United States Patent Application Publication US 2026/0103690 A1 - sequence listing, part 84

SEQ ID NO: 414553 - protein, 369 aa, unidentified
MADRITYVGLDVHKESIVVAVASGGLRGEVREYGRIANTATALDRLLRKLGDAGMALRFCYEAGPCGYGIQRHVSARGHECVVVAPSLIPKRAGDRVKTDRRDAASLAKLHRAGELTAVWVPDPQHEAMRDLVRARLDAVHSLRRARQQLSGFLLRQGCHYGRPAWTKLHRRWLAGLIFDQAIHHIVLEDYIAAVEAAEARRDRLTAQIETMLPDWTLAPVVAALQTMRGMAMVNAATLIAELGDLSRFADPRQLMAYLGLTPSEYSSGSSVRRGGITKAGNGAARRLLIEAAWSYRFPARLSRELLLRQESQPKPIRDIAWKGQVRLCARYRRLARTAKPANVVTTAIARELTGFVWAIARQVTVTPG

SEQ ID NO: 414554 - protein, 403 aa, unidentified
MEGPLISLDVSKGKSNYRFFENGTDRKGKKGVIRHDIQGFDSIRDEAEKMEKRLRIKPSVILESTGVYSDVVEKYFTDKGFDVYVISPLLSASMRKEGVRPAKNDSLDTLSIAKVFYSRDDLRKCSEKDKKAERLREMSYELDMMNRRIRPMKCQFLRLLDKVWPCLDEVSDYSSRFMLDFIIAFGHPENIKTVKGVLSVIRKSEMGTAGRKDKIAQDLFDYCHTHLSAVSKDSSYVELLKRMAIELKAMAKKKSELIDRMAEEARNKDEFARLLTIPAVAKTTALKIMARVGDISRFRNAEALVAYCGLDPRVYQSGKMTGEHRTITKKGDCILRSTLFLAVKLMVMLYPDTKVARFVAAKAKNGLSYKQAVVAGSAKLARIIYSMLTHHENYVEFNADIVA

SEQ ID NO: 414555 - protein, 445 aa, unidentified
MSLTPEVVPERVCAGLDWAKDDHAVCTIGTDGEILDRFTIEHTAPGLTALVRRLLKAGVGEIGIERGDGPVVEALLQAELTVLVISPNQVKNLRSRYGSAGNKDDRFDAYVLADVVRTDRRRLTPLVRSSAATTALRSTVRARRDLVEHRVAVANQLRAQLHLVFPAATVLFAALDSPITLSFLERFPTQSKADWLTCTRLGDWLSKVAYSGRVAPEVLHQRILAAPRGPTDPDAQTHAATTLAFVAVLRTLATQIDTLEDSISNQLNVHPDRHIVTSLPRSGMLLAEIGDARGRFPTADSLASLAGVAPSTRQSGKVKAVTFRWSADHQLRDALCDFAGDSRHANPWAADLYNRARARGHDHPHAVRILGRAWANIIWRCWQDNVGYDPTKHGALQPFSTRRPRPPKHPGVDTGQLIGWPSVRSHDPTAISRNTTNPNQPALAR

SEQ ID NO: 414556 - protein, 421 aa, unidentified
MNMTSKSAQFAALIGIDWASQRHALCLYDCATAKRESSILEHTPEAIAQWARGLQERFKGKKIALCLEQSKGPLIYALLEYPFFVLYPINPATAARYRMAFKTSRAKDDPSDAQVCLELVLHHREKLNPWLPNDAPTRELSCLLQHRRAAVDLRTLLTNMLRDALKSYYPQALELAGQDFFAPLGCQFLLKWPSLQELHKARKESVRKFYYAHNCRRMDVIEKRLDAIAQMTPLCRDLALLEPAMVQVRMLARQLLQLGGALKEYDSKIEQLFAQHSDALIWESFPGAGPTLAPRLACAFGTQRSRYQSAVAIQQYSGTAPVTEKSGKNQHWVHRRWARPHFTHQSFFEYASQSVLHCSWAKLYLKEQMARGKAYPTAIRALAFKWQRIMFVCWRDRVPYDETIYRQSLQRRGSHLARKLN

SEQ ID NO: 414557 - protein, 352 aa, unidentified
MIIIGVDFHPECQQIASVDTGTGEFQEKRLTHREEAENFYRTLAGQKVRVGMEASGHARWFERLLAELQLELWIGDAAEIRTKRVRKQKTDRQDARLILQLLLEDRFPQIWVPSWENRDVRQLLWHRHRMVQARTRIMNQLQAVALNEGLRCKKRLWRERGRQQLESFRLAPWASRRRRDLLELLDRLNPTIAELTQAIEQEAEKCPPAQRLRTHPGVGALTALAFVLIIGEADRFHCGKQVASYLGLVPLEDSSGNRRRLGHITKQGSSILRFLLVEAAQVTVRSRPEWRSKYFHLAMRRGRKIAKVAMARKLAVGLYWMWRKGWNYEQLTKFGSHAGQPGNRHGVQSNTE

SEQ ID NO: 414558 - protein, 346 aa, unidentified
MKITTIGIDLAKAVFQIHGVDQRGRVAVRKQLKRSEMASYFANLGPCLIGMEACGSAHHWARKLSGYGHTVKLMSPQFVKPYVKTNKNDMADAKAICEAVGRPNMRYVSVKTVEQQAILSVHRARAGFVKARTAQANQIRGLLAEFGVVTPQGNRTITKRMPEILEDGENGLPGTMRNLLARLTENLKALDCQVVELEQQIQLWHRENEASQRLAAIPGIGPITASAIAATVGNARDFKNGRQLAAWLGLVPKQNSTGGKQNLLGISKRGDTYLRTLLIHGARSVIQFAERKPDERSWLRRLMARRHKNVAAVALANKNARTVWALLAHDRTFRPDYMPADGAAVA

SEQ ID NO: 414559 - protein, 370 aa, unidentified
MQNSNTLYVGLDVHKDSIAVAYVAKAHDAEVIYLGTIGTRQCDIDQLVRKLQSKAKHLVFVYEAGPCGYWLFRYLTKQGYVCWVVAPSLIPKKAGDRVKTDRRDAVQLARLMRSGDLTRVYVPTVEDEAMRDLTRAREDALRDLKAAKFRLKAFLLRHDIRYTGHATWGPAHLRWLAEVVCATPAQQIVFQEYVRAVNEHTERLQRLEQELQEQVKTWRLQPVVEALEGLRGVQFTVAVTIVAELGDLTRFENPRQVMKYLGLIPAEYSSGERRRQGAITKAGNAHARRALVEGAWAYRYPAKVSRHLQLRLETLPKPIQDISWKAQVRLCKRFRRLMARGKHPNQVVVAIARELAGFMWAIAKEVPLIP

SEQ ID NO: 414560 - protein, 351 aa, unidentified
MVYVGLDYHTKWSYLTMLDDESEEVVEAKLDSRCELAEFLGKLGDAKVLFEAGYGWPRLAKILEETNVELTMCHPESNRRIACDRRKSDRRDSRNLAVYLKTGTYKPAYMPDAAVRDERQFIRGRTYLSWKITRVKNQIHSLLAYAGIPKESEAIFAMKRRSYLETVEVPERTREILDVDIRELDFLTEQLAILDKQIVEMNRNDPLARLLKTIPGIGDISARVILAEIGDIARFPTDKSLACFTGLTPKQHQSGDTMRTMGITKEGSSHMRWVYVQAAWIALRFDPALREYYERLQKEKGAQKAICAVAHKLAIASWHILTKRTPYRPQRPKAEGKPAVARGKSTAPAVR

SEQ ID NO: 414561 - protein, 346 aa, unidentified
MYYIGIDHHKKYSQYTVMDTVGKVLKRAQVSNRAEEIKDFMESLPEGPKVAAMEASRTWGWLFDEMEKYTEEMFLGNPLEMKAIAHAKVKTDSIDSATIAHLLRSNLLPCCFVPSQEVREVKDQLRFRGFLVKVLGMVKNQIHVLIDRNHVLQSEDREWVGLFSKKGFEALKGVDLPGKERQILDELLKLFESLKSQIEISNGWVEALYESSAQAQLIDTIPGFGHFLSVLVVYEIGDIERFETPKKLCGYAGLVPSTYASGGKSFQGHITKRGNGHLRWALIEAVLPAITSNVVFRTEYEKIRERRGTKIGRVAMGRKLLEWIYRVLKRGQSFQEIISQSTLVTS

SEQ ID NO: 414562 - protein, 348 aa, unidentified
MKEVSIIGLDLAKNVFQAHGASADGSVVFRRKLSRAQLLKFFAEQPSCTVAMEACASAHHWARAIGSLGHTVKLIPPAYVKPFVKRQKNDVADAEAIAEAAGRPTMRFVAPKTEAQQAAAMAYRTRDLLVRQRTQTINALRAHLAEYGVVAPVGVAHIGRLAALVESDDGALPEAVAALGQMLLAHIKTLNASIETLNKELQQRAGSDDKARRLMTIPGVGPITAAALTTFAPPFETFTKGRDFAAWVGLTPRQHSSGGKERLGKTSKMGQRDIRRLLIIGAVAVVRWAARKGAPVGSWLARMMERKPRMLVAVALANRMARIAWALMRKARTIGIRRWRPHRPKLPG

SEQ ID NO: 414563 - protein, 383 aa, unidentified
MATKPDYDRLADELTAIGRPILVGFEATGNYHRTLAYRLLSAGFDLRLVSSVALARTREALHNGWDKNDPKDAQVILHMLRIGATQVYVDPLAADINDLQELSKTHETISRAKTQTWHRILTHYLPLYFPEIARFAGNSRSDWFLALIERFPTPGSITALGVEAFTGEAWSLVGRKVSKAQLINDIYETASSSIALPVPEDAAAITMFRMIIAQARSLIQQRNQIEALAQTRLAGNRDYGLLRQIPGMGPINALTILAEAGDLRRFRHHRQFLKFCGLDLATCQSGTFRGRTKLSKYGNARLRRTFWMAAQVASRQRDNSFRDKLGRYVAGHGDDPDRRRKAMTALTAKMARVAHAVVKTGTQYRPFVERSDARWKDPSLQVP

SEQ ID NO: 414564 - protein, 416 aa, unidentified
MNAAGIDVSSSKSTVAVLRPFGEVVKLPFDVRHSAEELASLAKQLKSIEGETRVVMEHTGRYYESIAKVLHEAGLYVSAVNPLLIKEYGNNSLRKVKTDKADAMKIAKYALDNWSELRDYTPMDTIRYDLKTMNRQFQLAIKQKTATANNIIALQEQSFPGIRKLFDSPVRSDGTQKWVDFTHDFWHTDCVRSGSLNAFTEHYRKWCKRNRYQFSTEKAAEVYALAKSAVVLVQKTSVTKTLVQEAANQLTAISRSAETYRSEMNKLASQLPEYSVVMEMYGVGESLGPQLMAEIGDVRRFERKQSLVAFAGIDPAPSESGDYCSRSNRTTKRGSPYLRRTLFNIMKVHLQRAPADEPVFQFMDKKRAEGKPYYVYMIAAGNKFLRRYYGKVMAYFSSLEDLPPVDMESTGLHLTK

SEQ ID NO: 414565 - protein, 334 aa, unidentified
MQNITLIGIDLGKHSFHIHCQDKSGKALLRKKFTRTKLMQFLATCPPSVVVMEACAGAHFMARRISDFGHETKLISPQFVRPFVKSNKNDFVDAEAICEAASRPSMRFIQPGTETLQTMRALHRVRESLIRDKVKTTNQIHGFLLEFGISLPTGDAVIKRLSLVLAEHEIPEYLSRLLVRLHTHYFYLVEQIAELESELSQSINADDTAQRIMTIPGVGPITASLLSSQLGDGKQFSCSRDFAASTGLVPRQYSTGGKSTLLGISKRGDKNLRRLLVQCARSFIMRLERKHGKLAEWVREQLNKKHSNVVTCALANKLARIAWAITTQKKEYQA

SEQ ID NO: 414566 - protein, 343 aa, unidentified
MKIIRVGVDLAKNVFQVHGVDRCEKVVWRKKLGRAEWLSALMEKIEPSCEIGMEACGGAHHWARQLQKRGFTVKLIAPQFVKPYVKSNKNDANDAEAICEAMSRPSMRYVAVKSVEQQDLQAIHRIRAELVSQRSAKGNQIRGLCSEYGLVAPREMIQLRAAIPLWLDDLENGLTQRFRRMLRGLWLDLMNLELRVKELDQEIEIAASTDPVASRLQQLRGVGPIIATAIVANVGDAKQFSSGRQMAASLGLTPRQNSSGGKERLLGITKRGDAQLRTLLIHGARSVLRTAASKNDRMSRWVTHIAETRHHNIAAVALANKTARIAWAMITKGTDYQPGLGAV

SEQ ID NO: 414567 - protein, 286 aa, unidentified
MEHELHYIGIDTAKEKLDVDVLRPDGRHRTKKFANTTKGHDELVSWLKGHKIDHAHICIEATGTYMEPVAECLYDAGYIVSVINPALGKAFAQSEGLRNKTDTVDARMLAEFCRQKSPAAWEAPHPLERALRALVVRHQALTDMHTQELNRTETAREVQRPSIDAHLLWLEAELKRLEKQIKDLTDDDPDMKHRRKLLESIPGIGEKTSAVLLAYIGLKDRFAHARQFAAFAGLTPRRYESGSSVRGASRMSKAGHVSLRRALYMPAMVATSKTEWGRAFRDRLAA

SEQ ID NO: 414568 - protein, 343 aa, unidentified
MEHYAGIDVSLKDSSVCVVDSSGKIVRETKVASEPEALLRYFADLGFPVSRVGLEAGPLSQWLRESLVGAGLEVVLLETRHVKAALSAMTVKTDRKDARGIAQLLRMGWYRPVYAKSSDARDVRALLVGRKLLQGKLLDVELSIRGILRGYGLKVGAVSRGRFEARILELTEGQTMLETVIGAMLQARASLWNEFTRLHRAMLKIARADRICRQLMSAPGVGALVAITYRTAVDDPARFAKSRTVGAYFGLTPKKYQSGETDIDGGISRIGDAMVRTALYEAAHIILTRATRFSAMKRWAMDVAKRRGMKRAKVALARKLAMVLHRMWVDASEFRWSKDAVTA

SEQ ID NO: 414569 - protein, 399 aa, unidentified
MNKKTRSEPTEKVRGQAGFQGWRLRRYSAYIGLDVHKDTIAVSTADGTLSSDPQYLGEIPNEPKSVRALLKRLEDTRPGSLLFCYEAGPCGYVLYRQLTGEGHDCVVVAPSLVPRKPGERIKNDRRDSRKLAEMLRARTLTAVWVPDEHQEAMRSLVRAREDMKNQQRRARQQLNAFVLRCGHSWPSGKSRWTQSHYNWLEELKCSHPLEHVVLQEYIDAVREAGERVSEVSKQIELARQGWSLGKVVEALVALRGVDRLSATVLLAELGDISRFEDAKQLFSYLGLVPSEYSSGEKRNQGKITRAGNSHARRILVECAWSYRFPPRVTGHIRRKSKDAPDYAQQIAWRAQKRLCGRYMKMVLAGKNAKVITVAIARELAGFIWDIVCHEMGAINKEAA

SEQ ID NO: 414570 - protein, 427 aa, unidentified
MNNALTTTLFIGIDVSSKSNYIFALDFFGKKLLSFQANNNLPGSEEIVANIVSCIKENNLTHLTIAMESTSFYSWHLANVLATHDALIWFKPKIYCLNPRVICSYKKSFVDMDKTDPKDAFVIADFARVGKITTAPWDGSKYIALQRLTRCRLHLMENISREKSYILSNIFLKFSELAVLDKKESPFSNTFGASSLAVLTEFMSIEELATASLEDLVAFLVDKSKNRFSDPEATAKLLQKAARDSYRLDKSLYDPLNATIAASLNCIKALEKEVKGLDKAIEKAVKRLDNNQFQCLVSIPGIGPIFAAGIVSELGNISKFNNQGCLAKYAGLTWRKKQSGNFTADNTFLTKTGNKYLRYYLLEAAASVTRYNTEYKDYYNRKYAEALVHKHKRALALTGRKLVRLIFSLLRNNQLYTSNEVVEKATT

SEQ ID NO: 414571 - protein, 362 aa, unidentified
MAKVAKRKQTSKGLRLEVVNPNAAGIDISPKEMQVCVPSDRDGECNRTFGVYTEDLHYIAEWLKACRIDTVAMESTGIYWLPVFRILKESGFEVILVNASDVKNFSGRKTDASDAEWLMMLHSYGLLKPCFQPENIARTMRNLVRHRNNLIRSASREVLHLQKAMEQMNLKLDNVFSDILGKSGQSVIKAILNGERNPKVLADLADPRCRTSKEEIEKSLHATWDEEHLFEMRQSDSLYQFYQQLIAECNAKINEIAMQYSATVDAPKTQLLRSEKYNAKKNRIGFDVEKVAFELWGVNVMRIPGMSRGALLRLVGELGADFTTKFVDVKHFVSWANLVPNNKISGGALLSSKVPKKKNPVA

SEQ ID NO: 414572 - protein, 410 aa, unidentified
MELLHRRCCGLDVHKETVVACLRLVSDGKVTTEVRTFQTTTADLLRLSEWLATNECTHVAMEASGVYWKPVWHILDDGEFELVLANAAHVKNVPGRKTDVNDAMWLAELLAHGLIRASFVPDSQTQEMRNLLRTRKQLVREQSSHVQRVQKTLEDANIKLDSVLSDLMGKSGRAMIEAMIAGETNPAKLASLAHPRAKASHEEFREALRGRVTKHHRFLLRLHLNQIDALNAAMATLDTQVEANLGPFRTAVELIMSIPGIKNLGANVIVSEIGIDMSRFPSDAHLISWAGICPRNDESAGKRRSNRLRKGAPWLKTTLVQCAWAAVKKKNSYLQAQFYRIKARRGPKKAIMAVAASILTAIYHMLKDGTMYKDLGSNHFDRRSTDQQKNRLIKRLADLGYAVQIKPLSA

SEQ ID NO: 414573 - protein, 351 aa, unidentified
MEKYERNSEKETLFLGIDLHMRTWYVTGLLENTEIFSKGIPGTLWDMKLLLRRYKDYRIKAVYEAGYFGYWLYDELTANGVECIVTPPSLVPQEYGNRVKTDRRDSRKLAYLLSKGLLKKIYVLAEEERYHRQVVRRRHQLIRDRVRQQNRIKSELRLYGIDTPEIRGKWSKAYIHNLWSIRFGDDWMQESFHLLLKTYEFLDNAVYEQTMRLKRLSQTDKYRELVEILMSVPGIGIITAMEFLLELNNMERFSRAEQIAAYVGLTPSQYSSGDKVRMGHITKIGKPHLRAALIEASWQLISKDERMGKTYKRIALRAGGKRAVVGVARRLVLCLRRMLLDSSAYSFKRVA

SEQ ID NO: 414574 - protein, 375 aa, unidentified
MNKYTTKYGGMDVHKETIAVAIAKEGRGEAVYYGEIANNAEAIRKLVTKVNSDGENVSFCYEAGPCGYEVYRQLIDLGQKCDVVAPSLIPKKSGDRVKTDRRDANTLTRLYRAGELTPVWVPDKEQEAMRDLTRAREDMKAMEGHAKQRLGAFLLRHGKKYPGKSKWTQAYFRWLEGIKFEIPVQQIVFQEYVDTVKQMKERVAEMEQEMRHAMGGWSLVPVVTGLMALRGVDMITAMTVVAELGDISRFETPRQLMAHLGLVPSEYSSGARRQRGGITKTGNGHARRVLIEASWSYRLPARKTAHLQRRAGKTSAVVQAIAWKAQKRLCKRYWYLINKGKLPVEACTAVARELSGFIWAIACEVLGKNYACVTA

SEQ ID NO: 414575 - protein, 427 aa, unidentified
MGAMSESEVQELQFAALVGIDWADQKHAWCLQAADTTHRENGEVEHTPEAIEAWVGQLCRRFANRPIAVAVEQVKGALVFMLSKYGFLHLFPVPPTMSAKMREALYPSGSKDDPRDADLLLELLLQHRDKLRRLSPDSEATRRVQNLVDERRNLVDEKTAQINRLTHQLKIYFPQMLEWFEQLDTELVCVLLERWPTLEELQKVPPQRLRTFFHKQRCRYPELIERRLVGIRQAIPAIRDRAVIEAKSTVVKVSAQVIRSLVRGITDLDRKIEEAAAAHPDFFIFESLPGAGAVLAPRLLAAFGSQRERYTSAEEVQTYSGIAPVMKRSGKKKWVHFRWACPKFVRQSFHEWAGHSIAHSQWARSYYQQQRKRGKGHHAAVRGLAFKWIRIVFRCWKDRAVYDESRYLITLAKRNSPLAAVPGGTML

SEQ ID NO: 414576 - protein, 348 aa, unidentified
MNVTTIGIDLAKNVFQLHGVDARGKTSLRRSIKRSELARYLANLPPCIIGMEACGGAHYWARRLSDFGHTVKLMAPQFVKPYVKTNKNDARDAEAICEAVMRPNMRFVPIKNVEQQALLGLHRVRQGFVVARTAQANQIRGLLAEFGTVMPKGIRVIQARLPEILEDGENGLPGTTRELFSRLLGHFRELDRQVKEMEAQIMCWHRQNVASRRLEAIPGIGPLTASALVASVGDAKSFKNGRQFAAWLGLVPRQNSSGGKDKLLGISKRGDTYLRTLLIHGARSVLFGLKRRADQTEGWLARLVARRNSNIAAVALANKTARIVWALLTHDREYQAGYASRPLASAAC

SEQ ID NO: 414577 - protein, 369 aa, unidentified
MPHVTSIGLDVHARSVAAAAFNPFTGEVVHRDFGTDAAEIAEWALGFEEPRACYESGPTGFHMARELRALGLDCAVAAVSKMQRPAADARRKNDRRDAEFIARMLATHNIVEVPLPDAAVEAARDLDRALDDATAEYRRARQRLNMFLIRLGHVWDERNADGTRKGSWTRAHWRWISGIRLEGPQRDVLEYYVTAARCAESDRRQLEKKVLALARTDRWRPAVEALSCIKGIDALTAFRLAAEAGSFTRFRTAPAFASWCGLVPSERSSGETERRGGITKTGNRLARTALVESAWHYLTCTPRPKPPAPGADVPAAIRARADACTARLCRRREALAAAGKSSCKANAAIARELACWVWEIGRRAEGTLG

SEQ ID NO: 414578 - protein, 359 aa, unidentified
MKTYYIGADVHSNSTELAIEHNGKVICRHSVPTAIPAIKDIITSIDGNVHLTFEEGPMAGWLYRNLKDTVEEIIVCDPRRNKLICSDGDADDKIDSGKLAALLRGGYLRAVHHSDDESRTEFKQWISLYHDRVRDGVRTINKIRARCRMYCITIPRNVIMDKSRRPQWLAGIQNKALAKHLEVLWIGYDAVSVQVKRTKRQFCMSSKKYPIIKLWSELPGIGIIRAASLFAFLDTPWRFARPNKLWKYCGVGIVRSASGTDKNGKPKPARLHLAWAVNRLLKNVILGAVHTVVNQNKNIFKDYYERMLYDGIIPSNARHAVARKMLTVMWGMWKANSRFNENLVKEVSETVSSSGFAKR

SEQ ID NO: 414579 - protein, 443 aa, unidentified
MRIIIKVGAGLDAHKKTVVATRMRVTEDKRWEWETKTFGTTTPELLELNDWLQEWGCTHVAIESTGDYWKPIYNLLEGDFEVLLVNAQHVKHVPGRKTDVLDSEWLAELLMHGLLKASFIPPKPQRALRDLTRYRSKLVQERARTVNRVQKLLEGANIKLSSVVSDVMGVSARAMLAALSEGQTDPTRMAELARGRLRNKIPELEKALIGIVESHHRFLLAKQLAHIDFLGEQIADISVEIGQRLEAMSQASPPPAQDAGDADTEVSGPDDDLAPLTWDEALALLDTIPGVNRNVAEVMLAEMGLDMSKFPTANHLASWTGLAPGNHQSGGKRYSGRTRKGNRYLSTIMVQAAWSAVRTKDTFLKSRYHRLASRRGKKRAIVATAHSMLVSAWHMLSLRQPYQELGGDFFDQRKKESKIKYHVRQLEKLMGHSLNVALQPTTA

SEQ ID NO: 414580 - protein, 346 aa, unidentified
MLYVGLDLSRQRLDVHVLDEEGRTVEVTAVHPDADALRTLANRVLCHGQEVSAAIESMTGSRFVHDTLERFGWDVMIADAVKAKGVAPLAAKTDKIDAHVLAELARRDLVPEIWLPDPAVRAERERARFRLHMVHHRSALKCRIHATLMTFGHSVPVADLFGTSGRRLLAGFELPEPWATTLATSLAMVDELDERIDECGRELIRLGADHPYIPLLLTVPGVGPLLAYTIASEIGDIHRFASPKKLTGYTGLCPLVRQSGNRDFRGPLAKNGPKYLRWALVEAATHAARDPHYRERYERNKRRLGRQRGAKVARIDIARQLAEGIWHVLTKNEPFAPASPAILLVA

SEQ ID NO: 414581 - protein, 402 aa, unidentified
MMSVGIDVSIGKSTVCILKPYGEIVSEAFEVEHTDIALNELKMMLVRLTDDIRIVMEATGVYHLPILHYLLEAGFFVSVISPLKMKKYRTRDIRNVKTDKRDAMNIADYGIDYWYRLSKYECQEAVYDELKLLGRQYRSYMEMRIKAVQNLTHLLDHTMPGIKGLLNDWNADSGKDKLSDFVSKFWHFDNIKKFSEHRFVDKYNDWAKKKGYHQSSQKAEKIYFLASNGIPTIASDTPSTKMLVDEAIKVLKEINNTLSTILSRMQELSKTLPEYETVRAMGGVGDLLASKLIAEIGDVRRFHSKNALIAHAGIDVPPYESGQFIGTRRRITKRGSAHLRKVGYEVMRCLKTMAEPEDGAVQRFILKKEAEGKPKKVAKIAGLNKFLKIYYARVMEVYQNQL

SEQ ID NO: 414582 - protein, 400 aa, unidentified
MLYLAVDQHRKQLTINLRDEAGDVILKRQVSTEWSRVREFLDEVRNRSVSEGGFVTIVEVCGFNDWFLKLLAEYGCREIVLVQPEKRSKVKTDRRDAAGPGELLWTNRQRIQEGKKVQNVRRIVPPSQRDAEDRQLTAARHRLGRQRTRTINRIQHLLLKHNLQQECPTKKLQTKSARKWLTTLVLGMTDRLELDHLLSQWELYDKQLAELDTKIGERQAQSQAAMMIATIPGAAAYGSLALASRIGSIERFPSARSLAHYWGLTPGCRNSGDATRRLGSITKEGSAMARFVLGQIVVHILRRDARMKEWYQRIKKRRGAKIARVAVMRRLATIIWHMLKHQQPYRLSGKPGEGNDPSCGCVPPDRNAFSKARQGRSKDVEKSCRGSEATATGVLDAPLT

SEQ ID NO: 414583 - protein, 344 aa, unidentified
MGEVSTIGLDIAKSVFQVHGVDGSGAVVIRKRVSRAKVLEFFAGLPRCLVGIEACPAAHHWARELQTIGHTVKLMPPNYVKAYLKRSKNDANDAAAICEAVTRPSMRFVPIKTTEQQTVLMLHRTRQLLVRQRTMLSNALRGHLAELGIVSAKGRNGTAELLKIIADSEDSRVSPLVRGILDVLARQYGAIGAEIASIDKSIMALHRACEGSRRLAEIPGIGPLSATALVAEIGDWSTFSSGRSLAAWIGLVPKQHSTGGKERLGSITKQGNRYLRWLLVVGAMAVIRYARKYGAKRRPWLARLMERRPTKVAAVALANKIARMAWAIMVRGERYREPKLSLAA

SEQ ID NO: 414584 - protein, 343 aa, unidentified
MKLTRVGVDLAKQVFQVHGVDRAERPAWCKRLKRSRWIADLERDVEPGCEIGMEACGGAHHWARVLQSKDYRVKLIAPQFVKPYVKTNKTDANDAEAICEAMSRPSMRFVAVKTVEQQDLQAVHRVRSSLIRERTAKANQLRGLVYEYGLVAPREIKSLRRAVPQWLEDAENGLTPRFRALLSGLYGDLRLLDERVRELDREVASITREHEPVRRLMQIRGVGPLIASALYSLVGDARQYRNGRELAVALGLTPRQHSSGGKEKLLGISKRGDKYVRTLLIHGARSALRTAPGRTDRISRWALALAERSHANVAVTALANKTARVAWAMLRHGTNYEPGSVVA

SEQ ID NO: 414585 - protein, 315 aa, unidentified
MKNAIHSVGLDVHKETIAVALCDEAGRVTSLGTIPNQPDAIARMMRKLSSRATLSVCYEAGACGYVLCRQLAKLGIQCIVVAPTLIPVKAGDRVKTDRRDAVKLARYLRAGELTAVWVPDEAHEALRDLVRLREAAKADQKRARNQLGKFLLRHGWHAPDGVKAWGAAHRQWLQSLWMEQPAQRVVLQEDLAELDHQNERIARLDAALHAQIETLPQMCKQLVGALQCMYGVAELSALTVVAETGDLSRFRKAPQLFSYAGMVPSEHSSGGPGNERRGAITKAGNSHLRRIVTESAWHYRHPPKVSAELRRRRAG

SEQ ID NO: 414586 - protein, 344 aa, unidentified
MDHSAGLDVSVKETSVCIVDDTGKIVREVKVASEPEALLAVLKNPAYHFKRVGLEAGPLSQWLFSALAEAGLPVICVETRHMRAVLKAQINKTDRNDARGMAQMMRVGIYRPVHVKTLRSQKLRMLLTHRKLLQSKAIAIDNDLRGTLRNFGLKVGMVGTVRFEARIRELVENLPDLAALIEPLLIVRRTLREQFCILHRRLLAIVRDDEVCRRLMTTPGVGPVVSLTYRATIDVPARFRKSKSVGAVVGLTCAKYQSGEVDWDGRISRCGDEMMRTMLYEAAQAMLRSKKWSWLKAWAMQIARRRGMKKAIVALARRLAVIMHRIWVDGTEFRWTREQATTAA

SEQ ID NO: 414587 - protein, 343 aa, unidentified
MKKFNLYVGIDIGKNVLDVAIGKNENEIVFYKFSNDVKGIGSLLSLIAEYKVRENEVLICCEHTGVYLNKLAFAVQSTECVLWVIHPLLLKHYSTEINRYKTDKADAKKIMTYALLNQSKAQQFKLLEHDSQLLRDLFTARKQLLQTRTQYLNRKDASKQKVLVHGLTDLINETIIKFLNDLISELNKEIKRTIASNPKISKLYHILISLPGIGPVIAQHFLFVTDCFEKIKDWKAFACYIGTAPNANDSGIRKGRARVSKHSYKPLKADLNQGMVSLIRPGQFFHEYYKYLISINRHHLYILNKFKNLIIKTTFVLIKKQSEFDQEIFWKNKKNLFQCLQVS

SEQ ID NO: 414588 - protein, 457 aa, unidentified
MTRRKHSRPARDIAPVHPHAAAVDIGATLHVAAVRPGSDPEPVRTFGTFTTDLHRLADWFEQCGVETVAMESTGVYWIPLYEILDQRGFEVVIVNARDAKNVPGRKTDVSDAAWLQRLHEYGLLRASFRPKGEIATLRSYLRQRERLLDQAAAHIQHMQKALTEMNLQLHHVVADVTGVTGLRILRALVAGERDPDTLAAYSDPRCKAPAETLRAALVGNYREEHVFALAQALELYEIYQAKVAACDQQIEAVLERLKAANPPPAAALPPARPRRRQANEPGFAVREALHAILGADPTQIDGIGPSLALTLVGECGTDLLAWPSAKHFTSWLSLAPHNKISGGKVLSARTRRSGSRAAALLRLAAVAVGRTATALGAFYRRLAARVGKAKAVTATARKIGVLFYNMLRHGMDYADPGASAYEARYRQRVLSNLRRRAKSLGYVLQKADPASAAIAVS

SEQ ID NO: 414589 - protein, 349 aa, unidentified
MRYIGVDLHKTNFVVCFLKDNESCRLETFPLSKAGIERFIEQLQPTDAVAVEVTQNIYYFYDRIKAAVARVVLVDTYRFSVIAKSKKKTDKADALALARFLKLDHLPEVSVPSERVRQLRHLLQARETLVGLRTKCKNLGHAALTRNGIDLPRSAFASRLARERLLKRDDLSAADRVILQSAIRQIGELDNEIEQLEAEIIRLGKNLKGIKRLLQLHGMNLLSAISLLAEIGSIELFETSKQLVAYSGLATSVRQSNETTRRGHITKQGRKRLRTTAIRAVLSMAGRTTSPLMDFYQRKKREKGAGKAICATARKLLTIIFVMLKKELDYWYLEERLYNRKLRLLNAAV

SEQ ID NO: 414590 - protein, 388 aa, unidentified
MNRIIKIGMDVHSKNYTLCAMEPTIGAEDRIFGEVQVAPDYREVICFIESLKMKLGLDNKYSIECGYEAGCLGYTLYHQLTGAGVKCVILAPTTMLTQQGKRIKTDKRDARLIAQCLCYGGYHPVYIPTDEDNAVKEYLRMRDDHKLALKKLKQQINAFVLRHGHPYSGTKWTIKHVTWLKKLELDPMDRETLNEYLASCEEQEAKIERYDKRIEEIASEARYQEHAKKLGCFLGIRTHTALSLIVETGDFKRFAKGNTYAAFLGLAPGEHSSSENVNRLGISKAGNTHLRCLLIEASKGVCKGAIGHKSKELRSRQSGQPAEVIAYADKANTRLRSKYYKMIRHEKKKNVAVAAVARELACFIWGMMTGNISISSRKGTSMPAVSQG

SEQ ID NO: 414591 - protein, 368 aa, unidentified
MSHVTTYVGIDAHKKDLFMAMVVGDQATPTAWTTPNEPRAVRRLVKKLERDAPGAVRVFYEAGPCGYALQRHVTTARVSCDVVAPALIPRKPGERVKTNRRDARKLVELGRAGLLTVVRPPTPEDEAVRDLVRARDDAREDLQRCRHRLGKLLLRRGLHFAGRNWTRAHRAWLDALGWAQAAERAVVEDYVLAIDHTEARLLELDAQLAKVAETEPYRERVGWLRCFRGIDTLTAMVILAELHDFRRFASAPALMAYLGLVPGEDSSGEQHRRGRITRTGNALVRRVLVEVAWHYQHRPGVGVALARRRTGQPGRVIAIADKAQQRLCRRFRKLVAEHKPAPKVVVALARELAGFLWAALQPASVTPN

SEQ ID NO: 414592 - protein, 301 aa, unidentified
MEHSRVIGIDVSKDHLDVHVRPTGEAFRVRCDDAGFAALIERVRPLAPTVLVLEATGGYEVTVAATLAGAGLPVAVVNPRQIRDFARATGQLAKTDTLDARVIALFAEAVRPAARPVPDAQAHALGELVARRRQLVEMLGAELNRRRLLRDGRLQRHLDAHIAWLKATLIRSTPAWRETEDLLRSVPGIGPVTACTLIADLPELGRLDRRKIAALVGLAPFAHDSGAFRGRRMIAGGRAHIRRALYMATLAATKHNPPLRAFYQRLVAAGRPGKVALTAAMRKLLTILNAILRDRRAWLSP

SEQ ID NO: 414593 - protein, 333 aa, unidentified
MVEGTEGSHHKEGSTKMSKYTTVCAGIDTGKHKLDVAIDGGAQRMQADNNSQGHRSLSAWLRQREVERIGIEASGGYEQAVVLSLRADGFVVIVFQPVQVRAYAKFVLQHAKNDTIDAVLIARCTAAATEIHEPPDARLAPLAQHLTMIEQLTEDVGQLKTRREACREERIREFWKQEINRLKVLLNRELKQLVTAIREYRDLANRLDLIASVDGVGLRTAVAILVRMPEIGRVTREQAAAIAGLAPYDDDSGLRRGSRHIKGGRQRLRQSLYAAALPAVFYWNPQLKAFYRRLLVAGKPHTLALVACARKLLIFVNTVVARGTSWRSSALTT

SEQ ID NO: 414594 - protein, 388 aa, unidentified
MKSFEGPYDAYVGFDVGKLAHRACCVLTGGSVAFNVGVANDEAAIDRVLAEAAAHGRALAVVDQRRNIGTTVVRRARAAGVEVAYLPGIAASRASSLFPGDAKTDERDAEVIARTAMGVPQALRPVPEEGALEGARRLEAQRCDLLRDRTHCVNRLRALLLESNPAFERELDCEAAWALSLMSRVGGPWQVLDAGRRRYAALTRDAPRGAADRLWAALKAASRPTEAQVRAEATLVRMLASRIAEDTALIAELAALVEAEVGGDETYRCLLTVPGVGPRTAAQLVLSVDISDFEDHDHLASYCGLVPRNRQSGTSLNSVSSSRQGNKQLKNLLIFSCSCLARGSGYYREYYERCRDRGMPHKAAIKAVARKRLKVIYAVMRDVRPYVA

SEQ ID NO: 414595 - protein, 321 aa, unidentified
MNKDRKIYGIDISKSVFDVYCEATGHIQLNNDEKGFKIFLKTLPKTALVVMEATGYYHYRFAQFLHKKGVSVSVVNPLSVKRFIQMKLTKIKTDKSDAKAIYEYGIMNDLPIYSALTDVQAECLQLFRLLDTYLKKRTQTKNKLHGEDVLGIPSKYVYKSLQRDLKHLNKEVQGIELRLLELVKQDQQHQLTLLKSIPGMGVKTALFLIVITDGFKKFETASQLCSYVGITPIIRESGSSVRGRSRISKVGNKKLRNLLFLCAFSACKHNKACRDIYERIVAKGKSKKLALIAVANKLLKQAFAIAKSGLPYDENFVSKLA

SEQ ID NO: 414596 - protein, 477 aa, unidentified
MGKPTNVNIRGLRGVQRAKDLEGLDLSRVLVLAIDPARDYPKALICDYFGMVLEKPFFFAVNSDGIMNLHKKLQHWVGCVKALRVYVGIEIAGCYHDAIGEALSRLGYDVGLVNSYTTASNRKMMLDFSKTDDKDLLAIAQALITNNGVSAKRVTGFYEQLQAICRTRRQFVKETSAVKIQVRQLMSMVFREFQGLVDSNSLTQQKIFDSFWSPKSKLVMSCFPLPGEILSLGETGLKELAASNGLKLSGREITMLLQAAKRDLMTTPAELNRFKAEQIKFRLGQLQFLEEQIASLEQEMEDMLVKTPAILLLSIKGVSVITATEFIAEVGSIFNYTYNRQLIKLAGINPVMSQSSGNKTRAYKISRQGNPALRYIVTLIGKIICSKNCCNSYFIDYYERLNDKGKMPSQIYAAAGNKFLRIAFAMLKEQKLFHIPGYEQCTSDICKKLKNKENRVTARQRLALLTETAIEKTTVAL

SEQ ID NO: 414597 - protein, 357 aa, unidentified
MISSNLSGKNEKNNSSLTAIGSYDHYIAVDWSIKNMAIARLSKKMREPIIIDVPSSVKELKLYLKKLQGSKILTVEETTTSQWLYVELHDYADKIFICDPYRNRLLSDGPKNDKIDAGKLCRLLKNGLMKEVYHSTDELYELRKLVSYYNDEVKAGVRLLNQKSALYRSENKSYKEKEQLAEGSGINKFIVTQLDEKISLYVDNKEKYEEEFEKISKSNKVIRSLDSIPGLGLISSVTICSIVIDAKRFKSNNHYLIYCGLVKHDKLSGGRSYGKRIPRYCRKLKGIYKTAASSVLRTENPIKEYYSYLINEKKLEEHNARNAVARYIAKISLGIMKTGKKYQPYKWRQNPKEKGTA

SEQ ID NO: 414598 - protein, 357 aa, unidentified
MSTSTAVGWDIHRKFSQLSVVQRSESGEIRVVKRLRLEHADRGAMRAELKKLGPGTAVAMEGAFGWPWIADLLDELELEPHLGHPPAIKVLAKHEAKADRVDADRLGRFWLRGIFPECYLATPDVRQLRERLRYRQALVRFRSGMKNRVQAILHRQGILHDFSDLFGQGGRAFLADLALPEASREVLDGWLAQIDLIGQHLAELEAWMERHLEEDETTRLLKTIPGIGPILAHVIQAEIGQLVERIPSRRHLTSYAGLAPLADDSAERRGKRHIGKACNRTLRWALIEAAGCALRGKDCPANLRRLHYRLTCGGRTNKSQAKVAVARELCELVYVIWKKGEPYREPDPPARPPRAKR

SEQ ID NO: 414599 - protein, 311 aa, unidentified
MASAHVDVAATGAELPAALGRVDNDTEGHSTLADGLARLKPTLVLMEATGGYEAALACALQAAGLRVAVVNARMARDFARAMQRLAKTDRIDAATLAEFASVLTRRSDCERFIRPLSDSEQQDLAALVTRRRQLVSMQLSERQRLRLARPVTRPSIEAVLEAIARQLDDVEATMARRVEQHHAQMTKLLQNVAGIGRVAAATLIAELPELGRLNRRQICALVGVAPYANDSGASRGRRHIVGGRFEVRRVLYMATLTATRHNAAIRAFYERLVAAGKHKKVALIACMRKLITHLNAIVREHLNAQNRPSIT

SEQ ID NO: 414600 - protein, 353 aa, unidentified
MEYIAFDAHKHYTLASVARPDGQLVREQRLPHERGALRQFLAQCEPGAPVAVETIGNWYWIVDEIEAAGCVPKLVHARKAKLMMGEINKTDKLDVRGLNQLQRNGTLPTVWIPPGELRDQRDLPRTRMVLVRQRTQLKNRIHATLAKYALHNLDVSDLFGVRGRALLRQRLDLLPPYTAYATQQLLEQVENLDHQVRGFEHQMQTVFKPTPTIQLLLTLPGVGLMLAVVIALEVGSIARFATAEKLAAYAGTTPRVHASGGKTRFGPSRPDVNRYLKWAFVEAANAICLNRGRAPRRHVSRLYERVARRKGHQKAIGAVARHLAEATYWILTKQETYREPKAAAVSSTGDKRG

SEQ ID NO: 414601 - protein, 347 aa, unidentified
MNYIGCDCHISTLDCAVVNERGQETKKQKMNTGVKGLMAFVKSIPKPRKIIIEEGTLASWLLEVCTDYGEKLIITDPKINRWIGRAGQKNDEIDASKLAQLARGGYIKEIYHPIGHRRRFRELVMSYHDTVKSQTRIKNKLKAKFRQNGIKCSGETVYSVKYREEWQKRLPQEKVVEVMVVGLWQQLDQVHEVQEELLSHIRKQSRQYSEIKRFKHIPGIGTVHAATISAIVETPHRFANKKKLWMYAGLGLAEKASGEKVYSRNLTRSYNRLLKSALKQAAEAAISARDNQFRRQYLRLTLEKGIPSHRAKLTVARSILATAYGIWKSGEEYDPTIDKKRTESDNT

SEQ ID NO: 414602 - protein, 344 aa, unidentified
MKLYTALDVSLRSVAICVVNEHGEVQYEAKVEADVQRIVTCLRSFSAELKVIGFEAGTLTQYLTYGLQAAGFEVICLEARQVSAALAAMRNKTDRNDARGIAQILRTGWYSRVHVKSLQSHQLRLLLSSRKAVLAKCVDLENELRGLLKVFGIRLASKVPHGAFDATLHPLIKNDPMLARALLPMLEARLVLYRTYLKLDNEVKAVVRSDPVCQRLMTVPGVGAVTALTYKAAVDDPRRFRYSRTVAAHFGLTPRRFQSGETDNPGRISKAGDPEVRCALYVAAHALVTRTAAWSSLKAWGIRLAKTRGHRRAIIAVARKLAVILHKMWINGTDFRWAGAEATA

SEQ ID NO: 414603 - protein, 550 aa, unidentified
MNISLELLKKLREDTSAGVLDCRKALEDADGDYKKARKLRYLLPEPGTCVNLPAHSKPVKWGFFWTFSFSPKLIYLGTLCILMPLSYTSKDNREKSFLSDYQKRNLLLRYIVMSPHQKILARRSPMEQQNDDNRLQEFRQLKHEIRMSGEFLVVGMDIAKERHHAFFGTPTGNTLLRRLVFENTKEGFEDLCFQADTLKIRHALKKVVFGLEPTADYHKPLAEYLIRQGHVVVLVAGAAVKKNRELLDGRWDKNDTKDAANVADLITQGKCLFYDFPSSDLKELRNPLSLKRRLKKQEQGYKVRIRNHLIAQYFPEMDNYFGYGEGPAIVKWCLNPAELSNLPFEEFFRMVSSRNGGEKQRRRLWKIQKKAASSIGCEVTPSVSFEAKILLEELQQLHRMIQETDKKIAVTCNRFPEYTFLLSIPGFGPDISAKVLGAIGNPHRFDNERQVLKMAGLDLSADRSGKKSEVTPVISKKGKADLRYGLYQAVFIASTRNHRFMTYFTNKLKGRERERGILTNRRVKLSAKMLVIAWTLMKKKEMFNPDHIKE

SEQ ID NO: 414604 - protein, 322 aa, unidentified
MEARTLNHLPPAASHDGAVRCLLAIELSKKSWIVAVNTPLSDKISRHTLQACDWKGLLELIERIRTRVSQTFSRPVEVISCYEAGYDGFWLHRLLEAHGVRNFVIDPASVQVDRRARRVKTDNIDVGRLLRSLMAYLRGEPKVWSVVRVPSVTEEDDRRLHRERDRLINERVQHVNRIKGLCAVHGIYDYEPLRPNRLARLEQLRAAGKRELPPRVKAEIARELQRLELVLNMIKTIEAERDAIASAGKSSTHANAKKIQDLTRLKSIGPEIGTTLVGEVFYRQFNNRQQLGSYVGLTPSHFQSGPLSRDQARLAIPRPALS

SEQ ID NO: 414605 - protein, 402 aa, unidentified
MNAVGIDVSKGKSMVAIMRPFGEIVSTPFEIKHTASDIRSLVELINSVEGESRIVMEHTGRYYEVLAHQLSKANLFVSAINPKLIKDFDNDSLRKVKSDKADAVKIARYTLDKWQNLKQYNVMDELRNQLKTMNRQFGFYMKHKTAMKNNLIGILDQTYPGVNTYFDSPARSDGSQKWVDFASTYWHVDCIRKMSLNAFIDHYQNWCKRKKYNFSQSKAEEIYGKAKELVPVLPKDNFTKRIIKQAIAQLNTTSKTVEELRNLMNETASKLPEYPVVMAMEGVGPSLGPQLMAEIGDVMRFTHKGAITAFAGVDPGVNASGEYSQKSVHASKHGSPVLRKTLFQIMEVLIKNKPDDAVYLFMDKKRAQGKPYYVYMTAGANKFLRIYYGRVKEYLLNLSELN

SEQ ID NO: 414606 - protein, 417 aa, unidentified
MTFKVVRFICGGMDVHKNLIVATIGTTDRQTLITEYIQQSFSTFYSDLIRLKEWFISHDCYDVCMESTGKYWIPIYNVLETELNICLTHPKYVKAIKGKKTDKRDSKWICDLYKCDLVKHSFIPKKEIREMREIARYRCKLVYMRSSERNRYQNCLTVSNISLASVVSDPFGKTATNIMKELMQSEVIEDDKILKLIHKNCKDKDKILDSLQGYRIESDQRFKMDTVMNHIEYLDKQIQACEAELIKRAYPLRDYFQHITHIKGISALSAILIVSEIGTDMNQFESDKQLVNWAGLSPANNESANKKKSVRISKAGQYLKPLLVQCALSSIKDKNSYFGIKYCRIKKRRGHKKAIIAIARMMLVCIYHMILTGEEFNPCDYESLTNPKSKKEPIMTVESALPFLKDSNFDFSSIHKQ

SEQ ID NO: 414607 - protein, 425 aa, unidentified
MKTTTTYAAFVGLDWADRSHQVCLRTADGTRDEQSKLDQDPLALQSWANALRARFPEGKIAVALEQTKGPLVYALSMHAHLELFPINPAMLAKYREAAKAASGTKNDPLDASLLCELLRVHRDWLRPLPTVPAAARELQMLLEARRGLVDQRTGLCCQLGAALKSYYPQALALVGHDVGSPLACAFLRRWPTLSAVQRARPETLRDFYHAHQVRSEERIEERLAVVRSTVALTNDAAVLATLPVLVASIVAQLEVLAPVIADYDQRIAASFASQPDAAVFESMPGAGAQLAPRLCVAYGPDRTRYASALQLQQYSGIAPVQEQSGNTKITHWRWHCPTFLRQSFHEFAGCSVPQSRWAKAYYDEQIARGKPRHQVLRALAYKWQRIMFRCWQNQEPYDEERYIAALRRRHSPLITKIDSICADAA

SEQ ID NO: 414608 - protein, 429 aa, unidentified
MDRVIIGVDPHKLSVTIEARDSREILRATGRFGTDARSYRQLLAYARQWPERVWAVEGANGIGRPLAQRLLASGERVLDVPAKLAARARVFDTGQGRKTDPADAHAIVMVALRDKRLRELTADPDLTVLRLLCDRRDELSRARAQALNRMHRLFLELIPGGAPVKKTTAWYRALLASVRPRDLAGKTRRRMAAEEIADLEHLDAKLKAMKAELKAAVAASGSHLMDIHGIGPAGAARILADVGDVARFPNRAHFASWTGTAPIDASSGQHTHHRLSRAGNRRLNHVLYMAGIVQLRHDTPGRAYYRRRVAEGKTPMEAMRCLRRRLSDVVYRQLAADAQEAGPGGHSGATLLSSAAGLLPVTGTSDQPLPGPVSATLPPLSAAKAAPAARTGATPRRRARGVNVERPAGRTTLTPTSAGAHSKSPGPPS

SEQ ID NO: 414609 - protein, 343 aa, unidentified
MPHYVGLDVSQKTTAICVVDEQGRWLWRGVCATDPEAISARVLRHAGVDAKVGVETGSMTPWLVHGLRSAGLDVACLDARRVKAALQMRLNKTDENDAEGLAQIMRTGWYRPVHVKSLDAHRARALLGARAQLVGMTTRLSNMIRGVLKTFGVLPGAGRGLRFDHRVEALLDDAPDIALIVRPLLVSWRQLREQIAVFDKAVRRQVGIDPICRLLMTVPGIGALSSLMYVSTIEDPGRFSRSRAVGAHLGLTPRRYQSGETDRSGHISKCGDGLARTLMYEAAIVIRHRVKRSLHLKDWAEAIERRSGPGKARVALARKLSVILHSVWRSGEPFRWAPNATAA

SEQ ID NO: 414610 - protein, 391 aa, unidentified
MIYIGIDVAKDKHDCFITNSDSEVLFKAFTIFNNLDGFNDLYQKIESVMDDVTKVKVGLEATGHYSYNLLGYLIDKGLPTYVINPLHTNLYRKSLSLRQTKTDKVDARTIASMLMSDMNLKSYSDTSYHNEELKSLTRYRFDKVKERAKLKTSVSRLVCILFPELEKLVPTLHMASVYALLSEFPSAKHVATAHLTRLTNLLSKSSKGRYGKDTAITFRDSARASIGSNMPAKSLELKHPIKLIQELDSEIDEIENEIKIIMDEINSPILSIPGINYRMGAMIIAEIGDFNRFDSPDKILAYAGFSPSTYQSGQLDGAYAHMEKRGSRYLRYALYNATKYVCHWNPTFAAYLAKKRAEGKHYNVAISHAVKKLVRVIYHLEKTKQQYIKAA

SEQ ID NO: 414611 - protein, 314 aa, unidentified
MDKTICGIDVSKDHLDVALRPSGERFAVSRTGAGLEDLVARLKVLKPNLIVLEATGGFETVVVAALAGAGLPVAVANPAQIRAFAKAIGQRAKTDPIDADVIAHFGEATGVTPRPLPDEATQQLADLVARRRQIVEMIGSERQREKRANPRIKKSIGRLVKALERELSSVDTDIDDAVRGSSAWREKEDLLSSVPSVGPVISRTLIAELPELGSLGHKQIAALVGVAPFTRQSGQWRGKSFIAGGRASVRRALFMGAMVARRHNPVLKAFFERLVAAGKPKKVALIAVARKLLVILNAIVRDGTPWKGTVGVVS

SEQ ID NO: 414612 - protein, 387 aa, unidentified
MSKDTLDICLSGLREDLSIREVESKSFSNNADGIKKLMKWATQKTEGNPYQVVMEATGVYHERLAFTLSKNGFEAVVVLPKLMSNYFKSHNLRVFNDKICAEHIAMFGLSRKLDVWKEPDPVYMALRALCRHRYQLDKLKTQCTNQIHAQKHSETSLQEMIDMSEEMVKLVNKQIKEIDKKLQVIINENDWLKAKVENVCTVNGLGWLTVVKIIAETSGFHLFRNGRQLVAYAGYDVLSKESGTSVHTKSRMSKKGNKYIRAAMYMPALSAIRSNPKMAAFYSRLFHRHFIPRKSNVAVQKKLLVLIYTLWTKDCPYDPDYCHPASQCHDQENNPGNDPEFDHENGQPSKITEKTINKNREAIRRSLHRLDQVRPQDFDDTNIEKNP

SEQ ID NO: 414613 - protein, 348 aa, unidentified
MKEASTVYVGCDVGDRTSEVCILDHDGAVLERRNVRTTRRGLTGCLGRIGPATVAIEAGTHSRWIEETLMAAGHRVIVANPRQVQLIWKRGKKTDKADALLLARLARVDLSLLAPVHHRSRTSQVDLAAIRSRDILVRTRTRLFNHVRGTLKPFGVEPVRCSPAAFPDRVADEIPSELAPALEPILKVLRELNQQISAHDRQIDALATANPVAAQLATVDGVGALTALTFRLTVEDPAKFKKSRVVAAFLGLTPAKDQSGQSDPQRHISKAGDPLTRRLLVQCAHHLLGHTGADCDIRRWGLRLAERGGKDGRKRAIVAVARKLAVVMHRIWVTGQPYRPFREVSAAA

SEQ ID NO: 414614 - protein, 343 aa, unidentified
MKLSRVGVDLAKNVYQLHGVDRFGKTMWKRRLKRHQWLKVLLDKTEPGCVIGMEACASAHHWGRELQSRGYTVKLIPPQFVKPYVKSNKNDARDAEAICEAMSRPNMRFVTVKTVAQQDIQATHRIREELKVRRTAKANQIRGLVAEYGLVAPKHMSSLRAAIPCWLEDAENGLTHYFRSLLQGLWDDLLILDDRMCEMDKTIKRLAKENEDCVRLQQLRGFGPMISTALVATVGDARQYHKSRQMAAAIGITPRQNSSGDRHRLLGISKRGDVYLRMLMIHGARAVVTRAEHKDDPLSRWVTEIAKRRHPNVAAVALANKNARMAWAMLRHKTDYDPDFAMS

SEQ ID NO: 414615 - protein, 340 aa, unidentified
MEITTIGLDLAKSVFQLHAVDADGDVVWRKKVRRGALLDTLAQVPGCLVGIEACATAHYWAREISALGHEVRLMPPAYVKAYLRRQKNDAADAEAICEAVRRPSMRFVPAKGAERQAVLVLHRSRELLVRQRTMLINAIRGHCAEFGLIAAQGVCGSRDLIERVQQADSAVLPDMAKAAMMLLIAQLHALVRQIQSLNRRLLVWHRQDQASQRLATIPGVGVISATALAASVTDPSQFRSGREFSASLGLVPRQNSSGGKDRLGRISKMGDRYLRKLLVVGATSVVRRARTADSTAANWVRSLLERKPARLVTVAMANKTARIVWAVLARGETYRPPAAI

SEQ ID NO: 414616 - protein, 347 aa, unidentified
MDTIGLDLHKRESQLCTLHADGRITEQRIVTSRERLMAVFAHRPSARILLEASTESEWVAQCLEGFGHEVIVADPNYAPMYATRTRRVKTDRRDARTLAEALRLGAYRPAHRVSAARRHVRAELAVREALVRTRTRYIAIAKAFVRRDGLRVPSSESHLVAKRVAALEIPALLEAELAPLFAVLEPLNAQIVAAERRIAAVEQSDPIVALLATAPSVGPITASAVVATIDDVTRFRSAHQFEAFLGLVPGERSSGEKRRVGRITKAGNARARFLLVEAGWRILRSKSPETAALRGWALKIAVRRGNRIAVVALARRLAGVLYAMWRDNTPYNAAKLRVPQPLVSRAS

SEQ ID NO: 414617 - protein, 320 aa, unidentified
MQQDPTYIGIDVAKAQVDVAVHPTGMRWQALYTEEGVQELISRVEALQPTLVLLEASGGLEIPLVAALANAHLPVVVVNPRQVRDFARATGKLAKTDSLDAQVLAHFAEAVRPEPRPLPDAEAKALAALLARRHQLVAMLVAEKNRLGKALPSVRSRIQTHITWLERELEDTDDDLQTMLRQSPLWCEKENLLRSVPGVGPQLALSLLAYLPELGTLDRKRIAALVGVAPFNRDSGPFRGRRKVWGGRTRVRTALYMATLVASRHNPVIQAFYQRLLAAGKPKKVALTACMRKLLTILNAILKNSTPWRAAIPQITGPCS

SEQ ID NO: 414618 - protein, 421 aa, unidentified
MKGLRTKNAKTIQEGTLIVAIDIGMISSHGYCAAADGRSTKTFKFDNTREGLDKLWGMVLASKTRFQCTEVVVGYESTGPYGEPLIHYLKHKPVTLVQVNPMHTKKMKEINDNSPLKSDRKDPRVIADVVRIGHALSVVIPEGDAAYLRRLNNARERHVRERTSLLNQLQQFVFLIFPEFARVLKWIASKTSLYILKKYTTPAKIGGAKPEDLGAEMSRQSRGKFGAEHAIALINFAKTTIGIQEGVEGLVMDIQHVLIQLELVDRLIAEIEQEMELTLQRIPYSGKLLSIKGLGIVSVAGLIGEIGDFAKFTTQAEIAKLAGLNLYEISSGKRRGQHRISKRGRSLIRKILYYAAIQTVRKNGIMHDYYQRLIGRGMKGMMALVAVARKLLRIIFAIVRDDSEFMLNHDSQKKEVIREAA

SEQ ID NO: 414619 - protein, 505 aa, unidentified
MILRPDHGNISYPKTRQRLQAAKMEEVKKRQAAPEKKPKKRSRKSKARGSLPMSAPAMPAELKQVNINAAGIDVGATAHFVCVPQGRDPQPVRSFGTFTADLEAIADWLAECGVTTVAMEATGVYWIPLFELLEQRGFEAKLVEPSRLKHVPGRKSDVLDCQWIQQLHTFGLLCGSFRPEDSICVLRSFVRQRQTLVRSAARCVQHMQKALTQMNVKLQHVISDITGVTGTAILDAILAGQRDPRKLAELRDGRCRNDEATIALALQGNWREDHLFALKQAVDTYRFFHERLAEVDQKIETQLKTFEDKSQGKPLEHPTRMRKYRGNEPAFDVRKYLYTITGMDLTVVHGLDANTILTVISEIGLDMSCWPTEKHFTSWLTLCPSVNKTGGRSQSTSGRTRPSSNRAATALRMAAWTLLRADCALGAYARRMRARLGSPKAITATARKLAIIIYKMLKYGKAYVDRGAEYYEQQYRAAMVKNLKRRARQLGFELVEATDTPVAEP

SEQ ID NO: 414620 - protein, 365 aa, unidentified
MKKISTAATTSNKNLHSRLTIGLDLGDRSSWYCVLDDSGEVIAEHKLGTTPKAMQESFEAIARSRIALETGTHSPWISRLLSELGHEVIVAHARNVRLIGESRRKDDRLDARTLARLARIDPQLLAPVKHRSAQAQADLTVIRARASLVRARTALVNAARGLTKSNGERLRGCNPRNLDREKAQALRPELQAALGPLLQSLEALSEHIAEYNQRIEKIAQQDYPQTALLKQVKGVGTLIALTYMLTLEDPHRFSKSRDAGCYVGLQPGRRNSGQTEPQMHISKEGDSYLRTLLVQAAHHILGPFGPDTDLRRWGLKLAERGGKNGKKRAVIATARKLAVLLHRLWVSGEVYEPLRNSNRTILATA

SEQ ID NO: 414621 - protein, 358 aa, unidentified
MADKVTEAAVVGGVDTHKDLHVAAVVDQNNKVLGTQYFATTRQGYRQMLAWMTSFGVLKRIGVECTGTYGSGLLRYLQNAGLEVLEVTAPDRMERRKRGKSDTIDAECAAHAAFSGIRTVTPKTRNGMIESLRVLKTCRKTAISARRVALQIIHSNIISAPDELREQLRNMTRMQLIRTLGSWRPDASEYRNVTNVYRISLKSLARRYLELHDEIADLDVMIAAIVDELTPELIKRNAIGYESASQLLITAGDNPQRLRSESGFAALCGVSPVPVSSGKTNRYRLNRGGERAANSALHIIAIGRLRTDDKTKEYVARRVAEGHTKMEAIRCLKRYISREIYTLLRNQNRQVNSIPITA

SEQ ID NO: 414622 - protein, 347 aa, unidentified
MKQYSEAFIGFDTAKKKHAVAIADVGRESEIRYLGEIDSSPAAVERMIRKLAGRYEKLHFCYEAGPTGYGLYRQVRALGHHCTVAAPSLIPKKSGERVKTNRRDAMTLARLLRAGELTSVWVPDTVHEAVRDLVRAREAASQDLRRKRQQLLSFLLRHGRIFGGRQHWSRAHLHWLAQQKFDHPAQQIVFQNGVNAINDTATRLRRLDDRVAAIEPSWSMVPVVEAYQAMRGVSFVVAVTFVAEIGDLRRFDNPRQLMAFLGLVPSERSTGDRLRRAGLTLTGNKRARRVLIEGAWSYRYPARVSQTLQARLEDLPKAVRAIAVSPTPIRHRRRLRRHTPQAAQRNP

SEQ ID NO: 414623 - protein, 347 aa, unidentified
MLIIGCDFHPGFQQVAIFDNLTGEIKEKRLQHRAEAERFYGSLAGQEVRVGMEACGHYPWFERLLAELGFELWMGDAAKVRASVVRKQKTDRRDAEHLLDLLRQDRFPRIWVPSLEERDARQLLVHRHKQVQARTRSKNQLQAMALSHGVQKKYKLWTQAGRAELEQLPLLPYAAERRKKLIEGLGALEAEISELDRRVAEEARQRPEAVMLMTHPGVGPVTALAMVLTLGPAERFKSAKQVGSYFGLIPSEASSGGKQRLGKISKQGSSFLRFLLVEAGQTAARYDPQLKRFYRRLAVRKNRGVAKVAVARKLATRMYLMLREGWTYAQLNQAVMSVSPSHSVAGE

SEQ ID NO: 414624 - protein, 447 aa, unidentified
MKKVFIGIDVGKFKNSISIIDTEGNPIIKKGISIENDYYGFAKLEEKIDLIMNNYGFTYDDCIAGVESTGHYWFNLRDYLKDIGIETVMIKTDSVKHRRALEEGQKGKNDTLDARVIASCLRNGNYVYIRENERELRALQKLTRMRNDISDEVVALKNKIHRCIDICNPVFFKIFENLNSKTGVALIKLYPSPQDIINVELDNIKKELGEIVDKPNMRMVSLYKEECEIWSGLIKEPSYAEKVEMIAYIDKFLLQNESKEHLDKQIKEIAKNIIPLYSEFEEIKGIPLIQLISVLSEIGDIRNFKNTRSILAFLGLSLKGNASGKYIGERKINKAGSRIVRKHLFNIMDTLVKHNEYFRIAYCYYKSYNHKNPTKKRSMQIAVMCKFVRVMYGMLKYNTPFDYKEMLKGYYFGDCNMKVFKEEFEGEKRTKKIENYKLGYSIFINYS

SEQ ID NO: 414625 - protein, 412 aa, unidentified
MTATNQFAAHVGLDWADKKHDVCVQFKNGERVFHVIEHTAEALDVWLTELHQKVKGRIAIALELKKGPVVYALQKYPFITVFPVHALSLARYRQAFSPSGAKDDPQDAELALELMLRYSQKIKAIEPDNADIRLLQQLVEQRRQLVEDKRRFVNRLINTLKQYYPQPLEWFSHRGSLLLCELLIRWPSLQQLKRARHDTIRNFLNAKGGRAMALTEQRVVSIDNAIPLTTDPSVIEANALMATALATQIKVVSEIIKTYDERIETLFDTLPDSGLFKSLPGMGPCMGPRMLAALGDNRDRFNSAEEIQNYAGIAPVTERSGQKSWVHWRWLCAKFVRQTFVEWAAKTVNSSYWARLYYQGLREKGKSHQSAIRALAFKWIRIIYRCWKTRTQYDEAKYLLALEARRSPLLKP

SEQ ID NO: 414626 - protein, 396 aa, unidentified
MYFLGIDIGKNNHVASMIGEDGKPVFRAFSFSNTTEGGESLLSKLSSHNVESQEIVIGLEATGHYWLAIYSFLRNKDYRLHVINPIQTDGWRKGMEIRKRKTDVIDSLLIAQLVRYGDFIEAKLPEETIISLKNLTRFRSYLVDSISDLKRKVICVLDQVFPEYQNIFSNVFGKTSKEILLQFSSPAELESVSADTLAELLAGLSRKKLGIEKAEELNRAAAASFGVTFCRDSFTFQLRMLIEQIKYIESQVKDTETEVKRIMSTLCSPIMTVPGVGKTLGAVILGEIGGIEKFDNASKLVAFAGIDASVNQSGEFEGTSNRMSKRGSPYLRRALYQASLIAVIGKNPDPVLQAFYQKKLAEGKHHSTCIGAVSRKLCYIIFSVLKENRPFEVRNP

SEQ ID NO: 414627 - protein, 335 aa, unidentified
MQVYGIDLSKEKFDVSFIDAKGKEKKQKVKNAVASISRFLSSVSEDGILCAEHTGVYGDLLVYLCNQMNVPIALVPGYTIKHSLGLVKGKSDPMDSKRIREYGERFPDKLEYAEYPEENLTELKQLYTLRHQLVKQRKSLRTLDKGEEHHPMQSISVHKHMHTALDGLDKEIVDIEEDIEMLIRKDQEMNENFELVTGIIGIGPVIATDLIIKTGNFKTIDTHRRAASYAGVCPFPNSSGKMLGKSKTSPFADKKLKSLLYMGARAAVKHNKEYKLYYQKKELEGKPYFLIMNNVSNKLLRTVYSIVKNKTPYVRDYVCLDPRERNINSSTKKVA

SEQ ID NO: 414628 - protein, 341 aa, unidentified
MTIVTLGLDLGKNWVHMVGFDGEGRIELHRRVRRQQLLVLTSNMPPCLIGMEACSGAHHLGRALEVQAHTARLMPPQYVKPFVKANKNDYRDAEANAEAVQRPTMRFVPLKTEAQLDLQTIHRVRQRLVGRRTALINQLRAILLERGIIVPQRRYVLEKALTSIFAEESNGLSPRIRRLIEDLRVEWRELDERIKAYDAELVSLAKQNETCRRLCEIPGIGAVNATGLVAAVGNAAGFRRGRDLAAWLGLTPREHSTGGKQRLFGISKRGNKHLRASLIHGARAALPHLMERRDALGHWLRGLLVRAHRNVAVVALANKLARMAWAVLIGQSYRHPVQVTA

SEQ ID NO: 414629 - protein, 363 aa, unidentified
MSELTTVAVGLDVHAHSIRLAAVRADELLEERTLAYDEEAVERVLRRWPSVRCCYEAGPTGFGLHRFLVGRGIDCAVVAPGLVPQRPGERVKTDSRDARKLARLLAGGLLEPIHVPSPEFEAARDLVRAREDARLDRMRDRHRLSKFCLRHGLRLPTSSWTVARRTWLSEQRFEFVAQQQTFATYLHAVDLVDARIAQLEQAIGETAEQEPWRELVARLRCLRGIDTLTALALVAEIGDFNRFKTAAEFMAFVGLVASERSSGEQRRQGSITKVGNAHVRRLLVESAWHARRRPTLGYQLARRQRGQDPAVIERAWRCQQRLYQRWQRMAGRGKPHQKIVVACARELAGFVWAIATEQPLRNS

SEQ ID NO: 414630 - protein, 307 aa, unidentified
MTITTIGIDLAKNVFAVHGVDQNGKTVLVKSRVIRAALPGLIAGLPLCVIGMEACSGAHYWARLFRQYGNEPRLMAAKFVSPYRMAGKSGKNDAADAQAICEAVRRPHMRFVPVKDESRQAMQCLHRPRQGFIEEKIATYNRLRGLISEFGVIAPQGTDALRHIVSAQKNSLPLQVQQCVDDLLEHVDRIEANITEYDQILPRIAKTDHRSQRLMKLKGVGPTTTCALVACIGNAHDFKNGRQLAAWLGLIPSQYSSGRKSKPGRITKAGDSYLRTLLVQGARSVLIGAEKRTDSFSRWGCLSRTVQ

SEQ ID NO: 414631 - protein, 391 aa, unidentified
MFLLGIDIAKLNHVASCIDSSTNEVVFSNFKFKNDFKGFSALLNKIKSFDAKNLIIGLESTSHYGENLINFLFIHDFKVALINPLQTSHLRKANIRDAKNDNLDSLNIAKSLLFTKLNFVSEKNIECFSLKKLTRFRSNLIKQRSKAKIQLTSLLDLLFPELQYLFKSKIHSKAIYSLLKKYPSAEEIAALKDDEISNLLYASSKGHFKKEKSIELKSLAKTTVGIKDTSISLHLIQLIELIELYTKQIKDIEIKITDIVNNLDTTLLSVPGISVIACAIILGETNNFENFSSSKKLLAFAGLDPKIRQSGNFNASSCRMSKKGSPYLRYALIFTAWNIVRHSEKFNKYYSLKRSQGKSHYNALGHVAHKLVRILFTLIKKDISYQEEKLE

SEQ ID NO: 414632 - protein, 391 aa, unidentified
MVCVGIDVAKDKHDCFIISSEGEILADVFTIPNNAEGFDTLLQAIRRSTRPEDKIKVGLEATGHYSYNLLGFLLDNGLTTYVLNPLRTNLYRKSLSLRKTKTDRVDARTIASMLLSDAGLKPYTDTAYHNEELKSLTRYRFDKVKERAKLKSSIARLVCILFPELEKLVPSLHIASVYALLEAFPGAKQVANTHLTRLKALLEPASNGHYKRDMALKIRNAAKNSIGSQMPAKSLELQHTIRLIRELDREIDEIEEQIQSIMDELHSPITTIPGLGFRMAAMILAEVGDFTRFDSPDKLLAYAGMSPSTYQSGQLKNCYPHMEKRGSRYLRYALYNATKYVCHWDPAFADYLAKKRAEGKHYNIAISHAAKKLVRLIFAMEKSRQPYRSAA

SEQ ID NO: 414633 - protein, 416 aa, unidentified
MEVVHRRCCGLDVHKKSVVACVLLSDPSGPPQREVRTFGTFTHEVLALADWLAEQEVTHIALESTGVYWKPIWNLLEDRFALLLVNPRHIKAVPGRKTDVHDAEWLAELLRHGLLTASFVPDRAQRELRELTRYRTSLINERSAAVNRLQKTLEGANIKLASVASDVLGVSSRQMLAAVVEGTTLEASALAELAHGQLRDKVPQLEHALSGRVGPHQRFLLAEQLAHIDALDASLERLSTEIAERMRPFDELIERLDAIPGVGRTIAEVLLAEIGADMTRFPTANHLVSWAGMCPGHNESAGKKRSGKTRKGSPWLRAALVQAAHAAARAKQTYLAAQYRRLTARRGTKKAAVAVGHSILVIVYHLLTDPDCPYFDLGATYFDQRDPGAVQRRLIHRLEALGYHVQVTPLAESSAA

SEQ ID NO: 414634 - protein, 409 aa, unidentified
MSTTFDCPTGPVAGIDTHTDTHTVAVISDTGRHIATDTFPATNPGYVAISEFMATYGVTTVGVEGTSSYGAGLTRHLRTQKYSVVEVLRPTRAVRRRDGKSDPVDAVAAARQVLTGEALSIPKDTSGPVESLRGLQITRRQLVMTAAKLMTTIKSLLVTAPDEIRRRYSAMSTLVMVEALSRCRPSADLADPRNGVLLALKTLATTYRDLQKQGTQLEKHNSILVEMINPHVTSIFGCGSVVAADLIVSVGDNPGRIHSEAALAHLCGAAPIPASSGRTHRHRLNRGGDRRANSALHRIALVRMHHDQRTRDYVAKRTKEGLSKKEILRCLKRAIVREVYRVLCLGQAVLPTGQVEVDELKARRIERQLSQAQVAEKLGCAPARISDIETGKRPLPELRLAYEELLKSA

SEQ ID NO: 414635 - protein, 461 aa, unidentified
MRIMYERCCGLDIHKASIAACALISEKGKTQEETRRFGTMTGDLQELAEWLQEKGIRHVAMESTGIYWKPVWNVLEPAGFELLLANGQEVKVVPGRKTDQKDSQWIADLHKHGLLRNSFVPPRAIRDLRDLTRTRAILTQEHTSVCNRIQKVLEDANIKLGSVASDVFGASGRAILGALMKEENDAEALAELSKGRLRNKIPQLRRALEGQMTAHHRSLISGHWQRMQFLERQIADFEVEIGQRMKPTAEETAQAQQMQAAEMPEPLSPREEAIQFWMEIPGVGWTAACNMVAELGTNMDQFPSAAHVASWAALCPGNNESAGKRFSGKTRKGNVWLRRTMCEVAWAASHTKDTYFAAQFRRIASRRGKKRALIALAHSILITAYHMLKYRRHYRELGGDFLDQINRDQVQRRLVQRLAKLGFEVTLKSKVENAGDNGACVKKPVVPHGTSSDALTEIVRG

SEQ ID NO: 414636 - protein, 404 aa, unidentified
MKGPIVSIDVSKGKSDYQAFKNLNVKYAGSRSIKHTKEGFDEIVNLVREMEKKLETEVCVVYEATGVYHRVLKKVLEDNNIKQFIINPLLSAKTRKNDSLRCPKTDKLDPKSIAKTYYSHSLHNSHKQETIYHELRELSRYYEDILVHIRKDKVAFRAQLDIVFPGYDTLYDDLYGPVALAVIEKYPHPEMLQKKKINTVSKVIQSKTCHRQAVSDTMADKAIEYSKTIYSGCDKDDIEVLILQRLIKKLNEDMAEAERTIGEMIKLAQELPDFSIIKSIPGIGDNLAARIIAELGDMTRFKKKNELVAFAGLDPRISESGQDDGDHMHITKKGNKRLRCLLYLAVTCSIRLKRDDNSIKDFYIKKKQQSNPMCSKAAKTACASKLVRIIYSMCKTGELYQYNK

SEQ ID NO: 414637 - protein, 339 aa, unidentified
MNSMAVGVDIAKSVFQVHYIDQATGEIVNKQIKRAKFLEHFANRAPCLIGMEACGGAHHWARQLTKMGHQVRLMPAEFVKAFNIRNKNDAADARAIWLAVQQPSKAVAVKTEMQQAMLALHRMREQLVKFRTMQINALRGLLTEYGEVMGKGRTALDKAIPEVLARIAERLPAALVETLREQWSGLTKVDEQIAGIERRMRDWVKEDKAVKAISEIPGVGLLTATATVAMMGDAKTFRSGREFAAWAGLVPKQTGSGGKVNLHGISKRGDTYLRTLLIHGARSVVTRAKDPGPWVEQMTKRRPLNVVVVALANKMARMIWALLAHDRPYQKDYISVKPG

SEQ ID NO: 414638 - protein, 347 aa, unidentified
MRFYTKQHPFYGGIDLHARSLDVCIVNHDGAILVHRNMKAAPEPFLKAVAPYRDGLVVAVACLFTWYWLADLCTPEGLPFVLGQALSMQALHGGKAKNDKIDSQKIAALLRGGMLPQAYVYPAEMRATRDLLRRRMHLMRKRAELLAHIHNTNSQYNLPEIGKKIAYKANRAGVAERFPDPAVQKSMEVDLALIDYYDPLLNDVELSIVRLAKQHDPDTFYRLQSVPGIGKILSLVLLYEIHDIRRFPRVQDCLSYCRLVKCAKESAGKRYGTSGAKIGNAYLKWAFSEAAVLFLRDNPAGQKYLTKLENKHGQGKALTLLAQKLARAVYYMLTRHTAFDLHKFLHA

SEQ ID NO: 414639 - protein, 329 aa, unidentified
MYMGVDVHKNYCQFHVLDDNGKIFSKAKVVNTPDSLTKYVQGLPNESKQAVLEAGYGWMPVHDTLSGLGVSVCLAHPKKTKAIADARIKTDKIDAQALAELLYQNYVPKVWIPDQQTRRLRELTRHRMLLVHNCTRLKNNIHNYLSRIGVQAPRLANLFTKPGIKFLQGIALDEQQRFLLDSKISSLLATKQQVKIVTERIQETGTQDKRVTTLTKIQGIGLFGALVIVSEIGDIERFEHPKKLCSWAGMVPSVSQSGNKTVYGHITKHGNAYLRWILVQCTHASIRYPGYLQSRYYKIMHKRGSKAATIACARKLLTKIWYELKRAKQ

SEQ ID NO: 414640 - protein, 338 aa, unidentified
MSGPRFVMLSAKGAAIVARSVRRGGLLKFFASLPRCLVGMEACSSSHHWARSLIELGFSVKLIPPAYVKPYVRRNKNDAVDAAAICEAVGRPTMRFVPVRSVDNQAQLMRHRTRELLAGNRTRMLNALRGNLAEVGVIAAQGAQNAYALKRLVADGFDENGEVVVPDCVRQALAPLVHQIDAIDEEIEAIDEEIKTLVKADETARRLMTIPGVGPITASAVVATVRDTSAFASGREFAAFLGLTPRQSSSGGKERLGRITKMGDRYLRKLLVVGACATLSHRKGHNDALRVWADRLLARKAVKYKFKLTAVALANKVARIVFAILTRGGEYNDAPIAA

SEQ ID NO: 414641 - protein, 417 aa, unidentified
MGKRRNRVCGADVHKDLIVATIQSADGTEFQEKFGTTYSELERFRDWLIANNCEQVAFEATGVYWFPVYDALSPSIDTIVANPWMIKGIPGNKSDACDSRWIAENCLDGKIKRSRIFSKEDRNLRTMTRARSGYTKTRTQLRNRIHKYLALCGIKLSSCISDIFGKSGRHILDGLVEVKDIDEILDSIPSGKVKKKRDLIKAALGNGIDDVSRMLVKDTLELLDHLEKKIEKTSLEILSRLQKRAKDLAIVMSVPGIGFTSGSIILAEIGDYRDFHTPEQLAKWCGLAPGLNESAGKKKPCGITKQGSKSLRTVLVEIAQVVAKMSNNKLSRFFHRLRARKNYNVAITALARKLITIIYHLLINQELYQENNCNTATSKPVKKDLLNLSKEERLKDGVAAIVDAFYHLKNRYSEGGG

SEQ ID NO: 414642 - protein, 332 aa, unidentified
MNMHPQGGVARPDQRLNAGIDVSKQHLDACWGTEDQRLDNDEPGWDVLIANFRATHVDLVVIEATGGYERGLVCALQGAGITVARVNPRQARDFAKSMGVLAKTDRVDARTLRDFADVLARHKDRHKYITPLIEAQREQLAALMARRRQLVDMRVAEGNRLEQAGTRAARSIRSVLKTLDKQIAGIDRDADDHLDRHFKEQRTLLDSVKGVGPVTILTLTSALPELGHLGRRQIAKLVGVAPLADDSGSRKGPRRVWGGRGEVRSVVYMATMSAIRFNPVIKAFHSRLIAAGKPKKVAIVACMRKLLTILNAMLRDHALWDATKHLQTSKTA

SEQ ID NO: 414643 - protein, 355 aa, unidentified
MDGQKYIGMDVHQSSISIAVRDATGKVIAESVIETKAATILEFIRGIKGSLWITFEEGTSAAWLYDLVKPHVTKVIVCDPRKNALLNAGSKNDRVDARKLSDLLRAGLLTAVYHGENGVRTLRELGRSYITVTKDLTRVMNRLKALYRSWAIPCAGEKVYSPRRRNAWLERLTEPGVRRRAEQIYQQLDALRQIRREVRHELLAESQKHPATQLLRQIPRLGPIRVALLIGLVQTPHRFRTKRQLWAYCGLALQTRASGEYRFSGGELQPFKKVPALRGLNVNHNHDLKNLFKGAAMHVSISTDPLGDFYRNLLAKGMKPSMARLTLARKMAAIVLTVWKKGVRFDPGELKRQAA

SEQ ID NO: 414644 - protein, 340 aa, unidentified
MNIKRVSIDLAKNVFQVCTFSETGKIHTNQKVSRTQLSRVIQQIEPTIIAMETCYSANYWGRRFQDMGHTVNLIPAQHVKPFVRGNKTDNNDAIAIAEASLRPNMRFVPVKSLHQQDIQIQHRIRQRHVSERTALVNQMRGILAEYGVIVSKGWRKLQQQLPDILEDGENELTPIARENIAELAEELRTHCKWIDGDNFRLKLMMEDNEDYQRLLGAPGFGPIVASATIAAIGNGAQFKSGRQMAAWLGLTPRAEASGERSVMKGITKRGNRYLRTLFIHGARAIVTWCEKKDDPMSLWIKQLIARRGKQKAIVAVAHKMARYAWVILNRKEHYKLAKIN

SEQ ID NO: 414645 - protein, 433 aa, unidentified
MNTSPPFDLVIGLDRSDRQADLYCLDTRSAKTAKQILATSPEALQDWLARLRQQHPQGRVALCLEQPAASLILFLETYSWITLYAINPITLQKFREAFVTSRAKDDGKDAQYLAELLLTHHDKLKAWQPDDGQTRQLQQLVRHRRAVVDERTGLSNRLKALLKQYFPQALDLCGDDLWRPLATAFLLQWPTLQSLQKAKTSAVKTFYYRQGSRSQQLIEPRLELIKKAVALTEEMAYLQSHTLRVQLICQQLDLLHRTLAQFEQQIAQVFGQHPDGAIFRNLPGAGPVLAPRLRASMGSERERFARAKNLQSFSGIAPVTKQSGGTCHVHRRYLCPKFFKQSFHEYAKESILHSRWAAAHYQQQRQKGCGHHTAVRSLAYKWQRIIWKCWQTRTIYREDIYEAALKKTGSPLVALLDQIELGKSPVKTTAKKS

SEQ ID NO: 414646 - protein, 417 aa, unidentified
MSTRQQKLIYVGIDWADDHHDIVITDDSANTLDQFRIDHTCEGFALLHSHIANHQTSPDLVLIAIETSRGLLVHELLQKGYVVYAINPKSVNRYKDRHVLSKAKSDALDALSLGHILRTDRHRFQPLKPLPEDYRLLDRLCTDLRKVVDEKSRVTNQVISCLKEFYPKALETFSLDSQIFIDFLKAFPDHRALSACTKKAFLAFLKKHRYPCPAKADELWKTIQSPTLQPDKVTARSGRLRMGMLLDQLENLKVHIIHYEQEIQDILDKLPESNSVKSLPGVGDRLAPELVATLGPNNKDGHHRFQASDEIAKLSGCVPIVRESGKWRTVSLRYACVKSLRRTFHDWAFTSINYSSWARAFYDYHKERNQSHCTILRNLGKKWIKILFAVWSQGTSYDETLHIQNLKARNVPWAMTL

SEQ ID NO: 414647 - protein, 324 aa, unidentified
MKEMLPTILGIDVSQKTLDVTLLNEKGGKRRKRFANSTAGIQALITWLKRQTQRGVHVCMESTSVYWEDVAEALHEATHQVSVVNPVRIKGYAMSQMRRSKSDPLDGDVIADFCRTQQPDLWQPPTAEQKKLRALVRHLEALKKSRTQQKNRLGTCRDDEVQDSLENVLTTLHEEIEQVEQRIRELIDQHPELKQKKELLESIKGFGEKTAIHILAEMYDLATYKNAKAAAADAGVTASHFRSGTSVWKRPKMSRMGKSTIRSALYYPAISAIRHNPIVKKLAQRLEAKGKKKSVIRVAAMRKLMHLAFGVLKNELPFDPAYTG

SEQ ID NO: 414648 - protein, 353 aa, unidentified
MKTYYVGMDVHSASIRIAVLNGAGKIVMESTIETGAERVRGFLKQLRGKVCVTFEEGTQANWLHDVVRPLVTEVVVWDPRHNKLLKSGNKNDRVDAQKLAELLRLGSLQAVYHGDNGVRTLKEMVRTYDCLVSDTTRVMNRLKAIYRGRAIACAGHEIYRQDRREQWLAKLRERGANQRAGFLYEQLAALKPLRRKAKLAMVKEARRQTAYRWLMSMPKLGSVSVAQLIAVVGTPYRFRSKRQFWTYVGLAVVTCSSADHEVVNGVLRRSTRPLATRGLNRNHNHLLKRVFKNAASSACHSGPFKAAYDVRVGRGMAPSLARLTIARQLAATTLSIWKRGEQFSTERMKQQAT

SEQ ID NO: 414649 - protein, 409 aa, unidentified
MELKYARCAGLDVHKDTVVACLRIERDERVRRTVKTFGTTTIDLLTLQQWLVDEEVTHVAMEATGVYWKPVWHVLEPICALVLANPAHIKNVPGRKTDVKDAEWIAELLSHGLIEASFVPPTPIQDLRALTRDRRQFHREASQHVQRIQKVLQDANIKIDSVISDVMGRSGRAFLDAIVMGESDPEKLAEHANYRLKASRREIVEALRGVVTPLHRATLRRHLQMYDAIQEMIAEIDAEVATLLEPFRRQVELLDTIPGVDVMTAEVILAEIGVDMSRFPTAEHLVSWAGLAPRNDQSAGKRRNTRVSKGGQWLKATLVQAAWAAARKKESHLRVLFLRLKGKRGPKKAIVAVAAEIIRSTWYMLSRDEAYREPASTLPDEIRREREAKRLVRKLNNLGYPVEMPVAAK

SEQ ID NO: 414650 - protein, 373 aa, unidentified
MMIIGCDYHPAFQQIAFVDTDTGELRERRLQHREEAEKFYRNLAAQEMKMRVGMEASGHARWFERLLAELNFELWIGDAAVIHTKRVRKQKTDRQDAQLILQLMMEDRFPRIWVANWENRDLRQLLWHRHRMVQTRTRIMNQLQAVALNEGLRCKKRLWREAGREQLESFPLAPWASRRRRDLLEVLDRLTPTITELSQAIEQEAEKCPTAQRLRTHPGVGSLTALAFVLIIGSAERFQCSKQIASCLGLVPSEDSSGDRRRLGHISKQGNALLRFLLVEAAQVTVRSIPEWRSKYFHLAMRRGRKIAKVAMARKLAIQLFWMMRKGWDYEQVNRFGPHAGWVLSRENIQPGRRRGKNARKAIWAGAIARVPV

SEQ ID NO: 414651 - protein, 430 aa, unidentified
MKKNNSNSQTNSDRAGKPGKARGPVQRDAKEVMAELVARLSQKLEPRSAGARAGEARQQDLPGPNRDRLTVGVDLGDKWSNFCIVGLDGEKLTEGELRTTQEDFAEFFQSLAAARVVIEVGTHSAWARDVVAGCGHEVLVANPRQMEGPKRRKRKNDRIDAHKLARIGRMDPQSLFPVEHRSVKVRQDLVAVRARDALVAARTQLINTTRGLVKSMGGRLPKCSSPSFPHKVEEALPAEVREVLLPLVRLVETLSDGIAAYDEKMEKLGSEKYPQTKLLRQVKGVGPITALAYILTLENPERFAQSRDVGPYLGLVPKQEDSGDSQPQLRITKMGDMMLRRLLVGSAHYILGPFGPDTDLRRYGIRLSERGGKNAKKRAVVAVARKLAVLLHSLWVSGEVYEPLRHALPKATEEEAVRHAPAEATEKEAA

SEQ ID NO: 414652 - protein, 336 aa, unidentified
MKHTVIGMDIAKHVFQLHAVNAATGEIERIKLKRNQLLDFFAKREHSLVAMEACGGAHHWARQLQELGHDVKLICARSVRPFVLRNKTDAADARAIWTAAQQPDARFVAIKTEPQQAILALHRLRAQLMKFRIMQTNALRGLLHEFGQTLPEGYQALQDAIPGTLARAAERLLAMLVDSLREQWGRVQSTDADIATLERRLKAALRENQQCQRIAEIPGVGLLTATAAVAAIGNASTFRSGREFAAWLGLVPRQTGTGGKVRQLGLSRRGDTYLRTLLMHDARSVITRGTRSPWLDGLLQRRPFNVVVAAMANKLARTIWAVLYRGTGYYGAIKDA

SEQ ID NO: 414653 - protein, 324 aa, unidentified
MKVQHIIGADLSKTTIDLFLQSRLQIENTKIGFQQMMNWFKQQNINASEVMIVMEHTGLYSYCFENFLHEHHIAFCKVNAYAVKRSMGLVRGKSDSIDARRLANYGSKEKLSVEPQLSKELQRLQMLYSTRERLVRHKAALLNAVSEYRNIGLAASDLIMTTHTTVIKSFEKQIEKLQNQMDDIVKNNPSIKGNQNLLQSIKGVGRVLSIATIIKTRNFTRFQSARKFACFCGTAPFEHTSGSSIRGKTKVSQLADKTMKTLLDLSAKSAIQYDKELREYYLNRTQNGKSKMSTINVVRNKILYRMFAVVKRQTPFTENHSQAA

SEQ ID NO: 414654 - protein, 409 aa, unidentified
MRLFVGLDVSSFDIKTCILNGEGEKLDSFSVNNDLPGAIALKERLLQRIANQKVEIFKIGLESTSVYSFHPSMFLHYDKELQSFGAKVFLMNPKQITNFKKSYSDMNKTDEIDAFVIADYLRFGRNQMSIVKESQYVALQQLTRSRYQLVRMLTKEKQHFLQHLSYKCNTFSQEVDSSIFGNAMMELFLEKFSLEELADMPLNELSEFLQAKGKNRFGDPKCVASTIQKAVRSSYRLDKVVEDSIDVLLGTSIAVIRTYQQQIKEIEKSIKQIMAGLPQTLESIPGVGPVFAAGIIAEIGQIERFDDETKIAKYAGLYWRKHQSGRFTAENTSLSRNGNHYLRYHLVEAANSVRKYVSDYQEYYVKKYNEVPKHQHKRALVLTARKFVRLVDALLRNHQLFTPERCVKV

SEQ ID NO: 414655 - protein, 399 aa, unidentified
MNYFGIDISKRTSVIAHYQDDIFQKEFTIQNNKNGYNQLLNYLNEMDQFQFVFEATGIYSRGMVKFCRVNQIDFIEMNPLEARFKTSSLRAWKTDESDAHKLALLAPYLKASTSLDSNPDIFFELRERARFHVEIENDQNRLKIMIIELLHQTFPGLEKLFKNRYSKIALNIIEEYAHPDLVSQKDIESLTSSIMEYTNKNLSYQKAQNYAERLNKIAQESYPNVKHSSFLVKKVRLLIQQLKSSIQQLSQLDKEMIELAQQLECFEVMHSIPGIGKLTVAMIIGELGDLTKFKTNKQLNAYVGIDIKRYQSGKTQYRDTINRRGNKKARRLLFLVVMNIIRGQRNYNNHIVDYYYKLRKQPNEKSHKTAVVACINRLLKTIHYLVNESKLYDYQMSPH

SEQ ID NO: 414656 - protein, 339 aa, unidentified
MKLYAATDLHSSNNYLAIIDEHGERRFKQKLPNNPSIILEALKPYKEEITGIVVESTYNWYWLVDMLMAEGYKVHLANPVAIEKYSGLKHADDKHDAFWLAEMLRLGILPEGYIYPKEERPIRDLLRKRGHLVRLRTSLVISLQNIINRNCGRELDCNSMKRLKTDHVAPFLEDNEDLALAGRVSKEGIDFLTRRIKEIESAVEHKVKLQAPYANLQTIPGIGKIIALTIMLETGHVERFADTGNYVSYCRKVHTKWMSNGKQKGKGNRKNGNKYLAWAFSEAAELARRFDSKAKAYYQRKKQQTNFMVAHNALAHKLARAAYHIMKDNVSFMPEKLFA

SEQ ID NO: 414657 - protein, 445 aa, unidentified
MSTTKHDTDKSSSTVAAPGPASEPHFAAFIAIDWGDEKHAVALRVAGQTQTEHTTLEQKPQALTEWIAGLRQRFAGGTVAVILEQKRGALLYALQPHEHLVLYPVNPQMSAKFRQAFYPSGAKDDPTDADLQLDILLGHRDRLTAWRPDDATTRQLSLLVEGRRRFVADQVRVTNRLRDALKSYFPQALELAGEDLTSLMACAFLQKWPSLAALQQVKPAVLRKFYYAHHSRSEELIARRLQLQAQAQPLTTDAAIIAAQSLLVQSLAQELATLHPVLARYEKQIAQLFALHTDGALWDSFPGAGPALGPRLAMAWGTQRDRFPDPQAMACFSGIAPVKEASGKQLWIHVRWACPKFLRQTFHEMAKCSLKFCAWALCYYQMQIARGKGHHAAIRALAFKWQRIMWRCWQDHIPYDDAKYVASLKRSARDLHARLSAAPAQEMCE

SEQ ID NO: 414658 - protein, 348 aa, unidentified
MNTTTIGLDIAKNCFQVHGVDAHGKTTLQRQLRRAQVLTFFANLPACLIGIEACGSAHHWARKLGELGHQVKLMPAQFVKAYVKTNKNDARDAEAICEAVARPNMRFVAVKTVAQQELLMLHRVRQRLVMERTAKANQLRGLLGEFGIVVPQGLHRLRRVMPEILADAENGLSCRLRERFSHLFSHLRELDASISEWERQIVAWHRESPLSQRLDKIPGIGPLGASALAASIGDIRTFKSGRQLAAWLGLVPRQDSSGGKTRLLGISKRGDRYLRTLLILGARSVLRQMQRHPARAAQSWLERLTARSHPHIAAVALANKSARIAWALLAHEREYQADYRRRVALAAA

SEQ ID NO: 414659 - protein, 358 aa, unidentified
MAALQISPEPDVIIGIDTHKTIHAAVAINSFGARLGETFIPVSSKGYAELEAWASAFGKVRAFGIEGTGSYGAGLTRSLLARGHRIIEVNRPNRQLRHQHGKSDTLDAEGAARAVLSGQATAVPKVGTGAVEMIRHLKIARDTAVKARTQAMVTLKTLIINAPAALRENLDGISGKISLIRHIAALRPGPISSPMASAKSAMQALARRWLALNDEVKAHDEQLRKLTEACAPTLVQAHGIASGTAAEMLILVGDNPERIRSDAAFAKLCGVCPIPASSGKTNRHRLNRGGNRQANAAIYRVVIMRMRSHEPTLDYVRRRMAEGKTKKEVIRCLKRFVAREIFGHLCRAGAATVRLSAP

SEQ ID NO: 414660 - protein, 407 aa, unidentified
MDLLKTVFGIDVSSRKSNVCIMVNGQKVNDYAISNDMVGFNQLLGDLKQVTKPQIIFEATGVYSRRLQAFLDMHELRYVMMNPLEAKRKTKDDLHQNKTDKLDALYLAKLQSEHPQRLAYVQSKEYQELMANNLIYEQASHDLITNKNRLHKAVQLTFPEIEHLLANPRGKNYWSIALRFPHPDIVLETKEADIIGFLKGLSGIGKKRANDITQSLIRLAKVACPTVKKNSAHIRGLKMAINNILSAEEECQTALQEMAKLAPKRDLEILTSIPGIGKNTALRIISELGDIRRFNNPSQLNAFVGVDPQVYESGNLTAHLSISKRGTAIGRKVLYLAINQIQSAKKVGNPCHIADYYEKRKRSSETVSHKKAAIASIHKLLRTIFALIKNDQLYNYDVAKHNQRLLS

SEQ ID NO: 414661 - protein, 409 aa, unidentified
MIIVGVDWARDKHDYCIQDHEGIVLRAGVVAHDWSALEKLGELIDEVESTRSSVHVALEQHDGALLAWLLDSGFTVYGINPKSADRARDIYRPAGGKDDKTDAQVLADLLRNNLKRFRPLDAQSEQTLHLKSLARLRMQLMHEKTSLMQRLRTILAEWCPSVSKLCKDFNRAWQRRLLERWHLHEDLIKAHGKSITVFLKKNRISEATREKVQAVRRTDPTFIPDGRKDALRFAISLVLEQLQLLIDRLERLDQDLAKSLEEHPSFNVFHSLPVKGVPTLAMLTSAFGDRRTTSPMEWRQLAARWGVAPVTYASGKSRSVRRRKACDSNMLQALSDFAFTTAFSISGCWAREFYDRKRQDGQDHHESLRAVALRWVKIMYRMWQDGTQYSEQYHRNRMQQQQSKTIDAR

SEQ ID NO: 414662 - protein, 485 aa, unidentified
MAVAERRVLGIDLGITSAHTAAILDQAGQVLGRRRCRPTVASLEAVEAAALAGTPAGTRLEVVVEPTGPAWLPVAVFFAGRGHAVYRVPVAKAADLRRFLSRHAKSNAIDAETLARLPLVDPGGVQPLELPDGPRASLDRRVRTCQWLTEQATAHKVRIRDLARQLFPTLNDAVDSELRGADLAVLERYGDPRKLLAAGPEPVAGLLRAGSTGRMAAAKVESRARAWVGVAQAAVELYGDSGAMPYADVAAELATEVRLLRAVLAEQKPHQQARERAYLKVEPDELARTLPGIAEVGAPLLVAAIGRPQRFASAAKFKAFTGLTPKASETGETDRKGQAITKAGAARLRKQLVCSANTARQVDPQLAAVYYAQMVERGAHHIKALCIVAAKLAERFWAVQASGKPYVLRDVDGREVTIEEARRIIAERYTVPEEVRRRRRSTKPRTGKAPQHVLSGHAQRGTSRAEPRRPSPRPILGPGHGTVNR

SEQ ID NO: 414663 - protein, 323 aa, unidentified
MEILHRCCAGLDVHKKTVVACVRTLGPDGKADTQTRTFGTRTAGLLELADGLEAHGVRQAAMESTGVYWKPVFHVLEGRIEVMLVNARHIKNVPGRKTDVKDAEWRAQLLQHGLLRPSFIPPAPIRALRDLTRQRAQLVHDRATVVNRVQKVLEDANIKLASVATDVMGVSGRAMIRALIAGNTVADDLAALARARLRAKRPELRQALDGRVTDHHRFQLRMLREQIEPLEGWIAELGTRIETLMRPFSEAAQRLVPIPGVGQRAAEVIVAEIGTDMTKFPDAGHLSSWAGMCSGNHQSAGKRRIGRTTPGDRWLRQVLVQAA

SEQ ID NO: 414664 - protein, 412 aa, unidentified
MRVMIERCAGLDVHQATVVACVLIYEGRRKPRKEVRSFGTMTQELEALRDWLAAEGVTHVGMESTGVYWQPVYTVLEGRFELIVGNARHIRNVPGRKTDVKDAEWIAELVCCGLIRSSFVPPKPLRELRALIRYRRKLVENQSAERNRLQKVLETANIKLGSVATDVLGVSGRAILRALIDGTASAEEMADLARGLLRRKRAELILALDGRVEEYHRFLLAMQLRRVEAIEQDIEQLDQRIAEKLAPYDIEVGLLEQIPGTDWVTAASLIAEIGTDMSVFASAHHLAAWAGVCPGNHESAGKHKAARARKGNVHLRTALVAAARSAARTKGSYLKDKYHRLKARRGPMRAALAIAHKILVAAYHMLARGVGYRELGEAYLDQIDQTRTAANLKRRLERLGYVVAIQPKEAAA

SEQ ID NO: 414665 - protein, 340 aa, unidentified
MNATTYGLDVAKRVFQMYWVDGDTGEIVNHRFGRDQLIQYLSRRPPGRVALEACGSAHWWARKIKALGHDVVLMHAKFIRPFVQTNKTDAADARAIWTAVQQPGMRTVAAKTEEQQAMLSLHRIRCLLVKFRTMQVNQLRGLLYEFGASFRAGRVAGLAEIRARMAELEEALPDAMMCCLQDQLRRIDALQTEIDQLERRIGAWQKQDAACRAIAAVPGIGKLTATALVATMGDAGTFKSGREFAAFLGLVPRQSGTGGKVRLGRISKRGDPYLRTLLIHGARSVLWHTKVPTAWQSAIQARRPANVAAVAVASKMARTAWAILAHGRVYQRDHVGVRPA

SEQ ID NO: 414666 - protein, 347 aa, unidentified
MSNITSLAIDLAKNTFQLHGTDAKGKIVLKKKINREKLLEFIVSLKPCNIHMEACGTANYWGRKFREHGHKVKLINPRYVTPYVKRNKNDANDAAGIAAAARDPDMRFCDVKTEEQQDMQSVHRIRSLLIQQRTALANQIRGLLAEYGIAIGQGISHIRSELPLIFGNNPNDMGVLILDCLMELYNRFGYLDKQIAAYDKKIEVLFKNNEGCQRLEKIPGIGTLGATILASVLGNGGAFKNGRHFAAFLGLTPRQHSSGGKERLLGISKGGDTYIRTLLVHGARAVLLRSDKKTDKQSKWINSLMSRSNYNKTAVALANKIARTAWAIIAKGANYNTNHKPVFLKTA

SEQ ID NO: 414667 - protein, 343 aa, unidentified
MKTVTTIGIDLAKNSFSVYGVDAKGKPVLSRTLSRAGVVRFFVKLAAPCLVGMEACASSEYWARTIESLGHEVRRIHPRYVKAFLLGAKNDINDAAAICEAVLRPNMRFVPHKSPEQLDIQGIHRVRQGYVKSRTALVNQARGLLAEYGIVIRKGICTFRNQLSALITDEANELSGLMRQNLASLYESFCFLDNRILEQDKLLKSIVKGNEACQRLMQVPGIGIMTATILLSVAGVASNFKNGREFAAFLGLVPRQNSTGGKTRLLGISKRGDCYTRYLLIHGARAALSRLIAGHTPEHRRNPWIMELASRRGKNKASVAMANKTARIAWSMLTLGTEYKHAA

SEQ ID NO: 414668 - protein, 411 aa, unidentified
MGSGRTEINLAPVNYPPCIINGHRIGRREKRWDEAAGPSRRGGPDSAPHKVDAVYAANGGRPAVEHVGIDVHKNQSQICIITSEGEMIEKRVSTERGRFETALSSHRGARIVIEASTESEWVARCLEGLGHDVIVADPNYAPMYGQRTRRVKTDRRDARALAEACRSGTYRRAHRTSDERRHLRGQLAVREGLVRTRTRYISLIRSLLRREGLRVRSGSADTFLERLAEVDLLDQLRREIKPLLAVMGPLGKQIARVDRQVAELASEDRQVRTLCTAPGVGPVTAISFVATLDRAERFRGAHQVEAYLGLVPSEKSSGERQFKGGITKCGNTRTRWLLVEAAWILLVRAKSVKAQPLQAWAQRIAARRGRRVAVVALARRLAGILYAMMRDGTEFNGMRLAPSTDRLSATA

SEQ ID NO: 414669 - protein, 365 aa, unidentified
MNAIHYIGLDVHKKTISFCVKTADGQIVEEGRLQAERTVLRRWAAGRKQAWHGAMEATLFSAWIYDTLKPYAQQLSMGHPAKMKAIAAGKNKSDQIDARTIADLLRCNLLPVCYVLPPQLRDLRRLLRYRNLVVQQSVRMQNKVAGLLMESGTPFNKQKLHQKKYFADLMKSLEEVPESVKDLLRMSRGSMEMFQSTQKQLVKRLLSEPALEQRVERLMSIRAVGPITALTWALEIADPHRFASIADAVSYCGLSAAFRSSAGKQQRGPISKQRNAWLQPVLIEAAKLAPLWNPQLAAVHARALERGHANRATLQVARKLVAYLLAVDKSGQPFQVRTPPPPASAKARKKSARKSKKAVALAPAA

SEQ ID NO: 414670 - protein, 330 aa, unidentified
MSVYVGIDVHRKRSQIAVIGEDGKVAVNRNVVNGGEPMRRLVSSLPAGTPVAFEAAYGWGWLAAMLEDHGLEPHMVHPLRCKAIASARLKNDKVDAAILAQLLRADLLPEAWIAPPAVRDLRALVRHRVALVRLRTRMQNKIHAAAADHGYDRPASYWTGPGRAWLAALDLPPVPVQVITSCLAVIDHLDPLIGQADAALRGYARTDPRVAALTELPGIGPVTALIIIAETGDITRFGSARKLASWAGLTPTVRGSDVKVRHGHISKQGSPILRWALNQAAQHARKSPGFEPAWTAIAARRGPKIATTAISRKLLCRAWHLLTEHAASHP

SEQ ID NO: 414671 - protein, 429 aa, unidentified
MNYNTQNAKIASITEKSLIVGIDVGSETHYARAFDWRNYEYSKKPFTFNNDEAGFAAFKAWMEDIAEKHGKEVVIPGMEPTGHYWLNLGAYLQEQGMKPVHVNPHHVKKSKELDDNNPNKNDRKDPKTIAGLVNEGRFSYPYIPTGIYAEIRNLSNLRIQTQEELTRIKNRIARWFSIYFPEIKDVYKNPDAVSGMMVIKKAPLPCDIKELGVDGVNQVWRDAKLKGAGLKRARTLVSAAEHSIGSTEAPESARIEIRNLLNDYEVYKNRMDDLMREIEAKLSEIPYIDKLMEINGIGLKTVSCFIAEVGDIRRFDNPKQLQKLAGYAIVADSSGKHNGESRISHRGRKRLRYALYEAAISVIGKNKEFREIHDYYRTRKQNPLKKMQSVIAIACKLIRIFYTILTKGVDYDGQKMLSDIVRPETVMAA

SEQ ID NO: 414672 - protein, 357 aa, unidentified
MQTAYDGRQVVGMDLHRRRSVLVRMTEDGRRLGMARITNSPAELRAQIARAGKRPRVVLEATYGWYWAADTLAAAGAEVHLAHPLGVKAFSYRRVKNDERDAADLADLLRMGRLPEAWIAPPEVRELRELTRYRHKLVSLQTSCKDQVHAVLAKLGVPVTCSDLFGVAGSAWLDALGLPQPYAGKVTSLRQLTGVLAAEITMLSEVIADLLAGDRGYQVIRQLPGIGPVLGAVIIAEIGDVTRFRSAAQLCSWAGLTPRHRESDVKVSRGHVTKQGSRMLRWALIEAIQRIPRDSAIGAVKDAIVARRGKQAKNIAKVAAARRLLTLVYYGLRDGQIRALATTRDEPPAAQPPARAA

SEQ ID NO: 414673 - protein, 420 aa, unidentified
MCKEPRLAGRAGRFVGVRSVSEGGDKMQGNRTGVCHGVSNGALRSRAALRTMRWSPPALTNGVICAMIEMSPLSNGRREKTMDNITTIGLDLAKNIFHVMGCDARGKVVRKKMLRRGEVIRFFNGLTPCLVGMEACASAHYWARELQAMGFKVKLIPPQFVKPYVRGNKNDDNDALAIAEAVVRPKMRFVTPKTTAQQDVQALHRLRERRIGERTALCNQLRGLLAEYGCILPKGVSVLRRRIPDLLEDGENGLSGLFRQLLAQGYQQLQQLDEHIECYTQALQVQCREDEACGRLQTIPGYGPIVASAFRSAIGNGSAFRRGRDVSASLGIVPGQHSSGGKETLLGISKRGNCYVRSLLIHGARSVVRQAVNKDDRLSRWINRIRAERGYNKAAEALANKLARIGWACLHSDTSYQAAR

SEQ ID NO: 414674 - protein, 319 aa, unidentified
MSRTFIGVDVSQDYLDVYVRPAAVRQRFPNSPDGIADFLAWVRPFAAERILFESTGPYQKAAVGVLLAEGLPAVVVNARQVRDFAKAMNYLAKTDRIDAAVIAHFAEVAQTTVRPLESQEIRDLRELYDRRGQLVHMLAVEKNQRHSATVAQASPRVLRSIDKHIAYLKSHIQDLEKRMDRIIESSATFQARDEILQTITGIGPQVSRTLLAYLPELGRCSRQAITALVGLAPFNDDSGTHTGERHIRGGRRKVRVGLYQAAVAAIRHCPRMQAFYAGLKARGKASRVALVAVARKLLVLANALIRDMVPYQAPANSVC

SEQ ID NO: 414675 - protein, 459 aa, unidentified
MARRLRRSTRPVTMPILHPDAAGIDIGATEIYVCVPLDRDPQPIRRFGTFTEDLHTLADWLRQCGVTAVAMEATGVYWIPLYQILETRGFAVCLVNARHVKHAPGRKSDVQDCQWLQYLYVVGLLRASFRPSDAVCAVRTLLRHRDSLVQLAATHTQHMQKALTQMNLQLHHVLSDLTGVTGLAILDAILDGERNPQVLAQHRDRRIKASPATIAKALVGDYRSEHLFTLRQSRAAYRQTQDLIADCDREVQQRLGAFASTIDPATHPLPPAAKQTRRPARETTPGFDLRTELYRILGTDLTRVPGLQTPSVCTLFAELGADLAAFPAGDHFASWLGLCPDNRISGGKILSVQTRHVKHRVAAALRLAAQSLSRSRSVLGAYFRRMRAKLGPPEAITATAHKLARIIYHLITTHEPYDETRLAQADRDHHQRAESRLRAQARAFGFQLVPLAPVGSTVS

SEQ ID NO: 414676 - protein, 333 aa, unidentified
MITVFPTWTAYVGIDVAKTKLDVVLRLGERAIHQVFANTADGFAALDGWLSSFALSPAQVRVCLEATGSYSDAIALDLFARGYTLSVLNPAVLVDYRRSQNIRSKTDKLDAHLLARYAQEKQPRAYKPLPAEILTLRALLHHRDDVQHMLRQERNRLEAGRMTDGIEQRVRKHIQDLQADFKATEGEIKAHLKAHPHLKAIWRRLQTIAGIGWLTATRLLAHLGEIGRFDKVGSLVSLAGLAVKEHRCGSSVRGKAQIDRHGRKDLRRSMSMSAVVALRVSPHMQQWAKRLQAAGKPKMIILVAIMRKLLHIVYGVWKTEQDYQPALAFPVAA

SEQ ID NO: 414677 - protein, 373 aa, unidentified
MEQVDRIRLEQFRQLKKEIRGSEKHLIVGIDVSKDKHHAFLGTATGKTLFKRLVFENSVEGVEKLLSQVERVRLEEGLREVVFGLEPTGNYHKPLGEFLIRKLAHVVLVSGVAAKENRKSLDGRWDSNDGRDAANIADLVSQGKFLFYEYPDPRLRELRSLLVLKRRLKREEHGYRVRIRNSLVAKYFPELDRYFDQSEKYALAIVRWCLDPRSLSGYRLDEFTRMIASGRRGGQQHNRLRMILEMARGSIGCEMGPAVKFEAELMVEGLRQIRLRIGDVEKQIHELCMEFPEYEYLLSIPGFGPDVSSKVLGAVGDPFRFENEKQVLKLAGWDLNAERSGKSSDSARPVISKKGKADLRFFCPVSGRSDCLD

SEQ ID NO: 414678 - protein, 348 aa, unidentified
MHFYTGQHRFYCGVDLHTRTLSLCVLDQAGGVALEATLPPEQDRFLEVLAPFRDGLVVGCECLFAWYWLADLCAAEGIPFVLGHALYLKAIHGGKTKTDTIDARKLARLLRGGNFAEAYVYPKAMRATRDLLRRRTYLVRKRAELLAHLQMTFLQYNLTPPAQKLAYAANRAGLDLDVFPDPSTRSMLAADLAIVTGLSQQIKRLEAELVRSAKVHDPQAFHRLRTVPGIGPVLALILLYEVHDIRRFEDEGRFLSYARLVGGVRESGGKRLGSAGRKIGNAHLKWAFSEATCLLIRSLPKAKTWLARKERKLGKKRALGALATRLARTVYHLWRKQEAFDVNRFLAS

SEQ ID NO: 414679 - protein, 388 aa, unidentified
MSSNDHILGDPTAIRTDLAAIFVSLELSRRTWLVTSLLPGSEKMSRHAVPAGAVGDLLTLLGRRRAAAAARGEGEYRIVAIQEAGLDGFWLHRVLEAEGIESHVVDAASIAAPRRRRRAKSDRIDGESLLRVLLAYKRGEPRVCSMVRPPSPAAEDRRRVSRERRTLVAQRIEEVNRIKGLLFSQGVFDYEPRSRHRRERLDTLRTGDGRPLPEHLKRQVGRELERLELVEAQIKQVEAERDALLAAPQDAAPEGAKSRLTQLVSIGPEFASVLEAEAFWRRFDNRRQLAAYAGLAPTPWQSGSIAREQGVSKAGNPRRRTTMIQLAWRWLRHQPQSDLSRWFQHRVRHGGGRIRKTGIVALARKLLIALWRFERCGELPAGAQVKPA

SEQ ID NO: 414680 - protein, 411 aa, unidentified
MRLFVGDDWAEDHHDVEVMDEAGKVLARRRLPEGVAGIAGLHGLIGAHLGEGADEAEVVVGIGTDRGPWVTALIAAGYLVYPVNPLQASRYRERHAVPRAESDSGDARVLADMVRADSRQLRPAAGDSPAAEAVKVLARTHKTLIWERTRAVQRLRHQLREYFPAALEAFEDLDAPDTLELLGKAPDPARAARLTRAQVSAALKRARRRNIPDKATAVLAALRAGHLGQPETVTAAYAATVRSLIAVITVLNEQVKTLQGQVEEHFGRHPDAEIYRSQPGMGAILGARVLAESGDDPHRYADGKARRNYAAASPITRASGKKKVVAARFIHNGRLVDALNAQAFAALNASPGARAFYDQQRAKGIEHNDALRRLANRLVGILHRCLKTRTLYNEATAWGHRENLPQSSLAA

SEQ ID NO: 414681 - protein, 460 aa, unidentified
MSQRRKKQKRAGQGGGAVPSLSCIEPNAAGIDVGATEIFVAVPQDRDPSPVRSFETFTEDLQRLKNWLQQCGITTVAMESTGVYWIPLFQILEKAGMEVCLVNAQHVKHVPGRKSDVIDCQWLQYLHSVGLLRASFRPEQRICAIRSLLRHRDSLVQMAAAHVQHMQKALTQMNLQLHHVLSDITGQSGLAILDAILAGERNPAVLAQLRPARVQASEEIITKSLVGDYQREHLFTLRQSLQAYRYYPSLITACDQEIEEQLQNLDSRTPPDASPLPPERYPHRPRKNEFRFDMRSELYRIYGTDLTAIPSINALTGYTVLAEVGTDWSKFRNGDAFASWTCLCPQNKKSGGKILSAHTRRSANRVNRALRLAAQTLERSTSYLGAYYRKMRARHGAPAAITAAAHKLARIIFHLVTTREAYDESLFAAEEQRQRKRMENKLKRTAKQLGYQLIPLGQTA

SEQ ID NO: 414682 - protein, 331 aa, unidentified
MFPVGIDVSKNTLDLCMLYDGIKGRIKTRNIQNNRHSVENILRWLRLQHCGPEDVHVVMEATGVYHERLATELHDAGFYVSLANPHRSREFARGMGIMTKTDKVDAYMLACYAFLKNPHRWEPPAPEIRYLGALLRRRDVLLGDALREENRLEKYLPTDTPADIISSCMHMAQLLRDEVSNIERQIKAHIKASPALRRDYTLLTSIKSVGPQLGMHMLVVLRSHDFSSAEQAAAFLGVVPIEKRSGTSVRSRPRMSKIGPPQLRAKLYMSALCGKIYNKRMRNIYDEMCLRGKPKMVAIGALMRKLVHWCYGVLKTGIVFNDEGLKQVLST

SEQ ID NO: 414683 - protein, 368 aa, unidentified
MHESITAYVGLDVHKDSIAIALAGKDRAVPHFVGTVRPDFKQVRKALSHYGSPSSLQVVYEAGPCGYTLARQLLAEGFDCQVIAASRITRSPTERIKTDRRDALTLARLARSGDLVAVRIPDERDEAIRDLSRARQDAVRACLKARQQLKAFLLRHGRPLRGSRPWSPTGELYLSKIGFAHAAQNIAFADYRQAVLDTRARVERLTEALRAQCEGWRMQPLVSALTCLRGVDFLAAVILVAEIGDFTRFAHPKELMGYLGLVPSEYSTGQQHHRGDITKTGNANARRVLVEAAWNYRFPARLSYAITRRQEGQSKPVRDIAWKAQLRLGHRYRKLQSRKLHQNKVIVAIARELSGFLWDIARHVTIPA

SEQ ID NO: 414684 - protein, 315 aa, unidentified
MASSSERFVGIDVSKKSLDVHIRPDGTTRRFDNTPQSIAALVEWLATVTPALVVLEATGGYENAVVAALSLQGLPVSLVNPKRVRDFAKAIGRLAKTDGLDAGVLAEFAERVRPPVRPLADADTQKLQALMARRGQLIEMHTMESNRLAAVTDRTIRRSVETILRALQKEIERADGEMETAIQSSAVWKAKDELLQSIPGIGPVVSRTLLAQMPELGTLTREQAAALAGVAPMNRESGSWSGRRMIAGGRAVVRTMLYLGSHAARQGNAVLRAFADRLQAAGKAPKVIRIALARKLLIIANAVLRDNRPWQPQMA

SEQ ID NO: 414685 - protein, 344 aa, unidentified
MSKHSVQAGDIAGLLRRFEKARARTGRDFPIIVIQEAGLDGFWIHRVLQSEGIENHVVDAASILTSRRRRRAKTDRIDGETLVRTLMAFKRGEPRVCSMARAPTPQEEDRRRVCRERRTLVGERVKHVNRIKGLLFAQGVFGYEPLRKGRRERLEDLRTGDGRPLPVHLKAQIIRELDRLEVLLEQLKTVEAERNALLKPATGEVASPAALLAQLKGIGPETAAVLWTEGLFRQFDNRRHVAAYAGLAPTPWQSGSIDHEQGVSKAGNPRLRTTMVELAWLWLKNQPTSALSLWFHERVRRLGGRMRKTTIVALARKLLIALWRYTTAGVVIEGAVMKAAPATI

SEQ ID NO: 414686 - protein, 318 aa, unidentified
MEVIYPRCAALDVHKQTVVACARVAGHGAPTQEVRTFTTTTSGLLGLADWLESLGIEHVAMEATGVYWKPVWHVLEGHFELVLANAAHVKNVPGRKTDVNDAMWLADLLAHGLIRASFVPPVAVQELRTLTRTRKQFVRERASHVQRIEKVLEDANLKLSIVLSDILGKSGRAVLQAIIDGHDDPEHLVSCIGRVKARRAELLEALRGRVSAHHRFMLRLHLSHIDALDKAVADIEAEVGLGLEPFRQAAKLLSTMPGLSAVSANVVVAEIGIDMSRFKTPGHLLSWACMCPRNDESAGKRRSTRLRRGGKWLKTTLV

SEQ ID NO: 414687 - protein, 444 aa, unidentified
MSKKAYRATRVNDVDWDRLARAKEGLGITLGIDVGKRTLWPVCRWADGRFERPWRVKNPEEIPALLALIQRMSAGRKLAVAMESSGTYGDALRQALADAQIDLLRVSNKASHDYAEVFDGVPSQHDGKDAAVIAELAALGKAQPWAYQPASPWEQELTYWVESMVAHRQILTTWQGRLEGLLARHWPEATEVLKLSSGTLLRVLKHYGDPKALAADPGAAQRLARWGRTFLSPEKIGHLLAGARSSAGVRVGDWQRRQIQDYAEHALAARREAERAQRHMRRLAEGHAVLQAQGRVVGVPTACVLWASTGDPRKYHAAGAYRKAMGLNLVERSSGQYQGRLRISKRGSARARQWLDFAALRLVQNCGVRPWYEAKKARDEDDARRVIVAVMRKLAVALYHVGVRNEEFRPRRLFGRISGRRGRSADLRSGARDRREAAEVSARG

SEQ ID NO: 414688 - protein, 451 aa, unidentified
MKDLSMRIINARSAGIDVGSRFHVVAVDQRSENVRQFGVYSEDQQAMIKWLKLHQIQTIAMESTGNYWQTLFDALQRAGFEVQLVNGNQTKNVKGKKTDVLDCLWIQKLHSLGLLNGSFLPAAEIQSLRTYHRHRIHLIEQCSRYINKMQKAMRLMNIRLDVVLNDVMGQSGRLIIEAILAGERDSDKLASLANYRVKKSRGEIAKALIGNWRNDLLFELRRCLTLHDVYCQEIKECDHQLETAIKNLLPHSTTTTDFKYAKATKQRNKYMPEFDIERFSWQYYGVNLMEIQGVGNGTILSFLTQIGDRINQFPSSKHFCNWLRLAPNNKITGGKVISSRTPKGKNPLSLALRQAANAIGNQKEGELVNFFKRVAYRKDRASAITATARKLAVIIYNMVTKRENYKPSSPVPLSDKVKNKIIKNIRTRVEALELTKEQLNFLFQATSFSTA

SEQ ID NO: 414689 - protein, 415 aa, unidentified
MEKIYDKCCGIDVHKKLIVACLRSGRKNEIREFGTSTKEILSMTDWLTSEGCEMIAMESTGSYWKPIYNIIESCGLQAIIVNAQHMKAVPGRKTDVKDAEWIADLLQHGLLKASYIPDKAQRELRELVCYRKSLIEDEARELNRLQKMLEGGNIKLSGTVSDINGKSSRNMLEVILSGEVLDLKKLESMVSEKKVSKRLKAPKQKIVEDMDGVLTALQRKMIRELLKHIDELERHIKNLSDDIDRFMDSGEKAAVKAIEEVPGIGKVSAEAIISVIGTDMTRFPTDRHISKWAGLCPGNNESAKKRNSGRTTKGNKTLKTTLVLCAHAAVRVKESYFAAQFARISVHRGKKRAYVAVAHSMLIAIYHMLRYGATFKDLGSEYYNAFNRERKAEGCLKKLKQLGYAANIATIADLA

SEQ ID NO: 414690 - protein, 486 aa, unidentified
MNSIVLTANVQPNLDVNYIGMDVHSDNVVVCVRRNTINSSGQLVGKTIKTKKVVIKNSQEPLVELLSKYADGQQHIMTAESTFNWYWLADIAEDHGWNFCLADPCTVSQANIKAANDETDAEYLADRLRTGSLKSTSVLPRQLRGVRDLMRHRLRVMQEVSDKKVRLSNLYHNHCAHPMHGKLLAALQDAYDEINIDAVLESGICNNGSELIIGDLLTGLREAETRLAKIEAAVYGRIDEIDSYKAERMLLKTSMKGCGDVLSAIIVTEIGDISRFRTMGDFVSYCRLAPTSKLSNGKSKGQGNAKNGNAYLSWALTELATLMARFNEPIRRYLERKQEKTGLRVVAVRALAAKLARCVYQVLRKKESFDLGLAFGSKPTHGQMTAAAEAAQTPPEPALPPVPAVAGEHHCPAEESDAPIVVKEPVPVKSKRSTRKKAVSAASSEPAVAAEGRQTARKADRVKARCALTATPPSCAGTSCVKSRRE

SEQ ID NO: 414691 - protein, 352 aa, unidentified
MIIIGVDFHPEFQQIATVDSETGEFQEKRLAHREEAETFYRALASQKVRVGMEASGHARWFERLLSELHFELWIGDAAVIRTKRVRKQKTDRQDAQLILQLMLEDRFPKIWVPSGENRDLRQLLWHRHRMVQARTRIMNQLQAVALNEGLRCKKRLWRKHGRQQLEAFRLAPWASRRRRDLLELMDRLNPTIAELTQAIEQEVEKCPEAKRLMTHPGVGALTALSFVLIIGQAERFQCGKQIASYLGLVPLEDSSGNRRRLGHITKQGSSMMRFLLVEAAQVTVRSVPEWRSKYLHLVMRRGRKTAKVAMARKLAVRLYWMWRKGWDYAQWVKFGSHAGQPGNRDGVQSNTE

SEQ ID NO: 414692 - protein, 369 aa, unidentified
MGIDVSPQQLDLDEFPTKNPLRFAYTTAGIEALRKQLQQRTPCLIVIEATGGLEQLLVAERVAAKLSVVVINPRQTRDFAKSTGQLAKTDALDARILADFGFAIRPSIRTLPDENARELPEPFARRRQLIHRRTAELNRQQQTRNTKVKASVQTVLETLERQLKDIVRELDQRLKDSPVWHQTDELLRSTQGIGPQTARTLIAELPELGQLSRQKIALLVGVAPINRDSGSVRGKQTIGDGRAAIRSALYIATLSAIRFNSVIKAFYQQLVLRTKKQETLPDRRHAQTAHHPQRPDPKQTTRERHHTQYPAIPIPPPNINPHNSRSHLISNTVALPRRRAGEGTRHGDQRLATSSSMGDYALTHHPPRG

SEQ ID NO: 414693 - protein, 342 aa, unidentified
MQITTIGLDIAKNVFQVHGVDAQDNVVVTRQLRRARLLAFFGRLGPCLVGMEACATAHYWAREIAKLGHEVRLMPPGYVKPYVKRGKNDAADAAAICEAVTRPSMRFVPVKSAEQQGALMMHRTRDLLIRQRTQLINALRGHMAELGLVAAKGREGVGKLMAIVAQDNEERLPACARIAVQTIIGQLGALQHQIAVIERRIHAGHRASEASRRLEAIPGIGVITASALISTMTDPKVFRSGREFAAWVGLVPRQNSTGGKERLGGISKQGDRYLRRLLVVGALAVLKQARAHPDKHPWLTQLLARRPAKLVAVALANKMARTAWVVLARGESYRPPALPATA

SEQ ID NO: 414694 - protein, 321 aa, unidentified
MSHFYLGIDVAKAKLDCALRLPNGKFRAKVIPNSLEGFTALLTWLNAQKAESVQVCMEATGIYWEDVAQHLATNGLTVSVVNPAQIKAYGASRLTRSKTDTVDAKLIADFCAERKPSAWQPRCEAEVTLRALVLRLDALQTMRTQESNRLQVAREAVREDIQQHLNWLDTAIQQLIDAINDHIDRHPDLKQQRELLDSIPGIGERTSAIILAFYADTSRFANSRQAAAFAGLDPRQYESGSSIKGKPRLSKIGHSFLRKAMYMPAMVTLYKTAWGKQFRNRLSSAGKPNKLIIGAMMRKLIHVAFGVLKSAKPFDSAIHLA

SEQ ID NO: 414695 - protein, 344 aa, unidentified
MADLIKYVVGIDISKDSFDACIGSIDTEQNIVILPSKKFKNTKEGFVELLKWSKANQSQGSQIWFVMEATGVYFENLAYHLSKKKQQLNIVLPTKMKHFKQSTEVKTKTDSIDAKILTRYGLERQLEVWKEPIEEMKEIRDLCREHSGLTAMSTEIKNQMHAKKSSYKASTKTLKRLNDHLNFLEKQSTSIINEIKLKLDKMPEVKSKIEMIENSLKGVGFITLIKLVSETDGFAFISNGNQLSSYAGLDVVESQSGNVSGKTKISTKGNSNIRKALYMSSLSVIRHTQRYKDFYQGLLIRNKEKMVGVVAVMRKLLLLIYTLWKKNEPFIDNYNFKLKETIIL

SEQ ID NO: 414696 - protein, 455 aa, unidentified
MRIVYQRCCGMDVHKDSVTACVLLIDEYGEWRSEKRKFRTMTRDLREMAAWLASLDVEAIAMEATGVYWKPVWNILEAEKKFHLLLVNAHHIKQVPGRKTDQKDSEWIADLLQHGLLKASFVPPPVIRRLRDLTRMRVKIRQMLATFANRIQKVLEDANIKLGSVASDVLGISGRHMLHAIVEGQHDPKQLAELAQGRLREKLGELQLALEGHITDHHRFQLKFLLEFVQFGEKQLSQLEAEIRCLLAQVEPASVPPEDTVTAELAAPGAGAEAPATAQKSPLQTVVELWDTIPGVDELTATTLVAEMGANMDQFPSAGHAAKWAGICPGNKESAGKRLSGKTPKGSVWLRRALCQAAWSASRTKNTYLAAQYHHLIVRKGKKKTIVAVAHTMLTIAYYIAKRQCPYQELGGGYFDRLNADTMQHRLVKKLKSLGYEVTLTPITPIVPEPIAQSC

SEQ ID NO: 414697 - protein, 308 aa, unidentified
MIAQNYVGCDISKQWLDFFDETSGRLRRIDNQADAIAAYVAGLDPSRDFVVMEATGVHDRLLRHALAKAGVPFSRHNPAHTHHYSKSTRRRAKTDPLDARMLSDYGRRYNPEAEPAPSEEVERLQSLAGHRDHLVEMRAALKKHLAEAFDEAVIADLEETIAFLDTRIKAFESRIAEVIRQNQDTARDHALMVSVPGVSKVGALSLLALLPELGQRSPKAIAALAGLAPFDNKSGKLNRRSHIQGGRSRVRRALYMAALTAIRTCERFKTFYTALAARSGSKKLAIIAVARKLLVVLNAIMRDKTAFA

SEQ ID NO: 414698 - protein, 407 aa, unidentified
MKVYIGIDWSQNKHDLCFLNEAGAHLAQLIIPHTPAGFWKIDETRKKLGVPIDACQIGLETAHNILLDFLWDQGYSQVFVLHPKMVKASRGRFRSSAARDDTSDALLIADILRTDHGHLRAWQPDTSLTRQIRSRIKFTQFLTTEIVRLTNRQRAVLLRFYPVVLDLFSSLNTLITQHFIREYPAPQAAARLSRDEFENFLKRHRYTKKSLLPRILAQLHQPYLKAAADVIEACYPEAQSLARMLLEMISAKKKMLKELGHLFNQHPDHEVYASLPGTGAFLQPALLSKFGDDRARFPTADRVQALAGTSPVTISSGKRRRVQFRHSCDHEFRHIAQQWAKSSLRASIWANAYYTSIRPHCESESHAFRCLANRWLAILWRLWQDGQPYDETYHLRQRTLRSQPRII

SEQ ID NO: 414699 - protein, 327 aa, unidentified
MTQKMDVVGIDVSKATLDAYALTSQQARQFANDPAGHQGLVAWLQALGVGVAVFEASGGYDRAAAQSLRRAGLVAHVVDPKRVRHYAQAAGQLAKTDRIDARMIAAFGAAFLLGKPSGVAGGDDPARQDLAELVGTRQVLVDHRTSLQQQADAVTSRVAKKLLLATLKQLDRQIETSDRQIAAAIARHEPFAALARRLDTVPGLGPVSIAALIAWLPELGQLDRRQLAALVGVAPFADDSGKRTGQRHIQGGRMKLRNVLYMATVGAATRHNPVLQARYRRLLENGKKPKVALIACLRTLLTILNAMVAHQQDWNPTTLPATEPVAA

SEQ ID NO: 414700 - protein, 312 aa, unidentified
MTQDRVFVGIDVSKARLDVALTTGEVWSVSNDRAGWRALMDKLQTIRPEAVGLEPSGGYERDLVEALTQAGLAVRRVEAGRVRAFAGVLGLKAKTDLIDAMLIARFVQTLPGRTVEPDARAQALAELVDARRALCEEQVRVRNQAEQVRDPMLRRMAARRLNRMKADVVLLEKRLAATVAADPDLAERDRLMRSVPGVGPVLSWTLMAHLPELGRLSHKQIAALVGVAPYDRQSGTLKGRSTIRGGRAVVRNVAYMAALIGARHNPVLAAMKQRLAAKGKPGKVILVALINKLMTLLNAVVRDRSEWRIATR

SEQ ID NO: 414701 - protein, 342 aa, unidentified
MSISYVGVDLGSSNFHQVAISERGVITLNRELATSEANLVKAFSGMRGEIHVHLEAGELAPWASEIIRPLVTRVVCSHPQKNAWIARDRDKSDRVDAYKLASLLRLNEFQEVRYPQSQLRRDFKAVVQHYDELTQQQARLKTKIKARLRMQGVITRGQLVFSAGGRKAGLQAVKSVLVRTAIQQLYEMLDQSLESQAEARLLMLRAAQALPEINIMRTAPGMGPIGACRFSAYVHAPQRFSSTRKLWKYCRLSVSHRSSNGKPLRRPRIDRSGCGRLKDVSRKAFEAALRRKDNNGFQRAYYRALAQTHDATHARLTVQRKIVSTLRAMWINQTPYSDQMTP

SEQ ID NO: 414702 - protein, 323 aa, unidentified
MQTPSAVLNIGADVAKDAIVVACSEGSFPVREVANQRAAVLAFLKGLPAGSRIGVEATGSYHELFAEAAHQLGFAVFLLNPKDTRHYAKAVGLRGKTDRVDAELIARMIAHEHTKLHAWIPPTPHQREIDRLIKRRATLISLREAVAMSLHELDGFAAELKALRTRFNQLIARIDLRVRALIDASPERKQNFARLCTISGVGPVVGAALVNTLERVPAKSADAFVAFTGLDPRPDESGQHHGKRRLSKRGPAELRRLLYLAALSAVKTKPWRSLYEHYRARRLPSTAALVILARRIARTAWSIYTYKTEFDPARLTNPVLRMH

SEQ ID NO: 414703 - protein, 338 aa, unidentified
MIVIGVDVHKHSLTAVAVDKTGRPLAERTLRGAEDGLLAWAAALDSERLWAVEDCRHVTGALERELVAAGERLLRVPPKLTAPERRAGRVRGKSDSIDALAAARASLREPRLDRPRAGEERLRELKLLVVHRDDLVDERRRAQQRLRWHLHELDSTLAVPPAALDRAAQLERVSRWLRRREQTVLVRIARDLVGRCRSLTCAILELERELAAMTAQIAPALLELPGCGALTAAKLLAEIGPIERFQTDAQLARHGGVAPLEASSGRVRRHRLDRGGNRQLNCALHRIAVTQARVHPAARAYLERKQTEGKSRREAIRCLKRQLARVVFNTLKASPVLT

SEQ ID NO: 414704 - protein, 356 aa, unidentified
MSYEVKYIGMDVHKEAIVIAVLNEGGKLVMESVIETKASSILQFIHGLRGELHVTWEEGTWAAWLYDLLQPQVQHIVVCNPRRNALLKEGSKSDKVDARKLADLLRTGMLRAVYHGENGLRTLRELGRSYQTISKDLTRVMNRLKALYRGWGIPCAGTQVYAARAREEWLSKIAQAGVRRRAELLYQQLDGLQALRREVRPEFLAESRKHKAAKLLRQIPCIGPIRAARLIALMQTPHRFRSKRQLWTYSGLGIATHDSAQFRFVSGQLQRSKKPQQIRGLNRNHNHEMKEIFKSAATRASCGMGPFHDFYAGLLTKGMKPEMARLTLARKIAAITLTLWKKEERFDAKQLKTQAA

SEQ ID NO: 414705 - protein, 428 aa, unidentified
MADHLNNKPYGAWIAIDIAKDFNAVLSETKEGKRQHFRMANSASDHDRFLSYLRTLPSPCIIGFEATGNYHRALGHRLVTAGFEVCFISSVASARYREVMFNSWDKNDPKDAAVLLELLKQGITQRYVDPLIAGHHDLQELSKTYYQVTLSRTRLQHSILTHYLPLYFPEMGKWWNSTRSAWWINYLLHFPIPSAVIKYSQEEFCQIASPVVGRKVNKAAKLIELYETALHSIGLPVEEDSLACKTFQIQLRRYQEINDCRTQLELTAQAVLADNLDSAILQSVPGIGPINALTILAEGGDLRRFSHHRQFLKYCGFDLAKNQSGNYRGQEQISKRGNARLRLALWMSVNRAIQQPENSFQQKYLRYIKSAPQDKDLQRKARTAAAAKMARVVYGLVKSKQMYQGYYEKALPSGSIPLCRAVEAARTS

SEQ ID NO: 414706 - protein, 332 aa, unidentified
MEPTTIAIDLAKRVFQIHFVDTDGTIHSKALKRAQMLPFFANRPAARIVMEACGSAHHWARQLSRLGHEVRLIAAQFVRPFVKSNKNDAADAAAIWEASQRPGMRFVAVKSAHQQAMLALHRMRQQLVRIRVMQVNQLRGLLYEFGVVLPQGRRPSIQAAQAAIATLADQFPAMLIDSLRDQLSRLHLLDDQIQRIEQRILEWRRGDPACRRISEIPGVGPLTATAAVSVIGQAKTFRSGREFAAYLGLVPRQNSSGGKVRLGGISKRGDVYLRTLLIHGARSVISSSRHLPERLHALLTRRPTNERWAGCKTALLPAAFLQTTGFIQGKSV

SEQ ID NO: 414707 - protein, 331 aa, unidentified
MISFKIVVGIDVAKDTLAISIFDGTTHQIKELDYTKRIIRKELITPFKKVKESVVFVMESTGIYHTRLAYWLVAEGLNISVVNPLIIKRYSQMHLMRIKTDSADAKLIAEYGYEYQHKLSFFRTKDESQIAVDNLVKAIDDLLLQRTMSNNQYLALKKQANYSKEAIDSYKRHLKFIKDEIKRLEKTLQTLLENEFNQEYELLRSIPGIGLKVSAMIIAVFNGFENFESAKQACSFAGIAPSPYESGTSVKGRGSISKRGNTFARKMLYMGALVATIHNPLIKQQYQRLVESGKSKMVAMVAAANKLLRQAFGVLKSGKPFDLNYAKEYSV

SEQ ID NO: 414708 - protein, 350 aa, unidentified
MIIIGCDFHSRFQQIAMLDPQTGEVIERRLEHENGEARKFYAGLPTPARVGMEATGYAQWFERMLAEQGHQLWVGDAAEIRAAMVRKQKTDSRDACHILDLLLRDKFPRIWIPSTDERDVRQLLRHRYKLVCLRTSLKNQLHAMAMGHGICRKKKLWTAVGRKELQGLSLGPWASRRRQQLLDLLDQLEPVLEELDRAVIQEAEKRPAAVRLMTQPGVGSVTALAFVLTIGPVERFPKSRKLVSYLGLNPSEENSGGRQRLGAISKQGNSMLRFLLVEAAQTASIYDPELRRDYQRLKFRRGRGVAKVAIARKLAVRLYWKLREQPSQVPPAPMQGSPAVSVVGESLSCF

SEQ ID NO: 414709 - protein, 360 aa, unidentified
MAKARTLVGLDVHATKVVAAVLDVETGELAFFSMTADIGRVAGFCAGLPGPVRATYEAGPTGYGLARELAGRGVQCVVAAPSKIPRGSGERVKTDRRDAELLARLLLAGKLHPVRVPGPEEEALRDLIRAREAVRVDLMRCRHRLSKLLLRLGIRLEDGDAWTTRHRQWLSTITLAQPAAQTTLLDARGAVDALVHRREQLEREIIALLPGSPWSVQCSRLRCMRGLDTLSAVGLCAEVGDFASFRKPAQLMSYVGLVPSETSSGQQRRLGSITKTGSTHARRLLVEAAWHYRKRPRIGTTLTERQAGQPPEAIAIAWSAQRRLHRTWTRLEQRNKRRTLIAVAAARELAGFCWAICQIE

SEQ ID NO: 414710 - protein, 417 aa, unidentified
MPREIESKEVRDELYYERCCGIDVHKAMIVACFRDGQKQTIKGFGTQSRELRELADWLREGNCEMAAMESTGSYWKPVYNILEILGVEVIVVNAQHLKHVPGRKTDVKDAEWIAKQLSAGNLRGSYVPDREQRELREITRYRKSLTEERAREINRLSKMLEGANIKLTSVVKDVLGKSARKLLTTFMDGEDITEETIGSLIDKQLIGKAAMLVDAMDGVMSVVQRKLVKAVLEHIDEMARWIAELSKMIDDEMSKYDDCIKRLDEIGGIGEQSAQTILAEIGMDMSQFPTASHLAKWAGLCPGNNESAGKKKSGRASKGNATLKTTMIQCAQSAVLMKGTFFRAQYDRLVVRRGKNRAKVAVAHSMIIAIWYMLKYGTAYKDLGGDYYNRFNKEKKIAMHLKKLAELGYSPPIQATA

SEQ ID NO: 414711 - protein, 343 aa, unidentified
MEYYVGLDVSLKQTSICVVDQSGSVVREGVVDSDPEAISVYVRSKAPGAVRIGLETGPTSTWLWTELKRLGLPVICIDARHAKAVLKMQINKSDRNDAIGIARIMQTGWFKEVHVKDIDSHTVRALLASRALLVKIKRDLENHVRGLLKNFGLVIGRAKFNVFAVRAEELIEGRPELIAAIRPLLEARTAVEQQVSELDRKVMKLARHDAQVRRFMTVPGVGPITGLAFKATIDDPARFARSRSVGAYVGLTCRRHASGEVDWSGRISKCGDAMLRSYLFEAAGVLLTRVPKWSAVKAWGVKLVKRNGLRKAKVAVARKLAVILHRMWIDGTEFNWSKKEIAA

SEQ ID NO: 414712 - protein, 344 aa, unidentified
MNSMHYIGFDIHKKVISFCEKQVDGTVVHRGVIRAIRQDLNKWAIERKVPWIGAMEATLFTGWIYDFLLPYSQELKVAHPEMLKAITAAKKKNDAADAEKIADLLRCNLLPECYMAPTEHRNLRRILRYRNLLVREAAKMKTKTATLLMEVGAEYSKRRLHGRRYFQDLLSDLEYVPESALNLLQMSHDSVDFFSKMQKTLIHALRNEPQISKRVQLLMSIRGVGEVTALTWVLEIGDINRFSSIGQMVSYCGLCSAQKESAGKEIRGPISKKRNKHLQTVLVEAAKLAPQWNPQLAEIHERELKKGNRNRATLAVARKLVAYLQAVDKTKKIFVPKEVLKEAA

SEQ ID NO: 414713 - protein, 343 aa, unidentified
MQAVTTIGLDIAKSVFQVHGIDAAGQVVIRRQLKRRYVLAFFQKLPPCLIGIEACASSHHWSRELQALGHTVRLMPPAYVKPYVKRQKNDATDAEAICEAVTRANMRFVVTKTPEQQSGLVLHRARHLFIRQQTAVINAIRAHLAEFGIIAPVGRHGVEELLNVVADPNDKRVPEIARACLMAFGAQLRRLKEQILEFDRMIRAWHRSSETSRRLDDCPGVGPALATALVATVADPKSFRSGRNFSAWIGLVPKQHSSGGKNRLGSISKQGDCYLRGLFVAGALAVIRYAKIHGTKHRPWLTALLARRPTKVAAIALANKIARMAWAMMAKGERYKEPIALAA

SEQ ID NO: 414714 - protein, 590 aa, unidentified
MKLGPLRSWARCGPQRAGVVAGSGGHGGREGCKAGLACRLPSPLGFGPFEAVEKYGAGTPCWVPPAAAACACASFLLILGFCGRRAFPIRWGIPLQEVDRRMRVLYERVAGIDVHKDMIKVGIRSPGDKAWTRRSEVLEYRTFYGVLQQMAADLSKRGVTHVVMEASGVCTEPVYYALAERDFDEVAVISQAHARALKGHKTDARDCLRVAELFGCGLLRGSCIPAAGLKEVRDLARYRTRTVQARTSEIQRLARALESAGIKLGSVASELTGKSATAMIEALTGGERRGRVLAGLAIGRMRTAGKLSDLSRALTGRFTDHHALLCRLHPGRIAVFDTAVAGLEDTIALRAARWQREQDLLRTVPGFGDAVACAWLAEIGPAPHAWFGSHEKLASWVTLCPGSHISAGKRKHGRTGDAGTYIKPMLVNAAWAAVRTPGRLQAKYGRLVRRFGGEKNPAAKKKAITAIARTLLKIACQVLRSGKPYEDPGADFYTRRESPEQRQAYLMRQLQKLHPGCTVTWPGQSCGLRSSLSDLLRRLPARTPSARLPDGAGPARGVQGCRPPGAPAPERVAAPPDRPGPLPAGRPAAS

SEQ ID NO: 414715 - protein, 434 aa, unidentified
MEEVTDEPLYRDRVCGIDIGKAGMAATIRVPSDENPARRASETREFATTKRGVLALADWLRAWQVPAVVMEATSEYWKPVFYRLEAEGFECVLADARQVKNLPGRPKRDPSDSSWLAQCFERGAVTACFVATPEFRVIRLHTRYRRDLIEERTREKNRTEKLLESAAIKISSVVTDLHGVTGRDIMDHLIAGERSPKVLAQLARRRARRKIAELEEALEGAEFFTGYHAGLLKTMLARIDQIDAEITRLSEVIEQLLAPWEEQLAQAESMPGWGRRSAQDVLAETGPDMTRFPTGGHLVSWAGRAPLDHQSGKHQGRSRHKKGNKYVAAATGETAISAGKTGTREGARYRKLARSRGKAKACVALGNTQLKVYHKLLSNPGMRYHDLGPDYYQRRAQTRRKIAYHVRELEELGLEVTLCRPGPAQDDPEPTRAA

SEQ ID NO: 414716 - protein, 388 aa, unidentified
MLLDHPSDGPTAIRTQFGAIFVSLELSRSTWLVTSLSPGTGEKMSRHSVTAGDTTKLMKLFAELKRKAAARTGQTYPMITIQEAGLDGFWLHRVLQQEGIESHVVDPASIATPRRRRRAKTDRLDGETLLRSLLAHKRGEPRVCAMVVAPSPEEEDCRRLCRERRTLIAERIVHVNRIKGLLFAQGIFDYVPMRRNRRAELDVLRTGDGRVLPAHLKVQISRELDRLELLLEQIAAVEREQDALLAASRPAGGTDGSDPVAMLLELKSMGPNFAAVLWTEAFWRQFANRRQVASYAGLAATPWRSGGIEREQGVSKAGNPRLRTTMIQLAWLWIRHQPQSALTQWFNANSPRGRKRTIVALARKLLVALWRYVTAGVVIEGAVMKSAA

SEQ ID NO: 414717 - protein, 445 aa, unidentified
MSKFKVVIGSLKPFAMLNPLLLLLKPALGTLGIKPVFTMIGLKEHSHIITKSIISIGGNAMQSILVVGIDVAKEKLDVAVFNGKKFVTRVYANTKEGIEKLIKDVEERDAEEVHFVMEATGSYNTKVLYALSNKGYPVYVLNPIVSKRYSEEQLRRTTTDKEVSKLLASYGYSSILSFLSNIPSESYNTLLSFKFNPSNKDNLKLKLLIKTLESLLRTKTRILNQIEALNQYPEGYGEEAIESLKKVLEEIEKEIKNIQDEIDAIINNEEESKDLYNRLTTIPGIGKRNASAIIAYFGSFSTFESSKQVASYIGLTPSIRESGKSVKKEGYSISRIGNPYLRQILFMASLSASKHNHQCSILYNRLLKEGKDKKLILIAVAHKLLRQAFAVAKYRRSYDPNYGLGNIEKEDISTPQNTEIDGKICTNFSYDLPFLQDKPLRIADY

SEQ ID NO: 414718 - protein, 342 aa, unidentified
MAIVAGFDVHRAQITFDALETATGEVMRGRIDATPAAVARWVARFGGRRIDVAVAACTGWLFVCDALAAAGAVPHLAEPVETRALRGRKRRAKTDREDARWLRELLADGRLPEAWIPPEHVRQWRSRARLRHTLLNERTQWFQRIRATLLHHGIDGTPENLRTGQGRALLQRLELPADARERIEIALAMIDAIDAQMAPLERELRQLARRQTGCRALMGLYGMGELTSLVTLCELGDVGRLTASRKAVRMAGIDIGVHRSDRRSRVGKLNRQGSPHLRWALYEAALAACRPSSPDHADYLALKARGLSHTRASLTIARKLARRSFHVLRQLGPAALEPVPTR

SEQ ID NO: 414719 - protein, 344 aa, unidentified
MTYYAGLDVSLRTVNICIINDQGDFVAEAKLASDVQDIIAYLDELDLAIESVALEAGTLCQYLTYGLQSAGFEVICMEARQVKGALSAMRNKTDKHDARGIAQILRSGWYSRVHVKSMQSHHIRLLLSSRKAVLSKCVDLENEVRGLFKIFGIKLPPKLGHGAFDPAVRDIIEIDETFSHALLPLLDARLVLYRTFRVLDNRTRHMAQDDPVCVRLMTVPGVGFITALTFKAGVDDPTRFKRSRTVGAHFGLTPRRFQSGEMDIEGHISKCGDADVRSTLYTAANALLTRSARWSPLKAWGMKLAKTRGHRRAVVALARKLAVILHRIWIDDTQFRWGTEGVRS

SEQ ID NO: 414720 - protein, 375 aa, unidentified
MKRLATTSTVVAEKPHNSNAVRAAREWRPAMDHVGIDVHKKESQVCILTPTGEITEVRIATTRERFREVLGGRPHAKVLIETSTKSEWVARFLEELGHELIVADPGFAPMYGMRTRRVKTDLRDARALAEACRSGTYRLAHRRSEQQRRVTSRLVVREALVRSRTSFISVVRALLRKDGLRVPTGSAEHFPERVAKMGLPGWLQSEVAPLLAAIMRVNEQLAWCDAAVEHATKDDPAVALLRTAPRIGPITAASFRAAIDNVERFHGPHQVAAYLGLVPREKSSGEKQHRGRITRAGDSRTRHLLVQAAQRLRYSRTPETFGLRVWAKRIEARRGKAVATVALARKLAGILFAMLRDRAPFDPIKQAGEPAVMAA

SEQ ID NO: 414721 - protein, 362 aa, unidentified
MRIIGCDLHARQQTLAMLDTGTGEVVNQTLAHEGESVREFYSRLSRPVRVGIEATGSMKWFLNLMEELGIDCEVGHPATIRAAEPRRQKHDQRDAELLLKLLVENRFPSIWQPSKELLDLRALLLHRHQWVRLRTRIQNALQAIALANGLRRGSSLWSESGQAAIASLPLATHTAQRPSELQSMYARFEAEIEQLNERVLERAGERPTAGLLMTHPGVGPITALATDVFLGDPRRFRDGKALASYIGIIPRENSSGGRQRLGGLTKQGNPLLRFLWCEAAVHAVRRDPELRQFYRRKLVQKGLGKARVAAARKLGIRLWIMLRDQIDYQEFCRRGQMQQKSGAACAGMPGPRYGVKNHRPID

SEQ ID NO: 414722 - protein, 319 aa, unidentified
MRKRTIEFDQVIERGCGLDVHRDTVVATVMGKGIQTETRTFGTTTSSLKELGEWLESLQVTDGAMESTGIYWKPVLHVLREYPLNLLVVNARHIKNVPGRKTDKVDSQWICKLLISGLLKGSFIPPENIQALRDLHRYKKKLVGIVVSEKNRIIRVLEDANIKLSSVVSDTSGVTATNLINGLIEGRKDLEKLVSECYHRKLQSSPEEIVEAINGRLTPHLMFLLKSMQKHIQSVEEQIAEIDAEIEKHIKDFEKEIELLQTIPGVGKEGAIGIVAEIGVDMSVFPSEHHLASHSGMCPGNNESAGKKKVQEHDKGTNI

SEQ ID NO: 414723 - protein, 410 aa, unidentified
MSKLYVGIDVSLRKNNVHCMAAGGDTLKKFKVPNTFDGALALVDNIVELSTRHCLQEIILGMEATSNYSYHLAQLFRSSEKLAPLSPKIHVLNAKVVHNFKKSYSDLPKNDDLDAWVIADKLRFGRLPQEVFMDERFLALQRLTRNRFHLVNMIKREKTYFLNSLFLKFSSLRQEKIFSNNFGATAVAVVEEFLSPDEIAAMPLEELVSFLQQKSKNHLVDADGIAKALQKAARSSYRLNKSLADPVNACLASSISVIKFLQSEVKKLDKLIEEHMKAIPQTLTSLKGIGPVYSAGILAEVGDVKRFKNHKALAKFSGLVWNEQQSGEWKAEDIKRVRSGNKYLRYYLVEAANLIRLHDREYADFYKAKYDDAHTHKHKRALVLTARKLVRLVYALLRTNQLYTPRKRGG

SEQ ID NO: 414724 - protein, 468 aa, unidentified
MGKYGMRDAEAKTVLSGMDAMRPDTAGIDVGSTEMWVAVPPDAQGRSQARLFGAFTEDIRAMSAWLKSLGVKHIAMESTGVYWIPPYEILQGDGFEVALVNAHHVKCVPGRPKTDKHDSQWLRRLHACGLLNPSFRPSEDVCRLRAVKRCGESFVRDASTQVRRMQKSLHQMNVQLDKVITDITGATGRRIIEAVIAGERDLGLLADRRDPQIKASRETIMKALDGNYRPEHVFSLRHAYDAYLFSSGKAAECDKEAESILKSMADKLAADTAVAGLSANPVPRPRPTTGKAGKKRPKAAEDATKAQLRQLLGVDITAVPGIGVDTALTLVAELGTDFSKWPTAGHLASYLGLCPDLRISNSIVKGHKTRKVPTRAPRALRMAAQSLHHSGTALGAFLRRIKTKLGGRKAITATAHKLAVIIYKMVTTGKEFVELGGDYYDRLHRTRAIKSLKRRAESMGFELVEKVA

SEQ ID NO: 414725 - protein, 402 aa, unidentified
MVSVGIDVSKDTSTVCILKPDQEVIASPYEINHIETELAKLILRIKSFEGEVKIVMEATGAYHLPVLNRLKEEGLFVSVINPLVMKKYASIALRKGKTDKIDSTKIANYGLDNWFRLVDFEALNEAYEELRQLGRHYSHYIKMRIQSKLTLDNLLQRTMPGIKTLLRGKHSENPTKDKLSDFAEEYGHYDNITNKSEEEFVISYAGWAKRKGYHRSEDKAKKIYAMAKDGIPTLSSNNPSTKMLMSEAVKVLQEINKTLKVILTQMQELANTLPEYETVRSMNGVGSILAPRLIAEIGDIRRFNNGSSLIAYAGIDSPPYESGSFVGTKRNISKRGSSLLRKTGYEVMKCIKATKPVEDNAVYLFMLKKEAEGKAKNVAKIAGLNKFLRIYYARVKEVYLAQ

SEQ ID NO: 414726 - protein, 409 aa, unidentified
MERVSERVAGLDVHKKTVVACVRVPGPAGERRQEVQTFGTTAAALLTLRDWLGAHGVTQVAMESTGVYWKPVYYVLEELCTCLLVNPAHVSKVPGRKTDVRDCEWLAQLLEHGLLRGSFVPPVAIRELRDLTRYRAVLVQDRTREANRLHKVLTDAGIQLASVATNVLGKSGRAMLTALIEGTTDPAVLADLAQGKLRRKLPALREALVGRFRKHHALLVSHLLSHLDYLDEALEDLTAQIEEALRPFASEAARLDAIPGVGARTVASLIAELGVDMRQFPTARHAASWVGLCPGTHESAGKRRAVRTGKGNRWLRAALIEAALAATNVRDSALAGYYHRLRPRCGHKKAIVAVAHKILTTAYVLLAEGRTYQELGAGYYDARSKDRDVRRALHALERHGYRVSLEPAA

SEQ ID NO: 414727 - protein, 382 aa, unidentified
MTKIIRIGIDTSKSVFVLHGVDAAEQPVLRRKLRRSQVLEFFRKLEPTKIGMEACGGAHYWARELQALGHEVVLLPPQYVKPYVKRNKNDAADAEAICEAMSRPTMRFVPVKTSEQQAALMLAGTRGGLIGRRTQLSNTIRGYAAEFGLTTAKGLDKIEPLLARIAASAELPTLAKELFAAYGREYAQLQRQILKIEARLMAWHKDNELSRRLVEVPSIGPIGATLLAMKVTNPHIFRCGRDFSAWIGLTPKDHSTAGKTRLGVITRAGDEALRSVLVAGAMAVIQQAQKGRGYAPPWLVELLKRKPPKLAAVALANKMARVAWKLMVSGERYNPARTAAPSAAREGRGAALRGGSAPRPSLASRITPLGGGCHDRGVTSSA

SEQ ID NO: 414728 - protein, 354 aa, unidentified
MPSKVTKPYTSAQPKLMSIGIDIGKDVFHIVGFDHNGKVVLRRKFRRLALDAVFEKLPRCIVDMEACLSAHFVSRRLRALGFEPRIIPAIYVKPFLKGQKNDYNDAEAIAEAALRPNLKLVKEKTQEQLDLQACHRVRSRLVSRRTATINQIRAFLIEHGIAIRTGANSLRRSLPEILLQRADELSPRMRVLIEELHGDWLRLDARIEALNEEIEEISRQEKSCQNLMTIPGVGPLISTATVAAIGNGEAFERGRDFGAWLGLVPRQYSTGGRPILGRISKRGSKYLRTLFIQAANVILMRPQNWPRYSFGGWLVTAATRLHRNKLATALANKLARIAWSVLRYNERFDDAQTV

SEQ ID NO: 414729 - protein, 282 aa, unidentified
MRFYTKTHKHYCGIDLHARKMFLCILNGSGEVLLHRNIATSPDSFLKAVAPFRDDLVVGVECMFAWYWLADLCSKEGIEFILGHALFMKAVHGGKAKNDKIDSHKIAVLLRGGSFPVAYVYPPKMRSTRDLLRRRNHLVRKRAELLAHIQNTATQYNLPEINVNLSHECNRKEVDKHFPDTQVRKIVQVDLAMIDAYDDVLKALEWDIEKTARVHDKHALMLLRSIQGVGRILSLVILYEIHCIERFDTVQDFASYAGWSNASTNREARRRGPVAPRLATPI

SEQ ID NO: 414730 - protein, 357 aa, unidentified
MNKSKQLDFSGQDIFVGLDTHLKNWRVSIIVGESPYKTFSQDPRPETLRNYLIKNFPKANYYSAYEASFSGFKIHRDLVNLGIKNMVVNPADIPTTDKERKQKEDSRDSRKIARQLSQKDLTAIYIPEIEIEGDRSLVRYRKTLTKEIARTKHRTKSQIYYFGIEIPIQFSGKKYWSKRFTSWLQEIELPTESAKMALTGHLDMAEMLRKKQYSINKEIRKLSEKKVYKENYTLLISVPGVGCLTAMIILTEIGDIKRFKNLDTICSFIGLVPMTNSTGENEKTGDITVRRNKILRTAIIEASWSAIRHDPALMLAYQKLIKRMEPQKAIIRIAKKLVNRILHVLKNKESYVHAVVK

SEQ ID NO: 414731 - protein, 310 aa, unidentified
MTTVGIDVSKQRLDVAVRPSGERFSMPNDDNGRLDLLKRLKKLRPERIVLEPTGGYETYVVQQLASAKLPVVVVNARQIRQFAQATGKLAKTDQIDADVIAHFGEAVKPEIRPLPDDAHRQLEALVSRRRQLVDMRAGEAKRRQTAPAVVHPNIDDVIAFLSKQIDDIDGDLHRLIRQTPAWREADDLLQSVPGVGPVLSATLTALVPELGKLNRKQIAALIGVAPLNNDSGTRVGKRTTWGGRAPVRAVLYMAASVARRFNRTIAAVYDRLVGRGKLPRVAIVACMRKLLVILNAISRDRKPWTPQLAG

SEQ ID NO: 414732 - protein, 413 aa, unidentified
MKYFAGLDWGGTNHAVCVVDQTGRVVLRTEVRHNAPGLESLRQQLKRIAPATAIPIAIERPSGLIVDALLDYGHPIISIHPNAVKAFRPRYSAAGGKHDLGDAYLLADLLRTDGHRLRPLAPASDAIKSLRALVRTRDDLVTQRVALTNQLRALLDSFWPGPAAMFHQIESAIALAFLQRYSTPSSAARLGEKRLSSFLKERGYSGRCPAAELLTRLRIAPIGKPGKLEEHAKGELACALARIMGTLQEEIAQLTSRIEDEVMRHEDGALIMSLPRTGRLNAAQILTELGDVRERLVDAEQLAAEAGVAPVTRQSGKSRTVLFRWACNHRLRRAVTKWADNSRHTSPWAAHIYATARGRGCRHPHAVRILARAWIRVLWKVWITRMPYDSDKHSCAKCFLRSEKSGDALLKTS

SEQ ID NO: 414733 - protein, 445 aa, unidentified
MAPRSSRKIVAKKISPMFNPDTAGIDIGATEVYVAVPSERSEQPVRCFGTFTEDLLTLAQWLKSCGIRSIAMESTGVYWIPVFQILDDHGFEVCLVNARHVKNVPGRKSDVSDCQWLQYLHSVGLLRGSFRPPQQVCAVRSVVRHRDSMIHMASAHVQHMQKALTQMNLQLHHVISDITGETGLAIIDAILSGERDPETLAKLRNKRIKASKATVAKSLVGDYRAEHLFTLQQSLQSYRHYQGLIAECDIKVKMLLSAFESQVDVVKNPLPPPSKKLRYLTDLRTELYRLSGVDLTEIPGIQATTAHTLFAEIGPDVSKFPSAKHFASWLGLCPDNRISGGRILSVQTRPVANRAAGALRLAANSLYQSQTGLGNFFRRMRAKLGAPSAITATAHKLAIIIYHMLQTRTPYDETRYARHEEQHRRRMEVKQKHQAKAMGFALVPA

SEQ ID NO: 414734 - protein, 338 aa, unidentified
MKVYAGIDLHSTNNYIGIINDKDQRLFKKRMPNDLDAVLSALEPFQQDIHGIVVESTYNWYWLVDGLQDHGYHVHLANPSAIKQYEGLKHTDDQWDSFWLAHMLRLNILPKGYVYPKEERPVRDLLRRRTMLVRQRVTHILSLQSMITRNLGINLPGNAIKRLTGDEAEQMFKDPCLVLAARNSISIMKFLKEKIRLIEQSVLSRVKLRKEFAPLLTLPGIGTILGLTIMLEVDNINRFPKVGNYSSYCRCVKSERLSNGKKKGTGNTKNGNKYLSWAYVEAAHHAKRAYPYAKRFYQRKEAKTNGIVAIKALSNKLCRASYYVMRNRVPFDQNKSFR

SEQ ID NO: 414735 - protein, 328 aa, unidentified
MSPNTIKIMQPVTVTVYAGVDVAKASLQVHLQGRQTEFPNQPAGLVKLCQQLKTVPHVHVVCEATGGYERLLVQAMHQAQIPVSVTNPAQVRAGAQAQGQRAKTDRIDAALLTDYGQRYQPEPTPPTTATQDQLVALTQWLTQLIQAQALAKTQTEHHEAAFVCRQHAKLMAHYHCQIAAVEKQIRALVAQDAVLQQRVDCLDQIKGVGPRTAWLVLAHLPELGQINRQEVAALAGLAPWTRESGTMKGKSCIGGGRPEVRLALYMPALSAARCNPVLQPFYQRLRAKEKPAKVALTAVMRKLLVYMNHQLKALAATQRASKTENPKS

SEQ ID NO: 414736 - protein, 456 aa, unidentified
METYYLGIDVSKGYGDFVILEKTKQRIEDSFQLDDTFNGHCLLYERLVEFFDNHPDCLLYAGVESTGGYENNWYNSLVKFQGTLNIQTARLNPLGVNANSRADLKRNVTDQISAQNIAEFMIAHSEKVTYQQQDSLANLRRQWSFIKLLTKQSTQLLNQLESLLYIANPELLAYCQDRTPKWVLKILGKYPTASNLSRAKAKTLASIPYVSIKRAEKLIAEAKKSIASATDKITGQLITNTVKQIIHLKQSIEAQTKMLAEQCRFEEIDLLKTFIGISDYSAIGLILEIQSVKRFASVKRLASFFGLHPVFKLSGDGSGGFHMSKKGRKEPRRILFMVTIAAIKHNPLIGSIYAERLEKGMSRMAAIGYCMHKILRIIYGMLKTKTAFDPEIDRANRSKNIQRQKKTRKDKSRRYQDYDSGAPVSRRQRKKRRERKESQSDSITENGIIASAPEYT

SEQ ID NO: 414737 - protein, 466 aa, unidentified
MKPFYLGIDVSKGYSDFMIVNAKKQPAIQGFQLDDTFDGHRCLYNILSRFLADHSESTLFAAVESTGGYEDNWYNSLIQFQGSLNIQTARLNPYGVAHNSKADLKKNTTDKISAQSIAEYLVAHPEKVVYQKDDQHAGLRKQWGFIKMLNKQCTQFLNQLNTLLYTASPELLHYCQNGMPDWVLKLLVKYPGAAKLKKARVKTVAKIPYVSQKRAQQVIAEAKRSVASTTDPVTQQIIMATARQILHLKKTIADQTKQMIEQCRLPEIKLLKSFPGISDSSAIGLAIEIQTVKRFAEAKKLASFFGVHPVYKVSGDGIGGIKMSKQGRKDPRQILYMITLSAIQHNPLIKQIYEEHQKQGKHNMAIMGICMHKILRIVYGMLKHNKPFNPQIDIANRQRSAQTKNERPENVTDRRFQDYDAEAPVTGRQRKKRLERDRSNSVTDTKFGITATVPLGNIITDILPQL

SEQ ID NO: 414738 - protein, 409 aa, unidentified
MNYLTDNAFTAYVGIDWADSKHDICVQAADDQQRELDCIPHQVDQIEEWAQSLHKRFGGVIAVALELSKGPIVYALQKYDFFVIFPVNPSTLAKYREAFTPSRAKDDPTDAELALDLLVRHPDRFKPLKPQSVEIRTLACLVEQRRNLVNDKIRITNRLRSALKQYYPQMLEWFDQLDTVLVCDFIARWPTLKQVKRARKNTLEKFFHEHNMRFSHVLDARLKSIKAATPLTLDAAVVTPYSLQALVLTDQLRVSLQAIRRYDDEIAELAPKHPDYGLFSALPGAGPSLAPRLLVAFGEQRERFASAAALQKYAGIAPVTERSGKKHWVHWRWQCPTFLRQTFVEWAAQTINKSFWAGAYYRQQRDKGCTYQAAVRALAFKWIRILYRCWQTKTPYNESVYLKALKRRG

SEQ ID NO: 414739 - protein, 450 aa, unidentified
MQALKTIQPNAAGIDLGSKEHWVAGPPHEDQTPNVERFGTTTPELNRLADWLSEQGVETVAMESTGVYWIPLFEILDSRGFEVVLANARQVKHVPGRKTDLLDCQWLQLLHACGLLRGSFRPSDDICQLRALIRERNTMVDQRSDWIRRMQKCLDQMNIRVHHAVSDITGATGMAIIRAIVAGERDPKALARMRDRRCRKTEAQIAEELTGNWRREHLFNLRQALKMYDQLCAVIEDYDFEILNYLKMLQPDGSDDTSAPPPSSKSKARNIAKKGQEPLRQGLYRFSGLDMASIDGIGVDTAAVVISELGLDYSKFPDEGHFISYLRLAPNLSISAGKKVPNNSKATTCTRVSNALKTAAIALRNSKSALGAFYRRIAWRKGASVAVFATARKLAQIIYRLVCYGQAYVDIGAETYENRFKKRRLYHYTQTLKNMGYTVQPLTTAEAAAG

SEQ ID NO: 414740 - protein, 385 aa, unidentified
MRPFGEVVISPFEVRHTDSELSELARRLKSLDGETRVVMEATGNYHAPVAWLLHDAGLYVSVVNAKLVHGYGNNDLRHVKTDRKDAVKLANYGLDRWLTLPRYVPEEDTRLLLKSCYRQYRQYSKVQTVLKNNLISLLDTTFPNANRLFNSPVRADGSEKWVDFVAEFWHCGCVCERSEKAFLNKYQRWCRKNGYNFSEEKALYIYSEAGGHIGVMPKSETTKLLVEQAVSQLRATSAALATLRREMQSLASQLPEYPVVMEMFGVGPALGPQLMAEIGDVRRFYSKKALVAYAGIDAPPNDSGDVTGRHKNMSKVGASSLRRTLFLVMSVYLQTAPLDEPVYQFMDRKRAEGKPYRVYMMASANKFLRIYYATVKTYLDTLEQI

SEQ ID NO: 414741 - protein, 321 aa, unidentified
MQTLSKALDIGADVGKDEIVFASAEGGFSRRKVSNQRTELKAFLKTLPAGSRIGMESTGIYHELLAEMAHKLGFVVFVLNPKDVRHYAMGVGLRGKTDRVDADLIARMIAREHEKLNAWIPPTPEQRQIDRLLKRRAKVNGIRVALNLSLKGVTGLGADLKAINERLDRLVKRIDDKVKALIEADADRKQHSARLSKIAGLGGIVVRSSVLNTLERIPLRSADAFIAFTGLDPRPDESGHHIGRRRLSKRGPSELRRLLYLAAMAAVKTKLWKPIYQHYRAKGLSTTAALVVIARRIARTAWSVYTHKTDFDPKRVALSLT

SEQ ID NO: 414742 - protein, 339 aa, unidentified
MKEYKLIAIDLAKNVFQACCLSKKRQVMYNKSISRHKLKELLINTSPCVVALEACGSAHYWVWFAEEHGHKVMLIPPHFVTPYRQGHKTDVNDALAIAHAALAPNIRLVPPKDPARLEFQAIHRVRSGLIGDRTRVSNQIRGLLYEFGVVIPKGFAALKKDIPGILEDAENGLSIPFRQLIHGLITDFDQINLRIKELDQMITDKIKALPMCKELMKLEGVGPIGASLLYITLGNGSVFKNGRCASAYVGVTPKQHSSGGKVTLIGIGHSGQGKLRSVLIQGALSYVKASLKKTDSKSRWIQGLVARGNMKKASVALANKTVRTAWALLSSNETYQPAA

SEQ ID NO: 414743 - protein, 379 aa, unidentified
MDGGGLVTARFSFTHDAAAIRSMVSRLCSAGVAGVAIERGDGPVVEELLDAGLAVFVVPSRQIKGLRTRYGSAGNKDDRFDAYVLADTLRTDGHRWKPLRPDTGPTRALRALCRSRKDLVETRVQVLGQLRANLELAFPGAVGLFTKPSSAISLAFLRRFPTAGKAAWLSPRRLACWLSSAGYTGGVSAGILHGRLTGAAPGLSGAEGEARGQITLAFVVMTAALNEQISVLDAEIGRLFAAHPDQHIFSSLPRSGMIRAATLLAEIGDCRQRFPTDDALAALAGACPSTRQSGKRSQAVFRWSCSKKLRAAVMDFANGSRMGDPWAASVYAAAIGRGCRHPHAIRILARAWLRIIWRCWQDGAAFDPALHRGRQPAAA

SEQ ID NO: 414744 - protein, 338 aa, unidentified
MTLYAGIDLHSNNNVVVVQDEEDNVVGRRRLANDLRTVSAWLEPYRDDLAGVVVESTYNWYWLVDGLMEQGYAVHLANTVAIQQYDGLKYRDDASDARWLAKLLRLGQLPEGYIYPRTERAIRDLLRKRSQLVRQATMNLLSIQNLFARNRGEGINANRVKQLTPETVDAAFEEPNVALAVKSNVKVLDCLLEQISVLEAAVHDQVKLRQGYRKLLTVPGIGKILAQTIMLETGDISRFREVGHYVSYGRLVGSSYLTNGKRKGSGNTKNGNAFLCWAFIEAANFAIRYSETIRRYYQRKQARTKRIVALKAVAHKLARACYHMIREDVAFEMSRAFG

SEQ ID NO: 414745 - protein, 340 aa, unidentified
MGYYVGLDVSLKNTHICVLDGERRVVWRGVSDTQIAMIAERLARWSKQIVLVGLETGSLTPWLYHGLSDLGLPMVCMDARRASDALKARAEKTDKADARALAEMLASGWYSAVHVKSLESHQLKALLGARDQLVRVKRQLYGQVRGLLRPFGIKISQRAGAKSFDEAVRMACNKEDVLYIAVGALLDTLANVASQIAVLDKQVRTLAQKKKACWHLMSVPGVGPITALAFTAAIEDPHRFGSNRDVGAYLGLTPKRYQSGERDVSLSISRQGDEMVRHYLYEAANCLLTTVTGASALKSWGLKMVKRCGAKRARTAVARKLAVLLLRLWKQESHFEAQPA

SEQ ID NO: 414746 - protein, 397 aa, unidentified
MIAVGIDVSKSKSTVAILNGDGSIRAKPFDVHHVADELQALVDYIKRTSEPPTILMEPTSHYHYPLLKAFQEAELPVCLINPYQMKKYGDTELRKAKTDKRDSLRIAQYALEKSYSLIPYTPQDQKYENLRFLSRQYSQRISTLTVAKVQLLSLLDETMPGITTILPLKSRDPNNCVLLRFIKRFKSFDVIRKMGKSRFLDSYQVLVKKTKDYYAGAKGLAIYELALNSITTRGENPLSSMVQDQCVDLVSTSQKAADEINLQMRIIAETIPEYKVLRSMAGVGDRLGPIILGEIGDVRRFHSGKALNAYAGNDAPPYQSGQFESRNRHISKRGNPALRKACFEVMQALKLTKPQDDPVYLFLLKKEQEGKPYNVAKMAAVNKFLRIYYARAMELYK

SEQ ID NO: 414747 - protein, 316 aa, unidentified
MQSNGDEVLVGIDVSKAWIDVCQSGTARAERVANTPDALAAWVARARPTLVAMEPTGGYERALCSALAEAGVRYVKIHPNTILAFRKARGLRAKTDRIDAMLIAQYLADAKGRADLPTTFRADERLRALAARRRQLVEARQAERCRADLASDPIVRESLAIVTGALTQSLDALEEAIERHIAGDAELDRLARALRAVRGVGPVVSATLVADLPELGHLSGKQIAALVGLAPHTHESGKKSRRAKTGHGRPLVRSALFNAARAAIRHPSALRDFYNRIVGNNNRPGKVALTAVMRKILIIANAVARDHFKATACQSP

SEQ ID NO: 414748 - protein, 318 aa, unidentified
MHTHDAFCHVGIDVAKPHLDVAFSESSSAKRFGNEPHGFEKLLAQLPRPDQCQIVLESTGVYHAAIVEFLVERGYAVAVVLPSRVRDFARGMGWLAKTDAIDARLLVRYSQHAEDLVFSEQLPEHQREMHALVTRRRQLIDLVTQEKNHLEAARRPSMRRDIQQVIAQLEQRIKTLDEQIAKLCQADETSRRKRELLTSVPGVGNVTAVTLIAELPELGQINREEIAALVGVAPINDDSSLTSKRRSIRGGRTSVRCALYMAAFNAIRHNPIIRAFAQRLQQQGKPFKVRLTACMRKLLTILNTMVKTNTTWKFAEHA

SEQ ID NO: 414749 - protein, 357 aa, unidentified
MLSSNVKYIGLDVHKEAIAIAVLNGAGKLVMESIVETKSSTVLDFLHGLRGELHVTLEEGTWAAWLYDVLKPHVREIVVCNPRRNALLKEGSKSDKIDARKLAELLRAGLLRAVYHGENGLQTLRELARSYLTISKDLKRIKNRLKALFHSWGICCAGKQVYAARHREQWLSKLAQVGVRRRADLFYQQMDGLLVLRNTVRGELLTESRKHQAVKILRQVPSIGPLRAALLLALMQTPHRFRSKRQLWTYSGLAVVTHDSAQHRYVDGQLQRSKKPQQIRGLNQNHNHAMKEIFKSAALNASRCAGPLQDFYNNLLAKSMKPDMARLTLARKIAAITLALWKKGGSFDAEHLKSQAA

SEQ ID NO: 414750 - protein, 433 aa, unidentified
MQDIEDEPLFAERVAGIDIAKAGIEVTIRVPSDTRPGRRQQETRSFGTTRRQLLALADWLRSWGVIKTGMEATGDYWKPVYFVLESQGLDCELYHAAQVKALPGRPKTDRADSVWLARITERGSLPSSFVPPEPIRRLRTHTRYRRHLTQARTAEKQRVEKLLEDGHLKLSSVISDIHGVSGRAMLEAIIAGEHNPKVLAQLARGTMRGKIARLEEALDCSFLTEEHAAVLRMMLSLIDSYTARIDELTAKIEVLTEPWPHQIEQLDAVHGTGRISAQDVIAEIGTDMTVFPTASHLVSWARWCPQAAQPGGKRKGANASGRGNPYLSAALGEISISAGRTQSFLGAKYRRLVKRMPKKKALAATGNSVLTIFHALLSDPAATYQDLGPGYYEQRMNTRRQARNHVRGLERLGYQVTIQAINPDTGELLTATA

SEQ ID NO: 414751 - protein, 353 aa, unidentified
MAAPGDKPVYQLYSGVDIAARTFTTSTCRREENPSKASSFEQTPAGFEGLKKLLLTKGTDPASILVVMEATGTYWIELATYLEAAGFGVSVVNPKQAHAFAGALGLRPKNDLLDAQMLCRMAATLQPARWTPPPQIYRELYQRLTHRASLMEARQQFRNQLHALSVAQPVEAVTLSLEKLIETLSQSIKQIEKEIKEILKAESAWATSISLLQTITGIGWLSACWLVVVTLNFTSCATAEALAHYAGLAPVERFSGTSVRPRPTIGHGGHSQLRAVLYMAAGSAMRFNPVIQAYTERLRTKQGKAYKVARCAAARKLVHLGFAIVKSGKAFDPHYVNGPKAVAAKAEPVSAAS

SEQ ID NO: 414752 - protein, 380 aa, unidentified
MEKDIRFVGLDVHAETIAAAVVDPGSPVESLGTIVHRPESVRKLMRRLGHPDQLRVCYEAGPTGYGLYWLLTGMGIHCDVVAPTLIPTKSGDRVKTDRRDAEKLAKYYQNGDLTPVWVPDAEHEALRDLVRAREAAKSDQTRARHRLSKFLLRRNRRAPKGVRRWTKKHLTWVRREVKFDLFAQQATLEDYVAEVLHAGERIQRLEQRIDDAIEEVPQSTRAVIAGLQALRGIAKISAVTIVSEVGRLSRFARPRQLMGYSGTVSSEHSTGQRVRRGAITKTGNAHFRRILGEAAWSYRHRPYVGPVLRKRQKGVPAEVVEIAWKAQQRLHRKYQRLLGRGKVKQQVVTAVARELTGFIWAIGVHLEQSLGVEVMPRGTK

SEQ ID NO: 414753 - protein, 395 aa, unidentified
MVHSVPAIWIGVDVGKEFHWAHALDASGRKLFSHRVENDESDLLKLIDEVLSFTGEVLWAVDQPGGGAALLLALLWERAQRVVYIPGLAVERSRDTYRGESKTDARDAHVIADQARMRPDLGQLAPSESDLAELELLLARRRDLVVDKSRSVTRLRETLLSLFPALERALDLNRSGPLTLLTHYQRPAQIRRAGRNRIATYLRNRGVKGYDALAQKALTAAEAQSVTLPAEDVAAGIVAELAGEVLDAKGRIETLDEELRERFFAREEAKIITSLPGMGTVLGSEFLVCVGDLSAFESADKLAAYAGLVPAAHDSGKRTGNDRRMRGGNKVLKRAFYQSSFASLRSSPASRAFYDRKKAEGKLHTQALIALARRRVNVLWAMLRDGTTFKAPSSA

SEQ ID NO: 414754 - protein, 341 aa, unidentified
MHITTIGLDIAKNVFQVHGIDAAEKVVVRKQLRRGQVMKFFGALPACLVGMEACATAHHWARELTKLGHEVRLMPAKDVKAYVKRNKNDAADAEAICEAVRRPTMRFVRAKSAGQQGRLMQHRTRDLLLRQQTQVINALRAHLAELGIVAAQGREGLKQLLTIIADEKDARLPMDARASLIVLAAQLQALHTMIGSIEKRLTVQHRENEASKRLESVPGIGIIGASAITATVTDPKSFQSGRDFAAWIGLVPRQDSTGGKQKLGSISKQGDRYLRRILVVGAHSVLRRAKQNPEKYPWLTKLLARRPFKVVAIALANKMARIAWALLASGGHYRPRLAAAA

SEQ ID NO: 414755 - protein, 406 aa, unidentified
MKQIVSVGIDVSKGKSTVCAMIHPNTIIKESFEVLHTVEEMSMLADYVGSLDGEIRIVMESTGHYHLPVAQFLYQKGFFVCVENAYIIRQFSRIMLHGAKTDPLDAKKLAKYGLAYWSELKPYKFHPSCYTELSLLSKQYQTYIKLLIAAKQNVIHLMDEMLPGFKEALDTASSVQFSKVKYVDFAKEFYHVDMIKSMGKEIFRENYKQWCKEKGYRFQSEKADELFHLAEDGIPTLPTEFPSTRLCMEAATEQVSQLGYALEQILSQMQNLAKTLPEYQTIRQMGGMGEKLCVRFIADIGDVRRFHNGKALVAYAGIDAPPYQSGQYTGTKRRISKRGNSALRKTGYEVMKSLKSHPPKTDTCVYDFIIKKENEGKSKKQAKIAGLNKFLQIYYARVMEIYKNIV

SEQ ID NO: 414756 - protein, 422 aa, unidentified
MLEETHDTEEIIARVAALDIGKAELVCCVRVPSAQGSGKRAQEVRTYPTMTRSLLVLADRLRQLGVTRVVMEATSDYWRSPFYLLEAHGFEVWLVNARDVKHLPGRPKTDKLDAVWLCKVAERQMLRPSFVPPPPIRMLRDLTRYRADLVAARTADKNRVEKLLEDAQIKLSVVASDIFGVSGRDMLAALIAGERDPKVLAQLARRRLRAKLSLLEEAFHGRFSDHHAFLLQTMLSRIDQASADIAALDAKIDQEIAPFAPAVDQLDEIIGVGRTAAQVIIAEIGVEMGRFPTPGHLVSWARFAPGVKESAGKKKGKATTGHGNPYLARVLGEAAVAAGRTNTFLGERYRRIARRRGAKRAMVAVGRSILIIIWHLLSDPTARFHDLGPGFYDTRSNADRRKRNHVRQLEALGYKVTLQPAA

SEQ ID NO: 414757 - protein, 342 aa, unidentified
MSVMIGIDPHKGLHTAVVINGDEVVIGEIRVRASATQLGELQEWASGYGDRSWAVESARGLGYLLSQQLVGAGERVVDVPAMLASRVRVLGSGKFQKNDPNDARSVATAALRHSGLTPVIADDHRRVLGLLAKRHRDVARLKNKAACRLHALLGELTAGGLASEMTVNKANSLLESVEVTDEVTRQRIVIATELVDDITRFNVQMRASKKRIRTAVAASGTSLCDIRGIGPIGAAIILGSVGDIGRFPTAGHFASYNATAPIDASSGNNNRHRLNPRGNRKLNHVLHITAVTQLRYPSEGRVYYDKKLAEGKTSKEAIRALKRRLSDVVYRQLRADARRTTS

SEQ ID NO: 414758 - protein, 346 aa, unidentified
MKHYAGLDVSVKETSVCVVDETGRICRETKVPSHPDDLAQVLHDPAWRLERIGLEAGPLSQWLFSGLAEAGLPIVCIETRHTKAFLKAQVNKSDRNDARGIAQMMRVNLFRPVHVKTLTSQKRRALLTARKLLQEKAIAFENDIRGLLRNFGLKVGIVGAAKFDIRIRELLDCLPDLAEIIEPLLASRRKLREEFERLHRKLLSIVRDDGVCRRLMTIPGVGPVVALAYASTIDVPARFRNSKAVGASLGLTPVLHQSGESNRIGRVSLCGDGMMRTLLYEAAQVMLTNVHVKWSWLKAWAMNIAKRRGGRKAIVALARRLGVIMHRIWSDGTVFRWTRESIPAAV

SEQ ID NO: 414759 - protein, 424 aa, unidentified
MKVTYQTCCGVDVHKSFLVATIVKTTGGIEPSYQKKRFSTFNNSILEFKQWLLDNDCHDVCMESTGKYWIPVFNLLEDEIHVVIANPKWVKAVKGNKDDTKDSKWIGDLFRLGLVKGSYIPCKKVRILREYTRYRYKLVSCRSSEKNRYQNALTVCNVALDSVVSDIFGKSSTSIIDYLLEQSGTSINHEEIASKLLRSLKSKEDAVIESVEGYQMTDAQKYRMRLIRAHMDYITAEINDVDKMIENMISSNPDFENAVQFLCTIPGVKHDSAVTIISEIGTDMSQFSSSKRLCCWAGLTPGSNESAGKKKSVRITRAGVYLKPALVQCAHAAVKSDKSPYYKKKYDSLVKRRGKKRAIIAIARMILTAIYQMLSTGEQWNPSDLYKIDMPAPLFEKQKAKAIKQAKKLLQREGLLPPDEPLAS

SEQ ID NO: 414760 - protein, 357 aa, unidentified
MAALSIADVPANVTVGVDTHKHSHIARAKDGMGRHLGQLEIGTDPRGYAGLLAWAQGFGPVITFGIEGTSSYGAGLTRFLRAHDQAVIEVLRPVRRDRRFGGKSDPIDADVAAGAVLSGKATAVPKAGDAGVEMVRALKIAKQTAIKARTQAVNAVKALIVMSPDPVREQLRHLKTPALVRTCSAYRVDGASDPTSAIKLSLRSMCRRYIALDHEVRALEKELDALTVRLVPQLRERFGVGQDVAATLVLAAGNSGDRLRSEASFSMLCGASPIPASSGMVQRHRLNRGGDRQANAALHHIVIVRLRHDEATKAYFAKRKAEGKSKKEIFRCLKRYVAREFYRTLVGPREEAIRSAA

SEQ ID NO: 414761 - protein, 344 aa, unidentified
MEVGISAYQLYVGVDIAADTFTAAWCMRAGKPTLPFTAEQTPAGFATLQRRLAATGAAPADALVVMEATGNYWVALAVTLHEAGYRVAVINPRQAHHFAKAQLRRAKTDALDARDLAQLGAALRPDPWTPPPAVYHEVRQRLVARDGLLAMRTQARNQRHALLQWPVVIAEVRQHLDELITDLDRRIAALEAEITAVLTESVWAESLVCLTSAPGIGLVTASWLLVSTLNFALCDGPEALTAYTGLAPVPRESGRSLRGQPRIGHDGNSRLRTALYLATLSAARYNPAIRAFYQRLRAAGKPKKVARCAAARKLLHQVWALGSKLQRFDPGYHQQHAVLPDLAA

SEQ ID NO: 414762 - protein, 346 aa, unidentified
MTEAYDGRQVVGMDLHRRRSVLVRMTMDGRKLETARIANSQAALRAVLARCGKNPLVVLEATYGWYWAADVLAGAGAEVHLAHPLGVRAFSYRRVKNDERDAADLADLLRMGRLPEAWIAPPQVRALREVVRYRHKLVRQRTSCKDQVHAVLAKLGIPVTHSDIFGTGGGLWLDQLVLPEPYAAKVASLRALIGVLDGQIARLGQEAAGMLAADAGYAAVRELPGIGPVLAAVICAEIGDITRFGKPGQLCSWAGLTPRHHESDLKVIRGHCSKQGSRLLRWALVEAIQHQPASARPQQAREAIVARRGPEARNIAKTAAARVLLTQVFYALRDGHARSAGHPPAA

SEQ ID NO: 414763 - protein, 453 aa, unidentified
MKTQKQRKQNRISRHLERVNLYAAGIDIGSSSHYVAVPEELDDEPVREFLAFTGDLHRLADWLVNIGIQTVAMESTGVYWIPAYEILEERGLEVLLVNAQHVKNVPGRKTDVQDCQWLQELHTFGLLRGCFRPAEEGIALRAYMRQRQSLVERNADHIRHMQKALRQMNLLLDNVVSDITGKTGMEIIRAILSGERNPQILAGMRDKRCKQDEKMIAASLEGHYREEHLLSLKQAVQLYDFHQQLIYDCEQSIEQQLQSLDGKIESHEVNPVTSKKRKTKSSLHFDVRHEICRLTGVDLTRIDGMDENSVLKVLSETGTSMQAWPSEKHFASWMGLSPGNKITGGKIINSKTKPSASRAAAAFRICAYGLFNSKSSLGSYFRRQRARLGAPKAITATAHKLARIFYSMIKNQSEYVDLGGDYYEKLYHERTLKQLKHKAKTLGFHLIPLTSEV

SEQ ID NO: 414764 - protein, 344 aa, unidentified
MPSIVGGLDIHRKQITFDYLDLVTGEVKCGHIAPADREHFRGWLARLEDPAGVAFAVEACTGWRYVTEELRRAGIQAHLAEPADTAAARGRKKRAKTDRADARLMRDLLAQGRLPECWIAPEHVLECRALLELYHDLRAEHTAWVQRAHAVLFHQGAPAVHDLSRTDAPAELAALAREQLSPAGQLQIGACLRMGDALEAELAAVRCRLIAAARQLRGAKVLAESIYGVGPVTALALTCWLGGAGRFTSARKAVRFAGLDITVRSSDSKRSPGHLSRQGPPVLRWAVYEAGKTHARPGAPDHGYYAAVKDRKDGKRAALSEARKIIRRACHILAELGDDALTTV

SEQ ID NO: 414765 - protein, 336 aa, unidentified
MEAMREVLGIDVSKSKLDIELLKNGKVKTKVLQNTPAGHKSLLEWIDKSKASRSSLHVCMEATGVYHEALALTLYDAGIKVSIVNPACIKGFGHGENIRNKNDEIDAGLIARYCLAMNPELWTPPPLEQRQLRGWTLRVQALKDIRQQEENRLEAHTIGGMEDVATHVKTHIIWLDVEIKKLEKEIDDHIDRHPNLKNDAQLIASIPGLGMTTIARVLGHIGDIRRFKNAKAFAAFLGVTPKQRTSGSSVRGRTVMSKTGSSSLRAALFMPSMVARRHNPILRQFADRLLATGMAKKAVIGAVTHKLAHLIYGVIRTGKPFDANFLSNRLAIQDGI

SEQ ID NO: 414766 - protein, 449 aa, unidentified
MPKKRNKVSSLPVIEPNAAGIDVGATEIFVAVPADRDAEPVQCFPTFTVDLERLADWLQQCQIRTVAMESTGVYWIPLFQILEKRKIDVRLVNAHHVKNVPGRKTDVSDCQWIQHLHSVGLLRGSFRPDDEICALRSLWRHRDNLIQLATLHLQHMQKALDQMNLQIHHVISDLAGTTGLAIMDAILAGERDPQKLAQLRNRHIQASEETIMKSLVGDYREEHLFTLQQSLKSYRHYQELIQEVDLQVKQMLQRLPSKIADGEKPPKGDKIRRTPWRNEPPQLRNDLYRAFGVDLTEVPGINSLTAQMLLTEIGPNLSRFPTAAAFCSWLRLCPNPKISGGQVLSSRTQPTKNRAALALRMATQGLHRSDTFLGDYFRRMKARMGAPKAMTATAHKLARIVYHMVTTQQEYDATVFQQQEQRRRLQKSARLHAQARELGFHLVPINAVP

SEQ ID NO: 414767 - protein, 344 aa, unidentified
MSNLDTCGIEVSAEELLIRLGRRGELQPLRSFSNTREGREMVRRYLSEAGRVVRVCLESTGLYGLDLALLLSAAEGMEVMVANPRAVRHFAHALMRRSKSDPIDATVLEQFAARMPFQAWKPPSAAALALHALARRLRELVQIQTAEKNRQHAAGLSQTIPTAVRRDLARSLRAQQRAVVRLTREARKLIAQDPQLRERFELLDSIPGIGETSAVQLLGELSVLAPDLDARQWVAYAGMDPRQHTSGSSVHKKPRISKAGNKHLRHSLFMPALVAVQHDPYLGAFYQHLLARGKFKMQALVAVMRKLLHAIHAMFKNHQAYDGGKLFRLPPVPAQEVPRAAVVA

SEQ ID NO: 414768 - protein, 428 aa, unidentified
MDQDNRNRLEEFRQLRKEVRHSEEYLIVGIDIAKDRHYAFFGTAAGKTLLKRIIFSNDHEGFRKLLDQAEALRVQHGLKKVVYGMEPTGNYHKPLGEYLINLGRAVVLVSGVTVARNRESLDGRWDKHDGKDSANVADLISQGKCLYYEHPSAELRGLRGLLSLKRRLKKQEHGYRVRIRNHLLAQYFPEMDRDYERLGAEGLSIVRWCLPASEIVQLDVEPFIERVTSRRITMEKRRRLEAIWEKAGESIGCEEVPGVGHEAKIIVEGLKQIRAMIKETEDQIKELCEQFSEYPYILTIPGFGPDVSAKVLGAVGDPDRFLNGKQVLKMGGLDLSADRSGKDSDRAIPEISKRGKADLRYALYQAALIASLKNRDVMVYYTNKIRGREKEKGIHIKMRVKLAAKLLVIAWTLMKKKEGFNPAYLNAE

SEQ ID NO: 414769 - protein, 332 aa, unidentified
MMDEVKRFIGIDVAKAKLDVFIRPSGESFSVANDEFGTRELLKRLGPADFVILEATGGLEVPVASSLASAGVAVAIVNPRQVRDFARATGRLAKTDRLDAEVLARFGETVRPAARPLADAQAQALEALVTRRRQLVEMLSAEKNRRTMAPKVLHRSIDEHIRWLEKRLGGLDDELGTMIRDTPLWRERDELLRSVPGVGKVLSSTLLAHLPELGALNRKQIAALAGVAPFNRDSGSMRGSRCIWGGRAQVRRVLYMATVAGIRSNPAITSFYLRLRASGKHAKPALTACMRKLLVILNAMLRTKTHWQLPALATPTSTISPLAGAVSEHGCC

SEQ ID NO: 414770 - protein, 342 aa, unidentified
MAIVAGFDVHRAQITFDALDTESGEVTRGRIDATPAAVTRWSERFAGREVDVAVEACTGWLFVCDALWRAGARPHLAEPVETRALRGRKRRAKTDREDARWLRELLAEGRLPEAWIAPEHVRQWRSRARLRHTLIGERTQWMQRIQATLFHHGVAGTPEKLRTRAGRAFLEDLKLPGDARERIEIALAMVDAIDARITPLERELRQLARRQSGCKALMGLYGMGELTSLVTLCELGDVARLSASRKAVRMAGIDIGVHRSDRRARAGKLTRQGSPQLRWALYEAALSACRPSSPDHADYLALKARGLSHTRASLTIARKLARRSYHVLRELGPAALEPIATT

SEQ ID NO: 414771 - protein, 337 aa, unidentified
MKSSVISIDLAKNVFQVCAMDEKQHITLNKKVSRKKLLDALRQFDPTTVVMEACYTAHPWGRAIEALGHAVKLIPPYQVKPFVMGNKNDHNDAIAIAEASRRPKASFVPVKTLDQQDIQSLQRIRERLMKHRTATSNQLRGLLAEYGVIIPKGIHYLRSQVPDILEDAEQPLTVVARRFVQRLYSELTVHEKQINEVEAELFALVEHNDDFQRLQTIPGIGPMIAATLLASVGDAHYFKNGRQMAAWVGLTPKQHASGENSRMQGISKRGDRVLRKLFIHGARAVLNWCENKTDKLSLWMKSLSKRAHPCKVVIALANKLARIAWAVMATKQVYRVM

SEQ ID NO: 414772 - protein, 400 aa, unidentified
MLSIGIDVSKGKSTVCGMKPGGEIVYTPFEIQHTREGMSELLSLLRGSGEEVRVVLESTGSYHCPVVAALLENGIFVSVVNSLRMKRFCSQSIRRVKTDQIDAMQIALYGLAYWQELQPTRLPENTYRELQLLARQYYQMTSLLIKAKVDFNALCDQVLPGMQELMSDHAGRHKLSDFVLRYHHTAHILKMGETRFRKDYCKWAEKKGYRNHERMAALIFATAQNGIPVLPDAPSTQIVITEAIRVLHTVEASRDAILTQMQALAKTLPEYSLVREMPCIGDTLAPRLIAEIGDVRRFHSKRALIAYAGIDAPPYQSGKFCANNRHISKRGNRYLRKTGYEVMQSYVMHKPANDPIFTFIEKKRSEGKSGKLAMVAGLNKFLRVYYGKVTELYRSLPAIE

SEQ ID NO: 414773 - protein, 408 aa, unidentified
MNTLYVGIDVSSKSNVVYLMLPNGDKHSNFSVANSHEGSTLLVKKIYSALTSHSLDTVLIGLEATSVYGDNLVYFLREDATLAPFNRKIHVLNPKQVKKFHDTYNDLPKNDYVDSFVIADCLRFGRINKEVYMGEYRYKALQNLTRARFFAVQNLVKEKQRFMNVLFKKYSTMTQEKVFSDAFSTTALAVYDEFESAEALANMDLHELTDFIIEKGKNRFPDPVAVAKAIQKAARSSYRLPKTVNDSVNQVLSISITSMKALESQIKEFDKAIKALMELLPNVLISIPGIGPVYSAGIMAEIGDINRFDNQASLAKYAGLAWKQHQSGGFEAEVTRLIPLGNRFLKYYLCEAAFSLVRCDKEYSDFYHLKYKEVNRCQHKRALALTARKFVRLVFRLLKDNRLYCPAK

SEQ ID NO: 414774 - protein, 356 aa, unidentified
MSRILAIDLGKFKSVTCLLDSDTNQTEFWSMATDRHYLLAVLKNYHPDLVVIESCGLAGWVHDICSEEGYEVLVCNPNQEAWKWKHIKRKTDRDDALKLAKLAALGQLVPVYIPCRQQREYRRLVKYRQVVLGRINRVQNNIRAIFAQRGMEMVRGQKAWALERLELIAQHRKPLAECSLDELWRGELDLELIQLEHLRQHQYEIHKKLKALAAADERVQLLQTIPGVGRKTAEVVVAYLDDPHRFQNARQVSSYAGMVPRRYQSGEMDRHGRIHKRGPRQLCSALVEAAWLMLRYNPWAKTVYEWLTSGQRTRKKKAIVAVARKLLVRCWVMLLRKEPWNKETMIRQSAGIAVAV

SEQ ID NO: 414775 - protein, 327 aa, unidentified
MDAIIGIDVSKAKLDCLWLRDSQTLKVKTKVIENSPAGHQRLSQWVQQQTGRSVTDCCFVMEATGVYHEALAYFLHDAGAKVCVVNPAQVRDFAKSLGGRTKTDKKDSMVLARFAVSHGPRAWQPEAPEIRTLKALLARLEALEKDIQREQNRLEKAEVSQASEDVIESIQLMLQVLQAERKRLEKMIDTHLDNHPGLKSDRGLLESIPGIGPVLSRLMLAVIHSRTFESARQCAAYLGLNPCIWESGSSVKGRPQLSKAGSSAIRAKLYMGAIVASTWNPDIRAHYERLLERGKCKMSALGAAMRKLVHICFGVLKQQTKYVPQVA

SEQ ID NO: 414776 - protein, 461 aa, unidentified
MRNNRKSGDRPGSTRPIEGLPIVRAKVAGIDIGSERHWVCAPGLEGCGREVADFGATTPELVRMVEWLKERKIESVAMESTGVYWIAPHEVLEKNFEVLLVDTRQLARVPGRNKKTDPSDCEWIQRLHSCGLLNGSFRPQEQVCMLRTLVRDKANLVAESADWVRRMQKSLDQMNVRVHRAVSELNGVTGMAMVRAIAAGERDAQKLAQLRDRRCRQSEQEIAEQLSGHWREDHLFSLRQSLQMYDAIAERITAYEQEILQKLATMEVEEHPGGAVPPVKNLEKAKAIKKRGQEPMRQALYRMSGVDVTQIDAIGVETVEVVLSEYGPDLSRFPTEKQFVSHATLAPRVPKSGGKPLKHKKRNSASTRVAAALRMAALALRRSPTALGAYYRRVARRIGGDVAVFATARKLATLIYRLLRWGQPYVAEGAEAVEKRYRQQHIKGLAARAKELGYQLMPTTT

SEQ ID NO: 414777 - protein, 354 aa, unidentified
MSPLISRIATVGIDIGKNSFHVVGQEERGAIMLRQKWSRGQVEARLANLPPCLVGMEACTGAHHLSRKLQALGHDARLMPAKYVRPYSKGQKNDFRDAEAIAEAVQRPTMKFVATKTTEQLDLQALHRVRERLVCQRTGIINQIRAFLLERSIAVRQGLRFLQAELPTILGTRSDALSPRMLRLIEDLAGDWRRLDARIEAISGEIEELARKDQACERLMTVPGIGPIISSAMVAAIGTGDAFAKGRDFGAWLGLVPKQISTGDRTILGGISKRGNRYLRALFVQAAWVVLVKLGKKWERYGLRSWIEAAKKRLHHNVLAIALANKLARIAWAVLYQGRAFEYVKTDATASRSA

SEQ ID NO: 414778 - protein, 422 aa, unidentified
MLHDSEDTEEIIERVAGLDIGKAELVACIRVPNPDRPGRRAQEITTYSTMTRSLLGLADRLGELGVTRVVMEATSDYWKPVFYILEAKGLDPWLVNAKDVKHLPGRPKTDKLDAVWLAKVAERQMIRPSFVPPPEIRLLRDLTRYRADLVNSRTAEKNRVEKLLEDAQIKLSVVASDIFGVSGREMMAALLAGQRDPKPLAQLAQSRMRAKIPLLEEAFVGNFTDHHAFLLRTMLARIDEASADIAAVETRVEEVIAPFAHAVEQLDEITGVGLTAAHVVIAEIGIDMTRFPTAAHLCSWARFAPGVTESAGKNKGRGTTGHGNPYLARVLGEAAVAAGKTDTFLGERYRRIARRRGKKKAIVAVGRSILVIIFHLLSDPKARYHDLGSDFYDNRIGPDRKKRNHVRQLESLGFKVTLEPAA

SEQ ID NO: 414779 - protein, 347 aa, unidentified
MFPFYLGIDLHLKRTYLVLMDHEGEVIDKRRLKNTEIETYISRNVPKETYAVMEATRNWPFFYDLLAKHVDRVELAHAKGVRMIAAAAVKTDQIDASVLAHLARLNFLPIAYAAPKEIRDLRQHLRYREWLIDERRRAKNRIHAVLAGYNLASPVTDLFGRSGREWLGEVAEKELRPTSQRVVLETLTMIDQLNAQIKELAKDIPLPEDLKPKAEILMSMPGIGKLLSAVILAEIGDISRFNSPKALCNWAGLTPRVHKSDTVVRHGRISKQGSRYLRSAMVCAAMTACRISPRWYGVYEHLARKIGRRAAKVAVGRRLLTVVYYMLKRDQPYDEKYEQRRAVEQGA

SEQ ID NO: 414780 - protein, 310 aa, unidentified
MERIVVGIDVGKQQVDVHVRPQGGAFRSTTDEAGLTELIERLQALGPTLVVLEATGGYEVPVAAALGSAGLPVAVVNPRQVRDYARATGQLAKTDTLDARMLARFGEAVQPAVRPLPDAQARLLSALVARRRQLVEMLAAESNRHRQVHEREVRELTAAHLEWLRQALKALERELHDTIRTTPLWRERENLLTSVPGVGDVTARTLIAELPELGQLDRRRIAALVGVAPLNRDSGTLRGRRMIGGGRATVRNVLYMAAVTAIRWNPPVAAFYQRLITAGRPAKVALVAAMRKLLVILTAIVRDGRPWQPA

SEQ ID NO: 414781 - protein, 398 aa, unidentified
MTESSDYESVQVFIGVDVGKDTHHAVAINRSGKRLFDKALPNDENKLRSLISDLKQHGQILLVVDQPATIGALPVAVARSEGVLVGYLPGLAMRRIADLHAGEAKTDARDAAIIAEAARTLPHALRTLKLADEQIAELSMLCGFDDDLAAQTTQASNRIRGLLTQIHPALERVLGPRLDHPAVLDLLQRYPSPEKLASLGEKKLAAQLCKLAPRLGKRLAADIAQALAEQTVVVPGTNAAAVVLPRLALQLITLRKQRDEVALAVEQRVLAHPLYPVLTSMPGVGVRTAARLLTEVACRAFASAAHLAAYAGLAPVTRRSGSSIRGEHPSRRGNKALKRALFLSAFAALRDPLSRAYYTRKMSQGKRHNQALIALARRRCDVLFAMMRDGTFYTPQAS

SEQ ID NO: 414782 - protein, 345 aa, unidentified
MKQIIRIGMDTSKHFFQLHGVDAAEQPVLRRKLRRREVVAFFTKLSPTVIGMEACGASHYWARELGQLGHTVKLMAPQHVKPYIKRNKNDGRDAEGLCEAMSRPTMQFVPVKTEEQQAALMLAGMRERLIARRTQLSNAIRGYAAEFGLTTAKGPDKIKPLLAEIATDEALPELARELFAIYGAEYLYLQGELKKVEARLMAWHRANADSRRLASIPGVGLICAAALVLKAPDPHAFPSGRHFAAWMGLTPKDHSTAGKTRIGKITRAGDEMLRSVLVSGATAVIQQAKKGRGHPAPWLVVLLARKSPKLAAIALANKIARIAWKLLTTGESYDGRRMFDASAVA

SEQ ID NO: 414783 - protein, 380 aa, unidentified
MASIGDDVRSNTTVYAAIELSKKSWVVAIAHPDRDRPSIHRIAGGNVADLIGRLRKAAGKNQRIVVCYEAGYDGFWLARSLANIGIDCRVLDPASIQVNRRARRVKTDRIDSLALLRALIAVDRGERHVCAVVRVPTVEEEDARRSHRERQRLIRERTGHINRIKGLLFAQGIRAIEPKRRRTRIDVGQMTTAEGRPLGERLRRELEREYQRLELIESQLRIVEKERDTVDAQDPAVERKRELLCALHGVGGASAAILVREVFARPFASRRHLGSYLGLTPSAYDSGSTTRCQGISKAGNSWARRVLIEIAWLWRKYQPASPLSEWYARKTADQSPRIRRIMLIALARKLAISLWRYVETGLVPDGAVLAKKTPHQTAAT

SEQ ID NO: 414784 - protein, 479 aa, unidentified
MAVGRMNRKQRKELTRQLRSEDPGLDVVHPRAAGIDVGNSAHYVAVRPDQDREPVRRFECFTADLHRLADWLQACGVETVAMQSTGVYWIPLYEILEERGLEVYLVNARHTKNLPGRKSDVQESQWLLKLHTYGLLNNSFQPTAEIRTVRTYWRQRAEHVHAASTCIQRMQKVLTQMNVQLANVISDLSGLTGQTIVRTILAGERDPKKLAELSHPRIQASREEIAKSLEGNWRPELLFVLKQEVEMYDIYQQRIGECDRELKAHLKRFADNAHQKPAEAGPVSEGQKDKKVPAKLPRSGKRAQGNAPCFDLRSELYRISGVDLTRIDSISVVVAQTVISEVGLDMSRWNTEAHFASWLGLCPDNRISGDKVLSKGTRHVINRAATALRMAATTLLRSRSYLGAQYRRLRARLGAPKAITAMAHKLARLVYRMLKYGQDYVDKGMQYYEDRHRRQQIELLQKSAAKLGLQIVEIQAVGG

SEQ ID NO: 414785 - protein, 322 aa, unidentified
MAKHITISAGIDTGKRKLDVAIEGRREQLQVENAPKGHEVLLAWLRRHRVKRVGIEASGGYEQPVVAELRRKRFVVVVFQPAQVRAYAKFHLQRAKNDRIDAALIAICTAAARKIHAAPDPRLLPFAEQLTMIDQVNEDIARLKNRIESCRNARIKQLWQEDIACLEQREKAELKALVAAIRKHSDLASRLALINSVDGIGLPTAVAILVRLPEIGKITREQAVALAGLAPYDDDSGEQVGVRHIEGGRKRLRRALYTASLAASFRWNRQLIQLYQRLTAAGKEHKRALVACARKMLIFANTVVARGTPWRDQPPEATSSVS

SEQ ID NO: 414786 - protein, 359 aa, unidentified
MNATTVAVDLAKNVFELVAADQRWNVIERARLTRTQFQRWFHNRDVSLVVMEACGSAHHWGRVLQQQGIEVKLLPPRYVRAYVKRNKTDAADAAALLEAVRCADIVPVRIKSVEQQALQSLHRVRSAWVATRTARINALRGLCREFGILISTGARLGVEQISRVLVDPHSNVPAMLRETLKLLVEEIRLLEVRIAQLERELSEAAKLSPACCTLLTVPGVGLLTATALVASTGGAVQHFKDARHFAAWFGLTPREHSSGSSRYLGRISKRGDRYLRTLLTHGARAVLRAACIAQRRGAVLDPLRRWGLAVQSRSNHNKATCALANKLARICYASMRDQQPYQSVRLAKKLERQTFPMPA

SEQ ID NO: 414787 - protein, 423 aa, unidentified
MAGVMIGIDPHKGSHTAFVIDGREKPLGQLRVRASCEQAEALLGWAGRWRQRTWAIEGARGLGQLLAQQLLAAGERVLDVPPKLTARVRLLDSGQINKTDENDARAVAIAALRARQLPQLTVEDQTIVMRVWARRYHDLGRLRTQAVCRLHTVLCELVPGGVRKQLRTSQAIAVVDSITAESPVAQAKLELAHDLVADLQRLDAQRREVKRRVARAVAAAPTSITEVYGVGPIVAACVLGYVRDIRRFPSRDRFASYNGTAPIEVSSGDRKIYRLSRRGNRQLNHAIHIAAVSQISHRGSEGHAYYQRKRAKGMTGKCALRALKRKISDTLYERMLHDIRPRKDPGGHSGNDAVSSAAGSHPDGPALRTSHSRATANSKTATTNQRPLTSPPAPDKRRTSRSGTGVKLQPRPRPRRGRGQERA

SEQ ID NO: 414788 - protein, 326 aa, unidentified
MTDAFEPIFVGIDVSKETLEVALDDKSKTQTYGNNDAGLKELITRLKALGNRVALVLLEATGGLEQPAAAALCANGFAVMVVNPRQAHDFAKSMGYLAKTDSTDARALSHFARTLYTSDKRERLLYKLPTPEQEVLLAMVTRRSQLVGMRVAESNRLASAHTSQRKSIRVILKALDRQIGHIDEDAARLLKDHFKDKLDLLKGLKGVGPGTQAMLMAALPELGELNQREISKLVGVAPLNCDSGKFKGKRKTWGGRSNVRAALYMATLSATSHDPTIKAFYQRLLLAGKPKKVALTACMHKLLTIINAVIKSGTPWKASYPQGAHA

SEQ ID NO: 414789 - protein, 332 aa, unidentified
MRLLAIDLGKQSFHIHGITDEGEVISKKVSRSKLEAIVLELAPESLAMEACASAHHWGRRFEAKGYRVRLIHPRFVKPFVKGSKNDAVDAEAIHEAALRPTMRFVPVKTIEQQDLQMLHRTRDRLITQRTGLINHIRGLLGEYGVVIPDGAFRFRKNIRSAVEDAPLSELASDNFNALIAEFQVLDARITAIDRKLAAICRKDERCKRLSTLPGVGPVVATALIAAIDDGRHFASGRALAAWIGLVPRQYTTGGKPRLGGIGKRGNHYLRRQLIHGARSVLIRVANRNDLRSKWAKDLLARAGHNKTLVALANKTARIAWAILRKGENYKSA

SEQ ID NO: 414790 - protein, 424 aa, unidentified
MSYRIAGIDVHKKMLAVVVSDVEVDGECQFERVRYSSSPEHLRFLAQWLIAQRVEEVVMESTAQYWKPVWGALERYWKPICRERADAGPKSGTLHLAQAQSNRGRRGRKKDFPDAERLVKRLVADELVLSFVPDTEQRLWRTVTRRKYQLTRNHVRLQNQLEGLLEECHIKLSSLVSDLLGASARRMLKALAEGETNPVALAAMADRNLRATQAQLCDALGACAELTPIYRRLLKMFLEELQFIEQQISKLDQELASLLSRHHDAVVHLAEIPGLGVDSAQQIIAEVGAGATTFPSAKQLSSWVGACPGEEESAEVSKSHRSPKGNRHMRRILNQAANAAAKSKGTIFEIVYHRLVSRLGHNQTIGAIAHRLCRLIWIILHRGVRYQERGPLVNAKTRRHRTNRMIRELRNLGYRVEPSVTTAV

SEQ ID NO: 414791 - protein, 339 aa, unidentified
MVEVYAGLDVSDKSTHVCVMDGSGAVLWTGACATDPEVIAKTLKSRTPGLVRVVLETGPLSAFLYHGLTERGVPVVCVCARHAKGVLSARVNKSDPHDAEGLAQMARTGWFKAVRIKQEATHMDRARLKIREQLIEARQAMAGQLRGLLKLFGLRLGKVTTPNKRRERLEALFALKPEIEPILAPLIESLEAIEIQLSHSSRELAAQAAADPVAMRLMTVPGVGPITALVFKSSIEDPGRFDRGEDAGAFAGLAPRRNQSGERDHKGRISKAGDSMLRSALYESANSLLARVKRPCALQTWGKRLAETKGPKRARVAVARKLAILLHRLWQSETEFRWA

SEQ ID NO: 414792 - protein, 301 aa, unidentified
MTIVNTRAITGGVDTHADIHVAAALDPIGGLLGVQEFPATAGGYAGLLGWLGGFGTVALVGIEGTGSYGAGLARHVTAAGIRVVEVDRSDRQDRRRQGKSDPLDAVSAARAAQSGRARGAPKGRDGAVEAIRALMVAKRSARSERVQTINQARALVVTGPDDLRTRFARHTAAGLVSGLASLRPRPGDVVGYATRIALRELGRRAEFLDAQLERLDELIAPLVAARSPGLLALHGVGPDTAALLLVAAGDHPERLRSEAAWAHLCAVVPIPASSGKVTRHASIPAATARPTTPYGGSCSHG

SEQ ID NO: 414793 - protein, 388 aa, unidentified
MQKKGLISEKEKTTFQIPQNNQPGSKPKKGSLMNRKMQDFIVKGKKVFIGLEDSKKTWKINARSEGMEIHYTAMPAKYAGLREYLFRKYPCCEITVIYEAGFKGFGLHDQLMSDGIRCIVTPPNKVTQEKDCRVKTDKVDARRLAKVLEQGDYKACAVPDKERREDRQVSRAMIQVQGEITRVKNRIRKFFDANGYAETFEAGAWSERQYTEARTMELSPALKITVDVYFDMLDKFKELRKQLHRNVMAMCKKERYKDAVRIVDSVAGVGKLTAMRLILEWGEDIGKRFSSGKSLACFAGLTQSEYSTGERIRKGRITGQGRGYIRAWLIQCSWMCIKRDPAMLEAYQRLVKNTASKKKAIVAIARKMVVRLWTCLHVKTEYVIGVVE

SEQ ID NO: 414794 - protein, 413 aa, unidentified
MTEETFGWFVGVDWGSEKHQVCILDQHGTIVGERNFPHGGAGLAELGDWLLSVAGTVTAVAVGIEVPHGPVVDSLIDRGFVVHAINPKQLDRLRDRFSVAGAKDDRRDGYVLADSVRTDRRLFRRLHVADPRLVELRAWSRLAEELTEERVRLGNRVHHELWRYYPQMTKLTDDIAASWFLELWTIAPTPAKARQLRKATVGQLLKQHRIRRIDAATVIRTLREPAIKVADGVAEAASVHMRSLIARLHVVNRELREAERQLDKICAEIGAAEAASGDGLQRQDVMILKSMPGIGRINLAALLSEGSGPLSRRDYPALRTLCGAAPVTRRSGKSQVVIMRYAAHVRLRNTVYHWARVASQHDPTSKSRYAALRQRGHSHGRALRSVADRLLGLACVLLRRQTPFDPQYGHPAT

SEQ ID NO: 414795 - protein, 341 aa, unidentified
MRTFIRIGIDLAKNFFQVHAIEREGEPAVTRKLSRGKVLAFFAQAAPCRVGMEACGSSHYWAREIRALGHDVVLIPPAYTKPYVKRGKNDANDAAAICEAMSRPDMRFVPIKSADQQAVLMLHKTRELLVKQRTMAVNALRGHLSEFGLIAPKGIHRVKELLALAQADETLPEEAKQATAMLASHSDGLDEKIGDLEKTIARASGKNQTIRLLDEIPAFGPLIASAMVAFNPDPSVFRSGSDFSASLGITPSQHSSGGKDKLGGITKRGNRYLRKMLVVGCTSVLRVAHKYKGALAEWIAAMRARKPERVVAVALANKLARIAWAMMSTGEAFRTELYTKA

SEQ ID NO: 414796 - protein, 391 aa, unidentified
MIFVGIDVAKNKHDCFITNTDGESLFNSFTITNNLDGFNDLYRKISSVTENITKVKVGLEATGHYSYNLLGYLLDKGFPTYVINPLHTNLYRKSLSLRKTKTDKVDSRTIATMMMSDMNLKSYSDTSYHNEELKSLTRYRFDKVKERAKLKSSVSRLVCILFPELEKLVPTLHMASVYALLFEFPSADAVANSHLTRLSNLLAESSKGRYGKDTAVMFREAARSSIGSHMPAKSLELKHTIKLIHELDAEIEEIENEIKSIMDEIHSPILTIPGISYRMGAMIIAEIGDFSRFDSPDKILAYAGMSPSTYQSGQLDNCYSHMEKRGSRYLRYALYNATKYVCHWDESFAVYLAKKRAEGKHYNVALSHATKKLVRTIYAMEKSGQPYQSAS

SEQ ID NO: 414797 - protein, 432 aa, unidentified
MKVTRGMQRRATKSARRAAVVGTDTLIAGVDPAKKTSVVVFMRASDKAPLGRLRIPTSPAGLLELDRRGKELLRRMGLSRLLMGMEATGHYWKIMARTANELGLPYVIVQSFVLARSREFDDLTRDKNDQRDALLISELVAERRFTEVELDRGAWAELRLLAEARDQRRVERAAALHEQRALLELVWPELLAEIRLLDGSHVQACLSLGLPPAQIASMSLARFARLLQREHGERRFMGSMATRLWAAAGANRACDETAAALLRVQLAAQRIEAADRAVATLDARMAVTFEATGLGWMRGQIRGLGEILLVNLLALSGDPRRFDEAGCMVKLAGSNPTERSSGQVEASGGIPRRGRRTLRLVACQAATCLALHNPDFEAFFRHLTQRQHRQLAPKAARVAVANKLLRILWAMATAGQNYDSRLATRGRLADAA

SEQ ID NO: 414798 - protein, 355 aa, unidentified
MTSTKYIGMDVHAESISMAVRNSVGNVVMESVIETKASMILQFIEGLRGDLHVTFEEGTAAAWLYDLLKPHVARLVVCNPRRNALLKVGNKSDRIDARKLSELLRGNQLHPVYHGEHGLRALKELVRSYLTISKDLARVMTRVKALYRSWGIPCSGTQIYSRFHRVTWLSKISEPGVRLRAAFYFQQLDALRTLRQEVRQELLAESHKHSAWKRLCEIPSIGPIRAAVALGVLQTPHRFRTKRQLWSISGFAIETRSSADHRHVNGQLQKVKKRVSIRGLNQNHNHDLKNLFKGAAVIASTKPGPFQEFYTALLAKGMRPEMARLTLARKIATIVWIVWKRGVSFDAQYLKPQTV

SEQ ID NO: 414799 - protein, 407 aa, unidentified
MLKIIYRVCCGMDVHKSFIVACIASTNEQGVTAYKSKRFSTFTGDLRRCAAWLSENNCEDVCMESTGKYWIPIYNILEPTCNIVLAHPKYVKAIRGKKTDKRDAKWIADIFKHDLVAGSFIPPANIRQLRDLVRYRWKLTSFTTGEKNRAQNCLTVSNFKLDDVFSDVFGKAASAIISRILENPAMKITDVSGFRTKHMKATNEEIFAAVDGEMCVEQAEKLRIIRSHMDSLELCKLNLESLILSTAEKYLPQLELIMTVPGIQSFAAIGVISEIGVDMSVFPTSKHLCSWAGLTPQNNESAGKKKTTRISRAGAYIKPLLVQCALGAIRAKPFPEVRNRYLALKKRRGHKKAIIAIARMLLTAIYNMLKKNEPYNRLSTTWQTVPRPTVKFRWKKLFTLSNDKGIW

SEQ ID NO: 414800 - protein, 391 aa, unidentified
MSMYFVGIDISKYKHDCCIISAVDQQIVSKFTITNDKDGFEQLLISLNSLSNPEDIKIGFESTAHYALNLELFLENANHSFMEVNPVLIKEYKKSTTLRRTKTDSVDCESIARWLMTVEYKPHSKGFYHAYSLKSLTRLRDRLIRQRSFYLVKITNVLDHTFPEFKPFFNERLSKTALYLLENYGSAEKMARMNSVSYEKLRSISRGKFSPQQFIALKELAANTVGVNNSIFDIELNSLLTLYKTLVTEIDTLEKEIYRLIEEVHPHYLSVPGIGPISAAIIYSEYGDISNFDNPGQMLAFAGIEPGINDSGTESHGGRMVKRGSSQLRYALINCCLPLIRFDMTFATYYAKKRAEGKPHRVAITHVAKKLIRVIYALERQDTDFCVQKLR

SEQ ID NO: 414801 - protein, 353 aa, unidentified
MRRYYVGMDVHLASIVIVVLNGAGKVVQQAIIETGAESVRGFLKQLRGKVSVTFEEGTQASWLYEVVRPLITEVVVCDPRRNKLLTAGNKSDRVDARKLAELLRNGSLRAVYHGDKGVRTLKELVRNYDCLVSDATRVKNRLKALFRGRAIACSDHQVYRRDQRAQWLQKLHEPGAKQRAHSLYEQLAALKPLRHEAKREMIKEARRQPAYAVLLSVPQFGPVSVAQLLAIVGTPFRFRNKRLFWSYVGLAVVTRTSAEYKVVNGVMRRRTRPLGTRGLNRNHNHVLKRVFKSAASSACASGPFRAGYEARLAQGMDPSLARLTIARQLATTVLAIWKRGEPFAPERMKLQVA

SEQ ID NO: 414802 - protein, 343 aa, unidentified
MQIRSVGIDLGKTTFHLVALSATGKVLLRKKFTQKQLITFTANMQTSLIGMEACSGAHFLGRVLREQGHDVRLIAAQFVKPFVKSNKNDFLDAEAIAEAVDRENMRFVPIKTDDQLDLQAMHRVRDRLVARRTSVINQLRAFLLERGMVFAKTPFKLKQAMPEILENADANLTLRMRNLVDLLWSEWKDLEHQIVAMNLEVEQIASSDPACQRLRQIPGIGPLVATAIVAAIGNGAAFRKGREFSSWLGLVPRQHSTGGKARLFGISKRGNCYLRKLLVHGARSAVLRVKRERSPFGPWLDALERRSPVKVVITAAANKLARVAWAVLSSGEEYRPPTALMPS

SEQ ID NO: 414803 - protein, 336 aa, unidentified
METQYFIGIDISKESLNWAVCSSNKIILEHVSGNDIKSITKTVVSLQRQLNFKLGSAVFCMEHTGIYHTRLLKYLLSRKAAIWLESGSQIKYSMGDVRGKNDIIDAQRIARYAYKNRDEIKLYVPPRAIIDQLDNLLDIRDRLVKVRQICLTALNEQKSCEANKTLTKDTKKYSAHTLKGVETDLQTLEKQIKELIDSDPQLKSLFDNITSIPGVGTVTAAKCIVITDEFKKFENAKQLACHAGVVPFENSSGSSLHSKPKVSKKAHKGIKSTLSNCVMSAMRYNTHFKAYYERKLKEGKNKFTVFNAMKNKLVRLIFSLAKQGKKYDENYTYSLV

SEQ ID NO: 414804 - protein, 326 aa, unidentified
MKIAVLGIDLGKNVCSVVGLDSSGAVVLRRRVRRDTLIDLVAKLPSCIVGMEACCGAHHLGRLFAAQGHDVRLMSPEYVRPYVKAQKNDDRDAEGIAEAATRPTMRFVEMKTEDQLDMQTLHRSRERLVGERTALINQLRAILLDRGIVVPQGKRKLEQYLVILMNEHNGEGLSARMRMLVADIRAQWQELDRRIGEFDAEFVRWAKENEDARRLVTIPGVGVTISTALIAAVGKAETFEHGRDLAAWLGLVPRQSTTGGKPRLMGISKRGNKYLRKLLIHGARAALPYVAEKDTALGRWAKSLLSRVHQNVAVVAFANNTGSLKF

SEQ ID NO: 414805 - protein, 321 aa, unidentified
MAMSVTPFEAGVDTAKDELVIQSAPDTKPFAIPNNPKAIRAWLKTLPSGSALAIEATSTYHMEMAEQAHAAGFTVYVVDGLRLSKYRESIALRAKTDAHDAALLARYLSKERSSLKAWTPPPAGHRKIQVLLRRRAKLVEIRGMLRMSWSGDKLFASELKRMEKAIKKAEMSLEKGLREVIKEAGLQDQLSRVQQLPGVGFLTAVGLVMSFMRGDFANSDAFVAYLGMDVTVAQSGKWSGKGRLSKRGDAEVRRLLYNASMSGSRTKAWKQFYAHHLGRGKKTTQAFVILARRLARLAFGLMRHQADWKPEVYTGGAKPVS

SEQ ID NO: 414806 - protein, 339 aa, unidentified
MKYTPVGVDIAKHLIQVHFINEHTGEVVDKQLRSKDFLTFFSNREPCLIGMEACGGSQHWARELAKLGHKVRLLQARFVKAFVMGNKNDVMDARAIWMAVQQPGKEIAVKTEEQQSVLVLHHSRRQLVKFRTAQINALHGTFLEFGETIHKGRAAMDRELPAALERMRVKLPPYLIALLEGQYSRLSELDSLIDDIEKQLISVARQSETCKRLMEIPGVGPLIATAAAATMGEASAFKSGREFAAYIGLVPKQTGSGGKVRLLGISKRGDTYLRTLFIHGARAAALLAKEPGPWITELKKRRPTSVAIVAMANKLARTVWAIAAHDRKYDKNHVSIRPY

SEQ ID NO: 414807 - protein, 401 aa, unidentified
MVSDFMKGRYNLMKIFVGIDIAKLNHFAAAISSDGEILIEPFKFTNDADGFQLLVSKLESFDKNSIIIGLESTAHYGDNLVRYLVAEFYQVCVLNPIKTCQMRKNNIRKTKTDKVDTYVIAKTLMMQDDLRFISFYDLDMMDLKALGRFRQKTIKQRTRLKIQLTTYVDQVFPEIQYFFKSGLHQNAVYALLKEAPSPKEIASMHMTHLANLLKVNSHGHFTKEQAKELRVLAQKSVGANDSAISIQITQTIQQIELLDSQLDKIEAEMTDIMKFNDSVIMTIPGIGYINGGMILGEIGDIHRFSNPNKLLAFAGLDPSVYQSGNFQAKTTRMSKRGSRVLRYALVNAAWNVVRNNATFKAYYDAKRAEGRSHYNALGHCAGKLVRVIWKMLTDEVEFNLE

SEQ ID NO: 414808 - protein, 415 aa, unidentified
MTSSFPWFVGIDWGSTTHHVCLLDATGSVRGNRAFPHSGAGQAELVRWLLDETGAAPGQIAVAIETPHGPVVEGLLLAGFAVFAIGPAQIRASRRRYVSSGAKDDPRDAWMLGRALRADPDLFRRLHLEESLVLQLRERTRTVNELTGQRTRLCHQIRQQLWRYYPQLLAIPDLLNQLTHPWFVELWNKAKTPARALTLRVATLAKLLKKHGIRRLNAESLWEILHAPALSVAPGTAEAAGRALQGLFAQAHTTNQLLAQAREEIRELLKAFSHNHADDQRPDDLTILLSLPGVGVYVLSTLLAEAFDLLQRRDYPALRARSGVAPVSIQSGNTRWEIRRLAVQHELRNGLYHWARVAAQHDPLSKARYRALRARGFSHGRALRTVGDRLLAVACAMLKNGTLYDPKLSRDKLAA

SEQ ID NO: 414809 - protein, 404 aa, unidentified
MEVTYPRCAGLDVHKKTVVACVMTPETRVTKTFGTMTADLLQLGDWLLDHQVTHVAMESSGIYWRPIYNLFEALDLQLLVVNAQHIKAVPGRKTDVKDAEWIAELLRHGLLRASFIPDRPQRELRDLTRHRRSLLQQRSRVVNQIEKLLESANIKLSAVASDVAGATGRAILKALVEGNTDPLALADLAKGTLRAKRGELALALRGLMGDHQRMLLQTLLRQLDFLEGEVAILDAEVARRLAPFEEVIQRLDRHPGIGRRSAEDILAEIGTEMSRFPTVDHLCSWARVCPGNDESAGKRRSGRTGHANRWLRAALTQAAQAAARKRGSYFQAQYGRLAARRGKKRAIIAVAHAILIDIYYMLSRQTEYQDLGNVHFDRIDLNRTKNRLVHRLEGLGFKVALEAA

SEQ ID NO: 414810 - protein, 340 aa, unidentified
MKIIGCDLHAAQQTIAMLDCDTGEVVERTLTHDGETVREFYASIPGPAVVGIEATGSMGWFLRLLEEVGVACRVGHPAAVRKAETRRQKHDRRDADLLLKLLVEDRFPAIWMPSTEQRDLRALLLHRHQWVRMRTRVQHALQAIALSHGLRRGPTLWSRDGQTVLASLPLPPHAAHRRRELLALYHQLAAQVDQLDDRVKEAAVARPGATLLMTHPGVGPVTALATHVFLGDPARFADGKALASYVGMIPSEYSSGTRQRLGALSKQGNPLLRFLWGEAAIHAVRRDPELQRFYRRKLVQKGLGKARVAAARKLGIRLWIMLRDQIGYEEFCRRSPRRPA

SEQ ID NO: 414811 - protein, 323 aa, unidentified
MNKYKETFGVDISKDVFDVYGSESSHSQYKNDEQGFKLFVKTLASDSLVVMEATGYYHYRLAHFLYKKDFTVSVVNPLSVKRFIQMKLSKIKTDKSDAKAICEYALFNEVTVYNALSDVQAECLQLFRLMDSYLKKRTATKNKLHGEEVLGTPSKYVYRSLKRDLKHLNKEVKGIEDRLLELVKQDQQQQLTLLTSIPGIGIKTALFLVVITDGFSKFEKASQLCSYVGVTPTIRESGSSVRGRSRISKMGNKKLRNLLFLCAFNACKYNKGCKEIYDRIVAKGKSKKLALIAVANKLLKQAFAIAKSGLPYDENYVSVLHKG

SEQ ID NO: 414812 - protein, 368 aa, unidentified
MGQKSSKLYVGMDVHKESIDVAVADEGRAVRHHGQIGGGMNALWRVVRKLESLGRELVFVYEAGPCGFGVYRGLIARGHACWVVAPSNTPRRVRDRIKTDRRDSLKLAGLARAGELTPIYVPDVRDEAMRDLVRTREDAVVMQRQARQRLAALLLRNDVRYAGKTAWTAAHRRWIAELKLPQPAQRLAFEEYVQAVEEASARVQRLGQCIEQELATWRWRSVVAALQACRGIQLIHAVRIVAELGDLSRFSHPRQLMSYLGLIPSEDSSGERRRQGAITKAGNTSARRALVEAAWAYQHTAKVSGPIARRQAKVPKVALDIAWKAQVRLCARFRRLAARRLNRNKIVVAIARELAGFVWAIGQRVKPV

SEQ ID NO: 414813 - protein, 321 aa, unidentified
MENRKEHISFEQVIERGCGIDIHKSILVATIRGLGIVEETRTFDGFTQSIEALRDWLKENGITHVAMESTGVYWKPVYNILESDFVILLVNARHIKNVPGHKTDKKDSRWITKLLLSGLLKGSFIPPKHIRELRDLTRYKRKVIEQIASEKNRIHKLLEDANIKLSSVVSSLSGATATKIIDSMIEGEEDIDKLLKFRHGKMQSSVEDLAASLRGNLTNHHRFMLQTVKESIKSKEQIIVKLDTQIDILLKENELVLDAELLATIPGVGKEAAAYILAEIGNDMSQFPDEQHLASWAGMSPGSNESAGKKKVIGSPMETSI

SEQ ID NO: 414814 - protein, 418 aa, unidentified
MQTELSQYTAVIGIDWADKKHDVCVQDMATGKRRASQVRHRAEDLDEWARSLQRRFGGPIAIAVELSKGPIINVLQKYDFFVIFPIDPSKLANHRKTFTTSGAKDDPTDAEFALDLLSKHTEHFKPLNPQSVEMRTLMTLVEQRRQLMNDRVRITNRLRSTLKQYYPQPLEWFDHIDTLLFCDFIRRWPALSQVRRARRATLEKFFHEHNMNRKALLERRIKAIKSAMPLTMDDAVIVPHRLRALALVAQLEVTLECIKQYDTEIASLAPQHPDYELFDPLPGAGPVFTPRLMVAFGEQRERFNNAAEVQKYGGLAPVTKRSGQSTWIHWRWQCPTFLRQTFVEWAAQTINKSYWAGLYYHQQRAKGCSHQAAVRALAFKWIRILYRCWKTRTPYDETRYLKALQERGSPLLKMAEAA

SEQ ID NO: 414815 - protein, 460 aa, unidentified
MPDGGENSSTRRKKQIEGLPVVLHNVAGIDLGSEQHWVCAPVAGGISREVADFGATTAELIRMTKWLQACGVKSVAMESTGVYWIAPHEVLEAAGLEVLLVDTRQLARVPGRDKKTDPTDCEWIQRLHSCGLLRGSFRPREEVCMLRTLVRDKANLVAECGDWLRRMQKSLDQMNVRVHRAVSDIDGVTGMAILRAIAEGERDARKLAKLRDTRCHKSEEEIAEQLSGHWREDHLFSLRQSLKMYDAIQQRLADYDREILQRLAAMQREEFRQQPPPPVKNPQKAKNMKKRGEEPMREALFRMSGVDLTGIDAIGVETVQVVLSEYGPDLSRFPTEKQFASHVTLVPHKPMSGGKPVRKKRRSSASTRVAAALRMAAITLRNSATALGAYYRKMARRLGGDVAVFATARKLATLIYRLLRWGQPYVDEGVEAFERRYQETRLKNLKAKVKELGYELVASN

SEQ ID NO: 414816 - protein, 343 aa, unidentified
MEYYVGLDVSLKQTSICVVDQTGAVVREGVADSDPEAISVYVRSKAPDAVRIGLETGPTSTWLWTELKRLGLPVICIDARHAKAVLKMQINKSDRNDAIGIARIMQTGWFKEVHVKDIDSHSVRALLASRALLVKIKRDLENHVRGLLKNLDLIIGRAKFNVFAVRAEELIEGRPELMSAIRPLLEARNAVGQQVSELDRKVMKLARHDAQVRRFMTVPGVGPITALAFKATIDDPARFARSRSVGAYIGLTSRRHASGEVDWTGRISKCGDAMLRSYLFEAAGVLLTRVPKWSAVKAWGVRLAKRNGLRKAKVAVARKLAVILHRMWIDGTEFSWSKKEIAA

SEQ ID NO: 414817 - protein, 384 aa, unidentified
MRTDQTDMTNAGEVVLAVSLELATAKWKVALHDGRRDSPAIHTVTQLQSAARLQAVLSLIEQHRQKWALPASTRVVVSYEAGQDAFWICRALQARGIECYVVDPASIPVERHKRRAKTDRLDVIKLVINLRAWLRGERDRMHVVHVPSPQDEASRHLMRDRGQLQKEVLQHRDRMRKLLATLGCQDEVDSRKFAGRLARSEVRCHDGAPLPAELHERLLRECERLALAEAQLAALEKARPTSLPEPARERIDHLTRLNGIGPVGASRLALELFWRQFSNRRQVGACVGLVPQPYDSCESQVDQGISKQGNRRVRALLIEMAWSWLRYQPGSTLTKWFKERTQGTGPNRRARRIAIVAVARRLAIALWRYLKDGVIPEGARLKSA

SEQ ID NO: 414818 - protein, 338 aa, unidentified
MNKFSGIDLHSNNSVVVVSDEADRIVYQRRLPNDPVQIRAALAPHREDLVGVVIEATFNWYWLVDELMEDGYCVHLANPAAIRQYDGLKYSGDFADAAYLAQLLRLGLLPEGYIYPAQGRQVRDLSRKRMQLVQCRTAQILAIENLFSRQTGGQMQGERVKRLDEAQVNGFGFAPDVLLAMQANLAVMQTLQEQIGIVEKRLMERVKQHPDYALLNSVPGIGPVLATTIMLETGTISRFAKVGNFSSYCRCVDSRRESNSRKKGEGNTKNGNKYLAWAFVEAANFAIRSCPEARRFYERKKRARNRIVAIKALAHKLARACYYMLREHKPFEVTRCFG

SEQ ID NO: 414819 - protein, 525 aa, unidentified
MSHKARTSRRPKQPQPILKPHGKIDHRVQQVGPERLGIVTVDCAKARSKWMLADFYANVLVPPTEVEHTRAGLENMLQHVRQAVQEHRLRDLLVAIERTGNYHTPIQRAFRRAQFETRIVHPFATKQFRQVDHPGVKTDDIDLAALHRATIVGFALAEQTLESPYRQLQLLVRHRRDLVDKRAALRCQIREHVHLNLPGYADLFGQHGSHFWDRPLPLTIARHFASAAQVAAVGFEGLAHLLTQHGIHFQRPTLLRILAWAQDADPPHEDALMRQRILADLDDDFTKKTQQILALERDIAGYLVQTPYMLLMAIPGINVVSAADLAGEMGPIEHYPNANAITGRAGLFPGRYQSDQVDQTTSLIRCGNKRLRDALMQIGDNLITCNDHFHGLAELWRARDVDPRLQRVRVVKQFSRLAFAMVAGRQVVPHRCCQTPDYLLHKLLPFELDHLTPLEDMRRHLFAAADLVPNNVRPQEAAALEEDSSRMTRSRKSGGLKHISEAIRLVVARLLGQQVQSDAEVQSSD

SEQ ID NO: 414820 - protein, 366 aa, unidentified
MLQKAELSCEADSENDLGGSSETMYSIGLDVHKRTISYCVKDAAGRVHMEGKIGSTRRELDSWIKTLPQPRTIAMEATIFTGWIYDHLLPHAEQVKVAHPLMLRAIAAAKRKNDKIDASKIADCLRCDFLPECYMTSTEIRDRRRTLRYRGLLVKQMVQMKNRISGLLMEKGVTHTKRRLHKVGYFAELMAGNEEIDQSIRPLLKLSREHIVRAQKLDYALVSSLERDPLLVERLKRLRTVPGVGPITALTWALEIGDVARFRSIKQAISYCGLCGAEKSSADKMLRTPISKQRNKHIQHVLVEAAKLAPRQCHELALIYEKEMQRGNRNRATLAVARKIVAYLLAVERREKDFVPTEEFGGTAAA

SEQ ID NO: 414821 - protein, 347 aa, unidentified
MRFYTKQHNFYCGIDLHTTKMYLCILNQQGETVFHRNMKTRPDIFLHAIKPFRDDLVVSAECMFCWYWLADLCADQKIPFILGHALYMRAIHGGKSKNDRIDSKKIAALLRGGLIPQAYVYPSTMRSTRDLLRRRNHFMRKRAELFSHTQNTATQYNFSEPLGRIAKPKNREGLLDRFEDPAVKKSIEANLEMIITYDRVIGDLERDIVKSAINHDPVAYALLKSIPGIGKIIALDILYEIENINRFPRVQDFVSYSRLVKCAKESNGKLYGSSGKKIGNAHLRWAFSLAAQLFLKGNEDGKKYHQKLVNKHNKGKALSILAHKLGRAVYFMLKNQRPFDMEKFLNY

SEQ ID NO: 414822 - protein, 337 aa, unidentified
MDTSKHIFQLHGVNAAEEPVLRKKLRRKEMVTFFEKLAPTVIGIEACSASNHWARLLQSFGHTVKLIAPQLVKPYVKRGKNDAADAEALCEAMSRPTMRFVPVKTTEQQTALMLVGVRDRLIRNRTQLINAIRGYAGEFGYTAAKGKAHLGPLLERIQADESLPGLARELFVAQAKEYAQLQAQIDEVDAKLLAWHRADECSQRLAKIPGVGPIGAVLLKMKTPEPELFRSGRQFAAWIGLTPKDHSTAGKVRLGVITRAGDEGLRSVLVVGATAVVQHVRRGGRASPWLTALLKRKSPKLAAVALANKMARVAWKLMITGENYAVKSTPAVLAGAA

SEQ ID NO: 414823 - protein, 349 aa, unidentified
MRHIGVDLHKLNFVVCFLDEAGNNSLMTFALTQKGLEEFTKLLRPDDALAVEASQNAYFFIRQVGGRLARVVLVNTYKFAPIAKSKKKTDKHDALTLAHYLKMDALPEVSVPSDEIIQLRNLLVARHSLVEMSTRLKNMAHAALTRNGVAFTRKVFASKKSREKLLEIEGLTSADRQILLASLRQMEQLEAEAAGLESQIVQRGRRLKGIERLLQITGLNLLTAITLLAEIGEIGWFESSKQLVSYAGLATSVRQSGNRDRRGKITKQGRKRLRTVVTRAVLSMVNRSSNPLMDFYQRKKREKGSGKAIVAAARKLLVIIWVMLKKERDYWYIKERLYEGKLRALEAAA

SEQ ID NO: 414824 - protein, 434 aa, unidentified
MSSPIPDVVAWVGLDWADQEHQGRLQAVGSSQVESFVLVQRPEALQGWVSQLRTRFPFGRVAIAVEQARGALIYALMTYDSLVLYPVPPKTLADYRKAFFSSGAKSDPEDADLLLELVRCHADRLRAWQPDDTRTRQIQMLSEQRRKLVDDRTRLTNRLTTWLKASFPQALEWAGELGTAQACAFLTRWPSLAALQQARRSQVCHFYLHHGGKDSDSLESSLDQIRQTQPLTSDPAVLQVSALMVRLLAQQLSALGSTLQELDQAIAPLFAQHPDQALWDSFPGAGPVLAPRLLAAFGADRQRYHEAREVQQFSGIAPVTAKSGKSCWVHWRWACPKFLRQSFHEFAAHSRRWSPWARAYYEQQIEKGAEHHAAIRALAFKWIRILYRCWKDRTPYDEQRYVRALRRRGSPLVNRLQTQAALSAAPGGTMLKKT

SEQ ID NO: 414825 - protein, 337 aa, unidentified
MEQQTQYVGIDLHRRRSVIVRRTGAGETLDTVRIDNDPVALAKELAKAGEHPEVILEACYGWYWAADVIQECGGNLHLAHPLGNNWGNRRVKTDERDATDLVDLLRLGRLAESWVAPPSQRELRELVRYRAKLVHLRTSLKAQVHAVLAKEGVPVPMSDLFGVGGRRLLDDVHLGDAYRLRVNSLRDLIGHVDREITVVENQVAPIFAGDLGFHAVQAIPGVGPVLAAVFVAEIGDVSRFTSARHLCSWAGLTPKHKESDVVVRRGHITKQGSRLVRWAAVEAVARQSTDSPIRRHHRHVGERRGTKIGRVAAARKLLIYVYYGLRDGEIRCLAQGE

SEQ ID NO: 414826 - protein, 342 aa, unidentified
MEHYAGIDVSLEYSSVCVVEANGKILREARVASEPEALIGWFRSSGFELERIGLEAGPLSQWLFAAMREAELAVELLETRHVRKAFEAMPVKSDRNDARGIAQLMRLGWFRSVHCKSMSAQETRTLLTARKLVQSKLRDVENSLRGILRGFGLKVGKTTDLKFAGRIEQLVVGHPHLQVIAKALLAVRAVLRKEFAAFEKQVRQVARSDARARLLMSMPAVGPIVSLTYASAIDDPTRFKSSKQAGAHFGLTPKKYQSGETDYTGRISKIGDSSVRTALYEAAHVMLTKPLKGCTQLKSWAMRIARRAGMSKAKVALARRLAVIMHRMLADGTPFNAAAAAN

SEQ ID NO: 414827 - protein, 275 aa, unidentified
MANLNQFCDFTKLIGIDIAKSVFQIYSCDTQTGEITNVQIKRDKVLESLANCGKCLIGMEACGSSQYWARKLQALGHTVRLMDPKLVKPFVRHNKSDKADAEGVYHALVSGVRAVAVKTETERDIQTLLTMRALLVKQRTARINHVRGLLAEYGHVMPRNVNQFDNKVDECINSLEGDAVQLVINMMRDTVKSIRDDQDRIKTLQREISRLANQTRNAKHFLTVPGVGETIMAYMCVLLADPTQFSSARQFAAYLGLVPMHTGSGGKTVTTKIPG

SEQ ID NO: 414828 - protein, 395 aa, unidentified
MRAYVGMDVHCKECVFVAQGEDGRKLVEGRIETSAEGFESLRTRYGLEAGTRVAIETGTVAFFAARHLARQGFEPVVVDAHEVRLKASRPNQKSDRRDAVELCEGVRRGIYRAVIHVPDATTQRLRETLSRRRHFVRLMTREVNAVKYMLRAEGLADLARKLKTDAAWDALHERMSFAPDQQAHLSCHRAVWSCAQAQVARLEAELDELTRHYAEPCRRLQAIPGFGPIVSLTVVAALSDVSRFPSAKHVASYAGLVPSTYQTGEREHQGRITKRGSPDLRAMLCEAAHQAARPRHPLNPFFARVCARHGYRKATIAVAHRLLRISFAMLRKGCEFDVGRLGVEAGPFEVRSTRWYRMKDASARSKAPVTRPGSGLPGRRAAFPQAAAGSATPEN

SEQ ID NO: 414829 - protein, 342 aa, unidentified
MQISTIGIDIGKNSFHFVGFDARGGIVIRRQCSRTQLVRALANVPPCLVGMEACCGAHHLGRILIAQGHDVRLIPPQYVKPFVKSHKNDLLDAEAIGEAVQRPTMRFVPLKTMEQLDLQAIHRLRTRLVGRRTAVINQMRGFLLERGVTCPIGREALVKRFPKVLDNPALGLSVRFCRLLKQLRDEWRLLDDDIEEVDQEILSLARDDEACDRLMQVPGIGPLTATALVAAVGNGAAFAKGRDLAAWLGLVPRQHSTGGKTVLRGISKRGNAYLRCLFIHGARSVCRHHRQKPHRLGRWLTNLEARAHPNVVVVALANKLVRTAWAVLQRNTHYDGRLLANA

SEQ ID NO: 414830 - protein, 378 aa, unidentified
MNRIIKIGMDVHTTNYTLCIFEPSFEHDGTVHCITQVKPEVKNIIHVIETFKKKHENEELNIVCGYEAGCLGYSLYHELKEKGIECSILAPTTMKTEKGGRKLKNDYRDAKMIAECLAYGGYSAVHVPTELDNSVKEFIRMRDDIKDNLKSIKQQIIAFLTRNGKQFEGKSYWTRKHIDWINTVSFSEPLLQDTLNEYMIEYNHLCDRVEILDRQIEEISLKEEYVEKVQQLQCLIGIKTHTALSLIVETSDFNRFKKGNMYSAYLGLIPGDDSSGGHENKVGITKAGNSHLRRLLVEAAQGYTRGRVGFKSKDLKSRQEKCSSEVVAYADRANERLRRKYYRMTLRGKKYNVAKTAIARELACFVWGIMTDHIDLCS

SEQ ID NO: 414831 - protein, 403 aa, unidentified
MNMNAVGIDVSKGKSMVAILRPYGEIISKPFEVKHTVSGIRSLIEQIQSIDGESRIVMEHTGRYYEPLVRELSKADLFVSAINPKLIKDFGDNSLRKVKSDKADAVKIARYTLDSWTEHRQYSLMDEIRNQLKTMNRQFDFYMKHKTAMKNNLISILDQTYPGANTYFDSPAREDGSQKWVDFSATYWHVDCVRKLSLNAFIDHYQKWCKRRKYNFSRSKAVEIYEASKELVSILPKDDLTKLIIKQAVEQLNTASQTVEQLRTMMNEAASKLPEYPVVMAMKGVGKSLGPQLMAEIGDVSRFTHKGALTAFAGVDPGVNESGSYEQKSVPASKRGSSTLRKTLFQVMDVLIKTKPQDDPVYLFMDKKRAQGKPYYVYMTAGANKFLRIYYGRVKEYLSSLPE

SEQ ID NO: 414832 - protein, 402 aa, unidentified
MTPHSIVRSLLLPGWKDTATSKGAANVTMIDAERPDTKVEVILGVDTHLNFHVAVAIDHLGRRLGESSVPTTVQGYERLLRWAEGFGPLRCAGVEGTSSYGAGLARHLRARGIEVLEVERPQHRRRSLRRNVQKSDPSDAEAAARAVLAGEASGLPKSADGTVEMIRALRVARRSAIKARTQAANQLQALRVTAPEELFDRLRGLSTKELVSVAARFRLADDPRDVPTATKFALRSVARRYEVLSAEIAELEAHLDRLVAQVDPELVSLPGIGTDSAATLLIVAGDNPQRLGSEASFASLCGVSPIEASSGKVVRHRLNRGGNREANRALYMICLARMRRDPRTKEYVARRTQEGKSKPEIIRCLKRYVAREAYRVLISCGARSSPTGPRDEAHIASGSSAA

SEQ ID NO: 414833 - protein, 343 aa, unidentified
MQTITTVGFDIAKSVFQVHGVNAAGQVVIRRQLKRRHVLAFFQKLPACLIGIEACASSHHWSRELQAIGHTVRLMPPAYVKPYVKRQKNDMADAEAICEAVARANMRFVPTKTPEQQSCLMLHRTRHMFIRQQTAVINSIRAHLAEFGIVAPVGRKGVTELLQVVADPNDKRVPEIARTCLAALGAQLLALKKQILEFDRMILAWHRSNQTSKRLHYIPGVGPMLATALVASVADARTFRSGRNFSAWIGLVPKQHSSGGKERLGSISKQGDRYLRSLFVAGALAVIRYAKIHGTGHRPWLTALLGRRPTKVAAIALANKIARMAWAMMAKEERYKQSAALAR

SEQ ID NO: 414834 - protein, 363 aa, unidentified
MFVERTSVGLDVHARSVAAAAIDGQTGEVIKARLAPAHAQVLEWVSRLPGPVAVAYEAGPTGFGLARALSGAGVRCVVAASSKLQRPAGDRIKTDARDALHLARLLRLDEMVSVRVPPLAEEAARDLVRAREDSRQDLMRSRHRLSKLLLRHGIVYDDGKAWSELHDRWLRHQRLDAPATQAAFDDAYETVLLAEARRDRLDEKITAIAGDSEFTALARRLPCLRGISTLTGFALAVEIGDWQRFTGASIGAYLGLVPSEHSSGQSRSQGPITKTGNTHVRRLLIEAAWHHRTPYRPASCCSDAGIKPTRRPARVVMPVTSGCTRAGLPTTCARSAASSPTSPSLANSPAGAGRWRCCPTDPA

SEQ ID NO: 414835 - protein, 351 aa, unidentified
MGIHYIGADVHCNNTELAVEQKGRIVQRYSVPTTVRAIRDALDQIGGTRHLALEEGPLAGWLYRNLVDQVDTLVVCNPRRNKLIAEDDSDKDDPIDAAKLAALLRGGYLRAVYHSRDEDRVRFKEWVALYHDRVEEATRYINKIRACGRLHGIAIPRRVLRDAQARETWLGSLESEDLAEQLRMVWMSYETAAVQVQHTRTRLRDLARAYPIIDYWTEVPGIGWIRSITLFAYLDTPWRFRKRNQLWKYCGVGLQRTTSGRDAKGRPRPAQLKLAWAVNRHLKNVVIGAALTAIHSQDNVFRRDYERMVADGMKPCNARHTVARKLLTVLWGMWKTNRRFEASSGQTDSGS

SEQ ID NO: 414836 - protein, 343 aa, unidentified
MQIHSVGIDLGKTTFHLVALGAAAKIVVRKKFTRKQLLAFTANMPISLIGLEACSGAHFLGRALREQGHDVRLIAGQFVKPFVKSNKNDFVDAEAIAEAVERKNMRFVPIKTDDQLDLQGIHRVRDRLISRRTAVINQLRAFLLERGMAIAQRPAKLKAAMGNILGNAEVDLTPRMRSLIAILWSEWKLVQKQIEDLDLELERISSSDAGCTRIRQIPGIGPVTATAIVAAIGNGAAFRKGRDFAAWLGIVPRQYSTGGKAKLLGISKRGNVYLRKVLIHGARAAVLRIKRDRAPIGAWLDALDARAPKNVVVVAMANKLARIAWAVLSSGEEYRPIAKAVTI

SEQ ID NO: 414837 - protein, 368 aa, unidentified
MNIVYERCAGIDVHKRNVVVCAITPDQLGQRHKEQCTFSTMMPDLLRMRQWFQNLGVTHVAMESTGSFWKPVFNVLEGYMEVLVVNAQHLKAVPGRKTDLKDAEWIADLLQHGLLRPSFVPPPFQRELRELTRYRTSVIEERSRTINRLQKVLEDTNIKLASVATDLMGQSAREMLAAFLVGETNPTVVAQLARGKMRAKRDLLVQALQGQFKPHHRVLISEQLAHIDALDEEIERLSAEIAQRLRPYEPQIKRLETIPGIKRRLAEVILAEVGPDMQRFPSARHLASWAGMCPGNRESAGKRLSGKTRKGSPWLRTALVEAAHASSSITFWLRRKTTRNLEGTTSTIMTGKQSRSGSFTAWRSLGRK

SEQ ID NO: 414838 - protein, 343 aa, unidentified
MEYGAIDLHTKESEIRIVTADGPVVLHRRVATKREALAAVFGGRPRLRILLESGTESEWVAQHVEALGHEVVVADPNYAPMYGQRNRRIKTDRRDVIGLADANRLGIYRPAHRVSSAQRTVRRQLQVRDQLVRMRTQVINLMRGQLRSEGLRVRSGRAESFVARYQALEVPAALRAVLEPLVQGLTALAPLIAAADTWAHETAHGDGVTRRLMTAPGVGPITALSFQSTLDTVTRFRGPGAVSAYLGVVPQEDSSGDRQRRGRITKAGPARVRGVLVQASWTVWRSPRGSATLHAWVHRLADRRGKRIAIVALARRLARILFAMWRDGRDFQPARVSRAATAA

SEQ ID NO: 414839 - protein, 409 aa, unidentified
MLLFLGDDWAEEHHDVELQNESGTVLARTKLPEGIAGIAKLHAMIGEQLGDEDEAEVIVGIETERGPWVQALVAAGYRVYAVNPLQVARFRERLGVSGAKSDTKDAHVLADMVRTFGEQLRPIASDSPQAEAVKVLTRAHKTLIWERTRHLLRLRQSLREFFPAALVAFDDLAAADALQLLAAAPDPASAAGLSLEAIEAALKQARRHGRAAKAQAIAEALRADYLGQPTVVTAAYAATVRAQVAILTVLNEQITTMGDQVEANFSRHPDAEVYLSQPGLGVVLGARVLAEFGDDSTRYADAKARRNYAGTSPITRQSGKKKVVSARHIHNDRLIDALGLQAFAALLRSPGARTYYDQLRARGISHRAALRQLGNRLVGILHGCLKTGTLYNETKAWTPPQPQDQQMAA

SEQ ID NO: 414840 - protein, 350 aa, unidentified
MLIIGCDYHPAFQQIAFVDTATGECGERRLEHREEAEKFYRDLAAQGIKVRVGMEASGHARWFERLLAELQYELWIGDAAVICTKRVRKQKTDRQDAQLILNLMLKDDFPQIWVASWENRDLRQLLWHRHRMVQARTRIMNQLQAVAINEGLRCKKRLWRESGREQLEAFRLAPWASRRREDLLKLLDGLNPTIAELTQAIEQEVEKCPAAQRLRTHPGVGPLTALAFVLIIGRADRFQCGKQIASYLGLVPLEDSSGNRRRLGHITKQGNALLRFLLVEAAQVTARSLPEWRSKYVHLTMRRGRKIAKVAMARKLAVRMYWMMRKEWDYGMLTKFGSHAGKPGTGDGVK

SEQ ID NO: 414841 - protein, 372 aa, unidentified
MSEAKIWIGLDLGLTRTSVCITDSEGIPLRERECDSNLVALKEALAGFSIDRIGGMAVEAGAGTHIVRKLRSAGFPVAMFEARKASKFLSLRRNKTDASDARGLADLARLGRHSVSQVHLKTTACQQIRSSLVVRKRFIMMRVAAEALLRSNLALHGRRLKPVYSRKGLRAQVKMEIAAVALEEGINLEPNLGALLSVCESLRAYVEKLDRDLADKAKSLEVCRLLMEVPGIGPVCALSFYSAIEDPTRFRVASDVGAYLGLIPRRYQSGAASRTRGITKTGSRLTRGHLVMAAAVFARTAPDCSLKSWYLALRERAGSKRARVALARKLAVILLAMWKDDAHFELWRTAPAAGLSERSPAERKAGVTSPIQ

SEQ ID NO: 414842 - protein, 343 aa, unidentified
MSKRTATESVPRYVGLDYHQASVQVCVMDAAGRVRRNVRTANDTRQVIRAVGAGGPQVQAAVEACCGAAAFVDDLTAQAGWHVVQAHPGFTSRMRQNPDKSDCSDAYLLADLRRVGYLPVVWTASPALRDLRCLVRYRQQLVAAQRNVKLRIRALLREHRLKPTLKKLWGPSGRRWLEALELPTLARWVLDQHLAEWQHQATRLAACERRVAAAVKGDAVVAKLLTLPGVGLVTAAVLRAEIGRFDRFTSGKALAHYCGLSPRNASSGQRQADAGLIKSGHPALRAILIQTGHRLSQRDARWKPYKAALRARGKPGSVAAAAIANRWVRWLYYQMVLLEKEAA

SEQ ID NO: 414843 - protein, 335 aa, unidentified
MGIDLHRRRSVIVRMTTDGDPLECIRISNDAERLATVMARAGESPEVVLEATYGWYWAVDALREQGAQVHLAHPLGVKAFEYRRVKNDERDARDLADLLRMGRLPEAWIAPPATRELRELVRHRAKLVGIRSNCKAQIHAVLAKCGIQISMTDLFGLAGTELLDRLQLPKPYAARIASLRRIITALDFEIDAFAGQVRARLARDPGFVAVQSIPGVGPILGAVFVAEVGDVHRFARAEELTCWAGLTPKHHESDKHVHRGRITKQGSRLVRWAAIESVQILPKTSVVGRIRDRVGDRRGRNIGVVAAARVQLEFVFYALRDHRVRALQGTRPVAA

SEQ ID NO: 414844 - protein, 344 aa, unidentified
MDHFGGLDVSVKETSICIVDDTGRIVKEVKVASEPAALLKVLGNPTYRFKRIGLEAGPLSQWLFSALAEAELPVICVETRHMQAVPKAQINKTDRNDARGIAQMIRVGLYRPVHVKTLRSQKLRMLLTHRKLLQSKAIAIENDLRGTLRNFGLKVGMVGKVRFEARIQELVENIPDLAVLVEPLLIVRRVLREQIVILHRRLLAIVREDEVCRRLMTTPGVGPVVALTYRATVDVPARFRKSKSVGAVFGLTCSRYQSGEIDWSGKISRCGDEMMRTMLYEAAQSMMHSKKWSWLKAWAMQIARRRGMKKAIVALARRLAVIMHRIWVDGTEFRWTREQATAAA

SEQ ID NO: 414845 - protein, 392 aa, unidentified
MLYIGIDVAKSKHDCFIIDSDGVVYTDNLRITNDRIGFNKLLETILNALDGEPATNAKVGLEHTGHYSINIKRFLESQGFVVTCFNPLETSAFRKASTLRRTKTDKCDAKIIATMLFSDESIPTSSPSYQIQELKSLTRHRFRLIGYRGKLKVSFARIIDVVFPEFPGFVWSVNQKSSHQLLLELPTPDAIAACHLTRLTNLIRKSSHGRYGREKAVALRDLAASSIGLSDEALAFELQQTIRMIQNVQTEIDALDRKIKSIVQELHTPLLTIPGISYTLAAIILAEIGDINNFSNPSKLQAFAGLDPSTYQSGKYTASYAAMVKRGSTYLRWAMFQAARLVAMRDKTFADYLAKKRSEGKHFNVAISHVSKKLLRTIFYMLKHNEAFVPQS

SEQ ID NO: 414846 - protein, 453 aa, unidentified
MEKSSTDDQLMNLEVLHPNAAGIDIGNAAHYVAVPPDRDTEPVRRFACFTQDVRALADWLKQCGIVTVAMQSTGVYWLPVYEVLVERGFEVFLVNARHTKNLPGRKSDVQECQWLMKLHTYGLLNNSFRPTEEICVLRTYWRQRDEHVKAASAVIQRMQKVLTEMNVQIANVISDISGVTGMAILDAILKGERDRYQLADLANPRIQASKEDIARSLEGNWRPELLFVLRQQRDLYHEYQKRIGECDEVIQLHLRTLEDKAQPENKPENPKRGKRAGGNAPRFDLRGELYRITGVDLTRIDGIHVMIAQTILSEVGLDMSRWPTEAHFASWLGLCPDNKITGGKIYHRGSRHVENRAATALRMAATSLWRSKTYLGAKFKRLRTKLGAPKAITAMAHHLARLVYRMLKYGQEYIDKGMEYYQQRYQNQQIKWLEKKAEDLGLTITLAPVSIAK

SEQ ID NO: 414847 - protein, 430 aa, unidentified
MKSNTQNAKIEAITEKTLVLGIDVGSKTHYARAFDYRGIEYSKKPFKFSNTEVGFATFKEWILDLKERHEKDKVVPGMEPTGHYWFNLGKFLQDNEMKPVLVNPHHVKKSKELDDNNPTKNDRKDPKVIAGLVREGRYMIPYLPDGVYADLRTASNIRFQLQAELTRIQNRISRWFNIYFPEYKTVYGKPDAKSGMLILKAAPLPEDILTLGIDGVNQIWRDAKLRAVGKARAKTLIEAAEHSIGSKEGTVSARMEIRMLLEDYESKNMRLQEVMVLIEELVKEIPMAEKLLEIKGVGIRTVSGFLAEVGDISRFNNPKELQKLAGLALVENSSGKHKGKTTISRRGRKRLRYLLFEVAMSLVAKNPEFRELHNYYTTRRLNPLKKMQSLMAIAAKLIRVFYAMLTKGVDYDPKKMISDIKRPTVYLQAA

SEQ ID NO: 414848 - protein, 406 aa, unidentified
MTAVMIGVDPHKATHTAVVIGPAEEPLGELRVRASAGQAEKLVAWAADWPERTWAVEGAAGLGRLLAQQLVAAGERVLDVQPKLASRVRLLQAGDTNKNDPNDALPVAVAALRSKTARPVMAEDYPAVLKVWSKRHRDLARLRNQVACRLHAVLCDLVPGGHPKEISAAQAARILEQASPSGAVDQARAELAAEFPGDMRRLDAQLRDTRKKLAAAVRASGTTLTEVFGVGPVIAGTIIGDIADVSRFPGRDHFASCNGTAPVEVSSGNRKVHRLSLRGNRRINHAIHMAAITQIRHKHSDGRAYYDKKIAEGKTHKEALRSLKRRISDAIYARLLADARRAGQRPARAREGNRGTTLTPARPAHTPNAGSSDKPLPDPGTTIRPGTRAATPSPSKPTSKKTLTTT

SEQ ID NO: 414849 - protein, 342 aa, unidentified
MGRLARNINRARTVDWIRFRRDRIVQGRARKREYMEVYVGIDISKDSLDVAVHKSNKQWKFSNDPAGIARLCKMLTKLEPTLVVFEATGGYEMPLYLSLGEAGLPSAPVNPRQVRDFARSTGKLAKTDFLDARAIAHFGYAIQPVPHPVPDTQELKIAQARRVQLLEMITAENNRLKGAPQAIRKRIEAHIAWLKKELADTDRQLTESIEKDPIWREKDNLLQGTPGVGPTLSATMIAQLPELGTLNRREIAALVGVAPLNRDSGVMHGRRTIWGGRAHVRAVLYMATLVATRYNPVIRDFYTRLCAAGKRKKVALTACMRKLLTILNSMLKHRVHWRYSPC

SEQ ID NO: 414850 - protein, 340 aa, unidentified
MNEITTIGLDLAKHVFQVHGVDASGVTVVRKRLRRSEMLAFFARLPSCLIGLEACATAHYWARKLQAIGHEVRLMPAQYVKAYVKRNKNDAADAEAICEAVQRPTMRFVPVKTAEQQAALLVHRGRERLVRQRTALVNALRAHLAEFGVIAPLGLRNVARLIAIVRDESDARMPDLAREVLRVLAEQVEQLQAAVAAMEKQLMAWHKSNPVSQRLATIPGIGPIIATAIAATVVEASGFRSGREFAAWLGLVPRQHSTGGKARLGGISKRGNRYLRRLLINGASANLLRSKATNADPWVIGLRRRRPSLVVAVALANKTARIAWAVMHRQENYQRMAVAA

SEQ ID NO: 414851 - protein, 360 aa, unidentified
MTSEPGPRHIVIGVDTHKLTHHAAVLDADTGKLLADREFPATRTGYRRLLSWVGSHGEVVKAGLEGTGSYGAGLQRYLHAHGVAVIEVSRPNRQDRRARGKSDPIDAINAARAVLSEMATTTPKHRDGFVEAVRQIRAVRRGAVKARRAALHQIHGLLWCAPDELRAKLSRYDRAALVARCARLRIPTTGALDDPTVTARRMLRRLAKRIQMLDDEIAEANKELDAILASQAPTLLAVNGVGTEAAGQILTTAGENIGRLKSEASLARLCGVAPIPASTGNTTRHRLHRGGDRDANSAIHLIVVNRLRWHEPTKRYLERRTQEGKTKKEIIRCLKRAVVRELYRALQADLQRPPQALDAA

SEQ ID NO: 414852 - protein, 331 aa, unidentified
MFPVGIDVSKNTLDLCILYDGIKGRIKTRNIQNNRHSVENILRWLRLQHCGPEDVHVVMEATGVYHERLATELHDAGFRVSLANPHRSREFARDMGIMTKTDKVDAYMLACYAFLKKPHHWEPPSPEIRYLAALLRRRDVLLGDALREENRLEKYLSTDTPADIISSCRRMAQLLREEVSNIERQIKAHIKASPALRRDYTLLNSIKSVGPQLGMHMLVELRSHNFASAEQAAAFLGVVPIEKRSGTSVRSRPRMSKIGPPQLRARLYMSALCGKIYNKRMRNIYDEMCLRGKPKMVAIGALMRKLVHWCYGVLKTGTVFNDEGLKQVLST

SEQ ID NO: 414853 - protein, 409 aa, unidentified
MRYYIGVDWGDEEHAVWVEDEQGQRVSAGMVSHSPVGFSEWGRQLDEWRAQGLGLWAAIERPEGRVVDVLLDHGVRVYPVNPKALDRARDRFRQSGAKDDLFDARVLAGFLRTDHAHLQALEPSSEASQELKLLTEDYQRQVRTQTRLVNQLTATLKAYYPRALDVAELTTALAAAFLQAYPTPATLMTLTERQWQRWAKGHHLSEVRTTDLWTKLQQPQLPVPPHVVRAKSRLMQALVTELTAVVAAVASYRQAIDDVFATMPAAAWARTLPVGEHGVTVPTLWARLGDAPGRWESFRHLQAQAGMVPITVRSGKQVVVRFRFACDKPLRYAVDQLAWLSLQRSEWARAYYDEQRARGHRHRRALRALGAKWLKIIFIMWQRHVPYSEEHHLATMARQALRHPEKKIA

SEQ ID NO: 414854 - protein, 318 aa, unidentified
MSQDQDSVVGIDVSKAQLDSYFSLGGQRHIDRNDEAGQQRLVERLQAASPGLIVLEATGGLERALVARMLAGGLPVAVVNPRQVRDFAKATGRLAKTDRLDAENLARFAAAVKPAQRGLADEATQELSDLLARRRQLVEMLAMEKNRLRQAPSKGIRQDIRKHIEWLQQRLRATDGGLRQAVETSDAWQAKRDLLAEIQGIGDVTVFTLIACLPELGHLDRKAIAALVGVAPLARDSGTLKGRRSVWGGRAVVRQALYMATLSAVRFNPVIRAFYARLRAAGKLPKVALVACMRKLLTIINAMLRDNARFQPQLHQST

SEQ ID NO: 414855 - protein, 380 aa, unidentified
MRTVSGLDIHKDSIFMCILDEQGKKTEEKFGVTTREIKRMSSVLHTHYVSDICMESTGIYWIPIWRLLENDFSLHLVNPQFLKQLPGRKSDVKDAQWIATALLKELVRDSFVPDGNIQRLRQYGRRINEINKDLVRCEQRIDMLLQRCNIRLSNYVSRTKNKSYRKVVDALIAGETSADALVKLIHGRTVNRYGKSAVHEALEGCICESDSDLLQQYTQSFDMLQLQKQQCLDAMVRMCNQLYPEAFSFLLTVPGIKLVSAAIIISEIGDNMELFATAAALVSWAGLRPRNDESAGKIKSRQITHGNKYLRKALMECANGAARTKGSVFYFRFWHLKGMKKHHNAIIVAIARQILTIIWTLLSKKENFDQMYRIKKKTAS

SEQ ID NO: 414856 - protein, 396 aa, unidentified
MISVGIDVSKGKSTVCIMKPCGEILESPFDIGHTADELDSLISLIKSFDEETRVVMEDTGHYHLPVATYLSSHNIFVCCVNALRMKKFCSQSIRRAKTDKIDSIKIASFGITYWNELVKAYPSNVIYDELKFLARQYYQVTGMLVKSKVNFSNLLDQVMPKINDVLSNQGENHKLTEFVSRYIHFQNILDMGEMKFTSDYCKWAKKKGYRLNERKAAEILVLAQNGIPTLPNSQSVKIAVSEAIKLIHSVEESRNTILAQMQELCNTLPEYSVVKEMDCIGDTLAPRIIAEIGDVRRFKNKHSLVAYAGIDAPPYQSGAFHASERHISKRGNSYLRKTGYEIMQSLIKHKPADNAVYDFIQKKRSGGKCGKEAMIAGLNKFLRVYYGKVMEFYSEH

SEQ ID NO: 414857 - protein, 347 aa, unidentified
MRFYTRQHLHNCGVDLHARTMYVCVLDREGKVLVSQNIASAPEPFLELVAPYREDLAVAVECMFTWYWLADLCAREGIVFVLGHALYMRAIHGGKAKNDRIDAHKIAALLRGGMMPQAYVYPQAMRATRDLMRRRNYLMRQRAELLAHITNTNHQYNLPALGVRPARPAERAGLAGHFADVSVRKSVEVDLSVIEHYDQELPRLERYLESSAQAHDPVALAIVRTIHGMGKVLGLSILYEIHDIGRFARVQQFLSYCRLVKPTKESGGKILGHSGRKIGNAHLKWAFSEAAVCFLRANKPAQALRARLMAKHGKGKSLAIIAARIARAVYFMLRRSEAFDPERFFAH

SEQ ID NO: 414858 - protein, 349 aa, unidentified
MVVVGADVHKQTHTFVAVDEVGRELGHKTFPATTPGHRDAVCWARQRFGLELRWAIEDCRHLSARLERDLLTAGQKVVRVPPKMMAEQRRIARTRGKSDPIDALAVARAAQREPDLPVATHDEKSRELKLLVDRREDLVKQRTATINRLLWRVHELDPSWAPPAKSLDLAKHQEGLAARLAGVEGVVAEIARDELVEIVELTGKINELAKRIGGQARAAVPVLLAMPGVGELTAAKLVGETAGIGRFKSEAAFARHAGIAPIPVWSGNTAGRVRLTRSGNRQLNAAIHRIAVTQIRMDGLGKTYYEKKKAEGMSTPEALRCLKRRLARIVYNHLITEQTASTTPTPAAA

SEQ ID NO: 414859 - protein, 497 aa, unidentified
MKVQYERVAGIDVHKDMVKVAIRSPGDKRWTRKTEIVEFRTFYGVLQHMARELRRRGVTHVVLEASGIYTEPVYYALAEQDFTEVAVINPAHAKALKGHKTDAKDCARLAELFECGLLRGSCIPAPELKEVRDLTRYRTKTVQARTSEIQRLGKALESAGIKLGSVASDITGKSATAMIEALIDGERRGQVLADLAIGRMRTAGKLADLSQALAGRFTEHHALLCRLHRDRIAVLDAAVADLDQRIAGKAARWQREADLLTTVPGFGDVVAWAWLGEIGPAPHQWFPDHEKLACWVTLCPGNNISARKRKHSRTGDAGTYIKPMLVQAAWAAIRVRGRLQARYSRLVRRFGGDKNPGAKKKAITAIAHTLLKIAYQVLRAGQPYQEPGADFYTRRESPQQRQAFLQRQLQKLHPGRVAPVHCCTGAPSGPRMHVIRARGPGKPPGRFRSSAASRCFPPAGASFSSGGRWRARGVFACCVRQRACRGGPGSPPRSPSW

SEQ ID NO: 414860 - protein, 350 aa, unidentified
MSQLIRIGMDTSKKVFQLHGVDADERVVLSRKLSRHQMIRFFANLPPTVIGIEACGASHHWARTLGALGHEVWLMAPQLVKPYVRRSKNDAADAEALCEAMSRPTMRFVPVKTVGQQAALMLVGMRERLIGRRTQLANSIRGYAAEFGMTAPAGLSRVAPFLQQIASEETLPPLARDLFAQMAEEYEVLMEQIRELDKKLATWHRSQEVSRRLSGIPGIGPLAAALLLMKAPDPHLFRSGRDFAAWIGLTPRDHSSGGKVRHGGITRAGDSRLRSTLVVGATTVLRHVRQNGQSRLATPWLLSLLSRKKPKPAAVALANRMARIAWKLMTSGETYRKPMDAVALAAAAAC

SEQ ID NO: 414861 - protein, 426 aa, unidentified
MNCNQNFKISQVTEGTLVLGIDVGSNTHYARAFDWSGLELSKVFKFKNSFEGFQSFVLWVNDLCCKYNKSKVIAGLEPTGHYWFSLGELLKENNITIAIVNPYHVKQSKELDDNLQTKNDSKDPKIIAKLVIDGRYSFPYIPEGIYGELRVADKLKNDITQQIISIKNKIHRWLSIYFPEYEKIYSVVESKSGFLILKETPLPKDIVELGSEGIVKRWKQAKLRGVGLDKAKKLEEAAKKSIGCKNITSLARLEIKLLIEDYEYKQNQLNSITEELNKLCEKIPMIKEIAEIKGIGIATAISFVAEVGDIRRFKSAKQVQKYAGLALKENSSGKHKGLTRISKRGRKKLRTILFRAVIPLVGKNEEFSLIYRYYIERKENPLKKKQALTALCCKLIRIFFTILSKKIKYDEKKMVSDIKRPLELAA

SEQ ID NO: 414862 - protein, 361 aa, unidentified
MTGTVTWAGLDVHARSTHAAAINVMSGELVRAKFGAGLQEPLAWLAALPGPVKACYEAGPTGYGLYRAARAAGVEMIVIAPGKTPRGPSDRVKTDRKDAELLARLLLAGSLTAVKVPPPEFEAARDLMRAHDACRRDLMDARHRVSKLLLRYGRVYPEKSTWPVRHRGWLGRQQFDQVATELAYADALACVDAISARKSALALRLSELALDERWWPTVARLRSFHGIDTLTALALHLELGGDWHRFARAPQLAAWLGLTPTLNQSGESSRQGHITKTGSVLARRLLVEAAWHYARTPGPGVALVARQAGQPAHVLQISHRARQRLHRTHRKMRSRGKPGNVCVVAAARELSCFLWAAATAD

SEQ ID NO: 414863 - protein, 340 aa, unidentified
MSEITTIGLDLAKHVFQVHGIDAEGTTVLRKRLRRNQVLGFFSRLPRCVVGLEACATAQYWARELGALGHEVRLMPAQYVKAYVKRNKNDAADAEAICEAVQRPTMRFVAVKTAEQQAAQLLHRGREQLVRQRTMLVNALRAHLAEFGMVAAQGLRNVAQLIAIVRDASDLRLPDVARQVLQVLSAQLEHIEAAIAALEKQLMAWHKANAVSQRLASIPGIGPIIATAIATTVADPGVFRSGREFAAWLGLVPRQNSTGGKTRLGGITKRGNRYLRRLLINGASANLLRSKATKADPWVIGLRRRRPPLVVAVALANKTARIAWAVMLRQKEYQPRAVAA

SEQ ID NO: 414864 - protein, 461 aa, unidentified
MRKMKSTGPQKGSARAKVDWKALDVVHPEAAGIDVGGSEHWVAISPDRDPEPVRRFGCFTADLREMAKWLIDKGVQSVAMQSTGVYWMPVFEVLEQNGLEVYLVNARHTKNLPGRKSDVQECQWLLKLHAFGLLNNSFQPTHEIRIARTLWRHRGNLVAEAGSAIQRMQKALTEMNIQLGNVLTDLSGVSGMKIIGAILEGERDPWALAALARPEVKATPEDIAKSLEGNWREELLFVLKQEVELYRVYQQKIVDCDRQLRQHLESLKSTVDLQAQPLGPKPKGKTRSRNAPQFDLRTELYRITGIDWTQINGMDVLTAQTVIAETGADLSAFPSEKQFASWLGLCPTNEQSGGKILNRRTRKVVNRATGAFRNAAVTLIRSQSYLGAQYRRLRTRLGAPKAITAMARKLACLFYRLITRGQQYVDKGTEYYEAKYREQQIRSLAKRAQKLGLQLVIPKTA

SEQ ID NO: 414865 - protein, 335 aa, unidentified
MIYRWFVGIDVSKAELAVCIFEATENARHRFTVKNNPRGFAKLVRTLLARQVAISQTVICLENTGVYDDRLVAHLHENGWAVSIGKTTILKSVRPEHHRKDDGFDADLAAEYAHRFQDKLELHIPSPPVIEELRALYAERRRLVTRRAAILKLRREAHLRTHPTKTLIKLWRRRKAFYDRQIEDIERFMFELVKTDRQVYRRFKQMRAVFGELTALMWVTLFFGQERLNARRIASRFGHAPHGTQSGKMKKRDRTTGHGNGEMRRLFTMCAWSKGRYHPRFIAYKQKKLAQGKSRTLITNNIINKLIRIACAVWNQDGEFDPMYQSPFERMTVAA

SEQ ID NO: 414866 - protein, 336 aa, unidentified
MKPMPVGVDIAKNIMQVHYIDTETGEITNKAIKRSRFIEFFTNLAPCMIGMEACGGAHHWARQLIKMGHQVKLMPGEFVKAFNIRNKNDIADALAIWRAVQQPGKSVAVKTEQQQAMLALHRMRSQLMKFRLMQTNELHGLLAEYGEVMAKGYASLLRSVPDILTRLSERLPAVLIDSLREQLNEIQRIDKRITDTERRIRELSKDDPGVKAISEIPGVGLLTATAAVASMGDAKAFRSGREFAAWVGLVPRQTGTGGKLLLLGISKRGDKYLRKLLVNGAHSVIQNANEPGPWVTGLLKRRPINVVSVALANKMARKIWAVLAHGRPYQRDYAPN

SEQ ID NO: 414867 - protein, 355 aa, unidentified
MDKIKYIGLDVHRDTISAAVLNESGRLLQQSVLMTRTAAILDFIGGVRGSLHVTFEEGTHSAWLYDLLSRRVDKLVVCNPRKNALLKSGNKGDAIDARKLADLLRAGLLSPVYHGETSALEVQQLARSYLMLTEDTTRAMGRLKAVFRGQAISCTGRKLYGPKHRGEYLEALGAGALRRRAERLYQQLDALQQLRRDARHDLIVECRKHVEAKWLQTVPFLGPLRAAVLIGRVQTPHRFRTKRQFWTYCGLALETRDSAEYRVTDGQLERKRRPAQVRGLNWNYNHELKNVFKGAANAASVGQGVFREFYLGLLKKGMRPEMARLTLARKIAAIALKIWKKGESFDAEHLKSQAA

SEQ ID NO: 414868 - protein, 343 aa, unidentified
MKLHVLGIDLGKTVFHLVGLDSTGRVVIRKKCSRTQLLAFTANLQVQLIGMESCSGSHFLGRALRQQGHEVRLMPAQYVKPYVQTNKSDFLDAEAIAEAVQRPRMRFVPIKTEEQLDLQALHRVRERWVMRRTAVVNQIRSLLLERGLTLPKGRGYVDRQLPRILEDGELRLSGCFRVLLAQLKIELEQLTARIEEMDRVIQQTAKENEACQRLTEIPGVGPVTATALIAAVGNGSTFQKGRNLAAWMGIVPGEYSTGGKQKLLGISKRGNKYLRTLFIQGARSVVQQRHKQAPGLSHWLEQLLGRTHQNVVIVALANKLVRMAWAVLCKNERYRAPLLAVAT

SEQ ID NO: 414869 - protein, 358 aa, unidentified
MTTLIDDVTVIGGVDTHKHTHYAAVIDAHGRLLGHQQFPATSPGYGALRSWMRGYGHLASIGVESTGSYGAALARELTRQGEQVVEVNRPNRIARRMDGKSDRLDAEQIARAVLGETSTAIPKSKSGMIEVIRTLRVTRSSAVKSRTQAFNALSGIMIGAPSTLRDELVDLTKRTLVNRCLRLRPETEDLLSLATAPERMHLAGTKLALRDLARRWKALDDEIKQLSAQIDALVTNAAPDLIQLHGVGTEIAGQFLVTVGDNTDRIRTEAAFAKLCGVAPQPASSGRTTGRHRLSRSGDRAANSALYIIAIVRMRRHEPTRAYVERRTAEGLSKREIIRCLKRYIAREIYANLPQTRT

SEQ ID NO: 414870 - protein, 332 aa, unidentified
MYYVGIDLHKRDLVIAVEDERGPVGKPRRFACRDEAAIVAHLSALRPFRAVIEASASYRWLYDRLKPLGEVILAHPLRLRASIARPAKTDKLDAALLAHLLRMGQIPEAYAPPAAYQELRELTRARARLSRSATEAKNHLHGLLAARNIHPPYRNPFGVRGRRWMRSLEMGVVGNLERDELIGRLEHYDAQRDRLDGALEESAASFPQIESLQDIRGIGTYTALLVVAEIGEPERFSEPGQVASYAGLATRVYQSGGHDYHGHITRQGSPWLRWVLVQAAMKAIGRDRRLANFYERVRKRSSRHIARVAVARKLAEICWIRLRRWHRERAAA

SEQ ID NO: 414871 - protein, 421 aa, unidentified
MEETGEPAELVERVAALDIGKAALTACIRVPHEDKPGRRCQEVREYATTTRALLDLADHLRCQGVTLVVMEATSAYWKPPFYLLEAEGFECWLLNARHVKNAPGRPKTDKLDAVWLAKVAERGMCAPSLVHPKPIRQLRDLTRYRRTLIRERAREKQRLEKILEDAQIKLSAVVSDLFGVSGRAMIEALIAGQRSPRALARLARGTLRNKTRILEEALTGHFDDHHGFLCQMMLDRIDGLSNQIGQLDARVEQAIAPYSHQVTQLDEIAGVGTTSAQELIAETGVDMSRFPTAGHLVSWAKFAPIENSSAGKKKGGSTGKGNPWIGGTLGEIVLGASRSHTFLAERYRRIARRRGKKRAIVATGNTVLTIAYHLLCDPAARYTDLGPGFYDSKAGRERHARNLIRQLEHLTGKKVTLNEAA

SEQ ID NO: 414872 - protein, 365 aa, unidentified
MNANQVGVVANPGRLVVNQYVALDQYVALDVSLRKTAVCVLNSWGHVVTEADVPSEPGALISFIRTRAPHASRIGLESGPMSTWLWHALKAAGLPVICMDARHAHAALSVRPIKSDRNDARGLAEMVRVGWFKEVQVKSLGTHERMALLGVRRRLVDIRVEIDGQIRGILKTFGLVVGSGNKGAFAQRARMMAQDHPILSALVEKLLDVREVAAAKVAVLDKEIRRFVRDDPTLRRFLTVPGVGPVTALAFRATVDEPSRFRRARDVGPYLGLTPRRYQSGETDRQGHISKCGDRFTRTCLYEAANVLLTKVQRWSPLKAWGTRLAKRIGSKKARVALARKIAVILHCIWTDGTEFWWTKEMAAA

SEQ ID NO: 414873 - protein, 315 aa, unidentified
MLYDGIKGRIKTRNIQNNRHSVENIIRWLRLQHCGPEDVHVVMEATSVYHERLATELHDAGFRVFLANPHRSREFARGMGIMTKTDKVDAYMLACYAFLKKPHRWEPPAPEIRYLGALLRRRDVLLGDALREENRLEKYLSTDTPADIISSCRRMAQLLREEVSNIERQIKAHIKACPALRRDYTLLTSIKSVGPLLGMHMLVVLRSHNFTSAEQAAAFLGVVPIEKRSGTSVRSRPRMSKIGPPQLRAKLYMSALCGKIYNKRMRNIYDEMCLRGKPKMVAIGALMRKLVHWCYGVLKTGTVFNDESLKQVLST

SEQ ID NO: 414874 - protein, 351 aa, unidentified
MSHKTAATVVHTIGIDTGKNTLHLIGLDDQGAIVLREKIARGRIAARLANVPRCLIGIEAGMATHYVARELGALGHDVKQVPPAYSKPFRQGHKNDFRDAHAIAEAVQRPSTRCVPVKTDDQLDLQALHRVRSRLVGQRTAVINQIRGFLLEHGIAVRQGLRFLRQQLPDILAKRSDVLSPRMIRIMEDLSGDWRRLDERIEHITKEIEVLAGTDVNCGQLMTVPGIGPIVASATVAAIGNGAAFARGRDFAAWLGLVPKQMSTGDRTILGRITKRGNRYLRMLFVQGARAILLRPKSWVKHSFGPWLTTAARRLHRNILTIALANKLARIALSVLIQGRSYETRIVPAAA

SEQ ID NO: 414875 - protein, 455 aa, unidentified
MQAHPPPHYQREATVNTSDSTPDPVAGCTLFVGIDWAEDKHDFCAISSQGRTVKRGTVTHSAEGLAKLATSILDANNGDPTTVAIAIETPRGPVVDGCQPYGFRLFSINPKQLDRFRDRFSLAGSKNDQLDALVLADSLRTDAHLFTPIVQNHPTLVRLQGLNRIRQRLSGQFRQLANQLRDVLVHSFPALLKLCNAADEPFLWDLLERAPAPDQAARLRHSTLGSILQNHRIRRHTVDQLADACKAPALPITDAARGVAIEQISYLLPQLRLVHNQLRHCENQIEAATNAITGDRPQQDQTRDSQASPDHSDDQLLALRRDARIIRSCVGIGPTILSVLLAEVAPLIQARDLRALRARAGVAPVTRKSGRYRGVRMRYACNQHVRHALHAWARVAIRCDPPTREHYANLKARGHNHNRAVRGIMDRLLSVLVAMLKSQTTYEPTRRHAYLPQSP

SEQ ID NO: 414876 - protein, 469 aa, unidentified
MLGVLRVFKAGYRQRRRGCLKSGVNGGTNPAGVRVWEVIPMTSKTYSARKVNEIILDSMLKGREGQDLWIGVDVGKVEMQAVLNWGAGDFERPWKIANPRAIGKLVEHLKQLAVGRKLIVAMEPSGTYGDALRQACQDGGIVVHRVNPKIAHDYAEVFDGVPSQHDGKDAAVVAELSRCGKSTAWPWTTSPEREQQMEYWVDRMDNQRRLRQMWCGRIEGRLARHWPEVLMQLKLTSVTLLKALREYGGPAGLAADAQAARKLKGWGKTSLTSEAIERIMSGAKATMGVRQQAMDLLRLRDYAGEALAAREKLKEARVRLRKLSRGHKAMETLSGAVGNATACVLFVYLGDPAKYHCAAAYVKAMGLNLTERSSGLYQGKLKISKRGSSAVRYWMYLAALRLIKSHSPVRPWYLRKKQRDSQEGARALVGIMRRLGLALYHVGALGEEFDPRRLFPGRRRGAIEMQKGA

SEQ ID NO: 414877 - protein, 482 aa, unidentified
MATRKMSTFDRLQHGKLNRKQRQELQRRLNLDDPGLQVMHPDAAGIDIGNESHFVAIPPDRDATPIREFGSWTADLHVMASWLKEHGITTVALQSTGVYWIAVQEVLERAGLEVYLVNARGTKNVPGRKSDVQECEWLRKLHTYGLLRNSFRPPEEIRAVRTIWRQRDRWVQESGRAVQHMQKALTTMNVQLANAISDISGKTGQAIVRAIVAGERNPWKLAQHRDPRIAASKEEIAYSLQGHWRDDVIFELRQAVESYDFYQKQIAACEEELIKYTAAVPSRDITPKQDLPKDATPLPPSKSARRSKTRRKNQPGFDLAAELERTMGVDLTRIDGIDVMTAQVIFAEIGPNFIAFPSENHFASWLTLAPRRDISGGKVIRHIPAAGRNRAANALRMAAQSLSRSDSYLGARYRRLRMRLDGPLAVKAMARYLACLVYRMVTKGQAYVDRGAAHYEAKRQQRERVALERRAANLGLKLVPAA

SEQ ID NO: 414878 - protein, 363 aa, unidentified
MMSAPVGGIDPHQDTYTIGIIDTNGVELAHESFPTSATGYLDGIELLSAYGVEQVGIEGSAGWGAHAAIALVAAGFDCREVPAQRSAAQRRSRRLDKTDVVDAVAAARAVLAEPALGPVQTLEVYDSLVAKIEAVLEHRRMLVTVRTLVLHHVQDQISKLPVEIRDQLTTSGKIEARLRRLAHVDTSVVSTLAGEYRLSWLIPLVEHDRAMRRQIRQLEADIDALLDEHGTTLRDEPGVGPIAAATLIVEVGDPWRFARESKFARWCGTGAVAVSSGEGDGPPGKHRLDFRGNRRINSVLYIASVTQHRDLDDARLYIDRKLSEGKTRREARRAHKRHLANRVIRRMWKDESRRRQRPITTAA

SEQ ID NO: 414879 - protein, 393 aa, unidentified
MICVGIDVAKDKHDCFILSSEGEVLADVFTIQNNAEGFDMLLQTIRRCARPEDKIKVGLEATGHYSYNILGFLLDKGLDTYVINPLHTNLYRKSLSLRKTKTDRVDARTIAAMLMSDVDLKSYTDTAYHNEELKSLTRYRFDKVRERAKLKQSVSRLVTILFPELEKLVPSLHLASVYALLIEFPGAKQVAGAHLTHLKAILSDASKGRYGRDMAVTLRDAARCSVGSVMPAKSLELQHTIRLIRKLDAEIEDIETAIQSMMDEMQSPITTIPGIGVRMGAMILAEIGDFSRFDSPDKILAYAGMSPSTYQSGQLSLSGPYSHMEKRGSRYLRYALYNATKYVCLWDPAFAAYLAKKRGEGKHYNVALSHAAKKLVRLICALEKSQQSYRNAA

SEQ ID NO: 414880 - protein, 377 aa, unidentified
MHSENIAAYIGLDVHKETLAVAIAAPERLGEVRYYGTINNEAQAVRRLFQKLQGLYGNILSCYEAGPCGFGLCHQLTAMNIKCQVIAPSRIPKSPTDRIKNDHRDAISLARLLRAGELTPVWIPDLTHEAMRDLIRARAAAKRDSRVARQRILSMLLRTDKRYAGKHWTGKHRTWLANQSFSQLSQQIAFQHYCQSLEQIEDRILQLDQEISRLLPEWSLCNLVCQLQALKGVGQLIAITLVAELGDFSRFSNPKQLMAFLGLVPGEYSSGNSIRPRGITKVGNSELRRLLYEAAWSYRTPAKVGAWLIYYRPDSVTQYSKDIAWKAQQRLCSRYRTLTAKGKKSQVAITAVARELTGFMWDIALAAQSSFSQQKQN

SEQ ID NO: 414881 - protein, 399 aa, unidentified
MLNPQALQLRVGVDVGSQRHSVAVGLTDGSLLEEFEIPHTAAGFGDFFARIKGHAKRHPYPIAVAMEGYNGHVRPLDSLVKARGWRLFNVNNLKLARFKEIFPAAAKSDRIDSAKTLELFQLHDHLPMAGDVLQEVMATPEENDTLKRLSRRRRRLVNERGRVMNSLQADLQAVAPGLLQITRYVANLWFLNFLTCRKGLLKLARVRRASLLKVPGIGATYADAIQAWQRRALFGHDASLVGDMIQQDAARILELRQQIKALEEQMAHVAESSSIASQLASIPGYGSVCSAELAGEIGTIERFRCESSLALYLGMATLDNSSGKYRGSKAPKHVNARAKAAMMAAVDHHRKRVPQSQRYYEKKRAEGKRHNQAIRALGRHLCRVIFKMLSQERPYRIDP

SEQ ID NO: 414882 - protein, 430 aa, unidentified
MKSNTQNAKIEAITEKTLVLGIDVGSETHYARAFDYRGIEYSKKPFKFSNTEAGFVTFKEWILDLKDRHEKEKVVPGMEPTGHYWFNLGKFLQDNEMKPVLVNPHHVKKSKELDDNNPTKNDRKDPKVIAGLVREGRYMIPYLPDGVYADLRTASNIRFQLQAELTRIQNRISRWFNIYFPEYKTVYGKPDAKSGMLILKAAPLPEDILTLGIDGVNQIWRDAKLRAVGKARAKTLIEAAGHSVGSKEGAVSARMEIRMLLEDYESRNTRLQEVMVLIEELVKGIPMAEKLLEIKGVGIRTVSGFLAEVGDISRFNNPKELQKLAGLALVENSSGKHKGETTISRRGRKRLRYLLFEVAMSLVAKNPEFRELHNYYTTRRRNPLKKMQSLMAVATKLIRVFYAMLTKGVDYDPKKMVSDIKRPAVYLQAA

SEQ ID NO: 414883 - protein, 427 aa, unidentified
MISASIERCAGIDVGKKFLAVCVMVGPLEGEPRVEIRKFGTIRAELEGLRDWLKQQGVTHVVMESTGSYWKPVFNVLEDAVKVYLANPQEVKNRKGHKTDNKDGWWLAHLLRHAMIHPSFIPPRVIRELRDLTRRRKRLLGAGTSERNRVQKVLEDANVKLGNVLTDLFGVSGQLMLEALLRGQAKPEEIAQFAKGRAKKKIPEMIAALEGHQMSDHHRQMIRYSVDHMRFLEEQIAQLDLDIAAKIREAGLEPQWQLLQSVPGIQETSAAAILAETGTDMKLFPSEKHLSSWAGICPGNNRSAGKNRSSHTTGGNRWLRGTLTECAWAAAAKKNCFIQDKFWRITTKSGGKKAPAVVAIAHTLLILIYQALNTGQPYQDKRVPVLDQRQKRRMIRHHIRRLGKLGVAVHSPRPGSSAAATSPTTST

SEQ ID NO: 414884 - protein, 422 aa, unidentified
MIKSKAYRSIPVKQVDVQKILAGHLQEHVEVGLDIGKHWIWAVCRFRDETYLRPWRSSNPMELRLLVSLLERMSEQVKLRVAMESSGTYGDPLRQAMSRAGLDVHRVSSKASHDWAETFDGVPSQHDGKDAAVVAELCAMGKSVAWPFHQPGELEQEMAYWVDELDAAHRSQQMWIGRLESRLARHWPEVCGQLKLTRPTLLKALVQWAGPGAISADPQAGARLRRFSYRLMSDEAIGRLLRQAASSVGIAMNSWDQRRVRDDAQRALAAHRQKRKAARQLGDLARRHELLSALGQVVGVATACVLWVCVGDPRHYNSGAAYRKAMGLNLSERSSGMYQGELHLSKRGKSMPRRFLYFAAMRYVQQEPVKQWYLHKKHRDGQEGMRGIVAVMRKLPLALYAAAQGQAFDAQRLFKSIVTDVK

SEQ ID NO: 414885 - protein, 351 aa, unidentified
MEVTTIGIDIAKRIFQLHGVNNNGKTVLKKRLMRDQVLIFMSNLPKCLVGIEACGGSNYWARELSKLGHEVKLMAPQFVKPYVKTNKNDEADAEAICEAVARSNMRFVPIKTVEQQDMLSIHRVRARLVKNRTALANEIRGLLLEFGIIIPQGINKIVDKLTEVLDSDQLSGISYQTFSDLKEEYITNDKRVKELENRLKILSNQCSLYKRLQEIPGVGLITGTALIASIGNASCFKNGRQLVSWLGLVPRQNSSGGKTKLLGISKRGDVYLRSLLVLVQGARAILNAKLRYISKKDQIHANCSKFTEWICNLSERCGSNKTVVAIANKLARVIFAVLSSGNAYLEQKVCN

SEQ ID NO: 414886 - protein, 409 aa, unidentified
MQVVHPRCAALDLGKDVLVAAVRLHDATGISRECRTYGTTGHQLVVLSSWLESEGVTHVVMEATGSYWKAVWHVLESRFELTLANPAHIKNLPGHKSDVNDATWMADLHAHGLIRGSFVPPPEIGALRELTRTRKQFVREINRHTQRVQKTLDIAGIKLTGAISQVLGVSGRAILTALVAGETDPKTLATLGHPRLKASRDRLEEALEGRLTTQQRRLLGMHLNLIQTLETSIAELDAEIAKAVTPFQGIVERLHEVPGLSEINVPALLGEIGIDMSRFATHSHLLSWARVCPRLDESAGKVRSTRTMKGAVWIKELMIQAAWAAIRTKDSYLRAQFLRLRARRGGKKAIVAVAASILTIVYYIIRDGTPYRDLGINHFATRDRARAARSLVARLKQLGYNVSVTEAVA

SEQ ID NO: 414887 - protein, 412 aa, unidentified
MKQIRDRVAGLDVHRDTVVACWRVQQPDRSVDTAKESFATTANGLGQLATWLSEAGVTTVVMEATGVYWKPVYYALEGLFSELWLCNAQHVKNVPGRKTDLSDAEWLADVAAHGMVRPSFVPPAEIRELRELTRYRKTQVDARAKEIQRLEKVLQDAGIKLTSVASSVWSQSSRAMIEAMIDGERDPKVLAEMAKSRLRAKIPELEEAFSGHFGAHHALVCRQIIGHIDFLDHSIAALTTELTARLVPFEPTVTILCSITGVSRTTAEVMIAEMGVDMSRFPTAGHLCAWAGVAPASHESAGRRRPAGTRHGSTWLQRALIEAARAAARTKGSYFSAQYSRIARRRGPNKAAVAVAHSILAVSWHLLTTGSFYDDPGADYFERRHDPAIEAKRLQRRIETLGYKVTITEQAA

SEQ ID NO: 414888 - protein, 338 aa, unidentified
MSIYAGLDVSDKTTHICVVDVEGSVVRRDVVASDPDALAKWLNRHCPNLARVVLETGTLSTFLYHGLVERGVTVECICARHAKGVLSARVNKSDVHDAEGLAQLARTGWYKRVHMKAAATHIDRAALRIRSQLITSRTAMANQLRGLLKLFGLRMGTARTSGRRAERLTAFYAQRPDLKPLFAPLIASMEAIEEQLRASNRLLNDRAKADEVCARLMSVPGVGPITALTFTSTIEDPHRFARSDDVGAYAGLVPRRNQSGERDLSGHISKAGDPMLRKALYEAANVALSQVKRPFALQAWGRKMAEAKGAKRARTAVARKLAALLHSLWLNETEFRWA

SEQ ID NO: 414889 - protein, 334 aa, unidentified
MYCGIDLANKASAVCVRTTERIVVECECETDEDGFRQALRDYDKLLILIEASPLSEWVANVLESLGHEVKVIDPRRASALIRTKKKTDRLDARHLARMAQTDWYHEVHRKSPEARMLRSHLQARRGIVDARKGQLLRIRGLLRAHGIKVGAVSAGKFASRVRELVRMRCEALGVVIEPLLDAWQALREAEAALTKTLKSQVKAHPTCRLLMSAPGVGVITAAGYVATVDDPTRFEDSAQVPAYFGLVPRVYQTGETLYRGRITKEGDSLMRTLMVESGHVLLTRCRKDSALKQWGEALRERKGPGKARVAVARKLSMILHQMWLKNEPYQAFST

SEQ ID NO: 414890 - protein, 380 aa, unidentified
MTVEEWASAGTAIMEVPTMAKVRSWVGLDVHAAKVVAVCVDAESGEMTVRRLPGQTARIVEFVAGLPGRVRVAYEAGPTGFTLARALRAVGVGCVVAAPGKIERPAQDRVKTDRRDAERLVRLLMVDGLHPVRVPDPAEEALRDLVRAREDLRGDLMRARHRLSKLLLRHDVSFDGPGGPWTDTHRAWLAKVTLGDPAAQITLADYVGAIEALLVRRDALERSIAELVPDSPWAETVARLRCLRGIDTLSAVGLCAEIGDFARFERPGQLMSFLGVVPSENSTGAKRRQGTITKSGSRHARRLLVEAAWHYRKAPRSSRVLARRQAGQPDHVLQISWKAQQRLHRTWNRLDRDRGKRRTIVAVAVARELAGFCWSIANAD

SEQ ID NO: 414891 - protein, 422 aa, unidentified
MDSKCKAVNLLAVGIDPSKDTLGVALIRYPEEVLFNDSIPNLPEAFADLDAMVCAAAGKMGLTPAYGLEDTGRYGKALCDFLCARGRVVKEVNPILTHHQRAFYGQDKSDGIDAKCVGVILMRRFDRLPDREAGNAVFAALKELSSFRHAQVKQRARLLNQLHHALEQTYLNVYQPFFSDLKHKTALAFFQRYPMPQSLKGVTPEALEQFLRDESRNRIKTRAAKILAAAAAVWDRPADRLTHATSLTAALLCGQIARLNQDIADVEKNIAALVKETGIKLTSVNGIDVVRAGVILGQTGDPRRFPSKHAYAKYNGTAPCVYGTGRFQRHVSNRICNRTLRHELHQLALHMADHDPLSMDYVRLHMAEGKKSKGQAVNRLARRISDVLYAMMLSKDKYDPQIATCNMERKRPKTDRRRAASK

SEQ ID NO: 414892 - protein, 346 aa, unidentified
MTHSTTVGVDLAKNVIQVSVVSARGKELLNRSFTRRKFSEFLGKQKPSLVAFEACATSHHWAREAQRHGHVARIIPAKFVAPFRQGHKTDSNDALAVAESARRPSIKEAPMKTVEQQGLQAIHRSRQLLIQESTALSNHLRGLLMEFGVVIPQGFASLLRAVPEVLEDGENELPDLYRPTLHRMYTRLLELREHIEAMTKEVEVLVKQHPICSRLTALEGIGPIGALLLYATLGSGNVFSSGREFAAYLGLAPRQYSSGGKTNIVGLSKKIGNCRLRSILILGARAYTYRLKEPKSAKDRWLKAAIDRNGHSRAAVALANKNVRTAWAMVTQGTEYQRRGQQKVAA

SEQ ID NO: 414893 - protein, 383 aa, unidentified
MKKNIKTSVMDTASAVDVAAAQRQPAVDGAVLVTPQYQAVVGLDVGDRQSHYCVLDLSAGVVAEGVVKTTATSLRVLFEGKGRMRIALEAGTHSPWISRLLIALGHEVLVANPRKLRLIAESDAKHDRADAQLLARLAHVGPALLAPIHTRSAQTQIDLTLIRAREVAVQTRTKIVNAVRGMVKSTGHRLPASPRVTFARKATEACPKALQPALLPLLRLVQILTDDIAAYDRLVVEKARVYPETEAIQTIPGVGALSAVAFVLVLNNDRSRFKRSRDVGCYLGLKPKQRDSGRQSPQLGITKAGDPLMRRLAAQSAQYILGPFGRDSALRRWGLVLASRGGKNAKKRAVVAVARKLVVLMHRIWITQEVYDPMRGIRVRPAA

SEQ ID NO: 414894 - protein, 346 aa, unidentified
MTIVETRAITGGVDTHADVHVAAALDPIGGLLGVQEFPATPAGYGQLLGWLGEFGSVCLVGIEGTGSYGAGLARHVTRAGVRVVEVDRSDRQDRRRQGKSDPLDAISAARAAQSGRAAGASKGRDGAVEAIRTLMVVKRTARSERTQTINQARSLVLTGPDDIRVRFIHHTTSGLVADLAGLRPRPGATVGYATRIALRELGRRAQFLDRQLESLDELIVPLVTAHAPGLLALYGVGPDTAALLLIAAGDHPRRLRSEAAWAHLCAAAPIPASSGKTVRHRLNPGGDRQANHALWRIVITRMSSHPPTRAYVERRSEEGLSKTEIIRCLKRYVARQVYPHLRPPAG

SEQ ID NO: 414895 - protein, 353 aa, unidentified
MWIIGCDFHPRYQQVAALNQETGEMVERRLSHETKEAEAFYQSLPQGARIGMEATCTAQWFERLLNRCGHRLLVGDPATIRASVVRKQKTDPRDARQLLELLLTNRFPSIWIPTPAERDTRQLLVHRHKLVGWRTQVRNQLSALARNQGLLPRTRLWTRPGRQQLESLPLDPWAARRRQDLLQLLDQLDPQIAELSRQAEQQAQARSDALQLMQQDGVGPIVSLAFVLTLGTAQRFPRGKQVASYLGLNPSEHSSGGLQRLGHISKQGNRMMRWLLVEAAWTAVRKDPELARVYQRLAFRRGRKIAAVAIARKLAVKLYWRLRAFEEQQSAQPAPMQGRSGSGLVNAVGSPSA

SEQ ID NO: 414896 - protein, 367 aa, unidentified
MLPENAPLNSNRIPDGTAMEHYAGIDVSLELSSVCVVDAKGKIVKEAKISSDPVALVTIFRGLGIAIERIGLEAGPLSQWLHAGLTQAGFEVVLLETRHVKAALSAMTVKTDRKDARGIAQLIRMGWFRPVHCKSVGSQEVRALLVGRKLLLGKLLDVEFSIRGILRGFGLKMGMVTRRNFEARVQELCAGHSMLEQICAAMLAARSALQIEYTKLHKAMLTIVRKDEVCRRLMTTPGVGPLVAITFKTGIDDPSRIRKSKAVGALFGLTPKKYQSGETDVTGGITRVGDEMVRTALYEAANILLSRVTRFSALKRWGMDVAKRRGTKRAKVALARKIGVILHRMWVDNTNFRWTKEAPNAPRLIQA

SEQ ID NO: 414897 - protein, 319 aa, unidentified
MFVGIDVAKAELVIAVRPSGERWTVVNDERGVRTLADRLRAERPELVVLEATGGYELLCVGALVAAGLPVVVVNPRQVRDFAKATGQLAKTDRMDADILALFAERVRPAVRALPDADAQELEALLARRRQLLEMLQAERNRLGQVFGRGKQPVKKSLKGHIAFLERELRITDTDLGTMIHESPAWRERDDLLQSVPGVGPVMSRTLLADLPELGRLSRRAIAKLVGVAPLSRDSGTMRGRRFVQGGRAPVRAVLYMAALVATKRNPAIRAFYQRLLAAGKPKKLALVACMRKLLTILNTMVRTASRWSAAHVERAIITT

SEQ ID NO: 414898 - protein, 350 aa, unidentified
MEITTIGLDLAKNVFQAHGADERGREVVRKKLHRHQVTEFFAKQAPCVVAMEACGGAHHWGRKLRQYGHEVRLIAPQYVKPYVKSQKNDAADAAAICEAASRPHMRFVTLKSVDQQTILAVHTVRSGFVKQRTALSNQMRGLLAEFGVVLPQGLARLRQGLLPALEREPGELTAGMHTLIGMLHEQLQRLDEQIGKLELQIRQWARQDERSRLLQQIPGVGPITASALTASVGDARQFEDARQMSAWLGLVPRQHSSGGKNVLLGITKRGDKYLRTLLIHGARAALKAYQRHPEKMPARLQQLLQRKHINIVCVALASRNARVAWAMLSRGEDYRQSSPIAETGLLPAMV

SEQ ID NO: 414899 - protein, 421 aa, unidentified
MTQGYGNTGGDILVAIDVAKKQDAVLVQFPDGSRKKFTVANNLRDYRNFSAYLNDLASPCKIGLEATGNYHRPLAYYLQRQGFDLKLISSVAASRTREAMYNSWDKNDPKDAQVILHMLQTGLTQTFYDPLVHKINDIQELSKTYHQVSLQKVRVQHSILTHFLPLYFPEAQQYFHTSRAEWFTSLLLSFPNPAAVLKFSRDGFIEAAQTVAGRKVNKTAWLRDFYETAKESIGLPVPEDSEAIRMFRLVLQEHQDLCRMRRAIESRADLYLQQNADYLRLRTMPGIGPVIALTILAEAGDLRRFSHYKKFLKYCGLNLSTQQSGGFRGMSKLSKHGNSRLRYAFWIAGTSAIRMRENTFRKKYENYVKADPRNPDLKRKAYTAVAAKIARVAFGLIKSGCDYHGYYESSIPIGKIPSTRR

SEQ ID NO: 414900 - protein, 357 aa, unidentified
MQTIACLVEEVLLGVDTHLDTHTAVVIDLLGRELDTRTFPTSRRGLNALIKWARLRGTVHRAGVEGTGSYGAGLAQRLVLEGIEVFEVTRPARRGNRHRGKTDDRDALAAARVVLSGEARAIPKTRDGIVESIRVLRNTRASAVKARTQTGQQLRSLVLTAPSELRDSLRDLSTTKTVAHCARWHRVDPTNATRSTRLAMRVLARRHEALDDEIAELDTHITALTKTAAPRLLAQRGIGPETAARLLIVAGDNPDRLRNDSALAALCGASPVEASSGKTIRHRLNRGGDRQGNNALWTIANNRMIHDPETRAYTARRTKAGKSKKEIRRCLMRHIARGIYPLLIADLRDAETHICLT

SEQ ID NO: 414901 - protein, 403 aa, unidentified
MIYVGIDWAEAHHDVCIEDGEGHVLAKGQVPDGIEGVERIHEMLGAHADEASDVAIGIELDRGLLVGALVAAGYEVHAVNPLAVSRYRDRLGPAGAKSDPGDARVLAEVMRTDRHLHREVAGDSDLAEAVKVLARAHQNLIWTRQRIGNQLRSVLREFYPGALRTFAELGSVDAIAVLGLAPTPSAGRALTETKVRKALAAGGRKLRLDQRAGEIVESLRAPQLGAPGLVEEAFGHQVASLVAVLQTLVTQIDELRAELARSFEGHPDAEIITSLPGLSSVLGARVLAEFGDDRTRYTDARARRSYAGTAPITKASGTRRVVLARVARNKRLADACYGWAFSSLKTSPGARAFYDRQRASAKTHHQALRALGNRWVGILHGCLEHRRIYREELGWGGRLETAA

SEQ ID NO: 414902 - protein, 416 aa, unidentified
MQKHSNLPVKSEQRSKQTKSRVPVQRDTKELMAELLGKLMEKQDPKAISASAGKEQKQGRLRPNLDRLTVGVDLGDKWSAYCILGLEGETLIEGQLQTAPLGVAEFFQSLPAARVVLEVGTHSAWVRELISGCGHEVLVANPRLMEGSKRRKRKNDRIDANKLARLGRMDPQSLYPIQHRSPQVRQDLVMLRARDALVAVRTELINSTRGLVKSVGARLPQCASPSFSKKVKESLPVEIREALLPLVELVAALSDSIQGYDEKIEKLGSEKYGHTALLRQVKGVGPITALAYVLTLENPNRFAKSRDVGPYLGLVPNQEDSGDIQPQLGISKAGDTMLRRLLVGSAQYILGPFGPDTDLRRYGLRLCERGRKNAKKRAAVAVARKLAVLLHHLWVSGEVYEPLRQGLSATLTQATA

SEQ ID NO: 414903 - protein, 358 aa, unidentified
MQSNTLNFKGQKIFIGIDVHLKSWNVSIFTSNVKMKPFSQSPDAVALRTHLDRNFPGGDYFSAYESGFCGFSVHYDLLRCGIKNIVFNAADITDSHKERARKADSVDSAKIARNLRDGNLTPIHVPSQEDLSDRQLLRTRRSLMKNQSQTKIRIKSFLNFYGIKCPLSLECNGTHWSQRFINWVKYEFGNMADSQRKSGMFLLRTLEFQHAEVLSSTRELRDLMRSPKYEKNMRLLTSVPGVGLIAAATFLLEIGDISRFSNSDHLASFIGLVPDTRSSGEKDAKIGITNRSNRYVREALIEGAWRAIRKDPALTLAYEELRKRMEPNKAIIRIARKLANRIMCVLRTQEPYVPAVIK

SEQ ID NO: 414904 - protein, 340 aa, unidentified
MSEVSIIGLDIAKHVFQAHGADASGRAVLRKKLSRSKVLPFFASQPRCRVVLEACGGAHHWARELAKLGHDVQLIAPAYVRPFVKRQKNDAADAEAICEAAQRPSMRFVPVKTEAQQAAALIFRGRDLLVRQRTQISNALRGHMAEYGWIAPKGLAHLEKLAALLADPSAVPADVRAVCTVLLESLAVLDRQIALLDKEIVRRSREDEVARRLMTIPGIGPITATAIAALAPPPGTFAKGRDFAAWVGLTPRQHSTGGKQKLGAISRMGERTLRRLLIIGSSAVVLQASKRGAGKGSWLEQMLARKPRMLVTVALANKTARIVWAVLTKNEDYRAPVVAA

SEQ ID NO: 414905 - protein, 375 aa, unidentified
MNKDTLYVGLDTDKKHIAVALAEALPGGEVRCWGQVANEASSVARLVKRLQAGGRQLEVCYEAGPCGYGLYRLLNGKPGVRCQVVAPSLTPRRPGDRVKTNRRDALTLARLLRAEELTAVWVPDATHEAMRDLVRARGAGVADLVRCRQRIAGFLLRQDIRYAGKPWTRKHRAWLGQLVATLALPAHRLMFGEALQALDEATARRDRLTDHIAELMPGWSLAWLVEALQALRGFALINAATLAAEIGDPRRFAKPSQLMAYLGLVPSEYSTSDRVRRGGLTKTGNGHTRKALIEAAWTYSRPARAPRDTARHAPAVAAIATKACHRLSRRYRRLTAGGKRPIVAVAAIARELSGFAWAIAQVAGPAAMPERSPRR

SEQ ID NO: 414906 - protein, 266 aa, unidentified
MSKCKEFFGIDISKDVFDVMDSSENHHQFKNDPSGFKAFGKLLNENSHCVMEVTGCYYQGLATWLYSQSIDVSVVNPLSVKRFIQMRLKTSKTDKLDAQMIRLYGESEQPNLWNPPSKLIIEATELHKLIEMLVKQRVALKNRLHALNAKDITRSPVVTSVRRQIRNLSNEINDLKLKLEAVIKEYQPDLLTRLCSIPGIGKRTAIYLIVLTHGFEKFETSRQLISFFGLNPIIRQSGSSIRGKSRISKIGDNHIRNLLFTDLSEN

SEQ ID NO: 414907 - protein, 412 aa, unidentified
MQDILTCAMGLDIHRDVIVACLAKGELGTDPEIEIRSFSTLIPEMRKLRDWVLEAECRYVAMESTGIYWQPIYEMLEPCFDGQISILVVNARHMKNVPGRKTDMRDAQWIATLLRAGLLKGSFIPDKTFRELRHLTRYRKSIVRDITAQKNRIDKFLQSSGFRFTAFLSDAFGASGRNIIRHLMEYGSISREALDKCLKTQTRKRIDEILIALNGSLSEHQRCFLRMIFEHLETLEQHRHTVEDAITKEITKHEEALSLLCSIPGIDVTAAAAIIAEIGTDMSAFPDSQHICSWAGLSPGNNESAGKRKSAHINKGNPYLKSMLCEVGWVISGKRSLYLSGWYWRIKQRKGAKRATIALARKLLALIYTMLKTGSPYNEDCFEIRRKQSERKQASRMVNELQKLGYFVVAPG

SEQ ID NO: 414908 - protein, 342 aa, unidentified
MKFIGVDLHKQTITVCVMGKVDGKRKVLARKQFHCCEPEKIREFFEEVGQFQVVVEATSSYEWFLLLVEDLAHRWVLAHPKKLRIIAESKHKSDKIDANILAEFLMLDMLPEAYRPSPRVRQHRVLVRHRRWIQGRITSIKCKVRHKLAHYNADIAELFTQRGQEHLAEVAMDMADRFETKALQEQLRLLQQQLKEVDSQLHEFAKTSPAAEREARAVLDTIPEIGPVTIDVVLSELGDWRRFRSIKKVVAFSGLDPGCRETGGKAKQLHITKEGSRHLRWALVEAAWRLVLKYNRWKKVYEQLKKNTGSAKKAIVGVARRVLCVMFAMLRDSKSYQLAAAT

SEQ ID NO: 414909 - protein, 404 aa, unidentified
MKGPIVSIDVSKGKSDYQAFKNLNVKYTGSRSIKHTKEGFDEIVNLVREMEKKLETEVCVVYEATGVYHRVLKKVLEDNNIKQFIINPLLSAKTRKNDSLRSPKTDKLDPRSIAKTYYSHSLHNSHKQETIYHELRELSRYYEDILVHIRKDKVAFRAQLDIVFPGYDTLYDDLYGPVALAVIEKYPHPEMLQKKKINTVSKVIQSKTCHRQATSDTMADRAIEYSKTIYSGCDKDDIEVLILQRFIKKLKEDMAEAERTIGEMIKLAQELPDFSIIKSIPGIGDNLATRIIAELGDMTRFKKKNELVAFAGLDPRISESGQNDGDHMHITKKGNKRLRCLLYLAVTCSIRLKRDDNSIKDFYIKKKQQSNPMCSKAAKTACASKLVRIIYSMCKTGELYQYNK

SEQ ID NO: 414910 - protein, 342 aa, unidentified
MQKVTIIGLDLAKNIFQAHGARRDGSVAFRKKISRAKLLSFFASVPKCVVAMEACASAHHWGRHIGALGHEVRLIAPIYVKPFVKRNKNDAADAEAIAEAASRPTMRFVAVKSIEKQAAGMAFKTRDLLVRQRTQTINAIRGHMAEYGVVAPNGPVHIKRLVEALQDPDSGLPESIHGVCELLLRHIALLSEKIGLLEREIRERTRRDELAKRLMEIPGVGEICAVAMEALAPPPESFSKGRDFAAWLGLTPRQNSSGGKTRLGGTSKMGQRDLRRLLVCGAMTVVRWAARKGAPQGSWLEQMMKRKPRLVVAVALANRTARIAWALMMTGERYRASKAISA

SEQ ID NO: 414911 - protein, 366 aa, unidentified
MFHVGLDVGDNCSSIAILNSNGKVFKQMEVKGRWPVLLEQLGQIRKPMNVCFEASCGYGYLYEKISKLARHVAVAHPAQLRLIFRAKKKHNRVDALKLAKLSYLGEVPQVHVPGADVRSWRTTIEHRQRILAGRVATKNRIRSLLKSQGIFQPAEVKSLWSKKGISWLEGLKLPEAEALRVQILVDELKEARRKIGLVEKYLSKVAAQHPGVALLVTIPGVGIRTAEAFLAYVDNIRRFERNKQVGAYFGLVPCEDSTGDVRRLGHITKDGPATVRKLLTEAAWQGIRRSATIRGFFDRVKHDDPERRKIALVATAHYLVRVMAAMLRTGECWREKAPGRRKGKKDGPGVPGPAGGGSPPRKTPDA

SEQ ID NO: 414912 - protein, 414 aa, unidentified
MGDHGRIAGIDVHKKMLAVVVAEGSSEGQLRFERARFGTMDSELRRMGEWLRERNVGEVVMESTAQYWKPVWQQLEGQCQLYLAQAQSNRGPRGRKRDFVDAERLVRRQMAGELILSFVPDGEQRMWRIMSRTKYQLRRDRVRLQNQLETFLEEARIKLSSFVSDLLGISSLRILEALSKGESDLPKLAAMADANLRATPEQLQDALQGAKHLSEPQRQILGLFLARLKLIDEQIESLNSNLGQSLRQYNDAVVRLAEVPGLGADSAQQVIAEVGPGAATFPSPQELCSWVGTCPGKEESAEVSKSNRSPKGNRMMRRLLNQAANAAVKTKGSVFQNLYRRWVPRLGHNKAIWAIANRLCRLVWKILHQGDRYIEYGDRSNPKTIKERAKRMVRELKALGYQVQIALPAEPSVE

SEQ ID NO: 414913 - protein, 339 aa, unidentified
MTEEKGFIWAGIDVSKRTFFAAIDIEIEAKKLPVAKLPAKEFKRSKDGVASFIKWADELLEDQEFAVVMEATGSYSLELISLLKNQRTDLRISMQNPRMVSDFIRSLNQPHKTDKTDAQAIARFGTERKPEEVSLPEPHWAELRELERLRSAMVRVRVELENRAESLFTAFARRTNQRTIGSLNMEISELEREIKHLVIEHEDIHSEVRILTSMPGVSFVSACAILAELGSLKQYDQKQISAVSGLAPRRMSSGSSLNKSFMGRNGSKRLRQILYLDSIYAVAKVPLLNSMYERLIAKGKSKMTARCACMRKLLLILRAMVVNNKPYEENYSKTFPKSA

SEQ ID NO: 414914 - protein, 362 aa, unidentified
MNGKVLKQCVGIDCSKDELAICFGLMNSEFTIVHKALTVFPNDSKGLKKLLKWTEKLKDPAVPVTFVVEATGVYHENLAYFLVDEKQTVSVVLPNKINHFAQTLELKTVTDRVASKTIATFGLEKKLDAWVKPSPLFAQMKQLTRERGQLKDERTVCQNQLHAEQHAAFPISSSIKRMKKRIKILNEQIAEIEEEIKNILDENVWLKEKIDNLCTIPGVGLITAVTVVAETDGFNLIRNGKQLTSYAGFDVVDKSSGTSVRKKSRISKKGNKHLRKAMYFPSITNVKYDKRHQNLYQRLEAKSGIKMKGYTAIQRKLLLLIYALWKKNECYDPNYQSTKLNQPKLLEQPILTALTELDQVCS

SEQ ID NO: 414915 - protein, 353 aa, unidentified
MKCDKYMGMDVHQAMTVVVVLNADGKVILETMVPTEAAAIIRLVQSLSAPLRVTFEETTQAEWLYEVVRAYVTEVIVCDPRRNKLLGEGSKADKVDARKLADLLRTGMLRSVYHGHEATRKLKELVRAYETLSIDTQRTMGRIKAIFRGRGIRTPGRGVYQPKQREQWLEMLTEPGIHQRAAWLFEQLDQLRTLRRKAKQTVLTEGREHRAIGLLKTIPQLGPIRAAFIVATVDTPHRFRTKRQLWSYSGLGVVTHMSAEYEMREGRAVRSRKPIATRGLNPNCNHRLKETFISAATGGIRTEPYRSYLSRLQKGGMRAEMARLTLARKIAAIALRIWKKGETFDPKKLNWTT

SEQ ID NO: 414916 - protein, 326 aa, unidentified
MVHERTEPYAGVDVSKDRLELCVRRGREAGEGEHTFGVSNDPAGTQTLLACLLEERPALVIVEATGGFERPVAAALAAAGLPIAVVNPRQAREFARATGRLAKTDRIDAHLLARFAQAVRPAPRPVPEEEAQALAEITARPRQVVGMLTAEKNRLGAAATTKPVRGRLQAHVRWLEKELSRTDGDLEEAIAKSPSWRENEELLRGVAGVGPVVARTLLAELPELGSLPPKQLAALVGVAPLNRDSGAFRGRRAVWGGRATVRAALYMGALVATRHNPQIKEFYERLLGAGKPRKVALVACMRKLLIILNAMLKNRTPWRFPQALAP

SEQ ID NO: 414917 - protein, 383 aa, unidentified
MGNSITLYVGLDVHKDSIDIATADPGRTGEVRHVGSIGGDLAALDKALRKLISKGEHLHVVYEAGPCGFVIWRHLTAAGLSCEVVAPSSVPKRSGDRVKTDRRDAMMLARLSRSGDLTAVRVPSAADEAVRDLVRARDDAVRECRNARHRLKALLLRNGITYEGRSTWTAAHLRWLSRLKMQHAAQQIGFQEYLHSVTESSARIVRLEQAMRDALPDWRLKPLVQALQAMRGVQLIAAMTLVAELQDFTRFESARKLMAYVGLVPGEHSSGPKRRQGSITKAGNSAARRMLVEVAWHYQHNARVSPIIARRQDQLPKAITDIAWAAQLRLHAKFRRLLARRVMKTKAVVAVARELTGFVWAIAGEVHNSGWQGVAIAATDKAA

SEQ ID NO: 414918 - protein, 411 aa, unidentified
MDVMYARCCGVDVHKESIAVCVLIREAGGKQQKHKAHFSTVTAELLRCADWLTSLGVTHVGMESTGVYWKPVWNLWEGLFGLSLANAAHLKRVPGRKTDDTDSEWIAQLLQHGLLPTSFVPATELRELRELTRYRAQLVGDHGRVVNRIQKVLEDANIKLGSVASDVVGKSGRLMLQALLAGQTDAEQLAGLALGQLRKKKVELTLALEGRLRPSHRYLLQQYWMQMQFLEEQLASVEKQIDSENPGFREAATLLDTIPGIDLVAAWGIVGEIGADMRQFPSAQHLASWAGVCPGNHQSAGKRLSGKTRKGSRWLRQKLCQAAWAASRTKNSYLSALFHRLAARRGKRRAIVAVGHTLLVIAYHLLERRCTYQDLGADYFIRANAENLRKYHVKRLKQLGYEVQLNNPAVA

SEQ ID NO: 414919 - protein, 352 aa, unidentified
MTYIGIDFHKKYSVASSVDESGRIVKEGRIEGNTKAGFERYFGSLGFPCKVVIEACWNWGYIFDLLEDIPQVQEVILANPYKTRIIAEAQIKTDKIDARTLAQLLRAGLIPQAHIPSQPVRQRKNILRQRQYWVRMRTKLRNRVHALLDRQRGLEMPQVTDLFGSKGKAALKVARLPEPDRDLLGQDLEVLNALDKQIRENESYLREESGEDIELLESIPGIGRVLSQVLSAEIDEIGRFPTSAKLCAYAGLVPTTHSSGGKEYHGKLLSKCNKWLRWAFVEAAWVAVGCSPYFGSLYRHYRSLGKPGNKTIMIAARRMCQIVWRVLSEKKPYEERMFLENNPGCSQARLAV

SEQ ID NO: 414920 - protein, 338 aa, unidentified
MKLYCGIDLHSNNSVVVILDEADKMIYHKKLNNDLASILKQLSVYQGKITAIAIESTFNWYWLVDGLMDAGYNVKLVNTTAVQTYSGLKHTDDKDDARWLAHLLRLEILPTGFIYPKEERAVRDLLRKRSQLVRQSTTNILSLQNILARNTAQTLSSYRIKKLDDEQAEKIFENPNITLALKSNLNVIRCLQSTINEIETSVLQQTRIRAEFKKLLTVSGIGEILGLTIMLESGDMSRFAKVGNFSSYCRCVKSERLSNGKKKGENNRKNGNKYLAWAFIEAANFAIRYNDQVKSFYQKKKSKTNGIIATKAVANKLARACYHVLKDQVSFDVNKAFS

SEQ ID NO: 414921 - protein, 461 aa, unidentified
MILRLGIDIAVRAPHQASLANERGELLWSGHRFRTSAKELEALWSKVQGMTAEAVTVVMEPTRNAWVPLAAWFRRRGADVVLIPPERSADLRAYYAKHTKSDRLDSVLLARLPLLHPEGLHPERGLGPGDPLRRATKLHSTLVKRRSTNLARLDALLEILGPDWHAAFDTHLGTKTALRFLAAGYADPHTVRRLGRARLARFLHRHSRGAFGEPLAERLTAAAAATAELWAEDLAYPDLAEDIAVEARLALALTEEIHELDERIAVLARDLDPRGIMASAPGVGSVTAAVLLGRLGDASRFHSLAAARAYTGLVPSLDASGTNGRHGGPTKRGDTLLREALFLAANQARRHDPTLAAKYHRLLTIAGKHHNSALCHIATTLLTRIIACWRTQTPYQLRDTDGAPVTPAQARAIIADRYTVPDDLRRARTTSGKGTDRRSKKSLSAPSTGPSTTHARPAGAA

SEQ ID NO: 414922 - protein, 354 aa, unidentified
MGNLTTIAVDLAKSVFEVAVSEVPGRVSERKRLNRAGLVAFFSNRPPAVVLMEACGSAHHWGRVVEKLGHEVRLLPPARTARYRIGNKTDRADADAILEANRNEKIHPVPVKTIPQQALSTVHHLRHAWMETRTARLNALRGVMRELGVPIPVGAKAVLPQVAEAMAGGRVPEDLHALLQASMAEIRKLEENVKESDLLLARLARSIPVAKALQEIPGIGPLGSTALIPAVGDPNRFRSGRKMSAFFGLVPREFSSGNKRRLGSITKRGNTYVRTLAIHGGRSVLVAAHRRKNPDRLHRWALEVERRQGRNRAAVALANKIIRIAWAVWARGTRYDGALAGPSTQTTPRTTGAF

SEQ ID NO: 414923 - protein, 345 aa, unidentified
MKNTMIGVDLAKEVIQVCIYTNKRVHSNREMTHNEFLLWLFKTKPTVIIFEACGTSNYWKQKAIEAGHEGRLISAKLVATVRQNQKTDKNDALAIVQAAQLPDIKFIKGKSEQQQQLQSVLRLRELAIKQKTALNNQLKALLLEFNIRVSTRNGGLNGVIKSVLEDAENGFSGEFRQALDTAWKQYSQLLGSIRLYDECLESSIKEHGDCKRLLKLEGVGTVNAINLYNVLRCAELGTFNKGKDASACIGLTPLQYSSGGKTSLGSIGRHVKNSMLRSQLITGAMAAVSQAMKRVAITKKDAWIQGLVERRGKKCAAVALANKTVRTAYAMLDQGTEYKAELLPA

SEQ ID NO: 414924 - protein, 379 aa, unidentified
MRKDTRHAGFDVDSNKIAVAVAEPGGEVRSLGVIPNREESVRRLVKKLGPASRLRVCYEAGPHGYGLYWLLSGLGVHCDVVAPTLVPVRSGDRVKTNRRDALKLARCYRAGDLTAVWVPDAEHEALRDLVRAREVAKKDQLRARHRLGKFLLRRGLRAAAGMKSWTKNHLLWVKTLRFEHPAQEATYLDYLHEVERGAERVARLERAIDQAIEGLPAEMGAVVAGLQALRGIRKVSAATIVAEVGPLSRFPRPKPLMGYSGMVSSEDSTGDSVRRGAITKTGNAHLRRIVGEAAWAYQYRPAMSREMKKRQEGLSEEVKEIAWKAQHRLCTRYRRLVAKGKLRQKVTTAIGRELFGFIWAIGVQVEKEQRLTRTSARAA

SEQ ID NO: 414925 - protein, 325 aa, unidentified
MHYVGIDVSKAKLDCCWLRDVEKNKVKTKVFKNTLADHDALCGWLKAQTKADPADIRVVIEATGIYHESLAYALYDAGFQICVVNPARTHEFSNSLGSVHKTDAKDSLMLAQYSCRMQPERWQPEAEEIRELKALIARLEALEADLQRETNRLEKAEFNRTSERVIESLTLMIERLKEEKARLEKDIDDHIDRHPQLKKDRELMASIPGVGDVVSRMMLSLIHSRSFNNARQVSAFVGLIPRIQESGQWKGRSRLSKQGPSRIRAKLYMASVVCVQWNPDIKAQYQRLLANGKSKMQALGAAMRKLVQICFGVVGGWEKWYLHNF

SEQ ID NO: 414926 - protein, 387 aa, unidentified
MKVIRRARNRASNNYMNNQSIAIDGRSDHGPQNPNNTAPTVSTIKMGLDVHQASVVVVAQWDHATPKPPQRLSAGALVAWARRLKAKGHRIVSVYEAGSFGYTLHRQLEAIGVESYVTAAQILDSRLSGVKTDGRDAHELCLRLDRYVQGNRQSLTMVHVPTPEQEQQRSVSRQREQLVRQRVALEITGRSLLATQGVFTPGSWWRPRRWDQLQPQLPGWLQSRLETLRPVLGLLQHQIDQLGAQLEAAVDRSALPKAVGSLSAAILNREVGDWNRFRNRGQVASFTGLCPREYSSGGQRRLGSITKHGNPRLRSVLVEMAWRLVRFQPGYHAVKKWQPKMMDAALTQRSRRKKIIVAIARQLAIDLWRLNTGQTTPEKLGMSLAPL

SEQ ID NO: 414927 - protein, 439 aa, unidentified
MLRTINPNVAGIDVGSEQLFVALVDGPVRVFDTFTESLHALRDHLLAAGVRSVALEATGVYWLALYEVLEGAGIEVCVVNGAHVKSLPGRKSDVADCQWLAELHSHGLLRTGFVPPAQIRRLRDYQRLRQDHIQMGSAHIQHMQKALDRMNIKIHEVLSDLTGMSGLRMIRGILKGVRSPQLLLELCDVQVVRRKRERLLKALHGSWHPEQLFALRQALEGWEFYQRQIADCDRQIAAALEELAAAVPPASAASGSGTPKRIHHNAPDIPDLHRLRLRLTGGQDLTGLPTLTDYSVLQLLSEVGTDMSRWPTTKHFTAWLGLAPSRRQSGKRRRREKRFRGRAGQIFCVIARVLARSKHLALGGFYRRLRATRGAQVANIAAARKLAVLFYNALRYGLDYVEQGLQEYEAAYRQQCLRRLQRNARQFGLTLVPATASNV

SEQ ID NO: 414928 - protein, 389 aa, unidentified
MEAQTANTLASVASHDETVRCLLAIELSKKSWIIAANSPLVDRIGRYSLEACDWKGLLERIERIRMRVARELNRPVEVISCYEAGYDGFWLHRLLEAHGVRNYVIDAASLHVDRRARRNKTDHIDAVQLLRSLLAYLRGEPKVWSVVRVPSVAEEDERRLHRERHRLIAERVQHVNRIKGLCAVHGIYDYEPLRSNRMLRLERLRTGDGRELPRRLRTEIVRELQRLELVLQMIKAIEKERDAMASATQTSPDGNAKKIQQLVKIKGIGAETATVLVGEVFYRHFDNRRQLASYVGLTPSHFRSGFMSRDQGISKAGNPKARTTMIELAWFWLRHQHESSLSVWFRERVGAAKGRMRRITVVAVARKLLIALWRYLTTSLIPTGAAVKG

SEQ ID NO: 414929 - protein, 346 aa, unidentified
MLHAGLDLSRKRLEVRVLDEPGETVLETWTPPDRDGLHALVRRVERFGEPVRGVVEAMNGARFVHDHLELLGWDVEIADAVKVKGLAPLACKTDRIDAWVLAELSRRDLVPAIWLPTPGVRAERERARWRLHLVKRRTALKNRVHSILIAFGYPKLASDLFGLAGRAQLERLEFPEPWRSNLLAALRLIDELDTDISGCERDLRTLGAEHPYTSLLMTAPGIGWVLGYTMAAEIGDIARFASAKKLTGYTGLCPKVDQSGESDWRGPLAKNGPRYLRWALIEAAVHAAQHPCYRPHYERTRRRCGKQRGAKIARVEIARKLATAIWHMLTRGEPFAPAGPDYSLAA

SEQ ID NO: 414930 - protein, 426 aa, unidentified
MEVLFPRCAGIDVHKRTVVACRIVLTDDGEWLRETRTYGTTTEDLLRLSDWLAAGDCTHVGLESTGEFWKPVFNILEGSFTVWLLNAQRVRAIPGRKTDVRDAEWIAELLRHGLVEPSFIPPRHQRELRELTRQRTNFVRGRATLVNRVQKVLEGTNLKLTAVVSNIVGVSGRAILAALLNGEEDVTLLADLAKGKLRKKRDELERALSGRLQPHHRFLLTELLAQIDGLDETIGRFDAEIARLCTVNEEEVVVALLDTIPGIGRAMGELLVAEIGIDMTKFPTAAHLAAWAGVAPGNNESAGRQRSGRTRKGNAWLKTALVQAAHGAARMKGTALAAKYQRVRARRGAKRAIMAVAHRLLIIAYHVIARREPYRELGADYLERRQPVAIVDRLVQRLRQLGVEVTVMAEGQSAPRPTQAMPAAVP

SEQ ID NO: 414931 - protein, 388 aa, unidentified
MFYVGLDIHSKRISICVLNETGQVAHRSQVRTIDQMMQILERLPDRFEVCYEASCGYGHFHDLLQPVAARVLVAHPGRLRLIFRSSDKNDRKDAERLAKLLYLGEAPAVHVPSQDVRTWRELINCRSQVIAKRTRAKNTIRALLRSAGETPPRHPSLWTKKGIAWLRQLNLPTTSQRLRRDLLLEEIDTLNRQLRRIEQELNGRAAHTPAVGQLRSIPGVGIRTAEAIAAFVDDPHRFQHAKAVGRYFGLVPRQDQSGDKNRLGHITREGAPVVRRLIAEAAWQARRRSPTVRAYFDRVQHGDPQRKKIAVVATGHYLVRVMWAMLKRGTQWQENPTLTKPTPAPARQQQGAPMPLASSRVRRQGPAGLTERATHGDGETGGRGQRGP

SEQ ID NO: 414932 - protein, 388 aa, unidentified
MNNVAGIDVSKGKSMVSVLRPFGEVVAKPFSIGHTGSELKELADYLKSLDGETRVVMEHTGRYYEPVARFLHDEGVFVSAVNPKLIKDYGNNTLRKVKTDKADSRKIARYGIDNWAELRQHTPMDTIRMQLKTLNRQQSLYTKTKTMMKNNLIALLDQTYPGVNALFDSPVREDGSQKWVDFATTFWHVDCVRKQSYNAFSERYRKWCKRHGYFFKQSNAEKVYALAKNAVVLVPKSGVTKVLVQEAANQLSSTSRSVETYRAEMECLASMLPEYPVVMEMYGVGKSFGPQLMAEIGDVRRFERKQSLVAFAGIDPMPNQSGDKNVRSNKSSKRGSPYLRKTLFNVMGIYLKCAPQNEPVFQFLDRKRSEGKPFYLTLDLGTTEKTLR

SEQ ID NO: 414933 - protein, 312 aa, unidentified
MNNIICGVDVSKDWLDAHIRPGAAFARFANDAAGLGELLVFCRGHRVELAVMEATGGYERLAFLWLWENGLPCGIVNPRSVRRFAEAMGTFEKTDRIDADVIAHYASVKQIVPAAPPSPAQQRLKVLVSRLSQVTGDITVNKQRKSATTDAETLASLSTVLTCLKREEKRLAGEVASLIDDDPLWARLDMTFRVFKGLADRTVARLLAEVPEIGIVSNKAIAKLVGLSPFANDSGKREGPRNIRGGRTGPRGILFIVARHVARYDPHLQAFAERLQKAGKTKMVIRMALARKLLVILNAKARDARMEFANAT

SEQ ID NO: 414934 - protein, 403 aa, unidentified
MSAICGIDWADEWHDVRIDDGTGEALLERRFAHTEAGIDALLGALVEREVKLVAIERPEGVLVGRLLAGAITVLAIHPNQVAAARDRFRAAAGKSDRFDAFVLCELARTDRHRFPALCPSGDETLALRALVRTREDLVAARVALANQLRATLDACWPGARRIFAEVDSPIALAFLERYPSPHDARGLGPKRLAGFLHRHAYCGRRSADQLLERLRSAPKPIVGELEAQARRGAVIGLVAALRPIVEQISQLTSQIAGAVRAHPDGAIFLAFFRDRKSVVTAAGLLAEIGDDRARYPTDAALAADGGQAPVAVESGKRRTASFRRACDKRLRNHICVLADSTRHWHPWARDVYTRARARGADHPHAIRILGRAWTRVLWRCWQDHVPYDPARHGNLNRLLAAGG

SEQ ID NO: 414935 - protein, 384 aa, unidentified
MDTHFEVIHPCCAGLDVHQATIWACRRRIRPDGLVEDDVLPFSSMTASLRQLVEWLEHEGVTIVAMESTGVYWKPVFNILEGRLPVFLVNAHHLKNVPGRKTDVIDCQWIAKLLQCGLLKASFIPPLPIRQLRDLTRRRTQLTRERASVVNRILKILEDANIKLGGVVSDILGVSGRSMLTAISRGATDPETLAELARKGLRRKIPALKQALDGLVNDHHRFLLGQALDQIDALDELIEEMTERIETALAPEPLATARRRLITIPGISATAAEVILAEIGADMSPFPTSGHLCSWAGISPGNDQSGKKRRKAKTTKGSQWLRTTLVQVAWAASRSKGTRFQRQYAGLSKRLGRKKALVALAHRILVVIYILLKQGQDYKEPQVA

SEQ ID NO: 414936 - protein, 314 aa, unidentified
MKRKVYVEMDVHKETISFAYLTSKSKDVVKEQQIKHNEIQIKKFVNKLKSEWNEIHCCYETGVTGYPLYRYLNSLGVNCTLVAPGKIPRQNSDKIKTDKRDAIKLARLLRSGDLESIHVPNEEDESVRDYLRSRDSLRLDLGRNRQKLMKFLLRKGNVYSATKYWTTSHYKWLNNLHFENEILQETFNDYYSRVRVQEENLKAMDQKIQEIAKSEAFKERVGILRCFRGVDYLTAMFLLCEVCDFKRFKTAGSFMSFLGLVPGEYSSGSKRKQTGITKTGSPRLRRILTEAACQHRFPGTGSKIVAARRTGQPA

SEQ ID NO: 414937 - protein, 322 aa, unidentified
MSAYLGLDISKLTIDACLLDDRGEHVKKIVNNPKGFEQLNRWLENRKVRKSVHVCMEATGSYYEGVAEHLSDAGILVSVVNPSQIKAFSQTLLMRAKTDEVDAHLIADFCRKFEPAAWIAPTADERKLRGLVRFCGKLKETRASYLVQRETPNLVPEVAQSISAVIENLDEQIEKVESEIDEFIDGDSDLRRRRDLLCSIQGIGKTTAATILVETPRLEEFTDSKAVSAYAGLSPKTRTSGTSVRGSGAICKTGNSRLRKALWWPAIAAIKHNPRLAAFAARLTALGKPNKKIIIAAMRKLLVLAYGVLKSGRPFDGALTPS

SEQ ID NO: 414938 - protein, 307 aa, unidentified
MPPNVGIDVSKHHLDWATTRDEKIRHTRNDGRSIAALTRRLVLLAPERVIIESTGGYERRLVERLAEAGLPVVVINPWRARRFGEGLGILAKTDPIDARVLALFGERAQPAIRPIPQGTDRVAADLVARRRQLVAMIVAEKSRLDTAPAALRKEIASLVRLLEQRVARLDRRIDALLADDPERHELGDLLESVPGVGPGVARTLLVDLPELGHLDRRQIVSLAGLAPFARDSGKKRGQRRIHGGRASVRTALYLAAMSASRFNPVLKVLYQRLRAAGKPPKLAFVALARKLLTMLNAIARERIAWQP

SEQ ID NO: 414939 - protein, 432 aa, unidentified
MKFKLKQKQNQRITRITDSTLVVGADIAKKIHVARAVDFRGIELGKDCVFNNDQVGLTKLAAWMKEIGRTHGKTDILFGIEPTGHYWFPLAAYLQDQGIQVVVVNPHHVNKTKELEDNSPTKSDYKDAKVIAKLIRDGNYSEPKLPTKEYAELRILMNLREKVSDSLTQVKSRIGNWFDRFFPEYTSVFKDWDGKASLMAMRAFPLPADIVAKGARDVLAHWKTGVKRGVGIKRAEALYAAASVSIGLTEGVVAARMELSTLLEQFDLYNEQLEAIMVKVMEILENIPGTAEMLTIPGMGVLTIAGFLAEIGDLNSYDHGQQIIRLAGLNLMENSSGIRKGQTGITKRGRSRLRALLFRAVMPMVAKNKEFQALHRYFTTRSQNPLKKKQSLIALCGKLIRVLHTLGTKQRTYSPIDVIGPIRHAQLQQMAA

SEQ ID NO: 414940 - protein, 342 aa, unidentified
MEIAVLGIDLGKNSCSVVGLDGTGRVVMRRRMQRESVIKFAAKRTPCVVAMEACCGAHHLGRIMRDHGHQVLLMSPEYVRPYVKAQKNDDRDAEAIAEAATRPTMRFVELKTAEQLDMQSLHRVRDRLVGERTALMNQLRAVLMERGITIPQGRRKLAQYLAMMLDDDDVCLSARMRQLVKDVQAEWTALDHRIEALDDEFAARAKNDDAARRLASIPGIGVLNATALAAAVGNAVTFARGRDLAAWLGLVPRQMTTGGKPRLLGISKRGNKYLRKLLIHGARAALPSLSASTTPLGNWLRRLLERAHKNTVIVALANKLARIVWAVLRHGGTYDAATIKAA

SEQ ID NO: 414941 - protein, 430 aa, unidentified
MMHPKMQYTYVGIDSHKDTHTAVFLDCFFERLGVIAFGNLPADFADFFAQAQAFKQDGTTLMFGLEDVSSYGLALTRFLRASNQPVKHVNAYLVARERKNLNVDKSDSTDAECAARMLISKFGSLPDVEDDEKFLILRTLVVRRNFLMRGNLALKTYLHSLLTVDFPNYHKFFSEIGGKTSLAFFTKYPHPGLLNDTTADELAQFLWEHSSGLLGLKRAKEILASIDTTDITDTTDTHEIRQKHEASQKHQIRSKTIHGTIRQLQYNRDELEAVETDLAAVFHSFNTTLISMSGLDIVSASQLLSCIGDVRKFSTPAKLARYAGIAPVSNSSGKRDMQFASQRGDRELNSLFYGLAVRLIVTFGPGHKAHNPFFYEYYHRKMSEGKTKRQALKCVQRRLVNIVWGMLTHGEDYVNPPLIAVDNIKISTQS

SEQ ID NO: 414942 - protein, 419 aa, unidentified
MFKIFRKNCCGLDVHKTWIYACVGITDTNGRTEYKQARFSSFSKGLRELADWLAKYACVEVCMESAGKYWIPVFNILERTCLVTLAHPKYTKPQRGNKTDRKDAKWICDLFTCDMIKPSFIPPPDIRQLRDLMRYRFKLTCCLTAEKNRALNCLTVSNLKLDDVFSDVFGKSARSITNHILEHPGEPFDVAPFVDKRCKHPIEQIQAAVDGSVSREQAAKLREILAHIDEINTHKLNIEAEILRLVAPYQLLLDLIRSVPGFSADPMTAIALLSEIGADMSVFQTAKHLSSWAGCCPRNDQSAGKSKSTRISRAGAFLKPLLVQVANAVVKSTKHPEFGNRYRRLKARRGHKKAIIAICRMFLTAIWNILSKLEPYRADGFLLDRAAHEPVLITKAQGLQLLRSRGYLFKDDVDSVAPA

SEQ ID NO: 414943 - protein, 354 aa, unidentified
MNTTQNSTKSKIVKVIGVDLAKDHCDVIGYDENGKICLRLDGCSYAKLREILSNLPQAVVLMEACKGSMFHARSIADLGHEVRLVKGADVKALRNVNHKNDLRDAAYIANLYFVPGIKYVYIKSQQQQSLQFLQNEYKSLQELRIQAGNQIHAGLEEFGCPVRKSSKFIKTRMVAHLEKHAELIPEDVMASFKRRREIWLNLLQQEEEAKRRLEQVAATDANAKRIMTAPCVGPQTAVGLLVHIGVDIGRFKNSRQFAASLGLVPKQNSTGGNSRLNHITKCGPKRLRSNLVQCAQLVLMHADKWKGNFGDWVRKMRDSGKKHGVIVCAIAAKLARIIYRLMKDKVDYTPVLSC

SEQ ID NO: 414944 - protein, 347 aa, unidentified
MRKIAYLAMDVHARNIVMGDMNGAGKFLGNRCFTTCENNIIEALKTVKAKKKLLVMEAGPLANWVAQTAAAYVTEVFISDPRYNALIYNSSVKTDKVDTQKLCRLLRLNEFKEVYRPANDQRAIFKATVQHYNDLRDQLKAIKQKTKAMFRQWGVIDVFTDSVYSPSGRDKFLQQVAKRPILLQLKRLYTLMDLTAELKQDAKKVMKSFGRRYPEIREFKKIPGIGNAGAHTFDAYIQTPHRFAKTSRLWKYCRIGVTDRSSDGKPLGFKRLDKAGIGELKAVSYRAFISTMKSDNEVKRFYLKSLQTTHNRTHARLNTQRKILAVMLGIWKKGQPYRAELFLDPCI

SEQ ID NO: 414945 - protein, 363 aa, unidentified
MLKTPDRVVIAVDPHKASWTAAAVNASLQPLDIIRVPVSRDGYRALRRFARRWPDPTWAIEGASGLGAPLTARLRADGADVVDVPAKLAARVRMLSTGHGRKNDDADAVSVGIAALSARTLNTAAVHATVTALRAVVEHRDDLVKTRTQTINRLHVLLTHLVPAGARRELTADQAAELLRGVRPHDAAGKALRGLAADLVAEIRQLDRYIAKAAANIQTAVSASGTTLTELSGIGTLTAGKILGRVGTIKRFRSAAAFATYTGTAPIDVSSGDVIRHRLSRAGDRQLNLCLHVMALTQIRQDTPGRAYYQRKRAAGKSHKEAMRCLKRRLSDVVYRQLVRDETRLEAGPGGHSGAALLSSAAS

SEQ ID NO: 414946 - protein, 360 aa, unidentified
MTSMTTATVRVIGGVDTHGQSHHAAVIDGVGRQLDDREFPASPAGYGALLEWLRGYGELDRVGVEGTGTYGVALTRHLREAGALVVEVDRPDRRARRAQGKSDPLDAYSAARAALSGAASVVPKLRDGRVEAIRALRVARSSAVKARSQATNQIKALIVTGPAQLREQLRHLRTGMIIAACARLRPGHNLGDAEQATKTALRRLARRHQQLSEEIAEADHELDQLVHQVAPALLALPGVGPEVAAQVLTSAGDNPNRIKSEAAFAHLCGVAPIPASSGRTRRHRLNRGGDRSANNALYVVVLGRMRHDARTRAYVKRRTHEGLAKPEIIRCLKRYVAREIYNTLNLTTPAKKPEQLLARP

SEQ ID NO: 414947 - protein, 346 aa, unidentified
MLHAGLDLSRRKVDVCLVSVEGELVDEWASPPDADGLRGLAARAAMYGGPVRGVIESMNGARFVHDRLEEHGWDVLIADATKVKGLAPLACKTDKIDARVLATLSARDLVPEIWLPDPSIRRERELARFRLHLVRHRTTLKNRIHATLIAFGHPCPVSDLFGHAGRELLDRLQIPDPWRRNVDVSLGLIDDLELQIARLTVELKRQGADHRYIPLLVTAPGLGWINAFTVASEIGDISRFPSPAKLCGYTGLCPRVKQSGATDARGPISKYGPKYLRWALFEAALNACKHPYYAERYQHTKRRLGRQRGPKVAQIDLARKLTESIWHMLTRNQPFAPAGAPFRLAA

SEQ ID NO: 414948 - protein, 402 aa, unidentified
MAVCGGLDWGQAGHSVCVIDRATGQIVVQFVIPHTADGLADLIRRLARRGAPADLPIAIERPSGLIVDTLMAAGHPVIPIHPNVVKASRPRYRAAGGKSDQGDAYLLADLLRTDGHRFRPLVPCSDAIKALRALVRGRDDLVAQRLALANQLRALLDSFWPGAAAIFADIDSPIALAFVQRYPTPDSAARLGEKRLTTFMAQHRYCGRRSAAELLNRLRAAPTGLAGETEADAKGELVRSLAAVLSTIVAHIAELSARIGHDLAELPEGRVIMSFPRTGRICAAQILAEIGDDPERFQTQDQLAAEAGVCPVTHASGKSRGVVFRWACNHRLRQAVTCFADNSRHASHWAADIYRRAIARGCKHPHAVRILARAWIRIIWRAWSDNVIYDPNRHQAARAFAA

SEQ ID NO: 414949 - protein, 398 aa, unidentified
MLSIGIDVSKGKSTVCGMKPGGEIVYTPFEVQHTREGMSELVSLLRGSGEEVRVVLESTGSYHCPVVAALLENGIFVSVVNSLRMKRFCSQSIRRVKTDQIDAMQIALYGLAYWQELQPTRLPENTYRELQLLARQYYQMTSLLIKAKVDFNALCDQVLPGMQELMSDHAGRHKLSDFVLRYRHTTHILEMGETRFRKDYCKWAEKKGYRNCERMAVLIFATAQNGIPVLPNAPSTQIVITEAIRVLHTVEASRDAILTQMQALAKTLPEYSLVREMPCIGDTLAPRLIAEIGDVRRFHSKRALIAYAGIDAPPYQSGKFCANNRHISKRGNRYLRKTGYEVMQSYVMHKPANDPIFTFIEKKRSEGKSGKLAMVAGLNKFLRVYYGKVTELYRSLPQ

SEQ ID NO: 414950 - protein, 345 aa, unidentified
MEQISRIGMDTSKHFFQLHGVNAAEKVVLRKKLRRKEMVAFFKALAPTVIGIEACGASHYWARLLRSFGHEVKLIAPQLVKPYVKRGKNDGADAEALCEAMSRPTMRFVPVKTAEQQAALMLVGIRDRLIRNRTQLANAIRGYAAEFGLTAAKGMAHLVPLLERIQADESLPALARELFSLQAKEYAQLQAQIDEVDAKLMAWHKADECSRRLAKIPGVGPIGAVLLKMKTPEPELFRSGRQFAAWIGLTPKDHSTAGKVRLGVITRAGDEGLRSVLVVGATAVIQQVRRGGRASPWLAELLKRKSPKLAAVALANKMARIAWKLMLTGETYTAKSAPAALASAV

SEQ ID NO: 414951 - protein, 355 aa, unidentified
MNQEKYIGMDVHQATISVAVMDGRGKLIMECILETKAATILEFVRGLQGDLSVTFEEGTSAAWLHDLLKPHVAHLVVCDPRKNALLKDGSKSDRIDARKLADLLRLNKLNPVYHGEHGVRTLKELGRSYLTITQDLTRVMNRIKALYRSWAIPCSGTTVYGARHRAEWLAKIVEPGVRLRAERLYQQLDLLQPVRQQARRDLLRESHKHPAVKLLQQIPAIGPIRAALLVALLQTPHRFRTKRQLWAYSGFALETHDSGEYRMVRGKVRRNRERMTVRGLSNNHNHDLKNLFKGAAISASTCPGPLYDFYVGLLEKGMRPTMARLTLARKIATITLTMWKKGVDFDAKQLNRQAA

SEQ ID NO: 414952 - protein, 358 aa, unidentified
MEIKSSEVRFDGQEFYLGLDVHHKNWKVTIRTMGMEVKTMVMPPDPLKLHEHMTRNYPGGRYISVYEAGFSGFWAHRQLVGMGIANSVAHAADVPTSDKERRQKEDARDSRKLARCLENGALEPIHIPDPHIEQLRSLCRLQERSRSHLTRLKNRIKGHLKYYGLPVPEDSAYRHWSGAFIVRLKALCSEPGPRSDYLSITLDALREESCRLALIMRKLRVHCRQGESARVIDLLRSIPGIGPKTAFTLYTEMQDIGRFPNLDKLNSFLGLIPSTDSSGEDDKVTGITPRSNRRMRVLLIEASWVAIRHDPELLSAFSKLSGRMKKQAAIVRIARKMAARVAYVWRTGTPYKPTILNG

SEQ ID NO: 414953 - protein, 343 aa, unidentified
MKDTTISVDVAKSVFEIAVSLHPGHVAETHRLPRPRFAPFFAARQPTTVVMEACGMAHHWGRELQNQGHRVVLLPPHAVRPYVPRNKTDRTDAKGILEAFRNQAIHPVPVKTVAQQALAALHRLRSRWMATRTSRINTVRGVLREFGLPIPVGSRQVVPAVRAALEDADSGLPDAIRPVLETACDEIRDLEVHIISVDHQIEAVARETPVVSTLRSVPGIGPLTATALVAVVGDAARFPSGRHFASFIGLTPRESSTGLRRRLGAISKRGDSYLRMLLIHGARSVLCHAKKAGTHDRLRTWALEREQRRGHNKAAVALANKMARIVWAVWTKGVPYQDTATAE

SEQ ID NO: 414954 - protein, 343 aa, unidentified
MKSQKATSWNELAKCQAIGVDVSKKTLEVVGLNGINEMRSGKLDNTAEAIGAFIEGLAGQSFQGTIVCKAAAHYHLILAVMACEAGLDIRAANPLLSNKLAKSAIGKTKADRVGAEALATMVLTEPNLPPRLKLSREMCHVRMTLGLVQTMEKHFQGLAGSLTSYQEWVDQLGCDPTDGFYEALAAIRQLRGSQEQLLSRLASMMEDTPERTATIERVTAIYGISRSNAALFTFVLDPTARSAKSWITYAGLDVEVKESGSWRGQSKLTKRGPAWLRKRLFQSAWGAVINYPQVRLYYDMLREKGRKYKEAVIIIAKKLLCIMYAVIVRQETFNPAKAFQIPA

SEQ ID NO: 414955 - protein, 317 aa, unidentified
MEPGECFVGIDVSKATLDVATRPAATPWTEAHTEAGITALVARLQSLKPTLIVLEATGGLELPLAGALGAAQLSVAVVNPRQVRDFAKATGQLAKTDRLDAAILAQFGHAVRPTPRVLPDALTQELSALVARRRQLVEMLVAEKNRYSAAPPRVHAEIRRHIRWLETALARLDDTLAGTIQRSPLWRANDQLLQSTPGIGPTMARTLLAELPELGTLNRKQVAALVGVAPLNRDSGTLRGKRTVWGGRAQVRAPLFMCTLVAVRHNPVLKVFYQRLRAAGKAPKVALTACMRKLLTILNAMLKHRTPWRTTDGPQSA

SEQ ID NO: 414956 - protein, 377 aa, unidentified
MEYSTTIGVDVSDRTSKICVMARTPDGGRRVVVETTCATTKDGFAEAAAKFDRSWPVVFETGTHCRWMERHFKSLGFRVIVANPAKVKLMGDPTSKTDRNDARKLARLALADPALLHPVSLRGEKYQRMLRLHEARQLLMRMRTSAICQVRSFAKSLGFRLPDVSPERFHALDMAGLPDDFERTVWPMMDAVKTVNLKIAAYDALIDELAGGPEFKAMVDRAMEIYGVGIIGATAVVAAIDGAPGRFTRARDVGPYLGMTPRKSQSGESDPQLGTTKAGNDLVRRVLVECANVVMKESAKDTDLKLKGLRIGARGGSIARKKAKVAVARGLAVLIVALLKDPSRKYVPLSDEGVAGFERYRAERELLTPAKGRMTIV

SEQ ID NO: 414957 - protein, 357 aa, unidentified
MSTNKLFIGMDLHKNSSTFCVKDFSGKLIATEKILTNKSEVLGFVNRFKKNELSLAVEPVSQWYFMADLLQNAGVDVHLANPLRVKAIASARIKTDKIDAGVLCDLLRGNLLPEAYFSSQDMRMWKELVRFRLSLVNLRTQTKNKIHAILGKNGCICKYTNAFGKAGRVWLASLELPEHFRNSLNEYLRVHDYLSVQITDAEKNIEKVVLQNEQMRLLLTIPGVSYFSALTIMAEVGDIGRFSSAKHLMGYAGVVPSTYASGDKIVHGRITKTGSRWLRWIMIEIAHKQIRCKINPGLGWYYAKIKKKKGSKTAAVATARKLLAVIWRMLTDERPFISPLEVQEAYRKNIVHQRRIS

SEQ ID NO: 414958 - protein, 372 aa, unidentified
MNIIGIDLGKTVFHLIAMRPDGAIIAKKRLSRPQLIAFMRNTPPSVVAMEASCGAHYLGRLFVSQGHEAKLIPAQFVRPFVKSQKNDYVDAEAIAEAAQRPTMRFVPIKTEDQLDLQAIHRVRERLVERRTALINQFRAFLLERGIIVRTGRQCLLRRIPEVLAAAEVQLAPRMFRLLTSVVAEWRAIEAEIAEMDREIGMIAASDEACVRLQTVPGIGPLIATAVVAAVGNGAAFSRGREFAAWLGLVPRQASTGGKAKLLGISKHGNTYLRWLFIHGGRSVQHRVSREPHAFGRWLTELESRTHSNVAGVAMANKLARIAWVVLNRQEPYRRMDQPSSGGGFGLSTLATPVSDAAQGSSMNSLRSALTGA

SEQ ID NO: 414959 - protein, 346 aa, unidentified
MTIVEDTRAITGGVDTDSEVHVAAALDPVGGLLGTREFPATAAGYAGLPGWLGEFGDVALVGVEGTGSYGAGLARYLAARGVRVVEAARAGRQDRHRKGKSDPLDAVSAARAAQSGRASGVPKGRDGAVEAIRALMADGRSARGERTQAVNQARALILTGPDELRARFAGKRAAALAEAVAALRPRPGDAAGYAVRTALRELGRRVEFPGAQIERLDDLIVPLVTVRAPGLLSLYGVGPDTAAMLLITAGDHPERLRSEAAWAHMCAVAPIPASSGKTRRHRLNRGGNREANHALRRIVITRMSAHPATRAYIQRRTAEGLSKKDIIRCLKRYVAREAYPCPRAGS

SEQ ID NO: 414960 - protein, 339 aa, unidentified
MTMIGIDPHKATHTAVAVDDDEQVIGEFTLEASNNQAERLCGWADRFAKREWAVESANGLGYLIGRQLVSAGETVFDVPPVLVSRVRLMGSGRSQKNDPNDARSIAIAALRSDRLRVVEPDDHVTVLRLLVKRHRDMAQLRNKHCSRLHALLLELAAGGIGGKINTRNASEPLDRICVTDETARYQILVAREVVDDIARLDATLKASKKRISVAVDASGTSLTNTVGVGPIGAATIIGYTKDVARFPTRGHYATYNATAPIEASSGGNTRHRLNPRGNRVLNHAIHIAAVTQLRHDTNGRIYFDKKIAEGKSSKEAIRALKRRISDAVYRQLQHDASHR

SEQ ID NO: 414961 - protein, 341 aa, unidentified
MNITTIGIDLAKSVFQVHGTDERGKAVLTKVLRRSQMMPFFTQRAPCLIGMEACGSAHFWARKLTALGHTVKLMAPQFVKPYVKSNKNDARDAEAICEAVGRANMRFVAIKTPEQQALLALHRARQGLVRARTAQGNQIRGLLAELGCVIPKGRRHLESHIRAILEEAENGLSGMSRELFVRLLGHLRYLDEQVQALETQIKAWHREDAASRRLEEIPGIGPLTASALVASIGDARNFKNGRQLSAWLGLVPRQHSSGGKSTLLGISKRGDVYLRTLLIHGARSALQRQSSERWGAALAERRNKNLAAVALANKNARIVWALLAHGRDFQADYRRLRSQAA

SEQ ID NO: 414962 - protein, 400 aa, unidentified
MLSIGIDVSKGKSTVCGMKPGGEIVYAPFEVQHTREGMSELVSLLHNSGEEVRVVLESTGSYHCPVVAALLENGIFVSVVNSLRMKRFCSQSIRKVKTDRIDAMQIALYGLAYWQELQPTRLPEDTYRELQLLARQYYQMTSMLIKAKVDFNAICDQVLPGMQELMSDHAGRHKLSDFVLQYCHTTHILEMGETRFRKDYCKWAEKKGYRNCERMAALIFATAQNGIPVLPNAPSTQIVITEAIRVLHTVEASRDAILTQMQALAKTLPEYSLVREMPCIGDTLAPRLIAEIGDVRRFHSKRALIAYAGIDAPPYQSGKFCANNRHISKRGNRYLRKTGYEVMQSYVMHKPANDPIFTFIEKKRGEGKSGKLAMVAGLNKFLRVYYGKVTELYRSLPAIE

SEQ ID NO: 414963 - protein, 428 aa, unidentified
MNEVERIRLEGFRQLKKEIRGSKEHLIVGIDVAKEKHNAFFGTATGKTLLKRLVFGNNIKGFQRLLTYVEAVKVKHGLEKQVFGLEPTANYHKPLGEYLIKCGLDVVLVSGVSVKRNRELLDGRWDKHDTKDSANVADLISQGKCLFYEYPPMALRDLRNLLSLKRRLKKQEHGLKVRIRNHLLARYFPELDRYYGRSGSEGLAIVRWCLNPSVIAGLEYDQFVRLVAPGSRRIVQHKRLKAIWLKAVDSIGCDVGEAVEFEAKVMVEGLRQIRETIRATDDEIEDICLQFAEYSYLLTIPGFGPDVSSKVLGAIGNPFRFNTQKQVLKMAGMDLNAERSGNRSDAAIPVISKKGKADLRYALYQAALVASTKDLNFIVYYTNTLRGREREKGIKIKMRVKLAAKLLVIAWTLMKKKEPFDPDYLNIE

SEQ ID NO: 414964 - protein, 342 aa, unidentified
MGEVSTIGLDIAKSVFQIHGVNAAGAVVMRKRITRAKLLEFFAALSPCLVGIEACPTAHYWSRQLQALGHTVRLLPPSYVKAYLKRSKNDANDAAAICEAVTRPSMRFVATKSEQQQSGLMLHRSRQLLVCQRTMLSNAMRGHMAELGIISAKGRNGTAELLEIIADEQDDRIPAAARFSLDVLARQYAVVRAEIATIEKRINAWHRSCEESRRLEEIPGVGPIVATALMAEVGDWKVFASGRSLAAWIGLVPRQHSTGGKERLGRISKQGNRHLRWLLVAGAMAVIRYARQHGTKRPWLARLMDRRPIKVAAVALANKIARMAWAMMVRGERFKEAKLLPA

SEQ ID NO: 414965 - protein, 344 aa, unidentified
MVTFGVDAHKRTHTIVAVNDRGTPVGQTTVGTTSQDHLVLLRWAARFGAERRWAVEDCRHLSRRLERDLLAAGESIVRVPPKLMAHVRDSARTYGKSDPIDALAVARAAQREPNLPLARLDGPDREVRLLVDHRESLISERTRLICRLRWHLHELDPAWEPKARSLDAQRTLDEVRGRLQDHVGVVARLAVELTERCAELTITIKALEKEITELTTQLAPALLELPGCGALTAAKIIGETAGVDRFKSRDAYARFNGTAPLPVWSSNKARHRLSRTGNRQLNAALHRIALTQARWHPPAKEMIERRKSGGNSGREALRVLKRRLSDAVFQALLHDQTAGLTHAP

SEQ ID NO: 414966 - protein, 336 aa, unidentified
MDIYGGIDWAEDHHDIALVNRDGQLLARRRISDDAAGLAQLLALLAEHGDTAGDPVPVAIETPRGLLVACLRATGRAVYPINPMAVARYRDRHSVAGRKSDHGDSFVLANVLRTDIAMHRPLPADTELAQAIAVLARAQQDAVWDRTQAHNRLRSHLREYFPGFLAAFASAKGGIMRPEARTILAAAPTPADAAKLTLTQLRGLLKRAGRSRSLDAEATRLRDAFRVPQMRQLPLVEQAMGRQAIALLGQLDAACTSAGDLEQAVTESFNQHPDAGIITSFPGLGPLTGARVLAETGDDRSRFQDAKGLKAYAGAAPIGSRTTGWPPPATSGRFPP

SEQ ID NO: 414967 - protein, 307 aa, unidentified
MKEHVVYCGIDVAKGQLDGALLGKRWQVPNTKAGIRRLIKMLRQRNTCPQVICEASGGYEQDLVELLHQAAVPVTLVQPQRVHQFARASGILAKTDKIDAQVLVCFGQALAPAPNAAPGAQTLLLRELDRQRAHLSGLLVAEQNRRAQLRDPSLRQLSAQLIKQIQGHIVRIDARTQAIIAADQELKAKAKMLTSFSGVGLRTATMLLAQMPELGQLNRREAAALAGLAPFNRDSGTWRGQRRVCGGRSLVRRGLYMAALTAARRNHILAPFYQRLRAAGKPPKVALTAVMRKLLIALNSALSPTPA

SEQ ID NO: 414968 - protein, 339 aa, unidentified
MRLYAAFDLHSSNSYLGISDEKGKRIFKKKLPNDPARIKETLRPFKAEIEGIVVESTYNWYFLVDLLREEGYRVHLANVMKTQQYSGLKYSDDKNDAFWLVEMLRLGILPEGYIYPKEERPIRDLLRKRGHLVRLRTSLIVSLQNIIARNLGGRLKANDVKVLTTDRVTPLFQGNEDLALAGKVSKEAIDFMTRQIKAIEASIDGRIHLSNPYNRLLSIPGVGKILAFTIMLETGSIDRFQKVGNYVSYCRKVPSGRFSNDKKKGTGNRKNGNKYLAWAFSEASDHARFFDSESRRYYQRKLQKTNAPIAHNALAHKLARAAYYIMKDGVVFMPDKAFA

SEQ ID NO: 414969 - protein, 372 aa, unidentified
MEKLSNIHVGLDTHKDSITIARADPGRDPGRVVSKIANDVVKLAKCLAGIAAPQQLHIVYEAGPMGFALQRKLAQRGYTCEVIAPSQTPRRPGTRIKTDARDAIVLAQASRAGELQAVQIPDPEDEAVRDLSRAREDAVKACTRARQQLGGFLLRHDMRYAGKSAWTKAHYLWLAEINMGAGAAQIAFTEYVLAVQAAEQRVQRLTQALGECVTGWRFEPVVAALQALRGVALVTAVGLVAEIGDLRRFAHPRNLMGYLGLVPSEHSSGEHVQRGSITKTGNSHARRLLTEAAWNYRYTPRIGRDAQQRQLALSESICATAWKAQLRLTRRYAALSSRGVQPNKVCVAVAREIAGFVWAVGTQAMREHSRTL

SEQ ID NO: 414970 - protein, 410 aa, unidentified
MTKEDFIYVGIDLHKETHTAVMIDCYNNKLGEITFPNRPADFPKLVTKVKKCNTDAKEVVYGLENAYGYGRPLAVWLIDKGYFVKDVNTAISHRQAKHRGAMYRKSDSDDAEAIALATLNMLDKLPDACPNDAYWSLGQLVHRRDNIMKQRTRLVNQLHEQLCIAYPSYKQFFNDISRPTALYFWEHYPSRKYLKGKSVEDLRTELVPVSHNRCSTKNCEKILDAVASDKVKNNAYQDARDMVTLSIVSDLQHYDSQLAEVDKMLEQMYKMLGCTLTTIPGVNVITAVKILAEIGDIKRFSNANKLAQFAGIAPLHLSSSGKGKDVATKQGNRRLQATIYFLAIQMVQVSSKGTPRNSVVRAYYEKRKAEGKTSQQALICISRRLISIIYGMLKHGTEYRMPVVESAGEK

SEQ ID NO: 414971 - protein, 429 aa, unidentified
MKIIYPRVCGIDVHKKFIVAVICISESVEPVYLKKRFSTFHNDLIRFRDWLIQNDCQNVCMESTGKYYIPVYNILESHISNIVVANPKWVRAVKGEKDDDKDAKWIADLFKLGIVKSSFIPQKDFRILRELTRYKYKLVNMRSSEKNRYQNALTSGNCKLDMVFTDVFGKSASNIIDLILSDNPYTDEDILSKVHKNCKASPDMILNSINGTDLTPVQKSRIELVNNHIKQLSSNIQRLDKLIDLMIEPYEDYISFLCQIPGVSRNSAITILSEIGVDMNQFTSTRRLTSWAGLTPSSNQSAGKKKSVRISRAGVCLKPCLVEVAHAAVKDTNRPYYANKFNKISKRRGKKRAYIAIARKILVAAYHMLLTGEIWNPADLAEVETPVEQRIKYVKNNLKSDIKQLLDIGLTVEELTLMIQQNANNIATQ

SEQ ID NO: 414972 - protein, 348 aa, unidentified
MNSNKYVGMDVHLATISCAVLDSDGNQVMSLVLQTKAELVISFLQGLKGTVHLAFEESTCSQWLFEITKPLVERVVVCNPRKLGKPRSAQKNDARDAADLADLLRLNALKGVYHHQRRSFSEIKQLVVIYNQLTEDRTRSINRLRSVFREQAMTIKLDSLALAESVKELPTAGHRERAELLFAEIESITQLREKARQKMLAQAEEHQSYHLLQSLPGISSIRAAQLLAWVITPHRFRTKRQFWSYCGLSVITRSSADYRIVGGKIVRRQSDGTTYGLTNEYHRGLKNLFKSAALDSIKNAKMKESYQKLVDRGLKETIARVQIARKIAASCLAIWKSGEKFEIERFSS

SEQ ID NO: 414973 - protein, 401 aa, unidentified
MKTVLSVDVAKNKSMIMLMNSDGEIFIDTKEINHNLEDFEKVKEEIKEINPQNLTVFMESTGTYHLPVERYFKENGFNTLVINSLTTKNNYDTIRKTKTDKKDCYRLAKLFFVNEVEYHDLSKKDLYANLKAMTRQYFYLLQNNVSCKNRYKRLINICFPELEKIFKSTRIYDDTALNFIKEFPHAEIVKEKRIDALYNNLYKTNGRNLNFYKKLATTIKTASINSYPGVDKEHEDVKNLSYMAKIVQNNNNIINELREKMIETAKQSSYYKIINSFYGIGDTLTAEILGELGDITRFDSPKEIIAFCGLDPTIKQSGKSINVKGAISKRGNKYARYILFNCSQMVVKLGASNYPEHPVYIYYQNKKAEGKHYYESLTACSTKILRMLYSMCKNNKQFLEN

SEQ ID NO: 414974 - protein, 335 aa, unidentified
MKYNAFIGIDISKLTIDVAIRSRASKELAHQQFENSPKGYARMLAWVKRLTRCGETEFFFCVEHTGVYALPLACFLTGKGLDYRLENPYHLKHSMGLQRGKNDRVDAMMIARYAYLHHDELRLTTLPPGAIITLQHLLAHRERLVKTKRVYTVAPKELASFSSQESHAFIGHESQLIVSTIERGIKAVEGQIESLIQEHADLNKNFRLARSVKGVGLVIAAYILVYTHNFTAITDPRCFASYSGIAPFARSSGTSLAKAPRVSHLANKRMKALLSNGARSAIRNDPEIRAYFQRKCDEGKPEMLVANAVKNKLVGRIFATVKRGTPFVGLGKHFS

SEQ ID NO: 414975 - protein, 346 aa, unidentified
MDYYAGIDVSVECSSVCIVDATGKIVREGKPASEREALIGWLHSWGFELTRVGLEAGPLSQWLYAALKQAGFAVELLETRHVRDAFSAMPVKSDRNDARGIAQLIRLGWFRPVHCKSMAAQEVRAMLTARKLVQSKLRDVENSLRGILRGFGLKVGKVTRNSFAGRIQQLVDGHPSLEMIAKSLLSVRAILLEEFKAFERRVRLMARSDARARLLMSTPAVGTIVALTYGAAIDDPARFKSSKQVGAHFGLTPKKHQSGETDRSGRISKIGDASVREALYEAAHVMLTKPIKGCSELKSWGMRIARRAGMAKAKVALARKLAVVMHRMLVDNAPFNPATKARAAMV

SEQ ID NO: 414976 - protein, 366 aa, unidentified
MAQSRFAGVDAHKRSMTFAVVDGFGVEVAVASFGTSSEGVGLALAWLASVGPVSRIGVEGSAGHGRHLAERLVTAGEDVREVPPRRTAERRRARRRAKTDREDALAIARATAGEPGLGPVKPGAGLGPAHEELVVVRDHRLMLVQRRKTMLNHAEAALGGLPLEVTDAGRDGRQVRPRLRQVLRADPAAAPGTVRALLSVLAEIEADITELDRRIGVLDKQLAALITACGSTLLEEPGIGVAGAATLLAEVGDPARFRSESAFNRWWGGAPVAVSSGEGDADPLRHRLDLLGNRTVNSVLYVMSITQARYHPPARLYLAKKKTEGHSRKEARRAHKTVLGRRVIRRMWSDRRRQLNRAVLHPSQVA

SEQ ID NO: 414977 - protein, 413 aa, unidentified
MQVLYERCCGLDVHKKTVVACVLITSPDGQVQKQGRTFATTTASLLALADWLASLDISHVALESTGIYWRPVFNLLEEGRTIILVNAQHMRAVPGHKTDIKDSEWLADLLRHGLLKASFIPSKPTRDLRDLVRYRKTLVQERAQEVNRLQKVLETANVKVSSVVSDVLGKSGRRMLAAIIEGVSDAEALADLARGTLRHKLPQLQEALHGQIESQHRVLLGQIFAHISFLEHSLEHLQQEIEQRLCPFEEAMQLLLSIPGIQAITAAAILAEIGVEMSRFPSAKHLASWAGVCPGNKQSGGKRLSGKTTKGNVRLRAVVVEAVWNISRMKDNYLSAQYHRLARRLGKLQAAIAVAHSLLIVIYHVLRDKKPYHDLGTDYFDSLDKERLTRQALRRLEALGYAVTLTPKEEVVI

SEQ ID NO: 414978 - protein, 343 aa, unidentified
MQVAIGIDTHKGSLAAAAVDALGRVLGAREFTNDPTGHRSLLRWVREQAQPRTIGIEGSLSYGSAAARMLLGHAEDVREVAPSLTHLERRRRSKGKSDPVDAVAIARVVAADETLPSARRTTLLVDLKLLVDYRDQLVHARTQVANRVHADLVIIRPGYEQVVPNLRAKRHVAKARSLLGRDRSVQAELVRRRLGEILRLEAQIAQADRRITDKLAEADTTLTQIPGVGPFIAAKILGEVGEISRIRSKASFAMLSGTAPLIASSGQTHRHRLNRRGNRQLNWALHYVALVQSRTSPEAKAYLVRQREAGKSHKEAMRCLKRHLSNVVYRHLLLDARRLEQAA

SEQ ID NO: 414979 - protein, 314 aa, unidentified
MADPCSVGIDVSKATLDVAWSTNPTTRWQTTNDDAGWTALVAHVRALQPTVIVLEATGGYEIGAASALSTAALPVAIVNPRQVRDFAKALGLLEKTDGIDAAVLATFGARIQPTPRPLPDDLQADLQALVTRRRQLVDMLTAERNRVLLARGAVRKNVVAHIAWLEKQLGKTDRDLRTQIEASPIWRARDQLLQSVPGIGPATSARLLASLPELGTLSHRQISKLVGLAPLPDDSGRRHGYRRVQGGRGDVRSALYMATVTAITHNPTIRAAYRRWRAAGKLPKVALVAAMHKLLIHLNAMLRHQMPWHPLATA

SEQ ID NO: 414980 - protein, 410 aa, unidentified
MEVLYRRCAGLDVHKDTVVACARLVDGDAARAQMETVTFGTTTRALLELSDWLTAREVTHVVMESTGVYWKPVWHVLEGNFELVLGNAVYLRNVPGRKSDVADAAWLADLLAHGLVRASFVPVAMQAEMRDLTRTRKQCVREQSRQIQRLQKVLEDANVKLDSVLSDITGTSGRAIVQALINGEADPKKLAALANPRVKATQETLADALLGKVTQHHRFMLKFHMDHYDAISRQIEEIDKRIEETMHPFHDAARHLQEIPGVGAVAASAIVAEIGVDMSRFPSVGHLLSWAGLVPQMDQSAGKHRSTRTRKGNPLLKTMLVQCAWSASRTKKSYYRARFHRIRARRGTKKAVVAVAASLLTAAYYMLRDGTEHKDLGVDYFDRRDGTKTVKRLERRIRELGYDVQIQKVA

SEQ ID NO: 414981 - protein, 388 aa, unidentified
MLLDHLADGPAAIRTQFGAIFVSLELSRSTWLVTSLSPGKGEKMSKHSVPAGDVPELLKLFAELKRKAEVRTGRSYPTITIQEAGLDGFWLHRVLQQEGIESHVVDPASIAAPRRRRRAKTDRLDGETLLRSLLAYKRGEPRVCAMVVAPSPEEEDRRRLIRERRTLIEERIVHVNRIKGLLFAQGISDYAPLRRDRRARLEAMRTGDGRRLPSHLKTQISRELDRLELLLDQIKAVEAEQDVLLTEASQPKGKAAAPDPVSLLLELRSMGANFAAVLWSEAFYRQFANRRQLAAYAGLAPTPWRSGSIAHEQGVSKAGNPRLRTTMIQLAWLWLRHQKQSALTRWFEAHSKRGRKSAIVALARKLLVALWKYVTAGVVIEGAVMKSA

SEQ ID NO: 414982 - protein, 421 aa, unidentified
MNSIHINDTHKPAPTHLLLAVDVSKRRLDAYSRYEQGRCEYDCIDSFANDVPTIDAKLVYYARQALALGYQGLDIVVEPTGRHEQKLTQAAHARGHTVWMVNPEHMYKAGVIHHGDDGKSDPLDGQVLHMMARMGKVSRWIPLPMPWQKLRSLGQYLEDATLAAADVRIRIIGLRRELFVDYQQSTDLTWGATGKALQEVFGFDPWAITQGTYESYVRQIRSQYPRIPERGLASIWEQALQSKRPECHPQQRALLLEQLTHLWRNWEYQEQRKHELGAQMVGLVNELDPEHWIPPLWSGFSELMRAKILAETGPLRGFPHWRALVAYAGLKIRMRASGTYRGKDRITKKGRILLRKHLGQATFTLTRKDRLLGPYYHRKLGEGMPPRKAKVACMRKLVKILYGTARSKQEFSKERVYRSAG

SEQ ID NO: 414983 - protein, 309 aa, unidentified
MAMMTVNTELGIDVAKDWLDISNGKDVVRIKNNQQAIKSYLKQLCTTACISIESTNTYHELFVELAFLAKHTIYIVDAYRLSRYRDAVGVRAKTDTNDAHLLLRYMRSEKQHLTVFEPIPKAVKRLNRLLKARAKLAKSKATIGLSLKGVAELAQTCKALMKRIEQAMTLIDNRIQACIKDAGYKEDYMRCLSIPGIGPANAAALVAMFHRGHFRKSDSFIAFIGLDVRVRESGYYKGKRKLTKQGNPEIRRLLFNAARAAARTETWNDYYMSMRAHGHSTTATAVSLSRKIARLAFALLRDQSEFRAV

SEQ ID NO: 414984 - protein, 412 aa, unidentified
MELLHRRCCGLDVHKETVVACLRLVSDGKVTTEVRTFQTTTADLLRLSEWLAANDCTHVAMEATGVYWKPVWHILDDGEFELVLANAAHVKNVPGRKTDVNDAMWLAELLAHGLIRASFVPDAQTQEMRNLLRTRKQLVREQSSHVLRVQKTLEDANIKLDSVLSDLMGKSGRAMIEALIAGETNPAKLASLADRRVKASPEEFREALRGRVTKHHRFLLRLHLNQIDALDAAMATLDAQVEANLGPFRTAVDLVMSIPGIKNLGAHVIVSEIGIDMSRFPSDAHLISWACICPRNDESAGKRRSNRLRKGGTWLKTTLVQCAWAAVKKKDSYLQAQFYRIKARRGPKKAIMAVVASILTAIYHMLKDGTMYKDLGCNHFNRRSTDQQKTYLIKRLADLGYTVEIKPVVAMA

SEQ ID NO: 414985 - protein, 455 aa, unidentified
MPGKKTRGTSAGRLSTINPDAAGIDIGSTFHVVAVPSDRDDRPVRTFRTFSSDLHQLADWLTEVGITTVAMESTGVYWIPVFEILEARGFEVLLVNARDVKHVPGRKSDVNDAQWLQQLHQHGLLRGSFRPRDSVVRLRAYLRHRERLVDYAAAHIQHMQKALMQMNVQLHHVVTDITGLTGMRIIRAIVAGNHAPEQLAEFRDRRCHASEDTIREALIGNYRPEHVFALRQALELYDFHQVKVAECDVEIEGVVCGLNEQRVTPEAPLPSVRHAKGRNEPAFDVRPALYTLLGADLSQIHGFGPYTVLRLVAECGDDMTKWPTAKHFTSWLSLAPGNKISGGRLLSSKTRRSSNRATALLRIAAVNIGKTQTALGAFYRRLAARTGKAKAVTATARKLAILFYNALRFGMTYVDPGVSSYEDRYRQRVIHNLHRRAKSLGFALVAAAPATEGVS

SEQ ID NO: 414986 - protein, 404 aa, unidentified
MLWGGGVDIASIVRCEPMELPMQTLNNLSRSLIDLEPASTLIAVIEMSLSSWLVAGIVPGIERQPLKKLAVDEGALLRLLHRWREEAEKAGCRIERIVVAFEAGRDGFWLARWLKARSIEAHVIHAASVAVSREHRRAKTDRLDAELLKRAFLGWLRGERNHCKVVAIPTLKDEDAKRPSRERESLVGEQGRIVNRMKAALIRLGIRGFNPKLKRAVGRLDSLRTPEGEPIPPNTLAELRRDMERRRLISNQIRQIEEARLKHFEQAPNDGPHAMVRLLARVIGVGIETADMLVHEVLSRNMHDRRAIARYAGLTGSPDESGRKRREKGLARSGNGRVRRGMVQLAWRFLTYQKESALAQWYRARTENARGARKPMIVALARKPLITLWLRVSWPIGVVLKPAQ

SEQ ID NO: 414987 - protein, 343 aa, unidentified
MTIVEEKPAVTGGAGTHSEVHAAAALDSVGGLLGTREFPATAAGYARLLGWLGKFGDVALVGVEGTGSYGAGLARYLAGHGVPVAEADRADRQDRRRNGKSDPLDAVSAARAALSGRAAGKPKGRDGAVEGIRALMVAKRSARRERTQAINQARALILTGPDELRARFAGLRAAALAEAVGSLRPRPGDAAGYSLRTALRELGRRVEFPGAQIQRLDELIVPLVTARAPGLLSLCGVGPDTAALLIAADDHPGRLRGEAAWAHLCAVAPVPASSGKSRRHRLNRGGNREANHALWRIVITRMSTHPATRACVARRTAEGLSKKDIIRCLKRYVAREVCPYLRG

SEQ ID NO: 414988 - protein, 382 aa, unidentified
MRSVALDLGSRISYCEVKDGKVVERATVGSLSDLVPLLGSNTPPARVAFEAGCEAWLVHDQLQAWGHEPLMLDTTRVRQLGVGQHKRKNDRIDAETMAMALDVGRIPLAHVLSPHRRELRMQLGARRALVETRAQYVTQIRGLARAHGKHLPSCDTENFVERLRETPLDEQTRALVEPLVKVLEVLTPQIALVEKKLEQLCAAEPVIKRLGTTPGVRLIVAAAFVSVIDEASRFRRAHHVEAYVGLVPSEHTSIHRKLGAITKQGNSYLRALLVQAAHSVFRLRADDPLKRWGESIAERRGKRIAVIAVARRLVGILWAMWRDGSVYNPTKLGLATANGLSSHARELTAEAEKQRAAVAPTGNRRSTPRASTRKTPREVRMS

SEQ ID NO: 414989 - protein, 374 aa, unidentified
MNYYNTIYVGMDVHKESFTLRYFTVDMEEPSTPLRINADYKLVLKYLDSLRNTFGDNSRIICGYEAGCLGYTLYHQLTAHNVECIILAPTTMSIDNRKKKNKNDKRDAGNIAKCLAFRTYSPVHIPSEQDEKIKEYLRMRDDHKIALKKIKQQILSLCLRHGYQYDSTKSHWTQTHIKWLRTLKVEDMYEEILSEYLATFDYLTDKIERLDQRIEELSLKEEYKDNVKKLSCFMGIKTITALSVIVEVGDFQRFCCAQCFASYLGLVPGEDSSGDTYRHLGITKAGNSHVRKLLIEAAQSYTRGVIGHKSTVVKKRQQGNSPAVISYADKANERLRRKYYKMVLTKGKKANVAKTAIARELACFIWGMMTNHII

SEQ ID NO: 414990 - protein, 340 aa, unidentified
MGDIITIGLDLAKNVFQVHGVDEAGNVVVRKRLRRGQVLAFFAGIPRCLIGLEACATAHHWARELIALGHEARLMPPNYVKAYVKRNKHDVADAEAICEAVRRPSMRFVPLKTTEQQSVLMMHRARDLLIRQRTMLVNALRGHLAEFGLIEAQGLHKVARLITIVMDEMDGRVPDIARQVLKVIVSQIEDIRRGIAELETQVLAWHKNNPVSQRLATIPGIGPIIATAIAATVADPNTFRSGREFAAWLGLVPRQNSTGGKARLGGISKRGDSYLRRLLVNSAHTVLLCSKAAKTDPWLISLLRRKPRLVAAVALANKTARVAWAIMSRRETYRHVAAAA

SEQ ID NO: 414991 - protein, 415 aa, unidentified
MKSLYRRIAGADVHRMLYVLTVLIELEDGTVEKHQRSFGGFKRDRRALVIWLLELGVDLVVMESTGIYWKSLYAALEQAGIPAHVVNARHARNLPGRKTDVSDSEWLAQLGRFGLVKPSFIPPQDLRELRLVSRYRQKLAQTLAGEKNRLHKILDDAGIKLGAVVADIHGVSAQAMIEGLIAGTPIEQLPDLAKGALRNKREILEQALDGELSPRHRFVLRHIQNHIHALESELQSLDVYLIDAMAPYAEHWHLLQTLPGVDRISAAMILVEIGTDLSAFADAAHFASWAALCPGNHESAGKRKTGKTRKGNHAIRYLLCEAANAARRTHSAFRNRYQSLVPRKGHKKTIIALGHSMIRTIYVLFTRRQAYRDPGIDYQAIVVTRNAPRWIQALKKYGYWPTFDQAVPPTPVPAH

SEQ ID NO: 414992 - protein, 342 aa, unidentified
MDEITRIFIDTSKHVFQLHGVNGAEVVVLRRKLRREQLLAFFAKLSPTVVGLEACAASHHWARELAALGHAVRLLPPQYVKAYVKRGKNDGRDAEAGCEAMSRPTMRFVPVKSAQTQAALMLASLRDRLVRERTRLGNVIRGHAAEFGLTAPKGVAHVAPLLAEAAGDARVPALARELFVDLARRWDQLADELRRAERRLLAWHRSSELSQRLAKIPSLGPINAPMLVMKVPDPALFRSGRDFAAWIGLTPKDHSTAGRQRLGVITRAGDAALRSALIVGATAVVKQAQRGKGSPWLIKLLKKDAPKLAAVALANRVARIAWRMMLSGEAYDPKPLMRELPA

SEQ ID NO: 414993 - protein, 341 aa, unidentified
MPVVTVGIDLAKSVFAVHGVDEAGKAVLIKPRVPRDQLIALIAQLPPCLIGMEACSGAHHWARMFQQYGHTVKLMAPKLVAPYRMSGKRGKNDAADAAAICEAVTRPSMRFVPLKDEHQQATLCLHRTRQGFVEERTAIYNRIRGLLSEFGVVLPQSPERLRREISTHLDALPGWARRCISDLLEHASNIEARLAEYDRAIGGIARDDERSRRLMHLRGIGPTTASALLASLGAGRDFRNGRQVAAWIGLTPSQYSSGGKERLGGITKTGDAYLRNLLILGARSVMASLGDKQDRFSRWVRSLVERRGYWRAAVAIAAKNARMAWATLKYGDAFKYVLATA

SEQ ID NO: 414994 - protein, 350 aa, unidentified
MKKLSKTQKQMPKETIGIDLGDKMSRYCIVNQDGEAVEEGSFRNQVSSLETHFAGEPRRIALEAGGQSAWISRELKRLGHEVIVANARELKWITASDSKNDPVDARKLALLARADVQLLAPVEHRTAEQQAELAVIRARDAILRARTLLINSARGIAKGFGVRLPKSITSTFGKRALVDLPALLRTALQGLLEQIDALSQHIGNYDQQVGQLAGQHPEVNRLTSIPGVGTLTAVTFVLTLGRPERFAHSRDVAGFLGLRPKQRQSGARDPQLGISKSGDPYLRKLLVQCAHHVLGHWGKDSALRRWGLAKSEGGKKATLRAIVAVARKLSVLLHRLWVSGEFYKPFPKMV

SEQ ID NO: 414995 - protein, 414 aa, unidentified
MSHMIAGIDVHKKILAVVAADGAQEGEVEFQRRKFYSTPGELRVLADWLEALGVKEVVMESTAQYWKPVWQTLEGKFHLELAQAQSNRAPRGRKSDFRDVERLWRRYRADELILSYVPDPEQRLWRTLSRTKVRWTRDKSRLQNRLEALLEEMGIKLSSKVSDLLGVSSRRMLRAIADGEKDAEKLAEMADPQLRASKQALCDVLQAVNTVDQRYRRVLKHFLEQLDLNERQAQQLQEELADSLKPYADQVERLAEVPGLGVDSAQQIIAEVGPSAEKFPTAGNLSSWIGVCPGENESAERSTSDHSAKGNQAMRRILDQAANAAVKANGTVFQARYQRIRGRDPKKHNTAIWAVAHHLCRVIWKILHKAVRYEERGNRPDSRAVKRRATRLLRQLKSLGYKVQATPIIAEASA

SEQ ID NO: 414996 - protein, 326 aa, unidentified
MKEVSTIGLDLAKNVFQVHGIDAQGKVLVRRQLRRAEVLPFFAKLAPCLVGMEACGTAHHWGRELIKFGHTVRLMPPAYVKAYVKRGKTDAADAEAIAEAVSRPTMRFVAVKTVDQQAVLMLHKVRDLQVRQRTMVINALRGHLAEFGIVAAQGPAGVKAAIAEFHTVQDSLPELAKSALRRLVDQIGDIDAEVRKAEKEIVAWCRDNAASRRLMTIPGVGPITASAIVAAVPDASLFRSGRQFAAWLGLTPRPHSSGGKERLGGISKQGDGYIRKLLVTGATAVIRLARQDNPVRLGRRACSTASPPGWCRSRSPTRPPGSPGWC

SEQ ID NO: 414997 - protein, 372 aa, unidentified
MSETQAPIARVGIDLAKQVIQAHAVDAHGRRVQARALKRELFFAWCERLPAGCLVAMEACSSAHYWARRLRVLGLDARLIAAHFVSPYRMEGRDGKNDAADAAAICEAASRPSMRFVPIKTCEQQGVMCLHRVREGLKEECTACINQIRGVLMEFGLAFGKSPKVLRGVLADVIEDASNELSSTARLVIQRAFDHWCELDEHMRWCDKQVGLHVRSNPSAQRAAKVIGIGELGASAMTAGVGDFKQFKSGHQFGAWLGIVPRQHSSGGKIRLGRITKRGDDYLRTLLIQGAKSAVMTAERRDDPTSRWLAQLTARVGWQKACIAMANKNARILWAVMTREEGFDPHHVSVKPGSKQATRPPSQDLPDVACAG

SEQ ID NO: 414998 - protein, 368 aa, unidentified
MVEPITAFVGLDAHAESTAIGVAEPGRAPARFVGTVGARLSELRKALAKLGPPSTLMIVYEAGPCGYALARDLLSAGYHCEVVAPSKIPRRAGERVKTDRRDALMLATLARAGELTVVRVPDERDEAMRDLSRARIDAVRARHKARQQLKALLLRQGRRYTGKSSWTAAHERYLASVGFAHRAQNIAFVEYRQAVSESHARVQRLQEALTQELQSWRMRPVVQALMTLRGVDQLVASALVAELGDLKRFAHPRDLMGYLGLVPSEHTSGEKRRLGPITKTGNSHARRMLIEAAWNYRFPPRLTPALQKRQEQQPPEIRAIAWRAQLRLSHRYRGLKARGVQHNKICVAIARELSGFLWSIGQHVAAGP

SEQ ID NO: 414999 - protein, 311 aa, unidentified
MQELFIGVDVAKDWLDVHHPLRGARRIANTVTVARSFAASCAKEGAWVVFEASGGYDRVLRDALEAGGVRFSRVNPRQARDFARAMGVIGKTDRVDARMLAELGTRLRPAPTQPLAAARRALQAHATRRRQLVEMRKQEATRLHQTADRQARADITSLIAVLDRRIAKIEAQMAALVEADPEMRAVDRRLQTAPGVGPIVAATLLAEMPELGQLDRRRIAALAGLAPIARDSGKRIGPRSLGGGRPVVRTILYLAALQASRRCTVFRNFRQRLQLAGKPTKAALTATARKLLVTLNAMLAAGTDYHPIVAA

SEQ ID NO: 415000 - protein, 341 aa, unidentified
MDVSVLGIDLGKNSCSLVGLDATGKVVVRRRMRRETIIAYAGALPPCIVAMEACCGAHHMGRALERQGHTVRLMSPEYVRPYVKAQKNDDRDAEAIAEAATRPTMRFVELKSEEQLDMQTLHRIRDQLVGDRTSLMNQIRSLLLERGHIVPQGRAKLVTRLAELLDGDEPVLGCRIHRLVSDMRQRWTSLDERIADLDAEFTQAAQADARTRRLLTIPGIGALNATALVAAVGDARTFGRGRDLAAWLGLVPRQATTGGKPRLLGITKRGSRYLRKILIQGARSSLPTMSKSDTRLGAWLRSLLSRSHANTVVVALAAKLARIVWALLRHERTYNPVAQAA

SEQ ID NO: 415001 - protein, 373 aa, unidentified
MPRYSTAFGMDVHLRSTTVCALDAETGEAVTRRFRGNPWGEVAEWMSGFPGPSLAAYESGYLGFAPQRELSGLGVDCVVAAVSKVPRSAADLSSKNDRNDAARMAKAILSHDISPVWVPSPEIEGLRDLAGAHDAATARLAAAKQRLLAFLARRGYAYGGTTPAGNPRRYWTYDFLRWLDKVRPADDGGIRALAALRNEVEAAAETRDDLLAEYRAAVAAGPLSAEVEALQSIKGCGFALAAAFASEVGDFSRFRSGRQVTSYFGLAPKQRSSADSVRLGGISGAGNALVRRLAVEGSWSYVQASHQPKLMPKGSGVPLEVRMHGRKGSERLLRRREEMLARGMPQAKANAATAAELVRWLWALGAMCREATE

SEQ ID NO: 415002 - protein, 327 aa, unidentified
MQVVADRAEAPTAIQTDLRAIFVSLELSRSTWLITSLSPGGGEKMSKHSVQAGDIAGLLRRFTQLKEKARARTGRDFPIIVIQEAGLDGFWIHRVLQSEGIESHVVDAASILTSRRRRRAKTDRIDGETLVRTLMAFKRGEPRVCSMSRAPTPQEEDRRRVCRERKTLVGERVQHVNRIKGLLFAQGVFGYEPLRKGRRERLDELRTGDGRPLPVHLKAQIIRELDRLEILLEQLKTVEAERNALLKPATVEAASPAAMLVQLKGIGPESAAVLWSEGLFRQFDNRRQVAAYAGLAPTPWQSGSIDHEQGVSKAGNPRLRTTMVELA

SEQ ID NO: 415003 - protein, 418 aa, unidentified
MKNENYAALVALDWGDKTHAFARQVVGTDGTVCGTITATPEALHAWMEELGQTCGGQPVALAIEAGRNVLLHALLEYPWLTVYPVHPATSARFRKAFTPSGAKDDGPDAVVILTLLRLHRAHLSPLVLDTPATRELAALVAARRSAVDQRTRTANQLCSVLKSYFPQALTLAGDDLTAPLAVAFLRRYPELAVVKKIQPARLRAFYHQHNSRSTERIAERLALVANARALITDRAVIAPALLEMALLVDLLEVHSRHIALLEARIAAAFQAHPRAELFAALPGAGAAFAPRLLVAFGDQPDRFPSAISVQNYAGVAPVREKSGQKSWTHWRWGAPKFLRQSFVEWAGQTVAHCDWAHAYYHQQRRAGKAHHAILRALAFKWIRILWRCWHDNKAYDEQLYLTALHRHGSPLASTLQRT

SEQ ID NO: 415004 - protein, 430 aa, unidentified
MKSNTQNAKIEAITEKTLVLGIDVGSKTHYARAFDYRGIEYSKKPFKFSNTEVGFATFKEWILDLKERHEKDKVVPGMEPTGHYWFNLGKFLQDNEMKPVLVNPHHVKKSKELDDNNPTKNDRKDPKVIAGLVREGRYMIPYLPDGVYADLRTASNIRFQLQAELTRIQNRISRWFNIYFPEYKTVYGKPDAKSGMLILKAAPLPEDILTLGIDGVNQIWRDAKLRAVGKARAKTLIEAAEHSIGSKEGTVSARMEIRMLLEDYESQNMRLQEVMVLIEELVKEIPMAEKLLEIKGVGIRTVSGFLAEVGDISRFNNPKELQKLAGLALVENSSGKHKGETTISRRGRKRLRYLLFEVAMSLVAKNPEFRELHNYYTTRRLNPLKKMQSLMAIAAKLIRVFYAMLTKGVDYDPKKMVSDIKRPAVYLQAA

SEQ ID NO: 415005 - protein, 351 aa, unidentified
MMIIGVDYHPSFQAMAFLVEETGECGEQELNHSDGQAEKFYRDLKQRGISVRVGMEATGYSRWFERLLAELGFELLIGDPAEIKARRVKKLKYDRYDARLLRRLMLENNFPQTWVPSPENRDLRQLLWHRHRLVQMRTRIMNQLQALAMNEGYRWKKKLFSEQGRAQLEKLALAPWASRRRQELLELLDRIHPTIEELTAAVEQETRKRPDVLRLMTHPGVGPLTALAYVLIIGTPERFHCGKQIGTYVGMIPSEDSSAGKQRLGHISKQGNSLLRFLLVEAAQAAARSNPEWRRRYMHLAMRRNKSIAKVAMGRKLGVRLYWMWRNGCAYSPSFEFGSYVGQLGTGHGVK

SEQ ID NO: 415006 - protein, 340 aa, unidentified
MSLIKVVGIDLAKYVFSIHGVDEHGKCKLRKTIKRNNLLAEITKLPPCLIGMEACSSAHYWAREFTKLGHTVRIMASKFVIPYRQNEKNDANDAEAICEAVARPKTRFVSIKSEEQQAVLCLHRIRQGLIKDRTASINRLRGLLAEFGIVMPQGRYPAQNTISSILEDAENGLPQLARERLTDVWLSIQGLNQEILKYDRQLYALSKQMPAAKLLMSIPGIGEVTATAVVATVNDAKHFSSSRQFAAWIGLVPRQYTTGGNVHLGRISKRGEKHIRTSLIHGARAVIANCKTKTDKTSLWVQGLIERRGFKRAVVALAAKNARLIWALLQSGKEYQVDYV

SEQ ID NO: 415007 - protein, 368 aa, unidentified
MDPAFFPHEAKWVLLRTQPTLIIRKKGEAVIHITTLGIDLAKTVFQLHGVDVRGRAVLSRRVKRSQLLNAVASLPPCVIGMEACGSAHHWGRAFEQLGHTVKLMHPKYVKPYVKTNKNDGRDAEAICEAVSRPTMRFVSIKTVEQADLQAVHRTRSLFVKHRTAVINQIRGLLTEYGLVIAQSPAKVRPALVRFLDDAASGLTAFARETFSELYEQLKDLDSRIERVTHRVECVYRAHPVCQKLAAVPGIGPLTATALVATVGRPQAFRNGRHLAVWLGLVPRQYSNGGKERLGGISKRDSRSVRTRLIHGARAVVQRAERRTDAQGRWLCALKHRKGTNVAAVALANKNTRVIWPLLAHDEAYRQPA

SEQ ID NO: 415008 - protein, 357 aa, unidentified
MKIIGCDLHARKQTIAMLDSDTGELEEKTLEHQGETVREFYSTLRGPILVGIEATGSMQWFLELMEELGIECRVGHPAKIRKAETRKQKHDRRDARLLLTLLAENRFPTIWMPSSEQRDLRTLLRHRHQWVRLRSRVQHTLQSMALNHGLRRGRSLWSQAGQDELRALPLAPHASERRKALLTLYPHLQGSIEELDKEVCEEVQQHPQARRLLTHPGVGPITALATEVFLGDPLRFIDGRALASYIGMIPSERSSGRRQRLGAMSKQGNTLLRYLWCEAAMHAVERDPELKRFYRRKLVQKGLGKARVAAARKLGIRLWIMMRDQINYEEFCRRGKARQESGSVRAGMPDRNSGPAA

SEQ ID NO: 415009 - protein, 371 aa, unidentified
MRNNHRTKFVGMDVHQKSISIAIADDGPDGEVRLYGTIKNTVEAIGKVIRKLVSTGAELHFVYEAGPCGFALYRHLTGNGFCCIVAAPSMIPKKVGVRIKNDNRDAISLARLHRAGEITAIYVPDREDEAMRDLTRARNDARIAARKAKQRLHSFLLRNECIYTGKKKWTKSHYNWLAQLTMKHPAQQVAFQEYIDAVNECSERITRLDEQIVKAADEWRWAPTVKALQALRGVSLLTAVNMVAEIGDFNRFHNPKELMAYLGLVPSEHSSGDRIRRGGITKTGNSHARRLCVESAWSYRYQARVTKILLKRHEGLPKDILQIAWKAQLRLCTRYRRLRARGKATQVVVVAIARELVAFMWAIARRIPAVA

SEQ ID NO: 415010 - protein, 387 aa, unidentified
MSQTAAVLTPAAVDYEKTLVLSIEVSNKSWVLAAQVPGQPHTKAKRTINPEAEALSVAIAGYRARAITAGRSIERVIAVYEAGWSGFWLARWLMRHGVEVYVIQPASVPVDRRIRRAKSDGIDAELLLRTLLAWLRGEPRVCSMVPIPDEADEDARRCVRERTELISERVGLVNRINAVLATLGVSDYNPLLRNRHRRLAELRTGLGEPLPLNAHAKIVRLLTRLELVLAQVAVLEHERDAVMETEASDQANKMIQQLASLRGIGVQSATVLVREAFVRRFANGKALGSYAGLASSPYSSGGIDREQGIGKAGNRRVRTVMVELAWLWTRYQPAAAQVCWFRERVGSTGRRVRKIMVVALARKLLIALWRFVTDGVVPEGAVLKPAA

SEQ ID NO: 415011 - protein, 445 aa, unidentified
MAGVMIGIDPHKGSHTAFVIDGREKPLGRLRVRASSRQVDGLLKWADTWPRRTWAVEGARGLGHLLAQQLIAAGEHVLDVPPKLAARVRLLDSGQINKTDENDARSIAVAALRAGDRLPELTVEDQTVVMRVWSRRYRDLGRLRTQAVCRLHTLLCELVPGGVRKQLRTSQAIAVVDAIVTDSPTAQAKLELARDLVTDLQRIDAQRREVKRRVARAVAAAHTNITDVYGVGPIVAATVLGYVRDIRRFPTRDRFASYNGTAPIEVSSGDRKIFRLSRRGNRQLNHAIHVVAVSQISHRGSEGHAYYQRKRAEGMTGKCALRALKRKISDTLYEQMLHDTRPSQDPGGHSRNDAASSAAGSHPDTPALRTSHSRATTNFKTATGDQTMLTSQPAPDKRRTSRSAAGVQVEPRPRPAPRARAGTTLTPASTGHNPRRRSRPTSPGT

SEQ ID NO: 415012 - protein, 348 aa, unidentified
MTLVGCDLHSRKQQVAVLDTRTGELVEQELVHEGDAVERFYRALPPPVTIGIETTGYTQWFHALMHQLGHTVVVGEAAKIRAMVVRKTKTDRRDARHLLDLLQHDRFPAVWIPDPDTRDRRALIAHRVRLVRMRTVVKNGLQAIALNQRLALHSALWTQRGLTQLKALALPPHTTRRRDDSLALLAWLTTRIDQLDAHIATVASADPRVQLLLTHPGVGPLTALTTVLVLGPLARFPDSKHVVSYVGLAPAVNASADKQRLGKITKQGNALLRWVLGQAAPLAARTDDELRRRYFSILHRRGRPKAKVALARKLLVRLYIMLRDQIDYEEFRRRGRAPRPHPLPVAVM

SEQ ID NO: 415013 - protein, 384 aa, unidentified
MNRIVKIGMDVHSTNYTLCAMEPVLDGEDRIFANIKVTPDYKNVIQFISKLKNKLGASDTYSIECGYEAGCLGYSLYHQLTDAGVKCTILAPTTMLTPQGKRIKTDKRDALMIAQCLSYGGYNAVHVPDEKDDAIKEYLRMRDDHKLVLKKIKQQINAFCLRHGHFYDGHKWTIKHREWLKTLNLSNLYRETLDEYMATYEEQESKIERLDRRIEELASDSAYKEKVKKLGCFLGIKTHTALSLIVETGDFKRFAKGNTYAAFLGLAPGESSSGDNVIRTGISKAGNSHLRTLLIEGARGICKGKIGHKSKDLRLRQAGNSAEVIAYADKANVRLRSRYYRFMRHEKKKNVAVAAIARELACFIWGMMTDNISIVPERGKQNVA

SEQ ID NO: 415014 - protein, 372 aa, unidentified
MEKVTRIGVDTSKNVFQLHGVDAEEKPVLRKKLTRPKMIAFFKELGPTVIAIEACGSAHHWARQLSSFGHEVKLIAPQLAKPYVKRGKNDAADAEALCEAMSRPTMRFVPVKTADQQAALMLVGMRDRLVRNRTQLANSIRGYAAEFGLTAAKGICRVEVLLTEIVSDDTLPELARDLFAIHRREYELLQVEIEKVEAKLMEWHRKDECSQRLSQIPGVGPIGASLLMMKTPDPKLFKSGRDFAAWMGLTPKDHSTAGRARPGGITRAGDELLRSVLVNGATAVLKQVRAGRGRNTSPWLHRLLEHKKPKLVAVALANRTARIAWKMMVSGESYRATPARPVLAKAAISKMVQSIFRLSHGRNATSLSPAIG

SEQ ID NO: 415015 - protein, 405 aa, unidentified
MESELQVAIDIGSRVHRVAVGDADGHILDQFDVRHTARGMDAFFTRIELLPHETVAVAMEGYNGWARPLDQRILAHGWKLFNVNNLKLARYKEIFPAPAKSDNIDSLRMLELFRMRQSLHVARDVLQRVIAAPPENDKLKQLTRRRRQLVNDKVRLIARMGTMLQALCPGLLELTGAVDNTWFLSLLTARADVRKLPGLRGTTLCSLPGIGKKYAALIKTWQHEALLADDADWTGPMLIADANRLLTLKYEIEGLERQIAPLSDQSELARRLASIPGFGLVCTAELAGEIGDLARYEGESGLAVYMGMAPLTNSSGMFQGCKRPRQVNRHAKFAMMTAAARHLELVPQSRHYYAKKRAEGKKHNQAVRCIGRQLVRIIWSMVKHGRDYEVASMEKETHESDSCQA

SEQ ID NO: 415016 - protein, 356 aa, unidentified
MSRDIKYIGMDVHKEAIVIAVLNGSGKPVMESIVETKASSILQFIHGLRGELHVTWEEGTWAAWLYDLLQPQVARVLVCDPRRNALLKEGNKSDKIDARKLADLLRTGMLRPVYHGEHGLRTLRELGRSYQTLSQDLNRVMNWIKALYRGWSIPCAGTQVYAPRYREEWLHKTEHAGVRRRAELLYQQLDGLQRLRRTLRPELLAESRKHKASKLLRQVPCIGPIRAARLLALMQTPHRFRSKRQLWTYSGLGLETRDSAQYRFVRGQLQHAKKPQQIRGLNQKHNHEMKEIFKGAAIRASCGVGPLRDFYMALLAKGMKPEMARLTLARKIAAIALTLWKKEERFDAEQLKPQAA

SEQ ID NO: 415017 - protein, 443 aa, unidentified
MSRKKHTHLRGERGQAFADKIRGIPLEQILCVSLDIHKYFHVVMLHNALGEIVTTTFEIDIFQAGFDQLCRAIDEAVARTNAQVVLVGMEPTGHYFENLARHLHQRPQAVTLINSFAVSRNREQQMMRREKDDEIDVAAIGDLLRRGEGTPFQPIRGIYLEMQHLSRVRLSKVKMRTALKNQIIGHLDRIFPGLVIQGKVARERYEPLFVADFWSCQTLQHLIRVCPDPHQLITMAPSDLRTAFHAQGFALGAKIAAKLITYAQKVLLPDPEVVAIRCELLARDLALLAEVERLIAELEDRLRTLLQQTPYWVWTRVRGLSVTQVASLAAAIGDPSHYTYAAQVFRRSGLVSGRNDSGTRRHKGKGKRVVKTGDVYLRRALMTAIVSLIRHQPVLQDYFHELHRTKHAGVARVATARRAMGILWAMQRDQHSRTLVLKRGAEM

SEQ ID NO: 415018 - protein, 347 aa, unidentified
MLYAGMDLSRQRLDVHLMDEAGTTVEVTAVRPEADAVRDLVAHVGRHGQPVEAVIESMNGARFVHDTLELAGWDVTIADALKVKGIAPLAAKTDRIDARVLAELARRDLVPAIWLPDPGTREDRERARFRLHLVRHRTALKNRIHATLIAFGHPVPVSDLFGTAGRELLGRLGIPEPWATTLTTSLRLVDELDHEIDACEAELRRLGAHHPDVPLLMTVPGIAWVLGCTIAAEIGDISRFSSPKKLAGYTGLCPIVRQSGGRDDRGPLAKNGPKYLRWALIEAATHAARHPLYRDHYQRTAKRLGRQRGSKVARVELARELATAIWHMLTKREPFAPGRPHARPLVA

SEQ ID NO: 415019 - protein, 395 aa, unidentified
MYRLLVGIDVSKDFFATAGIDSEGKESFSRSCSMDSNGFDDLLKTITSHCEDLSMAIVAMESTGCYHINLFSFLTSQGIRTLVVNPLLIANFSKLSLRKTKTDKKDAMTIARFLMGHHEEVSQLSLTQDHQDLRDLSRERESLCHLMAATKVEIKRVLRTTFPELESIGDIYTGVMLRFIQEYPSARLVRAAKPKAIAKVLKQPYVGNKLTYCAEDILRAAKASIGMVSPAKEIIVQGKIATLLHLQGRLEEVTKLLTDLCKATRVDDLKILRSIKGVGPKTAAPFLAEMGEVENYASHKKLIAFTGIDPSLHQSGNYIGMSKLSKRGNRHLRRAVYLMTMAVVSKNPFFKAYFLRRKKEGLPPQKALFATAHKLLRTIFAMLSNRTLFKVKEAI

SEQ ID NO: 415020 - protein, 359 aa, unidentified
MQQQVIKNSFIGQELQIGIDVHKSSWKVTIACRGQKLKQMSMNPKPDELLRYLNTHYPLASYRAVYEAGFSGFTACRELIKGGVDCIVVHAADVPTTQKEKMQKTDSVDSFKLAKALGNNEFKGIHIPDRALEVDRALIRQRERITKDIVKTKLRLRALLFQFNIPVPDRFTKSQIRSWTKAYTSWLLNIEGLEPTLSQIITNYVILGMQLRKELLIVIKQIRSLGFTKYKNDLELIRTIPGVGFMTGIYFLVQLGDIKRFGNNDELNSYIGLIPKMNSSGPKIRASKLTNRGRKEMKIDLIEASWISIKKDPELKHTFDRFCQTMTKNKAIIRIARRLASRIKCVLANQKEYKIAIQE

SEQ ID NO: 415021 - protein, 389 aa, unidentified
MKIYVGIDIAKLNHFAAAISSDGEILLEPFKFTNDADGFQLLVSKLESFDKNSIIIGLESTAHYGDNLVRYLVAEFYQVCVLNPIKTCQMRKNNVRKTKTDKVDTFVIVKTLMMQDDLRFITFFDLDMMDLKALGRFRQKTIKQRTRLKIQLTTYVDQVFPEIQYFFKSGLHQNAVYALLKEAPSPKEIASMHMTHLANLLKVNSHGHFTKELAKELRVLAQKSVGANDSAISIQITQTIQQIELLDSQLEKIEAEMTDIMKFNDSVIMTIPGIGYINGGMILGEIGDIHRFSNPNKLLAFAGLDPSVYQSGNFQAKTTRMSKRGSRVLRYALVNAAWNVVRNNATFKAYYDAKRAEGRSHYNALGHCAGKLVRVIWKMLTDEVEFNLE

SEQ ID NO: 415022 - protein, 338 aa, unidentified
MMYGAIDLHLRYSEIRVVEADGRVVRERRVATSRETLTAAFAGLGVLRVLVETGTESEWVAQTLEAAGHAVVVADPNYAPMYGEVRRRVKTDRRDVAALAEANRHGWYRATHRRSRAQRTLQQILRSRRQLVAMRTGSISVVRALLRQEGYRLPSGSAAQVPARLARVPLPEGLAATLAPLRQVIDTVTRAVAEIDTRLRTYAAADPVVTRLQTVPGVGPVVALTFRATLDEVARFQAAGQVSAFLGLVPREDSSAERRHRGHITKAGSGELRSLLIQAAWACWKSRGSGTLRAWAERLAGRRGRRIAVVALARRLSRILYAVWRDGTTFDGARVTAA

SEQ ID NO: 415023 - protein, 443 aa, unidentified
MSNSLPSAAEPEYAAFAAIDWADQKHFWEVRPADSLRVEKGELQNTPEAVDVWATDLYERFQGRPIAVILEQSRGALVYMLAKYSHLVLFPIHPKAAAQYREVFYPSGAKSDPVDTDLLLDFLLKHREHLRALKPDTKETRLLQLLTEHRRRMVNEKTREKNRLTACLKMYFPQVPQWFDDVDTPLVGDLLERWPSLDQLQRAHPGTLRKFFHEHNCRSEERIQERIQAIYQAMPATRDPVVVEGESLAARGFLELLATLRGHIARLDKRIEEVVQTHPDFALFSSLPGAGPVLVPRLIAAFGTQRDRYQTPEEMQRLSGIAPVTERSGKTKWVHMRRACPKFLRQTFHEYAGHSLAKSEWAQAYYESQRALKKSHHTAVRALGFKWQRVMFACWQAGTPYDEQIYLQSLNRRRSPLAAAFAHVTGIGWKLVSGFQKLSENPS

SEQ ID NO: 415024 - protein, 338 aa, unidentified
MKTYAGIDLHSSNNYLGIIDEQDKRLFSRRLPNSMDTITAALKPFRKTLTGIAVESTYNWYWLVDGLQSAGYKMHLANPSAMQQYEGIKHTDDKWDSFWLAHMLRLGILPEGYIYPKQQRSIRDLLRRRLFFVQKRTSHIQSLQSMFTRHLGGKISSNEIKKLDSEHVDQLFQDPYVALAAKSNLDVIGFLTTKIKDMEKVILSKSKMRKDFQVLTSTPGIGRILGLTIMLEVGDIARFPAAGNYASYSRCVKSIKISNKKKKGQGNRKNGNKYLGWAYVEAAHLIIRYCPEANAFYQRKMAQKNGAVATKALANKLARANFYMLRDQVTFKKEKLFP

SEQ ID NO: 415025 - protein, 361 aa, unidentified
MLSERTTVGLDVHARSVVAEAVDWASGEVFTQRLVPADEVVLDWVRQLPGPVAVTYEAGPTGFGLARTLTGAGIRTVVVAPSKLERPPGDRVKTDRRDARRLARLLHIGEVPGVRVPTVVEEDARDLVRAREATRADLMRARHRVSKLLLRHGIVYYGGAAWTGEHDRWLRTQRFDSPGTRAAFDEAFDTVLATLARRDRLDEAITVTAADPVWAPMVSRLSAVRGIATLTGLGLAVEIGDWDRFTGASIGAYLGLVPVESSSGTSRAQGSITKTGNTHARRLLVEAAWHHQRPLRAPSKALTARRANLPPAVRARAEAADRRLHHRWVTLAARKKRPTIIAVAVARELAGWCWSLATMSD

SEQ ID NO: 415026 - protein, 470 aa, unidentified
MVAVMIGIDPHKASHTAVAIDPAEAPLGQVRVRACAAQTERLLEWAQAWPQRTWAVEGAGGVGHLLAQQLAAAGERVLDVPPTLAARVRLLATGNINKNDPNDARSVAVAALRSAGVREVRRDDHAAVLKVWSKRYRDLGRARTQVACRLHQVLCELVPGGVPGEITAAQAERILASITPAEAVQAARWELAAELTEDLRGIDARIRQARTKLAAAVRAAGTSLTRLFGVGPVIAAAVIGDVGQVARFPDRDHFAAYNGTAPIEVSSGGRKIWRLSRRGNRRLNHAIHMAAVTQIRHRHSQGHAYYQKKLAEGKTGKEALRALKRQVSDAIYACLQADARRAAAHVKGPGGQPGNGSDSSAAGSHPGHRLFGQATPGLRHHTTTAASDPAPGPASARGRAGHSSIAATSPLAKPQVQVQRPQRSEDERPGGAARQRPYSAARKAWGQGSQAKPQRPKTASRAHENDRRNP

SEQ ID NO: 415027 - protein, 411 aa, unidentified
MLNTLFVGIDVSKKNNVVRFIDSLGDTLTIFSIPNNQDGANVLLEKLHNTIISKDFEAVSIGMKSTSIYADHLAIFLRNDAFLKKWGVKVFILNAKQINAFKEVYPELPKNDNIDTLIIADYLRFGRISKEVNPDEKFIALRNLTRARFQVAQNLSREKTRFLDTLFYKFSSLDSSKVFSNTFGATSIAVITDFFSVDDISDMPLEDLAEFLMEKGKNKFADPEQIAKNLKTAARSSYRLSKTVNDSVNQLLAVRIVGIRSLQQQTKDLDTSIESYMQLFPAILDSIPGIGSVYSAGLLAEIADIKRFRNHAALAKYAGITWTQYQSGDYQASNTKLILSGNKYLKYYFLEAANKVRMHDAEFKRYYQSKFKEVLKHQHKRALALTARKLVRLVYSLLSTNQLYIPPTNRL

SEQ ID NO: 415028 - protein, 333 aa, unidentified
MNEQAVGIDVSKKKLDICVATGNKFKSKVFANSPSGHEALNAWLQQRDIPVDTPVVVEATGPYSEAVAIFLADLGWSISVVNPARISGYAQSELSRNKTDKADARLIACFAQRARLERWAPPGLAVRELRALVDRLQALIDMRQQELNRLEALSQTSTSSVEKMVKEHVDWLNDQIKKIQSNIDDHIDGSPDLKNDAELMQSIPGIGRRASSQMLAYIGDVRRFKNAKALAAFIGVTPRLRQSGSSINKRSAMSRTGHVAARKSLYMPGLVAKHHNPVVVAMAIRLHARGLSPKAIVGASMRKLVHLIYGVIKSGMPFNAEIAMNGLDLQEGI

SEQ ID NO: 415029 - protein, 381 aa, unidentified
MEVYIKGVFMKYIGIDLHSNKFNICIIHDDNTRKVLSFGLSMHAINAFLESVDKETFIMVEASTNTFRFVERIRDKAKEVYVANTHKLKLISLVKKKTDRIDAEKLAIFLKMQIASGEKIIEPVHVPERLIQNLRSLFTTYKIIKKHIASTKNRIHSLYKQELYPFTKEYIFGKKTRTKLKGISINPATDFQLNLLFDSLENREKEIDRLKEYLMYLAKPYFKEIEILTSMKGISVFTAIALIADISEINRFKSSKKLSSYLRSAPGVDISNKTVRNLKTNNLGRKLSITLISQSLNHFRDSNLKLKKWYEIKMEQNKPKGKARMALCRKVFTEIFQMLKKKEYHYYRDEKNHLAKIKMYEKFLNNCEVDEKYEYYIKKSA

SEQ ID NO: 415030 - protein, 423 aa, unidentified
MKSLRRQNFTAYVGLDWADSKHDICLQEAGSEQREFACVAHQVECIDEWAKSLQQRFGGPIAIALELAKGPIVYALQKYDFLVLFPINPLTLAKYREAFRPSRAKDDPSDAELALDLLVRHPERFAPLQPQSVGMRTLISLTERRRELINDKTRVTNRLTNTLKQYYPQALEWFDQHDTVMFCDFLSRWPTPLQAKRAHRASIKAFHHAHNAHRPKLIAERLAAIKAAVPLTQDPGVVVPCRLHAMVLVEQLRLALQAIEQFDRHIAELAPTLPDYRLFEGLPGAGPHLAPRLLVAFGEDRERFQRAEELQKYSGIAPVTERSGKKNWVHWRWQCPTFLRQTFVEWAGQTINKSFWAGAYYNQQRAKGSTYQAAVRALAFKWIRILYRCWKSRIPYDESKYLKALKKRRSSLLNNLVPDPLNA

SEQ ID NO: 415031 - protein, 393 aa, unidentified
MICVGIDVACDKHDCAIMDSSTGEICEIFAFENNRVGFNTLMSKIALYAVKRDFSDTQIGLESTGHYSNNLVNFLHEKRLSVKVFNPLLVQRLRKAESLRRTKTDKADAKFLACMLIRDDSKSYKKSLPQIEELKTLTRHRFRLVKEQSKHKQQISRLITIVFPELKTAFCSTSLTTVRELLLQFPSVEAIASMDIRKLTNLLCSASKHRFGRDKAEELRNLARQSIGTNNRGTALELQQHLQSILFLKQQIKVVEAEIKAIMIELDSPIISVPGISYTLGAMMLAEIGDIENFRNPSKLLAFAGLDPSLYQSGKFVADRTPMVKHGSSYLRYAIVQAATSVRRYAPEFRAYYDKKIAQNKHYLVAVSHVAKKLTRVIFSLLKYQKSYESQAS

SEQ ID NO: 415032 - protein, 373 aa, unidentified
MAGLARLHALVAEHLEEDGPELVAVGIETDRGPWVGALVAAGYQVFAVNLVQVARCRERRSVSGAKSDAGDAHTLADLVRTDRHQLRPVAGDSGRAEAVKVLARAHQNLVWERTRHMLRLRSGLREFFPAALAAYGDLTAPDTLALLAAGPDPTSAARLSGAQVTAALTAARRRGVPDKARAILAALRTPQLTQPEVLTAAYAAIVRAQVAVLGTLNAEISRLEGQLDADFGQHPDAEIYLSQPGLGPVTGARVLGEFGDDPDRYADARSRKNYAGTSPITRASGKKKTVLARYVHNDRLLDALYRQAFSALSGSPGARAYYDALRARGTGHNAALRQLANRLVGILHGCLKTRTRYDEAKAWAHHTTGQAAA

SEQ ID NO: 415033 - protein, 457 aa, unidentified
MADVMIGIDPHKSSHTAVAIGLGEERLGDLQVRACPSQAGQLLAWAQEWPERAWAIEGAAGLGCLLAQQLVAAGERVLDVPPKLAARVRLLASGNTSKNDPNDAYSVAVAALRSKAWRPVLAEDHAVVLKIWAKRHRDLARARNQACCRLHAVLCDLVPGGIRREISAGKAAAILEQVTPSGPAATARRELAAEFLADLRRLDAQLREASKKLAAAVKASGTSLTGLFGVGPVIAGTVIGDVRQVFRFPDRDHFASWNGTAPVEVSSGDRKKACRLSLRGNRRVNHAIHMAAISQIRHKSSDGRAFYDKKVAEGKTHKEALRALKRRISDAIYAALVADARQALCSEGPGGQPGNHSASRAAGSHPARRRFGQATPGPRHHPTAADGIPGRAGHSSIAATSPPAKPQVQMERPQRSEDERPGAAARRRPYSAARKAPMGPLQPPLKPQLRTNPRTTT

SEQ ID NO: 415034 - protein, 343 aa, unidentified
MQIHSVGIDLGKTTFHLVALGAAGKVLLRKKFTQKQLLTFTANMQTSLIGLEACSGAHFLGRALRKQGHEVRLIAAQFVKPFVKSNKNDFVDAEAIAEAVERKNMRFVPIKTDDQLDLQAIHRVRDRLISRRTAVINQLRAFLLERGMVFAQKPARLKAAMTDILENAEADLTPQMRNLIDMLWSEWKLVEQQIEELNDELERISASDAGCTRIRQIPGIGPVVATAIVASIGNGAAFRKGRDFAAWLGIVPRQYSTGGKAKLLGISKRGNVYLRKVLIHGARAAVLRIKRDRVPIGAWLDALDARAPKNVVVVAMANKLARIAWAVLSSGNDYRPTANAISA

SEQ ID NO: 415035 - protein, 427 aa, unidentified
MAYRVAAVDVHKKMLAVVVADVGGEGDYQFERRKFGATPDQLHVLADWLVQQEVEEVVMESTAQYWKPVWGALERYWKPVRQKREGATKMSGALHLCQAKSNRGPRGRKSDFADGERMIKRLVAQELVLSFVPDAEQRLWRTVTRRKHQLTRDKIRFQNQLEALLEQAHIKLSSFVSDLLGVSARRMLKALAEGETNPAVLAALADCRLRATPEQLRDALGACTQLNGVYRRLLKMALEELKLKEDQMEQLDREAANLLQGHQDAVQRVAEVPGFGVDSAVQMIAEVGPEAAVFETEKHLSSWVGTCPGSEESAGESKGTRSPKGNRTMRRLLNQAAQSAVKVQGSIFDITFRKLPPRLGYKQAIWAIAHRLGRLLWMILRKGVRYQERGPEVSAKSLRTRTARMIKQLQNLGYRVEGGQLPPGNPA

SEQ ID NO: 415036 - protein, 354 aa, unidentified
MKKVYCGVDFHARQQTCCLITEDGELVFHELKHHDKAAVRAFYSQFEYRLIIGLEASGYSPWFEQLMEELGHEVWLGNATEIRRRARCRHKNDCRDAELIWELLVRDEFPRIHRPSPESREVLRMLRYRHKLVKIRTITKNSLQALAIQSGLARRASLFTTVGLEQFRQLQMSAVMQEQREQWLQLLPVLNQRITAVEAWLATQAEADERVSRLLTHPGIGLLTAMGLVHTLEPVSRFANQRKVVAYVGLEPREFSSAEKKRYLGISKAGSRVLRFLLVEAAQTAICGDAELKRFYLRLQHRCKRPKAKVAVARKLLVRSYILLRDEIDYREFQHRAVAARLAREDAGPTSPPL

SEQ ID NO: 415037 - protein, 351 aa, unidentified
MSKRTKAVAISTIGIDTGKNTLHMIGLDEKGSIVLREKISRHRIAARLVNVPPCLVGIEAGMATHYMARELVALGHEVKQVPPTFAKPFRQGHKNDFRDAHAIAEAVQRPSTRCVPIKTDDQLDLQALHRVRSRLIGDRTAVINQLRGFLLEHGIAVRQGHRFLRQQLPQILATRSDVLSPRMIRIIGDLVEDWARLDERIETVTDEIEGLARADVSCRRLMTVPGIGPIIASAMVAAIGDGTAFAKGRDFAAWLGLVPRQMSTGDRTILGRITKRGNRYLRMLFIQGARAIQLHPASWAKHSFGPWLTAGARRLHCNVLTVALANKLARIALTVLVQGRNYETRIETVAA

SEQ ID NO: 415038 - protein, 473 aa, unidentified
MAKRKQTPTKSNVDGTPSKARRPLREQAVSLSVQNPNAAAVDIHSDMHMVCVPADRDSEAVRKFGANSCDLILIADWLKHCGVTTVAMESTGVYWIPLFELLESRGFEVYLVEPGQLAHCGARPKTDVLDVQWIQRLHTYGLLRPSFRPPDSIMALRGYHRQRQMQIRYTASHVQHMQKALEQMNVKLTEVVAAITGMTGCKIIEAILDGERNPETLAALRDRRCKNDELTIAKALEGTWRAEHLFALRQAYDLYQFHHGQIDQCDAMIQAELTKLPDRSNDKPFIPRHLNRGRKPNDMDFEACTPLFKALGVDLTEIEGIDVGTALVILAEIGVDVSRFPTEKHFASWLGLCPRQYESNKTKRKRGPRKGKNRVAIALRMAAQALGKTKSPLAMFYRRIKSRIGAKGAITATAHKLATLVYRMLKYGKEYVKQSIEQYEQKIRGQLERSLKRKAAALGYELVPKSPPTAAAT

SEQ ID NO: 415039 - protein, 261 aa, unidentified
MRIIGCDLHARQQTLAMLDTLTGEVENRTLMHEGNQVREFYAQLPRPVLVGIEAIGPMQWFLNLLEELGIECQVGDAAKIRAAEPRKQKHDRRDAELILKLLVEKRFPAIWVPAKEQLDLRALLLHRHHWVRLRTQIQNALQAIALANGLRRGPGLWSYDGQAKIAFLPLPPHASYRRSALQTMYRKMEEEIENLTEQVAEPAKQRCGARLLMTHPGVGPITALATDVFLGDPQRFADGKALASYVGMIPREYSSGDRQRL

SEQ ID NO: 415040 - protein, 448 aa, unidentified
MRTRKPARPKKMNLPKHLQHINPHAAGIDVGSRSHFVAVPEGSCEQPVREFTSFTDDLHRMADWLLACGVTTVVMESTGIYWIPVFEILESRGLEVRLVNARHVKNVPGRKSDVLDCQWLQRLHSYGLLEGAFRPAEQVCTLRAYVRQRMNLVRYASAHIQHMQKALSQMNLQLANVVSDITGVTGMRIIKAVLAGERDALVLARLRHPRCKNDESTIARSLRGNFRSEHLFSLKQAVDLYEFYQHQIGECDRQILDQLASFDAADGPANGPPANLEQALLRMSGVDLTRIDGIDTNSALKIISEIGTDMSRWKTAKHFASWLGLCPGTKVSGGKVLSAKSKPVANRAAAALRMAAFTLLKSKSALGAYFRRQRSRLGAPKAITATAHKLARLVYSMLKHGTAYVDEGQKQYEERYRTRVVQNLKRKAQDLGYALVEIAEKQPQPATI

SEQ ID NO: 415041 - protein, 419 aa, unidentified
MGNSITKKLKRISEKTLLVTVDIGKVKHTGYYRFPDGTDGKTFEFCSSRKGFEEMWQWVFDAKRSRNLTDVVVGFESTGPYAEPLLHFLRRHNVRLVQVNPLHTKRLKELEGNSPNKTDQKDPKVIADIVELGHALTVIIPEGTVAELRRLTQARERSIQRMSMLMSQLQDLVFLIFPEFMAVMKDITTKSTQYILKNYPRPQDSVDAGVELLTEILKKVSRGRLGKERAEALYQAAGESIGLIEGRESIVLEIKESISTIESIESFAKELKRHMSLHLKDVPYSRCILSMKGIGEITAAGLIGEMGDFKKYGTIAEVIKHAGLDLFEISSGKHKGKRRISKRGRPLLRKLLFFASINVVRKGGILHTQYWRHIEKGMPKIKALIAISRKLLSIIFALVRDHSVYIAQYSKTQQLKEAA

SEQ ID NO: 415042 - protein, 324 aa, unidentified
MKNESESFALFVGVDVSKSQLDVFLPDSKTRLKIDNSTDAIVRELVKVLKHKSRVLVVMEATGGYESTLVRVLGERQIAVAVVNPRQVRDFAKGIGRDAKTDAIDAEVIATFGQVVKPTPLAAKSEAEEKIAALVTRRAQLLDLINQESNRLLQTGDHEVRDYIRQTLESLKKQLKVLDSRLEKCVAADTVNARKVEILNSVQGVGAVTISTILADLPELGKLNREQIAKLVGVAPINRDSGTWKGQRFVMGGRMHVRRVLYMATLVATRRNERIRTHYQHLLARGKAKKLALVACMRKLLTILNTLIKNDVLWRDEKIVPGQP

SEQ ID NO: 415043 - protein, 341 aa, unidentified
MNVKTIGIDLAKNVFQIHGVDEHGKRLFNKQLRRAQMASFFANIPPCLIGMEACASAHFWANKLISMGHNVKLMAPQFVKPYVKTNKHDAADAEAICEAVTRPNMRFVPVKTAEQQAVLALHRSRQSFIKQRTAQANQIRGLLAEFGIVVPRGIQQLQRRLPELVEDADNPLPVLFRTQLSLLQHHMAYLFDVIATLDKQIEQCYRQNALCQRIGKIPGIGPVTASALIATIGKANNFENGRQLAAWLGLVPRQHSSGGKQVLLGISKRGDTYLRTLLIHGAREVLQSAKHKQDAVSSWANQLMARRNNNIASVALANKNARTVWALLAKEREYCAPIISA

SEQ ID NO: 415044 - protein, 354 aa, unidentified
MEYGAIDLHKRESQIRIVTADGEVIDRRIPTTRDRLTATFWGRARMRILIEASTESEWVAQHLESLGHDVIVADPNYGAMYARRSRRVKTDRRDAAALADACLHGNYRPAHRRSARQRIVQSMLNVRRELTDSRTRAILIARAITRAEGFRIRSGRTETFLDRLAALELPASMTATLLPLRSVIEVLDDELAAADDQFAKLVAADPVATRLMTLPSIGPITATAFIAALDDAARFDGAAQVTSYLGLVPREYSSGEHQHRGRILRSAHPHVQSLLIQAAWRMSRSSDPKTAGLRAWADAITRRRGKKVAMVALARRLARILFAMWRDETEYQAKRIRVINGTAPAIMDGAAAVV

SEQ ID NO: 415045 - protein, 349 aa, unidentified
MKIIGCDFHPGYQQIAMLDLVTGEMTEKALSHERKEEVRAFYAGLEGPVRVGIEASGQSQWFERMLAELGHEVWIGDAAKIRASCERKQKTDRRDAELLLKLLAEDRFPRIWVPTAVERDDRQLLLHRHKLVRMRTQVKNQLQALALNQGVQRKWKLWSEAGRKQLESLPLLPWASRRRAELLQLLGQLEASIGELDRAVAEQASARPAARRLMTHPGVGPVTALAFTLTMGPAERFQRGKQVASYLGLIPSEHSSGGRNQRLGHISKQGSPFLRGLLVEAAQSAVRYEPEMRRAYQRLAQRKCRALAKVAMARKLAVRLYWMLRLQVNYAQLIQGSHAGQPGTFCGRG

SEQ ID NO: 415046 - protein, 423 aa, unidentified
MLRGLGGLSEVVDDDLIEAAEAVTKPVLLSEPTGRRSMPCMPRRSSVAARARPGRPTSYGMARPLRRGRMLFGIGQPGRNAMSINTLGIDLGKTVCHMVALDEGGQILFRRKLRRDQVLRMTANLPACRIGLEACCGAHHLGHRLNAQGHDVRLMPPEYVRPYVKSNKNDDRDAEAIAEAVGRPTMRFVPLKEEVQLDLQAIHRARERLVRDRTALINQVRGFLFERGITVPQGRLSLGWRLPEILRDDTLGISPRIRLLLSDIRAEWQELDRRIDAFDRELAECARRNDKACRLIEIPGIGVTIATALVAAIDNGAAFSRARDLSAWLGLVPKQHTTGGRPRLGGISKRGNVYLRRLLIHGARSVLPHLAEQSSPVGCWLRGLLSRAHRNVAIVALANKMARIAWVVLRTGTHYEAQALPTA

SEQ ID NO: 415047 - protein, 480 aa, unidentified
MSRQKKHPKKPGEENTTVGKGKRGKRKGMCLEGRPILEPNAAGIDIGAREIYVAVPPDRDEHPVRVFSTFTEDLQKMAKWLVSCGITTAAMESTGVYWIPPHDVLEQHGVKPCLVDARGMKNVPGQRTDWHECQWLQFLHSVGLLRAAFRPEAEVCAVRSLMRHRSDQVLMANQHIQHMHKALTQMNLQIQHVISDITGVTGLAIVDSIIDGERDPAVLAKLRDPHIKASEETIRKSLEGNWRGEHLFTLRQSRKSYQHYQEQISACDEEIEKLLLAFESRVDPEERPLPPDRKRKQRGRKKKNVNPKTGFAVRTEAYKLFGVDLTQIPGLMAMVLTLFSEVGRDMSRWPTAGHFASWLALCPDNDISGGRVLWRGMRRVHNRAGDLFRIAAYTLHHDQTPLGDYLRRMKSKLGPAGATTATAHKIAIIFYTMVKKQVEYDASIWAERDAAREKRFDAKLHRQAQQRGYKLVPIEEEPAA

SEQ ID NO: 415048 - protein, 371 aa, unidentified
MSELPAETRPARLKVEASPRPPGARKPETELGAVSTTAVPHPDSRSGPSPHLQGRVMDEQRTVFVGIDVSKDRLDVHLRPSGEAFCVPREGKGMDDLVIRLQRLSVALVVLEATGGFEATVAAALAGVGLPLCVVNPRQIRDFARAMGRLAKTDTLDAEVIALFAERVRPQARPLREPERVHLAELVGRRRQIIEMIGMETNRGRQAIDKPLARRLARHVAYLQKELDAIDHDIGDAIKHSPAWREAEALLKSVPCIGDVTARTLLAELPELGTVSRHQVAALVGVAPINRDSGLMRGRRAIAGGRTSVRAVLYMAALTAIRRRSPFRGFYDQLTAHGRPKKVALVAMMRKLLTILNAILRDHTPWRPLNA

SEQ ID NO: 415049 - protein, 460 aa, unidentified
MNSKRSKSRNSSKMPMVHPNAAAIDVGATMHMAAVRADRAPEPVRSFGTFTADLHRLVDWFTECGVETVVMESTSVYWIPIFELLDARGFTVFLVNARDAKHVPGRKTDVSDAQWLQRLHSFGLLRASFRPKGQIAELRAYVRQRERLLEYAASHIQHMQKALTEMNLQLHHVVADITGATGLRIIRAILAGERDPEALACLRHYSCHSSAETIAKALTGSYRAEHLFALEQALALYDAYHEKASACDVRIEAVLKELSIHRGHGHGSAPRASRRRNRTDQANALAFDVREALFALLGKDITTIDGLGPYLSLKLIAECGDDLSSWPSAKHFTSWLGLAPSNKVSGGKMLSSRTRRSGGRAAALLRLAAVTVGRTDTALGAFYRRLSARIGKAKAVTATARKIAVLFYNAVRYGMDYVDPGASSYETRYRTRVVNNLHRRAKAFGFVLQPLEPKVGAAVS

SEQ ID NO: 415050 - protein, 318 aa, unidentified
MNPPSLALWVGIDVSKDFLDVHVRPTDTAFRVANDEAGIAALVARLQPLAPAGLVLEATGGYEIPVVAALASAGLAPAVVNPRQARRFAEGVGRLAKTDPLDAAVLAHFAEAVRPEARPVPDAEARALGDLLARRRQLVQMRVSEQHRLPTAAGAIRQGIQDHIDYLDRQIKRIEKELAAAVQASPAWRARDELLQSVPGVGPQVSRTLLAELPELGSTSGRQLSALCGLAPFNRDSGRRRGPRSIYGGRSHVRAALYQAALVAMRWNTLLQGVYQGLLARGKAKKVALIAVARRLLVILNALVRNGSPWQEKLAVGT

SEQ ID NO: 415051 - protein, 409 aa, unidentified
MERQLERCCGLDVHKATIAACVRLGGRTGKAEQHVQTFGTTVGDLLVLHDWLAAHGVTHVAMESTGVYWKPVFYALESDFTCLLVNAAHIKQVPGRKTDVKDCVWIAQLLEHGLLRGSFVPPAPIRDLRDLTRYRKALIHDRTRVANRLHKALEEAGIKLASVASDILGVSGRAMLTALVQGTTDPAVLADLARGCLRRKLPALRQALVSRFRPHHAFVLGQLLAHLDYLDEAIATLSTEIERVMTPFAEPLRRLDTIPGINQRTAEVILAEVGTDMRVFPSARHLASWAALCPGQHESAGKHRSGKTRKGNQWLRTALIEAAAGASRAKNSALQARFRRVLRHRGPKKAVVAVAHALLRMVYHVLADGTVYREAGADYYDRHHSQRITRRALQTLERQGYRVTLEPAA

SEQ ID NO: 415052 - protein, 408 aa, unidentified
MTAYRFYVGIDWATAAHRVVVLDADRRSLHDRTVPHEGVALETFAHWLVELAAGQARDVAVALEVPRGAVVDVLLARGVHVFALNPKQLDRFRDRFTMAGAKDDRRDAQVLASALASDPPAFRRLEPEDPLILELRELSRLEDDLRQELSRLTNRLREQLHRYFPQVLQLVPAADEPWLWALLERAPTPSTAQHLPRATLRTLLSRHRIRRVDADAVRAILRTPALPVTAGTVHAAQHHLAVLLPRLRLVHQQHAECATLIEGLLDRLGNSQEHRDVPILRSVVGVGRVVAATMLAEASRLLAARDYHGLRAQAGVAPVTRQSGRRTLVVMRYACNPRLRLAAYYWGQSAARHDPFSRAHYQHLRARGHSHARAVRGIVDRLLRVLMAMLTAGTLYDPTRRRPVTDAA

SEQ ID NO: 415053 - protein, 313 aa, unidentified
MTNVSKVYIGVDVSKNKLDIYIHPLGKFFKIANTEEEITKLIKELAKYDVAQVACEATGGYEKMLSQILKNNLYNIWIVDPRRIKDFIIASGCKTKTDKIDAQKIAEFATKNSRGYETFYKTKNEDKLLALVNRKGDLTKFLAAEKTRLKHPSHTLYLASIKKLIKTLESEIKIIDKQIQNLIQQDDDLNTKSKFLESIPGIGKASAATLLSFVPELGKLSNRKISALVGVCPYDNESGKYKGKKYIRGGRITPRNTLYMCALTTIKYNLIFKNFYDRLIANKKPFKVAIVAVMHKLIILANSLLKKGELCKV

SEQ ID NO: 415054 - protein, 343 aa, unidentified
MKDTIYAHYIAIDWSIENMAIARMTKKSNKIILIDVPSDIKEMKVYLKKLKGSKILVVEETTTSQWLYTELRDYVDRMVICDPYRNKLLNDGPKTDKIDAAKLVHLLKAGLIKEVYHSTDKFLYLRRFVSGYEDLVKAGVRLKNQRYSLLRACGKRGFEWAGTKLDSEGDQFVLDCMDRQIEAHKQEKEGYEKEFARLAKDYPEIRHQKSLPGIGPIHAVKIVARVVTPYRFAEKGNYLSYTGLIKLEKISGGRSYGRKNSRYCRQLKSVYKTSTWAAIGGNNPINDYYEYLIQEKKYPEHNARHKACRKLAILSLGVFKSGKKYEPYRRDHVKSYQEVKPGL

SEQ ID NO: 415055 - protein, 346 aa, unidentified
MMLIGCDFHPSWQQVSWLDVETGGTGEQKLVHARGEAKQFYEQLAAPVLIGMEATGNSQWFIELVEDLGHEIWIGDAAQIRASYVRKQKTDKRDAAHILKLLVEGRFPRLWTPDREQRDLRQLVLHRHKLVLIRSRVKNELQHLSLNKGMQRKRRLWSQAGQQLLRELPLKKWAACRREDLLGLLTMLDEQIGKLDGAVEHAAEENPQSKLLMTQPGVGPNTALAFVLTLGDVGRFPRGKQVASYLGLIPREESSGGRQKLGVITKQGNRMLRMLLVEAAQVAVQHDPGLRKQYRHRCHQKPKAVAKVAVARKLAVRLYWMLRTNVAYPEIVRIESSSGLPLVGAS

SEQ ID NO: 415056 - protein, 427 aa, unidentified
MNETESNRVDEFRQFKSQIRGSREYLIVGVDIAKRKHHGFLGDANGKTILKGLIVENSAEGFGHLLSQVCFYMQRDGFSRVVFGLEPTSVYHKPLAEHLIEQGHLVVYATNEAIKKNRSLIDGRWDKNDTKDSANVADLVAQGKCHYYDLPDQRLRDLRSLLLLRKRLKKQLHSCRVRIRNNLVAQYFPELDLFWNNAEAENLAIVRWFLDPASIRQLTCERFIAQVSTHNGGLRQQRRLRHIWEAAGNSIGCRPGAAMQLEAGLLVDTLKSIQEQLDHVEKATQRLAEGFEEYGYLKSIPGFGPYVSAMTLAAIGNPHRFENRAQLIRLAGFDLCASRSGEKSSTAVPVISKKGKADLRYALYQAALVASSLTPHFRVHYNRLLEGRQREKGIRTKMLVKIAAKMLVIAWTLMKRKEPFNPAYIQA

SEQ ID NO: 415057 - protein, 346 aa, unidentified
MDHIIIGVDTHKSNHIAVAINAQGARLGVVTIPTNRQGYRDLEIWAAKFGRIKAFGIEGTGSYGAALSRDLLVKGHTVLDVMRPNRQLRYLHGKSDSLDAESAARSVLNGQASALAKTQAGSSEMIRHIKIVRDSAVKVRSQAMITLKTMIINAPTELRDSLDQIEGPISLIRHIAALRPGDTASPTASAKWAMRALARRWLVLHEEIQAHEVELERMAREKAPELMKSHGISTQTVAEMLILVGDNPERIKSEAALAKLCGVCPIPASSGKTSRMRLNRGGNRQANAALYLVATVRMQTTKKTKIYVAEEPQKAKHGARQRCLKRYIVREIYHYLCVPPTAESNT

SEQ ID NO: 415058 - protein, 352 aa, unidentified
MTSIALEPGDAIVGVDTHKDQHVAVAIDGLGGLWDQPLFIEATNEGYARLLEWAQSLGRVRTFAVEGCGSYGIGLARFLRRHGHHPVEVSRPPRKGERRLSGKSDAIDAEHAARSALVGAGIVTPKLADGQVEAIRLVKIARDTAVKAQSTAMITLKAVLVTASDDLRAELEPLSDYRLIRAAAALDEAGDIADPRVAMRHTLKALAQRWLELHEEIKDHARRLKGLTRAAAPELLNAFGIGVDIAAQMLITAGDNADRVRSEAALAKMCGASPIPAGSGRTNGRHRLNRGGNRQANAALYRAVIVRMRWHQPTIAYVQRRTAEGLSKREIIRCLKRYLVREIFQLLPPIST

SEQ ID NO: 415059 - protein, 344 aa, unidentified
MEHYTGLDVSLEQTSVCVVDERGEIICEAKVASEPEALVGWLSGSAPGIARVGLEAGPLSQWLHAGLVAAGFDAVLLETRHVKAALSAMTVKTDRRDARGIAQLLRLGWYRPVHVKSVSAQEVRSLLTARKLIQGKLLDIESGIRGVLRGFGLKVGSISRGRFEARIFELVEGQAVLETVIGSMLAARAALQAEFTRLHRAILVLVRADPICRQLMSVPGVGAVVAITFRSGVDDPKRFKRSSDVGPHLGLTPRKYQSGELDVTGSISKVGDRMVRTALYEAASVMLTRTVRMSALKSWAMAVARRRGAKKARVALARKLGVILHRMWVDGTNFRWTSETTAMA

SEQ ID NO: 415060 - protein, 341 aa, unidentified
MKTFIRIGVDLAKNVFQLHGIEREDGSPFQRKLTRVKFREFFSRLTPCRVGMEACGSAHYWARVLGAMGHEVVLIAPAYTKPYVKRGKNDAADAAAICEAMSRPEMRFVPVKSADQQAVLMLHKTRDLLVKQRTMSVNALRGHLHEFGLIAAKGIHRVQELIARAQADEGLPEEAKQAAALLAWQSEQLDMKIDALEKTIATASAKHPMNRLLREVPAIGPLIASAMTASLPNPSVFKSGRDFSASLGLTPSQHSSGGKEKLGGITKKGNRYLRKMLVVGCTSVLRVAHKYKGALAEWIVAMKAKKPERVVAVALANKLARICWAILSTGESFRKELYVRA

SEQ ID NO: 415061 - protein, 315 aa, unidentified
MVDVPCFIGIDVAKAQLDIALRPAGERWAVPNDASGIASLGDRLQALHPTLIVLEATGGLERAATAALAAAGLPVVVVNPRQARDFARATGQLAKTDALDARALAHFADVIRPTPRPLPDAQTQELRALLGRRQQLIGMRTAEQNRLVGTNARLAKDIEAHITWLDAGIATLDDDLETMLRASPLWRENDDLLQSAKGIGPVCAHTLLLELPELGTLTRQQIAALVGVAPLNCDSGTMRGRRTIWGGRAHVRTVLYMGTLVATRYNPQIKVFYERLLAAGKVKKVALTACMHKLLTILNAMLKHRTPWQPQEVQN

SEQ ID NO: 415062 - protein, 336 aa, unidentified
MERRYVGIDLHRRRSVIFIMNSAGEKLSCVRIANEPLRLLEEVAKAGDDAEVVIEATYGWYWAVDLLQDNGFSVHLAHPAGNDWGKRRVKNDERDARDLADLLRLGRLAEAWIAPKPVRELRELVRYRAKLVQLRTGLKAQVHAVMAKEGVLPSRFDMFGPGGNAQLDGMQLAENYAARIESLRAAIRHYDREVLALERRIHQQLRHDKGYQAIQAIPGVGRTIAAIFVAEIGDVSRFPNAEALTSWAGLAPKHKESDTKVTRGPITKAGSKLVRWAAVEAVSGRRGGTKLRADFDAIAARRGKYKARAAVARKLLTLVYYGLRDGEIRCLTAEAA

SEQ ID NO: 415063 - protein, 403 aa, unidentified
MNMNAVGIDVSKGKSMIAILRPYGEIVSSPFEIKHTSSNIQSLIEQIRSIEGESRIVMEHTGRYYEPLARELSLAGLFVTAVNPKLIKDFGAHSLRKVKSDKADAVKIARYTLDSWTELKQYSLMDELRNQLKTMNRQFGFYMKHKTAMKNNLIGILDQTYPGVNTYFDSPAREDGSQKWVDFATTYWHVDYVRKFSLNAFVDHYQKWCKRRKYNFSKDKAEEIYGAAKELVPVLPKDDLTKLIVKQAIEQLNTASKTVEELRTLMNDTAAKLPEYPVVMGMKGVGPSLGPQLMAEIGDVTRFTHKGAITAFAGVDPGVNESGTYEQKSVPTSKRGSSSLRKTLFQVMDCLIKTKPQDDPVYAFIDKKRAQGKPYYVYMTAGANKFLRIYYGRVKEYLMSLPE

SEQ ID NO: 415064 - protein, 339 aa, unidentified
MSKRSIQVQETMYCGIDVSAKSLTVAIQRMHQPVEQRSFPNTSVGHKALIVWLRKAKLPVRVSLEATGIYSLDLAFALDAAEGIEVAVLNPKVANRFAQTIRRSKTDAADAELLAEYARRMPFTAWVAPSPGSLRLRSIVRHIESLSVQSAQNQNRLHAAHGSTSTPGCIVQDLKRSVASLELRIHKLRREAMTLVRQDDLLRKRFELLVSIPGIAQVSAMQLLAELSTSPPDLTVREWVAHSGLDPAHEISGSSVRKASRISRAGNRHLRRALYMPALVASRCDPHAKAFFESLLARNKARLQALIAVARKLLHAIYGIFRSGLKYEGTKLFPRITLS

SEQ ID NO: 415065 - protein, 335 aa, unidentified
MHRMHLGIDVAKHTLRVLLLQSTGKRKQRSFPNTPAGHQELLRWLDEHASGPVHACLEATGTYAEAVATTLHTQGHRVSLINPCASANHARKQLRRTKTDPVDAAVLADYCQKEQPALWSPPPPAVRELQALVRRLESLQEMRQMEANRLEALTALPPEAAAAVATVRTSLETHVAYLDTQIAATLQAIKDHLDQDPELKPRRDLLLSIPGVGETTVAVLLAELGLVTQFRGARQVAAFAGTTPREYQSGTSVHKRARLSKIGSSRLRQALYFPAITALRYNPVIRELGERLAARGKAKLVIIGAAMRRLLHLVYGVLKTGQPFDPAWGKTAAAV

SEQ ID NO: 415066 - protein, 346 aa, unidentified
MPETEVDTFAGIDVSARELSVALRRGKGEDKPAMAEFSNHPSGHKALIARLLRGDRRVRVCLKANGNYSLDLALTLQAHRQVEISVINPRRARRFAESLGQRSKTDPVDARVLGEYAARMPWVAWQPPSSVALHLRAVARAIADLGVIHTQQNNRAHASAASQALPVLVVKEMQRHQKYLEQRMTRLRREALRIIAGDPELDRRFRLMLTTTGIAETSALLILGELAVLPDMLDARQWVAFSGLDPRLFKSGKSVEKRPRISRGGSRHLRRALYMPALVALRRDPYLRCFYQNLLARGKARLQAVVAVMRKLLHALFAMFRTNQRYDGSKLCCAFEMAGHAIATRA

SEQ ID NO: 415067 - protein, 346 aa, unidentified
MDHVGIDVHKRESQICIETGAGEVIEQRIRTDRERFAAVFGGRPRARVLIEAMSESEWVARCLESLGHEVVVADPNFAAMYATRSRRVKTDRRDAQTLADACRLGAYRAAHRTSERQRQVRAELAIRECIVRTRTKFIALTGALVRREGLRVRSGNADHFLRRVDDVVMDESLRNRLQPILRLLAQVNGELKAADGRITAIVQDDPVIQRLCTVPGVGPITATAFVATIDTIERFAGAHQLESYLGLVPSERSSGEKQRKGRITKAGNTRLRYLLVEAGWSILLSRKENTAQLRAWAQRIALRRGMKTAIVALARRLAGILYAMWRDGTTFEPRRREESRAEASRA

SEQ ID NO: 415068 - protein, 385 aa, unidentified
MGSQAFIARDYDVFAGLDVDKKSISVTFTDHQGSVKSMRMPYSVDHLVNHVRKHYGDKKVAFAYEAGPTGYGLYDGLVAQRYPCLIASPSMIPKAPGQRVKTNRLDSLGLAENLRGGQLKSIHVPTTLYRELRHLTQLRDALVSEVVAMKQRIKSLLLMEGLEFPPAPPGSQWSFLVKAKLRKLPCSSVVRFKLDQLLDNLEFGEKQVLKVTREIRRFCQHDPELSQCIDYLKSLPGIGWIVASQMLARIGDWRQIKNIRELPAFLGLVPTESSTGERTTRGSITHSGDPRLRSKLIQASWSAIRQDGELLKFFRTVAKKHPRHLGPRVAIVAVAHKLCMRAAVVLMQQRPYEIREKVQSAPLTQEETVPQGTTRRRRVPGEKIS

SEQ ID NO: 415069 - protein, 347 aa, unidentified
MSTFYLGSDLHLKRSYVVLMDANGEVIDQRGLPNDAMKGYISQRVPYETFAVLEATRNWPFMYDILSAHVKRVELAHPKELKAIASAAVKTDQIDARVLAHLACLNYLPIAYAAPISVRDLRQWTGHREWLVGQRTQAKNRIQAVLAAYNLISPVTDLFGVTGRKFLAQVIDSQLRPSAKRVIEDNLNLIDVLDRHIQALEADLQMNLEQAQAIQLLATMPGVGKITAITLVAEIGDISRFHSAKALCNWAGLTPRVRKSDKIVRHGRISKQGSPYLRAAMVRAATVAVRKSQRWRTVYRNLTHRCGKRAARVAVARRLLTVAYSILKRNQPYQENYGYIKHPDRGA

SEQ ID NO: 415070 - protein, 334 aa, unidentified
MEFKNFIGIDISKNTFDLALIKNNDLGSMVSAKFSNKPEGIVKLEEFLKTNGIIKDETIFCMEHTGIYCRFLSHYLTENKYHVWLEMPVQIIKSLGIQRGKNDKIDARRIAEYAHLRKDKVELWEPPREVLMKIHDLLSLRDRLCQARKTLKMPIKEFKDCGHDETAKLIEERCKSTLASLDKEINQIEKELEKLINKDSNLKKLYNLATSIPGIGKITAMSLLYFTNEFKLYQNAKQLACYCGVAPFAHTSGTSVKGKTRVSHFANKTIKKLLHLVAMVAIQSDKELSQYYKRKVEEGKNKMLVINAVRNKILHRLCAVIRRGTPFQKEYQFA

SEQ ID NO: 415071 - protein, 367 aa, unidentified
MQNTIVHYEGATSLEAVATKVKPSSARIKIGLDVHARLYVAVAQYDHLLPKAARRLRPEQFVPWVEELLRRGHTVHVVYEACGFGFSLYRQLIAAGAHCYVIAPRKLDEECSRVKTDPRDATTLCQRLSRYLEGNTRELAVIRVPSQEEEQARHVSRQRTQLVCHRQKLEAQGRSLLISHALPAPAHWWKEQTFSRLSKHLPVWMVERLEVHRPGLLSLQKQIELLSTELEASAASGIPRGVGKLTSVVLTREICDWRRFNNRRAISSYTGLCPGERTSGSKRVPGSVTKRGNPRLRAALVECAWRLVRFQPQYPPVQKRLAVLAKGSPALGAARKKAIVAVARRLAVDLWRLHTGRCTAEQLGLEL

SEQ ID NO: 415072 - protein, 371 aa, unidentified
MPVPKLSHSRDFTGENFYIGLDVHKKSWSVTVRTSNLEVGHFSQAPNPKALYSYLTKKFPSGNYYSAYEAGFSGTSTHTALCKLGIENIVVHAGDIPNTDKEKKNKTDVHDSRSIAKYLEKGLLKPIHVLSEQQQELRAYFRLRETQVADQTRASHRLKSFLNFIGLHLPMDMQMNGKFTNRQLLWIEGQILSTAAGQACLQQNIANFKEQRIKVTKVTKSLRNFVIEKFPDAYNNLMTVPGIGSITAIALIAEIGDFDRFETPCEYCSYLGMIPWNHSSGDSSRTFGVQPRCNGHLRPLLVEAAWIAIRKDAGLLLYYKKHAAKNNKHAIIKVARKLALIAKGVVTNNKPYDPDYLESKTEIRRQRKAKS

SEQ ID NO: 415073 - protein, 429 aa, unidentified
MDEVDDADLVVERVAALDLGKAGLEACVRVPHPQRPGRRMQELRGYATTTAQLLAMAAWLRHWQVQRVVMESTSTYWKGVYYLLEAEGFDCWLVNAREVKNVPGRAKTDRADAVWLAKVAERGMCRPSLVQPPEIRRLRDLTRYRRALVQDRTREQQRMEKLLEDAQIKISAVLSNLHGVTGRAIMDALIAGERDPRTLAGLAKGLARKKTDRLEEALRGFFTDHHATILQMMLDNSDHISAQIAALDARIEAAIGPFSRPAARLADIPGVSTVAAAELIAEIGVDMTRFPSAAHLVSWAKFCPQVHQSAGKSMSKGRANGNPWLAGTLGRIAFVNSRTDTFLGARYRRLARRRGKQKALVATGNSVLTVIYHLLSDPDASFCDLGPGYYESRINKHRRARDLATQLQALTGQHIAIRDGKAVITDTAA

SEQ ID NO: 415074 - protein, 402 aa, unidentified
MTYDYVIGMDVGKYFHHACVLDIDGTQVLSKRINQNEKSLRALFSTFSAHDHKVLVVVDQPNNIGRLTVAVAQELGIDVRYLPGLAMRQLSRIHAGNAKTDIRDAYIIAHAAKNLPESLRSVDRVEEAFLQLKVLNGIDEDLARSYTRLINQIRSALVGCYPQFEQALRGQIIHRKWVLHLLARYGGPTKIKRLGKAKATAFARRYKARNPEPVLDAIFAAISEQTVAIAGAHYAEMGVAMSAKDALLKLEHRTQIEQEVIELINDIPHTQILLSMPGIGPKTAAQILMTAGDMTDFPTAGHLASYAGLSPRTNQSGTSIMSNSLNRAGNKKLKNALWQSSFASIRFHERSRQFYERKRREGKRHNAAVVALARRRLNVLYAMMRNHKHYHDPAPSQEDLAA

SEQ ID NO: 415075 - protein, 333 aa, unidentified
MNTIGIDVGCKELVVVVMVNGKARKAISFENTTSEHQTIIRALTKLKGPTRVCLEATGIYHFDLAVALSRAEGIEVMVINPKAAHNFAKALMTRSKTDAIDAENLASYAERMPFESWERPADEYISLRVISRRIAAISKQKTQTKNQLHALVSTIETPRLVIEQTKELISFLDLQIDTLRDSALLLIQQQDKLKAAYILITGIKGIAHASAIQILSELMILPKDMTARQWVAHAGLDPRIFDSGSSVSKKPRISKVGNRYIRQALYMPALVASRFEPNIKGYYHHLIDDNGLKKVQAVCAVMRKLLHAIHGMLRTNKEFDGSRFYTLPITTNS

SEQ ID NO: 415076 - protein, 376 aa, unidentified
MNSVAVVPLDIHKRFSKAVEMGEGGEVLGEARVSHAGRDEMKKYFSRFPAGTDVVMEATFNWPWIADAAEEAGLRPHLAHPMRAREMAKGMAKSDRKDAIFLGKLWLAGDIFPESYLAPPEVRRMRGLFRLRLTLVSMRTALKNAIHGQLHRQGILISECSDLFGKSGLAILEKLPMKEHERWQLDTKLSVLGDIGLYVKEMEQKIRRELKTDPRAQLLMSLPGVGEITAYSMLAEIGEIERFHNSRALASYAGLLPLDNESAEKDFGKRTGAHCNRFLRWAMIEAVTGAVTASGRMKSLYMRVKNRNKDKPQKARIAVARELIELSHLLLTRKVKYEEKRPPRPGSKEVGDGTRPNRASQTTLCARSPQASQAAL

SEQ ID NO: 415077 - protein, 464 aa, unidentified
MKPIYRRCCGIDVHKKSLSVCVLPPEGQQGMVKREKFRTFLRDLKRLRAWLKSCQVTEVAMESTGQYWRPVWNVLEDHIPNLVLLNPAHVKGLAGRKTDRRDAEWLARLNEREHLRGSFIPPVPLREMRELTRTRVHLLEDCNRMKNRIAQVCEAGNIKISSVASDLFGTSGRRMLAALIEGKHRAGWIADYACTRLRGKRDQLEMALEGTLSEHQKKLLTRLIRQLNAQEAEVADLTGEIESRVAVWDEIIGRLVEIPGIERVSAWTILAEIGTDMSVFPDARHLASWAAVCPGNHESGGKRMSGKTRKGNVYLRRILCQAAWAATHKKGSYLGALYRRVRARRGHQKAIMALAHHMLTVIYHMLRDNQPYKEPGATYYDEKRKPEITKRMVQRLERLGYQVTLEVRLTPEEVRDLAPAIPQPPETQPTLRRRGRPCKCLERRIACIHQRLPAIQETAELNPQ

SEQ ID NO: 415078 - protein, 332 aa, unidentified
MNYNTVYVGMDVHKESFTLCSCKYEDEKASHYQRTPASYKNVLRYLAFLRTIYGEDTRFVCGYEAGCLGYSLYHQLENFNVECVILAPTTMLEQRSKRRIKTDKRDAEIIARSLAQHNYSPVHIPTETDNQTKEFIRMRDDHKAELKKIKQQILSFCLRQGYQYDGSGNWTAKHVKWLRSLKPAGLYKEILDEYLLTYTILTDKLNRLDQRIEELASKEEYKESVSKLTCFLGIKIHTALSVIVEVGDFQRFVSARKFAGYLGLVPGQHSSGDDRNGLGITKAGNTHVRRLLVESAQSYTRGKIGYKSRVLRSRQAGNSPQVINYADRKSVV

SEQ ID NO: 415079 - protein, 394 aa, unidentified
MKLIGIDIGKNKHFFCVMDQQTGEIISQPVSFSNDKEGFDFLVQKIKSYPKDSILIGMEDTGHYHFALLKYLLDLQYTVALINPKTTDFNRKMQGGITKNDKLDTINICDVLDTPERKKQYRITKVNKFDLYEQKQLTRQHHNLKEELNVYKNRLQKSIDIVFPEFNSLFKSKYGTVYINILKTFGSAENIANTDIRTIRKCFEIDGRGNRISLTPERLKERARSSIGISSLAEVIQIKHLSAQIDLIEEQLSEIDKKIEEFSIQNNSPILSIPGISHFSGTSILAELGDISNYSKPSQIIKFAGVAPLHYESSQFNAQHTAITKKGSKYLRKTLYQIILPVIRHNPVFNKYYQLKISQGKGHRCAQGHCVRKLLRIIYHLLKTNQQFDPQLLR

SEQ ID NO: 415080 - protein, 402 aa, unidentified
MNAVGIDVSKGKSMVAIMRPFGEIVSAPFEIKHTASDIHSLIELINSVEGESRIVMEHTGRYYEVLAHQLLEANLFVSAINPKLIKDFDNDSLRKVKSDKADAVKIARYTLDKWQNLKQYNVMDELRNQLKTMNRQFGFYMKHKTAMKNNLIGILDQTYPGVNTYFDSPARSDGSQKWVDFASTYWHVDCVRKMSLNAFIDHYQNWCKRKKYNFSQSKAEEIYGKAKELVPVLPKDAITKLIIKQAVDQLNSASTTVESLRTLMNETASKLPEYPVVMAMKGVGTSLGPQLMAEIGNVSRFTHKSAITAFAGVDPGVNESGSYEQKSVPTSKRGSSDLRKTLFQVMDVLIKTHPQDDPVYQFLDKKRAQGKPYYVYMTAGANKFLRIYYGRVKEYLSSLPES

SEQ ID NO: 415081 - protein, 343 aa, unidentified
MGMFAALDVSQDETAICVVRQDGTPVAEGKVPTCPDAIADWLTKRTEGLDRVGMETGPLAVWLWNALVARGVPLVCLDARHANGVLKMMPNKTDRHDARGLAQIVRTGWFKTVQIKSHEAYVNRALLRSREALVGMRVRLENEIRGLLKTFGVMFGKRVGGFKRRAEEIIARDLSVAPELVPIFEALMQARRDILARIASLDSQIRATARQHATVRLLMTAPGVGAITAMAVVAAFDDAARFRRSSSAGAYLGLTPRRYESGEISRNGRVSKRGDRFTRKCLYEAANAIYCRNLGNSRLHSWAKAIAERTGPRKAKVALARKLAVTLHAMWRTGTPFREATMA

SEQ ID NO: 415082 - protein, 345 aa, unidentified
METMYYIGLDVHKRTISYCVKDVSGRVCAEGAVSATRFDLDRWMKTLPGPWTAAMEATVFTGWIYDHLRPHAVALKVAHPLMLRAIAAAKKKNDRIDASKICDCLRCDFLPECYMASTAIRERRRTLRYRNLLVRQMVQMKNKIAMLLMEAGVSYNKQKLHKAGYFRELLATNPDINEELGSLLRLCRETVVRLQRTESALVRSLERDSLLVERVERLMTIPAVGPITALTWALEVGDVQRFSSIKKAISYCGLCGAEKSSGNTVQRTPLSKQRNKHLQTTLIEAAKMAPRNSSQLAMLYNKERQKGNANRATLAVARKLVAYLMAVDRGQRNFQEVETSNCIAA

SEQ ID NO: 415083 - protein, 355 aa, unidentified
MTKQTAAAPKIMVGLDLGDRYSDVVVRVGGEVRMQARVETTAQALRRRFEGLERSRIVLEVGTHSPWVSRLLEELGHEVIVASAGRVREMIGHGDKTDALDARSLAQFGAVAPELLRPIRHRGPQAQRDLAVIRARETLVRARTTLVNHVRGSAKSLGERIGASSTAAFVRRARQALSKETAAMQEPLLASIEQITVQIRVYDRRIEELCTERYPVTARLRQIKGVGAVTALGFVLTLEDPHRFAKSRMVGAYLGLRPRKYASGDRDPELGISKRGDGRLRRLLVQAAHYILGPFGPDTDLRRWGLRLAAGSKRAKKRAIVAVARKLAVLLHRLWLSGADYEPLRQAEARAVAVA

SEQ ID NO: 415084 - protein, 362 aa, unidentified
MSNGIRWVGLDVHASQTACAIFDSDTGELITRRVMGRPHEVMGLLEQLTPPVRAVYEAGPTGYGLARRGRAAGIDMQVCAPGMITRAGSERIKTDKRDSIKLARLHAAGQLVLVYVPAVEQEQLRDLARCREDARQDLMRAKHRVGKFLLRREIYYPGRGRAWTREHRAWLAGLRFTDAASEATFADYLHAHDTLTARRDQLDRAIDERARDCCWTPLIARLRCLHGIDTLGAFGLCAEVCDFQRFPRATSLSAYLGLVPCENTSGDKRRLGSITKAGSTLARRLLVEASYHYRRPPRIGGGLLRRQDGADAWVVDLSWRCQRRLHGRWQRLRSERHKHNGIAAVAVARELAHFCWELAITD

SEQ ID NO: 415085 - protein, 400 aa, unidentified
MGQPLWAGVDAGKSDHYCVVIDADGKRLLSRRVANDEAALLELINAITALADGSELTWAIDLNAGGAALLIALLIGAEQRLLYIPGRTVHHASGGYRGEGKTDAKDAAVIADQARMRRDLQPLRPEDDIAVELRILTSRRTDLVTDRTRAINRLRAQLLEYFPALERAFDYSASKAALILLSGYQTPDGLRHAGAARLAAWLRKRKARNADAVAAAAIEAAKSQHTVVPGQQLAAAMVARLAEEVMTLDTEIGDTDAMIEERFRRHRHAEIILSMPGFGVILGAEFLAATGGDIAAFGNTDRLAAVAGLAPVPRDSGRISGNLKRPRRYNRRLLRACYLASHIAIRTDTASRIYYDRKRIEGKRHTQAVLALARRRLNVMWAMLRDHKPYQPTAPNAAAA

SEQ ID NO: 415086 - protein, 321 aa, unidentified
MSLFDLGLDVAKAKLDCALRSPDGKYKSKVVDNTPSGFKILTEWLAKHGATSAHVCMEATGVYWETVAEYLAAKGMTVSVVNPAQIKAFGQSQLVRTKTDQVDARLIASYCAERHPAPWQAPSANEQALRAMVLRLESLQVMRTQESNRLDVSREVVKPGITAHIEWLDKQIKALAKEIRGHMDGDDTLKDKHALLDSIPGLGERTISILLAYYADLERFGNARQAAAFAGVDPRQHESGTSVKMKPRMSKIGHAFLRKSLYMPAMVALYRTAWGKRFRERLAAAGKPPKLIIGAMMRKLIHVAFGVLKSGKSFDPELHRC

SEQ ID NO: 415087 - protein, 430 aa, unidentified
MDVEDRIRLDEFRQLKKEIRGSERYLVVGIDIAKDKHTAFFGTATGKALLKRLVFENSIVGFEKLFTFTEAEKVKGGFETEVFGFEPTGNYHKPLGEHLIKCGRKVVFVSGNAVVNNRELLYGRWDKNESKDPANIADLISQGKFMYYDHPVLPLRDLRNLLSLKRRLKKQEHGLKVRIRNHLLAQFFPELDRYFGKWESLGLSIVRWCLAPSVIAGMEEGEFAELIAPGNRLRPNQTERLRLIWRKAIDSIGCEVSPGVDFEAKMMVEGLKRVREGIHMTAKKIEEVCLHFPEYSYLLTIPGFGPDVSSKVLAAIGNPFRFENENQVLKLAGWDLNAKRSGKKSETVSPVISKRGKAELRYALYQAAFIASTRNQYFVMYYTNKLRGREKEKGIKTKMRVKLAAKLLVIAWTLMKKEEPFNPDYLKIES

SEQ ID NO: 415088 - protein, 428 aa, unidentified
MTRKEINRQRRFCQIIREISGSSRYLVVGIDIGKDTHHAFMGTATGISLFRKLVFGNDLIGFRKLIETSDLIKRKHNLCEIVYGLEPTGNYHKPLAGHLVRCERDVVLVTGQAVKNNRQLIDGRWDKNDTKDAANIADLISREKCHYYDVPSTEIIDIRALVSLRRRLKKEEHRLRMRIRNNLIAQYFPELDRYYSASESEGLAIVRWCLDPKEIAGMRFEEFFQLVTKSRRGISHYLRLSKIHQSAIDSIGCPMGHAGEFEARLLVEKVHRVEKEIKDTENLMNDICMEFPEYKYLLTIPGFGQYISAVVLSVIGNPFRFKNRGQLLKLSGYDLSAKRSGKTSHQAVPVISKKGNGELRYALYQAACIAASRTALFRKYFAGLLYGRERERGIRSKMRVKLAAKLLVIAWTLMKNRVVFNPAHIHID

SEQ ID NO: 415089 - protein, 301 aa, unidentified
MHATTYGLDVAKRVFQMYWVDGDTGEIVNRRFGRDDLIQYLSRRPPGRVALEACGSAHWWARKIKALGHEVVLLHAKFIRPFVQTNKTDAADARAIWTAVQQPGMRTVAAKTEEQQAMLSLHRIRSLLVKFRTMQVNQLRGLMYEFGVSFRAGRVAGLAEVRARMADLDEALPSTMMSCLQDQLARIDRLQAEIDQLEHRIAAWQKQDAACSAIAAVPGIGKLTATALVATMGEATTFKSGREFAAFLGLVPRQSGTGGKVRLGSISKRGDPYLRTLLIHGARSVLYHAMNRPGFRGGPLG

SEQ ID NO: 415090 - protein, 341 aa, unidentified
MLLIGCDYHPSVQQIAWVNTETGECGERRLTHCAEAEQFYRELKQQGTSVRVGIEATGHSRWFERLLAELNFELWIGDPAQIRAKQVRKQRNDRRDAEHILKLMLKDDFPRLWVPTPENRDVRQLVWHRHRLVQMRTRVMNQLQAIAMNEGVRRKRGLWTQQGRAQLEALPLPPWTTRRRQELLDLLDRFDPNIDELSEAIEQEAQRRPEVERLQTHPGVGAITALAYVLVLGTPDRFRCGKQVGSYLGLIPCEESSADHWRLGHISKQGNGLLRYLLVQSALSAARVEDEWRRQYAHLAIRRHHGIAKIAMARKLAVRLYWMWRRGWDYQQLRKFGSNVG

SEQ ID NO: 415091 - protein, 321 aa, unidentified
MLANKSRRSFIGIDVSKQLLEIGVHKSNYRLCCPNDAKKFPALIAELIALRPARIVLEATGGLETPLLQGLHAVGLPAVRINPRQVRDFAKALGLLAKTDRLDARVLAHFAAAVQPPLRPIKATEDIELDALMGRRNQLSDMLGAEKNRRGSAATDAARADVEAHIEWLEQRLKALDKQLKDQLKCSAVWQQKDKILQSVKGIGFVTSVSLLADCPELGKLNRHQIAKLVGVAPLNRDSGKQRGARHIFAGRAQVRAKLYMATLTAIRCNPLIKAFYQRLLAKNKLKKVAIVACMRKLLTIINVMVRDNKLWNVKAQSVSA

SEQ ID NO: 415092 - protein, 343 aa, unidentified
MDHFAGLDVSVKETSVCIVDDTGRIVREAKVASEPEALLAVLKNPAYHIKRIGLEAGPLSQWLYSALAEAGLPVICVETRHMRAVLKAQINKTDRNDARGIAQMMRVGLYRPVHVKTLRSQKLRMLLTHRKLLQAKAIAIENDLRSTLRNFGLKVGMVGNVKFEGRIKELVENLPDLATLAEPLLIVRRVLHEQLGILHRRLLDIVRNDDVCRRLMTVPGVGPVVALTYRATVDVPARFKYSKAVGASFGLTPSRHQSGESDRPGAISRCGDEMMRVMLYEAAQVMLTRTNKWSWLKAWAMKIARHRGMKKAIVALARRLAVIMHRLWVDGTEFRWTHDVVAA

SEQ ID NO: 415093 - protein, 370 aa, unidentified
MLYVGLDVHWKKSNLCILNDQGRQIKNQQVAGGWNRMLEVLGQIQEPFSLCFEASCGYGHLYQCIARHPKAQRFLVGHPGQMRLIYKSKKKHDRIDAAKIAKLLYLDAVPQVYVPSADVRSWRGLIEWRVKLLHKRVATKNQIRALFKNAGLQTPRGLWTKKGAAWMQTQRFTTAFEIVRRDMLLEELADHNRRIKQITAALNQEAKKHPAVALLRTIPGVGPRTAEAVVAYIDQPARFASVRDAGVYFGLVPCQDASADKNRLGHITREGPASVRKLLIEAAWQGVNRCSAIRDHYQKIVGDHPDQRKIALVATARWLVVVMLAMLKSGETCRWKRDLIFNPRVRGNVPTFSPPVGDALQAADASPTGR

SEQ ID NO: 415094 - protein, 360 aa, unidentified
MHATTVAVDLAKSVFQIAVADEQWHIVDTQRLTRSQFERWFVNRSVGLVIMEACGSAHHWARWLGSLGIEVRLLPAQYVRAYVRRNKTDATDAAALLEAARASDLRPVRVKSVEQQALQGLHRIRSLWMGTRTSRINALRGFCREFGIAIPVGARTGIEVIGRVLADPQSAVPDLIRHTASQLLEEIRLLEARIAQVERQLSMAAQQSPACTLLLSVPGIGLLTATAMVAATSGDVTHFADARHFSSWFGLTPREYSSGGSRYLGRISKKGDRYLRMLLTHGARSVLRAAKVAEGAGKEVQGVRRWALDVQGRSNHNKATCALANKLARICYATLRDHKLFDEAARLNRKENRQSFVMPH

SEQ ID NO: 415095 - protein, 430 aa, unidentified
MIAAEIERCAGIDVGKERLAVCIMVGPLAGEPRVEYREFGAINAELERLRQWLEAEGVTHVVMESTGSYWKPVFNMLEDKVRVYLARSQDVKNRKGHKTDKKDSWWLAHLLRHAMIRPSFVPPRGLRELRDLTRRRRKMIGVASSERNRVDKVLQDANIKLSNALSDIFGVSGQLMLEALLEGKAMPEQIAQFAQRSAKRKIPEIIGALEGHRMNDHHRQMIRYSLEHLRFLEEHIIELDEQIVAKIQKLGYVPQWELLQTVPGMKENSSASVLAEIGPDMGQFPSEKNLSSWAGVCPGNNRSAGKDKGGKTTKGNRWLRGALTECAWGVSGKKNCFLKDKFWRLATKKKRRPPATMAIAHTLLVLFYQVLKTGQPYQERGLPVMDEKQRNRLVCHHVRRLGKLGIRVHSLPIDKDRTTPKSKKTAAKVN

SEQ ID NO: 415096 - protein, 380 aa, unidentified
MPRYWGLDLHKRYVHACEWVTATQKERHFRFPNTPEGWAQFAAGELGPDCWVAIEVTGSAFEVHDWLSPRVGRVLLANPVELKRLGSGRHTDRVDAARLAKMLAMGILPTVWVPPPAVREVRRLLRYRHSLQVSRTRAYNQARAVLRRHGIHLPSRAELPEQLTEAHWRALPGGDRVILASAVAQVVRLGQELAALDAEILRRVASYPEVGRLLTITGVGPITAATLWAFIGDAARFPNAKCLARYAGLDPSVHQSGESHYQGAISRNGNGLLRACLVEAAHVVARFDAGGLGAFFRRKLPQLGYKRAVVALARKLLVVAWRLMLRGDTYRAARMKTVRNKRWALQKLQEQALDWEARIRRLLAIGVEESASRDRTKVPA

SEQ ID NO: 415097 - protein, 321 aa, unidentified
MSISTQSAPKRIIAFEVSKASLTVHLMPDDQQVVIANTPKTINKLLRKFDNQETPFAICEASGGYERHVLACCAAANLLVHRAHGTRTRNFARFPGLVSKTDSIDARMLALFAQKSDGLRLWEPTDPQAEELRAWRRRRDDLAKIMRIEQNRLEHAAVKTVHLSLQRHVRSMTREMTGLDKQIAELVAATPAFKRKAELMQSIKGIGPKTASACLAYLPELGSLTKGEAAAIVGLAPYAKDSGTYQGRRHVAGGRKDVRASLYMAVLSALRSNPVIRDFAAKLRARGKPSKVILTAIMRKLIVIMNAVLKEGQASNRYGTA

SEQ ID NO: 415098 - protein, 353 aa, unidentified
MDHESVKGEIILGVDTHLDTHVAAVINHAGRLLGTLAVPTDTAGYLKLLAWAQSLGALHKAGVEGTGTYGAGLVRVLREHAIEVLEVNRPDRAKRRLRGKSDPTDAESAARAVLSGTATAIPKSQSGAAEAMRTISVARRSAVKAKTQAINQLRALLVSAPQDIRERLWKAKPEQCVEACARIRNLGDTALLQTLTSTLKLLAKRWLMLAAELKELDATLDRLTSQSAKRLREQFGVGPQTAAILMAVAGDNPERLRSEAALAALCGVSPLQASSGKTTRHRLNRGGDRSANNALWTIAMVRMRSEPRTRTYVERRTMEGMSSKEIRRCLKRYIARELYPLILADLADAAGIS

SEQ ID NO: 415099 - protein, 370 aa, unidentified
MSKGITTFVGLDVHKESIAIAVASAGREAPRFVGTIGPNLKELLKALSHLGAVQHTLIVYEAGPGGYVWVRQLRAHGYDCEVVAPTKIPRRAGERIKTDRRDALSLAHFARAGDLSVVTVPDAADEAIRDLSRAREDALRARMRARHQLKALLLRHGKHYPAKTTWTLAHERHLSSVNFEHPAQNIAFTEYRSAVREAHERLERITQALRELLVEWRLRPVVEALMSLRGIDFVSAITLVAELGDLRRFAHPKQLMSFLGLVPSESSSGQSRSQGAITRTGNVHARRILIEAAWSYRYPARIGREMQIRQEQLPRSLREIAWRAQLRLCQRYRRFAARGVHQNKACAAIARELTGFIWDLAQHVPHTDSI

SEQ ID NO: 415100 - protein, 358 aa, unidentified
MAVIEGVCRIVGGVDTHKDLHVAAIVDEQDRIIGTRSFATTRQGYRQMLAWMRSFGELQRIGIESTGSYGAGLLRFMQQAKVTVLEVTTPDKQDRRRRGKNDDLDAQNAAHAAFAGQRTVTPRSRDGMIESLRVLKACRKTAVSARRIALQMIHNTIVCAPDGLRDQLRSLTRMQLVRTLASWRPDLTAYRDLDSAYRIALKSLARRYLELHDEIADLDAMIAAIVDELAPNLVARNSIGHTGAAQLLLTAGDNPERLRSEASFASLCGVSPVPASSGRTVRHRLNRGGDRAANSALHIIAIGRLRTDQRTKDYVARRLAEGHSKLDAIRALKRYLAREVFTLITQRRKEINATRIAA

SEQ ID NO: 415101 - protein, 345 aa, unidentified
MPIVGGLDIHRKQITFDYLDTATGEVKRGQIAPADRAHLRSWLVRFAGRNDVAFAFEGCTGWRYIAEELAAAGITAHVAEPADTAFARGRKRHAKTDKTDSRHLRELLAEGRLPECWIPPSRILECRALLETYHALRAEHTAWVQRIHAVFFHQGAPAPGEAALRTDRALQALRAAAAAHLSPAGQLQVATALDMLAGLEARLDVLRHELLLAARSLTGARVLAARLYGVGPVTAPAMTCWLGGAGRFSSSRKAVRFAGLDVTVWSSDRKGPPGRLSRQGPEVLRWAVYEAGKTHARASAPDHRYYAAVKDRKGGKRAALSEARKILRQACHILAELGDDALTAA

SEQ ID NO: 415102 - protein, 378 aa, unidentified
MTATTHPTQSTGLQTLFLSLELSKSTWRLTSSIGPGVAPRERRIAAGSDAACVAELAQAKRRFGLPPEAPVRSCYEAGRDGFWVHRWLTRLGVHNVIVDSSSIEVPRRARRAKTDRIDGRKLLAMLLRVAGGERGVWKVVQVPSEAAEDRRHLVRTLRAVKSDRTRAINRIRSLLATQGVTIAGSLLRCDVAQVHRWDGQPLSPGLHRRVARECESLTASTQQLRALEVQQRVAVRRAHDVAARQARRLRQLNGIGWNAAWLYASEIFSWRGIRNGRELGALAGLVAAPYQSGATHTTRGITKAGNRHWRAMAVELAWGWLRYQPTSALTRWYLERFHAAGTRARRIGIVALARKLLIALWRYVDQHVMPAGAQLKTT

SEQ ID NO: 415103 - protein, 341 aa, unidentified
MMIIGCDFHPRFQQIAFLDQDTGEYGERRLNHPQEAVEFYRRLSGLPVRIGMEATGNYFWFHRLAEELGHELLLGDAARIRAAAPRKQKTDKRDARHILDLLLTDKFPRVWQPNAANQDLRVLLVHRVKQVRMRTRLKNQLDGLAKSEGYLSPRVWSEGRRAELEALPLRGWLDRRRQDLLELHDELDERIAPLDEALREAANQDAAARLLMTHPGVGPVVSLAFVLTIGDVSRFQRGKQVGSYLGLIPSEESSGEHRRLGGVSKQGNSLVRWLLVQAAALAQRYDPSWHRQYVRLSMNKHHGVAKVAIAHKLAVRLYWMLRTGQNYQQLAVRGSHAGQSV

SEQ ID NO: 415104 - protein, 370 aa, unidentified
MSEENKFLLNLIFSFFNDFTMHVIRQNVGVDVDSAELKVSFQVLQEDLTIKVIDSSAFKNTPAGFKALMKRVNRKRVADLPLHFTMEVTGVYHENLAYFLYEDPNIIIHIELPNKTAAYKKSLNLKSKTDVIDAAMLGQLGAERTLGEWSPGSSQMRKIKKLSRERLRILKEKTMVSNQLHAETKSFDSCKSSVKRYKQRITFLDKQVAQIEKELKKEVGKDKELEQKIENVCTIKGVAFITVIGIVAETDGFALFKNRNQLVSYAGYDVVATESGTSIKGKTRMSKKGNSYIRQIMYMPSMSAARHDEHHKAYYKRIVQKHGIKMKASVAIQRKLLLLIYALFTKNETFDEKYAERVKKKLAPKQIENA

SEQ ID NO: 415105 - protein, 356 aa, unidentified
MTIVAHVHPYVVGVDTHARHHVYSIVQAKTGELLESQKFPATEAGINRAMTWVLKRTESKMQILWVIEGTASYGAVLTGKVLADGFEVAEAPRVDSQHRYGSGKTDDMDSFQMARTAAGLPVDKLRRPRQGSGVRQAVKILVASRELMTRERTSYINALTALVRSNSLGVDARHALSRIQIEQISAWRQREETVDLRIARVEAKRLACHILRLDEQLRSNESELVSLVKISEAAPLLQEKGFGAVSVAKCLAAWSHYGRVRTEAEFASLAGVNPIPASSGNTVRHRLNRGGDRKLNSAIHMVAIVKMTHDEETRAYVARRRQEGKTDREIRRCIKRYIARHVYRTLNTQHMNHTTT

SEQ ID NO: 415106 - protein, 310 aa, unidentified
MDSIYVGIDVSKDRLDVHVLPSGQSFAVARDGKGLNELIERLRSVGPRLIAIEATGGFETIVAAAIAGAHLPLAVVNPAQVRHFAQAVGKRAKTDPIDAAVIARFAEAVKPEPRELPDEAARLLSELVGRRVQVIEMLVAERQRERRANAVRVRKSLARHIAALEKELPEIDRDIDTMVRGSPVWRENEDLLITFPGVAHKTARSVLADLPELGRLTRRQIASLVGYAPFTRQSGRWQGKSMIAGGRPHVRAAIFMAALSASRRNPVMRVFYQRLLARGKPKMVALIAVARKVLTILNAMLRDKKQWHPA

SEQ ID NO: 415107 - protein, 402 aa, unidentified
MNAVGIDVSKGKSMVAIMRPFGEIVSAPFEIKHTASDINSLVELINSVEGESRIVMEHTGRYYEVLAHQLSEANLFVSAINPKLIKDFDNDSLRKVKSDKADAIKIARYALDKWQNLKQYNVMDELRNQLKTMNRQFGFYMKHKTAMKNNLIGILDQTYPGVNTYFDSPARSDGSQKWVDFASTYWHVDCVRKMSLNAFVDHYQNWCKRKKYNFSKSKAEEIYGKAKELVPVLPKDEITKLIIKQAIDQLNSSSTTVESLRTLMNETATKLPEYPIVMAMKGVGPSLGPQLMAEIGDVSRFTHKGAITAFAGVDPGVNESGSYEQKSVPTSKRGSSDLRKTLFQVMDVLIKTHPQDDPVYQFLDKKRAQGKPYYVYMTAGANKFLRIYYGRVKEYLSSLPES

SEQ ID NO: 415108 - protein, 326 aa, unidentified
MQYILGIDVSKDKLDLVLITELGKFHKVISNNSEGYKALDKWLVSRQVEQVHACLEATGQYGEEVAEHLYKQGHAVSVVNPARIKHYGESKLHRNKTDKADADLIAEFCLKENPTLWQPLSPEIKHLRALVRRLEDLKTNCQQEKNRLSSGEKDEWVVKDLSTHVAYLETCIAATEKEIQNFIKQTPNLKKQQELLNSIPGIADKTSARLLAEIGDISTFESASQLAAYAGLNPKGFSSGSSVHKKTRISKQGRRELRSCLYMPGIVASNHNPVVRSLKVRLHDRRLANKAIIVAAMRKLLHIVYGVLKTQMPFDAEYHKQFNFSA

SEQ ID NO: 415109 - protein, 377 aa, unidentified
MRVVFGIDVSKVSSEVAILVNGEKVHNYTMSNDAIGFSRLLGDLKTVHKPEIIFEATGVYSRRLQSFLDEHGYAYTRLNPLEAKKQLDSLRVRKTDQIDAEKLAQSQFVLNRKTTYVQEEIYQNLRDLSRFYQNLTEDIVRAKNRLHKALQVTFPELENILSTPSGEQYWNLVIAFPCKDFVLDLSKDELSESIRQSTSKRISDKRVAYLAEKLIALANQSYCAVKKTSPMLEEVRYYAKELFRLSEQRQTILDEMVELAQPLPEYDILLSIPGIAETTATSIIGELGDIRRFQSANQINAFIGIDLRHYESGNFLAKEHITKRGNPYARKILFKCIHNIASASNTNPCHIADFYEKRKRQSQTTSTKPHTIASIHR

SEQ ID NO: 415110 - protein, 331 aa, unidentified
MFPVGIDVSKNTLDLCMLYDGIKGRIKTRNIQNNRHSVENILRWLRLQHCSPEDVHVVMEATGVYHERLATELHDAGFRVSLANPHRSREFARGMGIMTKTDKVDAYMLACYAFLKKPHRWEPPAPEIRYLGALLRRRDVLLGDALREENRLEKYLSTDTPADIISSCRRMAQLLREEVSNIERQIKAHIKASPALRRDYTLLTSIKSVGPQLGMHMLVVLRSHNFVSAEQAAAFLGVVPIEKRSGTSVRRRPRMSKIGPPQLRAKLYMSALCGKIYNKRMRNIYDEMCLRGKPKMVAIGALMRKLVHWCYGVLKTRTVFNDEDLKPVLST

SEQ ID NO: 415111 - protein, 391 aa, unidentified
MVCVGIDVAKDKHDCCILDSEGTTLVDCFTIPNNMDGFKSLLQTIQDCSQKSDKIKVGLEATGHYSYNILGFLLDNNLPVYVMNPLHTNLYRKSLSLRKTKTDRVDAKTIATMLLSDVDLKSYTDTAYHNEELKSLTRYRFDKVQERAKLKQSVSRLVTILFPELEQLVSSIHGTSIYALLSEYPGAKQISEAHLTRLANILVKTSRGHYRKDKATHIRDAARTSIGSVMPAKSLELKHTIKLIQELTSEINEIEDAIRKIMDELKPPILSIPGMGFHSAAMILAEIGDFSNFNSPDKVLAYAGCSPSTYQSGKLTNCYAHMEKRGSRYLRYALYTATKYVCYWNPVFTEYLTKKQAEGKHYNVALSHATKKLVRLIYALQKSGKAYLAVT

SEQ ID NO: 415112 - protein, 312 aa, unidentified
MTIAPKYIGVDIAKSWIDVFDPETATAQRLPASRAGLRAFAKSGAGKLVVFEASGGYERPLAEALAAQNTPYTRVNPRQAREFARATGRLAKTDRVDAEMLAHMGAALRLSPTPPPEKTRAELADMLARREDIKAMMRAENNRLKQARLACIARDIRSVLAHLARRLALLEAGVQQHVQAHKPLRAAAARLQTMPGIGPILSAALIAGLPELGQMDRREIAALSGLAPHARDSGVFKGKRRIWGGRAHVRRALYLAAFIASRYDPTLKAFRNRLQDAGKPTKIALIATARKLVTILNAMMKNQVDYQNPELI

SEQ ID NO: 415113 - protein, 378 aa, unidentified
MNSLDTALQGKDTTTQGDLHVSFELGDRSWKLSCSDGVRSPSRYSVNAGDQVAVLDCLDKARARCGLDPQAKVHTCYEAGRDGWWLHRWLREQGIDNIVVDSSSIEVNRRAKRAKTDRLDADKLLALLLRFHRGERRVWSVVHEPTAKQEDARRTHREIGRLIHERIAHTNRIGSLLVMHNLRPGRIGGRTWQGWWEGHCKQVPPLLRAEIEREYARLVLAKQQLNALETERRHEVAEGAHPVVALLAKLRAIGPRGAWILDKELFGWRRFANRRELAGCLGLAPTPYASGTSEGEQGISKAGNKRSRALLVELAWRWLKFQPDSALSQWFHLRFGIAGKRSRRIGIVALARRLAIALWRYIECGEIPAGATLKTVEA

SEQ ID NO: 415114 - protein, 402 aa, unidentified
MIYAGIDIAKSEHVIGATDERGKDAARPMSFANSAGGFERCIAYLEGLADSKAGLLVGMEATGHYWLPLFCRLQDEGYDVVVVNPIRTDAMRRFKGSSRVKTDMIDCVLVAETLRCGDFEPSRLGDEAMIELRQLTRLHQELKESVADLKRQVVVALDQVFPEYDSIFSNTFGESSKAFLRRCPTPEECLGVRVDSLAKTLERASRGKLGREKADEIKGAARTSCGVSVAASAFSFQIKLLIAQIDFIEGQISEVEARIRSGVEAVEPLILTIPGVGHTLGAQIVSEIGDVRRFHGAPAIVKYAGINPSVSQSGKFSSEDNHITKQGSPYLRRALYLAAMAQLKLKTPFYDYYSKKRADGKSHREALVAVSRKLVHVIYAVLSKQEPYDPGIAKGPHGSRSE

SEQ ID NO: 415115 - protein, 355 aa, unidentified
MWSLGIDQHERQITISLRDENGDVLLARQVSTQPEKIQAFFQQLTQDRLQKGEEFVAILEVCGFNDWLIRMLQDYRCYKVILIQPDERKKCKTDRRDAAALSELLWVNRARLLAGKPVRGVRQVDIAASTDQENRRLTTLRKEARQARTRVINKIKHILRRHNLRWHLPTKTFPTQSAIAWLKALALPMVDRLEMNYLLADMEHLEQRYLDLEKVIAERCIASEDAMIVSSMPGVGNFTATALACRVGRVERFPRAHSLSNYWGMTPRCRDSGEKTQRLGSITKNGSSMARWLLAQVAYQVLRKDRRLREWYKNIKRRRGANIARVAVMRKLATIIWHMLKHRKTYAECRAFVTQ

SEQ ID NO: 415116 - protein, 370 aa, unidentified
MEEFSKYIGLDVHKETIAVSVAEGNGGEVRYLGEIDNTPDAMEKLIKHLRKGGTDLLFCYESGPCGYGIYRQIVDLGWKCKVVATSLIPKKAGDRVKTDRRDSMMLARLLRAGELEAVWVPDGTQEALRDLTRAREDMKHLQRQAKQRLLAFFLRHGKRYSGQSNWTQAHFRWMEGIKFDQPVQQIVMQEYINAVQDGGKRVAGMDREIERVAQASTTWPVIESLMALRGISLLTATTIIAEIGDLTRFASAPQLMAYLGLVPSEHSSGDRVRRGGITKTGNSHVRRVLIESAWTYRHAARKTAAIQRRAECTSEKVQEIAWNAQKRLCGRYRLLETKGKLKVQVCTAVARELAGFIWAVGQAMPLSPNS

SEQ ID NO: 415117 - protein, 376 aa, unidentified
MSKDTLYVGLDTDKKSIEVALAEGLPGGEVRAWGKLANDARSVLRLVKRLQAGGRQLEMCYEAGPCGYGLDRLLNGQPGVRCTVVAPSLTPRRPGDRVKTNRRDALMLARLLRAGELTAVWVPDPAHEAMRDLVRARGAATGDLVRCRQRIGGFLLRQGIGYVGKPWTRKHRAWLGQLVATLPLAAHRLMLGEALQALDEATARRDRLTDHIAELVPGWSLAWLVDALQALRGFALINAATLAVEIGDPRRFATPRQLMAYLGLVPSESSTGDKVRRGGLTKAGNGRTRKALIEAAWTYSRPARAPSDNRRHAPAVVAIATKARHRLSQRYRRLTARGKRPVIAVAAIARELSGFAWAIAQVAGPTATAPQPPAKR

SEQ ID NO: 415118 - protein, 387 aa, unidentified
MFYVGIDIAKNTHWASIMSSDGEIVKEPFSFSNDNSGFQKFISILESLDKTKILIGLESTAHYGENIISYLFNLNYKIGLINPIQTSNLRKSNIRKTKNDKVDTYIIIKALTLGNYSLITSRDINNLKLKGLCRSRRNLVTMRSKSKIQLVSYLDQIFPELAQFFKGNLHLNVSYQLLKEYSSPKQISSLHLTKLSNILHDNSHGRYGKQDAIRLRDLAKSSVGIDNLSLSLQIKHAILQIELYNEQIAEIEALYKSILDEMDSPILTIPGMSYNQAAVIVGSIGDINRFEHSCQLLAYSGLDPSVVQSGNFQAKSTRMSKRGSGMLRYSLVYAAHNVVLNNKTFKEYYELKRSQGKSHYCALGHVAHKLVRVIFKMLKDNVAFNLD

SEQ ID NO: 415119 - protein, 379 aa, unidentified
MENDSTLYVGLDVHKDSITVAYAMGLGDVELLGKTGTTQMEVDRLCKRLQSKARYVHVVYEAGPCGYGLNRRLVEKGFDSMVCAPSLIPRKPGDRVKTDRRDAFKLVRSLRAGDLSAVHVPSVEDEAFRDLARAWSSARDDLKQARQRLKSFLLSHGVQYSGRANWGPAHRRWLSTLSFNSAWQQLAFNEHREHRRTIEDRLAQCDRLEAALHEAVVSWRFYPVVLALQAMRGIQFTSAVGLVSELGDLSRFDHPRQLMAWLGVTPSEHSSGSKRRQGSITKAGNSYARKLLVESAWSYRHPARVSKDIQRRHEGIPKPIIDRAWDAQLRLCRRYRKLVARGKSPQVAIIAVARELAGFIWDIGRMGMTLALPQDGQPA

SEQ ID NO: 415120 - protein, 440 aa, unidentified
MKGRVRKLYVGIDVHSREHKAALIPRALLNQPGSAWKNVKPLDIKNTVADFDRLHAAIVSHISGIDEAVIAVDHTGGHYSEPLVHYLQAKGYNVYHLETRGIKAARERFLDEESKSDAIDSTATAYMLYLRDVHGLSFRLSGTRPELGSKAAVLNSLVLQRLQFNNLAVQATNRLHQFLIAVFPEAEARYFKQLLKIIHCYPTPRDILNSNGLEAIKGLRKKDREAIIELAACSVGVPDDTYGWLIRELSILRTQFQKNRDALTSMIRAQVVIHPYGEILLSFPHLGEITAATIIGIIKDINKWPDKKKLKKALGVYSTLVQSGTTSRVYKGREGSKHGRRVLFQICLGCIRTNAPDNDFKDYYLRQVARGKVKIKALVSTMGKLAEIIYHCLRSGESYEYQGIYRRNRVSANKNVSSDNLLHIRPKERLLSIEVDNYGN

SEQ ID NO: 415121 - protein, 404 aa, unidentified
MPTYFVGIDVSKFKHTCCIIDGDGEIIKKSFDFSNSKEGFDSLIETFKSIDQSESLFQIVMEATGHYHECLFRYLVANNYLAQIKNPVVIARFKQSEYLDKAKTDNLDALIIAQYASKHPFSPSTIKSYNIERIRRISRAKYFLYQDKERTINHLHRYLDESFPELVPFLRKRGDIKRYQGRNFFDSKTTLWFVENFPSAKKFSNARSETAEKLRRMSKGAFSLIKFNELRNIAKNSIGVSFQETEEIIIQLVQELRNIQERNDKLDELLIPLIDETSPNLLTVPGIGYRLAGLLISEIGDASQFPSADKIIKFAGLDVRVYQSGTIEKHGAIRKRGSPLLRYALFQAAEKARIHCPEIAEFYSKKKSEGKHPICALTHTARKILRIVWALLKTGQNYSRSISD

SEQ ID NO: 415122 - protein, 425 aa, unidentified
MQQLNQPEPLVAFIGIDWADQKHFVSLCPADQEVPEHYELEHQPEAIVQWLSGLQERFPGQRLAVALEQSRGPLIYALMSYDFLVLYPVNPQTLAKYRKALYVSGAKDDPVDADLLRELVTLHRDRLRAWRPDDELTRTLTLLVQYRRDLVDNGTRLTNQLSSLLKLYYPQALQWAGDLTTVQACEFLQRWPTLEKVQRTAPSKLRQFYQAHGCRKADLISERLAQIAAAKSLTQDGAVITATVSMVQAIINQLRPLLLDIARLNQQLEELFAAHPDREVFSSLPGAGRVLAPRLLVALGADRTRFASAQEVLQFSGIAPVIERSGKTCFVHRRFACPKFLRQSFHEYAAQSIRWSPWARAYYQQQRQRGQKHHAAVRSLAFRWIRIIFSCWQTRQPYSEDFYQQALRRRGSGLANLLIASEAAS

SEQ ID NO: 415123 - protein, 415 aa, unidentified
MKKHNYRAKKVNDINWPQLRQQFTGQALVFAVDVAKEQQFALLSNTELSESVLIQWNQLEQTAWLINELKQLNALVTVVMESTSTYGDAMRYQFRQAGFTIHQASAKRVHDAKEIYDGVPSLHDAKAAWLIAHLYQDGLTKPWHELGDKERELNAYRREYELHESQHKRNQNRLEAFLSRHWPEVLPLLALDSVTLESLLIDYGSPEQIAACAEQAAKDMHRWGKHCLSTEKIDAVIHSAASTLGQPCIEAERRYLQALAEELRHNRTQAKNAKSALEAVVKAEPELKEMGLTVGMVTTAILIGLHLDPRHFGCARSYLKALGLNLKEKSSGQDHGKLKLTKRGSALARKYLYFAALRLINSDPVISAWYQNKVDPRAKLKTVIALMRKLAKALWHVARGQRFDARKLVMTTVVN

SEQ ID NO: 415124 - protein, 343 aa, unidentified
MDQYVALDVSLKETCVCVLDAKGAVAFEGRVPSDPASLVHLIRTKAPGAVKIGLETGATSAWLWHALKAKGLPVVCMDARHAHAALSLRPVKSDRSDARGLAEMVRMGWYREVQIKSLAAHERRALLAARHRLVLIRLELDAQIRGMLKPFGLVVGPGNSDAFIRRAEALAQGHPVLAPLLACLADVRRHVAAQISKLDREIGRIVRADTTLRRFMTVPGVGPITALAFLSTIDDPSRFRRARDVGPYLGLTPKRYQSGETDRQGRISKCGDTFTRTCLYEAANVLLTKVQRWSPLKAWGVRLAKRIGAQKARVAIARKLAVILRCIWTDGTQFWWTKETAMA

SEQ ID NO: 415125 - protein, 320 aa, unidentified
MIPATAVIGIDVSRDWLDGFCVSSGQHFRLPNTAEGHVQLLAWIQQLPDAVRIGFEATGGQEWALWAYLVAAGIEAAQLAPAQIKAFARSRGTRAKTDRIDAVLIAGFMQFRPEAGRILPHGNLRILRALTTRRAQIVDMRKRLAAQICAREKQGVADDLQELDSTLKAVLDGQISEIEQRIERVITQEESLAKKARLLRSIPGIGPVSAAMLIAEMPQLGRMTAGEAAAMTGLAPVSHDSGARRGRRTIAGGRRSLRHVLFQAALAAACHNPLLKPLAKRMKESGKPHKLIIIAVARRLVVTANTVLKTATPWQTGKAA

SEQ ID NO: 415126 - protein, 343 aa, unidentified
MESVTTIGLDIAKSVFQVHGVDAAGRVVIRRQLKRRYVLAFFQKLPMCVVGIEACATSHHWSRELKALGHTVRLMPPAYVRPYVKRQKNDAADAEAICEAVTRTNMRFVETKTPKQQSCLMLHRTRHLFIRQQTAVINAIRAHLAEFGIVARVGRNGVMDLLDVVADTSDRRLPEVARGCIAALGAQLRMLKAQILEFDRRIMAWHRSNETSKRLDEIPGVGPALATALVASVADPKAFRSARNFSAWIGLVPKQHSSGGKDRLGSISKQGDRYLRSLFTAGALAIIRYAKIHGTKHRPWLTALLARRPTKVAAIALANKIARMAWAMMAKGERYKEPVALAA

SEQ ID NO: 415127 - protein, 360 aa, unidentified
MERYLGLDAHGQSCTFGVIGPSGRRIRHDVVETNGAALVQYVKSLPGRKHLCLEEGTQSAWLYEILSPHVEEIVVVGLYEKSRGPKDDLRDAFQRAEELRTNQVQTSVFKAPRSFATLRELSRVHTMLVRDVVRVQSRLKAMYRGRGIPVAGKTVYGARGREEWLAKLPASGRAATARLYEEYDALLELKQAAEKEMLSEAAKQPIAKVLATAPGLGPIRTAQLLPVVVTPHRFRTRKQFWAYCGLAIVMRSSSDWVRTEHGGWARARIQQTRGLNRNHNSRLKSIFKGAATTVLTSYPTDPLHEHYRQLTAAGTKPNLAKLTLARRIAAVVLRMWKDGKEYDPETLRAKQSTDSASPTP

SEQ ID NO: 415128 - protein, 344 aa, unidentified
MSIVGGLDIHRKQVTFDYLDTATGEVKRGQITPADRKHVRAWLARFAGRGDVAFAVEGCTGWRYIAEELAAAGLEAHLAEPADTAAARGRKRHAKTDKTDARHLRTLLAEGRLPECWIPPEHILEYRALLETYHDLRAEHTAWVQRIHAVFFHQGARLGEGALRTEQGLAALRAAAAAHLSPAGQLQVATALDMLAATEARLQPLRHQLREAARHLTGAKVLAARLYGAGPVTALALTCWLAGAGRFSSSRKAVRFTGLDVTVWSSDRKGPPGRLSRQGPPVLRWAVYEAGKTHGRAAAPDHAYYAAVKDRKNGKRAALSEARKIVRQACHILAELGDDALTAT

SEQ ID NO: 415129 - protein, 343 aa, unidentified
MQAVTTIGLDIAKSVFQVHGVDAEGKVLIRRKLKRRYVLAFFQKLPPCLVGIEACATSHHWSRELKALGHTVRLMPPAYVKPYVKRQKNDAADAEAICEAVTRANMRFVETKTPEQQSCLMLHRTRHLFIRQQTSVINAIRAHMAEFGIVAPVGRQGVEALLEVAADGGDNRVPEVARSCLAALGAQLRALKAQILEFDRRITAWHRSNETSRRLDAIPGVGPALATALVASVADPKAFRSGRNFSAWIGLVPKQHSSGGKDKLGSISKQGDRYLRSLFTAGALAVIRYAKIHGTKHRPWLTALLARRPTKVAAIALANKIARMAWAMMARGERYKEPVALAA

SEQ ID NO: 415130 - protein, 342 aa, unidentified
MGVVGIDTHKATLAACAIDEVGQVVTERTFPNDPAGFEALLGWLHELGEVTRVGLEGSAGYGAAAARFLLAAGLPAVEVPPQLSHRERLRTRRAGKSDPGDALAIARVALRELELPPVRTADASRELKLLVEARDDLAAEATRVRNRLHADLVVIAPGYSAVASNLVAEKYRRAAGRLLRRLPGVQAELARGRLVRLGKLATETRGLDRRIEGLVADHPLRSLWGAGPLVTAKLLGEIGDIRRFRSADAFAMLAGVAPIPASSGQTSRMRLNRGGNRQINRALHGIVLAQVRTYPPAQAFVARKRAEGKSWREALRALKRHLARIVFRLLSQPVDQVSSVRA

SEQ ID NO: 415131 - protein, 418 aa, unidentified
MAMKIVRFNCCGMDVHKNLVVATIGITDRKTNVTEYFQRSFSTLNSDLYRLKDWLRSHHCSDVCMESTGKYWIPIFNILEDEINVHLTHPKYVKAIKGKKTDKKDSKWICDLFKHDLIKFSFIPPKEIRELREIARYRYKLVCMRSSERNRYQNCMTVSNIGLASVISDPFGKTASNIMKEVMKSNVIDDDKILKLVHRNCKNKDKILDSLHGYRIESDQRFKMEKSLDHMEYLDQLIDSCEVELIKRAYPFRRSFQHITQIKGISVLSAILIISEIGIDMSQFGSDKQLVSWAGLSPANNESAGKKKSVRISKAGQYLKPLLVQCALSAIKDKTSYFGRKYSNIKKRRGHKKAIIAIARMMLVSIYHMILTGEEFQPCDYESFMDPKPNANPSLTVEKALNFLKQSGIDISSIPINL

SEQ ID NO: 415132 - protein, 454 aa, unidentified
MYLSCFEDFEQALKSSTWRDLETRGKFTKNDKLTFISDDMLILGCDIGSETHYVRAIDSRGRELSRNAFSFSNTGEGFQNAKSWAIELAAKNDKKQIVLGLEPTGHYWFCLATWMIANGISVVQVNPYAVKQTKELEDNSQLKDDRKDPKLIANLVKDGNYGMPYLPEGLYADLRRLSMFRDQLTEDRIRNINRLHREMKIYFPEYMDAFGKLEGAFTLEVLKKAPFPKDILALGTEGIRDIWHEAKLRGRGYSRASGIVRYAGESIGLTDGADVGKITVKWFAEKIAELDKQLAEIEIILHQKCKEIPYVENILEISGIGENILAGIIAEMGDISRFDDVKEIQKLSGMGLVACSSGKHKGATKISHRGRKRLRYWLFQGAKSAVSHADEFKQIHAYYTTRADNPLKKMQSLIAIACKLLRIIYAILKTGTRYDPKKMLKDIKLPATGQVQAA

SEQ ID NO: 415133 - protein, 407 aa, unidentified
MRAIGLDVHRDFCEVAICEEGKVRSAGRVESSPEALGALAASLGADDRVALEVTGGAWAIVAILEPQVAKVIVVSPGDTGIAQARAKTDRLDAQTLARLLWAGELVEGVWAPDELTRLLRRRLARREQLVRARSRAKNEIHAVLMRCLVGKPPVSDLFGKNGRRWLKGLELPVEEAETVEACMRHIEFLDAEIAEVERVIARYALSCSDARRLMSVPGVNVICAATFLAAVGDIGRFRTSRQLVGYLGLDPRVRQSGSSPAKSGPISKRGSGTVRWALVEAAWSVVHQPGPMRAYYQRLRARRGHQIAVVAVARKLAVLFWCLLMREEQYAHQQPSLTAKKLRPLEIRSGAPTMKGQRTGTFATREKMREAEQALALAAEASYVRMVRDWQAAAPKKVGASVTPGRA

SEQ ID NO: 415134 - protein, 342 aa, unidentified
METAVTIGLDLGKSVFQVHGVSAAGTVVVQRRLTRSKVLTFFAKQAPCLVGMEACAAAHHWGRELSKLGHRVRLMPPRYVKPYVKRQKNDAADAEAICEAVTRPTMRFVEIKTCEQQGTLVLHRVRLMLTRQRTQLSNAIRGHMAEYGLVAPVGRNGLQRLIAILGNPDDERVPAVARASLAPLVSQFGLLNDQVLDNDRRVRASARSTALGCRLMEVPGVGPVLASAMVATVPDPTAFKSGRDLAAWIGLVPRQNSSGGKEKLGGITKQGDRYLRQLLVAGALAVIRYAQRHGTKRPWLVHLLARRSPKIAAVALANKMARMIWAMMMTGERYREPRVAAA

SEQ ID NO: 415135 - protein, 345 aa, unidentified
MEPMYYIGLDVHKQKISYCVKDSSGKLFAEGWIPATHHDLDCWMKNLPQPWTAAMEATMFTGWIYDHLKPHAAALKVAHPLMLRAIAAAKKKNDRIDAKKICDCLRCDFLPESYMAPTAIRERRRRLRYRNLLVRQMVQMKIKISTLLMEAGVSYNKQKLHKAGYFRELLASNPDIDESLRSLLRQCREMVVRLGKMEAVLVHSLQQDRLLAERVERLMSIPGIGPITALTWALEIGEVQRFSSIKKAISYCGLCGAEKSSGNTVQRTPLSKQRNKHLQTTLIEAAKMAPRYSPTLALLYDREKQKGNANRATLAVARKLVAYLVAVDRGQTHFLVLDRDTCAAA

SEQ ID NO: 415136 - protein, 335 aa, unidentified
MTAYVGIDLHRRRSLAVCLDEGGQRRWWRRFENSPQTLVEAVTDAGADPEVVMEATWGWYWAADVLADEGIGVHLAHPLGIKAFENRRVKNDLKDAEMLADLLRLGSLPESWIPPRSVRQLRELVRYRHKLSQLRAGLKSQIHAVLGKEGVIPPLTELWGPAGSRYLDELSLGDAYQIRVSSLRDVIEVYDGEISELDRRIRHWLRHDPGYRAIQQLKGVGPVHAGALVAEIGDVTRFPHPKCLCSWAGLTPKVRESDTAGYHGSITKQGSRLVRWTVIEAVSRYRGGAPIRDTYRRVAERRGRNIGRVAAARKLLTLVYYGLRDGEIRCLKDAA

SEQ ID NO: 415137 - protein, 389 aa, unidentified
MMIYVGIDIAKLNHFASAISSDGEILIEPFQFSNDADGFQLLISKLDSFDKDSLIIGLESTAHYGDNLVRYLVASFYKVCVLNPIKTSSMRKNNIRKTKTDKVDTYIICKTLMMQDHLRFVSFYDLDLMDLKALGRFRQKTMKQRTRLKIQLTSYLDEVFPELQYFFKSGLHQKSVYALLKEAPTPETIASMHMTHLAHLLKSTSHGHFDKETAQQLRVLAKKSVGASDSALSIQVTHTISQIELLDSQLEKVEAEMTEIMKFNDSVIMTIPGIGYINGGMILGEIGDIHRFSNSNKLLAYAGLDPSVYQSGNFHATKTRMSKRGSKVLRYALINAAHNVVKNNSTFKAYYDAKMAEGRTHYNALGHCAGKLVRVIWKMMTDKVEFNLK

SEQ ID NO: 415138 - protein, 329 aa, unidentified
MQKNYIIGVDVSKDKLDIHCHSHYESLVVSNDEKGFQKLLKWILHEVSNELSSIGVVMEYTGIYTYRLEHFLHQAGIDYVKRPALDIKRSAGLKRGKTDKADARMISRYGWQRREELCAMKPLSNTQQNLQQLMAYRDKLVADRASYQARITEMKEQMGSQFNDCITCSTRHLIETLSDQIKIVTVSIEQVICSDKVICRNYQLLKSVTGIGFATAVHLLIVTENFNRFINARKFACYCGVAPFENSSGSSIRGKTKTSHLANKKLKSLFTMAAISAIQHEKDLKEKYHQKLQQGKAKMCALNIIRFKLIERIFAVIKRQSPYEIKLAA

SEQ ID NO: 415139 - protein, 317 aa, unidentified
MNHDFHVGIDVSKLTFDAFVWEKRAHESFRNDACGFEQFARWLKKQTHGAESVLVCFEHTGVYSLQLAIFMEREHLTYAMLPGLQIKQSLGITRGKNDLVDSMRIAEFAYRFSDKIAAMKLPSAEIRKIHSLLTLRARMMTDMQGYVVARNEIRRVVPTDGLLELFASYDRIISDLRAEIKRLEAEIKTVIDVGFVIAAFLIAYTHNFTRFTDWRKFACYAGIAPFGCQSGTSVHGKSQVCSIANLQAKKMLHLAAMTAVHFDTELREYYIRRQKDGKSKMAIINIVRNKVIARVFAVMKRGTPFVDVKKYAIRNSA

SEQ ID NO: 415140 - protein, 424 aa, unidentified
MKVTYQTCCGVDVHKSFLVATIVKTTGGIEPSYQKKRFSTFNNSILEFKQWLLDNDCHDVCMESTGKYWVPVFNLLEDEINVVIANPKWVKAVKGNKDDTKDSKWIGDLFRLGLVKGSYIPCKKVRILREYTRYRYKLVSCRSSEKNRYQNALTVCNVALDSVVSDIFGKSSTSIIDYLLEQSGTSINHEEIASKLLRSLKSKEDAVIESVEGYQMTDAQKYRMRLVRAHMDYITAEINDVDKMIENAISSDPDFENAVQFLCTIPGVKRASAITIISEIGTDMTQFSSSKRLCCWAGLTPGSNESAGKKKSVRITRAGVYLKPALVQCAHAAVKSDKSPYYKKKYESLVERRGKKRAIIAIARMILTAIFQMLTTGETWNPCDLYKIDMPEALLEKQKQKAIKQAQKLLIREGLLPPTEPIAS

SEQ ID NO: 415141 - protein, 416 aa, unidentified
MTQPILPTVERHLAVDLHKHYLVIGGVDARQEVVLSPRRVDLDDWPTWAKANLKPNDGLVVEATTNTWWFYDQSHEFVGQVLVADPRKIAWIAQTKVKTDAHDVMKLARLSAAGLIPLVWVPPLAVRELRSLLAHRRRLVKTQTMLKNRLHSLLHRLHLVPPAGELFATKQQAWWESLQVSPTEKLHVKHDLATLDQVGGQLDEIDDELRRLSCNEPWSAVMPYLLHLPGVGLIVAMTILAAIGDITRFPTAKKLVGYSGLAVSIHDSGQTHRTGHITKEGRKEFRYALVEAAWSAVEHSDYWTAEFDRLCRRMDKNKAIVAIARQLLVVIWHVLTERAADQHANPDMVAFKLMTWSWKLTDEQRGGLTTRQFVRYQLLRLGLGHDLTHVIRGGGKYLIAPPDEVLKLKPELHVSP

SEQ ID NO: 415142 - protein, 309 aa, unidentified
MTCYVGLDVSQKMTAICVVNEVGHRLWRGQCRSVPSEIEASVRQHAGGDARIGLETGAMTPWLAHELRGRQLDVVCLDARHARTALKMQLNKNDRNDAEGLAQIMRTGWYRPVHVKSFEAHRARSLLGARSQLVGMTTRLSNHIRGVLKTFGLLPGAVRGLPFDRRVDDLLADHPDLAPIVRPMLTAWRRLREQIAVFDKAIGAIVKQSATCRLLMSVPGIGVLSVLAFVSTVEEPNRFKRSRSVGAHLGLTPRQYQSGETDRSGRISRCGDHLARTLMYEAAVVILTRVKRASQLKDWAARPRCSAPR

SEQ ID NO: 415143 - protein, 342 aa, unidentified
MNAIRIGIDLAKNAFQVHGVGSKGKPVCRKKLTRAQLLPYFANLPPCEVGMEACGSAHHWAREIARFGHDVKLIAPQFVKPYVKTNKNDAADAEAICEAMSRPGMRFVPVKTPAQQASLSLHRAREGFICERTALANRVRGLLAEFGIAIPQGIRYLRSTAYDCIEDGARPLPGAFRLLIQRLLDHLAHLDRQVGELEREIQREHRQSEACRRLAAIPGIGAITATALVATVGDARNFASGRQLAAWLGLVPRQHSTGGRSTLLGISKRGDGYLRRLLIHGARAVVRFAELKRNANSWLTRLLGRRHKNVATIALANKNARIAWALLAHGSDYQHGYSITTV

SEQ ID NO: 415144 - protein, 346 aa, unidentified
MDQIIRIGMDTSKHVFQLHGVNAAEKVVLRKKLRRKEMIAFFQKLAPTVIAIEACGGSHHWARLLTSFGHEVRLIAPQLVKPYVKRGKNDAADAEALCEAMSRPTMRFVPVKTEEQQGALMLMGLRDRLIRNRTQLSNTIRGYAVEFGLTAAKGLAHLDPLFERIQGDESLPALARELFAVQAEEYQRLQAQIDSVNAKLTAWHKTNECSRRLAQIPSVGPIGAALLQMKTPAPALFRSGRQFAAWIGLTPKDHSTAGKVRLGVITRAGDEALRSALVVGATAVIQQVRRGGRADPWIVELLKRKPPKLAAVAMANKTARIAWKLMVTGESYRTKSPRTAISAVAA

SEQ ID NO: 415145 - protein, 421 aa, unidentified
MRKADTRKVKFVKDNTLIVAIDVGMEMNHGYCTTPDGRDIKPFKFDNTREGMDKLWGMVMASKNRFQCEEIIVGYESTGPYGEPLVHYLMKKQVMMVQVNPMHTKRVKEISDNSPLKTDDKDPRVIADIIKLGRTLSIVIPEGDAAYLRRLNNSRERHVKERTALVNQLQQLVFLLFPEFKKVLKNIKCRTPLYLLKKYPTPESISVLETSVLGEEMRKKSRGKFREHHADMLINLAKNTVGIREGVAGLSLDIRHILVQLEMLKSLITEIENEMEIALGRIPYSSKLLSIKGLGIVSVAGIIGEIGDFKKFQTQGEIMKLAGLDLYEISSGKMKGRRRISKRGRSLLRKILYYAAIQTIRKNGIMHDYYIKLTDRGMKRMKALVAVSRKLLGIIYAIVRDDSEYLFNFESVKRQVIKKAA

SEQ ID NO: 415146 - protein, 340 aa, unidentified
MTVIIGVDPHKGIHMAVAVDGDEQPLARLEVVAGRGQAQRLLAWAAPFEDRRWAIESADGLGKLVAQQLLAAGEDVVDVPPTLSARVRLLGSAKAAKNDSNDALSTAIAGLRHCGLRSVRVEDHVAVIQMLVDRYDDLTGLRTQAACRLHVALRELVAGGAPNRLSADRAGRMLRSVRPHGVAAIERKRLAGELLADVRRLDRDLATARARVTDAVATSGTSLLELHGVGPIVAGFVLGHVGDPARFPTPERFASDNGTAPIEASSGPVKRHRLNPRGNRKLNHAIHMASVTQIRHDTPGRAYYERKLTEGKSKREALRALKRRISDAIWRQLQVDLGRR

SEQ ID NO: 415147 - protein, 346 aa, unidentified
MKKIFIGIDFSKEKFDATVIKAVGVEECAERKHEVFDNKVSGFLRLLRWVKSVADEQDAGLWLFCGENTGGYSKALCNYLYGSGYDMWLENALSIKRSSALQRNKSDKADSNIIAEYAMRNYDQMRLYKPLGKNLERLREVFLYRHNLVKLKASMTMRKGEKKLTQEKSDISRFMAMSSKHLISEFNKKIAECDMRIEKIISEDEELRRNFEIITSVPGVGMQNAVCLMVYTDNFNRFDYNSRKIACYYGVAPFGRQSGTSLNTPPHVSPFANKLIKTLLSQAALASIRFCPHLAMYYHRLVETGKKPPVALNNLKNKMLHIITAMVRKGEKYDPDHDYYAAIKAA

SEQ ID NO: 415148 - protein, 413 aa, unidentified
MLKIVYPICCGMDVHKSFVVACIATTNDHGVTNYKSKRFSTFTGDLRRCADWLSENNCKDVCMESTGKYWIPIYNILEHTCNIVLAHPKYVKAIRGKKTDKRDAKWIADIFKHDLVSGSFIPPADIRQLRDLVRYHWKLTNFNVGEKNRAQNCLTVSNIKLDDVFSDVFGKAASAITTRLLESNEPFDVKPYLTKNIKKPIEQIQAAVDGEMCAEQAEKLRIIRSHMDSLELCKLNLESLILSTAEKYIPQLNLVMTAPGIQSFAAIGIISEIGVDMSVFPTSKHLCSWAGLTPQNNESAGKKKTTRISRAGAYIKPLLVQCALCAIRTKQFPEVRNRYLALKKRRGHKKAIIAIARMLLTAIYNILKKNEPYNPELYLRCNNTPPEHRAVSVEEAIFILQRQGYLVTPSAPG

SEQ ID NO: 415149 - protein, 399 aa, unidentified
MECRNAPAERPRPAPGQALSRSLVALDQNSTIIAVIEMSQSSWLVAGMLPGIERQPRKKLEPSPERLLALLQRWRDEAVRAGSTITRIALAFEAGRDGFWLARWLEARGVEAHVIHASSIAVSREHRRAKTDRLDTALLQRGFLGWLRGERGHCSMARVPTIAEEDAKRPNRERDCLVGERTRIVNRIKSTLARLGIRNFKPTLRKAAERLATVHTPEGTPLPPNTLAELQRDMARLGVVVSQIRQIEEARQKRLEQQHETGPHAMVRLLARIVGVGVETADMLVHEVLSRPMRDRRAVARYAGLTGSPDESGAQRREQGLARAGNARVRRGMIQLAWRFLMFQKESALALWYRARTTDSRRGTRKTMIVALARKLIIALWRFVTTGEPLEGVILRPAS

SEQ ID NO: 415150 - protein, 412 aa, unidentified
MRIIGFDIHRAFAEAVAWEDGKLGRLGRVDMRRNLLTAFAVTLSREDIVVVEATGNAAAVASVIAPQVKRVVIANPIQVRMIAHAKIKTDTIDAGVLAQLYASGFLPEVWIPDEATQALRRQVTRRNQVERQRTRLKNIIQSILHAHLIPSCPAADLCGSKGRAWLGKQVLPEDERFAVERHLREFDRLGEDLAVIERDLARSALADENVARLIAIPGIDMVVALAVIAAIGDINRFGEPQKLVSYLGLNPSVRQSGPGPAHHGRITKQGRGHARGMLVEAAWAAARAPGPLRAFFLRVRAKRGQHVAAVATARKLAVLIWHLLHKKENYAWARPALQARKIRKLELKAGHPAKRGQKGSAHAYNIKGHREQERRFVEQAEAAYAHFVAGWTPRGSKPASKARPGAANEERR

SEQ ID NO: 415151 - protein, 407 aa, unidentified
MQVLYGVCCGLDVHKKEITAALMTGANELAVKKFDTTTKALREMVVWLKSASCQHVAMESTGVYWKPIYNILEMEDIPTMVVNAYHMKAIPGRKTDVCDAEWIADLLRHGLLRASFIPKKDQREYRELVRYRSSRTEERAREINRLQKMLEGMNIKLGDFVSSVMGKSASQLLGLALTNEELTDEQILEASHGNLKASLDELKEALRGIITPLQKDLVTIVLDVIATQTQQIAQVEALIRKYTKDAYAEAANNLEAIPGIGTKSAQAIVAEIGIDMSRFPTANHLCSWAGVAPGNNESAGKRKRAKSKKGNKHLKKTLTQCATSAIKNKTSFFHAQHQRLVVRLGSNKATIAVAHSMLIAIYYVLSGKDFVDLGADYYTQFNRDKKIKSHLNQLKKLGWHPPESEPA

SEQ ID NO: 415152 - protein, 357 aa, unidentified
MPMLAELIDGVIGVDTHRDTHHAEIAHPTGATIATCSITNDSAGYAHLLAWASEHAPGSRLAMCIEGTRSYGAGLARAAATAGLPVIECEQPTRKTRRGKGKSDPIDAHLAVLTALQLDSEKLPTPRADGDREALRILLCARQELTTTNTAQTNRLRALLRDGDDTERRLARARLSDAALATLARRRQPAAASRAQAVRHGEIRRLALAMRQAARALKANRAELAAIVNDLAPGLTERPGIGPVSAAQAIVSFSHAGRCRNDAAFAKLAGTSPIDASSGQTTRHRLNRGGDRALNNAIHVIANTRMRTHTNTQAYVARRRAEGKTDREIRRCIKRYIARQLYRTLTAAMTPYSAAST

SEQ ID NO: 415153 - protein, 351 aa, unidentified
MMIIGVDYHPSFQAMAFLMEETGECGEQELNHSDGQAEKFYRELKQRGMCVRVGLEATGYSRWFERLLAELGFELWIGDPAEIKAKRVKKLKTDRKDAQLLLRLMLENNFPQIWVPSPENRDLRQLLWHRHRLVQMRTRIMNQLQALAMNEGYRWKKKLFSEQGRAQLEKLALAPWASRRRQELLELLDRIHPTIEELTAAVEQEAQKRPEVLRLMTHPGVGPLTALAYVLIIGTPERFHCGKQIGTYVGMIPCEDSSARKQRLGHISKQGNSLLRFLLVEAAQAAARSNPEWRRRYMHLAMRRNKSIAKVAMGRKLGVRLYWMWRNGCAYSQSFEFGSYVGQLGIGHGGK

SEQ ID NO: 415154 - protein, 410 aa, unidentified
MAYKVAGIDVHKKVLMVVILEVDDPASEPQRRRFGATTSELRNLSSWLRQQGVQQAVMESTAQYWRPVWYELEPYMKLSLAQAFSNRAPRGRKHDFRDAERLVRRLLAGELTLSFVPEPQQRTWRMMTRARVQLTEDKSRLQSQLECLLEEMRIKLSSVVSDLLGVSGYRILRALAEGETDPRKLAALADDRLRCSEKQLIDALSGNPQPAHRRVLRLYLNRYQVMVEQIAELDSLVAEALKPHQEAVVRLALAPGLGVDSAQQIIAEVGVEAGTFPTAGHLSAWVGTCPGRDESAEENYSSRSAKGNKYLRRILNQAAHAAVKKKGSHFQAVFRRLLPRLGYKSTIWAVAHRLCRLVWKMLHEAVPYLERGSEPDARTKRRRARQLVRTLRKLGYQVDLRVINPTPAAA

SEQ ID NO: 415155 - protein, 345 aa, unidentified
MKIVGCDLHTRYQQIAMLDQETGELVERRLEHESGEAKAFYANLVGPVRVGIEATGHTRWFERMLAEQGHELWIGDAAQIRASVVRKQKTDARDAAHLLQLLMDDRFPRIWRPPMAERDLRQLVWHRQKLVWMRNAVGNQLHALAMGEGVCRKKQLWTKKGRAELEGLHLGDWASYRRQELLRMLDQLDQSLQKLDAAVAEQAEQNAAAQRLMTHPGVGPVTSLAFVLTLGPVRRFARSKQVVSYLGLNPREHSSGGRQRLGAISKQGNPMMRSLLVEAGHTAARLDVELKQDYQRLKLRRGSGVAKVAIARKLAVRMYWMLRTQASYAQLVRMQGSPRGTLVKK

SEQ ID NO: 415156 - protein, 359 aa, unidentified
MKIIGCDFHPSWQQVAVFDAETGEVMERKLIHGDGEAERFYGALPAPALVGVEACGNSQWFIDLLQRLGHEVWVGDAAQIRASYVRKQKTDKRDAGHILKLLLEGRFPRLWVASVEQRDLRQLLIHRHKLVEIRTRVKNGLQHLALNRGVQKKGGLWSVRGRACLEKLPLEGWTARRREDLLRLLAQLDRQIGELDTAVSEAAEQHAQARLLMTQPGVGPITALAFVLTIGEVSRFEHSGQVSSYLGLIPCERTSGGKQRLGAISKQGNRFLRQLLVEAAQSVTRLDEGFKKQYQARCHHKPKGVAKVAAARRLTVRLYWMLKQNVGYPEIVHIESSPRVPLVGKSQTEELIGRSRIQQ

SEQ ID NO: 415157 - protein, 413 aa, unidentified
MQTLVEHGCGLDVHQATVVACLLWVRRDGRVQKQLRTFGTTTRELVQLRTWLVAEGCTHVAMESTGVYWKPVYAVLEGGELEIIVANAQQVKKVPGRKTDVKDAEWIADLLCHGLLRPSFVPPLPIRELRDLTRYRRKLVESRSAERNRLLKLLESANIKLASVATDVFGLSGRLMLEALIADKTSLSEMAELAKGKLRRKIPQLELALEGKLQEHHRFLLRLQCSRLDAVEKDLAILEQRIQQKLEPYAAQLALLLEIPGIDLTLASVIIAELGVDMSAFQSVSQLASWAGVCPGNNESAGKRKSSRIPKGNVYLKTALVEAANAAARAKGTYLRDKFYRLKARRGYKRAAVAIAHKILVSIYHMVSQNVSYNDLGDLYLDKLNTHHVTRNLVRRLERLGYTVTLSSQPTAA

SEQ ID NO: 415158 - protein, 399 aa, unidentified
MLAVGIDISKSKSVAAILNQDGSMHTSPFEFHHTQPELDAFIKYILNSNQSATILMENTGHYHYPVLKAFREAGLPVCMVNAYQIKKFGDMDLRKAKTDKKDAVRIARYALEKSYSLVPYTSMEQKYEDLKFLARQYNQRMLTLKTNKVFLLNLLDETMPGITNILPLTTRTPETSLSVLFINRFKSYDRIKKMGKSRFLDAFEKIARKSRNRQTKTYGLAIYEAALRNITTRGENEYTLAAQDQCLELVCESQKAADSIIPKMQTLAETLPEYAVLRSMAGVGDRLGPLILAEIGDIRRFHSGKALNAYAGNDAPPYQSGTFESHNRHISKRGNAALRKYCFEVMQALKLTRPQNDPVYLFLLKKEQEGKPYNVAKMAGVNKFLRIYYARAMETLKQQ

SEQ ID NO: 415159 - protein, 337 aa, unidentified
MGFAKIIALDLGKFKTVCCVMNALDRTHAFETIEMSPANVHDLVLRHVTDVATDTLVAFEACDCAGWVHDVATALGTSVIVVNANDERWRWRRVKRKTDRDDALKIARLAALDQLSAVHMPDPPARQRRRLMLHRRSVVSRRTQSRNAVRSIFSQQGIALARGGKQWTIAGVAQLREHARSIAACADVNDLWRGRLQVELDLIAATDAQLKLLDARLDELSAGDPRVTLLRTFKGVGPRLAEAVVLYLDDPNRFASAAAVASYAGLVPRQIESGTMRRFGHITGRGPGLLRSLLVEAAWTVYRCHDWARAFVDHVSAGGRARRKLAIVALARRVLII

SEQ ID NO: 415160 - protein, 370 aa, unidentified
MYVCILNQAGETLLHRNMKTTPEAFLKAIAPYRPDIVVAVECLFTWYWLADLCADEEIPFVLGHALSMKAIHGGKAKNDKIDSQKIAVLLRGGLLPQAYVYPAEMRATRDLLRRRMHLAHKRGELLAPVQNTNSQYNLPALGKNIAYKANRDGVAERFADPAVQKSIEVALSLVSYYDELLRDVALTIVKTAKQHDANTLYRLQTVPGIGKILSLVLLYEIHHIDRFPRVQEFASYCRLVKCAKESNGKRSGTSGAKIGNAHLTWAFSEAAVLFLRENPAGQKFLARLEKKHDKGKALTILAHKLARAVYYMFKRKVAFDMKRFLNDEGRGVGERDVSLDNHGMNLILATLSNASMTASLNAYERLGHYP

SEQ ID NO: 415161 - protein, 404 aa, unidentified
MWYVGLDWSDTHHDVVVLDEAGHRVGTQRFAHSHQGLHHLKDFLLSIASRPEDLACIVETNHGLLITFLLEAGIPVYPVNPKTANQLRKTAGAKTDRIDAYLLAKTGRFDLADLRRLSPDSPIIAELKTLTRDQDALIQSQTRLVNQLTACLKEYYPVGLKLFGKLHQPSTLLFLQAYPTPAAAAAASLEEIEALLKRCKYPNARRAATEIVEQLHHQELTANEVIVRAKSRLMLSLVRQLLLLLEDIKSYDKEIASLFLKHPDHDLWQSLPRAAQRLAPRLLAEWGDDRARYRDAQSVQELAGTAPVPFQSGNFSKAHKRFACLKPLRNVLYQFAWQTTRQDGWAREYYQRKRMEGKTHSMAVRCLANVWVRIIYRMWVSKDVYQAATFEAAKLAHAPRQRVA

SEQ ID NO: 415162 - protein, 350 aa, unidentified
MKIIGCDFHPSFQQIAMPDVEPGEYTRKKLPHAWGEAAEFYRSWQGEVRVGIEATGSTRWFERLLEELGQELIMGDAAKIRASCVRRQKTDARDAEHLAEHLLELLAGGQFPAIWVPSAEQPDLRELVLHRHKLVEMRTRIKNQLQHVALNEGLQKKRQLWTERGQQWLEELPLPEWTDRRRADLLQLLDQLEANIGELDEAESKAAASQDARVRLLMTHPGVGPVTALAFVLVTGDIARFGRSKNLTSYLGLIPREDSSGTRRRLGAISKQGNTLLRTLLVEAGQSAARCDPELRCAYQRLCRKKQHTGTGKVMVARKLAVRLYWMLKQQQPYRPAHALSSPSHSVSAA

SEQ ID NO: 415163 - protein, 289 aa, unidentified
MQTQVIKKIDFSEQDLYIGLDVHKKSWHVSVLSESICLKSFTSPPAPLSLSNFMKAHFPGANCYSAYEAGFSGYSAHRKLNALGIQNIVVNPADIPRRDKDSHYKTDKSDSRIIAESLRAGLLKGIYVFDPESEGFRGLFRSRLALTKDIRRTKGRIKGFLAYRSIAVPVKYIRNPQASKYLDWLKLLKFPYPSDRNQLDQLLNNLLYLIEQRRILEQQLRDAARRRDRTIFNLLQTVPGIGPITSIDIMAEIGDINRFQYFKRLASYVDLVPRLHQSGENDKSFKIAQ

SEQ ID NO: 415164 - protein, 523 aa, unidentified
MATKFKSKPGRSQRYLTIVKPSGSLHPRVQKVGPEHFGIVAVDCAKARSKWMLADFYGNVIIPPTVVEHNKQGFDAAVAAIRGAMASHGLGDVLVAIERTGIYHLPVKRTFISHKFEVRIVHPLTTKQYRLPADPGTKTDDTDLLAIHRATTNGFGLIELPLDEIHGPLRLLARYRRTLVRNNAGLRNQIIALLDVVLPGYTGLFEDVFDNQAALSIARSVTSASKIRSLGSEGLAEILSELQVRYQQRTLKKILHWADGVENTTEYSEMYHNILVHKDNERCARLQQIATLEQELAGLLARTAYVVLLSIPGVSIVTAAEFAGEMGPITNYASDQAITGRAGIYPSRYQSDRVDRCDGPLVRRANRKLRGVILMIAENLLTCNRFFQGLREQWKTAGLKEQAMGVRAAKRFCRIAYQMVAGGQVFRHPCCQQRDAILRKLSLFHAEHGSALAQVLVDLQAAADHIPKSEHAREAKSLYEELQPSPRRERCGPRRLGEILPVVLAKLGVNAVDLSVKGENDLT

SEQ ID NO: 415165 - protein, 347 aa, unidentified
MYPFYLGIDLHLKRTYLVLMNHEGEVIDKRRLKNTEIETYISRNIPKETYAVMEATRNWPFFYDLLEKHVDRVELAHAKGVRMIAAAAVKTDQIDASVLAHLARLNFLPIAYAAPKEIRDLRQHLRYREWLIDERRRAKNRIHAVLAGYNLASPVTDLFGRSGREWLQEVVEKELRSASRRVVLETLTMVDQMDTQIKELAKDIPLPEDLKPQAELLMSMPGIGKLLSAVILAEIGDISRFNSPKALCNWAGLTPRVHKSDEVVRHGRISKQGSRYLRSAMVCAAMTACRISPRWYGVYEHLDRKIGRRAAKVAVGRRLLTVVYYMLKRNQPYEEDYEQRRAVEQGA

SEQ ID NO: 415166 - protein, 412 aa, unidentified
MEVVYPRCAGLDVHSKTVMVCRRILGRGGKLDKQVREFRTMTADLLAMSDWLAEAGVTHVAMESTGVFWKPIWNLLEGRFEILLVNARHIKQVPGRKTDVKDCEWIAQLLQHGLLRGSFVPPRPIRELRDLTRHRAKVSQERASVVNRIHKILEDANIKLGAVASDIVGVSGRAMLEAIVAGEDDPRKLAELARRRLRGKIPELRRALHGRLTEHHRFMLETVLDHLRFLDGQIRRLDQRIEKVARPFADEMQRLTTIPGLQTRGAENLLAEIGPDMAQFPSDAHLASWTGICPGNNESAGKRKSGKTPKGNRWLRRTLGEAAWAAARSKDTYLAAQYRRLAPRRGKKRAIVAVGHSILIAAYHILATGGVYQDLGGDYFDRLDPQRLTRYLVRRLEKLGHKVSLEPLPNVA

SEQ ID NO: 415167 - protein, 340 aa, unidentified
MGRYVGVDLHRNGFEVCTLAENGRRYRRRWPLRDVAKFAETLRPDDAVAVEVTTNTRFFYEMVAPRVSRVAVANPSQFKVISQSVKKTDRRDAETLAEFLSKDMIPEVRMKDKDQARLASLTQTRDMLVKQRTAAKNKINNIFAAYGIVLAKESLSSERGLRRVASWTFDVSAELEVGVLVDQVRSLTASIKRLEEAIGEAGAKRPGYKNLRSIKGIGDVGAGILLSVIGDVNDFEHEGKLASYFGIVPRVDRSNQTEHHGRITKRGSKLGRTTLVQCALVAKQYSPYLASYYRRIQRRRGGGKAIIALARKFLSIIYHTLKNDWIFEDFPNGVLAQASA

SEQ ID NO: 415168 - protein, 354 aa, unidentified
MPIIGAFDVHRKQITFKWLNSETGEVKRGRIVPALRKTVREFFVPFKGLDAHFALEATTGWRFIAEEISRAGLRAHLAEPADTAALRGSKRRAKTDRRDCDHMMDLLLTGRLPESWLPPEHVLEMRTLVRLRKGLVDERCEWQQRIHAQLFHQGLPSIRFMTTEGRGELAAADLSAAGRRVATIGLEVMEQLDQQLLPLDAYLVRFAKLQPGCRALKQRLFGVGTITAVFIWAELGDCVRFSSSDDAVRYSGLDITVYESADKRPPGHLSYQGPEALRWALYESAQSACRRSSPDRVYYEQVKARLNHKRACLSVARKICRRAHHILRSLGDNAFAPVDASVLPSFERPASKTA

SEQ ID NO: 415169 - protein, 326 aa, unidentified
MATIGIDVSKKKLDLCWLHDAQAGKVKTRVFPNAHDHYPALLAWLLKQTGASPGELQVYLEATGIYHEPLAHWLHQAGVTVYVLNPARVRYYARSLGDQGKSDKKDSKRIAHFALANPELTPWQPEPEEVRTLKQLAKRLETVQKDIQREQNRLEKAQFNRDAQAEHSITHVLALLRREAKRLIKEVDDHIDRHDGLKRDRRLLESIPGIGEVLSVHLLVALRSRRFKSGRQVAAFMGLVPVESTSGSSVRHAPRLSKNGDPALRQKLYMGAVVAMRHNPSIRRQYQRLCAAGKRKMSALGAAMRKLVHIAYGVLAHQKEYEPQPV

SEQ ID NO: 415170 - protein, 341 aa, unidentified
MDIVVLGIDLGKNSCSLAGLDASGRVIMRRRMRRSSVESFVNGLGRCIVAMEACCGAHHLGRVFAAQGHETRLMSPEYVRPYVKAQKNDELDAEAIAEAATRPTMRFVAVKSQSQSDIQSLHRARERLVSERTALINHLRALLLERGIVAPQGRRKLQEELLVFADEDGIEALSPRIRLLIEDLRSEWRALDERIAAFDAEFVRMAREDEAVRRLTTIPGIGTINATALAAAVGNAQAFRRGRDMAAWLGLTPRQMTTGGKSRLLGISKRGNRYLRKNLIHGARAVLPYLVQRETPLGRWARGLLARAHKNIVVVALANKLARIAWAVLARGRTYEAASAA

SEQ ID NO: 415171 - protein, 368 aa, unidentified
MKKKTSATTETVDKGRAMIDFTGKIIHVGIDVHLKLYQICLLFDGLILGNYSIEADAQILIDFLKNRFPGATLKCVYESCAWGFNLQRQLASAGIECIVVHAGDIPGSDKEKKNKTDKVDAKRLARHHAAGLLRAIYVPDEQLEKHRSLVRYRKSLLGDLNCSKNRIKSLLKIYAIVIPEKMQTANWSKNFITWLEEQSIKDLDGKATLESMIKQMKMLRQLLLKVEKKVRALMSSEQYTAKSTSLKKIPGIGPITSSMLLVELGDIRRFEKFDRLNSFVGYYPGSHSSGDKSIDTGMTNRRHNQLRSMLIEAAWQSIRKDPAMLEAYTQLTKRMKGNKAIIRIARKLLRRIRRVMLTGEDYQIGVVQ

SEQ ID NO: 415172 - protein, 408 aa, unidentified
MKVLYERCCGLDVHKKEVVACIITPEGKEIRTFHTMTDDLLELADWLSGEQVTHVAMESTGPYWKPIYNILENEFTLVLGNAQHIKIVPGRKTDVKDAEWIADLLRHGLIRGSFVPDRAQRELRELLRYRRSLIQEHTREVNRIQKVLEGANIKLGNVASDVLGVSGRAMLRAIVDGVNDPMAIAGLAKGKLREKQAELEKALKGIIGPHQRMVMRCQMEHLEFLEEQIARLDKEVADRMGPMQGHIDAADSIPGIDVRTAQDILGEMGTDMSQFPDAGHLASWAGVSPGNNKSAGKRRSGRTTRGNRWLKASLVLAARAAVRSKENYLKSQYHRLAARRGDKKAIVSVAHSILVMLYTMLKKGQLYNELGPDYFDKRNLNATLRRSVQRIEQLGYKVILENVQPAFS

SEQ ID NO: 415173 - protein, 354 aa, unidentified
MTEILKSMIAAIGIDIGKNWFHVVGLDGRGAVALRQKWSRGQVEARLANMPRCLIGMEACVGAHHLSRRLSLLGHDARLMPAKYVRPYSKGQKNDFRDAEAIAEAVQRPTMKFVATKTADQLDLQALHRVRERLVSQRTGVINQIRAFLLERGVAVRQGLRVLRAELPGILATRCDVLAPRMIRIIEDLAGDWRRLDERIEALPGEIEALARRDGDCERLMSVPGIGPLISSAMVAAIGAGDTFTKGRDFAAWLGLVPKQFSTGDRTVLGKISKRGNRYLRALFVQAAWVVLIRSKNWERYGLKPWIEAAKRRLHRNVLAIALANKLARIAWGVLAHGRSFAAGKVVEAATQPA

SEQ ID NO: 415174 - protein, 316 aa, unidentified
MCWWWRWEGKGLAWQVRELANTAAGQQQLQHMLGKTSGRTRVCLEASGNYSLDVSLLLHRLPGVELSVINPRMARRFAESLGERSKTDPVDARVLGEYAARMPLQPWAPPGAAALKLRGMTRAIDALVRTQTQGKNRKHAIAVSAALPRVVAQELARHEKYLAHRIEQLRKQARRLVEANAELQRQWQHLQSVPGIGETSALAILGELAVLPPTLDARQWVAHSGLDPRHHRSGSSIEWQPRISRAGNARLRAALYMPALVAVQHEPHLRRFYQRLLAHGKAKLQALTAVMRKLLHGIYAMLHHDEDYDGGKLCAA

SEQ ID NO: 415175 - protein, 341 aa, unidentified
MMSNVATIGLDIAKSVFQVHGVDAAGEVAVRRKLTRGRVLAFFESLPRCLVGIEACSSSHYWARELIARGHDARLLPAQYVKPYLKRQKNDAADAEAICEAVTRPTMRFVPVKSPEQQSVMMLHRVRLMLNRQRTQISNALRAHLSEFGVVAPIGRNGIEQLLMVINDEYDARIPADARLCLRMLEAQLKVVKEQILENDRRVRASARETELGRRLMEIPGVGPLLASAFVATVADAHTFKSGRCLSAWIGLVPKQNSSGGKEKLGSISKAGNRYLRQLLAVGAMAVIRYAERNGTKRPWLVQLMARRTTKVAAVALANKTARMVWALMTNGERYREPVIA

SEQ ID NO: 415176 - protein, 311 aa, unidentified
MKEPERFVGIDISKQELVVAVRPTAELQSFTNTEEGLAALIRFLQPLSAHAIVLEATGGFARAAVNAMALAALPVVVVNPRQIRDFARSVGLLAKTDAIDAQIIARFAEAVRPEFRPLKDQETQKLEALNNRRRQIVEMLTAEKNRLGASPEWCHKDIRSHITWLEKRLKRANDDIDDLIKQSPVWRQKEKILTSVLGVGPVVTTTLLCGLPELGSLSARKLSALVGVAPFNRDSGQYRGRRSCWGGRAHVRAALYMAALTASRCNPVIRAFYQRLRLAGKPAKVALVACMRKILVILSAMIKNNTCWQQA

SEQ ID NO: 415177 - protein, 384 aa, unidentified
MQKPNDLNQSRIVLRQDSTLIAVIEMSLSSWLVAGIVPSVERQPLKKLAVDESALLKLLNRWREEAEKAGRRIERITVAFEAGRDGFWLARWLRARGIEAHVIHASSVAVSREHRRAKTDRLDTELLKRAFLGWLRGERDHCKMVAIPTTKDEDAKRPNRERQSLVGEQTRIVNRMKAALIRLGIRGFNPKLKKAAGRLEDLRTPEGEPIPPNTLAELHRDMERRRLVSDQIRQIEKARLERMEQAPGDGPHAMVRLIARVIGVGIETADMLVHEVLSRKLRDRKAVARYAGLTGAPDESGSKRREKGLAKAGNARVRGGMIQLAWRFLLFQKDSALAQWYRTRTEGGRNRKTIIVALARKLLIALWRLATTGEVPAGVVLRAA

SEQ ID NO: 415178 - protein, 380 aa, unidentified
MKTSILWDDGGSVTNRPRHDWKPVRILAVRPRASSVLQPYLPYPNSCQGTSPHQQGRGTKVSEPYNVGIDVSIDRLDVAIRPGGRTFCVTNDAAGWAELLARLPRGAIAAIGLEPSGGYERDVVRVLLAAGFSVRRINPNKFRQFARAAGAFAKNDRIDARLIADYVTVMPTRVVERNQAIERLAETVTMRRQLCDERIAVESQASHLEDALLQRIAKRRLTRMAADIALLDKRLAELVAAQPELAQHFRLLRSMPGVGATLAYTLLALLPELGQIGRKQIAALVGLAPYAFDSGRFRGQRHIYGGRIAVRNTLYMPALAAFRFNPALRAFHHRLVAAGKKPKVAIVAVMRKMLTTLNAMLRDGHSWTDGHTGRHTVPAI

SEQ ID NO: 415179 - protein, 436 aa, unidentified
MNQTKLNRKTIVSDGGDFAALIGLDWASQQHALCLYDCATGTRESSTLEHAPEAIAQWAHGLQQRFGGRKIALCLEQAKGALMNALLEYSFLVLYPINPATAARYRQAFKTSRAKDDPSDAQVCLELLLHHREKLTPSLVNDGATRELSRLLEARRSLIDLRTLLINMLRDALKSYYPQALELAGQDLFAPLGCQFLLKWPSLGQLQKARSESVRKFYYAHNCRRMDVIEKRLHSIASMIPLCRDPALIEPAIVQVKMLARQLLQLGIALKEYDSRIEQLFVQHKDASIWESFPGAGPTLAPRLCCAFGNERSRYQRALAIQQYSGIAPVIERSGKNQHWVHRRWGRPHFVHQSFFEYASQSVLHCSWAKVFIQDQIARGKAYPTAVRALAFKWQRIMFVCWRDRLPYNETIYLNSLKCRGSHLTSKLNHELPKAA

SEQ ID NO: 415180 - protein, 265 aa, unidentified
MNQEVYVGVDISKDNLDIAISVEKGSRRLNNNTTGIRKAVEYLRGISPILVVFEATGGLELPFWQELTEAGIAAAPVNPRQIRNFAKAKGVLAKTDTIDAQVIAQYASVMQPQPQVFPDTQELKEMIARRSQIIEMLTAEKNRLKAARKTKIQQDIKANIAWLKSRLEGVDKDLEQAIKSNPEWRQRYEILESTPGIGNITAISLVAGFAELGEINRHQAAALAGVAPFNRDSGVMRGKRMVSGGRSRIRTALYMATLVATRYNP

SEQ ID NO: 415181 - protein, 408 aa, unidentified
MQVLYPRCAGLDVHKDTVVAWVRCVSEPEHHETRSFATTTRELLALGEWIASHGCSHVALEATGVYWRPVWHVLEGQVELVLANAHHIKNVPGRKTDVNDAMWIADLLAHGLIRSSFVPPQPIQELRDLTRTRKQVVREISQHSLRIQKVLEDANIKLGSVLSEVLGVSGRAMLGAIIEGERDPHKLADLAHGTARRKHDALVEALHGHIRPHHCTLLKLHLNLIIALEHTVAEVDAAVGKCLDPIRQCVCLLTTMPGVRDTVAEVIVAEIGIDMTRFPTPGHLVSWATMCPRNDESAGKRRSTRLLKGNNWLKTALVTAAWAAVRTKTSYLRAQFLRLKARRGAKKAIIAVAASMLTAAYFILRDGVPYRDLGPNHFDRQQRGKTVRRLLRRLHDLGYNLPPQHQPV

SEQ ID NO: 415182 - protein, 360 aa, unidentified
MPSIALERSDVIVGVDTHKDEHVAVAIDGLGGTLGAPLFVAASPDGYAELLAWADSLGKIYAFGVEGCGSYGCGLARFLRRQDQKVNEVARPRRTDRRLAGKSDALDAEHAARAVLSGAGNATPKLADGKIEAIRLIKIARNTAVKAHSATLITLKAVLVTASDELRGRLESLTDHKLVVACAAFRTHESVSDPEAAMRHALSHLARRWLGLHEEIKVHSDHLKVLTKAVAPQMLERFGIGFDTAAELLMTAGDNSDRIRSEAAFAKMCGVCPIPTGSGKSSGRHRLNRGGNRQANAALHRVVIARMRWHAPTIAYLGRRTAEGLSKKDIIRCLKRFVAREIFQLLPAPSNGSQSNQLAA

SEQ ID NO: 415183 - protein, 347 aa, unidentified
MRFYNTNHQHYCGIDLHARNMYTCVLDQEGKALLHRDLPTNGDVFLKAIAPFRENLVVAVECIFTWYWLADLCAREGIDFVLGHALYMKAIHGGKAKNDRIDALKIATLLRGGMFPQAYVYPPEMRSTRDLLRRRLKMVRQRGHLLVHIQNTHYQYNLPTPKARLNYRCNREGIAEKFSDISASESISSDIELAGHYDLLIKNLELFLTRKAKVHDPGNFFRLRTIPGVGKILAMTMLYEIHDIARFERVQNFASYARIVKCEKSSSGKRLGTSGAKIGNVHLKWAFSEAAVLFLRANPPAQRYVEKLRKKHGKAKSLSILAHKLGRAVYFMMKNNKTFSIEAFRMA

SEQ ID NO: 415184 - protein, 463 aa, unidentified
MTPRKEKNLQMPVVQEALTITHPHAAGIDVHSRKHWVAVPPDHVPTPSADAAKDLPYVRQFDTYTADLEMLADWLQQCGITTVAMESTGIYWIALFELLERRGFEVFLVDPRQTKHAPGRPKTDRLDCQWIQRLHSFGLLTASFRPEDQVVVLRSYLRQRQMLISHAGQHIQHMQKALELMNVKLTEVVNDVTGMTGMAIIKDILAGQRDPLKLAKHRDCRCRRTEAEIARALHGNWRDEHLFALQQALELYEFYKRQLAVCDERLAAYLKTFDDRSDGKPLPAKRRLNPRQANMPAFDARTGLYRLAGVDLTVVEGISERTALVILSEIGRDMSKFPTAKHFVSWLGLCPQHQSSAGKIHSRHIRRGTNRAALAFRLAAQGCHHAKTAIGAFYRRIQARAGGPKAVVATARKIAERVYRLLKYGKEYVRQGADEYETTYRLRLVKGLARKAEELGYKLCPVT

SEQ ID NO: 415185 - protein, 396 aa, unidentified
MQRVAGIDVASQTHVVVVMTEADQVLVKPTSFGEDATGYDKLFQLLGPPTEILVAMEATGHYGRNLFAALCERGYPVAVLNPLRTRRFAQEDLRRAKSDSIDALGIARFALQKRPQPTPTFDEPTGQLREFMHLFDRLTQDYGDRLRQLHRLVCLCFPEFTRHVPSLSSQRATAILAAYPTAEAFSDSCLRKLAGLRYDGRHAVGPTLAHDLVDAAKVSVGRHHGPAYRTEMEYLCQDVDRLRSKLHELHAEVDRRLGEHPVASLLATIDGLGVTTVARLVAAVGDPARFRDGAAFAAYAGAVPGTYESGLRQGGSASLCPLGNARLRSALYMTTVAAVRLNPWLREFYQRLRARGKPPKVALLATMRKLLMAVYSVAKHRQPFVPRMRSNSGPSK

SEQ ID NO: 415186 - protein, 342 aa, unidentified
MTQYSSFVGVDVASGSFMACVGTAPWKLTVKPVKFDNHEDGFASFLTWLKNNSLPPEKTVVCMEATGVYSEGLAYFLFASGYTVAVEPPLNIQRKFPANASKTDELDCQYIAEYACRYMDKLAFWKPRADILEKVKVLLTTRQHFSVQLTGHKNALIAVIRKKVTSELAQQVHQNMIEQINKHIKAIDQEIRRLIDDDPTFKQTFLLLLSVPGIGLQLAAHLLIHMQETLDPKVLAAFIGICPIKHESGTSIYSAPTSRHYGPPVMRKLLYLGACSVRTHKKQFQQYFFRKVAEGKHKKVVLNNIENKILKIACAVVRSQKQYIPNYVSVNPQVFQKTLTAS

SEQ ID NO: 415187 - protein, 334 aa, unidentified
MSSIAHTRQVTVTRIICGVDIASRSVEARVGQQGAAGSFANNPEGIAALEAFCRAHQVELVAMEATGGYEQQAFAQLSEQGLPVAILNPRAVRQFAQSMGSLEKTDRIDAGMIAWYAEVKKSRPVCPAPERQQHLRALVTRLRQLTEMRVAQVNQQRLVTDRAVQSSFKKLLAVLARQIRELEQRIAALLDQEPLWRELNQAFRTIKGVADRTVARLMAEMPEIGVLSNKTISKLAGVAPLARDSGQHQGRRAVRGGRATVREILFIVASVVGRYEPDFIAFQQRLRAAGKPSRVIRIALAHKLLVRLNAKAREVRQRLQLSNPLPPAVPAGSL

SEQ ID NO: 415188 - protein, 413 aa, unidentified
MDIVYSRCAGLDVHKETVVATVRRRLDNGRVQQRTRTYGAMTEQLLDLADWLEAEGVTHLAMESTGVYWKPIWNLLEERFQIMLVNAQHLKHVPGRKTDVKDSEWIAQLLQCGLLRGSFVPPPPQRALRELTRQRRQLVHGKAAVANRIQKVLEDANLKLGSVATDVLGVSGRDMLRALVAGEQDAAKLAELARGKLRAKIPALRLALAGRVTEHHRFLLGLLLDELTHLEGLIGRLTARISEVLPAPFAEAIQRLATIPGIDVRAAENILAETGIDTDVFPSAGHLASWTGMCPGQRESAGKRQSGRTRKGNQWLRTTLVQVAWAASRTKHTYLSSQYRRLVSRRGKKRALVAVGHTILVVIYHVLREGTTYSELGADYFDRLDTERLTRTLVRRLERLGHEVVLKPKEPAA

SEQ ID NO: 415189 - protein, 357 aa, unidentified
MSSNLKKYIGLDVHKDATSIAVLNGVGKLVMESIIETKAATLLEFLYGLRGELHVTLEEGTWAAWLYDVLKPHVEEIVVCNPRRNALLKEGSKSDKVDARKLAELLRAGLLRAVYHGENGLRTLRELARSYLTVSKDQARVMSRLKALYRSWGIPCSGRQVYAPRYREQWLSRIAQPGVRRRAELFYQQMDGLSVVRHTVRGELLAESRKHQAVKILRQIPLIGPLRAALLLALMQTPHRFRSKRQLWTYSGLGVETHDSAQHRYVDGQLQRSKKPQQIRGLNQNHNHEMKRIFKSTAMSASRCAGPLQDFYAALLAKGMKPEMARLTLARKIAAITLTLWKKGGHFDAEHLKSQAA

SEQ ID NO: 415190 - protein, 320 aa, unidentified
MKEVNFTQVVRRGCGIDIHRDIAVATIGGEGITTETRSYKTFSSSLTELKEWLIENGVTHVAMESTGVYWKPVYKVLEGPELKVWIVNARHIKYVPGHKTDKKDSAWICKLLLAGLLKPSYIPPKEQRELRDLTRYRNKLIQHNASEKNRIIRVLEDCNVKLDSVVSSTSGVTATKLIDKLVQNGAVTMEDIDEVYHRRLQASKEEIYLACEGFIDDHQKYLLQLIQKDIDQTQLLIDELSERIKNLLAPYDNAVERLKEIPGLKTKIVEDLIAEIGLDMEVFPTEKNLASWAGMSPGNNESAGKKKAPAPTTETSKSSQ

SEQ ID NO: 415191 - protein, 366 aa, unidentified
MSTTSITPDRVVIAIDPHKASWTAAVVDASQQPVATIRVPVSRDGYRALRRFANRWPDPTWAIEGASGLGAPLTARLRTDGIDVVDVPAKLAARVRMLSTGHGRKNDDADAVSVAIAARSARTLNSAAVDGAVTALRAIVEHRDDLVKTRTQTVNRLHVVLTNLIPAGASRDLTAERAAELLRGIRPRDTAGRTLRSLATDLVAEIRQLDRRIAKAAADIQTAVTDSGTTLTDLCGIGALTAGKILGRVGTINRFRSAAAFATYTGTAPIDVSSGDVVRHRLSRAGDRQLNLCLHVMALTQIRQDTSGRAYYLRKRSEGKSHKEAMRCLKRRLSDVVYRQLRHDANRLEAGPGGHSGAALSSSAAS

SEQ ID NO: 415192 - protein, 350 aa, unidentified
MIIIGCDYHPGFQQIAFVDTETGELQERRLQHREEAEKFYRDLAAQGARVRVGMEASGHARWFERLLAELNFELWIGDASEIARKRERKQKTDRQDAQHILRLLLKDDFPRIWVASWENRDLRQLLWHRHRLVQARTRIMNQLQAVALNEGLRCKKRLWRESGREQLEAFRLAPWASQRRRDLLELLDRLDPTIAQLTQAIEQEVEKWPDAQRLRTHPGVGSLTALAFVLIIGRADRFQCGKQIASYLGLVPLEKSSGNQRRLGHITKQGNALLRFLLVEAAQVTVRSLPEWRSKYFHLTMRRGRKIAKVAMARKLAVQMYWMMRKAWDYEQLKKFGSHAGQPGHRYGVQ

SEQ ID NO: 415193 - protein, 343 aa, unidentified
MDQFAGLDVSVKDTSVCIVDETGKIVREVKVASEPDALLTVLKNRTYHFKRIGLEAGPLSQWLYSALAEAELPVVCVETRHMQAVLKAQINKTDRNDARGIAQMMRVGLYRPVHVKTLRSQKLRMLLTHRKLMLSKAIAIENDLRGTLRNFGLKVGMVGTVKFEARIKELIENLPDLAVLVEPLLVVRRVLREQIGILHRRLLVIVRDDAVCRRLMTVPGVGPVVALTYRATVDVPARFRNSKAVGAVFGLTPSKYQSGEINRTGAISKCGDEMMRVMLYEAAQVMLTRTNKWSWLKAWAMQIARRRGLKKAIVALARRLAVIMHRIWVDGTEFRWTREAAVA

SEQ ID NO: 415194 - protein, 410 aa, unidentified
MEGAVAGPGPEPTRFVALDVHKQYVMVGAVDARQEVVVPPRRVALVEFPEWARDHLTPADAVVLEATANAWSLYDCLTPLVATVTVAHAGVIKLIAHARVKTDRRDTLHLARLLAARMIPAVWVPPVEVRELRGLITHRRRLVAQRVQAGNRLQAVLHRHRIVPPAGKLFSRQNRAWWADLPVSTAERLRVRQDLALVETLDALVVEVEAELGRLSTTAPWADQVPYLVQLSGLGVLAAMTVLAAIGDIARFPTPKHLVGYAGLGAGVHDSGQTHQGGRITKQGRRELRGAMVEAAWVAVEHHPHWKEQFARLSARLGAQKAIVAIARKLLVVVWHLLTKREADRAGNPEAIARKLYTWISRCGTTPGRQRPLGALVRRELDRLGIGAELTVTGYGRCSLPPPGVAPHAG

SEQ ID NO: 415195 - protein, 349 aa, unidentified
MTEQRRFYAGECVYVGVDVHKETYTVTCVCHKQIVKTATVQAEPAGLAARLLRWFPGATLYSAYEAGFSAFVLHRVLTTAGITNIVVNPASIAVAANDKVKTDRRDAKKLAIDLADGRLRGIYIPTEAEELARLLPRTRAQIVEHRATIARQIKAKLHQFGLIAPSSRRMISHRYLREIAAWSLAPELRVRLTLLAEQWRFATRQLIEIRRLLQEQAAAQAELEKVYRSVPGIGAVVARTLATELGDMTRFANERALFSYTGLTPSAYSSGASVRRGHMSRQGSGRVRHLLIETAWRALPRDRVLQEIFDRIAATRGKKRAIVAIARRLTGRIRACFRQGTTYAVGTYA

SEQ ID NO: 415196 - protein, 338 aa, unidentified
MKLYGAIDLHSNNNVTVLIDEQDQVVYQKRLPNDLPLIAQQLSGYQDALQGIVVESTFNWYWLVDGLMDQGHRIHLANTAAIQQYEGLKYTDDHSDARWLAHILRLGVLPQGYIYPKEERAVRDLLRKRGQMVRQRTANLLSIQNLITRNTGSSIRSNRIKTLDAEQVDDLLPNSDLALAVKANLAMIQCADGQIDILERTVTDRIKLRAAFGFLKTVPGIGQILALTIMLETGEIKRFPTVGDYASYCRCVGSQKLSNGKKKGSGNTKNGNKYLAWAFVEAANFAIRYNARIKSFYQRKKAKSHGVVAIKAVAHKLCRACYYIVKDQVPFDIAKAFA

SEQ ID NO: 415197 - protein, 357 aa, unidentified
MPSLNHRKGTALAIVEDTRAITVGVDTHADRYVAAALDRLGGLLGVREFPATAAGYADLLDWLSGFGTVALAGVEGTGSHGAGLARHLAAAGVRVVEVDRTDRQDRHRPGKSDPLDAVSAARAAQSGRAGGAPKGRDGSVEAIRALMVAKRSARAERTQAINQARALIVTGPEELRGRFARHTPAQLVAGLAAMRPWPGDVPGYATRVALRELGRRARFLDAQIGHLDELIVPLVTGRAPGLLARHGVGTDTAALLLIAARDHPQRLRSEAAWAHLCGAAPIPASSGKVTRWRLNRGGDRQASHALWRIVITRMSSHPATRAYVARRAKEGVTEKEIIRCLKRYVAREVYPYLRDAR

SEQ ID NO: 415198 - protein, 348 aa, unidentified
MKKNITIGMDLGDQSHVVVVLDKDGDEIEMRTISNNEFSLVEFFSRYPKATVAIEAGTHSPWISRLLEEIGCKVYVGNPRKLRIIWDCNDKSDKRDARILAMVCRVEPRLMWPVKHREKQAYADLGVIKARDALVQNRVRLINHVRSVTKTCGYRIPKCSTPSFSKRAPDHIPPELEDSLAPLLLTIDLLTQQVKELDRQINKLCLKYPETKSLLQVPGVGPVTALAFVLTIDDPHRFIKSRQVGAFLGLTPRRDQSGKCDKQLRISKAGNTYLRSLLVGCGQYIIGPFGPESDLRNYGISIIVRGGKNAKKRAAVAVARKLTVLLHRLWVSNQSYNPFYKNVAQDAA

SEQ ID NO: 415199 - protein, 428 aa, unidentified
MNEGERIRLEDFRQLKKEIRGSERHLIVGIDIAKHQHKAFFGTATGKTLLRVLVFENTIAGFNRLRSRTEALKVQHCLSKVIYGMEPTANYHKPLAEYLIKCGHHVVLVSGVAVNKNRELLDGRWDKHDTKDAANVADLISQGKCLYYDYPSGRLRDLRSLLSLKRRLKKQEHGVKVRIRNHLLAQYFPEFDRYFAKGCSESLAIVKWCLHPSMIAGMEYDEFIEVVAPRMKTLGQEKRLKSIWELAIDSIGCDGGQSLNFEAKLMVEALQQTRDSIRAVDEHIEAICLHFREYRYLLSIPGFGPDISSKVLGAIGNPFRFNSGKQVLKLTGYDLSAHRSGKGSDSAVPVISKRGKAYLRYALYQAAFIASTSNRHFIAYYTNKLRGREREKGIRTKMRVKLAAKMMIIAWTLMKNKEPFDPAYLNRE

SEQ ID NO: 415200 - protein, 346 aa, unidentified
MTIVETRPITGGVDTHLDTHVAAALDANGGVLGIESFATTPQGFSALHGWLAGFGPVARVGVEGTGAYGAGLARHLRGEGLEVIEVDRPNRQLRRILGKSDTVDAVEAARAVLSGRARGVAKTADGNVEAMRALLIAKRSGREARITCLNQLRHLGFCAPDELRERFRGVPRDQLADAAVALRPRTDSDPVTYATKLAMRTLARRVLTLVKDNNALDGILAELVAATAPRLLELYGVGIDTAAILLVAAGDNAERVRSEAAWAHLCGVAPLPATSGKVTQRHRLNRGGNRQANHALWRIVFTRMASEPRTRIYMQRRLDEGLSKPEIVRILKRYVARETYRHLPRT

SEQ ID NO: 415201 - protein, 422 aa, unidentified
MLAESHDEEQIIARVAALDIGKAELVCCVRVPAPTGGKGRLQEVSTHSTMTKSLTELANRLVEMRVERVVMEATSSYWKPVFYLLEAHGLDPWLVNARDVKHLPGRPKTDALDAVWLCKVAERQMLRPSFVPPWPIRRLRDLTRYRTDLVAARTAEKNRVEKLLEDACIKLSVVASDIFGVSGRAMLAALVGGERDPKVLAQLARARMRGKIDRLEQAFDGHFADHHGFLLSRMLSRIEALDADIAAVDAQIAAQLAPFAEAAAHLDEIPGIGPVAAAAIIAEVGVDMSRFPTAGHLCSWAKFAPGINCSAGKTKRSASSGHGSPYLARVLGEAAVGTSKTNTFLAARYRRIARRRGQPRAVVAVGRSILVIIWHLLHDPDARYQDLGVDHYTQHVDSSAKKRNHIRQLEALGYTVTLTPAA

SEQ ID NO: 415202 - protein, 315 aa, unidentified
MTSSDERFVGIDASKRKNDVHVHGLADESQYHNDAEGNRDLVDSMLQLSPALIVVEATGGYERLMVAELSAAGLPIAVVNPTRVRRFADSLGQLAKTDKIDARMIAHFASVVRPPVRTLKSEEEEYLGEVLDRRRQILNMQTAEKNRLHTSRGRIREDIQEHVDWLTCKEKELNKEIARLIQGNQEWSEKEALLQSVPGVGPVTAATLLADLPELGTINRQKVAALAGVAPFNKDSGKKRGKRRIFGGRSAVRRTLYMAALSCSRHNPVIKRFYQSLLDRGKEKKVALTACMRKLLVILNAMVRDQQAWHHIPAD

SEQ ID NO: 415203 - protein, 404 aa, unidentified
MNNVAGVDVSKGKSVVSVLRPFGEVVAKPFSVGHTGSELKELADYLKSLDGETRVVMEHTGRYYEPVARFLHEEGIFVSAVNPKLIKDYGNNTLRKVKTDKADARKIARYGLDNWVELRQHTPMDTIRMQLKTLNRQQGLYSKTKTMMKNNLIALLDQTYPGINALFDSPVREDGSQKWVDFATTFWHVDCVRAMSLTAFTERYRKWCKRHGYNFSQSRAIEIHMEAQDLIAMLPKDALTKTMIRQAIDALNAVSKSLEQLKAEMRTLAAKLPEYPVVMAMRGVGDSLGPQLIAEIGDVTRFTHRGAITAFAGVDPGADQSGAHEAKSNHTSKSGPPELRRALFLVMDCLLKTQPEDDPVYRFMDKKRSEGKPYLVYMTAGANKFLRIYYGRVKEYLASLKNAD

SEQ ID NO: 415204 - protein, 356 aa, unidentified
MDETARADVIVGVDTHKHVHAAVAIDALGARLGATTVPVGERGYRALEAWARSLGPIRAFGVEGTGSYGAGLSRFLVAQGHAVLEVNRPDRQLRRRKGKSDPLDAESAARAVLGGQATARPKSGTGTVEMIRHLKVARDTAVKGRTQAMVTLKAIIVGAPAALRERLDRITGKMALIRHLAALRPGPITSTTASAKASLRAIARRWLALDEEIRGHDAHLERLTAARAPELVRAHGMGPGTAAAMLLLVGDNPERIRSEAAFAKLCGACPIPASSGKTTRYRLNRGGDRRANAALHRVVVTRMRGHQPTLDYVRRRTGEGKTKPEIMRCLKRFVAREIFGYLCATPKPAAPSIEAA

SEQ ID NO: 415205 - protein, 385 aa, unidentified
MALTPATQTSPYRDPRCLYMAIELSASKWRVAFSAGGQRIREKTIRAGDRGKLLGEIWAGKKRFGLAEDAKVLSCYEAGRDGFWVDRLLRGLGVENVVIDAASIKVDRRARRAKTDKIDARQLLADLIRHHRGEKDVWRVVRVPSEEQEDKRRLHRDLERLKKEKTQHRARILSLFATQGVQPCNLKAVLAELDAVRIWNGEPLPPALKAEIERERDRLRLVEDQIRAITKGQRDQLKQPNSPELRMIKMLAMLRGVGIDSAWILVMEFFAWREFSNRGQVGGAAGLGGTPYNSGSTKNEQGINKAGNPLVRTRMVELAWLWIRLQPHSELSQWFMRRFAGGGSRMRRVGIVAVARKLLIGLWHFVEHGAVPRGAIIDFTESSAA

SEQ ID NO: 415206 - protein, 330 aa, unidentified
MKNYDEVVGIDVSKKTIDAYCYWAQVHKAFVNDLIGYKSLLKWVLKHTKGGSVFYCFENTGYYSLKLALYFDSQAIVYVEESPLKIKRSSGIVKEKTDKIDASLIARYAWLYREELSPSTVKSKSHLELGRLLALRDQLVRNNAGLKGTLKEMKVLLSSPTTDFGCITLKRSIDYLEKQVKGIEARIKEIITADASMSKNYELLSSLKGVGLVVACQLIYHTGNFTRFESWRAFSSYCGTAPFEHRSGTSIHRRKQCHYLGDRKMKSLLSMASVSAIQHDSELRLYYKRKLAEGKDKMLAINNVRNKLIARAFAVVKRGTPYVVLQQHAA

SEQ ID NO: 415207 - protein, 363 aa, unidentified
MNIELYSELSSLEETRCQFNGTKADIKLGIDVHQEFYVVVMQQGGSNPKPPQRFHKEVFLHWASKLRAQGREVHAVYEACGFGFGLQRKLTALGIHCYVVCPQKLDEQNKRVKTDGLDARALCLKLDRFLQGNRAALALVRVPTEQEEQLRAIHRQREQLVKARKVLEAQGRSLIVNHGLEPVQQWWKRRAFAALSVPQWIKQLLGNSQPIVLALQEKIDQLTLQLQNAATQEPPRGLGKMTSVIIDREIGDWHRFNNRRQIASYTGLCPGEYSSGGKRLQSCVTKHGNPRLRAALVELAWRMVRFQPHYRAVRKLNEHLRKGQLTTGAARKKAIIALARELAIDLWRIRTGRLTPEQLGLEI

SEQ ID NO: 415208 - protein, 417 aa, unidentified
MKKRTYRSIEIKKINWYELKEYLSCEKIAVAIDVAKQKQYAVLINMDSSVSRLFHWQHPEQTAQMFDAIVALDCPITVILESTSTYGDIFRYQSLLRGFDVHQASAKRVHDAKEVYDGVPSLHDAKAASIIARFYLDGLTKPWRELNDNERRLNALRREYEIHQGQYQRNQNRLEAYLSRHWPEVTYLLSSHSVALEQLLMKYGSPVEVAANAKEAQQVIKKASRSMLKPEKIAAIVQSAKTTLGVPCIEAEKQYLRALAAEMNHSRLRRRTARNALEAEIDSDEQLIEMAKLIGKVTTAVLLSFHLDPRNFECARSLQKAMGLNLKEKSSGRYIGQLKLTKRGSSKIRMYLYFAALRLIQKDPVIKSWYQSKVNPKAKNKTVIAVMRKLSKALWHVAQGQAFDANELFSIPTKKAA

SEQ ID NO: 415209 - protein, 400 aa, unidentified
MSKNVSPLELRVGVDVGCYSHNVAIGLSSGEILDEFEVSHNPEGFHLLFSRIEKQQLKYDCPVSVAMEGFNGYARPLDTLVRGRDYRLFNVNNMKLARFKEVFPGAAKTDRIDARKCLELFQLRDILPLAKDALQEVAATPVENEILKRLTRRRRRLVKERARVLSNMQGDLQAVCPGLLEITGEAGNLWFLRLLTSTDSLIKLAKLRRVTLLKIAGVGAKYATTIQSWQKRAHFSHEAELVGEMIQEDAFRILELTDKINVIEAKIEDVTSRSMIAQKISTIPGFGPVSKSELAGEVGTIDRFKNEAGLALYLGMAALDNSSGKQKGTKTPKHVNIRAKAAMMVAVDRHRKCVPESQHYYEKKRAEGKKHNQAVRALGRHLCRVIFKMLTQEKDYEIRK

SEQ ID NO: 415210 - protein, 507 aa, unidentified
MHEKTFKQVSLSDLIRDPELRLQDFDEIPDDESEYIKEYGIGIDCHSKFIEVCVRYRNQDLIMKSQARFDTNWNSLISARDWCISVLKEKANPTPDLSKPLHYLVESTANYHMPICMAFEGDPTIINPTLAGATKRKTDVLDSQLLALHDQINIWREYYMPSEDVKALRVMIAERDRQLHDATAAGNRINNILIRFGFTIGREGSVVKNQNVRAIVENLISDTPSQIEDTCPIPLPIDVRLILREEYKKYDYYTEQAGKEKTKILEKARSMEWETDTGTMSGDEMIRILMTAPQVGEMTAVIWLARVITPRRFRNAKALSAYCGLDPSLKISANKVTSTIKRGGCKDLHKALNMSAHRLIHNHNEMFGIWGYNLQQQTGKKKKAANAVSRKLSVAMYYMMKTGTEFSYDNYRSIRNIDVFDIPVEELVLINSDFKRYIRVLKENGINTTVDLATAYITCSLGSCTGLGKKFFGLLKDFLDHHVKYKEMYDEIKENLSKKEDHLNEQT

SEQ ID NO: 415211 - protein, 336 aa, unidentified
MYVGLDVHSRSSFCVVMNRAGEVVAQAKLENSMQAFTEFFRPFVRPMEVAVEATTDAYYIADMLYKLGLTTRLAHPRRLRLIAESSSKTDRHDAFILADLLRMGRLPEAYLPSAETMELREVSRGRQSLVRERTRFKNRVSALLRRQGCSCPVKDKFTKKGREWIAELELPRSIRMVLNTQLTVIDVLNAEIRKLDNELRKFARHDERIQRLMRIPGIGVVFAAMIVAEIGTISRFPSKIGFVAYCGLAPIVRQSGEKTRRGSLRHDCNHWLRYAFVEAAHSCARTKGAYARYYSDKAQERDSSVAAAATGRRLSRLVFAMLWSGQEFQPDRSRAA

SEQ ID NO: 415212 - protein, 356 aa, unidentified
MPPIAPADVVVGVDTHKHVHAATALSGLGARLGTITVPASAEGYRELEAWACSFGAVHAFGIEGTGSYGAGLARALAGRGHAVIEVNRPNRQLRHPQGKSDPLDAESAARAVLGGQATARPKSGTSTVEMIRHLKVARDTAVKSRTRAMITLKTLIVNAPAPLREQLDHLSSRMALIHHLAVLRPGALTSTTASTKVALRALARRWLALDAEIKEHDLALDALTDACAPGLKRAHGIATGTAAEMLILVGDNPERIRSEAAFAKLCGTCPVPASSGKTTRHRLNRGGNRQANAALYRVVITRMRSHPPTLAYVAKRLAKGRTKREIVRCLKRYVAREIFGHLCGPKLRAACRPEGA

SEQ ID NO: 415213 - protein, 341 aa, unidentified
MKSKIPTDRYFRQCVGIDVSKNKFTACMCMLSWGCPAQFTEPIEFVNTKTGFNQLVKWARKEAEKGQPLLFLMEPTGTYYEDLAYHLHKLSFTVFVIPPGRVHAFFKEEGIKTKTDFVDARGLALMGSCKPALKEWNPPSRAYRELRQLTRLQVHFKDIRTMLINHKEALSHQHAPSPDAVSQINALIKSVDLRIEKNKASIEELAGNTPEIKEKLGYIQSIKGLGFLAAITILAETDGFANMSSRSQLASFAGLDVVAKDSGKSTPSRHISKAGNTHLRRITYLCALSAAVYNPQMRALFSRISQRNPSKVALVAVMRKLLLLAYTLCKSEQMYDPEKIK

SEQ ID NO: 415214 - protein, 319 aa, unidentified
MNRNNFIGIDVSKNKFDVCIVKNDASTIQKIFNNTLSGFKEFVDWLKKYSDKPWECMEATGHYSEILADFLVEKGLTVSVVNPVQIKYFAKVKLSRNKNDKVDSAIIAEYCRLMSSRLFKPRSSEQKYIRELIQLEDTLRAQSTQLKQQLECTQSSAIKKEFKTTIKLLDKRLDKLSEKIKLSINKDKEMSHVVELLTSIKGFGELSAYRLLAYLPDINLFNNAKQLAAFIGVSPKQKESGKYKGKTQLSKLGNSKLRNIIYMPALSAKSHNKALQPFVKRLQANGLAPKAIVGAVMRKLVHIIFGMLKTKSSFNPSMV

SEQ ID NO: 415215 - protein, 301 aa, unidentified
MEGSPAQSPATHSPVATRPVAFVGIDLAKQSFQAATDADTPAARFNASFSYDAAGMAQLLERLKTFEVALIVMEATGGLERKLAAELSDAGHAVAVINPRQARDFAKALGTLAKTDKVDAAVLAQLARILKPQARPLPSAEQIRLKDLAARRRQLIHMRTQELNRAQQATLKDVSKSIKHLITTLDREIAKIEKQVADLIDSNSDWKKKVDLMDSVKGVGIDTAHALLAELPEIGTLSKRQVTSLAGLAPHAFESGQFKGKSKIWGGRATVRSALYMGTLAATRCNPAIKRFYDRLLADGK

SEQ ID NO: 415216 - protein, 398 aa, unidentified
MSKAFIGIDVSKEHSTAQGIDSDEKKLFYLRFSMDAAGFAELRTAIKGCAVNLDDIAVAMESTGCYHINLFSFLCAEGLRCAVVNPLLISKFVQGSLRKTKTDKKDAMTIAQFLLINEKKLCVVTSSQDAQDLRDLARERESQSWVIASLKNDLKRLLQSTFPELETLRKNIYTETMLNFVRQYPSARLIRQAKRKDIDKALICPGEKRKRVQITADDLIAAAKRSVGSAGTAKELIVSEKATTILYLQEKCEKITEALVDACEATRIEDFEIIKTLDGVKDITGSTFLAEMGALSNFKSYKSLIAYMGFDPSTNQSGKHVGQSKISKRGNRHMRRITHIMTLGSIRSDNIFREYYLRRIVEGLPKMKALMATSHKLIRVIFSMLTHRMPFKKEVAAV

SEQ ID NO: 415217 - protein, 362 aa, unidentified
MDTMPQPDEFVIVGVDTHADSHAAVVLSLLGAVLGAKMFPATRAGYARLLEWAATFGPIDRIGIEGTGSWGRGLSLFCLARGLEVRDVDRADRRTRRARGKTDLIDAETAARAVLAGTASTLPKTGDGPVEMIRVLHNTRETAVRARTQAINQLRASVVTAPLELAEQLKGLPRRKLIAIAASFDVTTPITDPTGATKFALRSLARRIEVLTEEIGQLETQRDRIVDAAAPRLLDLDGVGYHSAAILLIAAGDNPDRLRSEAAFAKLCAAAPKPASSGKTNRHRLDRGGNRQANRALHTIVVARLRWPDDATRNYVTRRNPNGECKANLDTIRRLKRYIAREVYPVILDALATPPEELLTAA

SEQ ID NO: 415218 - protein, 458 aa, unidentified
MAVVMIGVDPHKASHTAVAIDTAEEQLGQLRVRACAAQADQLLGWAQAWPERTWAVEGAGGVGHLLAQQLLAAGERVLDVPPKLGARVRLLATGDINKNDPNDARSVAVAALRSADVRDARRDDHAAVLKVWSKRHRDLGRTRTQVACRLHAVLCQLIPGGVPKAITATHAAHLLEMITPGDAVAVARRELAADFVEDLRGIDARIRETRMKLAAAVAAAGTSLTGLFGVGPVIAAAVIGDVRTVSRFPGRGHFAAYDGTAPIEVSSGPRKVYRLSRRGNRRLNHAIHMAAVTQIRHPGSKGRAYFDKKLAEGKTRKEALRALKRRISDAIYARLQADARRAGGPGGQPGNDSDSSAAGSHPGHRLFGQATPGPGHHPTTAASARGRAGHSPIAATSPPVTPQVQVERPQRSEDERPGGAARRRPHSATGKPSRPHPPAKPQRPKATSSSAKKTGRTS

SEQ ID NO: 415219 - protein, 436 aa, unidentified
MPESIPYLSVGFDVGADFTWMSIMLPNGILIGKPFKIIHSDPQSRELAISKIKEAQEMYSLESRCFLESTGIYHIPLLCFLRDKGFDCAVINPIITKNSTNMNVRKLHNDKFDSKKAAKVGLDASLKASIVPDDAIIDLRNLVRDYYYFKDLQSAIVLKLHAELKVSFPAYLNVFSKVTTQTSLKLLEAYPLAADMLAAPKDELVEIIRSTARFGETYALARYDAICTAAKDAAVFGRALPSNALRIRLYIKMYREYQAHLDSILEELHQAVGKLEGTPDYDRISFIQTLHGVGFLSAVVLIAEMGSFDLFSSPKKLYAYFGLDPGVNDSGKFHGDRVHMSKRGSSLARRILHMVAINNLKVDKATKTPVNPVIYDYYTRKCASKKKSVAVGAVMHKICNIIFAMLRDNKPFELITPEEHRERYAAEHPESVNTAA

SEQ ID NO: 415220 - protein, 313 aa, unidentified
MSQNNTNILYVGLDVAKLSLQLHLAGRFHLMANDTKGHAQLLRRLHGYPAAHVVCEATGGYEQAVVRTLQSAGVPVSIVEAGRVRYFARAQGQRAKTDPIDAAVLSAYGTTFKPTATAPASPQQQQLADLAQRRRQLIQLLVSERNHAEHYTDSFRVRQSRQLAKTLEKQITQCDEAITTLITQDTALARKAERLKAIPGVGPVVAATMLAEMPGLGCLTTQTAAALAGVAPYNRDSGGQTGVRHTNGGRAAVRCALYMATLSAVRHDRILKEFYLRLRAAGKKPLVAMTACMRKLVILMNRLLKNYDFQLAS

SEQ ID NO: 415221 - protein, 394 aa, unidentified
MILVGIDIGKNKHTFSIIYKGTGEILSSPAVFDNNQIGFLYLIKKLSNYAKSELLIGMEDTGHYHFALLKYLLDNRYTVALINPTTTDLTRKIQGGITKNDPLDSLTICDVIDSNQRKKPYRITKVNRFDLYEQKQLTRHHHNLKEELNLYKNRLQKCIDIVFPEFNSLFRSKYGIVYMNVLKTFASAENIAAADIRTIRKCFECKGRGKHISLSAEQLKAVAKTSIGIPSVSEEIQIRHLVCQIEMIEGQLSEIDKKIEEFSLQNNSPILSIPGISHFSGTSILAELGDICNYTKAPQIIKFAGVAPYHYESSQFTAPHTTITKKGSRYLRKTLYQIILPVINHNKVFTAYYNKKLAEGKGHRCAQGHCVRKLLRIIYHLLSTGQTFDPNLLI

SEQ ID NO: 415222 - protein, 514 aa, unidentified
MQQTQQITQQIIIGVDPHKLSATIEVVDDRERFLGSGRFTTDRAGYTAMLTYAKAWPERVWAVEGSNGAGRPLAQRLLEAGEQVVDVPAKLAARVRLFDTGHNRKTDALDAHSIAVVAVRTEGLRVLKVDGELEALRMLTDRRETLTRRRVQTVNRLQALLAELLPGQAKKDITPLQAKALLASVRPRDIAGKTRRRIAAEELAELVAVDAKIKKATAELKAIVLARGSRLMDLRGVGPVVAARTLADVGDVTRFADRNRFASWTGTAPLDASSEEQNRHRLSRAGNRRMNHMIHIAAISQIRLDTDGRAYYRRKRAEGKKPLEAIRCLKRRTSDALYRQLLADHQRAAGGERGAGPGGHCGATQESSAVDLPPHIDTSDQPLPDPRNRRYAQHRRHGRPPEATPSSAPLDNRREPERRKGVALIIESCAVPTPPSTAGSSPACARVGEVGLDGRCVPCSNAGRGASDPADGYAPLAEGRGSAAPHHSQQGHTHAIRRLAAAANIMTGSTLPHH

SEQ ID NO: 415223 - protein, 417 aa, unidentified
MPPWSTSGPVSVARCPVSSWPVSLWPVPLWPVGKARLPEGVAGVARLHELVAEHLGEQGRPEQVVVGIETDRGPWVAALVAAGYQVYAVNPLQVARYRERHCTSGAKSDAGDAHTLADMVRTDRHQLRPVAGDSGAVEGVKVLARAHQNLVWERTRHVLRLRSALREFFPAALAAYADLDAPDTLELLAAAPDPAAAAGLSLEQVAAALRSARRRGVPGKAAAVVAALRSQQLRQPAALSAAYAASVRAQVAVLSTLNAEIARLEGQLEADFGQHPDAEIYLSQPGLGPVTGARVLGEFGDDPDRYADARSRKNYAGTSPITRASGKKKTVLARYVHNDRLLDALYRQAFSALSGSPGARAYYDALRARGTGHNAALRQLANRLVGILHGCLKTRTRYDETKAWAHHTGGTEQKAAA

SEQ ID NO: 415224 - protein, 419 aa, unidentified
MSFKILKFNCCGLDVHKTWIYACIGITDSNNRTEYKQARFSSFTRGLNELCDWLAKYNCKDVCMESTGKYWIPVFNILEQRSLWVTLSHPKYTKPMKGNKTDRKDAKWICDLYMCGMVKPSFIPPADIRELRDLVRYRFKLICMITGEKNRAQNCLTVSNLKLDDVFSDVFGKSSRSITEQILQHPGENFDVVPFVDGRCKTPVEEIQAAVDGAISKEQAVKLRQCLDHIDELNQHISQVEQEILRLSDKYEAALNLIRTVPGFDKNPMTAIQVLSEIGGDMSVFPTAKHLVSWAGCCPRNDKSDRKIKSTRISRAGSYFKPVLVQIANALIRSKKHPEFTTRYQRIKARRGHKKAIIAICRMILTAIWHILTDLKPYTPDGFLELRPVNESKILTISQALNLMKQRGYIIKDDVVPVT

SEQ ID NO: 415225 - protein, 331 aa, unidentified
MDHCAIDVGGKKSQICVRNSGGTIQFEGAWETPALGDHLRQLPRCRVILETAAESFRIADQARAAGHEVRVVPATLVRTLGVGARRTKTDKRDARALSEVSTRIDLPSVHIPSARSREWKTMAGVHDALVSCRTKLINNVRGWLRGQARKPRSGVAETFAERVRRLGELPVYITSELKMIDALSEEIAASAKRFASVTNSDPVCKSLMTVPGVGPSTALRFVAALDVVTRFASAHKVEAYLGLSPGEKSSSERQLRLGITKAGSASVRWVLIQAAWILKTCCRAPAARKLQLWAAEVEKRRGKGVATVALARKLAGILFALWRDGTEFKSC

SEQ ID NO: 415226 - protein, 370 aa, unidentified
MKKNNKNRNEDARRKALQARSGNTRLTVGIDLGDEWSHCCYLDGEGEIVEQCRVKTTREALKASFGELKPALIAMEVGTHSRWVSQMLSEMGHEVIVANARELRAITGSDRKSDKVDAEKLARFARVDRRILRPLRHRGEQAQVDLLVIRGRAVLVKTRTQMVNSVRGMVKSFGYRMPKCSTEKFAQLKNLVPVILKESLEPMMEALEQVPKRIEEYDERVKKLATEKYPETKVLRQVWGVGEITTVSFVLTIEDKGRFEKSRDVGPYLGLRPRRSQSSESDPELRITKAGDCFLRSLLVECAQKILSEKAPDTALKQFGMRIEARGKKKAKKRAIVAVARKLAVLLHKLWVTGEVYEPFPGATARKAAA

SEQ ID NO: 415227 - protein, 366 aa, unidentified
MKKISTVQTFKSEIFKDQKLTIGVNLGDRWSFYCVLDEAGKIILEQKVPTTLEAMKQTFSRMPQSRIALETGTHSPWVSRLLTELGHEAIVAHAQKVQLITKSNRKDDRHDARTLARLARIDPELLGPVRHRSVQAQIHLTVIRARAELVSARTALVNAARGLVKSYGERLPKCGTQQVNRELAAALSTELRDVLEPLLREIESLNERIKEYDERMEKIAKEVYPEVSLLKQVKGVGTQIALTYVLTIENPQRFLKSREVGCFLGLKPGRRNSGESEPQKGISKAGDRYLRTMMVQGAHYILGPFGEDSDLRRWGLKLAERGGKNAKKRAVVAVARKLAVLLHRLWVSGEVYEPLRNSQKAMRAVA

SEQ ID NO: 415228 - protein, 354 aa, unidentified
MSQTSNAAIAVIGIDIGKNSFHVVGLDARGAIVLRQKWSRSQVEARFANIPPCLIGMEACVGAHHLSRKLQGYGHDARLMPAKYVRPYSKGQKNDFRDAEAIAEAVQRPTMKFVATKTADQLDLQALHRVRERLVSQRTGIINQIRAFLLERGVAVRQGQRFLRAELPRILATPPDVLSPRMARVIEDLTGDWRGLDERIEGLSEEIEAIARQDIGCERLMSVPGVGPIISSAMVAAIGAGDAFSKGRDFAAWLGLVPRQMSTGDRTILGKISKRGNRYLRVLFVQAAWVVLIKPKSWERHGLKPWIDAAKKRLHHNVLAIALANKLARIAWSVLARGRSFEARKIDGATAQPA

SEQ ID NO: 415229 - protein, 408 aa, unidentified
MEILYPRCAGLDVHKETVVASVRCVSEPRHNEVRTFSTMTKGLLELNQWLESHGCTHVAMEATGVYWKPVWHLLEGSFELVLANAQHIRNVPGRKTDVNDAMWIADLLAHGLIRSSFVPPAPIQELRDLTRTRKQLVREMSQHTMRIQKVLEDANIKLDSVLSSVVGKSGRAMLKALIDGEADPERLADLAQGHARKKHAALVEALRGRVTNHHRSMLKLHLQMIDAIESALREVDGHVGKALEPIQACAHLLTTIPGVSDIVANVIVAEIGTDMSRFPTPGHLISWAGLCPRNDESAGKRRSTRTRKSGTWLKTNLVTAAWSAVRVKATYLRAQFLRIKSRRGAKKAVMAVAASMLQAAFFMLRDGVEYRDLGSDHFERRDKTKAIGRLIRRLGHLGCQVEIKAVAA

SEQ ID NO: 415230 - protein, 422 aa, unidentified
MVEEIIEEAVELVARVAALDIGKASLVACVRVPHETGAGARREEVRTFATATRSLLELQDWLVAQGVSLCVMEATSTYWKPPFYLLEDATECWVVNARDVKNVPGRPKTDRLDAVWLAKLAERGMLRPSFVPPVWQRELRDLCRYRRTLTQERTREKQRAEKLLEDTQIKLSAVISDIFGVSGRDMLEALIAGQRDPYVLARMARGSMRKKISVLQEALTGHFRDHHGYLLRMMLDRVDALTAQTEALTARIEEVIAPFAHQVAQLDEITGVGRTGAQELIAEFGVDMTRFPTAGHLVSWAKYAPKARQSAGKNKPSTTGKGNPWIAATLGEAAMSAARTKTFLGSRYHRLARRRGKQRALVAAGNSILTIACHLLSDPGAHFTDLGPHWHDRIAPLRRKRQLIAELERLSGKKVLLQEGAA

SEQ ID NO: 415231 - protein, 408 aa, unidentified
MEVVYRCCCGIDVHKKIIVACLDQGGEQSLREFGTTTSEIKSLATWLTESGCEMIAMESTGVFWKPLYNLFELMDLDAMVVNAAHMKALPGLKTDMKDAEWIADLLRHGLLKASYIPSREQRELREITRYRKSLTEERCRETNRLQKILEGANIKLDSVVKDINGKSARKLLEKIIEDDVPTSEEEVSKVVHGRMRSKLGQLVTAIEGITTPLQRKLLAQVIDHIDDLTRRIADLDKLVQDYMDEYEAAIAALCDIPGIARRSAEVILAEIGLDMSRFPSAAHLCSWAGVCPGNCQSAGRRKHGKTTKGNKPLKTILTQCAKSARSVKGSYFSAQYQRIAARRGKNRATLAVAHSMLIAIYHMLKNSAPFRDLGSDYYDSFNRDRKIHSYLKRLKALGWEPDALPGSA

SEQ ID NO: 415232 - protein, 334 aa, unidentified
MSDITTVGIDLAKNVFALHGVDGSGRVVLRRTVRRERLAPLVAQLPACLIGMEACTGAHEWARQFAKFGHQVRLMAPKFVAPYRQSGKNDDNDAQAICEAVGRPSMRFVPVKTLEQQAVLAQHRVRQGFIEERTATLNRIRGVLAEFGQVLPQRAGEVRRGLAQRLEQLPSQVAAALQDLLSHVRVLDERIGAYDRELQQHARTEPNAQRIQQLSGIGPITASAIVASVGTAREFRNGRQFAAWLGLTPRQYSSGGKTRLGHITRRGDPYLRTLLIMGARAVLQSAARHTDRLSRWALALKARRGYHRTCVAIAAKNARILWVLLARGATLRMA

SEQ ID NO: 415233 - protein, 331 aa, unidentified
MKFKEVIGIDVGKLSNDAIIHSNQFSFTFENTKEGFKTLLKIVLKGISCDKEQILFVFEHTGIYSFPLSLFLTENGLSFVIVPGLEIKRSIGIQRGKNDKVDAKRIALYAFRRLDEIKPSVLPTKSLITLRRLLSLRDRLIIQRASYMKNVGENSKFLKKSENVILFQVQEKMVKEFSTQIKKIDDELAQIITSETNLSKQYELITSIKGVGKQTALYMIAYTNGFTLFSNWRKFASYAGTAPFSYQSGISIHGRTKVNHLANKKFKGLLNMCATTSIICNPEIKAYYQKKKLEGKNGMSVMNAIRNKVLARIFAVINRGTPYVNTYGFAA

SEQ ID NO: 415234 - protein, 357 aa, unidentified
MKIYKIASQRAKVQGNPNLYVGIDVHLKMWHVTILHDGVILFSSGIPGQWEVLRKLLDRYKGYRIHTAYEAGYFGYGLYDQLRAYGASCLVAAPSLLPQQHGNRVKTDRRDSKKLALWLSQGALVGVVVPTMEERSHIAVIRRRHQLVKDCVRIQLRIKAEFRFHGLPFPEIKGKWSKRFVENLHKFQFKDRWLHESFQRLLAQYDLLIEEIARQTKLIEELAKTDCYRENVTILRTIPGIGLLIAMEFLVELQDIHRFRTADQLAAYVGLTPAQYSSGEHIRMGNITHIGKGRLRAFLVEASWTLISKDPAMAQKYQALKYRRGSKRAIVAIARKLLVRARRVLLDRTPYVIGKAA

SEQ ID NO: 415235 - protein, 345 aa, unidentified
MPIVGGLDIHRKQITFDYLDTVTGEVRRGQIAPADREHLRAWLARFVGRDDVAFALEGCTGWRYVATELAAAGIAAHVAEPADTAFARGRKRHAKTDKTDSRHLRQLLAEGRLPECWIPPEQILECRALLETYHDLRREHTAWVQRIHAVFFHQGAPRLGEGALRTEASLAALREAAACHLSPAGQLQVATDLDMLAAVEARMDMLRQQLLHAARHLAGAKALADRLYGVGPLAGLAMTCWLGGAGRFSSSRKAVRFAGLDVTVYSSDGKRSPGHLSRQGPEILRWVAYEAGKTHARASAPGYDYYTRVRDRTDGKIAALSQARKIVRQACHILAELGDDALTAA

SEQ ID NO: 415236 - protein, 578 aa, unidentified
MKKKSYRIVDVKSIRLAEVKAGLGASKRAAFGIDVAKSEVVVSIGGDDGESLVVFKVKQPAELPLLLELATELRAAGYEVELAAESTGTYSDVLVYQARLRELSVHRVSTKFVHDAKEIHDGVPSKHDAKDATLILWLHVQGKSRPWLEQEESQRRAKAVVSRRELQVHAYVANAGRLEALLARHWPELLALGASIGVLLLKLLMVLPSPRRVEADPKKAAAMLHPHRSADTRNAIVASATASQGVVMIEEEELGLRELATQMLAQWREIERIDKELRELLQRDPVALRLAALIGPTTAMVLAADLGDLSKYANPKAIEKACGLNLREHSSGKRKSGLHITKRGPPRVRQYMYLAALRFLRLNPIARAWYAARIARGQAKMCAVVAVLRKLVRALLFVARGEEFQANKLFDVRRLNLQSAVEVDVKPTLAEVVQLDETSASDPTETTLLPVLAAPDETQQASPHAPSDACGTQKSERTPSRPKRGRVSPRVDTLRGDLVKRGDGVASSESATPPDTDLQRVKRPPTSRSRGPTAPEQTGAPIRRARDERPAPDGVRRDPSQGSRRDAATPFLASAPDL

SEQ ID NO: 415237 - protein, 364 aa, unidentified
MKRKVYVGMDVHKETIQIAYLTSNSKEILKEQQIKHNEVQIKKFIKKLKTEWNEIHCCYEAGVTGYPLYRYLKSLGVNCILVAPGKIPRQSSDKIKTDKRDAIKLARLMRSGELESIHVPSEEDEAVRDYLRSRGSLRLDLGRNRQRLMKFLLRKDIKYSTTKYWTVSHYKWLNNLHFNNEILQETFNDYYSRVRVQEENLKSMDKKIQEIAESEPYREKVGILRCFRGVDYLTAMFLLCEVNDFKRFKTAGSFMSFLGLVPGEYSSGSKRKQTGITKTGSPRLRRILTEAAWQHRFPGTGSKIITARRSGQPALVVALAEKASLRLHKKFRNLQLRGKTPQVMITAVSRELSGFLWAAMNLVA

SEQ ID NO: 415238 - protein, 394 aa, unidentified
MKLVGIDVGKNSHHFCVMDKETGEFNVAPSSFSNNKEGFDFLINSLKPYSKKSILIGMEDTGHYHVALLKFLLSNGYTVALINPKTTDLTRKMEGGITKNDKLDTITICDVLDTPERKKQYRITKVDRFDLYEQRQLTRHHHNLKEELNVYCNRLQKSIDLVFPEFNTLFSSKYGIVYMNLLKTFGSAEAIASTDIRTIRKFFEIKGKGNRISLTPEKLKECAKNSIGISSEVETIQIKHLVSQITLIKEQIAEIDKKIEEFSITNNSPILSIPGISHFSGTSILAELGDIGNYSKPSQIIKFAGVAPYHYESSQYNAQHTGITKKGSKYLRKTLYQIILPVINNNPVFKKYYLLKISQGKGHRCAQGHCIRKLLRIIYHLLETGQSFDPALLR

SEQ ID NO: 415239 - protein, 319 aa, unidentified
MDTVTQAAIIGIDISRDWLDVHCLPGGNRARFPNKVKGHEQVAQLAFELNALVCFEATGGQEWRLWVSLDDAGIATRQLPPAQIKAFAASRGTRAKTDRIDAELIARFMAFRPGAGRTLPHGKLRLLRALTSKRAQLVETRKRLLGQIKAQGKLGSAEMFAAMDEDLKGLLDRQIAGLEAQIEDIIAADESLAMTADILRSVPGIGPVASTMLIAEMPELGQISGEQAAALTGLAPIAHDSGAMRGKRAIGGGRRLLRHVMFQAALVASHHNPILKIFADRLRAAGKPHKVVITAVARKLVTIVNALCKSSQKWAVPAS

SEQ ID NO: 415240 - protein, 454 aa, unidentified
MAKARDRRRTLDGFAEINHDAAGIDVGNTQHWVAVPAGRDAESVRMFGCFTADLHALANWLERCGIKTVALESTGVYWIALYEVLESRGFKVCVVNARQAKNLPGRKTDVKDCQWLQQLHTYGLLAASFRPQGEIIILRRYLRHRETLVQEAATCIQRIQKALTEMNLQLANVISDISGTTGLRILRAIVEGERDPQRLAAMRDWRIKATPDEVAKSLLGNWRDELIFVVGENLALYEVYQQKVERCDYRIEQHLKNMSAQVDNNTNPLPKPRKGKRSHGNAPSFDLRSELYRVTGTDLTQIDGINVVTAQAILADTGTDMSAWRTEKHFVSWLGLCPDHRISGGKVLQRGTRKVISRAATAFRLAASALRRSQSALGAKYRRLQSRLGAPKAITAMAHHLARLFYRMIKYGSKYVDHGAAAYEAKFKEQQLRWLSRKAAELHLCLAPLPNSAV

SEQ ID NO: 415241 - protein, 350 aa, unidentified
MEYIAFDSHKRYTWVEREEPASGRRVGHRLEHKPGAVRSYLARCEAGTAVAVEATGNWYWIVGEIEQAGMRPLLVHPRKAKLMMGMINKTDRLDAQGLNRLQRNGTLPVVWIPPGELRDLRELTRTRLVLTRQRTRLKNRITATLAKYGVPESQWSDAYGGGAREELQQRIGTLPPHARWTSQLLLEQLDGVSGQIEQIEKRLGELVRLTPGMQWLKTLPGVGVILAATIALEIGEIGRFPSAEHLASYAGTTPRVQASGGRVRYGRLRPDVNRYLKWAFAEAGNSVAVNHPRYPLRHTSQLYLRLRQRKGHAKAIGAVARHLAEAAFHVLEGQQSYRDPAANAGGAREV

SEQ ID NO: 415242 - protein, 347 aa, unidentified
MANGSKTEAQVFVGIDVSARELSVAVRGGTEDREAVTTFGNNAGGHKALLAYLLRGNGRARVCLEASGNYSLDLALTLHAQRQVEVSVVNPRRARRFAESLGERSKTDPVDAGVLCEYAMRMRWVPWVPPNLVALRLRALTRAIEDLGVMQTQEKNRQHALTISRALPALLIRELQKHQRYLQLRITRLRQEALRLIARDPELDRRFRVMLTTPGIGETSALQILGELAVLPDTLDARQWVAFAGLDPCRFTSGTSVEKKPRISRGGSRHLRRALYMPALVAMRREPYLRAFYQRLLARGKAPLQAVVAVMRKLLHAFFAMFHSDQPYDGSKLCPVKFAPDTVALCA

SEQ ID NO: 415243 - protein, 371 aa, unidentified
MRPYIFEAAPAACAIEIKIDKRPIAKRILLGIDVHLRGYQAARKVDEGVIGVVDTFRSEVELLLHIEKQRQRAEEVVVVYEAGPLGYTLYRKLKAAGVLCYVCSPDGAQQRRKRRKNNKIDARNLTSKLFNYLNGDKEALQLARVPTEAQEQLRLASRQHDQLVEERKRLGAKGNAMLLSQGFGSWSNWWRPKAWAQLSVLVPAWLLERLQIWVDVLKTLDEKIAQAKVGMARRCSGPRPKGVGALSQMQLQSEVLDWHSYSNRRKIACLAGMVPSEWSTGDSERRGSITKVGVPAIRRIIVEMVWRMIFFQPQYKPVQKWQEVLQGSNPALKKKAVVAIGRQLIVDLWRLETGRMTAQELNLVMIDAEGV

SEQ ID NO: 415244 - protein, 352 aa, unidentified
MKKYIGCDAHARYSVFVSVDERGQAAPPIRVEHAGRDLRDYLGSLEPGTPVAVEASGGWYWLMDELEAAGLDARLVNPLEAKRRMGGRNKTDPIDARGLAILLRNGTLPEVWVPPGQLRDLRGLMRTRLALRSHTTCMKNRIHAAIRRYGTLDGEPVSDLFAKKSRLRLSVAIGRMPEETRRARLHEWELLDELERHIGELEVRIRERVGCIGWVRLLKTLPGVGEILGATIHLEIGNVKRFATARHLASYAGLVPTVHASGGRSQHGPTSPQTNHYLRWAFVEAANCVIMHKQRYADQHVIQLYQRLKSKCHGKAAVAVARHLAEASWWMLSKREQYRQPHAATMSSSKNG

SEQ ID NO: 415245 - protein, 404 aa, unidentified
MKGPIVSIDVSKGKSDYQAFKDLNVKYTGSRSIKHNKEGFDEIVNLVREMEKKLETEVCVVYEATGVYHRVLKKVLEDNNIKQFIINPLLSAKTRKNDSLRSPKTDKLDPKSIAKTYYSHSLHNSHKQETIYHELRELSRYYEDILFHIRKDKVAFRAQLDIVFPGYDTLYDDLYGPVALAIIEKYPHPEMLQKKKINTVSKVIQNKTCHRQAVSDTMADKAIEYSKTIYSGCDKDDIEVLILQRFIKKLNEDMAEAERTIGEMIKLAQELPDFNIIKSIPGIGDNLAARIIAELGDMTRFKKKNELVAFAGLDPRISESGQNDGDHMHITKKGNKRLRCLLYLAVTCSIRLKRDDNSIKDFYIKKKQQSNPMCSKAAKTACASKLVRIIYSMCKTGELYQYNK

SEQ ID NO: 415246 - protein, 411 aa, unidentified
MEVVHGRCAGLDVSKRDAKVCVRVAGVGRRKTVETVTTWGSTTNQVLALREHLIAEQVTCAVMEATGDYWKPFYYLLEDAGFEVMLVNARHVKNLPGRKSDVADATWLAQLGAHGLVRGSFVPPEPIRQLRDLTRARTAITRERGREIQRLEKLLEDASIKLSSVASDITGVSGRAMLEAMIAGQDDPAALADLAKRRLRSKIPALTEALSGRFTEHHGFLARVHLDLIDRHTRAVEDITARIEVVIAPFQGFRDLIATIPGIGPLVADVVVAETGADMTRFATAGNLASWAGTTPGHNESAGRVKSTRTRPGNPYLQGALGAAAMACAQNPGTYLGARYRRIASRRGPMKANVAIQHTMLIAIWHMGRYGTLYEDPGADFFTRLHPERAKNRALHQLEAMGYQVTLDRTG

SEQ ID NO: 415247 - protein, 415 aa, unidentified
METGTEQVYERYIAIDSHKFYVVVGGIDARLEPVLAQRHLSLEDFREWASRHLKSSDAVVIEASTNTWVLYDLVAPLVGKVVVVHPPKVKLIAAAAVKTDKIDVFKLARLLLVGWLPEVWVPPQHVRDLRALISHRWRLVRMRATTKNRLHSVLQRNAIRAPRQHPFAQKHRSWWEGLEVTETERLRIRQDFENLDHLGRQIAEVEREIQRLSTSEHWADVVPYAMQLSGLGLITTMTILGAIGDISRFSTPKKLVGYAGLGARVHDSGLTHRKGHITKAGRKEMRWALVEAAWAAVRYDPYWKAQFQALKRRMHPNQAIVAIARKLLVVLWHLLSKKQVYRQGTEERIVRKMLVWSWKMDEDARLGLTRRQFVRYALMHLGVGAEMTHIAYGGVHRIASVEEVLALRPELGARS

SEQ ID NO: 415248 - protein, 362 aa, unidentified
MKIVGCDLHARQQSVAVLDTETGELLERTLEHEGEQLRAFYQGLDGPVTVGIEATGAMQWFLQLMEELGVQCQVGHPAKIRAAETRKQKHDRRDARLILQLLTEQRFPQLWMPKSEERDLRTLLRDRHQWVRMRSRVQSTLQAIALNHGVRRGRSLWNKNGGREALVALSLPSYTAQRRDQLLCQYDSLNERVQELQRQVEAEAQQRPRARQLMTHPGVGPVTALATEVFLGDPGRFRNPKAVASYIGMIPCENSSAKRRRLGEISKEGNSLVRYLWCEAAMHAVNHDPELKRFYRRKLVQKGMGIARVGAARKLGIRLWIMLRDQIDYEEFCRRRRQEGETLAGMPDRNSGPASAVTGLTE

SEQ ID NO: 415249 - protein, 347 aa, unidentified
MRFYTQPHTFYCGIDLHARTMYLCVLNQEGEILLHRNMKAAPEPFLKAITPYREDLVVCVECIFTWYWLADLCAREGIPFVLGHALYMKAIHGGKAKNDKIDAHKIAVLLRGGMLPQAYVYPAEMRATRDLLRRRMYLTRKRADLLTHVQNTNSQYNLPEIGKKIAYKSNRDGVAERFPDPAVQKSIEVDIALISQYDQLLRDLELHLLTVTKQHSANTLYLLRTVPGIGNILSLVLRYEIHTIARFPRVQDFVSYCRLVKCARESAGKRYGTSGTKIGNAYLKWAFSEAAVLFLRNNPAGQKYLARLAKKHGKGKALTVLAHKLARAVYYMLKRETAFDLDKFFNE

SEQ ID NO: 415250 - protein, 406 aa, unidentified
MLRYVGLDVHKQWTQVAWHMPDGSIQRERIATEAATLREFAERLGPQDTVALESTTNAFAVASLLKRRAKEVLISNPLRTRLIAESKIKTDKVDADVLAQLAKSGFLPTVWQPSGQVELLRRRAAYYDALTRQITAIKNRIHSVLHRHMIEAPVADLFCEKGRAFLRTVELPEDERFQVTLDLYILETIEEVREAARKELAALAHTCPQAELLMTVPGIDYPTAVGILAAIGEIGRFREARKLVSYFGLNPIVHQSADKCYTGHISKQGRCHARWLLVEAAHCAVRCAGPLRAFFLRLKGRKGTNVAVVAAARKLTVIIWHMLTTGEPYRYAPERSTREKISRMHYVATGIRKRGGIPKGAARPASYGTGLSGRMVMARKDKERLLQAQGNYEKLVKDRRETPSAH

SEQ ID NO: 415251 - protein, 466 aa, unidentified
MKNKRKTKKMKQRAATFELINTNAAGIDIGAEFHYVAIPKGRDPEGKDVRNFGTFTADLYALAHWLKDCQIETVAMESTSVYWIPLFELLDSEGIDVNLVNPQFIKNVPGRKTDVLDCQWIQQLHTYGLLRGSFRPEEQMCILRGYLRQRTMLVSYASHHIQHMQKALEQMNIKLNQVVRDITGVTGMGIIRAIINGECNPKKLAKLRNPRCKNDAKTIARALHGNYRMEHLFALKQAVELYDTYHEKIVDCDRKIEQHLSSFEDQSNGLPLDKTHKSNRGKNKPSFDARSHLYRMTGIDLTVVDGLDTLSVLKIISEVGLDMSLWPTEKHFGSWLGLSPGSKVSGGKVMSSKTKKCANRAAHALRLAAYSLQRSKSATGAFFRRKKAQKGPAKAITATAYKLARIIYNMLKNGTEYKDIGQDYYEQRYQKRLVENLKRRAKQFGYKLNYIKEQQPVMKHADNLVI

SEQ ID NO: 415252 - protein, 430 aa, unidentified
MKSNTQNAKIEAITEKTLVLGIDVGSETHYARAFDYRGIEYSKKPFKFSNTEAGFVTFKEWILDLKERHEKDKVVPGMEPTGHYWFNLGKFLQDNEMKPVLVNPHHVKKTKELDDNNPTKNDRKDPKVIGGLVREGRYMIPYLPDGVYADLRTASNIRFQLQAELTRIQNRISRWFNIYFPEYKTVYGKPDAKSGMLILKAAPLPEDILTLGIDGVNQIWRDAKLRAVGRARAKTLIEAAEHSVGSKEGAMSARMEIRMLLEDYESRNTRLQEVMVLIEELVRKIPMAEKLLEIKGVGIRTVSGFLAEVGDISRFNNPKELQKLAGLALVENSSGKHKGETTISRRGRKRLRYLLFEVAMSLVAKNPEFRELHNYYTTRRLNPLKKMQSLMAIAAKLIRVFYVMLTKGVNYDPKKMVNDIKRPAVYLQTA

SEQ ID NO: 415253 - protein, 326 aa, unidentified
MGKSIKNLSSVTIVGLDIAKNVFQVHGVDAGGALVVAKAVRRGQLLSFFASLPPCVVGIEACSSAHHWARSLIDLGHQVKLIPPAYVKPYVRRNKNDAVDAAAICEAVGRPNMRFVPVRSVENQAQLMRHRARELLVGHRTRMLNALRGHLGEIGVVAAQGAQNAYALKRLLADGRDDDGEVIVPDCVCRALAPLVHQIDAIDAEIVAIDEEIKTLVKADDTARRLMTIPGVGPITAQAIVATVRETSAFASGREFAASLGLTPRQNSTGGKARQGTARTHHQDGRSLLAQTARRRGLRNALSSQGAQRRAAHVGRSIAGAQDHQA

SEQ ID NO: 415254 - protein, 413 aa, unidentified
MDVIHPRCAGIDCSKKDAKVCVRIQGEGRRRKSATVTTWGSTTAQILALREHLVAANVSCVVIESTSDYWKPFYYLLDDELNVVLVNAAQVRNVPGRKSDVSDAAWLADLGAHGLVKASFVPPAPIRALRDLTRTRTVITRERTREVQRLEKLLEDAGIKLSSVAAEITGVSGRAMLEALIGGQRDPAVLADLAQRRMRSKIPALTEALTGRFTDHHAFMTRLFLDRIDAHSADIARLDARIEEAMQPFRAARDLLTSIPGFSRIVAEVFIAETGADMSVFPTAGHLASWAGVSPGSNESAGRVKSTKTRPGNRYLKGALGIAALSVARSKNTYFSAKYHRIANRRGPMRAIVAVEHAIVIAAWNLLVNGDFYRDPGPNYYTARQPARTKARAISQLETLGYRVILEPLTQTA

SEQ ID NO: 415255 - protein, 354 aa, unidentified
MKRMTKYVALDVHQATTVASVRGESGRVLARTILPTEGSTIVEFFRGMRGAVHVTFEVGTQSQWLYDLVAPVVDRVVVCDPRQVTRQGNKGDRVDADRLSELLRLGGLHAVYAQSAHRADLKELARTYRTLVEDGTRVMLRIKALFRARGIKTPGAAVYHPTKRMQWLAQLTERGVRFRAEVLYAELDVLRELRPKAKAMMVAEARRDPAWPLLQTIPFYGPVRVALLLATMQTPWRFRTKRNLWAYSGLAVRTSSSADHRIIEGQLMRRRRPPLTRGLNRNHNRVLKDVFKGAATAAASQPGPLQEFYAAMVARGMREEMARLTLTRKLAAITLRLWKRGEQYDPAKLTMQAS

SEQ ID NO: 415256 - protein, 315 aa, unidentified
MAVRKDGKPSEPQTFANTAAGRTQLTKKLVKLTGIKTCLEATGIYHFDLAIALHDAGVPLMVVNPKASHNFAKVLLKNSKTDAVDAQTLAEYAERMDFVPWTRPSDEKLAVRGFARRIHVLTEQRAAAKNHLHALCATSETPKAVLKDAQLAIAQLQKRIDRLTDGALALINKHPDLKQALALLVSIKGVGNTSAIALMGELLLLPPNLSHREWVKFAGLDPKAFDSGKSVHKKMRLSKAGNRHIRSALYMPALSAKQHDPHVSAYFQHLVANGKKPLQAICAVMRKLLHAIHGMLKHNQPFDNSRFYSIPIIAE

SEQ ID NO: 415257 - protein, 353 aa, unidentified
MGIVVALDVHRKQVTYKTLDRETGEVKRGRIAPAARADVREWLAQFAGREADFALEGTTGWRFVVEEIERAGHRAHLADPAETAAKRGRKRRAKTDSADCDLQLRLLCAGELPESWIPPAHMLELRTRVRMRKTLIDQRTAWQQRLQAQLFHQGVPAGLRPRTRAGRAALVRAELSPAGRELVELALRMIDAIDRELAPLDRQLCSFARRQPGCRALIARLYGVGPVSATAILAELGDARRFARSDDAVRHSGLDVTVYQSDEKRAPGHLSHEGPELLRWALFEAALSAARAGSPDHAYYLQVAERIDHNRACLSVARKLCRRAYHILRELGDEALAPVEGDPHAEEAIAAAA

SEQ ID NO: 415258 - protein, 345 aa, unidentified
MEHYVGLDVSLKLTAICIVDQTGKIEREGVAPSDPEAIAAFIKSHASHVARVGLETGATATWLWTELNKLGLPVICIDARHAKAALKMQINKSDRNDAVGIARIMQCGWYKEVRVKDLDSHAVKALLVSRALLVKIKRDLENQIRGLLKNFGLVIGRAKMNVFAVRAAELTVHRPELAAAIAPLLNARAAIEQQIADLDRKVMRLVRNNAQARRFMTAPGVGPITALCFLATIDDPTRFKRSRSVGAYLGLTTRRYASGEIDWTGRISKCGDMMLRSYLYEAANVMLTRVAKWSALKAWGIRIAKRTGLRKAKVAVARKLAVILHRMWIDGTEFRWSKEAANQPA

SEQ ID NO: 415259 - protein, 343 aa, unidentified
MTEVTTVGLDLAKSVFQVHGADRDGRPVVRKKLRRGQVLVFFAGLSPCLIGLEACASAHYWARELQALGHEVRLIPPQYVKPFVKTNKNDASDAEAICEALIRPTMRFAAVKSAEQQSVLMLHRARELLVRQRTMLINALRGHCGEFGLVVAQGAPKVAELIEVIEDPEDERLPTLAREALGSLVSQLRMVQAQVVGLEMKLKAWHRTNEASRRLATIPGVGVITATALVATIGDASQFHSGRQLAAWLGLVPRQHSSGGKERLGRISKRGDGYLRKLLVHGARTVLLWSRRKKERRSPWQEALLARRPTNVVLVAMANKTARVVWVLLSRGETFRIEAQAAA

SEQ ID NO: 415260 - protein, 455 aa, unidentified
MSRKKTRLQSVTEVPRIRADAAGVDVSPEMMYVAVDPQKDAPAVRRFGTFTAELYRIANWLKACGVRTVAMESTGVYWIPLLQVLEEQGFEVYLVNARHYRNVPGRKTDVCDATWLQYLHAVGLVEGSFRPAQEVCAFRTVLRHRAELVQAASRHIQHMQKALDQMNVQIHRVLSDVTGVSGLAIVDAILGGERDARRLAELCDGRVRADQARVAAALEGDYRAEHLFTLRQSLESYRHYQKLLADCDRQLQRMLEQFAGKVDGDAEPPAARKTMRGKSAEDLRQKFYRVLGVDLTAIPGINVRTVEVLLGEVGPDLGRFRSAGAFASWLALCPGNAITGGKVVSSRTRKADNRLAGALRMAAESLCRDKSYLGRFYRRMKVALGGGPQAITAAAHKLARIIYTLLTRQIEYDESRFAKIEKQDADKLHQRFIQQARRFGYTLVPSQPTPPAIVS

SEQ ID NO: 415261 - protein, 412 aa, unidentified
MLKIVYRVCCGMDVHKSFVVACIATTNDHGVTNYKSKRFSTFTGDLRRCADWLSENNCKDVCMESTGKYWIPIYNILEHTCNIVLAHPKYVKAIRGKKTDKRDAKWIADIFKHDLVSGSFIPPADIRQLRDLVRYHWKLTNFNVGEKNRAQNCLTVSNIKLDDVFSDVFGKAASAITTRLLESNEPFDVKPYLTKNIKKPIEQIQAAVDGEMCAEQAEKLRIIRSHMDSLELCKLNLESLILSTAEKYIPQLNLVMTAPGIQSFAAIGIISEIGVDMSVFPTSKHLCSWAGLTPQNNESAGKKKTTRISRAGAYIKPLLVQCALCAIRTKQFPEVRNRYLALKKRRGHKKAIIAIARMLLTAIYNILKKNELYNPELYRSADRPPKNREVSVEEAVFILQRQGYLVTAPPTA

SEQ ID NO: 415262 - protein, 338 aa, unidentified
MEWTVAVGVDTHKEVHVAVALDALGGQLGSREIATTTAGYRSLLSWAQQLGVPAFAVEGTGSYGAGLCRFLEAAGVEVFECERPRRQERRRGKSDLIDAALAARRLLGSEPLGLPRGAGRREDLRLLLLERRGAMQARNAALNQLHALLVTAPDQLRARLGALSGDRLAAAAARLRPSAEVIDGVLRRLGRRVERLSREIEEAERALADLVAELAPTLLEECGVGPVCGAQLLVSSGDPSRMRSEASFAALAGTSPVDASSGKQRRHRLNRGGDRQLNWALHVVALARIRHHAETGAYYQRLLAAGKTSKEARRCVKRALARRFYQHLRELPTLPLTT

SEQ ID NO: 415263 - protein, 345 aa, unidentified
MIIGCDFHPSWQQIAWLDTETGETGEQRLVHAGGDAERFYRQLAAPALIGIEATGNSHWLVDLLSELGHELWVGDAGQIRASYVRQQKTDKRDAAHILKLLVEGRFPRVWMPSSEVRDLRQLLLHRYKLVIIRARVKNELQHLCLNKGVQRKRKLWTKAGQQMLCELPLKLWAGRRRDDLLGLMTMLDQQIEPLDQAVKEEAQRDKMALLLQTQPGVGPITALAYVLTMGDIRRFPRGKQVASYLGLIPREHSSGGRQHLGAITKQGNRMLRMLLVEAAQTAVRLDPQFRKEYLHRCHQKPKAVAKVAAARKLAVRLYWMLRTQKPYPEVVRIESSPRVGLVGEN

SEQ ID NO: 415264 - protein, 326 aa, unidentified
MTDAPELIFVGIDVSKDTLEVALDDSAKTRTLGNDEAALKKLIAMLDAVRERVAVVLLEATGGLEQPAAAALCAQGFAVMVVNPRQAHDFARAMGHLSKTDSIDARVLAQFARTLHASDKRERLLYKLPTVQQQALLAMVTRRNQLVGMRVAEANRLAGAHASQHKSIRTVLKTLDGLIGRIDDDAARMLKEHFKDKLDLLKGLKGVGPGTQAMLMAALAELGQLTQREISKLVGVAPLNCDSGKFKGKRTTWGGRANVRCTLYMATLSATRYDPVIKAFYQRLTHAGKLKKVALVACMHKLLTIINAVIKSGVPWRAGYPQEGHA

SEQ ID NO: 415265 - protein, 430 aa, unidentified
MKSNTQNAKIEAITEKTLVLGIDVGSKTHYARAFDYRGIEYSKKPFKFSNTEAGFVTFKEWILDLKERHEKDKVVPGMEPTGHYWFNLGKFLQDNEMKPVLVNPHHVKKSKELDDNNPTKNDRKDPKVIAGLVREGRYMIPYLPDGVYADLRTASNIRFQLQAELTRIQNRISRWFNIYFPEYKTVYGKPDAKSGMLILKAAPLPEDILTLGIDGVNQIWRDAKLRAVGKARAKTLIKAAEHSIGSKEGTMSARMEIRMLLEDYESQNMRLQEVMVLIEELVKEIPMAEKLLEIKGVGIRTVSGFLAEVGDISRFNNPKELQKLAGLALVENSSGKHKGKTTISRRGRKRLRYLLFEVAMSLVAKNPEFRELHNYYTTRRLNPLKKMQSLMAIAAKLIRVFYAMLTKGVDYDPKKMVSDIKRPAVYLQAA

SEQ ID NO: 415266 - protein, 366 aa, unidentified
MKKQTKQAIRLKKLCNEVTRILNLGLDEHYWQVTVAMQEDGGRIKVVGKMSHEAFLDWVKKKVAEGWEIRSCYEAGACGYWLHRELEKLGVKNLVVTPRAMGKTGQKQKTDKRDAVELCDTLDRYLRGQHRALSVVKVPTPEEEAKRALIRHHRQIMKDRCRCEARGKGLLCAQGIRVRSCWWKDQSWQELSTDPRLKDWLKQQLEHWRSQILSAQEKQLSLREEIAALAPARLPKGVGAYSAAVLHYELRGFERFKNRRQISSITGLCPGVHQSNGHGKEGSINRCGIGAVRWVLVEMVWRLMIWQPQYPPVRRLAAGLVKSRRAKKRLVVEAARRLAIDLWRLSTGQTTPEKLGLIMQDHSQSH

SEQ ID NO: 415267 - protein, 411 aa, unidentified
MELLVPRCAGLDVAKDEVVACVRVPDGQGGRRQEVRAYPTFTSGLEALAEWLAAEGVVQVVMEATGQYWKPVWYVLEERGVALMLVNARHVKILPGRKTDVADAAWLAELLEHGLLRGSFVPPAAIRELRDLTRYRKRLIQAHTAEVQRVQKTLEDAGIKLDSVAADVLGVSGRAMLAALVGGERDPEVLAELARGRLRNKLPQLRQALRGRFSDHHALLLRLALGHLEHLEGAIAALDTEVDRVIAPFARARDQLDTITGVGKRAAETIIAEIGVDMTVFPTAGHLASWAGRCPGNNLTGGKRRSGKPTKGNRWLGEVLTECAWAAARSRDTYLSAQYWRLARRIGKKKAAMAVGHSILVIAWHLLANDCDYADLGGDYFVRRDADRARQRAVAQLQALGYQVTLEPLAA

SEQ ID NO: 415268 - protein, 474 aa, unidentified
MKEHKKTKAKTKSQAAKTLREQEPNAAGIDLGAEEIWVAVPAERDQNPVRRFEAFTQDLMAIVQWLIGCGVRSVAMEATGLYWIPLYQLLEDAGLKVCLVNARHVKNVPGRKSDVQDCQWLQYLHSVGLLLGSFRPAQTICATRSIYRYRQNLLSMATEHVQHMQGALDQMNIKLHYVIDDLTGVTGQAIIAAILSGHRDPVQLAKLRDKRIQASEEKIVKSLQGDWRKEHLFVLAKAWAQYQEVQKQIQDCDRELLAYTQELEACTTLVKPVKMMRLKPELVGSEPTGKLAAKKKPRKKTSKNQPQGPWQQELERFFGVDLTAIPGVSVLTGLTLMTELGNDLRAFKTQHHFASWLCLCPDNETSASKVLRRRTRRSQNRVRQALRMAASSLHHDKSYFGDKYRRLRARLSPPKAITAMAHHLARIIWTLITRKLPFDLSLFAEQEKLNEQRRLKHLAASARQMGFQLTPLAA

SEQ ID NO: 415269 - protein, 451 aa, unidentified
MGRKKKLELEIINPNAAGIDVGSRSHFAAVGQNLDEVKEFGVYDEDLKKLSAWLIENNIDTVALESTGDYWQNLHAQLLEDGLEVILVNGKFTKNIKGKKTDVLDCMWIQKMHTLGLLSGSFLPDDITMQLRTYCRQRLNMLRWSAQASSKMQKYLKFLNFRLDVVVSDVCGLTGLKIIGAICEGNLNPNELAKMRHYNCRKSEEEIEKALQGNNRKEYLFGLKQEFESYQFFKQKIKECEEQIKEFLETYFLSQEFPIDDMPSKKPYKRLNKNAPKNIDLNVASYQYFGGVDLMAIEGVSHSTLLTLMSEIGPDGMKKFGSAKQFASWLRLAPNNKISGGKTLSNRTPRGSGRLKIALRNSANAIGNLKEGQLAKFFKRIAYKKGRQIAITATARKLAIIIWKMVTNKEEYQPTESHMFLDEKRKLGIVKRMRKKIAKLGITNEDLGLST

SEQ ID NO: 415270 - protein, 349 aa, unidentified
MRNVTIGMDLGDKNHIITILDEAGVIVKSCSLENVRASIVKFFRKYKGSTVAIEAGTHSPWISRELKALGCNVLVGNPRKLRSIWNSDDKADVHDSEMLARIARFDPELLYPIAHRSKQAQTDLELLKARDMLVKTRTSLINHVRGAVKSFGERLPKCSAESFHKQCRDFLPENLKAVLQVIIETIEHITDRIKEFGRRIEKISREVYPETELLKAIGGVGPLTALAYVLILEEPGRFGKGRQVGKFLGLTPRRDQSGETDKQLRITKAGNRFLRRLLVGAAQYILGPFGPDCNLRRFGLRLAERGGKSAKKRAVVAVARKLAVLMHRLWRNGEVYDPFYKSAMIRNAA

SEQ ID NO: 415271 - protein, 371 aa, unidentified
MGESSKTLFVGLDVHKDTIAVAYAAEDRSTEVVSLGMIGTRQCDIDKLIRKLESKGAPFAIAYEAGPCGYWLYRYLTRRGLSCIVVAPSLIPRKPGDRVKTDRRDAVTLARLLRSGDLSSIYVPTVDDEAIRDLSRAREDAVRDLKRSKVRLKAFLLRQDIRYEGRANWNAAHLRWLARVVCPTAAQQIVFQEYVHTVTEQTERVQRLEVELHTAVKTWRLHPIVEAVQALRGVDLTGAVTLIAEVGDLTRFDTPRKLMSYLGLTPSEYSSGERRRQGGITKAGNGHARRVLVEGAWAYRYPAKVSRHLQLRLENVPTEVRAIAWKAQLRLCKRYRLLSARGKHVNQVVVAIAREMAAFAWAIARTVPMAS

SEQ ID NO: 415272 - protein, 400 aa, unidentified
MIDTGDIDVFLGLDVGKGEHHATAVTPAGKKAFDKRLPNTEPKLRELFAKLQAKHGTVLVVVDQPASIGALPLAVARDMGCPIAYLPGLTMRRIADLYPGEAKTDARDAFIIADAARAMPHTLRAIDGEDETIAELEMIVGFDDDLAGEATRVANRLHGLLTQIHPSLERVLGPRLQHPAVLMLLERFGSPAQIRKAGRRRLVTLLRPKAPRMAERLVEEIFDALDEQTVTVPGTEAAALIVPSLAGSLAAVLEQRKLLAGRIEELLEAHPLSKVLTSMPGIGARTGARILIEVGDGSTFPTAGHLAAYAGLAPATRSSGSSIRGEQPSRRGNKQLKRAFFLSAFAALGDPASRAYYDKKIAQGKHHTQALLCLARRRADVLFAMLRDGTFYEPQPARSV

SEQ ID NO: 415273 - protein, 325 aa, unidentified
MSLSILGIDIAKATYQVTLWHDGKSYRGEFANRVKEFRRLANWLKKHGASQVHACMEATGRYGDELAHYLHEAGHIMSVVNPLRIKSYARSRLIRNKTDPLDADVIADFCQTCQPPAWVPTPPEMRELQEFFCQYDALQEAITQAKNRLQSGFQSPLVLKQLQAQLDFLTQQLEMLKQLIRDLIDRSPGLKQQRELLESIRGIGEITASRLISYDLLRFNNARTVSAFAGLTPMQGLSGTSVHRKTKLSKIGDADLRRALYLPAVAAMRWNPVIQNLAGRLEARGKCKMSIIGAGMHKLLRLAYGVLKSGVPFDPTYSLKAQVAA

SEQ ID NO: 415274 - protein, 411 aa, unidentified
MKNNIKATTMQLAKNHSVKAQITGTQTKKASRESEQLSERLKYPIRDGGSRARAAKEVNCYVGIDLGDKKSNYCFLDAKGNIFAEGTLATTQAGLSELFSQIPRCRIAIEVGTHSPWVCALLKGHGHEVIVANPRKMESIHKNRRKNDKVDARTLARLVRADPELLYPIQHRGDQARQDLVLLRAREGLVAARTKLINCVRGQVKSVGGRLPSCSAESFHYTVAEKLPDSVREALLPLVLQIGEMSKRIRAFDAEVIRISRQKYPETECLQQVRGVGPITSLTYILTLEKPERFTKSRDVGSYLGLVPRQDESGAISKQLRITKTGDKMLRQLLVSSGQYILGPFGEDCDLQRFGLKLAERGGKNAKKRAVVAVARKLAVLLHRLWLTGEKYEPLHNVHLHEKTLGIAANG

SEQ ID NO: 415275 - protein, 310 aa, unidentified
MLSTKLVKGIDFSGQKFYIGLDIHKKSWTVTIRSSNMHIEQFTQPASSDALVKHLHSKYPGADYYSAYEAGFCGTTIHEQLIQNGIQNIVINPADLPSTDKDKKNKTDVHDSRSICKNLERGNLRGIHILSVEQQELRSLFRQRESKVRDVTRCVNRLTSFLTFFGVDYSQFGTDKTDVITAGVITKLSSLSLSSDAGTFALKEYIDNLVYNRKQLLALTKRLKQQIAKKFANEYELLLSIPGIGSITAMGLLSEIGDFKRFKDPDEYCSYLGLTPWSNSSGETISVIGIQPRCNKHLRPLLVEAVLDGH

SEQ ID NO: 415276 - protein, 312 aa, unidentified
MTSSVTPTRFIGCDVGKRSITVFDSQTQRSFAVANTAGALRAFAKRLDPCCLVICEATGGYEARLLASLVAAKVPAHRADARKVKAFIRSFGTLGKSDKIDAKGLSRYGAERQTRLVRWQARDESRISLQTLVLTRNDLVKSRTAFQNRLAAPQSQAARPHLKAVSAKLNAEIAKIEAKIGELERNSQPLRQALEILTGIVSIGATTASALLALMPELGTLNRRQVASLGGLAPHPNQSGEQERYRRTRGGRSAVKDALFMAALSASRYHPTLSLLYQRLIQRGKKQIVALAAVRRKLLVIANAKLRDAMAV

SEQ ID NO: 415277 - protein, 417 aa, unidentified
MAKRLEQEVCAVIFVGIDWSEQHHEVELQAGSGKVLKRLRVSADIAGLSRLQEAITDAAEEPSQVVIGIESNHGLLVNALVAGGYRVYPINPLTSARAREGEAPSRSKSDPGDAHVLANLVRTKRQDLRPLAGDSEQAQALQVRARSHLRAIRVQQRLRSQLRSTLAKFFVGALPLLGDESEDLRDALAVLSLAVSPEQGRGLSLNKLRSSLARHGRQRNLEVKAAEIQAQLRAPQLELNAPKVVSAYSDEVSHLVRSLLQARSEVAQLEAQLAADFREHPDAEILLSQPGLGLVLSARVLGESGDDPTRYVNAKARKNYAGNAPVTKRSGKWKMVSRRLARNRLLADASFLWANSALSASPGARRYYDQLRARGKTHNQASRALANRLVGILHGCLRRRCLYDDAVAWPQPLKEAA

SEQ ID NO: 415278 - protein, 418 aa, unidentified
MRHSCIITQDGGFVKEEFLVAGVDIGKFNHVSTVTSGVKGFPKHIKFCNDGYGYQKFLEYLRKHQREFGCTKIIVGVESTGHYWEPLAYWLSQKGIMVVQVNPLHTKKSKELLDNSPLKSDPKDARVITDLVRQGKFLCVVIPKGKIAELRRFVRLRESLIIEKTRKINQLHMIVGSIFPEFLYIFKNLQAKTAIYLLRTVPLPCDITSKGIDWLEGEIRRVSRGKLGRKRAEKLYEAAQCSVGLQQGLAGFLKHLEYLLDDLEGVLGKIRFLDKIIQGLTLEIPEARCLVSIKGIGFVTAAVMIGETGGFKNYGDAGKILKFAGLNLYEVSSGRHKGRRKITKRGNRMMRKYLYFAALEQARKGMPLHDFYKGLIDRGILRMKALIAVACKIVRLMYSLVRDEREYSEEYPTLRRAA

SEQ ID NO: 415279 - protein, 323 aa, unidentified
MIKKDFNIVIGADIAKKKFDVACLLEGKFKHKVFTNDAAGFASFVAWFLSLCGDISPLICMEATGAYSLPLADYLVNHGFSVSLVNPAKIHAFAKSELSRAKTDKADAKLIARYALKMQPPLWIPPPANIRELQALVRRVEHLLEMIQMEQNRLETADASTHLSITNVLNTLQTELKSTRKAINDHIDNNPDLKQRSDLLETIPGIGEACIAHLLLALSEHHGFTHAKQVAAFAGLAPVLRESGQWRGNTHISKTGDSALRKVLYMPALCAKRYNPVIQVFWDRLQSNGKNGKAITCAAMRKLIHIAFGVIKSGKPFDPNYAI

SEQ ID NO: 415280 - protein, 314 aa, unidentified
MEKITVGIDVSKDHLDVAVRPSGEQFAVPRTSAGLDELVARVKVLKPNVIVIEATGGFETVVVAALAAAGLPVAVGNPAQIRAFARAIGQRAKTDPIDARVIAHFGEATGVTPRPLPDQATQQLADLVARRRQIVEMIGAERQREKLANSRIKKSIGRLVKALERELSSVEADIDSAVRSSPAWREKEDLLSSVPSVGPVISRTLIAELPELGSLGRKQIAALVGLAPFTRQSGQWRGKSFIGGGRASVRTALFMGAVVARRYNPVLKAFFDRLVAAGKPKKVAIIAVARKLLTILNAIVRDGTPGKGTVGAVS

SEQ ID NO: 415281 - protein, 404 aa, unidentified
MQATPTFAGIDWSWKHHAVCIVDDGGQRIEEATVPHSRPGLAKVTAVLRRHGVERIGIERGDGPVVEHLIRDGFEVVVISARQVKSLRARYGSAGNKDDRFDAFVLADALRTDAGRWAVVQPDSQETMALRMLVRARHDLIDHRIAVHNQLLAVLQHNFPGAIGLFSQLDIPISLAFLRRFPTEAKAAWLSELRMAHWLQANHYCGRHTATQLVGHLRDAAAGRLTGAAADASQVIVLTLVDLLAILRQEQDHLEARIKEALLAHPDGPIFQSLPRAGTVRAATLLAEIGDCRARFPDAPSLAAAAGVAPSTRQSGKHLNVTYRRGCNTQLRAALVDWAQDTPRANAWARDTYDRARARGCRHPHAARILSQGWTRILWRCWHDRVPYNPDLHRRLNTLEQEAA

SEQ ID NO: 415282 - protein, 409 aa, unidentified
MEGMIERCAGVDVHQAKMVATVRVPDGNGGRRVETHTFGAMTVDLLALRDWLQAFGVTHVAMESTGVYWKPLYYLLEDGFTVLLVNMQHLKQVPGRKTDVKDSEWLAQLLECGLLRGSLVPPAPIRDLRDLTRYRKKQIEDRAQEVNRLHRVLEEAGVKLATVMSDVMGRSGRLMLDALLGGVTDPTVLAELARGRLRSKLPALRLALHAQFRAHHAFLIGQILAKIDFLEEAIATLTDEIDRQVRPFEPVLEHLMTIPGVKRRNAVTIFAETGGDMTRFATAGHLCSWGAMCPGHNESAAKRRTGKTRAGNRFLRGALIESGLATTRAKDTALRARYLRVKRHRGHKKAVVAVGHQILEIAYYIMRDGVTYQELGPDYFAHRDRDRTVRRSVRQLEALGYRVTIEEAA

SEQ ID NO: 415283 - protein, 361 aa, unidentified
MPSMPSTTPPDSAEVVLGVDTHKDAHVAAVLTTLGVLLATSTFPTTAAGYRELLAWARGFGPLHRAGVECTGSYGAALTRYLRAEKITVIEVNRGDRSERRRRGKTDTLDAETAARAVLSGRATAIAKAGDGQVEMLRMFKLAKASAVKSRSQAINQLKAVLVRADPALRESMTGLSNPKLFRRCAELTVSAASDCATAAALTLRLLARRILTLTDEINELEDQITTAVQARAPRLLRRYGVGPDTAAALLLTAGDNPERLRSEGSFAALCGVSPIQASSGKTHRRRLNTGGDRQANSALYTITIARLRWDTRTQQYVHRRIAEGKTRREAIRCLKRYISRELYRDITTTPDPSSRASSAA

SEQ ID NO: 415284 - protein, 411 aa, unidentified
MQTLVERGCGLDVHQSTVVACLLIVLKNGTVHKNMRTFGTTTRELLSLRAWLLSEGCTHVAMESTGVYWKPVYAILEGGALEIVVANAQHVKKVPGRKTDVKDAEWIADLLCHGLLRSSFVPPKPIRELRDLTRYRRKLVESQTAERNRLLKLLETSNIKLASVATDVFGVSGRLMLRALIEGKATTQEMANLAQRKLRKKIPELEPALEGKLEEHHRFLLRLQLDRLEAAEADLAVLEQRIQRKLQPYEAQVTLLDEIPGVDWTLAGVIIAELGVDMKVFENVSHLASWAGISPGNNESAGKRKSSRIPKGNVYLKTGLVEAATAAARTKGTYLRDKFYRLKARRGYKRAVVAVAHKILVAIYHMLSHRVCYNELGDLYLDKLNKHHLTRNLVHRLERLGYTVKLEQKAA

SEQ ID NO: 415285 - protein, 379 aa, unidentified
MKNVLWVGLDVHAKTIAVAVIGADGEVRYLGVIPNDPGSVSKLIKKLGKPQQLRVCYEAGPTGYVLYWQLTKLGVHCEVVAPTLIPVKPGDRVKTDRRDAQKLVRCYRAGDLTAVWVPDAAHEALRDLVRAREAAKQDQLRARHRLGKFLLRQGRRAPEGTKAWSGQYLKWIKEQVSFEQPAQEATLLDYLHEVEHAGSRIQRLEKSIDTAIETVPPKMRAVIAGLQSLRGIARISAVSIVAELGEISRFAQPRQLMGYSGAVSREYSSGERIQRGSISKAGNAHLRRIVVEASWSYRHRPSVGAALAARQKGNSEEVKEIAWKAQHRLHSRYSKLCAKGKTKQKVVTAVGRELLGFIWAIGVQVERSMSASPKKRRAA

SEQ ID NO: 415286 - protein, 343 aa, unidentified
MPIAIVGIDLGKNSCSVAALDVSGAVVLRRRVSRAKLAEFVGGLPACLVAMEACCGAHHLGRAFEAQGHAVRLMSPEYVQPYVKAQKNDDRDAEAIAEAATRPTMRFVAMKEEAQLDMQTLHRARSRLVNSRTRLINQLRAILLERGVTVAKGRRALAVALEPLLDGAEIGLSPRVRILLSDMRREWAELDARIATLDREFVETARRSAPARRLSTIPGIGALNATALVAAVGEAEGFAHGRDLAAWLGLTPRQMTTGGKPRLGGITKRGNVYLRTMLIHGARAALPGLSRSDTPLGAWLRALMARAHVNVAVVALAAKLARIAWAVLRGGDDYDRRAGATAA

SEQ ID NO: 415287 - protein, 375 aa, unidentified
MLSKRINQNEQSLRALFSAFSAYDHKVLVVVDQPNNIGRLTVAVAQDIGIDVRYLPGLAMRQLSRIHAGNAKTDIRDAYIIAHAAKNLPESLRNVDRVEEAFLQLKVLNGIDEDLARSYTRLINQIRSALVGCYPQFEQALRGQIIHRKWVLHLLARYGGPTKIKRLGKAKAAAFARRYKARNPEPVLDAIFAAISEQTVTIAGAHYAEMGVAMSAKDALLKLEHRQQIEKEVIELINDIPHTQFLLSMPGIGPKTAAQILMTAGDMSDFPSAGHLASYAGLSPRTNQSGTSIMSNSLNRAGNKKLKNALWQSSFASIRFHERSRQFYERKRREGKRHNAAVVALARRRLNVLYAMMRNHEHYHDPAPSQEDLAA

SEQ ID NO: 415288 - protein, 345 aa, unidentified
MKYFAGLDVSLEETAICVVDEAGAMVKEARVPSEPEALVAFFRGLGLVVERIGLEACSLSAWLHESLVAASLPAVCIETRRAKAAMGAMPNKTDRNDARGLAQIIRTGWYRAVHVKSPTCRSWRALLTARRLVLNKMRDLENGLRALLREAGLKLGTPARKEFAARVRELTAADPVLSVMTEPLLTIIAAMTRELAQLTKRVLDIVRDEPVCRRLMGVPGVGPLTALTFRATIDRPERFRRSRDVGAHLGLTPKRYQSGETDVQGGISRCGDELARPALYEAAHSLLIRSRKWSTLRAWGMQVAKRRGMARARIAVARKLAAILHRMWADGTEFRWGEADAAVAT

SEQ ID NO: 415289 - protein, 425 aa, unidentified
MSLVQPTRPSTVLVAIDIAKLRHDVLIEAPGWKSRKRLILPNTAAEFRLFADFLHGLKHPVRIVFEATGNYHRPLAHFLQAEGFHLELIASLAVARTREAMHNSWDKNDPKDAQVLLHLLKTGVTQHFHDPLVNQIHDFQELSLTYAQISLEKTRTQHRLLTHYLPLYFPEIERYYHATRSEWLLAFLQVFPTPALITRLSMEDFVQQAWTVVGRKVSKQRLLEDIYRTAQSSIGIPVAENSEAVAMFRVVLGEMIRLCQLRDQLEERAACHMKDNADFRRLQQMPGIGPILALTILAEAGDLRRFNHHRQFLKFCGLDLSTQQSGQFRGATKLSKYGNARHRCAFWMAATVAVRLRENSFRDKFERYLRRDPASADRKRMAYVAVAAKMARVAHGIIKTGTDFRCFYEAAAPSGRAASPGPSRP

SEQ ID NO: 415290 - protein, 379 aa, unidentified
MQTTDHLHHETAAQSNFARVLVSLELSRSTWLITALAPDGEKMSRHHVEGGDADALLALLDLLKVRTAQRLGRPVQIVTIQEAGLDGFWLHRRLEHHGILSYIVEPASIAVPRRYRRAKTDRIDGEVLIRTLAAWLRGEPRVCSMVRPPSPEEEDRRRLTREREQLIAERIRLVNRIKGLLFGQGIRDYQPLHRDRWQRLEALATGDGQPLPPQLKAELSRMLERLDLVCRQLEAVEQERDSMAASVEPVAALMQLKGIGPEIAARLWLEALYRTFSNRRQVAAYAGLTPTPWQSGGSSREQGVSKSGNPRLRTTIIELAWLWLRHQPGSALSRWFRERAGDRRGRVRMVAIVAVARKIALWRYVTQGVLPEGADLKTA

SEQ ID NO: 415291 - protein, 392 aa, unidentified
MRISVGIDIAKEIHWVTAIDADGAVQIDRKLPNTPADIATLSDELTALRGTVRIGLDVIGGIAGLAQAMLAEAGFALVHVPGIAVNRARQSTVGGENKSDPRDARTIADQVRTRPDLRPIEPAAELDLEIRLLVSRRGDIVQAQTQRLSRMRDLLVGIFPGLEACLDLKAKGPLHLLTKFVTPAELRAAGKKRLVRHLQAAGGLPKVEDLADLVLIVAAEQTVAVPAEPMTARLIRELANEALASRTRLIELDRELETLLQRHPDAALIRSLPGMGAVLTAELIAEAGNLARFRSADALASAAGMAPVLRQSGRTRFLRRPNGGNKGLKRVFYQSAFCSLNHDDSRAFYQRKRREGKRHHQAVIALARRRVNVLWAVLNSRTPFQTGFKAAP

SEQ ID NO: 415292 - protein, 411 aa, unidentified
MDVYCGIDWSEDHHDIALVDRDGKLLARRRISDDPAGLAALLDLLAEHGDSADDLIPVAIETPRGLLVACLHATGRPVYPVNPMAVARYRDRHSVAGKKSDHGDSVVLAHVLRTDMDMHRPLPADSELAQAIAVLARAQQDAVWDRTCAHNKLRSHLREYFPGFLAAFAAARGGITRPEARAVLAAAPTPAAAAALTLTQLRALLKKAGRTRGIDTEATRLRDAFRIPQMRQLPLVEQAMGQRTQALLGQLDAACAAADDLEQAAVASFNQHPDAGIITSFPGLGSLTGARVLAEIGDDRSRFQDAKGLKAYAGAAPITRASGKTKSVTRRHIKNNRLNAAGYTWAFSAISASPGARAHYDRRKEAGDRHAGALRNLFGRLLSGLHHCLITGQHYDEATAFPARPNLPAAA

SEQ ID NO: 415293 - protein, 443 aa, unidentified
MTRRCFGLDVHREFAQVAIWQDGRVRQAGQVPATPEGLRTFADSLAPTDEVALEATCNTHAIAKLLEPRVARVVISNPQKTRAIAEAKVKTDKVDAAVLAELLAADYLPGVWLSDDATHALRRQVARRANIVRQRTRLKNQVQAILHRNLIPRCPAADLFGHKGRRWLAEQSLPADERQAVGALLRQLDFHGQELRLIDAELARVALRSADVKRLMTIPGVDATVALSIVAAVGTFGRFSSPEKLVSYLGLNPRVKQSGGQPASHGRITKQGRAHARGMLVEAAWAASKTPGPLRAFYQRIRARRGMQVAVVATARKLAVLCWHLVTKGEDYAFARPSLTAQKMRRLELRAGMPSKRGQKGKAAGYSLKEIRARERALTEQAEHAYRQVVADWQAKGPAREAGVAAANGARLSRPSDGATAARQASAPDPALRSGVDHAHSPA

SEQ ID NO: 415294 - protein, 328 aa, unidentified
MSHFIGIDVAKATLQIYIPQGELDLEFTNTKSGLNKLYKTLKLSYKESLQELVFVYESTGCYSRPLEEFCQKMKVNCFKVGAYQSASFSKTIKNRNKTDKVDARMLSAMQMLASEGDIKVPYRDEDAHQLRSYVKYYQSLNKEKTRQKNYLEALEINQEDDYILKQVKKRIKQIDKEQDNLMVLSMKLIKANTEYLNAYNNITSIKGLGQISGIILLYLFLRYPNASRQKMTALTGLDPVQKESGTSLKRKTRISKQGISLVRGLLYMPILSTVQHNNEMKHFYERLIESGKVKMSAQIAVMRKVILLAHSLYKNDEMYDENKYLTFI

SEQ ID NO: 415295 - protein, 415 aa, unidentified
MEKVYDICCGVDVHKKLIVACLRSGRKNEIRRFGATTRDLLEMASWLNEAKCEMTAMESTASYWKPLYNVLENWGLSVMVVNAHHMKAVPGRKTDVQDAEWIADLLQHGLLKASYIPGKEQRELRELVQYRKSLIEDRARELNRLQKMLEGGNIKLSGTVTQINGKSARNILNFITDGGYFDDAKYDEMLANKDIAHNLKASKEQIIDDLNGVLSPIQRRVMKELLSHLDELNEHIQNLDDDIDRFMKQEDQDAALAIQEIPGIAANSAQVIISVIGNDMSRFPSDRHISKWAGLCPGNNESASKRKSGKTTKGNKMLRTTLVNCAHSAVKVKKSYFSALFARISVHRGKKRAYVAVAHSMLIAIYHVLNDKVAFKDLGADYYNQFNRERKANGMLKKLKALGYEVTIAAVPATA

SEQ ID NO: 415296 - protein, 431 aa, unidentified
MKNRANQRIEEITAGTLIVGVDVAKSVQWARFVDYRGVEIGKALSFQNSRKGFENIVARIREISNMKILRYPIEAVMIGMEPTGHYWKPLANYLMNAGYGVVGVNPYHTKKSKELDDNSPTKSDKKDAITIARLVKDGRFFDPYLPQGEYGELRGLTNARVSVMKRANAVKNIITAILDEYFPELWTVFKYPLKGKASRQILRNCPFPAHILAMGESGVLSEIQKAVKKTVGMKKVRALMAVAKDSIGVQNGLAAAKMRLGWLLDELELHEKQLDAVEQAMETELLKTGYAKQFLGIKGIGIVTAASFLGEVGDPLRFQNARQIARYAGYNLVEDSSGKSKSGTVISKRGRKQLRSVLYQMAFTMVGKNAEMKTLYQYLLTRKVNPLKKKQALVVVSKKIITVIYSLLKKQADYKPELVFGAVRKEMLLAA

SEQ ID NO: 415297 - protein, 316 aa, unidentified
MIPPPLFVGIDVAKATLDVAVRPTAETWSAPNEAPGLDALVARLVPLAPTLIVLEATGGYQGPLVAALVAAALPVVVVKPRHIRAFAQAVGLLAKTARIDARVMAHFAEAVKPAPRPLPDAQTQELRALLVRRRQLVAMVSAERARLDTAPAGIQATLQAHIAWLATQIAGLDDALTQARQMHPAWQAKDDVLQSIPGVGPVLARTMLGHVPELGTLSPKPLAALIGVAPFNRDSGTLRGRRTVYGGRAEVRAVLYMGALVATRYHPVIKAFYERLLAAGTVKKVALTACMHKLLTIMNAMVRDLKPWQPQEAPIA

SEQ ID NO: 415298 - protein, 408 aa, unidentified
MERYYLGVDWSDEFHQVWVSDPEGKKVMEKKVLENVDGLSEFGRWLDESRAKGIELWASIEKPAGRIVDFLLDHGVVVYPVNPKALDRVRDRFRMSQSKSDSFDAYVLAEFLRTDHAHLRALEPSSEQAQELKLLTRDHHRLGRHKTRILNLLGRTLKEYYPRPLEVFGDLESKIALDFLTQYPTPQALSNLKRREWNRFAKREHHLAEARCKELWDNLNTPQLKVPDHVVRAKAQLLTVLVVQLKTLIQAVETYSERVKSFFASMPAAELVHSLPGGKSGTTLPMLWAELGDVKSRWESFKHLQAEAGVVPVTKSSGKSCFVQFRFSCNKHMRYAAYWFAFVSLNRSEWANKYYRDQRARGKSHHQALRALGAKWLKIIFVMWRDHKPYDENYHLANITRQKIRQAA

SEQ ID NO: 415299 - protein, 346 aa, unidentified
MRKSIINLSSVTTVGLDLAKHVFQVHCIDASGRVVVAKPIRRNKLLEFFASLPRCLVGLEASGSAHHWARELIKLGHDARMMPPAYVKPYIRRQKNDAADAAAICEAVTRPSMRFVGVRSLENQAALMRHKAREMLVSQRTQLLNGLRGHLTEVGVIAAQGPRHARELAELIEACDETVPFEVCEALAPLVVQLRNLDEAIARLERTIAKLAQQDETARRLMSIPGFGPITASAMAATVQDTSGFAGPREFAAFLGLTPKQNSSGGKPKLGRISKMGNRNLRKLLVVGAHAVLFHRKPHTDPLRMWAKKLIEKKPFKLVAVALANKMARIAFAILRGKTVYREIPA

SEQ ID NO: 415300 - protein, 381 aa, unidentified
MSEYAALVAIDWADQQHAVCLLDPSSGKREHSIVKHTPQALQEWALSLRQRFAGPIAVGLEQSRGPLIYALLQYDFFVLYPINPATLAKYRQAFSTAHGKDDPSDADYLLDLLEHHRNRLRPWRPDDEKTRTLRLLVEQRRRLVSDQTRFSNRLTALLKGYFPQVLGWFEDIRTVLVCDFLERWPELAALQRARPDTLNKFFRSHHSTSNSTNQRRLAEIKSALPLTNDAAVMTSSVINVKALVAQMKTVIAAISAYDRHIEALCQTHDDYHLFAALPAAGAVHAARLTAALGSDRSRWPSADELVTFAGIAPLIERSGKQFRIRWRYFCPKFFRQTFHEYAAQSIQDSFWARAYYSSQRAKGKDHHAAVRALAFKWMRVI

SEQ ID NO: 415301 - protein, 451 aa, unidentified
MVMREPQEIEDEEHEQVLQRVAAVDVAKASGMVCTRVPHDARPGRRRTRVWSVDATTNAVLELAGYLSAERIEKVTLEATSDYWRIWFYLLEAAGLDVQLVNARDVRAAPGRPKTDKLDAVWLAKLTERGMLRPSFVPPAEIRRLRDYTRLRTDLTRERTRYWQRLEKLLEDSLIKVSSVASRLTTVSARDMIEALIAGERDPEVLAGLARGRMRVKHAALVEALTGKFGDHHAELARILLTQIDYLTSQIDHLTIRVEEQVAAIPAAQGIDADGTTGPGAGGGQDAPVLPVLARLDDIPGISRTVAQAIIAEIGLDMSRFPTPGHLVSWAKLTPRTIQSGAKSRDGKTGKGNPYLKGLLGEAAATAARTDTFLGERYRRLVRRRGKLKALVAIARTILVIIWHLLTSRTARFRELGAGYYAIRTDKDKKTRGHVRQLEALGYTVTLAPAA

SEQ ID NO: 415302 - protein, 340 aa, unidentified
MKLYGAIDLHSSNNVTVVIDEQDRVVYQKRLPNDLAMIVEQLSVYRGSLQGIVVESTYNWYWLVDGLMEQGYKVHLANTAAIQQYEGLKYTDDHSDARWLAHLLRLEVLPQGYIYPKGERPVRDLLRKRSQLVRQRTANLLSIQNLVTRNTGESLSANRVKGLDVQQVDELLPDGDLALAVKANLSVMCSADEQTEILERTVTERVKLRPQFSFLKTVPGIGQILALTIMLETGDIRRFPSVGNFASYCRCVGSQKVSNSKKKGKGNTKNGNKYLAWAFVEAANFAIRFNSKIKSFYQRKKAKSKGVVAIKAVAHKLCRACYYIMRDRVPFNITKAFGQK

SEQ ID NO: 415303 - protein, 341 aa, unidentified
MQITTIGLDLAKNVFQVHGIDAAENVVVRKQLRRRQMLEFFKALPPCLIGMEACATSHYWARELTKLGHEVRLMPAKDVKAYIKRNKNDAADAEAICEAVRRPTMRFVQIKSAEQQGQLMQHRARDLLMRQRTQVINAMRAHLAELGIPARQGREGLKELVAIVANDDDTRVPVNARASLMVLAAQLQALQTLIGSIEKRIIKQHRVNEASQRLESIPGIGVIGATAIAATVADPKVFRSGRDFAAWIGLVPREASTGGKQKLGPISKQGDRYLRRILVVGACAVLKLARQKPEKYPWLTQLLARRPFKVVAVALANKMARMAWALLANGGTYRAPRIAAA

SEQ ID NO: 415304 - protein, 338 aa, unidentified
MNIVFLGIDLAKNVFQLCGLNQAGKPVYTKRIGRKELLQTLANIPACLIGIEASTGAFYWQREFEKLRHKVKVISPQYVKTFVRRQKNDGNDAQAIAVALMQPTMQFVPPKSPEQQDIQALHRARQRIVNRRTATVCQIRGLLLDRGSPIGSAVSRARRAIPLILEDAENGLSSRMRRTIAELYELFNDLGRRIHFFDKEIETVFRQSEACQRIARVKGIGPKTATAIVAAIGKGTEFKNGRHFAAWLGLVPRQHSSGDRQALMNMMKKGDKHLRTLFIHGARAVVRVATNNNDGHMNQWVNQLKERRGFNKTTVAVANKNARIIWSMLRNETEYQVV

SEQ ID NO: 415305 - protein, 433 aa, unidentified
MATTKVVCGIDLAQASLVACLLKTEPDGRTEREWRTYAMTQADLTRLKDWLVAEKCSVAGMEGTGIYWKPVHRILEKHMKVVVGNAAHMKGLKGRKTDKIDAEWIARKIRDNDVIPSFIPDEASRELRGLYRLRSSIIKTRTQIRLAVHKTLHAAGIPLGNVFEDLFGVSGMGILEALADGQPVLAQLEKLVKGQSRKNLAAIRLALEVPLTPIQRWELRLQLDRLARVQEDLAKVDQQMEPRLAPHEQVRLGLMTTPGISRDSAGFILSEIGTDLSEFPDPDHFAMWTGTGPGLNETGGKQKPAKSRKGGRYLRSLLVECAHAATRTKGCWLREKFLALIKRMPRTKALVAIAHKLALIIYHIIKDGVVYRDRHQDFAPGRGKTSALARAIRLIQAKGGTVTLPDGFPDIPIRPVGRPRKNSLVPKIAPSSA

SEQ ID NO: 415306 - protein, 346 aa, unidentified
MFLIGCDFHPSWQQVCWLDRTTGETEEKKLVHAPGEVERFYRQFPAPARIGMESTGNCQWFVEMVTALGHELWVGDGAKIRASDSRQQKHDKRDAQLLLRLLAEERFPRIWTPSSQQRDLRQLLIHRYKLVLLRAQAKNGLQHLALNQGLQKKRRLWSRAGQKLLSELPLRPWASRRREDLTSVVKMLDQQIQSLDLAVIEAAEKDANARLLMTQPGVGPITSLAFVLTMGDVSRFQRGKQVASYLGLIPREYSSGGHQRLGSISKQGNRFLRMLLVEAAQGAVRCDPQFRSEYLHRCHEKPKGVAKVAAARKLAIRLYWMLRTQKGYPEVVSIESSSRVPLVGAS

SEQ ID NO: 415307 - protein, 391 aa, unidentified
MSMYFVGIDISKYKHDCCIISAVDQQIVSKFTITNDKDGFEQLLISLNSLSNSEDIKIGFESTAHYALNLELFLENANHSFMEVNPVLIKEYKKSTTLRRTKTDSVDCESIARWLMTVEYKPHSKGFYHAYSLKSLTRLRDRLIRQRSFYLVKITNVLDHTFPEFKPFFNERLSKTAIYLLENYGSAEKMAHMNSVSYDKLRCISRGKFSIQQFLRLKELAANTVGVNNSIFDIELNSLLTLYNSLCKEIKNLEAEITRLIEEVHPHYMSIPGIGPISAAVIYAEYGDISNFSNPSQMLAFAGIEPGINDSGTESHGGRMVKHGSSQLRYVLLNACLPLIRFDLTFATYYAKKRAEGKKHRVAITHVAKKLIRVIYALERQDVDFNAQKLR

SEQ ID NO: 415308 - protein, 359 aa, unidentified
MRIIGCDLHARQQTIAMLDTTTGEVSTLTLMHEGNQVREFYSQLPRPVLVGIEATGSMHWFLNLMDELGIECRVGHPATIRAAEPRKQKHDRRDAELILKLLVEKRFPAIWLPSKELLDLRALLLHRHQWVRIRTRIQNALQAIALANGLRRGPSLWSYEGQAKIAFLPLLPHASYRRSALQGLYRKMEEEIENLTQQVAEQADHRCRSRLLMTHPGVGPVTALATEVFLGDPRRFVDGKALASYVGLIPGERSSGRRQRLGKVTKQGSPLLRFLWGEAGTHAVRRDPELKRFYRRKLVQKGLGKARVAVARKLGIRLWIMLRDEIDYEEFCRRGQKQSGEACAGMPETRMVNDRRPVD

SEQ ID NO: 415309 - protein, 306 aa, unidentified
MVNVGVDVGKASLDVYIYEKSIHWQDDNDADGIKRILKRLSHYKIERLVMEATGRYEFNLAQAAHAKNLPVCIAKPSSVRQYAKAINILAKTDKLDAEIIAEFGAIVQPNITPQKSKNLLAIKDLIARRRQLMGMRTQELNRKNIMGKSFEISCKRIIKYMDQEIIRIERRLAKHVEDEAEWAEKKEILKSAPGVGDTLVYTILADLPEIGELSRTQISALVGVAPINRDSGKMRGKRRIKGGRYAVRTVLYMATLSATQCNPVIKAFYNQLVAQGKHKKVALTACMRKFIIMLNAMVRDRCEWAY

SEQ ID NO: 415310 - protein, 348 aa, unidentified
MKKIAIGIDFSKKTFDVTIKRRMDNDFIELGYSKFDNNEKGFKCFISWVRKSVKHLPEGKGRASWIFCGENTGICSAALSDYLVSKGFDMWLESALQIKRCSGIVRTKDDRGDSSRIADYALRYFNSDVHLHQLDTDAYKKLRALYTLHNILTKDMVAKNNQIKSGTFDASPEALKLANRQLGLIREQLKDVDRQIERMLKENDEFSENYRIMDSIKGIGSITACCIIVKTHNFKYMADARTFGNFAGVVPSHREQSGTSIDRSPHLSKCRDKETKATLSQAVNIALRYNPTIRTYFDGLVGRGVHINKAKNNCKFKLINIIMAMIRSRTTLDIEKYGVAKKKWKDAV

SEQ ID NO: 415311 - protein, 461 aa, unidentified
MSNKRQTGRRKRSVPKKVDWKALEIVQPDAAGIDVGGGEHWVAISPDRDPEPVRRFGVFTADLRELARWLIDKGVRSVAMQSTGVYWMPVFEILEQNGLNVYLVNARDTKNLPGRKSDVQECQGLLKLHTFGLLNNSFQPANEIRIARTLWRQRGNLVAQAGSAIQRMQKVLTEMNIQLSNVLSDLSGVSGMKIISAILEGERDPWTLAALVRPEVKATPDDIAKSLEGNWRDELLFVLQQEVEVYRFYQEKIADCDLQLQRHLKSFASTVDIQAQPLGPKPKGKKGSRNAPQFDLRTELYRITGIDWAQINGIDVLTAQTVIAEAGADLSAFPSEKHFTSWLGLCPTNEQSGARILSRRTRKVVNRATVAFRNAAATLLRSQSYLGAQYRRLRTRLGAPKAITAMARKLACLFYRLVKHGQQYVDKGTEYYEARYREQQIRALAKRALKLGLQLVIPETA

SEQ ID NO: 415312 - protein, 351 aa, unidentified
MDYRIGCDAHKHYSQFAVLDREGHLLQQRRIDHQGGAIQAYLEGFPDETPVALESVGNWYWIADEIEAAGCLPLLTHAAKAKLMMGHVDKTDKLDATGLATLLHNGTLPTVWLPPGAVRDQRELPRTRMALVRIRTALKNRVHSTLAKYALAPEGEIDVFSQKGRTWLQADLGRLPAETALCLTQELELLDQVQAQIVTLEGRIRQAIEDTPAMQLLKTLPGVGNILAVVVEREVGSIERFPSAGHFASYAGATPSVHSSGGKTHYGRMRHQANQYLKWAFIEAANVVARHRTSPGWRSKHVVRLYERIRSRKGHAIAVGAVARHLAEAAYSILKKDERYRELPSSGRARA

SEQ ID NO: 415313 - protein, 345 aa, unidentified
MKITTVGIDLAKSVFQVHAVDERGRSVLRKQLRRDQMTAFFANLPPCVIGMEACASAHHWARTLQKFGHTVRLMAPQFVKPYVKTNKNDVADAEAICEAVGRPNMRFVPIKSVEQQAVLSLHRVRQGFVRARTAQGNQIRGLLGEFGLIMPKGIGNVAKRVPVLLEDAGDELPPSLRQLIGRLTEHLKELDRQVDELETQIKAWHRGSELSRKLEKIPGIGPLGASALVASIADANSFENGRQLSAWLGLVPRQDSSGGKPKLLGISKRGDVYLRTLLIHGARSAILAAQRKSVNTNVWLADLLNRRHPNIAAVALANKNARTVWALLAHDREFRADYAPEVSAA

SEQ ID NO: 415314 - protein, 440 aa, unidentified
MHLGDTEGHVKEPEWAAFIAVDWADQKHDWAMEVPGENTRERGQVAHSPEALDAWVMQLRQRFGDRPIAIALEQSRGALLFTLSKYANLVLYPLHPRTASCFRQAMYPSGSKNDPIDADVQLDLLVKHRDRLQVWKPDTEDTRLLQFLVEDRRRRVDQKTGLLNQLTGRLKLYFPQLLRWFPVDSALASRFLERWPDLQSAQKVPRQKLRAFLTRDARSCPADVDQFISQIRDAMPATHDRAVVDSSTVFVQGLVGELQLLRATLQKYDKEIEAIVQKHPDFPIVSSFPGIGKALAPRLIAALGTQRERFPDASSIQSYSGIAPVREASGTREWIHVRWACPKFLKQTFQEWAQHSMARCAWARRHYEAQRARGKGHQAAVRSLAFKWIRVLFRCWKDRTPYDENRYTESLVRRSTAPNTDVRIVWKNVAGFLKPALFSA

SEQ ID NO: 415315 - protein, 423 aa, unidentified
MKEWKEITHYAGFDWARDHHVVVVVDRQGQIVADFQFDHSVEGWKRFRQKTAALESVAVAIETSQGAVVDQLLQYQYTLYPVNPAAAASYRQRKAPSGTKTDHLDAWSLADALRVDGHGWKALAPMDELSAQLRLLCRDEVALIEQRTALVNQLQQALLEYYPVALEAFEDWTMPSTWDFIIQFSTPEALVKAGKRRWKKFLHTHRLWRAQTLEKRLALFAQADQFKAGAAITRAKSQLALSLCKLLRTLQEQLDQYRKQIEALFENHPDHHLFGSLPGAREKLAPRLLAAIGSDPKRYGSFQVLQSFAGTAPISFQSGQLRRAKVRWACDTFLRHTVHLWADCFRKASAWGQAYYRKKRQDGKSHACALRCLGQRLLKILFRMLTERKPYDAELHARNQQKHGSWVLALMPNPTPHISEQLP

SEQ ID NO: 415316 - protein, 455 aa, unidentified
MARKRKSNPKSDKKTGASLLSCLNLNAAGVDIGATEIYIAVPGDRDPQPVRCFSTFTEDLHAAAAWLKACHIETVAMESTGVYWIPLFQILEARGFKVFLVNAHHVKNVPGRKSDVSDCQWLQYLHSVGLLRGSFRPEQAVCSVRSILRHRDSLVQMASSHVQHMQKALDQMNLQLHHVISDITGLTGIAILEAILAGERNPHTLAALRDRRIKASADTIAKSLVGDYRREHVFTLRQSLAAFRHYQELIAACDREIAQSLEEFESKLDPPPGSTSLSKDGSQPKTSEPGFDLQTHLHRIFGVDLTQVPGINVLTTQTLLAEIGPDFSHFANGPALTSWLGLCPDNRVSGGKVLSVKTRKVKNRAATALRMAAQSLHRSQSFLGHFYRRMRTKLGAPKAITATAHKLARIIYHMVTTGHAYDETICAQNEVQNRQRMEARLRKQAREFGLQLVAL

SEQ ID NO: 415317 - protein, 412 aa, unidentified
MDVIHPRCAGLDISKTDAKVCVRINGAGRRKTSETVTTFGATTRQIMSLRDHIAAQQVTCVVMEATSDYWKPFYYLLEDLPGVEVMLVNARHVKNLPGRKTDVADATWLAQLGAHGLVRGSFVPPEPIRQLRDLTRTRTAVTRERTREIQRLEKLLEDAGIKLSAVVSDLTGVSGRAMLEALIAGGTDPAAMAELAKKRMRVKIPQLTEALYGRFTSHHAFLTRMHLDLIDQHTAAIERLTDRIEVVIEPFRGFRDLICTIPGIGGYTADIVVAETGADMTRFPTAQHLASWAGTTPGNNESAGKVKSRRTRPGNSYLQGALGTAAMSISHTHGTYLAAKYRRIATRRGPLKANVAVQRALLVAIWNIATTNTTYHDPGGDYFTRLNPQKARNNAIRQLEAMGYHVTLEQAS

SEQ ID NO: 415318 - protein, 416 aa, unidentified
MKASKSRIDRSVNDHEMIVGIDVAKHKHVAKILFPNGSESQPFSFSNHRRGFETFLAWVCLHQKRATCNSIIVGLESTGHYWEPLAFFLEAIPRIRVVQVSPKHVKKTKEVYDNSPGKTDRKDAGVIAMLIQMGRFQRLVLPRGPYAELRGYARLRERKMVELGVQRNLLHSLVDWVFPEYGSLFPKLEGKTSLTILRHYTTPEQISRAGLPRLSNAIRQASHGRLSEACAERLMEAASATIGLQEGIEAATFAIRNIVASLERIQQEIVLIEKQLAKVLDQIPYAQQLLSIPGVGKVTVAILLGEAGDLRRYQRAEELIKLAGLNLFEISSGSHQGRRHISKRGRPLLRKCLFFAALRTVKTQGAFRAVYVRLTQANRMQKTKALVAISRKLLRLVFALVRDDMTYQPRGELRAA

SEQ ID NO: 415319 - protein, 388 aa, unidentified
MTYVGIDISKFKHNCFIQNDLGEVLHSGFAFTNDPAGFALLERELAYFSKADLRIGFEATGHYSQNLMAFLESNGYTFMELQPSLVAKYIAGQTLRRTKTDKLDTRMIAGYMDTIAYRPYPQGAQRLYALKSLTRFRQGLVRRRSEYMVLLTNILDHAFPEFKPFFGNKFTVTAFYILTNYPSPQHIANMNSRSFDILRRKSRGKFSMDKFVKLKALAKNTVGIWSQALALEWQTLLELYSELDAKIDEIEAEITGIIVDMDPPTLSIKGIGPLSAAVIVSEFGDFSRFANPNKMLKFAGLEPGYFQSGTWEHRGRMVKRGSSPLRATLMNLCGPLMLHNEVFATYYYKKVSEGKAHRVAQSHMVKKLIRLIFTLETRGEKFSPELQR

SEQ ID NO: 415320 - protein, 342 aa, unidentified
MSVYVGIDVHRKRSQVAVINQGGQVLANRNVPNGAEPILKVIGGLPPGTPAAFEAACGTSWLAGLLEDYGFAPHLVHPSRCKAIASARLKNDKVDAAILGQLLRADLLPEAWIAPAPVRQLRALLRHRVALVRLRTRLRNRIHAIVADYGYDRPGGGYRTGPGRAWLASLELPAVSRELVEDYLGVIDALQQRIDRLDWEIRQRARAGPRVKVLTRLPGVGPFTALVILAEVGDISRFGSARQLASWAGLTPTVRGSDRVAHCGHISKEGSVWLRWVLCEAAQAAERSPEFAVTFQRIAKRRGKKIATTAVARKLATRAWHLLADAGHAAAPPPAAPQTAAR

SEQ ID NO: 415321 - protein, 416 aa, unidentified
MIEQQRWYAGVDWASANHHVLITDVDGQRIGEKIFKHGGEGLADMAAWLMATSGATEPDQIHIAIEVPHGPVVETLIERGFKVHAINPKQMDRFRDRFTLAGAKDDSRDAETMASALRTDPRCFRLLAVGDPVVIELREWSRIAEDLGAERIRLTNRMREQLWRYFPAILDLDSDLGAEWLLDLWETVPTPAKASRVREATITKLLKRNRIRRFDAAHVLAVLRQQPVGVAAGTTEAATAHIATLIARIRLLNAQIKQAHERLDTLTSRLALNGEAEPGQEQQHDVKILASLPGVGRIVLATLLAEGFDALQRRDYAALRSLTGVAPVTKRSGKSLIVIRRQACHQRLSNAMYHWARVAVQHDRISRAKYTALRSRGHSHGRALRSVADRLLNVACAMLKTGTTFNPLLATQNNPC

SEQ ID NO: 415322 - protein, 428 aa, unidentified
MDETNGNRVERFRQFKREIRGSEEYLLVGIDIAKEKHHAFFGTATGKTLLKRLIFDNSRDGFERLLIQVEALKVHHGLKRVVMGMEPTANYHKPLGEYLIRKGYEVVLVGGVAVKKNRELLDNRWDKHDTKGAANVADLISQGKCLFYEYPTLALRELRDLLSLKRRLKKQEHGYQVRIRNHLLAQYFPEMDPYYEQSKVGSLGIVKWCLSPLKISEMGLDEFVRLVSCRRVGIVQERRFRGIWEKARESIGCEAGETVAFGASLMVDGLRQMREALKAIERKIEEVCKGFSEYECLLSIPGFGPDISSKMLGAIGDPFRFNNGKQVLKLSGFDLSADRSGKDSEEGLPVISKKGKSDLRYALYQAALIASVKNRDVMIYYTNKLRGRERERGIHIKMRVKLAAKLLLVAWTLMKKKEEFDPAYLNID

SEQ ID NO: 415323 - protein, 354 aa, unidentified
MKRTTKYVALDVHQAMTVASVREEGGRIIARSILPTEESAILEFFRGMRGAIQVTFEEGTQAQWLYDLLVPVVDRVLVCDRRGEKRHGRKDDQADADELSELLRRGGLRAVYHGSPHRSTLRELTRTYQNVVEDSTRVMLRLKALFRARGIKAPGKRVYHPRDREEWLAKLPDGGARFRAQTLYAQLDVLRELRPKAKAAMVAEARRDPAWAVLGSIPFFGPVRIALILAIMRTPWRFRTKRNLWAYCGLAVVTHSSSDYELVNGQVVRKRRAPMTRGLNRNYNRELKDVFKGAATAATGRPGPLLDYYEGMVARGMREELARVTLTRKLTALTLRLWKKGEHYDPAQLTKQAR

SEQ ID NO: 415324 - protein, 322 aa, unidentified
MSSFVLGIDVSKDKLDCALQLPDGKLRHKVVSNAPEGFKRLDEWLAQRGVGQVHVCMEATGIYWEASAEYLSGREHTTVSVINPAQIKAFGASRLVRTKTDKVDASLIAQFCAERCPPPWQAPSAQEQALRAMVLRLEALQNMHRQESNRLLVARDAVREGIEAHLAWLDEQITQLVRQINDHIDNDPDMHDKRQLLESIPGVGERTVAVLLAFYADPARFGNARQAVAFAGLDPRQHESGSSVRGRSHLSKVGHAFIRKALYMPAVVTAYKTTWGGRFRQRLVRRGKHPKLIIGAMMRKLLQVAYGVLKSGKPFDPTLHET

SEQ ID NO: 415325 - protein, 313 aa, unidentified
MSQYTSFTGIDVSKDTLDVHTLPDGQAWHVVNDEQGVGALLQRLDPGSLVVMEATNVYWRLVASKLASAGLAVAVVNPRQVRDFAKATGQLAKTDATDAQVIALFGQRIQPPVRALPSEQCQVAVELLSRRAQLMGMYVAEKNRLGTARAKRVRSDINTTIGFLQKRLDALDKELDQWLKSTPIDQSRFDLLKSFTGIGDKSAKSLLIALPELGRLNNKQISALAGLAPFACDSGKKKGARHIRGGRTAARAALYMPAITAMRCNPVIRNLYERLIKAGKHHYVAITACMHKMLVILNAMIRSNTPWHCPQTS

SEQ ID NO: 415326 - protein, 421 aa, unidentified
MLKIHRFNCAGLDVHKNLIVATIGITDKKTHVTEYIQKDFSSLNFDLYNLKNWLIEHECFDVCMESTGKYWFPVFNVLETEAKMNIVLVHPKYVKAIKGKKTDKKDSKWICDLFKHDLLKSSFIPPKDIRELRDLSRYRFKLICMRTSERNRYQNSMTVSNIGLASVVSDTFGKTAQAVMNEVLSTEVIDEDKITKLIHGKCKNKDKIVESLKSSKIEPDQRFKMTEIQSHMNELNQHIEAVEVEIIKRASRYFDDFLHITEIDGIQLMSAILIISEIGVDMTQFETDKQLCCWAGLSPANNESAGKKKSVRINKAGQYLKPVLVQCALAAIKNKNSYFGQKYTKIKKRRGHKKAIIAIARMMLVSIYHMILTGEKFNPSDYESFKNPKPQKEKNNYTVETALDFLKSQGFDVSTIQDIPK

SEQ ID NO: 415327 - protein, 333 aa, unidentified
MNKTIVRCGVDIAKHVFAIHGVNVNEQVVLKRNISRNKVLELFVQLPPCIVGIESCGGSHYWSRELTKLGHDVKLISVKNVIPYRRKLKNDANDAEAICEAISRPRMGFVASKSESQQAVLMAHRVRTKSVANRTSLINQLHGHLLEFGIVVVGGRAKLKLEAYEIIEQAILPPLAIDMLRELLEALKIEEERSADLDKKIANWVRHDHVAKELCKLDGVGTLTASAVVATAGNAKVFKNGRQFAAWLGLVPRQYSSGGKNKLGRITKQGDKYLRCLLIHGARTVMLQSRRGKGDHQEWIEKMRERKPDNVVAVAYAAKQARMLWAVMTKAAA

SEQ ID NO: 415328 - protein, 418 aa, unidentified
MQTEFSQYTAVIGIDWADKKHDVCVQDMATGKRRASQVRHRAEDLDEWARSLHRRFGGPIAIAVELSKGPIINVLQKYDFFVIFPIDPSKLANHRKTFTSSGAKDDPTDAEFALDLLSKHTEHFKPLNPQSVEMRTLMTLVEQRRQLMNDRVRITNRLRSTLKQYYPQPLEWFDHIDTLLFCDFIRRWPALSQVRRARRATLEKFFHEHNMNRKALLERRIKAIKSAMPLTMDDAVIVPHRLRALALVAQLEVTLECIKQYDTEIASLAPQHPDYELFDPLPGAGPVFTPRLMVAFGEQRERFNNAAEVQKYGGLAPVTKRSGQSTWIHWRWQCPTFLRQTFVEWAAQTINKSYWAGLYYHQQRARGCSHQAAVRALAFKWIRILYRCWKTRTPYDETRYLKALQERGSPLLKMAEAA

SEQ ID NO: 415329 - protein, 355 aa, unidentified
MSQEKYIGMDVHQATISVAVRDVKGKLIMECVLETKAATILEFIQGLRGTLALTFEEGTSAAWLHDLLKPHVSRLVVCDPRKNALLKDGNKNDRVDARKLAELLRTNQVKSVYHGKHGTRALKELGRSYLTVTKDVTRVMNRIKSVYRSWAIPCAGTSVYTPCHRGDWLGKLVEPGVRVRAEHLYQQLDSLQPVRLEARRQLLLESRKHAAVKLLRQIPSIGPIRAALLVALLQTPHRFRTKRQLWAYSGFAVEVHDSGEYRWVRGKLQRNRERITVRGLNDNHNQDVKNLFKSAAISASTRPGPLHDFYIARIESGMRPTMARLTLARKIAAITLTMWKKGVSFDPKQLQPQAA

SEQ ID NO: 415330 - protein, 365 aa, unidentified
MFLVLSFLKGGDPMNTLFVGIDVSTKNNQVCAVNFNQDVFFNLSFPNNPDGCDLLITSVLAFVDKEKFDSIIIVTESTSIYDYHICAYLSSQLSIVGTSVIIYSVNAKSIANYKKSYIEMEKTDLGDAFLIADFARVGRCKKLRPFKAAQHIALKRLTRERYHLAEQLIREKNYVLNNIYLKVSGLMTLPHKDLPFSDNFSASNTKFLTDYASPFDLAEKPLDEIIEYFKSASQNRCDDYGKIASLFDKAIRSSYRLDKTAYDPITISITASINLIQCIESQIKMVDKAIEKEMKGLYPNGYQSLMSITGIGPVFAAGILSEIGDISYFKSDASLAKYAGFHWKKNDSGNFIACLLYTSPSPRAS

SEQ ID NO: 415331 - protein, 388 aa, unidentified
MNYIGIDISKYKHDCFILGDFGEVLNTGFSFSNDAQGFSELLQTISEYDREHTRIGFEATAHYALNLKLFLEKNHFSFMELNPVLVSKFIKGQTLRKTKTDKLDARIIAQYMEQVVYKPYPTSFYHNYSLKSLTRLRDALVRQRSRYLVQLTNVLDCVFPEFKPFFGKRFSVTALYILEHYGSPEAIANMNSRSFDILRRKSRGNFTMDKFIQLKQLAANTVGEFNQIYALEFDTLLELYSQLNSKIISLEVEITIIISQINPPSLSIKGIGHLSAAVIVSEFGDFKRFSSPDKMLSFAGLEPGYFQSGTSAYSGRMVKRGSGILRYTIFNCCRVVRLHNEVFAAYYHKKIGEGKPHRVALSHLAKKLVRLIFTLETTGATFDPEKLR

SEQ ID NO: 415332 - protein, 343 aa, unidentified
MQHYAGIDVSLECSSVCVVDATGKIVREGKAGSDPESLIAWFGALGFGLARIGLEAGPLSQWLFAGLRKAGLAVELLETRHVRDAFKAMPVKTDRKDARGIAQLIRLGWFRPVHCKSMGAQETRALLTARKLVQSKLHDVEMSLRGILRGFGLKVGATTPRSFEGRIRELVAGHPSLEELAASLLAVRGVLVREFNGFERRVRTAARQDVRARLLMTTPGVGAIVSLTVASAIDDPARFRSSKMVGAHFGMTPKRYQSGETDITGRISKIGDKGVRTALYEAAHIILTKPLKGCSALKSWAMRIAKRAGMSKAKVALARKLAVIMHRMLADGTPFNSAATAAR

SEQ ID NO: 415333 - protein, 347 aa, unidentified
MLADQLDYIVGVDPHRDSHALAIVHVVSGAVVVESTVIANSDGYAQALKLVDRHAPGRRAFAVEGTGSFGAGLTRFLTARDERVLEVGRLRRERRSGGKTDALDAVRAARSVLAQERPATPRAGGERQALQALVAAREGAVNAKRAGLCQLRDLLITTPEPLRSELRPLTRARLLQRLAATRPGGGRDPELRGSILALRSIARRVLQLTAEERELAREIETITRKLAPQLLDQPGVGPHAAAQLLLSWSHQGRISSEAAFARLAGAAPIPASSGQTIRHRLDRSGDRKLNRALHMILVTRKRSHPATIAYIERRIQEGKTRREANRCLKRYLARNLYRLLEHPPMTI

SEQ ID NO: 415334 - protein, 424 aa, unidentified
MPYRIAGIDVHKKMLAVAVADVAVDGDFDFERQKVGTTPADLRRLAEWLVEQDVEEVVMESTAQYWRPVWEALEQHWRPRRRARDGAPRLAGTLHLAQAQSNRGRGGRKPDFPDAERLVKRLVAQELTLSFVPDAEQRLWRTVMRRKYQVTRNRVQLQNRLEALLEEAHIKVSSLVSDLLGISARRMLQALADGETDPVALATLAAPRLRATPDQLCDAFQAGRTLHPVYRRLLKLTLEELRMIEGHLGQLDQQMADLLAAHHDAVQRLAEVPGLGVDSAQQIIAEVGATAATFPSPKHLASWMGACPGNEESAGVNYSHRCPKGNRQMRRVLNQAANAAVKARGTIFAVVYRRLVPRLGHAQTIGAITHRLCRLIWKILHERVRYEERGPSVSAEATKVRARKMIRELRSLGYRVEIPSGNPA

SEQ ID NO: 415335 - protein, 419 aa, unidentified
MTRRIAGIDVHKRVLMVVVLSVSEDGAAASTREKTKCGTLSTELEELRQWLREKGVTEVVMESTAQYWKPVWLALEGGFELGLAQAWSNRAPRGKKSDFRDAERLARRHVAGELTMSLVPGAEQRQMRELTRRTAQLNRELVRIQNHIESLLEPARIKLSSVLSDLFGATGRRILQALAQGESDPEKLAALADDRIRCSPARLAEALRGSRTPMQRRLLKQMLQDAELAEAHKKELEEMTGELMRQHSGAIQRLTGVPGIRLRTAEDVIAEIGPDARAFPSAARLASWVGACPGREESAEHNHSARCAKGNMSLRRALCEAAQAAVNTKNCRFQQKFRRLLPRLGYAKAIRAIVRLLCIVIWNILHQGADYIERGGQTTPGAIRRRAQRLNKELRAAGLSLIIVPLTSQTRTISAATPV

SEQ ID NO: 415336 - protein, 347 aa, unidentified
MKITRIGLDLAKNVFQVFGVDAQDKRVLSRQLKRKDMQAFFQALPACLIGMEACASAHYWAWVLTEMGHTVKLIAPQFVKPYVKGNKNDANDAEAICEAVSRPGMRFVPVKTIEQLHIQARHRVRSELIKQRTAKANQIRGLLAEYGIVIGLGVRCLRHHLPEILEEAENRLQEDFRLLLTGLRDDLVYLDERIKTEDKAIGTLANTHASARRLQQLRGVGPLVATALIAALGDGRQFRNGRQASAWVGLVPGQHSSGGKQTLLGISKRGDTYLRTLLIHGARAALRAARSKTDPLSLWLQGLCARRNPNVAAVALANKTMRLAWVLLRREEDYDPLHGHARPAQPA

SEQ ID NO: 415337 - protein, 341 aa, unidentified
MDEYIGLDVSMKETAVSIRRAGERIWRGKCASDPRIIAELIRKRAPTVKRVVFETGPLSIWFYHSLRTEGLPAICIDARHAKAALDMATNKTDANDADGLAQLAEVGFFREVRVKGFDSMLTRTLVAARTRLVRITTELSNQIRGVMKTFGLLVPAGKGSIFEKSVRSLLADQDGLTSIVLPMLEAWRGIRIRAAELGRQLVRDARQNQACRILMSIPGIGAITATAFTTAIERPDNFKKSRSVGSWIGLTTRRYQSGEVDYDGHISRRGDAHLRGLLYEAAAVILTRSLTDSTLRTWGLKLRERIGFKRAAVAVARKLAVIMHTMLKTGELFNPNAGAIA

SEQ ID NO: 415338 - protein, 470 aa, unidentified
MAAVMIGVDPHKASHTAVAISAAEEPLGELRVRACAVQAERLLEWAAAWPQRTWAIEGAGGLGHLLAQQLLAAGERVLDVPPKLGARVRLLAAGNTNKNDPNDARSVAIAALRSAGVREVRPDDHAAVLKLWSKRHRDLGRTRTQVACRLHAVLCELIPGGVSKHITAAAAARLLEPVTPARAVEAARCELAAAFLEDLRGIDARIRETRKKLTVAVQAAGTSLTGLFGVGPVVAAAVIGAVRDVSRFGGRDHFAAYNGTAPIEVSSGQRKIYRLSRRGNRRLNHAIHMAAVTQIGHRHSEGRAYYDKKIAEGKTPKEALRALKRQISNAIFACLQADARRAAARAEGPGGQPGNDSVASAAGLHPGHRLFGQATPGPGHHITTAAGNPAPGPVSARGGAGHSPVAANLPPAKPQVQVERPQRSEDERPGGAARRRPHSAARKARGQGSPVKPQRPKGTSQAAKKTDGTP

SEQ ID NO: 415339 - protein, 430 aa, unidentified
MEVIYPKACGVDVHKSFIVAVICDSTSVKPQYLRNRFSTFNNSLIEFRNWLLANDCQNVCMESTGKYYVPVYNALEGHISNVVVANPKWVRCIKGEKDDNKDAKWIADLFKLGIVRGSFIPNKDIRILRELTRYLYKLTNMRTSEKNRFTNALTVGNCKLDLVFSDIFGKTSSAIINTILSQNEYDDEDILKNIDKHCKSSNEDILNSISGISWESSQKQRMNVIQEHIDYLDKSIKTVREIIDSIIAPYESAINLLCSVPGVDRKSAITIISEIGTDMSQFSSHYRLASWAGLAPGCNESAGKKKSVKISRAGVYLKPALVEVAHCAVKDKDNPYYANKFNVLSKRRGKKRAYIAIARKILVAIYHMLSTGELFNPSDLSRVETSDKDKIKYTKNNFMQSTKQLISLGLTIDDLQTLIQSKISESTPVI

SEQ ID NO: 415340 - protein, 345 aa, unidentified
MMKVIGIDVSKLHLDLALLDQDGKVLQEAHISNKASCLRKLLRSWIKGQCSGARMLVCLEPTGPYSFEAIKTMLAMGVPVWLAHPADIKNSLGMTRGKSDQVDARRIAQYALRFGDKARFLDETFLHLQELKDLLAARDQFVRERAKYRMQQGDQLKAMQGRAKACFKRCSDNMIAALTRSIAYVEKQVEAFLTSDPQLSLKRDLAMSVTGIGPVLSGELLVVTRGFTRFTDPRQLVCYAGLAPYDYSSGTSIRGRTGVSEKANQYLKSLFHMAALNAVKVPGDLQTYYQRKLAQGKAPMTALNAVRAKIVHHLWAVLESGIPLHAFQTPLANAIEIGVGVVSIR

SEQ ID NO: 415341 - protein, 370 aa, unidentified
MLNTTTFVGLDVHARSIKAVALDAMTGEVRSATFGYDAAEVAGWVSSVDPSAKCVYESGVTGFDLQKRLASMGVDCVVGAVSKMIKPPADRKRKNDRNDAEFLARMLSVGNVVEVWVPDDGCEAARDLSRALDDAREDLKRCKQRLSKFLLRHGYVFSETTPTGRRKGSWTAAHWAWIKSISFPEKADNDVLAYYVDAVRQAMEDKARLERLVEAEASKPRWKRRIDSIRCLKGIDVTSAADLVFEAGEFSRFKNARSFAAWLGLTPSEHSSGESVRQGGITKAGNKHLRRVLVESAWHYLGCSPHSKDLAKGQVPDPAARRHAAKGVRRLVERRRAMLERGVHKNKANVATARELACWCWAVGRMVENG

SEQ ID NO: 415342 - protein, 421 aa, unidentified
MDVHKKTVVACVLVTKQDGQVSQEVRTFGTTTGEILALAEWLKSQEVNSVAMESTGVYWVPVYNLLEGALELLVVNAQHMKAVPGRKTDVSDAEWIAQLHRHGLLRGSFVPPKPQRQLREVVRHRTNVVERRSQSVNELQKVLETANIKLASVVSEITGVSAMEMIRGLIEGKNTAEVLAELARGRLQDKKPQLRAALTGRLEKHHRFILSQLLADISFCEEQILELDLEIRIQMKEYEELIKRLDEIPGVNRRIAEVIVAETGADMSRFGDAAHLVSWAGMCPGNNQSGAKRRTSRVRQGNKSLKRVLVEAAHAAGRKKDSYFSAQYRRLSARRGKKRAKVAVGRSILETTFHMIQRGATYKDLGSDYFDRRDPERLAKRLAERIVRLGYKVSFEPTGKPATGYRLNYEPVHSLDQIKAA

SEQ ID NO: 415343 - protein, 415 aa, unidentified
MLKIVYPICCGIDVHKTFVVATIASTDRENITTYQTKRFSTFTKDLRALSLWLSNNQCVYVCMESTGKYWIPVHNILEPSCRITLAHPKYVKAIRGKKTDKKDSIWIADLHKHGLVPGSFIPPADIREIRDLLRYRSKLVSFASSEKNRVQNSLTVSNIMLSSVVSDTFGKSASAILSHLLKHPYDKDFDFLPLLHGSMLKKKDDIALAIDGTISEVQAGKINLCLSHMDVIKSYIAQVETTAMRLAASYSGAIKIIQSVPGISQLSALAILSEIGADMSKFHSAKHLCSWGGLAPSNDQSAGKKKSVRISRAGVYIKPLLVQCANAAIKDKNFLHYRTRYEAIKRRRGHKRAIIAIARMMLTAIYHMLSTGELFNTELYEDSQCKPGFVASSEEHAVKLLQRLGYSVTKITQSA

SEQ ID NO: 415344 - protein, 362 aa, unidentified
MHRNAPRAAAVYGVDLGKNLFHVVGLDERGVVVQRVKFRRDTVLAFFARASPSLVGMEACPGSQWLARKLQALGHSVRIVPAQFVKPFVKSQKNDTIDAEAIAEAVTRPTMRFTQVRTTEQIDLQALHRIRDQLVRSRTRLINQARAFCLEYGVAIRQGTGVFRSDLPRVLADDTNDLTPAMRVMLSELFDDVERVDQRIASVTRQIEALAAREGRARRLMTIPGIGPLAATALLAAVGDGRQFRRARELAAWLGLTPREHSTGGKTTLLGISKRGNRYVRKLLVHGARSCITHLNRTRDRIGHWLDALQSRMHVNKVTVALAAKIARMAWAIITRPGAIYERQDSGRRLTAPANRKRGSGT

SEQ ID NO: 415345 - protein, 455 aa, unidentified
MSRSKAAKVGDMPMIVPGAAAIDIGSTMHMAAVNPDADDRPVRAFNTFTGGLHDMARWFKACGVTSVAMESTGVYWIPAFEVLEEHGFHVILVNARYAKNVPGRKTDVNDASWLQRLHSYGLLRGSFRPKAGVATLRAYMRQRERLIEYSASHIQHMQKALMEMNVQLHHVVSDITGATGMRVIRAIADGERNPATLAQMRDVRCHASTETICSALTGNWRDEHVFALCQSLALFDFYQLKIVECDRKLEIALRDLEGGDGYDIARLPKIRTKTKQVNAPDFEVRSALYRVLGVDLTQIHGIGPSLALKLVGECGTDLAAWPSSKHFTSWLCLAPGNKISGGKLLSSKTRRSSSRAAALLRLAATTIGRTDTALGAFYRRLSAKAGKAKAVTATARKLAVLFYNALRHGMAYSDPGAAQYEERYRSRVIGNLQRRAKAFGFSLQELPSEPETAVS

SEQ ID NO: 415346 - protein, 345 aa, unidentified
MQIKSIGIDLGKTTFHLVALGIRSQVVIRKKFSRSQLLVYTANLPPSLIGMEAGVGSHFLGRALREQGHEVRLIPAQFVRPFVKSNKNDYRDAEAIAEAVERENMRFVPIKTEDQLDLQALHRVRDRLVARRTSVINQIRAFLLERGISFRKGPASLRRQMPEILENADEKLSARMRRLLDFLWQEWKGLQMQIESLNNDLERIANSDPSCVRLQQIPGVGPLVSTAVVSAIGNGAAFKKGREFAAWLGLVPRQWSTGGKAKLLGISKRGNPYLRKMFIHGARAAVLRVKREGSSLGQWMSGLETRTARNVVIVATANKLARISWAVLASGNDYHPRHKALAFSN

SEQ ID NO: 415347 - protein, 365 aa, unidentified
MFKGNQVNFAGQTIFVGLDVHKTNWKVCVVYNGEKAASFAQDPDGKQLIKTLKDKFPGIEKINLVYEAGFSGFGAYRLFKELNVDCIVVNAADIPTSDKDRKTKTDKRDARKLAFECSKGTLQGIYVPDEKIEAIRALVRYRKSMVNDRTATINRLKHYLMCYSLPVEEKLAELTKQVICRLREIELTVQSKEFTLGHLLDEYEHRSTVIVQITNKLEGLIRQNEELREIHDLLRSVDGVGLITALTLQTELIDMKRFKNKDLLCSYVGLVPDIYSSNDKYSRLGMTNRANKHIKPILIEASWSAIKKDPALKELYYRYKDKMPANKAIIRIAKHLLLRIRAVWVNKEVYQRGMLSPLKEPAIAA

SEQ ID NO: 415348 - protein, 356 aa, unidentified
MSRDIKYICIDVHKEASVIAVLNGSGKLVMESIVETKASSILEFIHGLRGELHVTWEEGTWASWLYDLLQPQVEQVLVCNPRRNALLKEGSKSDKLDARKLAELLRTGMLRPVYHGENGLRTLRELARSYQSISKDLNRVMNRLKALYRGWGIACAGTQVYALRYREEWMNKIPHAGVRRRAELLYQQLDGLQGLRRTLRPELLAESRKHKAVKLLRQIPCIGPIRAARLMALMQTPHRFRSKRQLWTYSGLGIETHDSAQYRYVRGQLQRSKKPQQIRGLNQNHNHEMKEIFKGAATRASCGRGPLHDFYAALLAKGMKPEMARLTLARKIAAITLTLWKKEERFDAEQLKPQAA

SEQ ID NO: 415349 - protein, 428 aa, unidentified
MNASLNNDDTQNNYAAFIAIDWADRKHTFSLKVTGQTKKETGTLEQKPEIIGPWVAQLRERFAGRPIAVAVEQSRGALIHALLAYDFLVLYPIHPTTVAKFREAFRFSGAKSDPLDTDQILEILTKHLELLKPLNPDTEETRLLGRLVEDRRKAVDLRTSQIQALLASLKEYFPQAIELLHGNLTSRLAGDFLKKWPTLQAFQQAKPSTVKRFYYGHNIRSPQVIEGVLKLALTAQPLTTDSAIIESGLRLSQMHSQMIQTLNPLIDEYDRRIEKAFHDHPEAHLFSHLPGAGPALAPRLLAFFGTDRGRYEAAENVQSFSGVSPVTKSSGKTRVVYFRQACPKFVRQTFHEFARLSVAKCQWARNYLDYYTGKGKKYHTVIRALAFKWIRILFRCWKNRTPYDETRYMESLKKRGSIFATLHVEEKS

SEQ ID NO: 415350 - protein, 353 aa, unidentified
MVIIGIDPHSTTHVAAAVDEHGQLLGSIQVGASPQQLQGLAGWVGGFQGPRLVAVEGARGYGLALTRVLLAAGERVVDVAPALTAAGRRRGRARGKDDRIDAIAVARLARQELGLPALSLVGLNADLKLLVDARDQLVVEAGRVRNRLHALLLVLAPGYRTSTGALAKRPALRRARRLIERAAPGEAVRARLALAAIARLEALEDECAQLEHEVKTALTPLRPTRLLAICGVGALTAAKLLGETHSVDRFASAAAFAAHTGTAPIPVSSGNTQRHRLSRSGNRQLNRALFTIAMCQARWDPNARAYLARKRSEGKSPAEARRCLKRHLANVVYRAMVADAQALQATPTTNGLT

SEQ ID NO: 415351 - protein, 384 aa, unidentified
MAMEKFDACISIIDQQQHVMIRSQCSFNNNIKGFETFILWVNKNTKLAIPAVYLMEATGIYYEQLAWFLHNKNCSVSVVLPNKAKKYKEALGLKSKNDRIDAKGLAQMACEQSNTSWKPLTGNIYLLRLITRQIQSVSEQSTVLKNKLHALQYGMYRDKAIEKMHARQLDLLQKNKKSLQLRVEQIVEKDEILKRKFKHIGKIKGLGLQNLAVIVAETNGFTAFENIAQLVSYAGYDVVENQSGKRSGKTKISKKGNSHIRRCLHFPAFNMIKYEMAPFKNLYERVYEKSKIKMKAYTAVQKKLLEFIYILWKKDEAFDPNYQDQKSGDVEPVPSFASVPQEPSIACSDQQEKIKPVKQKITPAITRVTQDKHPSKYRRMPSFA

SEQ ID NO: 415352 - protein, 411 aa, unidentified
MRLFVGDDWAQDHHDIEVMDEAGTVLAKRRLPEGVAGMAQLHELIGAHLGEDAADAEVVIGIETDRGPWVAALAAAGYAVFPVNPLQAARYRDRHQVSGAKSDAGDAHVLADMVRTDSHQLRPAAGDSPQAEGVKVLARTHKTLIWERARQVQRLRHQLREYFPAALQAFEDLDAPDALELLAKAPDPARAAKLTRAQVAAALKRARRRHAADKATAILAALRGEQLGQPPALTAAYAAAVRALIAVITTLNEQVSVLEGQVGEHFGRHPDAEIYRSQPGLGPVPGARVLAEFGDGPHRYADGKARKNYAGTSPITRASGKRKVVAARFVHNDRLIDALMAQAFSALKVSPGARACYDAHRDKGLEHNDALRRVANRLVGILHGCLKTRTRYDEATAWGHRENPGQSPAAA

SEQ ID NO: 415353 - protein, 361 aa, unidentified
MLDIVGELDRAVVCFEPEPSLERSHSTSSDSLGRDLTMKLQKSNFDRYIGVDVAKATLEIDDSYQLIPKSIDNDADAIVRLIVSSIESPRSTLVVCEGTGGYERKLAYAMHAAGIPIVIANPRQVRDFASGNGILEKSDPIDASVLRVFGEDARNLTLATPKSDDQEKLGAMARRRKQLLDMINQESNRLEQTVDPEIAELIRENLQTLKKQLKTVDQRLTRMINEQAQTNQTVRVLQSVPGVGSVTASTLLSELPELGKLSRGEIAKLVGVAPLVNQSGRKDGQRSIIGGRGYVRRVLYMATLVATRCNDTIKRFYTRLVANGKPKMVALVASMRKLLIILNDMVRNGECWRHANLSESK

SEQ ID NO: 415354 - protein, 359 aa, unidentified
MTSMNQDRRRGRVVIGVDTHKYVHVAVALNEFGGVLGAEKFTADAAGYGQLIEWSMTHGHLLTFAIEGTGSYGAGLTGAVRRRDIGVVEVMRTDRRDRRLRGKSDFLDAENAARAVLAGHADAIPKSADGVVEMVRTIKVAKDVAVKARTSAMISLKAILVNAPTALREQLQPLSKMALIHRCAGLRPGSISTVEAATKHTLRSIARRWELLHDEITAHEKVLAELTTALAPQLSAAFGIGADTAAEMLIVAGDNPERVRSEPAWARLCGVAPIPASSGMTTRHRLNRGGHRQANAALYRTVIVRMQHHEPTKAYVARRTAEGKTKPEIIRCLKRLLAREIWSLMRPLRTSPQNTESAA

SEQ ID NO: 415355 - protein, 369 aa, unidentified
MTVYIGVDLHKTQFTVHERTEETVESIEQIKQYPTTEVGYAAFLARITEYKIGGFTVKIGVESTGNTRFFKAQVEKVGAHVTVINTLKFKVINESTKKTDKHDASTISEFLSKDMLPESYLCSRETENLRRLLKSRERLVHSIVGQKNEIHALLVSMGLQDESRSLQSKKGRQEVLDALSSRSDLVLEAQSVKLMIEIIEQMSQSVKLIEKQLSELTKDDEMVSRLMTIRGCGKITAWIIRSYTEDIGRFASAKKYAAFCGLVPWVQDSNETVRHGRITKRGPQELRTAYVQLVLGIRRCKDTSGWRIMQRLDYMKKNKGSGKSIVAAARKMAEIVWALLTGKQDFDSTKMMGRYKPMSLAEQALVAMN

SEQ ID NO: 415356 - protein, 316 aa, unidentified
MKSSEVFVGVDVSKDALDVCVIPENQGWRVSNDDAGIGGVVKRLKAMIPARIVMEATGNLQVPLAVALVKADLPVVVMNPRQVRDFAKSRGYLAKTDRIDARVLAEYGQANRPEIRPLKDEQTLELDALVNRRRQLKDMLTSEKNRLQTPSTRVQKDLKAHITWLEKRIKDVDKDLDAFIKSTPVWREKDSIIRSVPGAGPVLSVNLLAKVPQLGIMNRRQISALIGVAPFTCDSGIFKGQRRIWGGIAEVRNVLYMATLAAIRSNPVIRAFYARLVNAGKKRKVAITACMRRLLVIINAMVRTRTMWDPCRFTIP

SEQ ID NO: 415357 - protein, 417 aa, unidentified
MVAKKSHTIVPLEYDIFFGMDVDKKSAATTIVDHYKEIRSITMPNNADMIIKYTQKRFSDKKVAFVYESGPTGYGLYDQLTQAGYTCLVVAPSTVPTPPGSQVKTNRIDGRKLATSLRGGELTGIRVPSRKYRDLRHLTQLLKVTTKQSRNYKCRIKALLLVEGIPYPNTTKYDHWANNTICKLETLDCNPEIRFKLDSLLENLRFHRQQLLKIKKKIRHFCKNDSDIADSIMFLLSLPGIGWIIAPVLLARIGDWRNLKNVRELAGFIGLTPSEKSTGDKVNKGNITRIGDSYLRNMLIEGAWSSIRKDAELNEFYQRVYDRHPNNIAARKAIVAVARKLTTRIFAVLTERRVYTLEHKGYNKPDKKRKPNAPEDASTLRRTVKYELKRAKSSPVLTGSTCEKETPGHFYAQRAVS

SEQ ID NO: 415358 - protein, 396 aa, unidentified
MKANDTSPPAPQGRVIGLDLHPDVFSAAALAGRDAATAQVEQSWDRRPTAELEKWGHALRPGDLVVVEASGNTFAAVERLRLAGVPAVVLESQRAGQIRTTYCANDRVDAVKLARIYLSGLAKLVWLPDARTRERREVLHGYRKAVATATRTRNRLKSFLSDHHVRLKKGVRLTQKSGAETVHASAVWTPLQTLLLDEMLAELQTAEARRRRLVAAMAQEVAADRSLLRLMRLLGVRHIIAFAISAVVGDIARFANPKKLVAYLGLTPSVDDSGATIRGRGALVSYGRSDLRALLIQSAQNALQQKNSPLHAWGWKLCLRKPSKNVAVVAVARKLTVTIWYMMRGLFTPLKAIDGSLLVKLGKLATAIGVKTIRHLGYESKAAFIAEKGGDLLNPT

SEQ ID NO: 415359 - protein, 385 aa, unidentified
MPSPIADGKGQPSLTLHRYGVGVDCHSRFFQVCVLIPSGTEIVKIERHVPAVWPELHAAKEWILRTLKEHGIELSPSDLRYTCESTGQYHMPLCLAWRGRLAIINPSDTGHVRRKTDRLDAEKLAQHSLHGLWRESWMAPDEIQELRVLANQRSKLVAERSRLTNRINSDLLRFGHVGGQLGKINGPVVRALIEDFCANGSVAVHRDHFSDTGIPAGVVRVFDQRWKRIDALDQEIKMIEDLCIKQADDLTWRIGEGRTASGRQLRANLVSIPGVGPRTVITWLGEIGDITRFGSVNKLLAYGGLDPSDQISAWKVTGTKTRKGNARLHVALRNAARAMLAHAPSCKFATWARVHGASLPSRQVESSPCVGTADRQGVVLLPSQK

SEQ ID NO: 415360 - protein, 401 aa, unidentified
MKTVLSVDVAKNKSMIMLMNSDGEIFIDTKEINHNLEDFEKVKEEIKEINPQNLTVFMESTGTYHLPVERYFKENGFNTLVINSLTTKNNYDTIRKTKTDKKDCYRLAKLFFVNEVEYHDLSKKDLYANLKAMTRQYFYLLQNNVSCKNRYKRLINICFPELEKIFKSTRIYDDTALNFIKEFPHAEIVKEKRIDALYNNLYKTNGRNLNFYKKLATTIKTASINSYPGVDKEHEDVKNLSYMAKIVQNNNNIINELREKMIETAKQFPYYKIINSFYGIGDTLTAEILGELGDITRFDSPKEIIAFCGLDPTIKQSGKSINVKGAISKRENKYERYILFNCSQMVVKLGASNYPEHPVYIYYQNKKAEGKHYYESLTACSTKILRMLYSMCKNNKQFLEN

SEQ ID NO: 415361 - protein, 403 aa, unidentified
MLSDRNALFDRCKKGTGMKKDNKETSKSKREAKKVASLQTLQGLTARDAKSLVIGMDLGDRTSAYCVRTLGQEIVLEGAVATKAEALVEAFRDLRRQRVVIETGTHSRWIAQLLELMGHEVIVGNARKLKLISENNQKSDKVDARLLSQLGCVNADWLHPVYQRSQATHSDLLLIRCREALVETRTALINHVRGTVKSFGCRVSECAAEGFVEVAQREIPEALKPALSGVLETLDGINEQLHYYECQIRQFCETKYREATKCMMQVSGVGPITALTFVLTIEDKDRFEKSRDVGPYLGLVPKKRQSGERDPHLGITKAGDEMLRKLLVNCAHHILGQKGQDSDLRRWGLGLVRGAEKKGTRGSRKLGAAAVARKLAVLMHRLWVTGARYEPLRKSEKRQAQAA

SEQ ID NO: 415362 - protein, 355 aa, unidentified
MESVKYVGLDVHQSTVSVAVLNGEGKLIMQSVIATKATAVMDLLKGLRGALHVTFEEGTYSAWLYDLIVRQVARVVVCNPRKNALLKSGNKSDQMDARKLAELLRAGMLSPVYHGEQSTRTLQQLVASYTALTEDTGRAMRRIKALYRSQAIACAGKKPLGKRHRGEWLAKLNDSGQRRRGEWLYQELDAMQMLRRQARQAVIVECHKIPTAKLLRSLPFFGPLRTAVLIARVQTPYRFRTKRQFWTYCGLGLETRSSADYVEQDGQIMRRRRPVYIRGLNWNYSHELKNVFKSAATTASVMDGPFRTFYESRIANGMLPAMARLTLARKMAAITLILWKKGETFEAEHLKPQTA

SEQ ID NO: 415363 - protein, 400 aa, unidentified
MISPHLYIGIDVSKFKHDVVVINDRKQTVIPCFVIKENATGYQSLLDRLETIRQQLAISQLQIGLEATGDYWKNLYYFLQSRTAWPVTVINPVQTRRFAQSHLRRAVTDPIDALEIARYMQERKPDPTPPQTFGLLVVKDIDKQMLSLIKERNANICRLRLELGKTFPELEQQSPSLTAQRVLVLLKHYPTAEMVHLANEDQLRQLTYGIKKQHLPSTFVSRVKLLAQNSIACKSGLGAGIVVQTLALRILEIQAHLDQLKKELIKVHHKIAGKPSILTTIPGVASLTAAILEAYIGDVKRFPNYNQIVAYFGMNPTICSSGVSKAKKGHLQKKGNARVRNILFMNALSLVRYKVEPFYGFYQQKVAEGKPKLVAVTAIMRKLLVVVYEMLKKNEPFHVK

SEQ ID NO: 415364 - protein, 344 aa, unidentified
MSKHVVQGGDIVSLLRRLAHLQEKVRGRRRKEFPLVVIQEAGLDGFWIHRVLEHEGIESHIVDSASIMTSRRRRRPKTDRIDGEALVRALLAYHRGEPRVCAMVRVPTPEAEDRRRVSRELKTLTAERVGHVNRIKGLLFAQGVSGYAPLRRDRRTRLEELRTGDGRLLPYHLKRQIGRELDRLELLLEQMNAVAAERDALLVPAEEQAAPTPAKMLLGLRGIGPDFASVLWQEGLFRNFDNRRQVAAYAGLAPTPWQSGAVDHEQGVSKSGNPRLRTTMLQLAWLWLRHQPSSALSQWFHQRVGDNGRIRKVMITALARKLLVALWKYVTAGVVIEGATMKTA

SEQ ID NO: 415365 - protein, 309 aa, unidentified
MSIHVGIDTGKSMLDVGFYPGERCERFANTAEGHRALLHVLAPLDVPHIAIEATGGYERGILDALAHAGYCVTRLASHRATAYSRAMGRFAKSDTLDARILARMAANITPQPYEVPSSERAELAELVRCRLQMVSQRDDNGRRLKQARLEAARQALQGMIEAASTQIRELDRRIAKATKAVDPASRLREVPGVGPVVEATLIAYLPELGRLTRQQIAALVGVAPYVDQSGCRDGARRVRAGRWIVRRALYMAAWAAVRAKGSALGERYRALRARGKVAKVAIVACMRCLITAINAMVRDQAGWRHAVAA

SEQ ID NO: 415366 - protein, 321 aa, unidentified
MAESASVGAVVGIDVAKDRVRPDGPRWTAATTAVGLRELAERLVTVAPRLIVLEATGGYEQPVVAALTAAGLPVSVVDPARVRHFARATGLLAKTDRLDALVLARFAEQLAPAVRPLPDAVQRELALLVQRRRQLLDMLAAEEQRLEQQALFPRSPITGSLAAHVAYLRQQLADTDQALTAHLTAHPRWDATHALVRSVPGVGPVTAATLLAEVPELGQLSRQQIAALVGVAPLARDSGRWRGQRKIGGGRAAVRQVLYMATLTAVRCRRSPLRAFYQHLRARGKLFKVALVACMRRLLVILNAMVRDGQPWNPALCMAKT

SEQ ID NO: 415367 - protein, 352 aa, unidentified
MNHYIGCDAHKKYSIFMAISQHGEIYPAQKVEHDREKYRAFLHTLPAASRIAVESTGNWYWMIEEMEAAGHIPSLVNPHKAKLMMGQINKTDKLDAEGLAKLALNGTLPTVWIPPGELRDQRELPRMRMAMSQVRTKFKNRIHSAFAKYGITFDEVSDIFGGKGRKLLEKSLVELPPETRLSVQEQLWLLDQVEQAINQAEQRIHQVIKVDPTMQLLMTLPGVGPILAITIALEMGEVDRFPSGEKFASYAGKVPRVNSSGGKTYYGRVRPDVNRYLKWAFTEAANVIVLQQHSLGDCHVLRLYQRIRKNKGHAKAVTAVGRHLAEAAYWMLKDDAPYQEPKVKPPAAYHQG

SEQ ID NO: 415368 - protein, 360 aa, unidentified
MEMIGLDLHKRETQLCICTEDGTIVEQRIATSRERFTAVLGARPPARILLEASTESEWVARHLESLGHEVIVGDPNFAPMYATRTRRTKTDRRDARALLGANQVGAYRPAYRVSDARRHVRAELAVRETLVRTRARYITLAKTLVRRDGLRVPTSSPAVAVRHIQALPVLADALALSPFLGEELAPLTAILAPLSAEIAAADRRLEAHATTDPEVTRLMTMPAIGPVTASALVATIDDIQRFRSAHQFEAYLGLVPSEQSSGERQHRGRITKTGNARMRWLLIEAGWRVLHAKTPATAALRAWALGIAARRGKRVAVVALARRIAGILFAMWRDGVPYDARKLRSGSAHAPTVVRSASDR

SEQ ID NO: 415369 - protein, 402 aa, unidentified
MDMDETQRFRWFLGIDVSKETFDGCCINMKGERLFSLSTSMDRKGFEELIKQLCGLSVSMESVLVGMESTACYHVNLYSFLISLGYTVMVINPLLISHFVKLQLRKTKTDRKDATVIAQFLLLNRDSLSQTILSSDISDLRDLSRQRESLVDQMSSTKSEIKRLLTMTFPELEHISGIFNKSMLRLLCHYPSAASIKQAKRSKIAKILIPGSYGKQTDVSVDRILKAARVSVGTSSATKEIILRQKTSLLIQMEEHLQELTDILIELCEGKVQGEKDILTSMKGIGEKSAVNFLIEIGGDIKQFESHKKVIAMAGLDPAVYQSGKIDRKGKISKRGNRHLRRVIWIMTTKVIQFNERFKQYYLKRIKDGLPYKMAVLATAHKLIRVIFAMLRNQTLFDPRMN

SEQ ID NO: 415370 - protein, 368 aa, unidentified
MGKSSKLYVGMDVHKDSIDVATGDDAAGEVRHYGAIGGEMGAVGKLARKLESTGKVLVFVYEAGPCGFGIYRMLRERGHECWVVSPGMTPRSNADRVKTDRRDCLKLCRLARAGELTPIHVPDEADEAMRDLVRAREDAVVMQRQARQRLGALLLRNDVRYNGKTAWSPAHRRWIAELKLPHAAQHIAFEEYAQGVDEAGMRIERLERAIGDELTRWRWRPVVAALEAFRGIRTIHAVRLVAELGDLTRFAAPRHLMGFLGLVPSENSTGNRRRQGAITKTGNSSARRALVEAAWAYRYAARVSVGIAKRQSGLPKQVTDLAWKAQLRLCSRFRRLCARGLNRNKIIVAVARELSGFVWALGQTVKPL

SEQ ID NO: 415371 - protein, 400 aa, unidentified
MKSVLSVDVAKGKSMIMLSTEYGEVLIEPKEIKHNFRDFNELKDKIESFNLEDLTIFMESTGIYHLPVERYFKENNFNTLVINSLTTKNNYDTLRKTKTDTKDCMRLAKLFFVNEVEYHDLSKKDLYANLKAMTRQYFYLTQLNVSCKNRYKRLINICFPEFEEIFKGSRIYEETALNFIKTFPHAYIVKEKRIDALYNNLYKTNSRHDYYYKRLANKIKDIAVNSYPSVDKDHSDVKNLSDMAAILQENIKTINELKEKMIKTAKESPYFDIINSFYGIGEVLTTELLGELGDITRFDNHRQLIAFCGLDPTIIQSGKSINVHGTISKRGNKYARWILFNISQIVVKLGHQCPGHPVYDYYLTKKAEGKHYYENLTACSTKILRMLYTMCKNNTTFKIN

SEQ ID NO: 415372 - protein, 349 aa, unidentified
MKHSATTIGLDIAKQSFYAVGVDRQRREVLKRKLTRAQVLAFFANLPPAAIGIEACAGAHHWARELNALGHDARLIAGQHVSRRVVGNKNDYRDGKVICELRGNPETNYVPINSEEQQDIQMLHRARARLVSNRTALLLQIRGLLGEYGVVFAQGVAALRKGLSEVLGGEHVNLSPSALETFCDLREQWMDLDERVRRFDARIRRLAEQNETATRIMALPGVGALTSTALVASLGDARHFRAGRDYAANLGLTPREFSTGGKQRLFGISKRGDRYLRTLLIHGARSALRCAEGKPDRLLQWALRLKEAKGFNVAACALANKLARVAWALVAHGRTYQGQWNNSTAAAAG

SEQ ID NO: 415373 - protein, 394 aa, unidentified
MLLETRIDEPTAIRTQIAAIFVSLELSRSNWLITSLSPGNSEKMSKHSVPAGDLKALLGRFAELQRKALLRTGKSYPIITIHEAGLDGFWLHRALQQQGIESHVVDAASIAAPRRKRRAKTDKIDGEALLRVLLAYKRGEPRVCSMVVAPTPEEEDRRRLCREREVLIDERIKHVNRIKGLLFAQGIAGYAPLRRNRRAQLGALRTGDGRALPEHVKTQIDRELDRLELLLVQIKAVEAERNALLAATVKANDETAQPPHPLALLLNVKGIGMEFAASLWAECFYRSFANRRRLAAYAGLAATPWQSGAVAHEQGVSKAGNPRVRTKMVQLAWLWLRHQPQSALTRWFHEQGKRERKNWRKSAIVALARKLLVALWKYVTAGVPIEGAVLKSAA

SEQ ID NO: 415374 - protein, 448 aa, unidentified
MKQEPEEIPDTEHELVLERVCAIDVAKDSGKVCVRVSSRAGRRVSKVWDVPARSGAVAELAEHLLGEGIEKVTVESTSDYWRIWLYVLEAAGLSVQLVNARDVKNVPGRPKSDKLDAVWLAKLTEKGLLRPSFVPPAPVRELRDYTRLRIDLTRERSRYWQRLEKLLEDALIKVSAVASTLDTVSVRDMLEALIAGERDPRRLADLARGRMKPKHGALVEALSGRFDDHHAELARMLLDQIDALATQIGTLTTRIDELLTAMEPETRADEPDTPGSAGAVADGARELTTIERLDEIPGIGRGAAQIILAEIGFDMSRFPTAAHLVSWAKLCPRTIQSGAIQRGGKTGRGNPYLKGALGEAAAAAAKTNTFLGERYRRIVKRRGKLKALVAVARSILVIIWNLLNDPTARYADLGADYHPTRINTERRTRNYVTQLMAMGYRVTLEPAA

SEQ ID NO: 415375 - protein, 492 aa, unidentified
MVRSRLGECPTAASLLLKPSPAFPGAIVMPSQPSFRPRPRRTISTLEQICPDAAGIDCGAAAHWVAVPPDRDAMPVRSFRTFTTDLQALADWLIACRVTTVAMEATGVYWIPLFEILEARGLTVLLVNARHVKHVAGRKSDVADCEWLRDLLMVGLLRGSFRPAQAIVPLRAYLRHRATLLESASMYVHRMQKALVQMNVQLTLVVSDITGLTGLRILRDIVAGQRDPHQLAAHRDRRCHASAADIVAALTGNYRPEHVFLLQQNLELFDAVHHQLRACDAAIAAELALLTAPCPPPATPLPEDQRRRAPRANEPRFDMRTPLHRLTGLDLSQIDGIGPYTALRLVAEIGTDMRRWPTAQHFTSWLTLAPQNRLSGGRRLSSRTQPSANRAAAILRLAAMSLGRTDTALGAFYRRLAFRVGKAKAITATARKLALLVYRSLADGLLYQDPGAAAYEAQHRAHVLRRLRRQATQLGISLVDMATGEVLEEVVS

SEQ ID NO: 415376 - protein, 409 aa, unidentified
MYSIMTGKNKKRNASRNRPERSVKVGDIAGREESKVAGVKRQRGRRAMEFFCGLDVSIDETAVCVVDDKGHVHLETTVATAPEMIRAALKPFLPRLRRVGHEAGSLSPWLHPEMLALGLPVVCLETEHVRAAMSAQRNKTDKADALGIAHIMRTGWFRAAYVKSEEGYRLRLILTQRRALKRKFLDLENTIHHSLKVFGIRLGRVSRGQFDAAVREAVAHDALTRDFMETMMRAKAALWEEYVRLHRLVVKIVSGHEICRRFLAIPGVGPVTALRVMTAIDDPSRFRRSRDVAAYFGLTSRRWQSGTSIDVQGRISKAGDPDVRRALYEAASAVLTRFRGRDRLRSWGLELAKRSCHRKATVAVARKMVVIMHAMWVDGTFYCGDATASDEERAMHAARRLKDHLGALA

SEQ ID NO: 415377 - protein, 318 aa, unidentified
MSDKTIVGIDVAKNTLEVVIDTTGHLLHLENSASGVHELQKALSGLTVAGVVMEATSRYHCTAELMLSASGLPVAVINPRQIKNFARAMGRVAKSDPIDARIICEYGRRMTPQFRPIKSEQQQDLAILLMRRRQLVQNRVMETNRLKELCGVYIEQGIMRHIKWLDAEIDILDAEIKLRLRQDDTLAMKRKLLDKVKGIGPITQATLLIQLPELGSLTRRQVSALVGVCPYDRDSGQLRGKRAIWGGRSGLRATLFMAMLSVVRFNPQIRAFYTRLLARGKPKKVALTACIRKFITILNAMFRDQKDWIYEGANGLNT

SEQ ID NO: 415378 - protein, 354 aa, unidentified
MSKYNTQSFVGMDIGDREIQFCILDPEGSVMDSGSLETTVRGLNAFLDRFDTPKTVLVALETGTHSPWISHLLEAREFHVLVGNARKLRAIWDTDNKFDDRDAEMLARIARFDPSLLYPIHHRSRKAHADLAVIKARDTLVRCRSTLIAYLRGICKTAGTRLPSCTAEAFARRVVEHLPKDLLAAAIPCVNTIQKLDSEIRQLDSHIEKLCAEAYPETKTLRQIAGVGPITALSYLLTLEDPNRFLKSRDVGPYLGLTPKRDQSGQSDKPLPITKAGDTYLRRLLVGSAQYILGPFGADCHLRRYGMRIASRGGKAAKRRAVVAVARKVAVLMHHLWKYNVPYHPWYQPNAKAA

SEQ ID NO: 415379 - protein, 405 aa, unidentified
MLCVGMDVHKDSTVFDLFDPAAPKPKQHRTATVPTTAEGIRSVLEPLTGRCRVVFEIGLQAQWVASVVRPLAAEVQVANPSRIPWLFRDGRKNDRIDARKLATLLYLDQVPQVHLPPQDVSMWRALINHRRSLVKRRTMLKNQMRSIVRTFNYRCPHPSLWTRKGRAWLGSQAFDVGRTVMMDSLLEELDMLNTQRRRLENQLDEIANSHPNVALLRTIPGVGPRTAEALVAYADDVARFDHRKQFASYFGMTPTQDASGHIDRHGHISKRGPSVVRWLIVEAVHRTIRYCPALRAYFERIWRGKKDRYKKAIVATGRKLLTIAFAMMRDQRPFDPLRVSCALAALDHNSFPRSTSIRRRPEPVQDSAPSGAPNSRPLHGPDSSWTEPAPPRQVQPSRKKRILRA

SEQ ID NO: 415380 - protein, 382 aa, unidentified
MVSTEPHAWGTGLMNDITYVGLDVHKATICVAVAESGRKGEVRQIGIFENRPEVLSKMVSRLGKGGRHLSFCYEAGPCGYGLHRFLTGCGYDCVVVAPSLIPMKAGDRVKTDRRDAMMLAKLHRAGELTPIWVPDAAHEAMRDLVRARATAVRVLSKARQHLQGFLLRHDRIYRGVRSWTLAYRRWLTTLHFDHPAQQIVLQDYIHAVHDAELRRDRLTRQIEELLPNWSMAPVAMALQAMRGVALVVAVTVVAEVGDFRRFANARQLMAYLGLVPSEHSSGSSIRRTGITKAGNSLARRVLIEGAWTYRMPARISRKIHDRLEPLSTPIRDLAWKAQVRLCARYRRLTAAGKAKVVVTTAIAREMVGFIWAIARIAQPVLI

SEQ ID NO: 415381 - protein, 423 aa, unidentified
MRIVYPICCGVDVHKKFFVATLITSEGIIPYYQKRRFSTFNNQILAFKSWLLENNCYDVCMESTGKYWIPVFNLLEDSINVTIANPKWVKAVKGYKDDDKDSKWIGDLFRLGLVPGSFIPNKDIRILREFTRYRFKLVSCKSSEKNRYQNVFTVCNVALDAVVSDMFGKSASSITSYIVNSNTFDPEHCVSLLRGSLKKKAEDVVASIEGFKMADEQKLRARMVLEHYDFLVGQIQVLDDAIDTLVTPMESAITLLSSIPGIDRHSAITILSEIGTDMSHFDSSKRLCCWGGLTPGNNESAGKKKSVKITRAGVYLKPALVQVAHAAVSDKKHPYYGIKYEQISKRRGKKRAIIAIARMILTAIFHMLSTGELWNPCDLIKVDMPAELREKELQKSLRRAAKLLIAQGVIDSKDVHLPATLSA

SEQ ID NO: 415382 - protein, 366 aa, unidentified
MEKIYIGVDFHARQQTICYLKTETGELVIAELKHQDKEQVRAFYQQFQGPIIVGLEASGYSPWFEALLEQLGGEVWLGHATEIRRRARWRQKNDRRDAELIWDLMVHDEFPRLHRPAVQSREVLRMLRYRQKLIKLRTMTKNSLQAIALQAGLAKGKQLFTRAGQEEFQLVALSPVLHWQREHWLALLQPFNQQLLETMVWFKAQSKDDVGIQRLRTHPGIGLLTSLCLLHTLQPVSRFRNARKVAAYAGFDPVERSSAERQRFLGISKAGSRLLRYLLVEAVHTAVRYDEDLKRFYQRLAARRGRPKAKVAAARKLLIRAYIMMRDEIDYAEFRRRAVAVRLARQGHGPTNVPAVLIGQPASPGA

SEQ ID NO: 415383 - protein, 405 aa, unidentified
MGKVFVGHDWAEAHHDIHVEDEQGQRLAKARLPEGVEGVARFHELISALVDEPGEVTIATETDRGLFVGALVAAGYVVLAVNPMSTSRYRERHSTSGAKSDPGDAFVLAELARTDGHNHRPFAGDSDLVDAVKVLARAHQSLIWTRQRQINQLRSTLREFYPGALAAFEELRSNDALAVLAIAPTPVLGRALSRSKIAAALRRGGRQRRIDERVAEIQTALRAEQLQAPTVVADAMGSTVTALVAVAAELTRQIAGLETELADRFDQHPDAKIIRSLPGLGMTLGARVLAEFGDDPNRYVDAKSRKNYAGTSPITRASGKHRVVLARYARNRRLADACYLWAFATLTHSPGARAFYDQRRTAGDTHNRALRALSNRLVGILHGCLTHQTLYDEHTAWSHRAQLAA

SEQ ID NO: 415384 - protein, 357 aa, unidentified
MKKLFIGIDFSKEKLDATIILACGMNEIGSREYGCFPNNTTGYRKLCNWVKTNAWNTIAEEWLFCGEDTGSCSIGLSKWLYGKGYDIWIENAYAIKHSSGIQRVKNDKADSAIIAEYAWRQQDKVVPFEPLNESLAQLREIFLYRHKLVGQRVAMELRKEDKSQSNKSKAISFINRKSKHLIEEINKTIAECDKAIDSIIEADEELKENYAIITSIKGVARQNATCMLVYTNNFKKFGYDPRKIACYYGVAPFGKQSGTSVNTPAHTSHFANKLIKSLLGQAAHIAKIYNPEIRDYYQRLISKGKKPQVALNNVKNKLIRIIVALVRKKVPYDQNTYKYYEEREVIERKKNEMLIYC

SEQ ID NO: 415385 - protein, 351 aa, unidentified
MLIIGCDFHTRYQQIAMAEETTGELLLEQRLDHESGEARAFYRSLQGPVRVGIEATGPIHWFERLLTELGHELWIGDSAKIRASEVRKQKTDERDAALILDLLLAKRFPRIWVPTPAERDLRQLLWHRHKLVRLRTMLGNQLHFLAMSQGLCRKKKLFTKKGRAELGNLTLGPWASRRREELLKLLGQLDPPIAELDRAVLEEAQRRDDAVLLMTHPGIGPVNALAFVLTIGPVTRFPCSRKIASYLGLNPTEESSGGRRRLGGISKQGNTMVRWLLIEAVHHAVRQDPALRQDYQRLKFRRGHAVAKVAIARKLAVRMYWMLRSGADYARLVRRQGSPGATLMNAGSSLG

SEQ ID NO: 415386 - protein, 404 aa, unidentified
MWYTGIDWADEHHDALTIDEKGHQMGSIRVDHSPHGFAKLDTFLGQIIGSESKEHMACMIETTHGLLIMHLLEAGWPVYPVNPRTVDRRRSASGAKTDLIDAYLLAKTGRADFADLHRLIPDSDKVAELKHLTRDQDSLIRTQTRLVNQLTACLKAYYPVALDLFSQLQQKSTLGFLQTYPTVEAARAASLTEIQQQLKQTRHPQPAQAAASIVEMLHHPQLQADAVLTRTKSRLMLALVSQLLPLLEQIATYDKEIHTLFLTHEDHAIFESLPRAGQHLAPRRFSEIGDDRTRYQDASSLQALAGTSPVLYQSGMYSKAHRRLGCIKPLRNALHQFAWQTTQSEAWAKDYYQRKRMEGKSHTVAIRALSNVWVRIIFAMWTRRECYQTATFELAQQQHARRAA

SEQ ID NO: 415387 - protein, 422 aa, unidentified
MSYCPVAGIDVSKRFSDMCILSPDNRIFAQEKIYHDETSINRANALLQKAERLFFRKPVIVMESTSHYHLILFQFFSEHGYDVIVVNPLQSNSMKDFSIRKRKTDRVDAFKLAMMYRTKTLRPSQIPQTATRALRQLCRHRAELLNDVSSYKNRLTALLDQTFPGYDKVFSDVGGVTSCAVLVRFPTPTILLVEEESELVEVIASASKSGYSFAKKKAGLLISAAQKAQAWGIHSCADETLIVCTIQMLRTLSESVLQIETAIDNLLAQIKEMRNNVSLLQSIPGIGSHSAALLLGEIGDISLFKKPKQLAAYFGLDPTERQSGSFRGTKNKLSKRGSPYARAALHMGVVNSICKRGKDSAANPVLLSYYEKKCKNKPAKVAQAASMHKLVFIVFAVLRDQKPFELKTPEQHAVEQGFVKAA

SEQ ID NO: 415388 - protein, 364 aa, unidentified
MFTERTSVGLDVHARSVAAAAIDGVTGELFQSRLTPSPGHIRSWLTDLPGPVAVAYEAGPTGFGLYRQLTAAGIRCEVVAPSKLQRPAGDRVKTDAKDAVHLARLLRLDEVVAVAVPTIDQEAARDLVRAREDCRGDLMRARHRLSKLLLRHGLVYSGGAAWTGKHDMWLRDEALRQLTSRSTRLTFDADYETVLATKARRDRLDVAIEETAADSEFTPVVRRLGCLRGISTLTGFALAVEIGDWHRFSGNSIGSFVGLIPAEYSSGSSRTLGPITKTGNGHARRLLVEAAWHHRPRYRIGKIMRDRWDLAPAAARARGDQGNRRLHQRWVTFIDRRKRSTVATVAIARELAGWCWSLAVLDDM

SEQ ID NO: 415389 - protein, 409 aa, unidentified
MQPILKSCCGIDVHKEKIKACIAKGPLDKPPKFEIKTFSTMTSDLLKLKDWLRQNKVEAVAMESTGVYWKPIFNILEDEFSIVLANPQHLKKVPGKKSDVSDSQWIASLLRCGLIPASFIPPRPIRELRDLNRTRKKLVGVMASEKNRLQKVLEDANIKLTSVVSKVDGKSSMNMIQALLTKDELTREDIKAMVYGKLRSKTDQLVEALNGKLTSHHRFLLKFHLENIAFMAEQIQELEKEIQERMIPFQKESNLIQTIPGISVITASAIIAEIGVDMSQFPDEAHLSSWAGICPGNNESAGVKKSGKIRKGDKFLKAALVEAAWAASKRKGSAYSAFYNNIAKRRGKKRALVALGHQILMDVYRALKTGEPYVDEGAEAVFQRNSAARQKSAIRFLEQSGYTITKASA

SEQ ID NO: 415390 - protein, 443 aa, unidentified
MSRKKRTHLRGKRGQAFANKIRGIPLDQILCVSMDVHKYFHVVIIHNALGEIVTPSFEIDIFQTGFDHLCRTVDKTIARTGAQVVLTGMEPSSHYFENLARHLHKRPQPVTLVNSFAVKKNRDQQMMQYEKDDEIDTAAIGDLLQRGEGSPFNPPTGIYLQLQHLSRVRFSKVKMRTALQNQIIGHLDRIFPGLIIIGEEAKERYEPLFATDFWECQTLQHLIRVCPNPHDLIAMSPHDLIEAFHARNYRMGPVRAAKIIAYAKKVLLPDPELAAIRCHLLPHDIALLEDVERHIAQLERDLYTLLAETPYLVWTKLKGLSDTQVASLAGAIGDPANYKYAAQVFRRSGLVSGRNDSGTRQRKGKGKRVVKVGDVYLRRALMNGLATLILHQPVLRDYCNKLKVSKHAGVARVATARRAMGILWAVLRDRRSETLILKKGAEM

SEQ ID NO: 415391 - protein, 404 aa, unidentified
MTVYLGIDWSTKSHALTFINQEGGSIAQETIRHTAKGFARLDEIRAGLGVSAAECLVGIESSHTLLIDWLWAHGYKQVYVIPPRMTASRQASYSQSGARTDSHDAYLIANLLRTDLHLLHPWRPDSASIQALRTQVSLRMQLVAERVREQNRLSALLERYYPAFLNAFSLDTDVGLAFLQRYPTPQAAENLTWAEFEEFARTQRYASRYRTAAFARIQALQPVALPEIVEISQLRALVLAERLMGTRTLIKETEKTIQALYLAHPDHYIYDPLPGAGSVLAPALLSKLGDDRERFPTPGTLQAFAGTAPVTEQSGQRRMVRFRQACDKELRTITQRWAKASLEKSPWAVAYFTQARERGHSTSRVQRALANRWLAILWKLWQSNQPYDQDIHLQRVKARSRPRC

SEQ ID NO: 415392 - protein, 320 aa, unidentified
MMAQNDLVVVGIDVAKDKVDACIRALSLRQTFSSTAEGRRKLISWLRKHKVTAAVMEASGGYEREWARAMRQNAVEVRIVDPKRVRNFARSAGQLAKNDAIDAEMIAWFAETFGEDSRQAHDAAREKLVQIVNARCALIDLQIKLQNREEHPAPEPVRKMQARLLRQLAREIAGLEAAIAAVIKATAHFAELAEIIESVPGLAKITSAGLIAAMPELGQVSNQAISALLGVAPYDDDSGKRRGERQIKGGRRKMRNLFYMACLGAATRHNPVLKAFYRRLVVKGKEPKVALVACMRKLIVILNTMIARRQKWDLSRYALS

SEQ ID NO: 415393 - protein, 415 aa, unidentified
MNPEHTTHMAKQTTTANTKRTAAKRSPASLLPAIQTLAEHEVKPAPLPEIIHLGVDVHLRQYVVCRKIDGATPQPAQRMTPPQFEAWAIKQKSQAQRVVCCYEAGPFGYGLQRRLSAQGITCHVVRPQDWDKHGQRVKTDGRDARELAEALARYEAGNKHAMAIVRVPEIEQEQRRAITRQRSALVNEVRRLGAMGRSHGMNYGHDINGRWWRVRSWKAVTQNMSAFLQSLLEPLQALLVQVEEHIKKLTGQITIKSSENTAAAKRPKGLGALTAQIIDNEVLDWSRFNNRRQVSSFTGLCPSEHSSGGSRRQGRINKHGNPKLRHALVEAVWRLMRLQPGWKRLEKVLEKLRGGEGQKVPNKKKIAVALARELAVDLWRLNTGRATLADLGFTAAEASEEEEELAAEQELVMRA

SEQ ID NO: 415394 - protein, 343 aa, unidentified
MELHAIGIDLGKTVFHLVGLDTSGNVIVRKRCSRTQLLKYTANLRVQRIGMEACSGSHFLARALREQGHDARLIPAQYVKPYVKTNKSDYIDAEAIAEAVQRPTMRFVPIKTEEQLDLQTVHRVRERWVMRRTAVVNQIRGLLLERGLTLPKGRSHVDRALPEILVDPALRLAGSFRVLLGQLQLELEQLSARIEQMDAVIQETAKENEACQRLTAIPGIGPVTATALVAAIGNGAGFRRGKDLAAWVGMVPREYSTGGKQKLLGISKRGNSYLRRLFVQGARVVMQYRTKQAPGLSCWLSQLMARTHQNVAVVALANKLLRMAWAVLCKNETYRIPALATAS

SEQ ID NO: 415395 - protein, 422 aa, unidentified
MLGIGIDWAEEFHDVALGTAEKGVIEQFRVEHTPAGVGALIERVLRLEPDPAEVRVVLETRHGLLVEALIDAGFTVLPVNPDLVARRRGPARKKDDAEDARICCLLAVDRHAGLKALIPHGELGGELRAIARDDDRAARDQRRLLNRLRADLQTTYPAALVLAGQDLGAPTVLRLLERWPTQAELAAAPRAELLEFARAGRHGWPDRFADRVAAALAAPSLPTRDYLVRAKAAGIRLAAVQLLALHEARRGWEARMAELLLGGRRTGRNHTVQDPDPGKAFPGGAIYLSFPGLGDRLAARVAGEIGEHIDQFDSPNGLQCYAGQAPVTRRSGKSDFVVARRLAHNRYLGAAVHQWAFCSLTRSGWAREFYDQKITAGKSHHAALRALGNRWLEILWHCLTKGVPYNEAVHVANRNRALARAA

SEQ ID NO: 415396 - protein, 340 aa, unidentified
MQIITVGLDIAKNVFQVHGVDGDGRAVLRRKVRRDQLLKLFGGLAPCLVGMEACATAHHWARELGTLGHEVRLMPPAYVKAYVKRNKNDAADAEAICEAVTRPTMRFVPIKSAEAQSVLMLHRARHLLVRQRTAQVSAMRAHLAEYGVVAAKGISRLRDLLPVLDAGAGMLPELARQTLLLIAQLIEALTMQIRRIETELLAWHRSNPASQRLETIPGIGVITATALAATVLDAKAFRSGRQFAAWLGLVPRQNSSGGKDRLGGISKMGDRYLRHLLVVGATAVVRYTRRKATTISIWANRLLDRKPPRLVTVAVANKMARIAWAVMAREENYRATSAAA

SEQ ID NO: 415397 - protein, 316 aa, unidentified
MDGANQVSVGIDVAKATLDLHVLSSGQTHTLPNVKAGYEELKQLLPAPVQYLIVLEATGGFEREVVAELIDAGYRVAVINPKRARDFAKALGLLAKTDRIDARVLALYAEKVQPVPTEKTPEKQAEIQQLVARRRQLIDLKTQESNRWDVTHVKAARKSIQAVINTLEAEIRGIEKLIESLVESDDEWRNKAQLIESVPGLGGVTATTVVADVPEIGKLNRQQISALIGLAPYNRDSGAWKGKRSISGGRKSVRSVLYMAAMAARRWNPVIKAFADRLAQHGKPFKVIITACMRKLLVILNSIVKSGRPWMAQTSS

SEQ ID NO: 415398 - protein, 353 aa, unidentified
MSMLAELVEFVIGVDTHADTHTAAVIAVGTRGVLASITVSADEDGYAELVALAEVHGGLRGWAIEGTGGYGAGLARHLAELGELVVELDRPVRPARRVGAKSDAIDAERAARDALSRTRLAQPKTGPERAGLQILLTARRAAIASATTAQRQLRALVITAPEHVRARFRGQTTRAMLTTACRLRPTTTSAASADVHTFTALSVLRALARRVRDLEAEAADHERAIRTIVRAWRPDLLDLSGVGPINAATVLAAWSHPGRCRNDAAFAMLAGAAPIPASSGKTVRYRLNRSGNRQLNRALHNIALSRLRYDPTTRTYADTRRTQGKTDRDIKRCLKRYIARQLYRQLESDPTKP

SEQ ID NO: 415399 - protein, 349 aa, unidentified
MRFYSGKHKHHCGIDLHARSLYVCVVDGEGHVLLHKNLPAEPQALLAALLPFREGLVVAAECMHCWYWVADLCAEEGIPFVLGHALFMKAIHGAKAKNDRIDSEKIAQLLRSGLIPQAYVYPRQMRSTRDLLRRRCYLVRQRTELLSHIQTLNNQHNLPAFDKRITFEANRAEIFDRFANEPQLAASIGVDCTLIDALEEQIRLLELQLQRCAKIDDAQAFYLLLSVPGIGKILALTILYEIHTIDRFPAVGDFASYARLVKCAHSSAGKMSGYGGAKMGNVHLKWAFSEAAVLFLRANPRGKQLLARLEKKHGKAKALSILAHRLGRAVYHILKRKQPFDADRLYAAA

SEQ ID NO: 415400 - protein, 583 aa, unidentified
MASTPTLDRIGVGIDTARYGHRVSFLRPDRKPAAKPITVMENHAGYQSFKDVLLRLRGQNPGVEFHVRIDAAGQYAQYLEQFLHSLDLPMTISVGEPKRNKDYRKAHFPKRTTDDTESQAMARFAIVEQPPATPAPSATMIALHEVAGRLQARVKQTTQAVNRLHNLLARCFPELATLTDDIAAGWVLSLLEKYPTAERIAAAHLTSLEKIPYLSSERAREVQKAAKQSVASLRGPVAEALVTDLVRQLRHCQIAERSMQKLLTKAFAELPGSAHTQLQTIPGIGQATAAVLVAKIVDIDRFDTPDKLVGYFGIFPEENRSGVDRFGNPLPPGTMCMSRKGCDLVRGYLWNATRVAICHNPAIRPLYRRLRAKGKRGDVAFGQCMRKLLHLVFAVWKTNRPFDANHYPWENPNNEVPQDLAASSVAATDSGNNKAEGHKQDKPAGKVVTSAHSKIEPAPPSVKPEHPPVAARPHVDFAFLRQQVSLEQVLAHLGLFDQLRGRGPQRRGCCPVHSHPGDQERTFSVHLAKNAFRCFQKDCGAQGNALDLWAAIHRLPLYDAALHLAETFGVPRNREEEPVKGTC

SEQ ID NO: 415401 - protein, 398 aa, unidentified
MHKDIHVAVVIDCWTNILGEITFENRPSKFDKFMQDVKKIYKDLTPCFGLEDTRGFGRNFASYLLGHKFTVKHVNPAYTDAMRSSAPMSKKNDGYDAFCVAKILRDMVDTLPNEEHNDLHWTIRQLVKRRNSLVKGIVIAKNQLNSNLTNVYPSYKKYFCDVDNKTALLFWEKYPHPQYLKGVKQETLLEELRTIHKGMKQEQAEMILTLSEQNSPKEKDFQYERDLIIKSLVREIRFKKQENEDIDNELERLVDLTGYKLQTMPGINLITASNIISEIGNVQRFPNSDKLAQFCGVCPVNFSSAGKGKDQRSRQGNRVLNAIFHFLAIQLVQISPSGKPRHPVFREYFEGKIKEGKTKPQALVCVSRRAVRIIYGMMRTKTEYKPFEKVQEVTGIQE

SEQ ID NO: 415402 - protein, 353 aa, unidentified
MRTYYVGMDVHRASIVIVVLNGAGKIVMQMVVETGAERVRGFFKQLGGKVYVTFEEGTQAHWLHEVVRPLVTEVVVCDPRHNKLLQSGNKNDRVDAQKLAELLRNRSLKAVYHGDNGVRTLKELVRTYDCLVSDTTRVMNRLKAIYRGRAIACAGHDIYRQDRREQWLEKLKEPGAKQRAGFLYEQLAALKPLRHKAKQEMVKEVRRQTAYPGLLSVPKLGAVSVAQLIAVVGTPHRFRSKHQFWTYVGLAVVTRSSADHEVVNGVLRRSTKPIATRGLNRNHNHLLKRVFKNAATSACHSGPFKAGYDVRVARGMAPSLARLTIARQLAATTLAIWKRGEQFDPERKKQQAP

SEQ ID NO: 415403 - protein, 410 aa, unidentified
MRYYLGVDWADQTHAVWVVDEQGTKVASRAVPHTAAGLSEWGRELDEWHAQGIELWAAIERPEGRVVDFLLDHGVVVYPVNPKALDRARDRFRSSAAKSDPFDARVLAEFLRTDHQHLQALQPSSETAQELKYLTADYRRHVRQQTRLVNQLTATLKAYYPRALEVSELTTALARQFLRAYPTPVAVAALTEKRWQRWARTHRLSEPRTQELWGVLQRPQLPVPAHVVRAKARLMLTLVEELTAVVAAVGQYREAIDAFFAGLPEAQWIRTLPIGDHGVTAPTLWALLGDAPTRWESWQHLQGHAGTVPVTIRSGQQRIVRFRSACDKAMRYVVDQVAFLSLGKSEWARAYYDQQRARGHDHHPALRALGAKWLKIIFVMWARQIPYDEQHHLATMTRQQLRQRNQKKVA

SEQ ID NO: 415404 - protein, 316 aa, unidentified
MTGPAAYVGIDVAQATLDVALLPSGETWQVANDEPGIRALLARLQPHAPALIVLEATGGYERAAVAALATAGLPVVVANPRQVRDFARATGQLAKTDALDAGILAHFADRVRPVVRPLPERATQELAALLARRRQLIEMLGAERQRLGLAAASVRRSLTQHIAWLERQLGRVDGDLDALIQTSPLWRAKDDLLQSVPGVGPVTSRTLLAALPELGTLSHKQIAALVGVAPLARDSGTLRGKRSVWGGRAPVRTALYMAALVAARWNPVLKAFYTRLRAAGKPAKVALTACARKLLTILNAMARSNTAWQSPATRSA

SEQ ID NO: 415405 - protein, 343 aa, unidentified
MKLHVIGIDLGKTVFHLVGLDSTGRAVIRKKCSRKQLLAFTANLEVELIGMESCSGSHFLGRALREQGHEVRLMPAQYVKPYVQTNKSDFLDAEAIAEAVQRPRMRFVPIKTEEQLDLQALHRVRERWVMRRTAVVNQIRSLLLERGLTLPKGRRYVDQQLPRILEDAELRLSGSFRVLLAQLKLELEQLGARMEEMDRVIQKTAKENEDCQRLTEIPGVGPVTATALIAAVGNASTFRKGRKLAAWMGIVPGEYTTGGKQKLLGISKRGNKYLRTLFIQGARSVLQQRDKQAPGLSSWLAQLLARAHQNVVIVALANKLVRMAWAVLCKNERYRAPVLAVAT

SEQ ID NO: 415406 - protein, 469 aa, unidentified
MQPGKELLFLKIISMHKVKSKKTKAKNAIQMPVVNPYAAGIDISDKEHVIAVPEGLAADRVRNFGTMSCDLAAIIEWLEECEIETVAMESTGVYWKPLFSMLVRKGFEVYLVNASHVKNVTGRKTDESDAMWIQKLHSCGLLKSSYLPDDEQEALRTLVRYRRTLVQDSSRFINRMQKSLELMNIKFHTVISDIIGKSGKAVIEAILQGEREGKKFLPLIDKRVKADKETIVKSLEGNWRAEHLFTLGESYKMYLIYKDRIAACDQEIEKQLQQYEVKRNDGIIEADQKPKVKPIQKRKDKNHPQFDVRRYLESIHGVDVLNIYGLSETCGLELLGETGTDLSKWENDNHFVSWLNLCPNNKISGGKLISSTLLKKRTNPASQAFRQAANAVQKSNNWLGDYFRRMKSKGGHKYAIVATANKIARIYYRMVRYKQEFNPVQLEQYQQKYKQAKIAYLERKLSQLKNGTA

SEQ ID NO: 415407 - protein, 357 aa, unidentified
MNFIGIDLHKKTISVCVVNQERKVLKRRTLSCAEASKIGAFFREWGEFRAVVEATASYEWLWQLLEPLAQRLVLAHPGKLRVIAESKNKSDKLDAQVLAEFLALDMIPEAYRPTPRQRQHRTLVRQRVFVKKNLTRVRNKIRRVLSNYNADRPDLFTKAGLTYLQEAKKKVSAADQFVLDQLLEEWHYHRRQFQAVGRQLQAFARQAPLKEKEIRAVLRSMPSVGPTTVEVVLSEIGDIERFRSNKRVVAYAGLAPGQRESAGRKKELGITKQGSGLLRWVLVQTAWRTVRCSLRWRSVYENLKKRRGSKKAIVAVARRLLTVMAALWRTGQRYRHAAQDGAPTVPKARRACRAAQA

SEQ ID NO: 415408 - protein, 330 aa, unidentified
MPFHVGLDWGGESHAICVIDAAGAIVAHFAASHDAAGLADLFARLRRIAAPAELPVAIGSTYTSNPSGLIVDALADAGHPVIPIHPNILKACRPRYRAAGGKSDPADAFMLADILRTDGHRCRPLRPASAEIRALRALPDGCWPGATALFADIQSPIALAFLRRYTTPDSASRLGEKRLAGLRAAPASLASEPEAEAKGELARARAALLEPLGAEIARLSARIEHAVAELPDGQTVMSFPRAGRVCAAVGSMLPTLAELGDVRERFPTEDQLAAEAGVAPVTHASAKSRGVAFRWACNKNLRAAITTFADNSRHASPWAATVCRSARERG

SEQ ID NO: 415409 - protein, 361 aa, unidentified
MNEATSNTVARVGVDLSKQTYQVHAVDRHGKVLLAKSMSVDRFFAWCASLQPGCLVAMEACGGAHHVARRLLRQGLDARLIAPSFVMPYRMAGRGGKNDANDAAAICEAASRPQMRFVPPKSREQQGHLCVHRLREGYKSDRTSCINRIRGLLMEFGLVFPKTPEALLRVLSDVLEDASNELTDVARLALQQAQEHWRFLEERLHWCDQRIAAHVRDDAQAKRAMQVMGIGPITASAFVLTVSNPSTFRNGAQLGAWLGLVPSQHSTGGKAKLGRITKHGDTYLRSLMIQGAKSAVMTAHLRTDRISQWALALKARLGWQGAVVALANKNARLLWAMLTRGSDFDPNHVPPIPAARCPKAA

SEQ ID NO: 415410 - protein, 355 aa, unidentified
MERYIGMDVHAASCTLAVVSQTGKRLKDFPVETNGQALVEAIRMIPGHKHLVFEEGLQSAWLYETLSPHVDEIVVAGITERRGPKSDKRDAYGLAEKLRVGNLDKPVFKAPREFTRLRELSRMHMTLVGDVVRGQSRIKSLYRSRGIPVSGVNVYGVHHREMWQKQLSPSAQTRATRLYAHLDFLLEQKQQAEADLLREAKRHRIVGIVETAPGFGPIRAARLVPIVVTPHRFRTKRQFWSYCGLGIVTRSSSDWVQTTDGAWIKARVPQTRGLSRQHNRFLKHIFKGAATTVITQRHKDPIHARYQQLLDGGTKPTLAKLSLARMIAATVLRMWKDEEEYDPGRTGLPAKTREG

SEQ ID NO: 415411 - protein, 310 aa, unidentified
MNFYNNTHPYYCGIDLHARSLYVCIIDKTGNTLVHKEISANPEKLHHLLKPFLGDIVVGVECMHCWCWVSDFCEQLNVDFILGHALYMKAIHGGKAKNDRIDSYKIANLIRGGNFPLAYTYPKEMRATRDLLRRRAKIVRHGAHLKAHVVNTTSQYNLPPNAVNLKNADAREQLRATFPDPVVQRNIDLDMAILDAYSQELSKVEWFIEKQAKQHKPAQLKLLKSIHGIGPILALTIIYEIGDISRFETVQKFASYSRLVKCKAESAGKSYGTQGNKIGNANLKWAFSEAAVLHLRGNDQAKNYLLKLQR

SEQ ID NO: 415412 - protein, 323 aa, unidentified
MNKDIKYFGIDISHLVFDVTDSNGNYYQFKNTSLGFKKFLKLLDSNSHCVMEATGYYHYQLAYYLLESSIKVSVENPLAVKRFIQMKLSKIKTDKSDSKLICEYAKQVELKLWQGNSKHQTECLQMTRLLSVYTKQSTMLKNKLHGEAVLGNPSKVVLSSLKRSLKHIQKEIKTLELKLLVLVKQVHQDILTRIKSIPGIGDKTAVMLVVLTDGFDRFTSGSELCSYAGLTPIIRKSGSSVNGRSRISKIGNQKLRNLLFMCSFNACKYNKACREIYERIVAKGKSKKLALIAVCNKLLKQAFAIAKSGLIYDDSYRSILVKN

SEQ ID NO: 415413 - protein, 343 aa, unidentified
MQAVTTIGLDIAKSVFQIHGVDAAGNVIVRRQLKRRYVLPFFQRLPPCLVGIEACASSHHWSRELKALGHTVRLMPPAYVKPYVKRQKNDAADAEAICEAVTRANMRFVETKTLEQQSCLMLHRTRHLFIRQQTAVINAIRAHLAEYGIVAAVGRNGVEELLGVVADPSDKRVPEIARACLAALGAQLRMLKAQILEFDRMITAWHRSNETSKRLDAIPGVGPALATALVASVPDPKAFRSGRNFSAWIGLVPKQHSSGGKDKLGSISKQGDRYLRSLFTAGALAVIRYAKIHGTKHRPWLTALLARRPTKVAAIALANKIARMAWAMMARGDRYKEPVALAA

SEQ ID NO: 415414 - protein, 312 aa, unidentified
MEKLSYGGIDVSKDRLDVVVLPEGWFFSVSNDTVGWTELVARLRPLAVCAIGLEPSGGYERGIIRALLAARLSVRRINPNKLRQFARARGVLAKNDRLDARLMAEYVAIMPTRAVQRDDAVDRLAEVVTMRRQLCDEHVTVENQTAHLEDAMLRRLSKRRLVRLEADIRLLDKRLAEMVATNAAFARLYELLTSMPGVGPVLAFTLIALLPELGKMSRKQIAALVGLAPYDFDSGKLRGHRSIYGGRMPIRNVLYMAALSASRYNPALKTFSNRLAHANKKSKVIIVAVMRKMITTLNAMLRDNATWQPQSN

SEQ ID NO: 415415 - protein, 376 aa, unidentified
MITCFIGIDAHTTNYTLSTAIDAEDKPFNTCKYAPKLTYILKYANALCKKYNLKKEDILLGYEAGCLGFKLQRDLNENGFNCVVMAPSTIPGTAINRRKKTKNDIRNAEAIAKALRNDDYSSVATPDEEDEAIREFIRAREDVRMELKRCKQHIMAFCNRHGQHYEETGWTQKHMKWLNNLAFSQPVLKETLNSLLLEYEYLTEKLEEKDRRIEEFAQMDKYRESVHKLTCFKGIKTLTALAVIVEIGDFARFMKAKNFVAYLGLSVGEQSSGNDHNQTGITKQGNRFIRKLLTEAAQCFSRATSKKSKELKKRQEGNVEEVIAYADKANERLRKRYHHLVIHNMKSPNKAKCAITRELACFIWGMMTDNIHTVLV

SEQ ID NO: 415416 - protein, 354 aa, unidentified
MNTTQNSPKSKIVKVIGVDLAKDHCDVIGYDENGKICLRLDGCSYAKLREILSNLPQAVVLMEACKGSMFHARSIADLGHEVRLVKGADVKALRNVNHKNDLRDAAYIAKLYFVPGTTYVYIKSQQQQSLQFLQNEYKSLQELRIQAGNQIHAGLEEFGCPVRKSSKFIKTRMVAHLEKHAELIPEDVMASFKRRREIWLNLLQQEEEAQRRMEQVAATDANAKRIMTVPCVGPQTAVGLLVHIGVDIGRFKNSRQFAASLGLVPKQNSTGGNSRLNHITKCGPKRLRSNLVQCAQLVLMHADKWKGNFGDWVRKMRDSGKKHGVIVCAIAAKLARIIYRLMKDKVDYTPVLSC

SEQ ID NO: 415417 - protein, 362 aa, unidentified
MEFFSGLDVSMERTAICVVDDKGEVQMQTEVVTDPDAIAAALKPFLPRLRRAGHEAGSLSPWLQPELVKRGLPAVCLETKHVRAAMSAQRNKTDATDALALAHIVRTGWFRQAHIKTESCYRLRLLLTQRRNLKRKVLDLENTIRHSLKAFGIRIKGTGRTGFDAAVREAVADDALTSELMDAMLAARAMLWKQYRRLHDLVVKFVARHELCRRFMAIPGVGPVTALSFVTAIDDPSRFRRSRDVAAYFGLTSRRWQSGTSIDVQGRISKAGDGDVRRALYEAASALMTRFKGRDKMQTWGLALARRSCHRKATVAVARKLAVIMHAMWTDGTCYVGDAAASASERQARAVMKDGKLLGAQA

SEQ ID NO: 415418 - protein, 348 aa, unidentified
MILVGCDLHSRTQQVAVLDTRTGELVEQALAHEGGAVERFYRALPPPVTIGIETTGYTQWFHALMHQLGHTVLVGEAAKIRAMVVRKTKTDRRDARHLLDLLQHDRFPTVWIPDPDTRDRRALIAHRVRLVRMRTMVKNGLQAIALNQRLALRSALWTQRGLTQLKALALPPHTTRRRDDSLALLAWLTTRIDQLDAHIAAVASADPRVQLLLTHPGVGPLTALTTVLVLGPLARFPDSKHVVSYVGLAPAVHASADKQRLGKITKQGNALLRWVLGQAAPLAARKDDDLRRRYFSVMHRRGRPKAKVALARKLLVRLYIMLRDQIDYEEFRRRGRAPRPQPLPVAVM

SEQ ID NO: 415419 - protein, 402 aa, unidentified
MAAGQLWAGVDVGKEHHWVAVVDDIGAVVLSRKLGNDEQSIRALVAEVDSLAERVSWTVDLTTVYATLLLTVLADAGKSVRYLAGRQVWQASTAYRGGEAKTDAKDARVIADQSRMRGADLPVLHPDDDLISELRMLTAHRADLVADRTRTINRLRQQLVAVCPALERVAQLTSDRGWVVLLARYQRPKAIRQSGLSRLTRVLTDSGVRNASTIAQAAVAAAKTQTVRLPGEEVAAGLVAQLAQGVIALDERITQTDADIEDRFRRHPLADVIISMPGMGFRLGAEFLAAVGDPALIGSADQLAAWAGLAPVAKDSGKRTGRLHTPKRYSRRLRRVMYMSALTAIRCDPNSRAYYQRKRDQGKRPIPATICLARRRTNVLYALIRDNRIWQPDSPPLTMTAA

SEQ ID NO: 415420 - protein, 365 aa, unidentified
MTIEVRTVTVIGGVDTHKHTHYAAAIDEHGVLLGHQQFPATDAGYQALATWLRRHGEVKAIGVESTGSFGATLTRSLTSQGEQVIEVNRPNRLARRMDGKSDRLDAEQIARAVLGQTSTAIPKSKSGTVEVIRTLRVTRSSAVKARTQAFNTLFGIMIGAPSPLRDELVDLTKRTLVNRCLRLRPETDDLLTLVHDPERLLVAGVKTALRDLARRWKALDDEIKSLNRQLEALVQRAAPELIELVGVGIELAAQFLVTAGDNAGRIRNEAAFAKLCGVAPQPASSGKTTGRHRLSRGGDRAANSALYIVAIVRMRHHEATRAYVERRTAEGLSKREIIRCLKRYIAREVYAKLPKTDPTSAPAAA

SEQ ID NO: 415421 - protein, 475 aa, unidentified
MNLKGKKKKNQVVTANIFEQQEFLKRAEVIRENLTASTWRELEANGKFDKNAKLSFINDDMLILGCDVGSETHYMRAIDTRCRELSKSAFPFNNDSEGFQSAKEWAVTIAAQHDKRQIVLGLEPTGHYWFCLATWMVSNGISVVQVNPYAVKQTKEVEDNSQLKDDRKDPKLIANLVKDGNFGMPYLPEKLYAELRRLSLFRDQLNEDRIRTVNRMHREMKIYFPEYKDALGKVDGAFSLELLKQAPFPDELTALGAEGIRQIWHDAKLRGRGYSRAREIIQYAKESVGIKDGVAAGKTAVKWFVQKIQELDAELAVVGDQIKRKCQEIPHADNILEISGIGENTLSGILAELGDISRFDDVKEIQKLSGLGLVACSSGKHKGETKISHRGRKRLRYWLFQAAKSVVAHAEEFKKLHAYYMTRTENPLKKMQSLIVIACKLLRIIYTILKNGTDYDPKKMLLDIRRPEKKEEAAA

SEQ ID NO: 415422 - protein, 336 aa, unidentified
MSSSYLGIDIHKKRCVYTEIDSAGKIIRQGQFGNTFEEVSAFASSLTTMVHIVLEPVLNYLWLLDQCEPYAGSIHVATPFKVRVIAESKAKTDRYDARMLAELLRVNFLPESWVPPAEIRWLRGLIRQRYHLVKTIVMNKNRIRHVLFQYGISLAVFNIASPKARQAIGGLCLPEVAKQTIDQCLKIIAVLDDLVLELNKRIETGIKGNPTIELLQTIPGIGHIRSATIYAEVGDISRFHSSKALASYTGLVPIVRSSGESVWTGGITRLGSRPLRHALVEASINAIRQSPALRRMYSRILHRGNVQKARVAVARKMAVIIYAMLRRHEPFRVEAA

SEQ ID NO: 415423 - protein, 339 aa, unidentified
MFYSGIDQHKLFSYITTVDSDGIIIKEAKLNNNNFEILNYFNSIGKDHIATVETTGGWYWMNDLLSSQGINLTLAHAKYLKAISYAKVKTDKVDSHILAQLLRLNFIPEAYKIPDDIRTLRDTLRARLRLSVKRTSCLNFMHRMLEKFNISVPSLLNSFYKLQYQQFDVQSKLLKEQMLTLEKSLYPSLIPNEDIQRMLWIPGIGKMNAFTILLEIGDIYRFPSEKNFFSYCRLVPSARNSGGKVKQKSSSKDGNKYLKIVFSDAAVHALQYYPVIKKYYNSKLRKKNKQVAKAIISKEIARIVYHVLKNKSEFNNQFKGIELEHKKSVQWPRITSPDV

SEQ ID NO: 415424 - protein, 340 aa, unidentified
MDILDLLGLDIGKSTFHLIGHDAKGKEVLRKKFNRSRLLEFAARLKPCTIAMESCGGSHWLARKLLSFGHQVKLIAPQHVKPYVTGNKNDYIDAEAICEAASRPKTRYVAIKTVEQQVLSTQHRLREALVGHRTQTINRIHGFLLEFGIALPATKAAMNQVHLILDDPAAELPRQLKSFIEHLLAEMKRLNEEIKAIDRSIKEQVDTDDAGTRLMSIPGIGPIIASALLADVGDASNFHSSRDFAASLGLVPRQYSTGDQTVLLNISKRGDKYLRKLMIQGSRAVLVHIDKRTDALGTWCRDLLIRKHPNKVACALANKLARIVWAVLARGVSYNAQSMA

SEQ ID NO: 415425 - protein, 367 aa, unidentified
MKKHTPMAVGLTVNRKCERLTIGLDLGDRSSCYCVLDEAGDVLLEQKVGTTPKAMRDVFGALPRCRIALETGTHSPWVSRLLIELGHEAIVAHARNVRLIGESKRKDDRLDAFTLARLVRIDPQLLCPVKHRSAEAQADLIVIRARAALVRNRTTLVNAARGLTKSYGEKLGRGNARSMKPKAAQDLSPELKNALGPLMREIESVSERIRDYDELLESMAQNKYPEAERLKQIKGVGTLIALTYMLTLEDPSRFRKSRDAACYVGLQPGRRNSGQSEPQMRISKEGDPYLRSLLVQAAHHILGPWGVDSDLRRWGMKLAEHGGKRGKKRATIAVARKLAVLLHRLWVSGDVYVPLRRIGQAAVPAVA

SEQ ID NO: 415426 - protein, 416 aa, unidentified
MHVVYSSCCGLDVHKRSITACLLLSGSGGKGHHEIRRFGTMTRDLLELADWLQCHHVTHVAMESTGVYWKPVWNILEGQFEVVLVNAQHIKAVPGRKTDIKDCQWIAELLQHGLLRGSFVPPTPIRQLRDLTRMRTSLRQDHTAIANRMQKILEDANIKLASVASDWLGVSGRAILSQLLAGEEDAEKLAELSRGRLRSKLPAMQLALEGRMTEHHRWMLRVLHEQLLFLEVQIAKLEAKIQDQLSDYQEAIALCTTIPGIEEVAAANLIAEIGVNMAQFPSAQHLASWAGICPGNHESAGKRLSGKPRKGSAWLRRSLCQAAWAASHTKATYLTARFRRLAARKGKKRAIVAVAHTIVVSMYHMLKNKQPYRELGADFLDRRNAEHVKRYLLKRLERLGLHVTVRSAEETAALSA

SEQ ID NO: 415427 - protein, 352 aa, unidentified
MTWVGLDLHKRYITACALDEAGVVVAEHRRLPADDVTLLGWLAALPGPVTVAMEATLYWAWLHARLTAAGFAAVAAHPYQVKLIWQARAKTDPIDARKLAELLRVKLLPTIWVPDADVLARRKLLRGRAYLVRMRTRMKNRIHGYLTAENCRCLVTDLYGKAGRAWLGAVVLPEISRVHVDLLLELVDALDLRIKRLDQRIRKTVAQDAAAERLQTVPGIGPFGALLLLAEIGRIDRFATSHHLAAYAGLVPSTRSSGDKTSHGTVDGAGSPWLKWVLIEIVQTLKLAPGPIGVQYQKLLRSKGKAKATVAAARKLCCYLYGMLKEAWTYEEWLQQHEELGVRPEHALVSVG

SEQ ID NO: 415428 - protein, 340 aa, unidentified
MIKNTQFFIGIDVSKPYFDAALLPVVDHQKKEMVFERFANTNEGIKSFGQWLKKHKVSFNENTILVIENTGIYHRLLWSFCSKKKLPIHIGNAAHIKWSFGIARGKNDKIDSQRLCQYACKEADELKATPALNPVLMQLKDFMTARTKLLSQINAIKVYVKELKNVSDKAIQKTLEQCYKQALEGMTASIKKIEAEIKKIIAKNKSLQTNYDLLITVPGIGHLTAVYLICCTNNFAGKISGKQLACYAGVVPFANTSGISIKGRNKVHPMANKDLKKALHLCALTVIQYYPEFKQYYERKKAEGKHSMSVLNAIRNKIVLRAVAVVNKQQPYVNNTQRAA

SEQ ID NO: 415429 - protein, 385 aa, unidentified
MALTGLSGNEGAAMSEGSEAFVGLDTSKTKISVAVADGGRCGEVRFYGDIDSSPDAVNRLVKKLSARYQRLHFCYEAGPCGYGLYRQLTALGHQCDVVAPSMIPIRPGDRIKTNRRDAITLARLHRAGELTPVWVPDEAHEAVRDLVRAREGAMLDLRMKRQQLTAFLLRHDRIFPGRKTWSRAHVRWLCEQRFEHPAHQIVMQEYRHTIDDAETRLDRLEGQLAEVVPQWSMAPVVEAFQAMRGVGFLAAVIFVAEVGDVRRFESPSQLMGYLGLVPSERSTGDRVRRGGITKAGNRRARWVLIEGAWTYRLPARVGRTLQARLDGLPKAVRDIAWKAQTRLCGRYRRLTAAGKKPCLVTTAVAREMAAFLWAIGQQVAPRLAG

SEQ ID NO: 415430 - protein, 391 aa, unidentified
MYIVGIDCSKYKHDCFIATETGEVIRDTFTFDNSGPGFALFFSILETLKCPKNQIKVGFESTSHYMVPLMKHLSVKGYEFILLNPVIVSRFRRSTTLRRIKTDKIDAKTIAQVLASSDYESYHMQVYHFPELKSLTRLRDRLVKQRSYYLVMLTNVLDEVFPEFKEFFDDSLKSKTAFYLLDTYKIPSRMANMNSNSFDNLRKISKGKFSYAKFVKIKELAKNTIGSSSEADELEISSLLNIYKTINDEVCRVESKIEEIMTILDSPTVSIPGVGLMSAASIIAEFGDLSRFANADKMLAYAGLDVGRSQSGTADYKGKMVKHGSSYLRQALMNVVETMMIHAPVFYDFYHKKRGEGKPHRVALSHLARKLVRLIYKLETSHTRFDLTNSK

SEQ ID NO: 415431 - protein, 382 aa, unidentified
MPAYADPTPTPISADTIFLAFELSGTSWLVALHAPDADKVERHRLSAGVAAEVLGLIARTKARVTRRLGTTPRVACCYEAGRDGFWLHRVLEAEGIASHVMDPTSLQVDRRARRAKTDRLDAQALLRALMAWSRGERQVCSMVRPPSPEHEDERRLSRERGTLLKERLRLSNRIKGLCAAQGIYDYEPLGADRRERLARLVTGDGRALPGRLAAEIGRQLDCLELVLRHLAEVEAVRDARTAQAREEGGSKLAALLRLKGIGPELATVLELEVFHRHFANRRDVAAYAGLAPSPYASGGTSREQGISKAGNRRARKALIELAWLWLRHQPESALARWYRDRVGTATGRVKRIAIVALARKLLVAIWRYVETGLVPAEATVRT

SEQ ID NO: 415432 - protein, 330 aa, unidentified
MDVPSSIKLDKDIAMKNNCHVGFVGIDVSKNWIDVACEAGLFQIEQTQIAIEEFIQNKLKKLKVQWCVLESTGGYERLSVNCLQAAGFQVHVAHPLRVRRFAQAQGLLAKTDRLDANLLAAYGKFIEKKGRVAKVLSPYEKELKDLQGRYEQLKSICHAEKCRANSLVHERVKKQIQKNIIFLKEEMTLLLEEIEKLIKTDTQLDTRKKLLCSMKGVGKITAQPLLIHLAELGELNGKEIASLVGVAPMTNQSGKKIGRAYIQQGRGNVRHVLYMAALSGCRFNTRLKVFYERLIKAGKPAKVAIVAVMRKMLVTLNAMMRDQVAYQTSI

SEQ ID NO: 415433 - protein, 457 aa, unidentified
MAKQSGRRKKGGAKADATEGLPPLNLHAAGIDVGSAEHYVAVPLDRDVEPVRRFGSFTADLHRMAHWLKDCRITTVVMQSTGVYWMALHDVLESHGFEVNVANARHTKTLPGRKTDVQECQWLQKLHTFGLLNNSFRPPEEIRVLRGYLRQRENLVAAAATCIQHMQKALTEMNIQLANVISDISGTTGLAILYDIVRGERDPYKLAMHKHSRIRASRQEIARSLQGTWRQELLFVLEQSLDLYQTYQQKIQTCDERIDGQLRSMEPKIDPVSEPIPEPRRGKDWRGHQSGFDLRGQLYRITGVDLTRIDGIEVQNAQTIISEVGVDMSRWKTEKHFASWLGLCPDNRISGGKVLKRGTRHVVNRASTALRLAASALLRSQSALGAKFRRLRSKLGAPKAITAMAHTLARLVYRMLKFGHDYVDRGIDFYEAKYQHQQLQRIRKQAAALHMQLIPLT

SEQ ID NO: 415434 - protein, 351 aa, unidentified
MAILAERFVHVIGVDTHKLTLSAAVLNSVGGVLESCEVAANEAGHRRLIAMAARYPSPLLWAVEGTGSYGACLTQHLAAAGQVVTEVDRPKRPVRKAGKSDQLDAVRAGRDALAMKHINSPRRREEREQIRVLLTTRAELVRTRTSLCNQLQQLVVTASQVLRARFLETNPRRHSSERLVRRCLLARGGSRLGPEDRTRLTAMRDLSGLIQGITARADSYEREMKGLVEAMAPSLLAEPGIGTLTGAQILVSWSHAGRLASEATFAALAGVAPIPASSGQVVRHRLNRGGDRRLNAALHTIVLNRCRYHQETRDYVARRSAEGKSQREIRRCLKRYLARQLFKFLANVDKG

SEQ ID NO: 415435 - protein, 348 aa, unidentified
MKKRPLCFVGIDVSKDQRDLACRPEDKRWHVANDSAGIADCLLQLRQLKPTLIVLEATGGWQGSLVAALAVAKLPFAVVNPRQVRDFAKATGQLAKTDALDAGIIAHVAEAVRPTPRPLPDATMQHIDAVLQRRRQLLEMLVAERHRVVLAHPAVRDSLARHIEDLQRLIREADEEIATVIQASPAWREKDDLLQSAPGIGPVLSATLQAALPELGTLNQREIAKLVGVAPLNNDSGKRSGTRHIRGGRAEIRAVLYMATLTASRANPVIKTFYQRLLARGKAQKVAITAAMRKFLIILQCDGQNPNPLECQVPTLRLTKNTVAYVDRFRRALPRLWQLGGPQPGLGC

SEQ ID NO: 415436 - protein, 387 aa, unidentified
MYYVGIDIAKLNHFASVVSADGEVLVKPFKFTNDNDGFCKLLSALASYERGSLIIGLESTAHYADNLVEFLVSKRYQVCVINPIQTSTMRKNNIRKTKTDKVDTLVIAKTLITQPHRFFSQEDIDLMHLKNLGRFRQKNIKERTRLKVQLTAYVDRVFPELQYFFKSGLHQKAVYALLKEAPTPELVASMHLTHLVHLLEVSSHGHFNKEQAKELRILAQKSVGSSDRALSLQVTQSVEQIELLDRQIKDVESQMTEIMLGLDSVIMTIPGIGYVNGGMILGEIGDIHRFQKPCQLLAFAGLDPSVYQSGNFNASHTRMSKRGSRVLRYALINAAHNVVKNNSTFKAYYDAKMAEGRNHYSALGHCAGKLVRVIFKMLTDDVAFNLE

SEQ ID NO: 415437 - protein, 346 aa, unidentified
MVLIGCDYHPSWQQVCWFDRATGETGDEKLVHASGDAEEFYRRFSSPVRVGIEATGNCQWFLELLNRLGHEVWVGDAAKIRASDSRQQKHDKRDARLLLQLLREDRFPRIWTPTREQKDLRQLLIHRYKLVGLRARVKNELQHLAMNQGVTKKQKLWSKAGEQVLRELALAPWASQRRKDLFRVREMLNEQIDLLDRAVVEAAEKNEKARLLMTQPGVGPITSMAFVLTMGDVKRFPRGKQVASYLGLIPREYSSGGKQHLGPISKQGNRFLRMLVVEAAQAAVRYDPGFRNEYLHRCHKKAKGVAKVAAARKLAIRLYWMLRTNTGYPEVVRVESSSRVALVSAS

SEQ ID NO: 415438 - protein, 457 aa, unidentified
MNKIRKAETDPFEKMPIINSAAAGIDVGSRSHFVAIGQSKEDVREFGVYTEDLHELCKHLVAAGRTTVALESTGSYWQQLFVLLQQYDLNPILVNGKFTKNVKGRKTDVQDCQWIQKLHLMGMLEGSFIPDLFTEKVRQYYRHRQTLVNNAASYINKMQKSLRMINIRLDAVLRDVMGRSGKDIIEAVLKGERNAAVLASLAQPTVKAPKTEIIAALTGDWREEYIFELKQCYEIYQHYHKKIDECDETIEKLLTEEIARRQKEENLSKALVKIKKKKVRKNEAKINVQQLAVDLTGGVDISSIEGVGLGLVLCIISETGLNLEAFPTAKHFSSWLGVAPDIKKTGGKVMKNRTRKGKSRLAKAFMQSANAIGNMKTGGYLVHFFKRIQRRGDRKKAIIATANKLSKIIWNMLVKKEPYNPIMPKEYLDKIRKKEVKNIQRKIRQLNITEEELLFAI

SEQ ID NO: 415439 - protein, 354 aa, unidentified
MDKYIGFDIDCKKTVACVVQGGKKDFYATFGSEIEFMKKFLISQKSMGNKIHLVFEISGQAGFIYDCLAGYADTITVANPSKMTWIYRTTKKNDRIDARKMAVLLSIGEVPSVYMPSKEIRQWRETILHRKKIVTKIVQVKNRIRATFKSQGYSKPLEKGSWWKNINLLWIREVCQRSIGVCDLWHMHVCNLLDEFELLQSQLKRVTFYLDGYLAKNPGGKLLMSMPGVGPRTSEAVLAYTDDVHRFGNYKQYCSYFGLTPKLDESGLCRRLGHISKHGPSVVRWVICESSWVAIRKSKGLRAFYERVRCGQDGRKKIAIVAVARKLLSIMRAMMLTGELFNEGLVNDVIRQAA

SEQ ID NO: 415440 - protein, 387 aa, unidentified
MSDTRMPAPATALDHESTIVTAVELSARSWLVGAQVAGVPRQCRQKLDPSAQALLDHLDHLRQRAGRAGKRVSRVVVAYEAGRDGFWLARWLLERGIEVYVIQPSSVPVDRRARRAKTDALDVEMLLRTTLAWLRGEPRVCSMVPIPSEAEEDGRRPLRERQDLIRERLAITNKIDGLLAALGVGGYRPLRRDRRERLEALRRPGGGPLPAHARARLARLLDRLELVLEQIGVLEEARDAVVTRDGAPSGEAEGLVRRLAGLRGIGPELATLLAWEAFVRPFRDRRALAAYAGLTGTPFDSGDRRREQGIGKAGDRRLRAALVELAWLWLRYQPDSALAAWFRHRTQAAGGRMRKVMIVALARKLLVALWRFCREGVVPEGAALKAA

SEQ ID NO: 415441 - protein, 461 aa, unidentified
MTSRKKKQGKLCGDETLPQLRENVAGIDVGATEHWVSVSSDRDPKAVRRFGAFTSDLHALADWLKACRIDTVAMESTGVYWIPLFEILEERGFEVSLVNAKHLRNVAGRKADWTDCQWIRIVYSRGLVSASFRPPDQIAALRSYLRHRKMLVEYAACHVQHMQKALTQMNLHLHHVISDITGVTGTKIVEAILAGDRDPVRMAQLRDRRIKSSPEVIAKALEGNYRPEHVFALGQAFHLYKTYQEQIEACDQQMEVHLQRLEAKVDLQQMPLPQSRRNRNAARKRRNQIRFDCRTEAYRIAGVDLTTIDGIDESTALLILSEIGLDMSPWDTEKHFASWLSLSPNHQISGGKILDRKTRKQKNRLRDGLRICGQSLLHSQSALGAYCRRICARIGHPRGIIATARKLACLIYRLLKFGGAYVDKGQQHYEQRFKERAVKNIARRAKEHGYQLVPLPDVQVP

SEQ ID NO: 415442 - protein, 407 aa, unidentified
MLLRARVSVSCTDRGLWRAARPLSHRWGVLLQEVARRMKVLHERVAGIDVHKEMIKVAIRSPGEKPWTRKTEILEYRTFYGVLQEMARELRRRGVTHVVMEASGVYTEPVYYALAERDFTEVAVINPAHAKALKGHKTDATDCTRLAELFECGLLHGSYIPAPELKEVRDLTRYRMKTVQARTSEIQRLAKALESAGIKLGSVASSITGVSATAMIEALIDGERRGGVLADLAQGRMREAGKLADLSMALSGRFTGHHALLCRLHRDRIKMFEDAVAGLEDRIAGKAAPWRRELDLLMTVPGFGDAVTQAWLGEIGPAPHLHFSSHDKLACWVSLCPGNNISARKRKYGRTGDAGTYIKPMLVQAAWSAIRVRGRLQARYNRLVRRFGGDKNPGAKKRRSSRSRTPC

SEQ ID NO: 415443 - protein, 394 aa, unidentified
MQVGIDAHKRSCTVCVIEEGAVTDSFSFPTTREGVNEFMEKIHGKATVVIEASTTGKVLSRMLLEKYEVHMVAPPERRRSVKTDRRDAERVVREDTLQYLRRCYIPSPYIEMLRFLVMQQIQIGRKIGRVKNQVHALLERNMIHDLDGFSDIFGVHGLRRMVEVKLPSLDRTALARSLEELKLHVAHHRQLETELAKIAESDADALLLMSIPGIDFFTALAVKSRIGDVGRFPTKKHLCSYGAVVPGASNSGEYISTHNHVKHGDMVLKYALTCAVRGAVSAGKNSAVKRFYLKHSKRMGAQKAEVAAARKMACVVWKVLSTHQPYREEDERLTAKKKRILAWKAKRQEKNVSSDIRQLAETLMGDTAILTKYPADFNQQFVDSSHKENERAWT

SEQ ID NO: 415444 - protein, 355 aa, unidentified
MNDAKYIGLDVHQATISVAVLDSAGNLVMEAILETKAETILQFLHALRGSLHVTLEEGTCAAWLHDLLKPHVTQVLVCDPRKNALIKAGNKSDRIDARKLADLLYLNKLNAVYHGETGIRALKEVARSYLALTRDTTRVMNRLKALYRSWAIPCAGQRVYAPRYRSEWLAKITEAGVRRRAEIYYQQLDALRSLREQVRRDLLAEGRKHRAMNLLRQIPSIGPIRAVLLIALMQTPHRFRTKRQLWAYCGLALKTSTSGEYRIVEGQLKRSKKFLAIRGLNQNHNHDLKNIFKGAATRAAAVPGPFQEFHAGLVARGMKPTMARLTLARKIAAITLIVWKKGVHFDAEYLKQQAA

SEQ ID NO: 415445 - protein, 410 aa, unidentified
MERVIERCCGLDVHKKTVVACVRVPGRTSVREQHVRTFGTTTAELLALRDWLGGYGVTHVAMESTGVYWKPIFYVLEDAFTCVLANAAQIAQVPGRKTDVKDCAWIAQLLEHGLVRGSFVPPVPIRELRDLTRYRAALIGEHTRETNRLQKVLEDAGIKLASVASDVLGVSGRAMLDALTQGTHDPDVLADLARGALRRKLPALRQALTGRFRPHHAFLVSQVLAHLDYLDEVIEALSTHLDEVMAPFAEEVSRLDTIPGVNKRTAEVLIAEIGVDMGVFPTAAHLASWAGLCPGNNESAGKHRSGKIRKGNRWLRGALIQAALAGGTRATKGAFAARYRRVMRHRGHKKAVVAVAHAMLVAAYHLLARHTTYQEPGADYYERRHAERVRQRAVQLLERQGYRVTLEPAA

SEQ ID NO: 415446 - protein, 594 aa, unidentified
MTTATALDRIGVGIDTARYGHRVSFLRPDLQPAAQPLTVTEDRAGYQALRHRLEQLRRQHPLVHFHVRIDAAGQYADNLEQFLRDLDWPMTLSVGEPKRNKDYHKAHSPKRTTDDTESRAMARFALVERPPASPEPKRPMTLLREVAGRLQGQVKQATRAANRLHNLLARTFPELAALAGDITAGWVLRLLATYPTAERIAAAHLSSLEEVPHLAGDKARAVHEAARQSVASLRGPVAEALVRNLVDQVIRCHEARRDLERLLTAAWDDLPASPHVHVLTIPGIGRATAAVLVAKIADIERFARPEGLVNYFGIFPQEESSGTDKRGQPRPTGAMPMSHKGNDLVRAYLWNAARSAIRHNPAVRALYRRLRARGRRGDVAIGHCMRKLLHLVYAVWKTDRPFDAGHYPWEPAEDGGTTTEGGALATTTSPRGPASDTGDEGAVGHERDEPAGRVVTTAAPTVDPMSSAVNTAPPSIPVARPRVDFAFLREQIGMEQVLAQLGLLSRLRGGGQQRRGPCPLHSHPGAADRTFSVHLGKDMFRCFHAECGAQGNALDLWGAVHRLPLYEAALHLAETFGLRRNREEEPVTGTRHPL

SEQ ID NO: 415447 - protein, 355 aa, unidentified
MSSAASTRTSTRITARSSTIKAGFLGTANFRPAIAATRHCCRGCKAFGPIRAIGVESTGSFGATLTRSLTAAGERVIEVNRPNRVARRMDGKSDRLDAEQIARAVLGQTSTAIPKAKSGMVEVIRTLRVTRASAVKARTQAFNNLFGVMIGAPSPLRDELVGLTKRTLVNRCLRLRPETDDLATLRTHPERLLMAGVKTALRELARRWKTLDAEIKTLNLQIAVLVQLAAPDLVDLFGVGVELAGQFLVTAGVNPERIHNEAAFAKLCGVAPQPASSGRTTGRHRLSRSGDRAANSALYIVTIVRMRHHQPTRAYVERRTAEGLSKREIIRCLKRYIAREIHAKLPRPEPTPLAA

SEQ ID NO: 415448 - protein, 370 aa, unidentified
MKSIIYVGMDVHKSSYTLCCYSIENDTTFATTQIEPDYKNIIKYLDQVNRNHNGQSEFLCGYEAGSLGYTLYHQLTSQGINCVILAPTTMALTKKQRIKTDKRDAMNIARCLAYNTYSAVYIPTEQDNATKEYIRMRDDAKSIIKRLKQQILSFCTRHGKQFTEGRNYWTQKHLAWLKTQDFGDAVLQEAFDEYLVMYRQASDRVERFDRRIEELAQQETYKEKVSKLSCLIGIKTHTALATIVETGDFSRFKTAKHYAAYLGLVPGEDSSGDSTRRSGITKAGNSHVRRLLVEAAQCYGRGAVGVKSKMLAGRQAGNDPKVIAYADRANERLRRKCYRILFRSKRNIAVTAVARELACFIWGMMTDNVE

SEQ ID NO: 415449 - protein, 325 aa, unidentified
MIISNQAKKIKSDTIIGVDISQDKFDIAITSKEGPVHTFANDPKGHQNFIKLIKPLKPKLILMEATGKCETRLALALQKAKLPFRIENPAKMRSFSRSMGMIEKTDKIDARMIALAGERLDISAKSSKLNHLIIKLKEHVRTRFTLIEELIRLENIMDRMLDADLKMELLKLHTRISESKEIVEKKIKKIIDSNEEFSSRYKLLTSVPGIGFVTAVTIIAECEELGETGRGQLAKLAGLAPLANDSGKMQGRRHIRGGRKNLRNALYMAMLATVKYNPKIKAFYERLKSKGKPPKVAMVACARKMLGLLNAMIKHKKGWNEFADC

SEQ ID NO: 415450 - protein, 348 aa, unidentified
MSQSNQYVGLDVSLKETSICVIDDADKIVWRGQVDSTPEAIASTVKQHAPHAVRIGLESGQLSSWLFHELKEAGLPVICVDARHAKAALSLKVNKTDANDALGLAQIMRVGWYREVTVKGLDCQAVRALLVARAQIVSQITTLKNCVRGILKIFGRVLPKGLRSQFPARVRAAIDGHPVLGAIIEPTLLVLEATRAQLLVYDKAVIQRARSDDTARQLMSAPGVGTVVALAYMTGVEDPARFKRSSSVAAYFGMTPRRYQSGEVDHAGRISKCGDGMVRGLLFEAAKVLLSRSARPSALKTWGEALGKRIGAKKATMAVARKLAVILHRMWTTGTTFRWTTEAASPAA

SEQ ID NO: 415451 - protein, 343 aa, unidentified
MEYYVGLDVSLKQTSICVVDQSGSVVREGVVDSDPEAISVYVRSKAPGAVRIGLETGPTSTWLWTELKRLGLPVICIDARHAKAVLKMQINKSDRNDAIGIARIMQTGWFKEVHVKDIDSHTVRALLASRALLVKIKRDLENHVRGLLKNFGLVIGRAKFNVFAVRAEELIEGRPELIAAIRPLLEARTAVEQQVSELDRKVMKLARHDAQVRRFMTVPGVGPITALAFKATIDDPARFARSRSVGAYVGLTCRRHASGEVDWSGRISKCGDAMLRSYLFEAAGVLLTRVPKWSAVKAWGVKLVKRNGLRKAKVAVARKLAVILHRMWIDGTEFNWSKKEIAA

SEQ ID NO: 415452 - protein, 346 aa, unidentified
MSEIKIWFGIDVSKSTFDSSVFVSGSKMDISSIPKSSFRRTREGVEQFKEWANEQIISLNFPSGSNYGAVMEATGSYSLALVSLLMEICPKCSPAIADPKSVHAFGKSLRIRNKTDKADAAVLAIYGAERKPEKYKVAAVEYSTLKELARQRKSLVEMLTAANLKAKEETKVKIINNVRNEVIRNLKKSIDKIELAIKKHVNENQSLKEQVAILTSIPGVGLTIAAVMIGELGDIRRFSSSKKISAFAGVSPRIYESGTSVKGKTRMCKEGQGRLRQALYLTAISSTRGNNGFARFYAMLVIKGKSKMSALGAVMRKMICVMRRLIIDKSLYNDSLVTPIMEGGNC

SEQ ID NO: 415453 - protein, 387 aa, unidentified
MSETRMPAPATALDHESTIVAVVELSARSWLVGAQVAGVPRQCRQKLAPSAEGLLDHLDQLRQRALKAGKRVSRVVVAYEAGRDGFWLARWLLGRGIEVYVIQPSSVPVDRRARRAKTDALDVEMLLRTTLAWLRGEPRVCSMVPIPSEVEEDGRRPLRERQDLIRARLALTNKIDGVLATLGVGGYRPLRRDRRERLEALRRPGGGPLPAHARARLARLLDRLELVLEQIGVLEEARDAVVAREAVPGGEAEGLVRRLVGLKGIGPELATLLAWEAFVRPFRDRRALAAYAGLTGTPFDSGDKRREQGIGKAGNRRLRAALVELAWLWLRYQPDSALAAWFRSRTGSVGGRMRKVMIVALARKLLVALWRFCRHGVLPEGATLKAA

SEQ ID NO: 415454 - protein, 352 aa, unidentified
MMIIGVDYHPSDQYIAFVDTETGECGERRLNHSDGEAEKFYRELRQREVSVRVGMEATGYSRWFERLLAELGIEVWIGDAAKIKTKRVRKQKTDRNDARLLLKLLLENTFPRVWVPSPENRDLRQLLWHRHRLVQMRTRIMNQLQALAMNEGQRRKKKLWSDQGRAQLEKLPLATWASRRRQDLLELLDRMNPPIEELTRAAEQEAKKWPEVLRLMTHPGVGPLTALAFVLIIGTPERFQCGKQIGSYVGLIPSEDSSAGHQRLGHISKQGSSLLRFLLGEAAQAAARCDADWRRRYVYLAMRRQRNIAKVAMARRLAVRLYWMWRNGWEYSQWVEFGSNAGQLATGHGVND

SEQ ID NO: 415455 - protein, 401 aa, unidentified
MTPLHSPKEGVILVSMETAIANRRSYCGGGPSDRSPAGGRHPFILWSIDRRSAQGPLPKSRTTGQSHDFPIAHTRQVTVTGVICGVDVSCSTLEVRIGRQGATGSFPNTAAGIAALASFCRAHEVELVAMEATGGYEKQPFTVLAEQGLPVTILNPRAVRRFAEGMGLLEKTDTIDAGLIAWFAEVKKSQPRPLPSAGQQQLRALVTRLRQLTQIRTAQRNQRRLVSDPVVEASFDQLLAVVNGQIKQLETAIAALISQDPLWRELDPVFRSIKGVADRTIARIVADMPEIGTLSNKAISKLAGVAPMARDSGKHQGKRITRGGRAAVREILFIVASVAGRYEPDFVAFQQRLNAAGKPPKVIRIALAHKLLVRLNAKARQVRKQMEAARSPSPVLAFATN

SEQ ID NO: 415456 - protein, 339 aa, unidentified
MKDQDVSDVVRTKKRTAMRYIGIDVSKATFVVAYSSDKGGEIRTFNNTTAGIRQFIGTLPKDGSIHCVMEATGNYSALLLYMLNVAGITVSMENPLKVKNFAKAMLSTIKTDKSDARLITLYGEKMNPRPFKVQGEAILRLRQKRTVIRQLTKQITAMSNLRGSLACLPVPDKGATHTVDETIKFLEKKRDRLQSELTDLVEVEFSRQLALLTTIKGIGITLATALIITTGGFTYFQNAKQVSRYLGICPTYEQSGTSVNIKGHINRNGDAYTRGLLYIAAWPASRFNAQCKETYTRLRQNGKPGKLAMIAVANKLVRQAFAVVAHDKEYIDGFVSNRP

SEQ ID NO: 415457 - protein, 317 aa, unidentified
MNNTEIQTPVNVGVDVGKANLDIALHPSGQFYTIPNTEAHIRRFVRILKNYEIERIVVEASGRHEHVLVQACHQAGLPIIIVNPISVRRYAQAIGVLAKTDRIDAKVIAQYAATLKPEFKPIPDKTSQKIRDLLIRRTQLLEMSTMEKNRLQILPKSLHRSIKSLLKMLQNQIEAVTRQIEQEVAKVDHWRTKMEIMTSVPGVGKVLAYTFLSELPELGSLNRKEIAALVGVAPINRDSGKLNGKRRIRGGRHRVRTVMFMAMLSSIQCNPVFKRFYERLKAQGKTPKVALIACMRKMIVVLNTMIKNQEVWRAEMA

SEQ ID NO: 415458 - protein, 450 aa, unidentified
MQVVYERCCGLDIHKKLVVACLIVLAANGQRHKEIRTFRTVTQDLLLLKDWLAAAGCTHLAMESTGVYWKPIFNLLEGDFELLVVNAQHIKAVPGRKTDVRDAEWIADLVQHGLLKGSFIPPTPQRELRDLTRHRTSLVQDRARVVNRLQKVLEDTNIKLGDVATDILGKSARAMLEALLAGQTDPKVLADLARGRLRSKIPALEQALVGVVKPHHRFLLTELFTQIDTLDEAITRVGNEIATRMHEEEPAGQEPTEHHRGSPNGEQQEAPAEEPGKAGERPPLTWALAVALLCTIPGISRRAAEGILAEIGLNMARFPSAGHLASWAGMCPGNSESAGKRLSGKTRKGSSWLRILLVEAAHAAAHTKNTYLSAQYHRLAARRGKKKAMVAVGHTILVIIYQMLQQQKSYEELGGNYFDERERQDTEKRLVRRLEKLGYQVTLQSDNPAA

SEQ ID NO: 415459 - protein, 428 aa, unidentified
MNYNIQNAKIASITEKTLIVGIDVGSETHYARAFDWRNYEFTKKPLAFSNTEAGFLTFKGWVEDLQEKYGKTAVIAGMEPTGHYWFALGKFLQDNGMKPVHVNPHHVKKSKELDDNNPNKNDRKDPKTIAALVNEGRFSYPYIPTGIYAEIRSLSNLRFQTQEEVTRIKNRIARWFSIYFPEYKDVYGDVKAVSGRMVLKKAPLPEDIKKLGVEGVNKIWRDAKQRGAGMKRAKTLVSAAEHSVGSKEAPEAARIELKHLLGDMDVYTARLEELVEKLENKLKEIPYIDKLLEIKGIGMITVSGFIAEVGDIGRFDNPKQLQKLAGYAIVANDSGKHNGESRISYRGRKRLRYVLYEAAISLVGKNTEFRAIHEYYRTRKENPLKKMQSVVAVACKVIRVFYTILTKGVDYDAGKLLGDIRHRKVQAA

SEQ ID NO: 415460 - protein, 424 aa, unidentified
MNNTQNRKIAQVTDKTLIVGVDIGGEKHFARAILARGFEVSRKPFPFMSTEDGFGSFVSWAYNLADSHKLTKIMIAMEPTGHYWFTFAAFLERYDVQVVLVAPQHVKHSKEMDDNTQEKDDRKDPIVIARLVPEGRYLIPYIPKDVYAEIRAAFNRRCELVEEQVQIVNRMTRWFDIYFPEYRKVYGRIDAKTGIMILKKAPLPADILGIGVDGICQIWKDAKIRGYGPKKAKQLFAAAEHSVGMEGCTSVRWNLWQLLEEYELVERQLNDILQLIEGCLYQIPGADKLLKVPGAGLVTVAGFLSEVGDIKRFSDPKQIQKLAGLAVVENSSGKRKGLPGISKRGRSRLRWVLFQLARSMVMFNPEMKAYHQYYTTRKDNPLKKLQSLIAIAARIARIFYGMLKNGTEYDPTMVMKDFNKAVAA

SEQ ID NO: 415461 - protein, 348 aa, unidentified
MTEQLMAGIDLHSNNLVIGIVDQNGRRLKHQKLDCNLKQVDDFLSPFKSQLTSVAVESTYNWYWLVDGLRARSYPVKLANPAQIDQYSGIKHADDKNDAFFLAESQRLGILPTGHIYDPVLRPVRDLLRRRMSLVHQRTALLLSFKSLYARTTGQTMSLSRLKSMEMAEAKRLYEHPANCLIAKIQKEHIEQLDRSLETIEKAVLQSARELPCYDKLNTLPGIGRILAMTITMEVGQISRFKTPGDFASYCRTVESRRMSNGKKKGDNNQKCGNKYLAWAFVEAANFAKRYDEPCRKWFDRKAAKTSTVIATKALACKLAKAAWHVMSETTDYDSKRMFPELAMKNAK

SEQ ID NO: 415462 - protein, 337 aa, unidentified
MTIIRIGLDTSKHVFQLHGVDGSEPPVLRRQVRRSEMAKFFAKLPATRIGLEACGASHYWARVLGGLGHEVVLMPPQYIKPYVKRGKNDAIDAAAICEAMSRPGMRFVAVKSAESQAGLMVLRVRDLLVKQRTALINAIRGHAAEFGVSAAKGPVKVAELLHRAHAEAAKVPAPALEMLRLLAGQLDAIETRLTTLEAQLIGVHKANPTSQCLATIPGVGPIGAVSFALRVPDPKAFRSGRHLAAWLGLTPKENSTAGRHRPGRISRQGDANLRRLLVLGATAVIRCARPGRASPWLLHLLARRPKKLAAVALANKMARIIWAMMVSGETYRRPQQA

SEQ ID NO: 415463 - protein, 341 aa, unidentified
MSEVSTIGLDLAKHVFQAHGADASGKVVFRKRLRRDKVLEFFAGKPACMVAMEACSSAHHWARELARLGHIVRLIPPAYVKPFVKRQKNDAADAEAICEAAQRPTMRFVAVKSVRAQANAVVFRARDLLVRQRTQAINALRGHLGEYGLVAAKGPGHVIKLVEHVEDPGSNVPDAARLVLRTLVEALRFLSERIDLLDREIARRAREDDEVRRLTSIPGVGPITAVALAALAPPASAFRKGRDFAAWVGLTPLQHSTGGKQKLGTTSKMGERTLRRLLIIGASSVVRKAVRQGTAAGSWLGRMLARKPRMLVIVALANKMARIAWAVQAKGEVYRAPAVVA

SEQ ID NO: 415464 - protein, 311 aa, unidentified
MNNTIGIDISKDTLDAHRLADGQHKQFLNGKTGHAQLVKWIGKQSDPLIIFEATGAYHRQLERVLCTHIIPFVKVNPKQARRFAQASGKLAKTDRVDCEMLAKMGAALQLMPKPFTAENLYDLRELLSARRALIKDRTAAKARKATVINALIKQQLEKRLRQIKNDVAKIDALMLDVAREDQYMSERLDILFSIPGIGVITALMILVDMPEIGALNNKQVASLAGLAPMSQSSGKWMGKARIQGGRPNLRNAIFMPALVAIRHNADLKTKYDQLVAAGKEKKVAITAVMRKLLVLANALLRDNRKWAEKAA

SEQ ID NO: 415465 - protein, 363 aa, unidentified
MKEEKRRYVGIDLGKREYSMAIIEKNGKIKIHQGKTSIQGRRALYRLLTQTDKVALEAGNLAFILAYEIQEQVGSEVRVLNAAKLPFIWDAPTKTDKEDAMKLAHLIEERGDKKLPIVPLPSKQEIERRKLLASYGREVKSRTRLINLLHAMFVHQGQTTIVQKNLATAEKRRTVVMLLVGQEREEAEWILKHLELYELRIKELKSKIQKEAKTDENMKRIQSIPGVGAIVAYAFVAHVGDGSRFSKGAQVSNYIGFVPRLDYSGETQRHGHITKRGNAYLRGLLVQAAWVAVRSKTGGALQERYKHITAFQGVSKKKTIVSIGRRLSELMYAVLRTKTEYKILHWKGTQEKTTALTEQAMSA

SEQ ID NO: 415466 - protein, 343 aa, unidentified
MQAVTTIGLSIAKSVFQVHGVDAIGNVVIRRQLKRRYVLAFFQKLAPCVVGIEACATSQHWSRELKAFGHTVRLMPPAYVKPYVKRQKNDAADAEAICEAVTRANMRFVATKTPGQQSCLMLHRTRHLFVRQQTAVINAIRAHLAEFGVVAPVGRRGVAELLDVVVDSSDERVPEVARACVAALGAQLRMLKAQILEFDRQIMAWHRSNETSKRLDEIPGVGPALATALVAGVADPKAFRSGRNFSAWIGLVPKQHSSGGKDRLGGISKQGDRYLRSLFTAGALAVIRYARIHGTKHRPWLAALLARRPTKVAAIALANKIARIAWAMMTKGERYKEPAALAA

SEQ ID NO: 415467 - protein, 347 aa, unidentified
MKILALDLGKYKTVGCEYERETGKHRFKTSLTTPAGLQQLVREVKPDRVVIEVCNIAGWVSDLVRGMGIETQVANTNEDAWRWRKVKKKNDQRDALKAAQLSAVNQVKEVYIPPLAVRQWRSLITFRQQLVRRRGRMKNHIRDLLVSEGELLPRGQSCWTNAGIARLEALARPLSEVGMNEMWRGQLYIELQQLQAVQAEIAAVEKKLDAIAATDVRVKLLRTIPGVGPRLAEAIVALLDRPQRFHKASEVSAYVGLVPKELDSGETVRRGPITKQGSRLLRSLLVEVAWAGLRHNPWVRETYQQISGGKKSRKKIAIVAVARRLLVRCWAMLRDGTSWRAPVPSSS

SEQ ID NO: 415468 - protein, 311 aa, unidentified
MAQHDQFVGIDVSKARLDVCLWPQNEACAFANDRDGLRALIRWLRRVRPHAVGFEASGGYERALLTALCEADLPARRVNPMRVRQFARAAGILAKNDRIDAAAIAHFCAALPQREVVHDPARAMLGELVTARRQLCEERTRCANQAEQTASALLRPIAAQRIKRLSAEIALVEAEIARLIADHPELAERNAIMRSVPGVGPTTAATLLAFMPELGAMSARQAASLVGVAPFDCESGAFRVKRRIAGGRKPPRDALYMAALVASRRNTTMAAAYHNLKNAGKPAKVALVAIMRKLITALNAMIRNKQQWAAA

SEQ ID NO: 415469 - protein, 410 aa, unidentified
MTAYRFYVGIDWATEAHQVVVLDAERRVMHERSVRHEGAALETFAEWLRDVAGGAPRDVAVALEIPRGAVVDALLARGFQVFALNPKQLDRFRDRYTVAGAKDDRRDAQVLAAALATDQPAFRRLEPEHPLIIELRELSRLEDDLQQECGRLTSRLREQLHRYYPQLLQLVPAADEPWLWALLQRAPTPSAAQHLPRAAVRTILTRHRIRRLDVAAVLAALRTPALPVAAGTVQAAEHHVAVLLPRLRLVHQQHAECARLIEAVLERLAESQEHRDVPILRSVVGVGRVVAATMLAEASRLLAARDYHGLRAHAGVAPVTRQSGRRTLVAMRSACNPRLRQAVHHWGQSAARHDPVSRAHYERLRARGHNHARAVRGVVDRLLRVLVAMLVTQTEYDPTRRGLRAAEVGA

SEQ ID NO: 415470 - protein, 341 aa, unidentified
MLIIGCDFHPTFQQIAYMDTESGETYDLRLTHRVEAEQFYRSLKGQAVRIGIEATGNFRWFRRGIEGWGFELWVGNPTEISASAPRKQHTDKRDAQHILRLMLEDRFPKVWMPPAADEEVRGLLVHRCRLVRLRTRIKNQLDALAKNEGLIRIRAGSGKGREQVEALPLTGWQEQRRKDLFALLDDLDQRIAPLDQAVATAAEARPEAKRLMTHPGVGPNVALAFVLTLGPWERFPRGKYVASYLGLIPTEASSGNSRRLGKLSKQGNAMVRWLLVQAASLAQSKDVAWHRQYLRLSHQKHHGVAKIAIAHKLAIRLYWMLRSGQDYEQVKERGSHAGQSE

SEQ ID NO: 415471 - protein, 359 aa, unidentified
METQSNKIDFSNQNIYVGFDVHLRSWKVTILTEKVAVKTFSQDPNPELLYQYLKRNFPGGIYHSAYEAGFCGYWIHNKLLSFGINSIVVNPADIPTTNKERVQKEDKRDSKKIARSLRSGDLRAIYVPGLKTLEDRSLLRARATMVKDLTRFKNRIKSFLYFHGIDFPESFSKPKSHWSNRFMTWLESIELTEESGKITLSSLIQQSKNLRASVLDLTKRMQKLSQTEAYQNDVKLLRSIPGIGILTAMTILTELETILRFGNLDQLCCFIGLVPSTNSSGEKEITGDITPRGHSILRNAIIESAWVAVRHDPVLLKSHLDYCKRMDANKSVIRIAKKLLSRIKFVLKNKQPYAFSGTD

SEQ ID NO: 415472 - protein, 354 aa, unidentified
MQQPERAAEVIIGVDTHKDTHTAVALNALGARLGTTTIPVSREGYRQIEAWACSFGSVRAFGIECTGSYGAGLSRALQASGHRVLDINRADRSARRRHGKDDPLDAEAAARAVLSGQATTLAKSGTSSVEMIRHLKLARDSAVKARAQAMQMLKGLIVSAPAELREQLEGIRGKVTLVRHLAALRPGPMTSTTASAKVGLRALARRWLSLSKEIEGHDRDLDALAADHTPELITAPGIATGTAAEMLILVGDNPERIRSEAAFAKMCGTCPLPASSGKTSRHRLNRGGNRQANAALHRVIVTRMRCHQPTIDYVRRRTAEGKTKAEIMRCLKRYVAREVFTHLCKPRQPASETA

SEQ ID NO: 415473 - protein, 367 aa, unidentified
MLWRGSKQERHPRIRSARRGDPLLIEEDMVFMIGVDPHKGSHTAVAIDDDERVIGELLVRADRHQRERLLCWAAEFEPRVWAVEGAAGHGALLSQQLVGVGETVLDVPAALSARARLLDSGHKDKTDPYDARSAAIVALRNRNLRTVVLEDHGQVLRLLARRHHQLTAARTRAICRLHAVLCEMVEGGLPKNLSAKRAISELRKLRPSDAVGIERKRIAVEFLDEVRRNDVALAELRHRIERAVSASCTTITDVHGVGPIVAAYLIGYTGNVRRFPSAGHYARYNATAPIEASSGPKVRHRLNPNGNRQLNHAIHIAAVTQVAHNTPGRAYYLHKQSEGKSPKEAMRCLKRRISDAVYQRLRADASR

SEQ ID NO: 415474 - protein, 412 aa, unidentified
METIVERPAALDVHEEQVTACVRVPAEQGRGREQHVAEFQTTVRGLLALRDWLEAHRVEQVTMEATGVFWKPVWAILEDAFALVLVNARHVKQVQGRKTDVKDAEWLCQLAEAGLLKASFVPPKPIRSLRNLTRYRKTQIQERQREANRLHKALEDTGIKLDCVASNILGVSGRLMLDALIRGTTDPEILADLAKGRLRVKLPALREALEGRFDELHALWIGAILAHIDFLDEQIDRLSDAIEEQIRPFEAAVELLCTIPGVQRRGAEIIIAEIRTDMSVFPTAKHLASWAGQCPGNDQSAGKRRSGRTRKGSKWLDWTLEESALAAVRSKDTYLAAQYQRLRPRRGHKKALGAVKHSILCTTWHMLSTGELYDDLGGDYFRKRDPERTAKRLITQLEALGHTVTLSEAVAA

SEQ ID NO: 415475 - protein, 310 aa, unidentified
MVIIGCDFHSGFQQIAIFDNQTGEFQERKLLHPEEAAKFYRSQQEPMRVGIEAGAPCQWFRRLLEECGHQLWVGDAAKIRAAEPRKQKTDRRDAELILKLLVEERFPRIWMPSEQERDVRQLLMDRHHRVRARTQVKNQLQSLALNQGLQKGKKLWSEAGREQLRELPMMEHAARRLMTHPGVGPQTALATVLTLGEVSRFESAKQVASYLGLIPGEYSSGNKQRLGHISKQGSSLMRFLLVEAGQTAARNDAQLRRAYARLAAKKCRAVAKVMVARRLAVRLYWMLRNEWTYAELARHAGEPGSSCGAQ

SEQ ID NO: 415476 - protein, 351 aa, unidentified
MKPNFEPGKWFMQCVGIDIAKGTFTACLCMYEFDMGCATEPIVFSNNKTGFNQFVKWSRKEALKGYPIRYVMEPTGVYYEQLAAHLSKLDLDICIVLPNKAREFAKYEGILTKTDNMDAYTLGMLGCLDKRLKSWTPPSPIYRELRQMTRFVADINKVRTELQNHLEALTHSEITEKSIVKHYNKLINEIDKQLASNQKAIRDKIKQQPGLSERIERIATIKGLGYMTVVTVLAETNGFALITNRKQLTRYAGLDVPAHQSGPVDPKRHISKQGNVHIRTALYFPAIVSTQYNPQMKDFYGRLCARNPQSKMIGVTATMRKLLLLIYSLWKSGEEYDSKRDKPIKKEKERG

SEQ ID NO: 415477 - protein, 333 aa, unidentified
MDSETGELQERRLQHREEAEKFYRDLAAQGVKVRVGMEASGHARWFERLLAELQLELWIGDAAEISSKRVRKQKTDRQDAHLILKLMLKDDFPQIWVPSGENRDLRQLLWHRHRMVQARTRMMNQLQAVALNEGLRCKKKLWREAGREQLESFRLAPWASQRRHDLLELLDRMNPTIAKLTQAIDLEVEKCPEARRLKTHPGVGPLTALAFVLIIGRADRFQCGKQVACYLGLVPLEKSSGNQRRLGHITKQGNSLLRFLLVEAAQVTVRSLPEWRSKYVHLTMRRGRKIAKVAMARRLAVRMYWMMRKGWDYGQLTKFGSHAGKPGSGDGVK

SEQ ID NO: 415478 - protein, 355 aa, unidentified
MNKIKTNFEGQAIYVGMDVHKDSWNLGIHLNDIFLKNVHQKPHPQIMVDYLHKNFPGAIYKAAYEAGKFGFWIQRQLTSLGVECLVVNPADIPKSQKDSLQKTDPRDARNIALRLQSGFLRGIHIPDEQQEADRIFFRHRKKIWKDLTRCKNRIKGLLAFTGIDIPEPYDNASWSHNFINWLKALDCKQSPRRLALDFQIRQMEFMRKELLSISNGIRKMMREQRYKTNYYLLRTIPGIGPLTAASILVEIGDIKRFDTFCHLNSFIGLLPMEHSSGQSENKMSLTVRKHRQLRSDLVESAWTAKRTDPAMALYFDQQIKRKDSKVVIIKIARKLLNRVRYVLLNQQPYEYGIVK

SEQ ID NO: 415479 - protein, 386 aa, unidentified
MHDGTNLPVPERTEIRGDCATLFVSLELSRSTWIATSLAPGSKKMSKHTLAGGNGRELLDLLARLKARAEQRIAAPVKVVAIHEVGLDGFWIHRLLEANGIESHVVDPASIAVPRRHRRAKTDAIDGETLLRTLMAWQRGEPRVCAMTVPPSPIEEDRRRTSRERATLLRERIRHTNRIRGLLFGQGITNYNPLHKKRREYLKELRTGDGRSLPAHLEAEILREIDRLELVLRQISEVETERDEMLRPAKASSPVALLMRLKGIGAEFATVLYLEGLFRHFENRRQLAAYAGLAPSPWKSGSIDHEQGISKTGNPRLRTTMVELAWMWVRYQPDSALSCWFRQRVGSERGRTRRISIVALARKLLIALSRYVTHGEIPAGAVMKPV

SEQ ID NO: 415480 - protein, 380 aa, unidentified
MKKFITHVGMDTDSRGFDIAIAEGFGSNNHEVRSLGRIPATLGAVDKLIKQLRKQGYGEVRFVYEAGPCGYGIYRHLQGREGIVCVVVAPSKIPRQPGERVKTNRRDALKLARLDRAGDLEAIYVPSEEDEAMRDLSRGRAAAVEAATRVKQQLKSLLLRHGIKYTGKGESWSSDYRKWLSLLQLPHEAQGYVLAEGLVGLEEAEARVKRMTERIRELLPGWRMQPVVAALQALRGVAMVSAVEMVAEVGDLTRFSNPREVMGYLGLVPMEDSTGDKRRQGSITKTGNGHARRSLVESAWAYARPPRVTRALKQRQQGLPREVIEISWRAQVRLCGRYRRLSARGKNKKKIIIALARELCAFMWAIALVTSGRQVPARAA

SEQ ID NO: 415481 - protein, 356 aa, unidentified
MKYYTTTTEFNCGIDLHARQMYVCVMDRQGKKLVHTNVKNNDFEFFLKLVAPYRHDLTVCAECMFGWYWLADACHAANITFVLAHALYVRAIHGGKNKNDRVDSEKLTHLLRSNLIPPAYVYPAAQRPLRALLRQRIFYVWRRSELLARIQSHQLAHNRKTARQTRSNRGPWEEQLLAAEDHPLRQLALKNDLAMIRHFDTQLIALEQELLKLTKQAASRDYTLLQSVPGIGQNLGLTILHEIGQIERFPTVKDFLSYCRLVKGTVASAGKIKGLRGAKLGNPYLRWAFGEAAVIAKRDHPILRPLSQQLEARMGGNKFKANTVVAIKLARAVYFMLKNKTVFDPERVVAVLSKAA

SEQ ID NO: 415482 - protein, 337 aa, unidentified
MEREYVGVDLHRRRSVIVRHDESGEVRDTVRIDNDPFELASAISACGPNPRVVLEATYGWYWAADVLAEGGAEVHLAHPLGVKGFAYRRVKNDERDAGDLADLLRMGRLPEAWIAPPPVRELRELVRYRHKLVGLRSALKAQVHAVLAKEGVGVPMSDLFGVAGTKLLEALELGDAYASRVRSLRDLIAHVDGEVRAFDDAIARALRGDPGYRAIQAIPGVGEVLGAVFVAEIGDVTRFRRPEQLTSWAGLTPRHRESDATVRRGGITKQGSRLVRWAAVEAVARNRGGTVLQTHYHQVAERRGRSIGRVAAARKLLTLVFYGLRDHHVRALEEAAA

SEQ ID NO: 415483 - protein, 339 aa, unidentified
MSIVMGLDQHRGQITGEWLDTETGEVRCARVTPADREHVRRWLSRFAGRELEVALEATTGWRFVVEELRRVGAVVRLAEPAETADLRGSKKRAKSDRADARHLRELLMIGRLPESWIPPEHVLDLRERVRLRHTLSEQRGEWQQRIQATLYHHGCPQRRQLMTGEGREWLAVQPLAAAAREQITVATLMVDALDRQLAPLDKELRGYARRQAGCKALMAHYGIGELAAVTILAELGDCTRFSSSRQAVRYAGLDITVYQSDRRRAPGHISRQGPPALRWALYEAAQVARRGERSPDRAYYLQAKERVGGNRACLSVARKLLKRSYHTLRELGEEALAPA

SEQ ID NO: 415484 - protein, 387 aa, unidentified
MTARTVSNLPAAMHVETARCLFAIELSKQSWVIGFITPLSAKISRRILSGGDWKGLLELIEEVGARVSRETGRAVDVISCYEAGYDGFWLHRLLEAHGIRNYVIDPASLQVDRRMRRVKTDRIDTERLLRSLMAYLRSEPKVWSVVRVPSIAEEDARRLHRERDRLVSERVQHVNRIKGLCALHGIYDYQPLRPQAMARLEQLRTAQGLSLPPRLTSEIKRELQRLELVVEMIATLEAERDAIVEDEASTHVNAKKIQNLHKLRAIGPEFAAVLVGEVFHRDFNNRRQLASYVGYAPSPFQSGNVAHDQGISKAGNRKGRTTGIELAWLWLRYQPDSDLSVWFRARVGALKGRVRRIAIVALARKLLVALWRYLETGLVPRGAVLKG

SEQ ID NO: 415485 - protein, 343 aa, unidentified
MTCFVGLDVSQKMTAICVVDNAGHRLWRGQCPTNPEQISVLVRRHAGSDARIGIETGAMTPWLVHELRTLGLEVVCLDARHARAALEMQINKTDQNDAEGLAQIVRTGWYRSVHVKSFDSHRARALLGARTQLIGMTTRLSNHIRGVLKTFGLLPGAMRGLPFDRKVEALLLDRSDVALIVRPMLVAWRQLREQIAVFDKAIRVLVRSNSACRLLMSVPGIGVFSALAYVSTVEDPVRFSRSRSVGAHLGLTPRQYQSGEVDRSGRISKCGDTLARTLLYEAAVVILTRLKKASSLKDWGHSIARRSGNGKARVAVARKLSVILHSVWRSGQPFLWSDHANAA

SEQ ID NO: 415486 - protein, 338 aa, unidentified
MRYVGLDVHWRQSSICVLDTRGRKLSAQAIKGGWSKVFEELGKIKKPFAICFEASSGYGYLFEKLTPIARRVVVAHPGQLRLIFRSKRKNDRVDAEKLAKLLFLDEVPPVHVPSVDVRSWRSIIEHRRKLVAEQTRTKNTIRALLRSQGIESPRGLWSRQGLTWLSSVTLATDLDELQRDILRERLESIASMIKRVERVLNRKATAHPGVQLLRTIPGVGPRTGEAVVAYIDNPSRFHSNKAIGCYFGLIPKQDASGRSNRLGHITREGPSTVRSLLVEAAWQGIRRCPRIREVYERIMRGDKQRKKIALVATAHYLLRAMLAMLQTGEVWRESEKAA

SEQ ID NO: 415487 - protein, 422 aa, unidentified
MLEQAQDEEQIITHVAGLDIGKASLVCCARVPDEARPGRRMQEVRTYATMTRSLIGLAERLAVLGVTRVVMEATSDYWKPVFYLLEAHGFEVWLVNARDVKHLPGRPKTDKLDAVWLCKVAERQMIRPSFVPPAPIRMLRDLTRYRVDLIAEAGAERQRAEKLLEDAQIKLSVVVSDLFGVSGRLMMAALIAGQRDPQTLAELARAGLRRKIPALYEALTGHFTDHHAFLLGKMIARVEQIEADIREVDARIEAQLAPFAQAAARLLEIPGIGSAAAATIVAEIGVDMTRFPTPAHLAGWAKFAPGVKESAGRRKGNGSTGHGNRYLARVLGQIAVSVARTDTFLGERYRRIARRRGAKRAIVAVGRSVLTIIWHLLSDLETRFRDLGSGFYLSRTDTERRKRNHIRQLEALGYTVTLDLAA

SEQ ID NO: 415488 - protein, 431 aa, unidentified
MTQRPIAGIDVAKNFSEMVVISPSCQIIARLRIKHQSSSDLKKAADILKKVEKDFAAAPVVVMESTGHYHKILFHYFTKIGLEVVILNPLQSDSIKNISIRKVKNDKIDAFRIAMLYKLNQSNIATLPLETIECLKRLCRQYYHFNDELIAYKNRFMSVVDQIMLNFREVFPDICSKTALAVLEKYPTPEDILNADRNELISVIQQNSHKSYLWACEKYELLYDKAQEFREISISDSANITMLKIYIDIIRTWEKNIQRIIEAIEEIIKENSQTGESILSTIELLQTIPGVGFISAVTILAEVGNFKKFSKPNKLVAYFGVDPSVVQSGQFVGTKNKMSKRGSEILRRVLFCVAFANIRTKRNNQPCNPVLYEYYQRKCEQKPKRVALGAVMRKIVCIIFAVMRNNKPFEFRTPEEHIQKYFSKAAVVNCK

SEQ ID NO: 415489 - protein, 400 aa, unidentified
MEDTERFRCFLGIDVSKETFDGCCINMKGERLFSLSTSMNRKGFEELIKELSALSIPRESVLVGMESTACYHVNLYSFLISLGYTVIVINPLLISNFVKLQLRKTKTDKKDASVIAQFLLLNRASLSQTVLSSDLSDLRDLSRQRESLVDQMSSTKSEIKRLLSMTFPELEHIAGIFSKSMLRLLCHYPSAASIKQAKRSQIAKILIPGSHGKQTDVSVDRIVKAAQGSVGTSSATKEIILRQRASLLIQLEQHLQELTDILIDLCQGKIQGDRDILTSMKGIGETSAVNFLIEIGGDIKQFESHKKVIAMAGLDPALYQSGKIDRKGKISKRGNRHLRRVIWQMTTRVIQFNERFKQYYLKRKEDGLPYKKAVLATAHKLVRVMFAMLTNQTLFDPRMN

SEQ ID NO: 415490 - protein, 376 aa, unidentified
MLSARPAGATTRPHRFERMAITTMAHPTPPRVTVGVDTHKDTHVAAARDQLGRRLGTTQVPASSAGYAQLLSWAHALGEVAAWGVEGTGSYGAGLARFLAAHGQRVVEVNRPDRQARRRRGKSDAVDADAAARAVQAGEATGVPKAQDGVVEMLRALRAARQTAVKARTQAINALKGLLVTAPAELREQLGGLPTGRLVGAAAELEVGTLTTPTAATKLALRGLAQRYQHLDAEIALLTEQLDALTARHAPKLRDLHGVGPDCAAALLIAAGDNPRRLHSEAAFAALCGTSPVEASSGKTRRHRLNRGGDRQANAALHRVVVVWLRWHQPTRDYATRRTTQGKTSKEILRCLKRYVAREVFAVLRQIDDPGLAAAA

SEQ ID NO: 415491 - protein, 370 aa, unidentified
MKKVATLFVGLDVHKDSISVAHVIGDRRADVTYVGRIGTRGADIDRLVSRLGDKAERLIVAYEAGPCGYVLHRHLTRRGVRCLVVAPSLIPRKPGDRVKTDRRDAVMLARLLRSGDLESVYVPAVEDEALRDLCRAREAAVLTLKAAKYRLQSFLLRLGLQYTGRATWNDAHLRYLARVVCPTPAQQIVFQEALSAVDEQVERLKRIEAQLAELVPAWRLAPVVRALQALRGVQQTVAVTVVAELGDITRFDNPRQLAAFLGLVPSEDSTGDSRRLGPITKAGNGHARRVLIEGAWAYQYPAKVSEHIRKRLEGLPKPVQAIAWKAQVRLCKRFRRLVAKGKHPNIVVTAIARELAAFMWAIAREVPITV

SEQ ID NO: 415492 - protein, 354 aa, unidentified
MRKMQKYIVKDNRIFVGLEDSKRQWKVCVRCEGMIVNQASMPTDYKNLRNYFMNRFPGCEVQVMYEAGFQGFWLYDLLEADGFDCIVTPPNKVTQEKNNKVKNDKIDARRLALNLENGDYKSCHIPDKERRNDRQISRTLDQIQKEIVRTKNRIRRFLDFHGLNDGMPSGRWGPGEYERARGLKLDVFLQIPFDTYFQLLDELTKIRYQLIKKLHIMCRKKRYRVSVNVKKNCPGVGRLSAIRFTLEWGEMSRFTARKRFSSFTGLTSSEYSTGDTVRRGRITGQSSERVRAWLIQCAWRAIKVDPVLLNKYQRVLKNSGNNKKKAIVAVAHKLTVRMRAMELSEETYRIGVIE

SEQ ID NO: 415493 - protein, 455 aa, unidentified
MQVTYTYCAGLDIHKKTVVACAIVPDPQGQPQTIIRTFSTMTADLLALGDWLHSLAVTAVAMESTGEFWKPVYNLLEGQFELLVVNAQHIKNVPGRKTDVKDAEWLADLLRHGLLHSSFIPPRSQRDLRDLTRQRTNLVQDRATVVNRLQKALEWANLKLSAVVSDVTGVSARAMLAAIVAGETAPAELAELARGRLRAKRDLLEQALTGRVREHHRFIIAEHLIQFDNLDEQIGRFDAQISAYLDQVSAPPPAAAGASDAAPASSPPAADPASPAPAAEPPSPAPAALTWNAALVLADAVPGIGLRLAQDILAETGIDMRRFPSAGHFASWTKICPGHNESAGKRFSGATGHGNRWLRTKLVQAAWAAVKVRDSYFAACFHRLAGRRGVKRAIIAVAHRILIALYHVLAKQEAFRDLGATYYDARSQAQLIKRTERRFAQLGLKVTVEPWPPAA

SEQ ID NO: 415494 - protein, 344 aa, unidentified
MNYYAALDVSLRSVHLCVIDDQGELIAETKLSSEVTDIISYLDSLDLDISMVGLEAGTLAQYLTYGLQSAGFEVVCMEARQVKAALSAMRNKTDKNDARGIAQLLRSGWYSPVHIKSMGSHRVRALLSSRRAVLDKCIDLENEVRGLFKIFGIKLPPKLGHGSFDAAVRGIIETDTTLSHSLLPLLDARLVLYHCFRELDNRTRHMAHADPVCQRLMSAPGVGFITALTYKAGVDDPYRFKHSRTVAAHFGLTPRRFQSGEINIEGHISRCGDRDVRCTLYTAANALLTRSSKWSPLKAWGMKLAKTRGHRRAVIAVARKLAVILHRMWLDDVPFHWSTEVARS

SEQ ID NO: 415495 - protein, 414 aa, unidentified
MSVTDTAAPARGNSAGVDWAKDDYAVCVVDTDGEPVERLTLTYTKTGLRRLLDLLDRHQVDAVGIERPDGPIVDALLPADTTVYVIPPSQVKALRRRYGSAGNKDDRFDAYVLADTVRTDRRRLTPLVLDSEATTGLRKLCRARKDLVAHRIAVANQLRAHLATALPATVELFNEIDSSISRQFLTRFTTQDDLDWLSPKRLAAWLKSVSYSGRTDPTVLHARINAAPHGATGDYGQTLAGITRAYLATLAAVMTQIDTLNQQITDALDQHPDRDIFTSLPRSGTIRAARLLAEIGDARGRFPTPAALACLAGVAPSTRESGKVRIVAFRWAVDKQLRDAVCDFAGDSRHANPWAANLYAQARARGHDHPHAVRVLARAWLGIIWKCWTTNTAYDPDHHRALQQLIRQDQLAAA

SEQ ID NO: 415496 - protein, 341 aa, unidentified
MSDLALVGIDLGKHTFHLHGQDKPGRELFRKKLSRQQMMRFFANLPACTVVMEACAGAHFVARELTALGHQAKLISPQFVKPFVKGNKNDFVDAQAICEAASRPTMRFVSPKTEGQQTLSVLHRLRESLIRDRTKAVNQMHGFLLEFGISLPQGLAVMKRLSAVLAEHELPVRLTVLLHRLHDHFVYLDEQIKQLDKELSGQLADDDLGRRLLSMPCIGPITASLLAVEMGYGQQHGCSRDFAASLGLVPREYSTAGKANLLGISKRGDKNLRSLLVQCARVYMRHLERQKGALADWVRSLLTRRHSNVVACALANKLARIAWAISAHHSQYEAGLDVLKA

SEQ ID NO: 415497 - protein, 387 aa, unidentified
MPDAKTLIKAADKLFIGMDLHKNTSTFVVKDREGKLINSAKVLTDKNDITRYINSLKRNGPGRDLSLVVEPVSQWYYYADLIENLGVDVHLAHPMEVKAIAHAHIKTDKIDAGVLADLLRTNFLPEAYFSPAEVRSWKEQCRFRASIMNLRTQTKNKIHAILFKHSLKHTFSNLFGKGGRSWLAGLELKEPFKGNLDKYLSLVDYLTEQIVLAEEIITHTVINCPQAKLLISIPGISYCSALTIMAEIGNIDRFISVKHLQSYAGLIPSTYNSGDKQIHGRITKRGSKWLRWIMIESAYHQMNCKRIPGFGSYYNTLKKRKGSKTAAVATARKLLAVVWRLLKDNRPYEVIDPRLSAIALATAGCWKSGPIASNISSVSNSAEAGND

SEQ ID NO: 415498 - protein, 312 aa, unidentified
MTPIICGVDVCSAALDAAIRDPAGDGAAARFANDAAGIAALLAFCQGQGVGLVVMEATGGYERLAFGTLWGGGMAVAVVNPRMVRRFAEAIGRFEKTDRIDARLIAWFAAVKHIRPTPPVPAAQARLAALVTRLRQLTEDRVAECNRRRLVTDPDVLRSFSETIALLSRQLRDLEAEIGRLIAADPLWARLDAAFREIKGVANRTVARLIAELPEIGTLHAKAAAKLTGLAPIARDSGKAQHRRPIRGGRASVRSILVIVAEVVRRHDPDFRAHHAKLTAAGKPKMVVRVALAHKLLTRLNAKARDARAALP

SEQ ID NO: 415499 - protein, 389 aa, unidentified
MNYIGIDVGKFNHCCAVMNSEGEVLVEPFFFANNSDGFDALLHIIKPFRSSRHMSGLESTGHYGDNLLRFLLANDFQVGIINPISTDAKRKQKIRKTKNDKKDSLTICAVLQSRDYTHMTKKKLSLREGKQLTRYHHDLTASLNQAKNKLQKCIDIVFPEYNSIFATKYSKAYMAVLKECGSAKVIRETHLKHLKKIVSDASHGKINSDYPTRLKESAKTSIGEDNAVMTLEIKQLIASIKLLMDQLDIVDKKIEELARTLNSPIFTIPGIGWITGMSILCELGPIDNFSSHTKVIAYTGLDCAVYQSGQYNADKTAITKRGSPHIRLSLYQAALPLCRFNATFNEYYNRKRSEGKSHRCAQGHVVRKLLRVIFKLLTENMSFDSALCK

SEQ ID NO: 415500 - protein, 319 aa, unidentified
MLPHPTPFATHLVGIDVSKDWLDIAFDDTKVERVDNTPAALQRLARRLVKAGLTTAGLEPTGGYERLAVAVLREAGLTVLQVDSWRCRQFAKACGQRAKSDPLDARIIRAFMLHHPCRPFPEPSQAQSDLTAWVREITRAEADIRRLENRKAHPTLAAITARLDAEIAALRETVAAAEQAIEALIAADPAMDAKAKIITSVPGIANKTARVLLAEAPELGQFSPRQAGAIGGCAPYRNDSGKARRPAHIEAGRRALKRACYLAAFAAIHWNPWAKQLYADLKARGKPAKVALIAIARKLLTILNAMIRDNKPWRDPKTA

SEQ ID NO: 415501 - protein, 430 aa, unidentified
MKSNTQNAKIEAITEKTLVLGIDVGSEMHYARAFDYRGIEYSKKPFKFSNTGVGFATFKEWILDLKERHEKDKVVPGMEPTGHYWFNLGKFLQDNEMKPVLVNPHHVKKSKELDDNNPTKNDRKDPKVIAGLVREGRYMIPYLPEGVYADLRTASNIRFQLQAELTRIQNRISRWFNIYFPEYKTVYGKPDAKSGMLILKAAPLPEDILTLGIDGVNQIWRDAKLRAVGKARAKTLIEAAEHSVGSKEGAVSARMEIRMLLEDYESRNTRLQEVMVLIEELVRKIPMAEKLLEIKGVGIRTVSGFLAEVGDISRFNNPKELQKLAGLALVENSSGKHKGETTISRRGRKRLRYLLFEVAMSLVSKNQEFRELHNYYTTRRLNPLKKMQSLMAIAAKLIRVFYAMLTKGVDYDPKKMVSDIKRPAVYLQAA

SEQ ID NO: 415502 - protein, 363 aa, unidentified
MSVQYVGMDVDKQKIVLARLGPGQDARAVEQVIANTPSAVKKYFASLLSAAEVHATYEAGCFGFGLYRQLSAMGVTVVLAAPGLIPRKPADRVKTDRRDAHNLALALRAGQLTAIYVPTQQDESVRDYLRMYEAFRGDLRICKQRILQFLLRRSLSYGGGGPWTVKHRHWLSTLEFQQPRDRQTLDMYLAQMQELEAKCAEAAAEVESIAAQDCYRQQTKKLTAFKGIKTLIALSFITDIGDFRRFTNARQFMAYLGLVPSERSSGNKRRQGSITKAGNSHLRRLLVEAAWHYRSYHPTSRDLTERRRGVEPAVVSYANRAGRRLNRKYMHMLLRGKRSQVAVTAVSRELAGFLWGAMTNQVA

SEQ ID NO: 415503 - protein, 343 aa, unidentified
MKIIRVGVDLAKEVFHVHGVDEREKPVWQRRLSRGRWFEAVLAKVEPGCEIGMEACTGAHHWAREFQSRGYAVKLIAPQFVKPYVKSNKNDSQDAEAVCEAMSRPTMRFVEIKSVEQQDIQALHRIRSELVSQRTAKGNQIRGLVAEYGLVAPKQMLRLRRAIPDWLEDAENGLSERFRCLLHGLWGDLQELDRRVAEMDAEIEVIAKSDPVAQRLQQLRGVGPVTATALVAAVGSGEQFAKGRDLAVSLGLTPKQHSTGGKERLLGISKRGDPYLRSLLVHGARTVICWAKHKDDPLSQWVMSVARRRHPNVAAVALANKTARIAWAMIKEGTDYQPALATH

SEQ ID NO: 415504 - protein, 356 aa, unidentified
MNYIAFDSHKKYTLASVEDRNGNLLEEKRIEHTPGALREFLSRYEKGSPVAVETIGNWYWIVDEIEEAGMEPKLVNAGKAKKMIGSVNKTDSLDARGLNKLQRADVLPTVWIPPAELRDMRDLPRTRMIFTQERTKLKNRIHANLTKYRLELTGVSDAFGVKSMDKLNERISRLPVYTRYATERLLEQLWIVQTQIDQFEKLTKEVFKDSADLKRIMSIPGVGHILGTVILLEVGDVSRFAGAPQLASYSGCTPRIHASGDKVRFGKLRTDVNHYLKWAFTEAANVICTHKSHWAHRHSVRLYNRISDRKNHQKAIGAVARHLAEATYWILRKEEDYKEPKSISEVIKGEISAALA

SEQ ID NO: 415505 - protein, 339 aa, unidentified
MKVSTLGIDLAKNVFQLHGVGCNGQTVLKKKLTRDKFLPFLMQLEPCLIGMEACASSHHFARVLRQYGHEVKLIPPQYVKPYVKTNKTDAADAEAICEAVARPNMRFVQIKTAEQQAILVLHTERNILIRERTACANSMRAILAEFGIIMPRTLSQLYKKIPEILEEYDNELSPFVRCSVARQLEHLQGVEDQITLIEQELSRWAKTQLACQRVMKVPGVRLMTATYLVASVGNGQQFHSAKQFAAWLGLVPREFSSGGKQRLGRISKRGDRYFRYLLVHGARAVAAVIERHKDNMPWLYRLLNKKAYNVAVVAQANKTARILWSMLVHHTEYRTLSAV

SEQ ID NO: 415506 - protein, 388 aa, unidentified
MHVYVGVDIAKELHYAAIMDSDGVVSKPFSFENNDKGFNLLLSRLAPYNKESILIGYESTAHYQENLAYFLKSLGYRTAEINPLQTAALRKANIRNTKTDSVDARLICLALMNHHIQGDQRDSERLDDLYQLCKMRMDTMKKRTTCKIQFVAIMDRIFPELASFFDNNLHANTIYRLIESFPLPSQIKKTRIDILTKLLHKASRGHFKKEKAQKLKNLAEYLRRNPSDIFAFQAQQLVHQIEFYTDQIQTIEERINTNPDVMSSPLMTIPGISTFCVCLYSICYKNINDFDGPCKILAYAGLDPVIRQSGKFNASHTRMSKRGNSLLRYALVWSAGNVVKNNNTFAEYYRHKTEDQGKSHYQALGHCAKKLVKSIYHMLKYNESFNLD

SEQ ID NO: 415507 - protein, 430 aa, unidentified
MNESVSEQPLSPKVAAFVGIDWADLKHDVVLRSVGDPTKSEHQIIKSEINALADWIAQMYERFEAKGKVLVCLEQSRGALIYQLMAYELFELYPINPSQLANYRRTFFSSGAKDDRPDADLLSELVMCHRDRLKAWKPDDQLTRELASLNEGRRNAVDRRTDLANEIKSQLKLYFPVALQLLENDITTALAADLLVQWPTLAELQKVSPAKLRKFFYGHHSRQEKKILERLALIKEAKPLTTDLAILRPNALRVKLLAQQLKSLLPFIAEYERRIAEIFGSHPDRFLFDNLPGAGPALAPRLLTAFGTDRDRFEVAGDLLSLSGIGPVRIASGKKTGKHASVHCRRACPKFLRQSFHEFGECSIRYSPWAQACYQAQRGRGKGHHAAVRAVTFKWIRILFACWKQRTPYDPQRYFQALQTRGSDYAQTTA

SEQ ID NO: 415508 - protein, 472 aa, unidentified
MPDSIFKTTGTNLRDVLASHDLGEILYTSIDVAKYNHSAMVVNFFGDVIIPKFDFPYNNHGIDFLKKKIQTAQKQTRARKLFLGLESTGHYHENLVASLTASGYDVQVIRPIDSKNERDNVHAKSDAIDLAAIAKVIISNKGARSHMPNPIYYNLQRASRTHRQLTHQETRTKNIITFILDKTFTGLWNPKDSIFSDKWGKASLLFIENYSTPQQATKLGVKRLAAFFRKHNTKLGMDTAKKIIQLAKITPARSLEEMESDIKALKAHIQVLRTLTSAILEQKKQMVKFLIQTPGTYLLSVPGIGIVYASDFTAEVGNIHRFAYAGQVISLAGTAPRKHQSGEVDKTNLPTSHKGKNNLRVTVNQMALSLNSHCPEYHSYYSKKHFQYKDAPGKARTATANKFIKLAFALMRNETLYYPRTGNPLITEKEFYQGVWDKMKPKLTPYLCDDIPQDNYLTKIQNELEEKYGINT

SEQ ID NO: 415509 - protein, 373 aa, unidentified
MSDYSTYVAMDTHKKQHRVALLYSKTGEIQEFTVKNTVKDITKMVKTVKKHSPGKVHFCYEAGVCGFTLKRRIEHLGGRCSVIAPSLVPTKRGDRIKTDRRDAKKLMGQFIAGQLTEVYPPDEEQEAARELTRCRQAAAENLKRIRHQLVKFLTRHGHIYCQGRHWTKKHFEWLRSLEFDLTDLQEVFELYYTELQHCMQRLASLDKQVQQLAERPQYRQVVGLLCCFRGIDILTAITVITEIFEFGRFESPRALMCYLGLVPSEYSSGDHRRSGAITKAGNKRIRRLLVESAWHYRHRPWVSRELKRRRKDQPQWAIDIADRAMARLHRRYWQLLARGKISNKVVIAVARELAGFIWAVLHEYKLRRTRHVA

SEQ ID NO: 415510 - protein, 342 aa, unidentified
MSFYCGIDLGARESQICVIDKRVKKVLEEKVPNKLEQIKQLLTPYRAELEIVVESTFNWYWLVDGLQAAGFKVVLAHTLGLHMITAAKVKTDRRDAFALAKLLLAGMIPTAYIYPAETRPVRDLLRRRGWLVQVRAGEYGSLRRLLLRQGILSRQQQEIKQAEEADLEKWFTHELVRLHASQELERISLYSQQIETLEKTILEQAKKEWAFEQLQQLPGIGPIIALTIYYEMGELERFATAKDFSSYCRVVPGVAQSGQMTRRGRGSKQGNPYLKWALSQAAVHAVRCYPGVRRYYERQLQRHRGRARQMVVYNIIAHKLAQAIYHMLKERSEYREELLFGR

SEQ ID NO: 415511 - protein, 343 aa, unidentified
MGEVSTIGIDIAKSVFQVHGVDDAGAVVMRKRVGRSKVLQFFAGLSPCLVGIEACPSAHYWSRELQALGHTVKLMPPSYVKAYLKRSKNDANDAAAICEAVTRPSMRFVPIKTQEQQTGLMLHRTRQLLVRQRTMLSNAIRGHMAELGIISAKGRNGTAELLQIVGDVADDRIPPVARFCLDLLARQYLTLNAEVYAVDKRIHAWHRACEESRRLEEIPGVGPIVATALVAEIGDWGAFRSGRNLAAWIGLVPKQHSTGGKERLGSITKQGNRYLRWLLVTGAMAVIRYARAHGTKRPWLTRIMDRRPAKVAAVALANKIARMAWAIMVRAERYKEPKLLLAA

SEQ ID NO: 415512 - protein, 316 aa, unidentified
MNTLNQNEINIGIDTSQTNLDIYVRPLGLYKSFGNNTEGIKEAIKFIKQHVPIRVLIESTGRLEMDFVCAGHKACLPISVCNPAHVRSFAKATGRVAKTDKLDAEDIAHFGEAVKPEPTTLKPEKLRHVSDLLTVRSQCLEMSTMQKNRLKRMPKTVHKPINNILKALKKELAVIDVQLEKLIKEIPEWQERVDQLTSAKGVGKVLAYTLMSELPELGRLNRKEVAALVGVAPMNRDSGSYEGKRYIRGGRSKVRTVLFVSMLSAIQCHPKLKPMYQRMVAAGKPKKVAIIACIRKLVVIINSMVRDGVMWDSKMI

SEQ ID NO: 415513 - protein, 353 aa, unidentified
MITIGVDAHKRIHVALALDEAGREIGEWRGPNSQAGWRDLSLWAFGLGGERQWGIEGAWGYGRCLAQHLVERGEAVYEINPRWTAAGRQRARKPGKTDRLDARAVALFVRQEAPLLPVVQLEDDSAILELLSTERGQVLAEIVRLRNQIHALLAHIDPEYQSRLPALKSRSGLAVLEAYDAPGHHPVQLERVAGVRRLARRLALAVAQLDELTERIRAGAQTRFSPLTRICGVNLLTAGMLAGALGPGRRFANDAQLAAYAGVAPLEASSAGLVRHRLNRGGNRRLNAIVHRIALTQAHHSPEARAYLERRASEGKSRREAIRALKRFIVRAIWRLWLECEPASAALSMATAA

SEQ ID NO: 415514 - protein, 359 aa, unidentified
MEQKRFVGIDLGKRTYEMKVIGSNGKVTGTNGQTNPSGRKSLYRKLLATDRVAIEVCSLAMIMAKELQKEVGCEVVLLNPSQLALIYRSLKKNDKEDALKLARLVQKYTNEELPKVELPTEHEENLRQILTEIRQLKHDRTKEINRLHAIFVECGITEIKRKDLATIDNRNNCIKMLKGIALSQAERILKKMELIESQIQDVEVLLDKEIDGDKNIGKLTEIPGVGKQLASAYVAFMGDGSRFSNASKIGAAIGLVPRLDMSSTVCKLGHITKCGNKNLRTLLILAAWSHIRSKEGGALKDKFLYMTRFQSKGKKIAIVAVARKLAELMYILLKNDTSYEKRPSPTISQLVDEALEKAS

SEQ ID NO: 415515 - protein, 341 aa, unidentified
MPIVTIGIDLAKNVFAIHGVDDAGKPALVKPRVPRDQLLTLIAQLPPCLIGMEACSGAHHWARVFQQYGHTVKLMAPKLVTPYRMSGKRGKNDAADAAAICEAVTRPSMRFVPLKDEHQQATLCLHRTRQGFVEERTAAYNRMRGLLSEFGVVLPQSPERLRREIGTHLDALPGWVRRCVSDLLEHVGNIEDRLAEYDRAIGEIARTDERSKRLMKLRGIGPTTASALLASIGAGHDFRNGRQVAAWIGLTPSQYSSGGKERLGTITKTGDAYLRNLLVLGARSVMASLGDKQDRFSRWVRNLVERRGYWRTAVAIAAKNARLAWATLKYGEAFKHEPATA

SEQ ID NO: 415516 - protein, 395 aa, unidentified
MLYLAIDQHRKQLTVNLRNEAGDVILKRQVSTEWKRVREFMEEMQKRSVPEGGFVAIVEVCGFNDWFLKMLTEYGCRETVLVQPEKRSKNKTDRRDANALGELLWTNRERLLAGKRVQNVRQVVPPSERDAEDRQLTALRQRVGRLRTRTINKVQHLLLKHNLQQECPTKGIQTKKARKWLETLPLGTIDRLEMDQLLAQWELLDKQLEDLDPMIGERYAENKTAQIIGSIPGAGAYGSLAIAARIGSIDRFPHARSLAHYWGLTPSSNNSGDATRRLGSITKEGSAIVRFLLAQIVVHVLRRDAVMKEWYRRIKKRRGAKIARVAVMRRLATIIWCMVKRQQYYQRGGAPATGNGSECMNVPDRNAFLEEIQGRSRNSKEKGRQGLETVAAARP

SEQ ID NO: 415517 - protein, 410 aa, unidentified
METIVRCCAGLDVHKDSVEACVRRMEQDGKLYQQIRHWGTTTRELMAMADWFKAEGVTQVAMESTGVYWKPIFNILEGNFEVLLVNAQKLKHVPGHKTDVLDCQWIAQLLQHGLLKGSFIPPRWQRELRDLTRQRAQIIGEHSRISNRIQKVLEDANIKLGSVASDVVGVSGRQMLQAIIRGENNPVQLADLARCRLREKIPQLQEALYGKITEHHRWMLGLLWDQLAATEEFLVRLDERITQLTRPQQPALEKLDAIPGIDRRVAEVVLAEIGPDMSPFPSDAHLASWAGVCPGNHESAGKRRSGKTTKGSRWLRQALVQAAWAASHKKDSYFQAHAQNLMRRRGRKRGLVAVAHSLLLVIYHLFHDATEYHDLGRDFLHRVRGEHLIRYHLKQLQQLGLTVTVTPVAA

SEQ ID NO: 415518 - protein, 370 aa, unidentified
MKQIRSFVGMDVHKATISISVAEDGRSGPVRFIGVIPNSPDAVAKMAKQLARHGELDFCYEASGCGYGIHRQLTGLGHKCTVAAPSMIPRKPGERIKTDRRDSEKLAILHRSGDLTPVWVPDTTHEALRDLVRARVDASMHLMRARQQLLAFLLRHGRSYTTGNHWTQRHRCWLAGQIFQEQAHGIVFQDYLETVWTAQDRRDALVKRISAMVATWSLGPLVEALRGSRGIDLVSAATFIASTGDLSRFESPRLLMGYLGLVPSEHSSGGTIRRGGITKTGSREARRMLIEAAWSYQYPARIAKEKAEILVRLPKNIRDIAWKAQTRLCTRYRSLIARGKKPTVVVAAIARELAGFIWAIGQEMRAPMTA

SEQ ID NO: 415519 - protein, 456 aa, unidentified
MSQKRKTKTILPVINARAAGVDIGAREIYAAVSPELDATPVRCFNTFTDELKTLVAWFTSLGITTVAMEATSVYWIPLAELLEEAKITVCLVNPQHVKNVPGRKTDVQDCQWLQYLHAVGLLRAAFRPAAGVRAIRSLWRHRDSLVRQSAWHTQHVHKALDQMNIQIHHVIADITGKSGEAIVKAIIEGERDPKALAALGDERLKASKQTLAAALTGDWRDEHLFCLKQAREGHEFTLKQIAEVDAQLENHLRALAPQEPKDAPAQDTPAKPRQKRKARTRCGCPVAYDATQLLKAHLGVDLTLIPGINVNTAQTLYAELGADLSAFPSGKHFASWLGLNPNNKITGGKIMSAHTKPFANRVKQALRMAAQGLHHADNELGEYYRRMRAKLGGASGVTAVAHRLARIIYAVMTTKREYDGRLHRASAARRAARTLEELKRRAKKLGFELTAVQQPA

SEQ ID NO: 415520 - protein, 356 aa, unidentified
MIKTKDTPISFSGQHFYVGIDVHKKRWSVTIRNNDMRIKTYSMDPSPDLLVSQLKHHYPDGVYHLVYEIGFTGFWICRRFKELGINCIVVNPADIPTAHKEKDRKTDPLDSSKLARELENGNLTPLYVPSESGQNFRSLCRLYRMTVQSNTRVKNRIKAHLAFNGIQVDSESSYWSGDFISYLRNLILDEGPSKSCLNIYLDELEQHRQRLAYVLKDLRLWIRQKGITPVIDNLMSVPGIGFKTAMILYTEIMDIHRFKHLDHLKSYAGLVPSTHSSGERDGTRGLTNRRNCHLRYVLIEAAWVAIRKDPVLLQSFHQLTRRMERQEAIVRIATKLLRRIRYVWMNDCHYVPGVIQ

SEQ ID NO: 415521 - protein, 420 aa, unidentified
MCLPFIFSRATRLFEVKQSRTNGRDLEGSGALQLNNNEQTNTPMKKELYLGLDVHKDCIITAVAEEGRKGEVRDTGVISNDLHALEKWVGRLRKAHGRDVILRACYEAGPCGFGIARRLKQLGVECEVVAPSLTPKRAGERVKTDRRDARKLARLLRAGELTPVYIPEATDEAIRDLCRARTDAVDDRRRSRHRLKGFLLRHGYRYQGKSSWSAAHERYLRELVLPHPAMKVILEEYLQGIAAAGERIARCEVGMRALLEQWRLAPAVRALMALKGFQTVAAMIVVSELGEVDRFAHPRQVMAYLGLVPTENTSSDKRRQGRITKCGNAHARWLLVECAQHYATPPKVSQHLSRRQQGQPAQVRAISWRAQNRLHSRYTRLLGRRLQRNKAMVAIARELCGFIWELLHTQSCYHVQATSV

SEQ ID NO: 415522 - protein, 370 aa, unidentified
MNEITGVRIARVGVDLAKQVIQVHAVDASGRRVVARAFKREQFFAWCTQLPAGCVVAMEACSSAHHWARKLRAQGLEPRLIAAHFVTPYRMEGKGGKNDATDAAAICEAASRPSMRFVPIKTCEQQGVMSLHRVREGLKEERTACINQIRGVLTEFGLVFGKSPKVLRAVLADIIEDASNELSTTARLVVQRAFEHWRELDEHLRWCDRQVGQHVRASPAAKRAAKVIGIGELGASALTAGVGDFTQFKSGHQFGAWLGVVPRQASSGGTIRLGRITKRGDDYLRTLLIQGAKAAVMSADKRDDPISRWLVQLTARVGWQKACVAMANKNARILWAVMTREDGFDSKHVSVKPQAKQPDQQRSIPAACVA

SEQ ID NO: 415523 - protein, 375 aa, unidentified
MDELSKIHVGLDVHKDSISVGVADPGRGAGRVVGKIAHDVGKLTKLLSRIGAPEELHLVYEAGPTGYGLQRSLAARGYLCEVIAPAQMPRRAGDRIKTDGRDCVQLAECSRAAQLRAVWIPEPGDEAIRDLSRAREDAVNSRTQARHQLKGFLLRHGLRFLGKTSWTKAYYAWLGSLSFEAQPAQTAFTEYWLAVQAADARVQRLTQAVRDSVSGWRFDPVVKALQALRGVDIVTAVGLVAEIGDLRRFDHPRKLMGYLGLVPSESSSGDRVHRGSITKTGNAHARRLLTEAAWHYRFKARIGSHAQRRQQDLSQPVREIAWNGQLRLNKRFAMLQARGVQVNKACVAVARELAGFVWAIGRQSMIESGDWPRAD

SEQ ID NO: 415524 - protein, 474 aa, unidentified
MARISKKVKRQQRRSRKPGVEQQLREIRRDVAGIDIGATEIYIACLPKEDRSPNVRTFRTDTQSLVEAADWMAGEGARSVAMESTGVYWMPLYQVLIHREFEVNLVDTRKVRSVPGRKTDVLDCQWLRLLHANGLLEGCFLPDDQTAALRSLQRMRQVLRHDQDDWIRRIQKHLDLMNVRVHRAVSDITGVTGMAIIRAILAGERNPRALAALRHECCHKSEAEIARELTGDWREEHLQNLKLAMATYDHFSAQIAESDRNIAARLECIRAIREAQGLPVASVALPHPLPEKAKRMNRRGEEPMRQALVRTYNIDLTRIEGVAVEAAACTFMEMGPDTPTRFPTEKQFLAYMRLAPRLAISGGHPLPGKGKAPRRGCPPLKRILLTSASALRDSKTALGDYYRKTAFRKGAGIAAFATARKIAQRIYRALAHGIEYAVSGDEHWQRAELERRRARLARQAAVLGLELTPATAKS

SEQ ID NO: 415525 - protein, 358 aa, unidentified
MKEYISLDVHKRYTFAEREDIMTKGVRQRRIEHERGAIAAYLADAESGTPVAVEATGNWYWIVDEIEQAHCVAKLVHPRKAKVMMGCINKTDKLDVHGMNRLQRCETLPTVWIAPPEIRDLRDLPRTRMFFCQERARLKNRIQASLTKFALNVTGYSDGFGVGAREEMRKHILQLPPHTQAMTNELLRQLDLVEEQIDAQEKRIRAVVAQTPAMQLLRTLPGIGDILSVVIAMEIGDISRFASAERLASYAGTTPRISASGDKMRFGRLRSDVNHYLKWAFVEAANCIRLHAKRHPDRHVTRLYKRIAVRRGHPKAVGAVARHLAESVFYVLSRKEAYKEPKQKEMARNQGSASATAA

SEQ ID NO: 415526 - protein, 412 aa, unidentified
MDVVVERPAALDVHKAQVTACVRVPNQDGNGREPHLAEFSTTVRGLLALRDWLAAHRVSQVVMEATGVYWKPVWHILEDDFELMLVNARHVKQVPGRKTDLSDAAWLCQLAEAGLLKANFVPPKAIRDLRQLTRYRKTQVAERQREANRLHKALEETNIKLDCVASDILGVSGRAMLDALVRGTTDPEILAELAKGRLRQKLPQLREALEGRFDELHALLIGAILAHLDFLDEQIDRLSDAIEERIAPFAPAAELLCTIPGIQRRTAQTILAEIGADMSVFPSSRHLASWAGQCPGNDRSAGKQRSGRTRKGSKWLNVALTDSAMAAIRTKNTYLRALYERQRSRIGHGRALGAVKHSIISAIWHILTNGELYREAGANYFAQRDPHRATKRLVAQLERLGHTVTIQEAAAA

SEQ ID NO: 415527 - protein, 382 aa, unidentified
MSPKLNAAIAVIGIDIGKNSFHVVGLDRRGAIVLHQKWSRGQLATRLGNLPPCLIGMEACVGAHHLSRKLTSLGHDARLMPAKYVRPYSRGQKNDFRDAEAIAEAVQRPTMKFVATKSAEQLDLQALHRVRERLVSQRTGIINQIRAFLLERGVAVRQGLRFLRAELPRILATPCDGLSPRMVRVLEDLACDWRRLDERIEGLSSEIEVLARRDAGCERLMSVPGIGPIISSAMVAAIGTGDAFTKGRDFAAWLGLVPKQISTGDRTILGKISKRGNRYLRALFVQAAWVVLIKPKSWDRHGLKPWLEARPRSGCITTSSPSRSPTSLLALLGASWLMVEHSRQARFRSRDQRVVETSYLPRSARGLETRWRIGLPGACEHW

SEQ ID NO: 415528 - protein, 482 aa, unidentified
MKKRNIFQNRSQLLLGLFEKAGNRLKMMCVPIDYAKKDHMVMFCNGYGDIVRKPFSVKNTLEGVKYLIGQVMRSCRHRHIKKEYVFFGGEDVNSYAENFANALRNKGFLVANVNAHDAKKQRETLQASTDRIDLMGIATMLLNLRAKCSPAQDGIYRNLRTLVRHRKKLVVMKTEVKNRMHTLVDRLFPGFLNEKNSGLNPFSKSSLYLMEDRFSAQQIRRRKQATLIKILKRCATPDAGSIAAKLHSYAAQVITTPDEYAATLQLSLQHHIKHYRCLQENIDQLLSEIALVLAQTQAAFLTSIKGVGIVLAAGVSSEIGNPFEQKPLNNLTSYSGIIPRVKQTGGVEGHTHIGRVSKRSNHILKDYVVQSAFQMGMRGPQLLLQDYKRREAAGQHADFGIGRRFLRMGMCLMRSSQVYLPPTLRSPKTQMQERAAYYLTTWPLLRDKWKKAHAHQAAFAKDQPLGQWRQVVQELYDIKLKL

SEQ ID NO: 415529 - protein, 346 aa, unidentified
MSYSTTIGVDLAKNVIQVSVVSSRGEERLNRSLTRRKFAEFLAKQQPALVAFEACATSHYWARAAQRHGHTARIIPAKAVAPFRQGHKTDSNDALAVAEAARRPNIKEAPMKTLDQQGLQAIQRSRELLVQESTALSNHLRGLLMEFGEVIPRGFAALQRKLPEILEDGDNEVPDMYRPALHRLYHRFLELRSDIRAMDAEIRALVRQHPGCSRLTALEGVGPISAVLLYASLGTGEAFSGSREFAAYLGLTPRQLSSGGKTNIVGLSKKIGNRQLRSVLIQGARSYVNKLKEPKTPKDRWLMELIERAGPGKATVALANKNVRTAWALLTQGTEYQRQPQLKVVA

SEQ ID NO: 415530 - protein, 340 aa, unidentified
MQLYTGFDLHSSNSYVGIIDEHGKRSFHKKLPNDPVVIVDTLRPFRNDIADVAVESTYNWYWLVDLLMAEGYRVHLANPSAIQKYTGLKYSDDRHDAFWLAEMLRLGILPEGYIYPKEDRPVRDLLRKRSHLVRLRTSLIISLQNIVSRNNGIKLKVGDVKALKTDRVTPLLADNEDLALAGKVSKESIDFLTHQIKAIEHVIEGKVKLREPYDSLLDVPGIGKILAITIMLETGPISRFDKVGNFVSYCRKVSSKWISNDKAKGKGNKKSGNKYLAWAFSEAAESARRLHDEPRAYYNRKMQRTNFMTAHNALAHKLARAAYYIMRDHVPFMPEKLFAS

SEQ ID NO: 415531 - protein, 340 aa, unidentified
MSEITTIGLDLAKHVFQVHGIDAQGTTVLRKRLRRGQVLAFFSRIPRCVVGLEACATAHYWARELGALGHEVRLMPAQYVKAYIKRNKHDAADAEAICEAVERPTMRFVPVKTAEQQATALLHRGREQLVRQRTMLVNALRAHLAEFGIVAAQGLRKVGELIAIVRDDGDTRLPDAARQVLQVLANQIEQIETAVAALERQLLAWHKSNPVSQRLASIPGIGPIIATAIATTVADPKVFRSGREFAAWLGLVPRQNSTGGKTRLGGITKRGNRYLRRLLINGASANLLRSKATKADPWVIGLRRRRPPLVVAVALANKTARIAWAVMLREKEYQPRAVAA

SEQ ID NO: 415532 - protein, 414 aa, unidentified
MERVIERCCGLDVHKKTVTACVRVPNPAGGRHQEVRTFGTTTEDLLTLRDWLEAHGVRQVAMESTGVYWKPVFYMLEDRFQCVLANPVQIAHVPGRKTDVQDCMWIAQLLEHGLIRSSFVPPPPIRELRDLTRYRKALIEDRAREINRLHKVLEDAGIKLAAVATDILGRSGRDMLQALVAGTTDPDVLAELARGALRKKLPALRQALVGRFRRHHARMLAHLLAHVEYLDDAVARLSADIEEAVRPFEAAMSRLDTIPGISRRTAEVLIAETGGDMGIFPTAAHLASWAGLCPGHHESAGKRRSAKTRQGNPWLRTALLEAAWAATRTIDTALAARYRRLMRRRGHKKAVIAVAHAMLVIAYHVLAHDTTYRELGGDYYDRRHADHARRRAVRTLENQGYRVVLEPAVLQPAA

SEQ ID NO: 415533 - protein, 391 aa, unidentified
MPTVADRPDAPTAIQSNLAAIFVSLELSRSIWLITSLSPGSGEKMSKHSLRAGDVAALLARFSELQKKALARTGKSFPIIAVQEAGLDGFWLHRVLEREGIESHVVDPASIATSRRRRWAKTDRIDGEALLRALLANKRGEPRVCAMVRVPTPEEEDRRRLCRERKVLIAERVEHVNRIKGLLFSQGVVGYELLRRDRRQRLNELTTGDGRPLPAHLKTHISRELDRLELLLDQLKTAEAERDALLAEQQAATPAQAPVGRMLLEFKGIGAESAATLWLEALFRHFDNRRQLASYAGLAPTPWQSGSVDREQGVSKAGNPRLRAILIELAWLWLRHQPQSALALWFKERVKRNGGRMKKTIIVALARKLLVALWKYVTAGIVIEGAVMKPA

SEQ ID NO: 415534 - protein, 345 aa, unidentified
MENMYYIGLDVHKKTISYCVKDGSGRIYAEAEIPATRLDLDMWMKTLPQPWTAAMEATIFTAWIYDHLKPHAAAVKVAHPLMLRAIATAKKKNDRIDAHKIADCLRCDFLPECYMASTEIRERRRTLRYRNLLVRQAVQMKNKIAVLLMEAGVSYNKQKLHKVGYFRELLATNQDIDAGLKPLLRLCRETVVRLGKTESALVRSLQRDSLLMERVERLMTIPAVGPITALTWALEVGDVQRFSSIKKAISYCGLCGAENSSANIIKRTPLSKQRNKHLQTILIEAAKMAPRNSPDLAMLYDREKQKGNANRATLAVARKLVAYLVAVDRRQKDFLVVENENRTAA

SEQ ID NO: 415535 - protein, 337 aa, unidentified
MRIIRIGLDTAKHVFQVHGVDETETAVLRAQLRRGAVARFFAKLPPTRIGLEACGASHHWARLLRGLGHEVVLLPPQYIKPYVKRGKNDAIDAAAICEAMSRPGMRCVPIKSADSQAALMLLRVRDLLIKQRTMLINAMRGHAAEFGVSAAKGPVRVAELLQQARSEVAGVPALAQELLALLADQLETIAAKLKALEGQLLAWHQQDPVSQCLATQPGIGPIAAVSFALKVPDPKLFRSGRNFAAWLGLTPKENSTGGRRRPGRISRQGDEGLRKLLVLGATAVIQFAKPGRGSPWLVKLLARRPRKLAAVALANKMARILWAMMASGEVYRRPQPA

SEQ ID NO: 415536 - protein, 364 aa, unidentified
MEEPAMSNNSTFINGLDLGDQHSHLVMLDQDGELIEETRLPTTQAAFQRKFSSLPPSRIAMEVGAHSRWASHLLKELGHEVLVANARKLRAIYTNPRKGDRADAETLARLARLDPKLLSPIHHRSPQVQAHLAILRSRDALVRCRTLLINHARGITKSFGARLPSCSADSFPTKVEASVPELLRPALLPLLDTLASLTQQIRGYDRQIQSLCQTQYPESQLLRQVAGVGYLTALAYLLTLEDPSRFRKSREVGPALGLIPKQDQSGDRDPQLRITKTGNAYLRRLLVGSAQYMLGPFGPDCDLRRWGLQLAERGGKNAKKRAVIAVARRLAVLLHRLWKTGESYDPFYCSRRSANEPAALSAAA

SEQ ID NO: 415537 - protein, 431 aa, unidentified
MDTQQFEVIRPKCAGLDVHKKSVVAAVCTSDPVTLTASYKTKVFNTTNSDISALRDWLLAQDCRDVCMESTGKYWIPVFNILEPHMHVILTHPKYVKAIKGKKTDKRDAKWIANLFRFDIVKASFIPPADIRALRELSRYRLKLSYMRTAEKNRYQNSMTISRIRIDCALTDPFGLSATRIMDYLLSGEPFDEEKCRSLIDRRVKASKDEVMDTIHGYHILEEQKFKMTHAKAHMDFINKSIDEIEAELFLRSRQYDVQVKRIATVTGITELSALFILSEIGADMSIFESDRHLCSWAGLTPANNESANKKKSTRCSKAGQYLKPLLIQCALAAVKSKKEPYFAIKYQRLSKRRGKKKAIIAIARMMLTSIYHMLSDNEDFHPDDYEATINPPKQKPVVLTLDNTLQFLREQGADPETLKLIQQQCVAQVG

SEQ ID NO: 415538 - protein, 367 aa, unidentified
MGDIIYCGVDFHARQQTICCLKTETGELTSHELKHENKEALRQFYAGLGGPVIVGLEASGYTPWFEELLEELGHQVWLGDATEIRRRARRRQKNDRRDAELILELLCHDEFPRIHRPLPQSREILRMLRYRHKLVKLRTLVKNSLQSLSIQAGLSLQARLFTGAGRQQLQHLALSPVMGQQRQQWLELLQELNQRITATEGWLKQQALPDPRIQLLRSHPGLGLLSALGIVHTLIPVSRFPNPRKVAAYGGFDPMERSSADKKRYLGISKAGSRLLRFLLIEATQTAVKTDPELKHFYHRLVQRRGKPKAKVAVARKLLIRSFIMLRDEINYAEFQQRAIAARLAREVARPKVPVSLIGQPASPAKG

SEQ ID NO: 415539 - protein, 324 aa, unidentified
MATSSSEYIGIDVGKTWLDVASFGEASVWRVKNNPEGIQTILKRLSQGSVQLVVVEASGGYERGMVSSLQLANVPVAVANPTRVRALAKATGKLAKTDRIDARLIAEYACRIQPAVQEPREEQEERLRALVTRREQLVEMRAAEQNRLDTSHPSMVEVLREHIIWLSEQIDGCAEQINVLVDRMTEWKEWVDLLESIPGVGRVTAVTVLAELPELGQLNRQKVAALAGLAPFNRDSGQMHGKRRIFGGRKGVRRVLYMACLSGIRCNPVLKAFYERLTRKGKLFKVAITACMRKLLTIMNAMLHQRLAWKAPGPRLPYLFDFAS

SEQ ID NO: 415540 - protein, 363 aa, unidentified
MEQFIGCDAHKKYSVFVAVNERGEASPAIRVGHDREQYRQFLERLPAGSQIALEAGGHYYWMVDEMEAAGHQPRLVHPLEAKKRMGKTGKKTDKVDANGLGILLRNGTLPEVWIPPSVLRDQRESLRLRMFLVQQRTRLKNRIQGALARYNIQIAGVSDMFGVEGRLRLGQRLGELPEHTRQSVELELVTLDFLEVQLGDIEKRLEELMKVTAEADLLKTLPYVGRILSMVMTLEIGKVERFASAAHLASYAGLVPRVHASGGHTRLGQICGDVNHYLKWAFIEAGNLVVIHQKRLAGQHVVRLYQRVKRKKNHQKAVVAVARHLAEAAYWILKKQEVYRDPQPKPKAPAQAQAAHALSSTHG

SEQ ID NO: 415541 - protein, 371 aa, unidentified
MKQTRSFIGMDVHKTTISISVAEDGRTGPVRFLGVIPNTENDVAKMAKRLSKHGELDFCYEASGCGYVIHRQLTALGHRCSVVAPSLIPRKPGERIKTDRRDSERLAILHRAGDLTPVWVPDSTHEALRDLVRARVDASMHLMRARQQLLAFLLRHGRSYPTGKHWTQRHRSWLAGQVFKEHAHGIVFHDYLETVWTAQQRRDALIEKISTMVASWSLGPLVEALRGLRGIDTISAATFIASTGDLSRFESPRLLMGYLGLVPSEHSSGGTIRRGGITKTGNREARRMLIEAAWSYQYPARIAKEKAEILVKLPKNIRDIAWKAQTRLCTRYRSMVARGKKPTVVVAAIARELAGFIWAIGQEIRITMAAG

SEQ ID NO: 415542 - protein, 342 aa, unidentified
MQHVAIDLHNQYSQICVMNQEREVLAEAKVATTRGGLADFFRHRPPSRVVFEAGPHALWVSELLRQLGHEAVICHPRRVRLIAESRNKNDRVDAELLARLSLSDLELIKPIHQRSRTTLEQRCVLRARAALVETQKQLRTMLRGIVKPFGVTLPAGKRRAVAAAAETDLPAHAALGVRSIVTTLATVAEQIHLLDTQVEQIAAAHPAGARLQTIPGVGPVVSAAFIHAIEDPHRFAATEVAPFLGLTPSNRSSAGKKLNPKERGRPGDPYVRSLLVQSAWTLLNSRSESDIARWGRNLLDRIGPKKAAIAVARKLATLMHHLWLHEQNFLAHPAKSRQIITA

SEQ ID NO: 415543 - protein, 342 aa, unidentified
MVELYAGLDVSLELTSVCVVDGDGRLIREAKVASEPDAIARELRAAAGDFVRVGLEAGPLSQWLFFGLHDVALPVVCIEARHAKAAMVAMNRNKNDRNDARSIAQLVRSGWFKSVHVKSRPSQELRTLLTAREFFVNKLRDHENEIRGLLRPFGLKVGKVGARDFEARARELVVGDALLELCIQTLLAGRAAMKKALADLHRALLRLTENDELCRRFMTIPGVGPVTALAFKATIDDPARFRRSNDVGAHLGLTPRQYQSGETDVRGRISRSGDAFARTALFTAAHVMLTRSRQWTAIRAWGVRIAQRSNLKKAKIAVARKLAVIMHRMWRDATPFRWGAAA

SEQ ID NO: 415544 - protein, 411 aa, unidentified
MRLFVGDDWAEDHHDIEVMDRAGKVLARKRLPEGVAGIAQLHELIARHLGENDEDAEVIVGIETDHGPWVTALIAAGCTVFPVNPLQASRYRQRHGVSGAKSDGGDAHMLADMVRTDSHQLRPAAGDSPEAEGIKVLARTHKTLIWERTRAVQRLRYQLREYFPAALEAFEDLDAPDTLELLGKAPDPARAAKLTRAQVSAALKRGRRRNIPDKATAILAAMRAGQLGQPPALTAAYAATVRALIAVIATLNEQIRVLQGQVEENFGRHPDAEIYRSQPGMGAVLGARVLGEFGDAPHRYADGKARRNYAATSPITRASGKKKVVAARFVHNDRLVDALNAQAFTALRASPGARACYDELRARGIEHNDALRRLANRLVGILHGCLKTRTLYDEATAWSHRQNLPQSSVAA

SEQ ID NO: 415545 - protein, 344 aa, unidentified
MNHFAGLDVSVKETSVCIVDDTGRIVREVKVASEPEALLKVLGNPAYRFKRIGLEAGPLSQWLFSALAEAGLPVVCVETRHMRAVLKAQINKTDRNDARGIAQMMRVGLYRPVHVKTLRSQKLRMLLTHRKLLQSKAIAIDNDLRGTLRNFGLKVGMVGTVKFEARIRELVEDLPDLVVLIEPLLIVRRTLREQVVILHRRLLAIVRDDEVCRRLMTIPGVGPVVSLTYRATVDVPARFRKSKSVGAVFGLTCSRYQSGEVDWSGKISRCGDEMMRVMLYEAAQSMMHSKKWCWLKAWAMQIARRRGMKKAVVALARRLAVIMHRMWVDGTEFRWTREQAAAAA

SEQ ID NO: 415546 - protein, 340 aa, unidentified
MKKLYAGIDLHSNNIYLGIIDQDDKRVHKIRLPNMPDVILAELEPFKEEIVGIVVESTFNWYWLVDCLMDVGYKVHLANPAGIQKYKGLKYSDDQYDSFWLAHLLRLNILPEGYIYPKEDRPVRDLLRKRGHLVRLRTSLINSLQGIISRNCGIMLGGNKIKQVTKDHVAPFLSDENDLALSGAVSKDSIDYLSQQISKIEVAVRNKAKLKKSFMGLQTIPGIGKILSLTIMLETGSIKRFAKVGNFSSYCRKVPTSWTSNNKKKGKGNSKNGNKYLAWAFSEAAEFCRRYDDVAKAFYNRKAARTNRMVAHTALAHKLARAAYYIMRDNVEFDSHKLFA

SEQ ID NO: 415547 - protein, 420 aa, unidentified
MFMNARSPIPYQATVGIDWADQKHDVFVHAANGDSYRRKIDSRPEAIQEWLLELRTACAEGKIAVALEQRRGALFYQLCTHLNWIDLYPINPHSLASFRLTFFSSRAKDDPIDSQLLEELVRTHPDRLRPYLSESPTERKLDQYCRHRRSLLDLSTKTELKLISTLKQYFPLAVNLFAAVGMKSDIALNFLSRWQTLNDLHRAKTHTVRSFFYAHNSRSQSLIEKRLQQIDEAHNVTDDLALIEPLVLTSKCLVGQLRQSNQAIKEFDRKIKDLFKSHPDHFLFANLPGAGEQLAPRLLSLFGSNRLRWADATDIQKYSGVAPVIERSGKSIWVHRRLSRPKFICQTFHEFAQQSIQRSAWADQYYRRQREKGKSHHSAIRALAFKWIRIIFACWKANKPYDESFYLQTLAKKNSSLSPT

SEQ ID NO: 415548 - protein, 418 aa, unidentified
MKKHNNSRKKSEPTTKQVKSRGPVRRDTKEVLAELVEKLKEKLDPKKVAATSAGEKHPRGELRPNLDRLTVGVDLGDQWSNYCILGLEGETLAEGQLRTTQEDIAEFFQALNAARVVFEVGTHSPWVQDVICGCGHEVLVANPRLMEGSKRRKRKNDRIDANKLARLGRVDPKSLHPIPHRSREVRQDLVVLRARDALVAARTELINATRGLVKSMGKRLPKSSSPSFAQKAEEAVPVEIREALLPLVRMAAALSDCIQGYDEKIEKLGREKYGHTALLRQVKGVGPITALAYVLTLENPDRFVKSRDVGPYLGLVPKQEDSGESQPQLGISKTGDTMLRKLLVGSAHYILGPFGPDTDLRRYGLRLCERGGKNAKKRAAVAVARKLAVLLHCLWVSGEVYEPLRQGMSATIAPAVAA

SEQ ID NO: 415549 - protein, 396 aa, unidentified
MISVGIDVSKGKSTVCIMKPCGEILESPFDIGHTADELDSLISLIKSFDEETRVVMEDTGHYHLPVATYLSSHNIFVCCVNALRMKKFCSQSIRRAKTDKIDSIKIASFGITYWNELVKAYPSNVIYDELKFLARQYYQVTGMLVKSKVNFSNLLDQVMPKINDVLSNQGENHKLTEFVNRYIHFQNILDMGERKFTSDYCKWAKKKGYRLNERKAAEIYALAQNGIPTLPNSQSVKIAVSEAIKLIHSVEESRNTILAQMQELCNTLPEYSVVKEMDCIGDTLAPRIIAEIGDVRRFKNKHSLIAYAGIDAPPYQSGAFHASKRHISKRGNSYLRKTGYEIMQSLIKHKPADNAVYDFIQKKRSEGKCGKEAMIAGLNKFLRVYYGKVMEFYSEH

SEQ ID NO: 415550 - protein, 372 aa, unidentified
MASIIYVGMDVHTTNFTFCCYTADSDRGFAVAQTEPDYRQVIKYMERVQKQRGEECKFVCGYEAGCLGYSLYHQLTRCGVDCVILAPSTMHQEKGKRIKTDRRDAENIARCLAFSLYSPVYVPTTEDDAVKEYIHMRDDIKADLKRVKQQIIAFTTRHGFAFDGKSYWTQKHLKWLETLVFEHPLYKETLREYLILYYMLDEKVAVYDTRIEEMSHLEHYEENVQKLCCFRGVAAHTALSLLVEVGDFQRFRSAKHFAAYLGLVPGEHSSSDKQIRTSITKAGNTHLRRLLVEAAQSYNRGAIGKKSAALKARQGGNPAEVIAYADKANERMQRKYYRIAFKSRHNIAKTAIARELACFVWGMMTGNISNAA

SEQ ID NO: 415551 - protein, 369 aa, unidentified
MGEYSEVFVAFDVAKKKHAVAIAEGGRQGEVRFLGDVENSPLPIEKTIKRLATRYDQLHVCFEAGPTGYGLYRQVKALGHDCMVVAPALIPKRAGERIKTNRRDAVTLARLHRAGELTGVWAPDPAHEAVRDLVRARESAADDLRRKRQQLLSFLLRHSRIYSGGGHWTLAHRRWLAGQKFDHVAQQIVFQEGIDASEDSLQRLRRLEKQLALIVPEWSMAPVVEAYQAMRGASFLVAVTFAAEIGDVRRFDTPRQLASFLGLVPAESSTGDTIRRKGLTLAGNRRARRALVEAAWTYRYPARVSETLRARLEGLPKPVRDIAWKAQVRLCARYRRLSAVGKKPPVVVAAIAREMAAFLWAIGRQVAPA

SEQ ID NO: 415552 - protein, 356 aa, unidentified
MCQNEVAVDLRQRGPSVDQISRIGMDTSKHIYQLHGVNGAEEPILRKKLRRKEMVALFAKLAPTVIAIEACGASHHTARLLQSLGHTVKLIAPQLVKPYVKRSKNDAADAEALCEALSRPTMRFVPVKTVEQQAALMLVGVRDRLIRNRTQLANAIRGYAAEFGLTAAKGMAHLVPLLERIEADESLPALARELFALQAKEFVQLQARIEDVDTKLTAWHRADECSRRLAKIPSVGPIGATLLRMKTPDPTQFKSGRQFAAWIGLTPKDHSTAGKVRLGVITRAGDEALRSVLVVGATSVIQHAQRTGKASPWLAALLKRKSPKLAAVALANKTARIAWKMMLTGQAYIEKSSVDN

SEQ ID NO: 415553 - protein, 334 aa, unidentified
MVAKSVFQVHGVDAAGQVVIRRQLKRRHVLTFFEKVPPCLVGIEACGSSHHWSRELQALGHTVRLMPPAYVKPYVKRQKNDMADAEAICEAVTRANMRFVPTKTPDQQSGLMLHRTRHMFIRQQTAVINSIRAHLAEFGIVAPVGRKGVTELLHVVADPNDKRVPEVARTCLAALGTQLLALKEQILEFDRMILAWHRSNQTSKRLHYIPGVGPILATALVASVADPKTFRSGRNFSAWIGLVPRQHSSGGKERLGSISKQGDRYLRSLFVAGALAVIRYAKIHGTGHRPWLTALLGRRPTKVAAIALANKIARMAWAMMAKGERYKQPAALAR

SEQ ID NO: 415554 - protein, 461 aa, unidentified
MKSKKPTGKHKESVRSKVDWKALEIVHPNAAGIDVGGSEHWVAVSPERDPEPVRSFGCFTADLRAMAQWLIEKGVRSVALQSTGVYWMPVFEILEQHGLEVYLVNAQHTKNVPGRKSDVQECQWLLKLHTFGLLNNSFQPTDEIRIARALWRQRGNLVADASSAIQRMQKVLIEMNLQLSNVLSDISGVSGMNIIQAILDGERDPWELAALATPGVKATPEDIVKSLEGNWRAELLFVLRQQVELYRTYQEKIRDCDLELRRHLKSLGSKVDLEAQPLGPKPKGKKSGRNTPQFDLRTELYRITGIDWTQVNGMDVVTAQTVIAECGADLSAFPSEKQFTSWLGLVPSNEQSGGKILKRRTRKVVNRAATAFRNAASTLVRSQSYLGAQYRRLRTRLGAPKAITAMARKLACLFYRLIKHGQQYVDKGMEYYEARHRGQQIRSLMKRAQKLGFQVVVSKTA

SEQ ID NO: 415555 - protein, 328 aa, unidentified
MIMLGIDVSKTKIDCCIFPQGLTGKRKNKIFTNTESGFGSLLKWLITLKIEPDQVTAIMEATSVYHENLGYYLYDAGVKVCVANPSRVRAFAKGMSMLNKTDKADSEALSRYGYTAKLIIWQPEPKNVRLLKALLGRRDVYLGSLLQEKNRLEKAQSTHTSVVVIKLLEENIEYLNQQLEHIDKLINNHIDQDPTLKQDLKLLQTIPSIGERSGLLLLGLFHSHKFEKASQAAAYVGLVPVHQLSGSSVNKQSHLSKAGDSKIRSVLYMSALTAIKYNPHIEALYQRLLSQGKNKMCALGAAMRKLIHLCYGVLKHQTAYQRDYLLVE

SEQ ID NO: 415556 - protein, 372 aa, unidentified
MTQTNILFIGMDVHKESIVISLADDDRSEVRRYGSIGGTMADFKKTLRKLVSTGKELFFCYEAGPCGYELQRFITSQGHQCIVVAPSLIPKKAGDKIKTDKRDADNLTRLLRSGDLTSVFVPNEEDEAMRDLSRAREDVVLALKSAKQRLKAFLLRHNKRFDGSANWSEKHLRWLTEDINMPYPEQKIVFQEYLSSVTEANERVKRFDKEILFFTQQWRLFPVVKALMAMRGVRMVVAVTIMAELGDLTRFENPKQLMCFLGLTPSEYSSGDKQKKGPITKAGNQHARRVLVEAGWSYRFPAKVSKEMQKRHEDVPLNVRDIAWKAQLRLTKRFRLMANKGKANNLIVVAMAREIAAFMWAIANEVPILPRN

SEQ ID NO: 415557 - protein, 339 aa, unidentified
MRYVGLDVHWRQSTICVLDHRGQKLLNRTIKGPWSKVLEEIGKVRKPFAVCFEASTGYGYLFEHLQTIARRVVVAHPGQLRLIFRSKRKNDRVDAEKLAKLLFLDEVPPVYVPSSEVRSWRGFIEHRHKLVSERTRTKNAIRALLRTHGVQSPRGLWYGPGMKWLCSVSFANELDTVRRDMLYERLCFLNKMIERVEATLDRISSRHPGTLLLRTIPGVGPRTSEAVMAWVDDPRRFQRIKSAGRYFGLVPCQDASARTNRLGHITREGPAIVRWMLTEAAWQGVRRSPAIRAFYERVRRENPERRKIALVATAHFLLRAMMAMLRTGEVWRLQEEAAA

SEQ ID NO: 415558 - protein, 346 aa, unidentified
MLHLGLDLSRRRLDFHLLDEQGATVEVGAAPPDVHGLASLARRVGGHDQPVRAAIESMNGARFVHDQLELYGLDVEIADAAKVKGLAPLACKTDKIDARVLAELCRRELVPAIWLPDPSVRGDRERARFRLHLVRQRTRLKSRIHQTLVAFAVPCPVSDLFGKRGRLLLERLALPEPWAGTLTATLRLIDELDREISSCERELRRLGLEHPYIPLLMTVPGIGWVLAYTIAAEIGDIARFSSPRKLAGYTGLCPRVYQSGDSDRRGPLSKQGPKYLRWALLEASTHACKHPLYRERYQRTKRRLGRQRGPRVAQVDLARRLSEAIWHMLTTTTPFAPASASAPLAA

SEQ ID NO: 415559 - protein, 425 aa, unidentified
MKFTQNERILQIKNETLVVGIDIGKETHYARAFDNRGIELAKLLRFSNTSQGYGTLEDWMQTIMQQKQKTEVIVGFEPTGHYWFTLGDYLQGKGYKLGIVNPFHVKCTRELDDNNQTKSDNKDPKTIAMLVKDGRFRDVYIPTDLYQELREAVCERERLQEQLISISNQVIRWLDIRFPEFSGVFKDWSAKTAITTLKHLPTPAKILSIGAEGILSLWQENLKRSSLKKAERLVEVATHSIGRTNGNEAATASLMNLLAQYEMIQEQKQMLEELMAQLLFKVPHADKLLAIKGVGLISAAIIVSEIGDIHRFRDPRQILKLAGLSLKENSSGKHKGKTTISKRGRRRLREGLFRVMIPILARNGEFRAIHQRNLTRTVNQLSKMQSIIALCGKLVRVLYAILTKGSDYKADKLIGDMKRSLEDAA

SEQ ID NO: 415560 - protein, 418 aa, unidentified
MDVIVERCAGLDVHRDNVVATTRVPGSGRRRWDQQTRTFKSTLAGLAELAAWLAETGVTLVGMEATGVYWKPVFQALEERFECWLLNAHHLRNVPGRKTDVKDSEWICQLVQHGLVRPSFVPPPEIRRLRDLTRLRKAQSNERARTIQRLEKVLQDAGIKLSSVASTTYSKSARAMLEALLCGVTDPEQLAELAKARMRNKIPQLREALASRFTIEHHGVMVAQLLAHIDTLDAALQNLSERIELALAPHAQIVELLCTIPGVQAHAAQVLIAECGLDMTVFPTAGHFASWAGACPGHHESAGRRKSGRTRPGPAWLTSQLTECARAAVRTKDTYLASHYAQLRGRRGEPKAIGAIRHDLLVAYYHIVRDHVPYRDLGPDWQRKRYSPEHRAHRLQRQLEALGYAVTLERTEQTQQAA

SEQ ID NO: 415561 - protein, 380 aa, unidentified
MDVHSKNYTLCAMEPTIGAEDRIFGEVQVAPDYKEVICFIESLKMKLGPDNKYSIECGYEAGCLGYTLYHQLTGAGVKCVILAPTTMLTQQGKRIKTDKRDARLIAQCLCYGGYHPVYIPTGEDDAVKEYLRMRDDHKLALKKLKQQINAFVLRHGQQYSGTKWTIKHVTWLKKLELDPMYRETLDEYLASCEEQEAKIERYDKRIEEIASEARYQENAKKLGCFLGIRTHTALSLIVETGDFKRFAKGNTYAAFLGLAPGERSSSENVNRPGISKAGNTHLRCRLIEAAKGICKGAIGHKSKELRSRQSGQPAEIIAYADKANTRLRSRYYKMIRHGKKKNVAVAAVARELACFIWGMMTGNISIHPKAGTSGPAVSQG

SEQ ID NO: 415562 - protein, 424 aa, unidentified
MYRIAGIDVHKRLLVVVIVELRADGVVILERRKFLATPEQMRKLAECLLEWEVEEVVMESTAQYWQPIWGRLEEVWQPARRQRTGAGPKAGKLYLAQAQSNKGRRGRKNDYEDAERLVKRLEANELVLSYVPEPEQRLWRAVSRRKIQLNRDRSRVQNQLECVLEQAHIKLSSVISDLLGVSAQRILRAITEGGSDPVVLAGMVEKNVKATPEELADALSAVRRCRTEYRKLIQMMLDHVKLLDEQMEQLILQAAKLMKPYEDAVQRLAETPGLGVDSGLQIVAEVGPRAEVFPRPGNLCSWVGSIPGEQISAERNASSKSPKGNRQMRRILTEAVEAAVKQKGNIFEVKFRKFITHMDYQEAIWCVVHFMCKIVWKILHDGVRYQERGPAVDAKNAHRRNQKMARHLKAVGYNVLPPVAPMPS

SEQ ID NO: 415563 - protein, 347 aa, unidentified
MEQMQLFAGLDMHTESITGTIKDEQGNSVRVLKVETSKEGVKKLFERLQKKGITAVFEASRNWPRYAELIQPYCNKVIMAHPLKVRAIASARIKTDVIDSNTLSDLLKADLIPESFMPPLDIVELREILRYRAGLSRMRGQLKTKSKNILSREGKKCEFDEVTGKRARLWLNNLELTGLNRKELDYTVALIDNLSAEIAKFDKVIEKLQYKYPEVDILKSIIGISTFSGMMILAEIADFSRFSSPNKLACYAGLVPSTYQSSQTQYSGRITKQGNSYLRWILTQCVHASIKSRYSHKLKTFYLRIQRKKGKQKAVVATARKMLTTIWHLLNKNEYYAYRDIPSKNGL

SEQ ID NO: 415564 - protein, 332 aa, unidentified
MAYDFVIGVDVGKYFHHACVLDPQGRQVLSKRINQHEGSLRKLFGQFLADNASVLVIVDQPNNIGRLTVAVAQDMGADVRYLPGLAMRQLSRIHVGNSKTDVRDAYVIAHAGLNLPDSLRSVDRVEEVFIQLKVLNGIDEDLARAYTRLINQMRSALVGTYPAFEHVLRGQMIHRKWILHLLAKYGGPTKIRRIGKTRLAAFARSHKARNPEPVIDAMLAAIHGQTVSIAGAEYAELGVAMSAKDALAKLEHRKEIEAQVLKLIQDIPQTEILLSMPGIGPRSAAQILMTVGDMSDLPDAAHLASYAGLSPRTNQSGTSIMSNSPNRAGNKN

SEQ ID NO: 415565 - protein, 376 aa, unidentified
MQAVQRQGYEQEVVLYMAMELSNSSWTLGFSNGQRTRRKSVEARDRVRLIEEVQLAKQKLGLEPNTQVVVCFEAGRDGHWIYRWLSAEGFKVFEIDSSSIETARGRKHVKTDRIDVEKLLDLLMRYCLGFRKAFRIVRVPSEEAEAGQRLHREDEWLIRQRGRVSNRLKGLLVTQGITEVPLKREFEDWLEKAQTWNGSDLSDALKTEISRLYEQYQFVNAQIAEVEQAYLQELLSDTAVANKRRRLERLKCIGPKTSRILSAEVFSWRVFSNGKQVGAMSGLTPTPSQSGDVQREQGISKAGNRRVRRVMIELAWFWLRWQPESHLSQWFNQRFAHGGKRMRRIGIVALARKLLIALWHYAEDGVIPEGAVLKAV

SEQ ID NO: 415566 - protein, 411 aa, unidentified
MRRVIGMDVHRTFAEVVVWENGRLRRLGRVDMTRSGLEGFGRTLASTDEVVVEATGNAMAVVRVLSAYVARVIMANPLQVKAIAHARIKTDKIDAGVLAQLRAADFLPEVWLPDAETERRRRLVARRNQIVRHRTRVKNEVHAILHAHLIPPCPHADLFGRLGRAWLARQDLPGDEMAAIARHLREIDRLGEDLATLDREVAQAVSDDPAVKRLLTITGVNLIVAAGLVAAIGDIKRFSEPEKLVSYFGLNPRVRQSGLGLAQHGRISKHGRAHARGMLVEAAWAASKSPGPLRAFFLRIRAKKGHQVAAVAVARKLAVICWHLLTKETDYLWQRPALVAHKVRAMDLQAGQPMRKGNMRGPAYAYNVKELRDREIDVARQAERAYEHAVRNWQPTRPRVRRTDAAKEARR

SEQ ID NO: 415567 - protein, 439 aa, unidentified
MPTPSLPVLDPTAAAIDVGSEQLHVSIAGGPPKVFGTTTGQLHQLRDWLLEQRAKTVAMEATGIYWLCPYEVLEGAGLEVVVVNGKYVKNLPGRKTDMKDCQWQATLHAHGLLKPGFVPPEHIRRLQDYLRLRTDHITMAGSHEQHMQKALDRMNLKIHDVLSDLTGVSGLKMIEAILAGERNPVALLALCDAQVQKRKADRMRAALEGTWKAEPVFALRQAYELWQSYQEKIAECDGAIEKILQELAGPEDPQDPPPPGTKRGGVNTPEIAGFHGLLWRLSGRKDLTTLPGVADYVWLQLLSEVGTDLERHWPTEKHFTAWCGLAPGSKQSGKRRGSQRRSRNRAGRLFCVIARSVGRSVDKALGGFYRRLKGRRGGLVANLALARKLAELFWRLMVHGVNYVEQGLKKYEEKVAQTEQRLLQKLARKYHMTLQPKSP

SEQ ID NO: 415568 - protein, 368 aa, unidentified
MAKSNAVYVGMDVHKDSIDIALADAGARGEVRHYGTIGGGLGDVDRALRKIVAGGREAHIVYEAGPCGYALYRHLAAKGVACMVVAPSRIPKRAGDRVKTDRRDAEMLARLHRAGELEAVHVPHAEDEAIRDLTRAREDAKAAQTRTRHQLKAFLLRNGIAYTGKTAWTPAHVRWLASVKLPEPVQQLVFQEYVDAVTAAGERLERLERMLRDAAAAWRLYPVVQALQTLRGVQLVIAATLVAEIGDIGRFDNPRQLMAYLGLTPSEYSSGQSTHRGGITKCGNSHARRMLTEAAWSYRLPARITPIIAKRQDGQSRAVRDIAWQAQVRLCGRYRQLRARGKEQNKVIIAVARELSGFVWAIARATRS

SEQ ID NO: 415569 - protein, 341 aa, unidentified
MNSVTLGIDLGKRWFHVVGCDAAGKVVLREKLGRNQLLQLMAQHPPCLVGIETCCGSQYLARKFQGFGHDVKLLPAQYVKPFVKSQKNDFNDAQAIAETVRLPTMRFVPLKSEEQMDVQALHRARERMLQQRLALTNQIRGLLLDRGIEIAQGFYALRTVLPALLEKEDSGLTPMMRDLGRMLLDMWNRTESTIEQMNDRLKCLSRESDLCRRLQTIPGVGVLLSTAIVSAVGNASTFRRARDLAAWVGLVPQQHTTGGKPRLLGITKRGNSYLRRLFVQGARALWVWKDKHPNDPIQHWLIQLAERRHAHIAVCALANKLVRIAWAVMRSGAEFNLHYHA

SEQ ID NO: 415570 - protein, 345 aa, unidentified
MNYVSTIGLDLAKHVFRVHGADTSGSPLFNRKLRRGEVLRFFEKLPPCLVGMEACGGAHYWAREIANLGHDVRLIPPAYVKPFVKRGKTDAADAEAISEAVIRKTMRFVPIKTAEQQADAMVLKTRALLVQQRTQSVNALRSHLAELGIIAAGGLPSVAALMAIVREGEELPAAARFALMAVADQIDSLADQIDELERAIVTEAKRDEDMRRLTTIPGVGPITAATIKALVPDPGGFKSARHFAAWVGLTPKPHSSGGKERLGGISKMGNPELRVLLVLGATAVLRIARNDDRARPWLKALLARRPFKVAAVALANKMARIIWALLNKGGIYHRPGPLSIAAVAR

SEQ ID NO: 415571 - protein, 402 aa, unidentified
MNAVGIDVSKGKSMVAIMRPFGEIVSTPFEIKHTTSDIHSLVELINSVEGESRIVMEHTGRYYEILAHQLSEANLFVSTINPKLIKDFDNDSLRKVKSDKADAVKIARYALDKWQNLKQYSVMDELRNQLKTMNRQFSFYMKHKTAMKNNLISILDQTYPGVNTYFDSPVRSDGSQKWVDFASTYWHVDCVRKMSLNAFIDHYQNWCKRKKYNFSQLKAEEIYGKAKELVPVLPKDAITKLIIKQAVDQLISVSTTVESLRTLMNETASKLPEYPVVMAMKGVGTSLGPQLMAEIGDVSRFTHKGAITAFAGVDPGVNESGTYEQKSVPTSKRGSADLRKTLFQVMDVLIKTMPQDDPVYQFLDKKRAQGKPYYVYMTAGANKFLRIYYGRVKEYLASLPES

SEQ ID NO: 415572 - protein, 283 aa, unidentified
MLTAEADKCKTKVVVNTAAGVQALLAWCAKHGAQPAQLHAILEPTGLYHEQAATALPQVRVSLVNPAQARDFAKALALRSKNDALDSYVLARYGQTLSPALWHPAPLHARQLRALLTRREALSKDLLRELNRKEKSQFSPSAPLVDGSIDKAIAFLREQIKQIERAIDQHIDNHPDLKQDCELLNSIPAIGPQAGNAILAVMHNRHIDSAQSLAAYLGVVPVQRQSGSSLNSCARLSKAGPSQVRATLYMAALVGTRHNPHIRALYQRLLKSRKSKRPRWARP

SEQ ID NO: 415573 - protein, 317 aa, unidentified
MTSFLGVDVGKSDVHATLLIDDRTWSKSFPNAKAGLTQLAAWLRNRKVERVHACLESTGGFEEALALDLHERGHVVSVVNPARIKAFAQSELLRTKTDAVDAALIARFCRAHLPEAWVPPAPEIPALQALVRRHAGIQDMLFTESNRLGAARVDSAVERSLREHIAYLEAEMQRVVDEITALINRYPPLRAQRDLITTIPGIADLTAARILGEMPNISEYRSARAVAAFAGLSPREHQSGNLRGRTRLAKTGNARLRRMLYLSATRHNPVLNALFVRLVAAGKPKRVTLAAVMRKLLILAYGVLKTNRPFDPAYSNA

SEQ ID NO: 415574 - protein, 400 aa, unidentified
MRAVFGIDVSKASSEVAILVNGEKVHGYTMSNDALGFARLLGDLKTVHKPEIIFEATGVYSRRLQAFLDEHGYAYTRLNPLEAKKQLDSLRVRKTDQIDAEKLAQSQFVLNRKPTYVQEEVYQELRDLSRFYQNLTEDIVRAKNRLHKVLQVTFPEIETVLSKPTGEQYWNLVTAFPYKDFVLDLSKDELLESIRQSTSKRISDKRVAYLAEKLIALANQSYCAVKKTSPMLEEVRYYGKELLRLSEQRQTVLDQMVELAQPLPEYDILLSIPGIAETTATSIIGELGDIRRFQSANQINAFIGIDLRHYESGNFLAKEHITKRGNPYAGKILFKCIHNIASASHTKPCHIADFYEKRKRQSQTTSTKPHTIASIHRLIRTMYYLITHNKLYDYRSTQNR

SEQ ID NO: 415575 - protein, 380 aa, unidentified
MASMHDSVRFETTVYAAIELSKKSWVVAIARPDRDRPSIHRIAGGNLADLIGRLRKAAGEKQRIVVCYEAGYDGFWLARSLAKIGIDCRVLDPASIQVNRRARRVKTDRIDSLALLRALIAIDRGERHVCAVVRVPTVEEEDARRSHRERQRLVRERTGHINRIKGLLFAQGIRGIEPKRRRTRIDFGKLTTAEGRPLAERLRRELEREYQRLELVQSQLRIVEKERDTADAQDPAVERKRELLCALQGVGGASAAILAREVFARPFASRRQLGSYLGLTPSAYDSGSTTRCQGISKAGNSWARRVLIEVAWLWRKYQPGSPLSHWYARKTADQSPRIRRIMLIALARKLAISLWRYVETGLVPDGAVMAKTTPHMAAAT

SEQ ID NO: 415576 - protein, 311 aa, unidentified
MTEHATVGIDIAKDTFDVYIDPTRQLLHLDNTPEGHQQLLSSLSAITVKLVVMEATGRYHSLLAATLELAGLPVAVVNPRQVKNFARALGTLYKTDPNDARIICEFGRRMEPEARPTPDEQTQRLAGMVTRRRQLVDNRTMEINRYKSCDDVVVSAGIKRHIDWLTAEIRDADDDIDRQIKVMPLWREKATLLEEVKGIGPTTMAVLLAMLPELGRLNRHKISALVGVCPYAHDSGKMKGKRSIWGGRSAVRSALYMATLSAVRYNPTIREFYERLTGRGKPFKVAVTACVRKLLTILNAMLRDNKKWVTN

SEQ ID NO: 415577 - protein, 452 aa, unidentified
MEEQISLEVVNKNAAGIDIGSRSHWVAVGQTDDLIQEFGVYNENLYELADWLTLHNIATVAMESTGNYWQNLHAVLISKGFEVTLCNGKFTKNIKGKKTDLKDCQWIQKLHSLGLLSGSFLPNQDTEILRTFTRHRHNLIKQAASASKKMQKYLRLMNIRLDVVVKDVVGLTGLKIIRAIAIGETNPKKLASLRHYNYKKSEEEIAKALHSNGRKDFLYALKDELDSYEFIQKKIRECDDQISEKLEDIIGKDPEKKQHHIDKKPYKRINKNTPKNIDINLKSYQMFKGTDLLAIEGMSYNTVLTIMSEIGYDGIKKFKTAKHFTSWLRLAPNNKVSGGKVLSSKIGKGSSRLKIALRNAANAIGNLKDSTPLRDFFHRINFRKGRVSAITATARKLAVIIWNMVTKAIPYQNPEGYLYLDQKRKLGLVKRIKKQIDKFGLTNDDLKITVNQ

SEQ ID NO: 415578 - protein, 342 aa, unidentified
MEEYIGLDVSMKETAVSIRRAGERIWRGKCASDPSILAELIRKRAPAVKRVVFETGPLSVWFYHSLRAEGVPAICIDARHAKAALDMAANKTDANDADGLAQLAEVGFFREVRVKGFDSMLTRTLVAARTRLVRITTELSNQIRGVMKTFGLLVPAGKGSTFEKHVRSLLANQDALASIVLPMLEAWRGIRFRAAELGRQLVRDARQSRTCRILMSIPGIGAITATSFTTAIEEPGNFRKSRSVGAWIGLTTRRYQSGEVDYDGHISRRGDHHLRGLLYEAAAVILTRSSTHSTLRTWGLQLRKRIGFKRAAVAVARKLAVIMHTMLKTGELFNPNAGAAAA

SEQ ID NO: 415579 - protein, 313 aa, unidentified
MSPNTTTTIYAGLDIAKSNLQLHLAGQFHDLPNSAAGHRRLLNLLAAHSGVHVICEATGGYERDVVAALHAAQRSLSVLNPARVRHFARAQGQRAKTDRIDAALLTHCGQALRPKPTAARSELEQQLSELVRRRAQLLDTLVAQRQQTERLTLPVVRRQAQSLVRRLERDLAQIEGWLTQLREAVPQLDQRAHRLEAITGVGSTTALGVLAELPELGTLNRRQAAALAGLAPHPRESGQWQGRRTIGGGRAAVRRALYMAALSAARSNQPLREFYQRLRTAGKPAKVALTAVMRKLVVLMNHVLKNPNFALAT

SEQ ID NO: 415580 - protein, 336 aa, unidentified
MDYGAIDLHKRYTWIRLVTADGVVTLERRVPTTREALTAAFGGRRPARVLIASSTESEWVAQTIEACGHEVIVASPGYALMYGHRDPHIKTDRRDVVALAEACRHGIYRAAHRVSAGQRQRRRELKIRELLVRQRTALINLLRAELRQEGLRLRSCAAERVARQYRVLALPHPRRESLAPVVAGLEDLDDAMAASTAALTAAAQADPVVRRLQTAPGIGPITALTFRAVLDDVERFADARSVAAYLGLVPKEESSGARQHKGAITKAGPPGLRTLLVQASWTVWRQKTGRGALHAWVDRLAARRGKRVAVVALARRLGRILYAMWRDGQDYRGQPA

SEQ ID NO: 415581 - protein, 277 aa, unidentified
MKVASIIGLDLAKRPFQAHGALADGSVAFRKKLTREKVLGFFAERPRCVVAMEACGSAHHWGQAIRDAGHEVRLIPPAYVKPFVKRQKNDAADAEAIAEAASRPTMRFVAVKTEEQQARAMLFRTRDLLVRQRTQLINALRGQLSEHGVVAPQGPANVAILAQAIDNMAPSLPLLVVELARVYLDQIDRLSEKVAELEKAIACEAKRGAMTRRLQTMPGVGPITAMAIETFAPPMEVFRRGRDFAAWLGLVPVQHSTGGKQVLGKTSKMGQRDIRRL

SEQ ID NO: 415582 - protein, 344 aa, unidentified
MTTIQPKKTAHEAKPDLFAGIDVGAEELILVIRKNGKPFDPQKFANTPADRTRLVKKLVKLPGIVVCLEATGVYHFDLSLALHDAGVLLMVVNPKAAHNFAKVLMKNSKTDAVDANNLAEYAARMDFVAWTRPSDEHITLRSFARRINALTGQKAAAKNHLHSLTATSETPKAVLKDAKLAIAQLEKRIDSLTAGALVLIGKHPELERILALLIGIKGVGETSAIALMGELLLLPPDLTHREWVKFAGLDPRAFDSGKSVHKKTRISKAGNRHIRAALYFPALSAKQHDKHVKAYFQHLMDNGKTPLQGVCAVMRKLLHAIHGMLKNNEPFDNTRFYAIPECNG

SEQ ID NO: 415583 - protein, 367 aa, unidentified
MNSSKYVAMDVHTATISVAVRDAAGKLIMESVIETKSSTILQFIQGLRGDLYVTFEEGTWAAWLYDLLRPHVTNIVVCDPRRNALLNEGSKSDRIDARKLSELLRANLLRSVYHGENGLRTVKELSRAYLTIGKDLTRVMNRVKAIYRGWGIPCAGKSVYHPRHREEWLRKITQASVRRRAELYYEQLDVLVVLRKQARQELLAESKKHKAWKLLRSIPALGPIRVAVLMAIVQTPHRFRAKRPLWKYSGFGVVTHTSADHRYVNGQLERSKRPVSVRGLDPGHNHQLKYLFKSAAIQASTAKGPFQEFYEALVAKGMRPEMARLTLARKIAVITLTVWKSMPTPRLCRLLTRDDGWKGLGLCLESA

SEQ ID NO: 415584 - protein, 429 aa, unidentified
MNSTQNKKIDQVKETTMIVGIDVGSEKHYFRAFNWRGIELTRKPVAFSNSMEGFNNFYNTIVELMQKRELEEALVGIEPTGHYWFDLGQFMGEKNIKFVIVNPHHVHKTKELDDNSPSKNDRKDPRVIAGLVRDGRYFYSYMPTGVYAELRNASNRRFVLVEEQTRAKNRLQKWIAVYFPEYKGIYTHIDAKGGLLVLKQAPTPEEIVRVGVEGIIKIWKDAKLRGNGHKKAMLILNAAMKSIGLKSGLTEARMEIQDLIEDYELQTKRLERVNDLIKELCQQIRYADKLLEIKGIGITTVAGFIAEVGDIARFDSTKELQKLAGLELVSDSSGKHNGKTKISKRGRKRLRYLLFEAAISVVGKNEEFKEIHRYYTTREKNPLKKMQSLIAVACKLIRVFHVILTKGISYDASKMLKDIQHQGKQLKAA

SEQ ID NO: 415585 - protein, 360 aa, unidentified
MSRREAITTIAHPEPIRVTVGVDTHGEAHVACALDQLGRHLAITRVATTPRGYRALLAWARSLGEVDAWGVEGTGCYGAGLVRVLAAQGQMVWEVNRPDRQARRQHGKSDPVDAEAAARAVQAGQATAIPKAGDHLVEMVRGLRVARTTAAKARTQAANALRALVVTAPAELREQLRDLPAAQLASTAARLRPGPIVTTTAATKLALRLLGERYQALDGELARVDAELDRLTTQAAPELRQLFGVGPEIAGALLVAAGDNPLRLRSEAAFSMLCGASPIPASSGKTVRHRLNRGGNRQANTALYRIVVVRLRWHQPTRDYLARRTTQGLSKKEIIRCLKRYIAREVFAALQAPTLPAQAA

SEQ ID NO: 415586 - protein, 457 aa, unidentified
MSNRSCVLSRGDRRRNDRLAGLRGVVTRESAVVAFDLACDKQVCVVTDPDSRVLARRGVTAKAWQLQRVVEWGLARARAAGFSSVVVACEPTGHRWRVLDEIVARAGVQLVCVQPLLTCRAREAEDFTFNKSDDTDAMIIARLVTELRCYLPERSEPIWARLRQLGARRAGLVTAVTADRQQITDLLECAWPAVLEAAAEPLESKNWLAAITVLLNRVDTDGDLSAIRRWGWNRFAAAVRRELPRHGAQRWRRAIVRSVFDAATDPARAAAGVAAQRAGAFERVLFTLADLAHDRAAKDRAEARMVEVLDELGLTVLVTSIPGLSALGAATILAETGDPARFTSARALVKHAGLCPRDNASGTYQGKTTISRRGRPQLRLAAWRAVWPALRTNPVFAARYDHLTTRTTNKLTANQARVAIACSLLRQLHAIITTDTPWNPALAGGPTTTAKETIPAA

SEQ ID NO: 415587 - protein, 401 aa, unidentified
MADAAQRYVAFDLHKRQVTVAAVDQAKAVVLAPRQVALSRLEKWCHQHLRSQDQVVMEAGPNTWHAYDIVEPVVSLVVVADPRKLRAMAAGAPKTDARDAIFPATLLAAEMVPEIWVPPKDVRDLRTLIHYRQRLVRRSTAARNRLHALMARRHVAVPDGDPFAQSCRAWWETLDLRPTEALLACQDLDTLDATTDQRRAVEAHLARLSVSEPWHADANLMLHLPGFAVVNAMTLLSAVGTIHRFPRSSHLVAYGGLDPRVYQSGETLRAGRISKRGRRELRSVMVQAAWVAVTCDEYWKARFAHLQAKLGTPKAIVAIARKLLVLVWRVLTHREVADRSDPETVARKYLRWATEHRLATSLHLSRTEFVRLELKRLRIKHGPINIKSGGWNLRLEATTAG

SEQ ID NO: 415588 - protein, 351 aa, unidentified
MSSMPCLQSKVFGGIDTHKDLHMAALVDETGAVIATHAFSTTRAGYRALLRWMTGFGQLQRVGVEQTGSYGAGVVRHLALASVPVLEVTGTDKAERRTRGKDDTLDAITAARAALEGKRISLAKHRDGEIEALRVLRVARQTAVKSRRSALQLLHNMIIAAPDEVRDQTRNLTRMQLIRTCAAWRPDVEAASDPAVATRIALKSVARRIIDLNDEIANLDEPIERLVRELNPKLLDQIGIGVEIAGQLLVTAGDNPERLRSEAGFAMLCGVAPLPASSGITQRHRLNRGGDRQANRALHMAAVSRLRLCPRTRAYATRRKAEGLSKREIIRCLKRYIAREAYHLITAETGP

SEQ ID NO: 415589 - protein, 449 aa, unidentified
MSKQRNKVVSLPVIEPDAAGIDVGATEIFVAVPNDRAPEPIRCFPTFTVDLERLADWLQQCQIRTVAMESTGVYWIPLFQILEKRKIDVRLVNAHHVKNVPGRKTDVSDCQWIQHLHFVGLLRGSFRPDDEICALRSLWRHRDNLIQLATLHLQHMQKALDQMNLQLHHVISDLAGTTGLAIMDAILAGERNPQKLAQLRNRHIQASEETIMKSLVGDYHKEHLFTLRQSLKSYRHYQELIQEVDLQVKQMLQCLPSKTAVGEKPPKGEKIRRTPWRNEPPQLRNDLYRAFGVDLTEVPGINSLTAQMLLTEIGPNLSRFPTAAAFCSWLRLCPNPKISGGQVLSSRTQPTKNRVALALRMATQGLHRSDSFLGDYFRRMKARMGAPKAMTATAHKLARIVYHMVTTQQEYDATVFQLQEQRRRLQKSARLHAQARELGFQLIPINVVP

SEQ ID NO: 415590 - protein, 412 aa, unidentified
MEIVFPRCCGLDVHKETVVACLRLQVPGEEVHKEIRTFSTMTDELLVLYDWLYAHGVTHVAMESTGVYWKPIFNLLESQFEVLLVNAAHIKAVPGRKTDVKDCEWIADLLAHGLLRGSFIPPVPIRDLRDLTRLRKSLIEDRTRVINRLQKLLEAANIKLASVVTDVMGASARAMLSALLEGVIEPEALADLARGRLRQKLPELRRALEGRFRSHHRFLLEQLLSHIDFLDESIARISEEVVQQIVPFQRQVELLCTIPGISRKTAEVLISEIGTDMKRFPTAANLASWAGMCPGNHESAGKRYSGRTRKGNSWLRRALLEAAWAAARSKNCYLFSQYSRLVARRGKKKAAIAVAHSLLVIAYHVLKNQTPYRDLGVDFLDKLNLQRLQRYHVRRLENLGLKVTIEPLQEAA

SEQ ID NO: 415591 - protein, 345 aa, unidentified
MDHFAGLDVSVKETSVCIVDDTGRMVREAKVASEPEALLPVLTNALYRFKRIGLEAGPLSQWLFSALAEAGLPVICVETRHMRAVLQAQINKTDRNDARGMAQMMRAGLYRPVHVKTLRSQKLRMLLTHRKLLQSKAIAIDNDLRGTLRNFGLKVGMVGKVKFEARIQELVENLPDLVELVEPMLIVRRTLREQIGILHGRLMAIVRTDDVCRRLMTVPGVGPVVALTYRATVDVPARFRNSKAVGAVFGLTPSRYQSGEIDRPGAISRCGDEMMRAMLYEAAHIVLVRLAKWSWLKAWAMKIARHRGMKKAIVALARRLAVIMHRIWVDGTEFRWTREQAAAAA

SEQ ID NO: 415592 - protein, 400 aa, unidentified
MSKCIAEQAREQTAAAMEAVSGWSRYGAFIGLDVHKETIAVAVALPGRDEPQYRGEIKHEPKALTKWLARLNDDFGGALLLFCYEAGPCGYGLYRQLTEAGHDCQVVAPSLIPKNPGERIKTDRRDALKLARLLRAGDLTAVWVPGTEQEAMRDLTRARDDMKSQERKARQQLNAFVLRHGHHWPRGKTRWTKTHFNWLESIRFEQPWLQIVLQEYIDAVKAATQRVADLTDQLMRALPGWSLAPVVDALVALRGIDKLAATVLLAELGDISRFDSPKQLMSYLGLVPSEHSSGGRRRQGAITLTGNSHARRMLIECAWSYRFPARQSMHLKRKAKDASEAAKAIAWRAQKRLCGRYRQLSQAGKNIKLVCVAIARELVGFLWDIVRHEMPRVQIAPAGR

SEQ ID NO: 415593 - protein, 320 aa, unidentified
MNETTSSIFVGIDVSKARLDVAVGEKGAQWSERNDADGIALLVKQLVEIQPELVVIESTGGLERPALVELVRVGLAIALVNPKRVREFARAIGLSAKTDKLDARLLARFARDVKPGRTVLPTEDEQQLSALLARRKQLLDMLTAEQNRLGTAPPVLKELILEHIAWLKEHIQAIDKEIDDFNRQDPQRQQKQDLMQTVKGVGRVTASTLLADLPELGQLNKKRIAALVGVAPFNNDSGHWRGKRRIKGGRASVRQVLYMAAVAAARSNPAIRTFYQSLLQRGKEKKVALVACMHKLLTILNAMIRTNQPWREPVPSPISV

SEQ ID NO: 415594 - protein, 313 aa, unidentified
MYKYIGIDVSKATLDLYDGEKSYKVSNDTTGFKAVKKLSTKKEELCLIFEPTGIYSHSLIEYCQKYSIKAIIVGSKEARDYARSIKQRSKTDKIDAKVLYRYHTQVVPKSITVPSIDTHMRKVTQRRNVYEKYQKMMGQLNNLIEASHKADKSLIASLEKQIISLEKSSQKVLAEIEKLLLDNREQQEAFTHLQTIPGIAKKSALVILMEFLRYPEAKSNEMVALMGLDPVLKESGMFRGKSRISKQGGKYFREKIYMSTVVAIQYNDRLKSFYERLIQNGKPKKLALIAAMRKLLRIAFAIVKNKEPYLALV

SEQ ID NO: 415595 - protein, 348 aa, unidentified
MSISMIGIDTAKSTFQLHGIDATGKVQLKRKLRRDELIAFFEQQPRCTVVMEACGAAHHWARVLSGIGFEVKLIASEAVKPFVERGKKNDPADAAAICAAASRPEAKFVAVKSLEQQGVLALHSVRSLLVKQRTMLANAMRGLATEFGLVVPKGMGKLEELMALVEEDKSFPEQARKAFAELREHCRVTTERIEKLERQIVAHARYGDTARRLATVPGIGPITASLIAATVGDTIGNFPSARHFAAWLGLVPRQHSSGGKTRLGRITKAGNREIRTLLVLGATSMVYRAGRWNSAAGAWVRGLLERRPVRHVTVALANKMARIAWAVMARNEVYRAKGGVAPAAAATA

SEQ ID NO: 415596 - protein, 296 aa, unidentified
MARKRTLSTLDTSIAYEAVGLDLAKEDTAIAAFGPDHEGPYLIDRMPYDKLYELLADMAPTLVAMEPCSGAHQIAEQIQELGHEVMMISGRHVQAWVKDHCNGQKTDLNDAFAILNLAYDRWLTPIRGKTREECRLLALQASYRQLKGQRTKTMVHVKATLHAWGFPIRAGSFNQKVLHELIDANREAFGDEVAETLHLMINRVRDLDHDIATVLKLLTEATKRDPRASLLRSIPGFGILTTSRWCAVIGDIARFDSPKQTMAFIGLVPNNRITGHHTETSSGREPKSRLMRPRFN

SEQ ID NO: 415597 - protein, 399 aa, unidentified
MIGVDPHKGSHTAVAIGAAEEPLGQVRVRASAAQAERLLAWAASWPQRTWAVEGAGGLGHLLAQQLVAAGEQVLDVPPKLGARVRLLASGNTSKNDPNDARSVAIAALRSAGCRPVRADDHATVLKVWAKRHRDLGRARTQVACRLHAVLCELIPGGFSKRISAAQAARVLSQVTVSGAVAQARFELAADFLEDLRRIDARMREARKKLAAAVQASGTTLTGIFGVGPVVAAVVIGEAGDPARFASRDHFAAYNGTAPVEVSSGNRKVHRLSRRGNRRLNHAVHMAAVTQVSQRHSDGRAYYDKKIAEGKTPKEALRALKRQVSDAIYKRLKADAARATAGSGQGPGGHQGNDSVASAAGLHPEHRLFGQATPGPVPTLRPRPQKKVTSRATRKTARTT

SEQ ID NO: 415598 - protein, 387 aa, unidentified
MEVRIENTPSAGTNNDPVHCFVAIELSKSSWVVGFQTPLSKQTSRYQVKACDAEPLLQLIERVRTRVTREVGRPVEVTSCYEAGYDGFWLHRVLEAHGIHNHVLDPASLQVNRRARRPKTDRIDADRMVRALIRHLRGEPEACSVVRVPSPEQEDARRLHRERGRLIAERVGHVNRIKGLCATQGIYNYEPLRSDRLERLDKLRTGDGRALPARFKTEIVREIKRLEVVLEMISTVEAERDAILKDKKSTHLNADKIKMLAKLKAIGAEFSTTLVGEVFYREFANRRQLGSYVGLASSPFCSGSLDRDQGISKAGNSKARAMMIELAWTWLRYQPDSALSRWFQARVGNLKGRPRRIAIVAMARKLLVALWRYLQTGVIPTGAELKA

SEQ ID NO: 415599 - protein, 363 aa, unidentified
MVLPPVCASERGTRSDRSGIDPHKQTHTAVALDTATGRKVGEITVKARTRGFERLLLWARELDDVDRFAVEDGRHVSGALERHLIAHGETAVRVPPAMMFQARRADRVRGKSDPIDAEAVARAALAHPELPTATLAGIERDLDLLVAHRESLVNERTDKISKLRWLLHDIDPDLAPPLRSFDRFKVLARVQRNLDSMTPTTAVAVCMDLLARCREITVQANKLEREIIGLVDLHAAALLKIPGCGALTAAKILAETAQVKRFPSEGHFARYVGTAPVPVASGASHRHRFNRRGNRQLNAAIHRVAITQLRIHEPAQAYFSRKRAEGMSKTEALRALKRQITRTIYKTMVSMDQPTDYAAAVAA

SEQ ID NO: 415600 - protein, 347 aa, unidentified
MSITMIGLDTAKSAFQIHAVNATGKTEVKRKLSRNDLLPFFQKQELCTVVLEACGAAHYWARVLLGLGHDVKLIAPEAVKPFVKKGKKNDAADAAALCAAASRPDMKFVPAKSLEQQGILALHSARSLLVKQQTMLANAMRGLATEFGLTVPKGIGKLAELAVLVGADEAFPVKARQAFTGLFDQCKALTESIMTFEAEIVAHARHDETARRLATIPGIGPITASLIAATVGDISLFASARHFAAWLGLVPRQHSTGGKTRLGRITKTGNREIRKLLVLGATSMIYRAQQWNSAAGMWIRGVLERRPARLASVALANKMARIAWALMTRKEVYQAKGRAQAATETAA

SEQ ID NO: 415601 - protein, 346 aa, unidentified
MEIVGCDFHPSFQQVAILDVSTGEVRELKLLHAGGDAERFYRELEGPVLIGMESTGNTLWFERLMEQLGHELWIGDAAQIRASYVRRQKTDKRDAAHILQLLIDKRFPRIWVPSQLERDQRQLLLHRQRLVQMRTKVKTELQHLALNQGLQRKYHLWSARGRADLEKLPLERWTARRRADLLKVLDMLEAQVTDLDEAVGQVALANAGARLLMTQPGVGPVTALAFVVTIGDVRRFKRGKQVASYLGLIPSERSSGGKQRLGAISKQGNVFLRTMLVEAAQSAVRHDEQFKKEYAHRCHSKPKGVAKVAAARKLAVRLYWMLRTQTPYSKAVRNEGSPSHSLVRQS

SEQ ID NO: 415602 - protein, 464 aa, unidentified
MDPGRLDGPHLRVGAATLWSLLVSFLSIKASLPAALVEEAIMEVIHQCVAGLDVHKDSVVACVRIVSEGKTKRECRTFDTTTAGLESLRDWLTSWECKLVAMEATGVYWMPVWKILDEGAFTLIVVNARHIKAVPGRKTDMNDAMWIADLAAFGLIRGSFVPDEEFHELRTLMRTRKQLVREQTSHVQRIQKTLTEANIRLDSVISDIMGVNGRRMIEAMIAGVRDPRQLAALGDRRLKATPKELYDALHGRLTEHHRFLLKLHMAQHDAQESAIRVIDAEVEKRVARLDKQAKAAETPFSRLIELLVSIPGVSQLSATTILSEIGRDMSRFPTAGHLVAWSGLCPGQNESAGKRKRCRLRKGAPWLKTMLVQCAWAAKRKKDSYYRAQFFRLQARRGPQKAICAVAASILTAIYHILKDGVPHQDLGVDYFDKRKPEAKVKRLVAQIAKLGFEATLQPIAKAA

SEQ ID NO: 415603 - protein, 360 aa, unidentified
MTVDKYVALDVDSANIVIGVYDRKGHQIMRGCIRTNGNDIRQFFKGLSGNVHVVFEEGTQAAWLYDLIRPLVAAVTVCDPRENKLLKSGNKSDDIDVDKLARLLRLGDLQAVYHGEETIQGLKHLVSAYENLVSDAIRAMNRLKAMFRGRGIGSRGTKVFSNEGRDEWLTKLNIEGLRVRAGYLYKQIDCLMKLRMEARKAMCGEATRHSAYKVISGVPGIGPVRTAQIIATVGTPHRFRTKRQLWPYCGLAVVTRSSADYEWIGEQIRKRKRPPQTRGLNKNYNRRLKQVFKGAALNAIRTNEHFKQYYQRLIDKGIRPEMAQLTVARKLSAITLAVWKKGEKFDPEKLNQAAQSTGNQ

SEQ ID NO: 415604 - protein, 342 aa, unidentified
MPQVAIIGVDLAKRVFQLHGAAADGSVLFRKKLTRERFLSFLASQPLCVVAMEACATAHGWGREIERVGHMVRLIPPIYVKPFVKRQKNDAADAEAIVEAASRPTMRFVAVKSEAQQARAMLFRTRDLLVRQRTQLINALRGHLAEHGVVAARGPAHVKRLADAIANDDSCLPIAVRELGELLLEQIAALNEKTRDLDKRLRDAAGREGATKRLQTMPGVGPVTAVAVETFAPPMEVFRRGRDFAAWLGLVPIQRSTGGKPRLGKTSKMGQRDIRRLLITGAMSVVQAAGRSAPPENSWLAHMLGRKPRMLVALALANKMARGIWAMLTKGENYLDPVTTGA

SEQ ID NO: 415605 - protein, 392 aa, unidentified
MRYVGIDIASEKHFVAVVDDGSEVLLKSTPVGEDEAGYWKLFQLLGESSETLVAMEATGHYWKNLYAALAARGFAVALLNPVRTRRFAEEDLQRTKTDAIDALGIARFAAQKHPPASRMPDSATEELRELVRHRDRLVQEFGDKTRQLHRLVDLGFPEFKRYVRQLDSALATAILADYPTAQAFAQARPRGLANLKYDGHHLVGLELATTLIEAAKHSVGAHHGYAYRLQVKHACQDLDLLRQRLRDIERDIEAKLDEHEIGSLLTTIDGIGPTTAAKLIAELGNPADFTSPAALAAYVGVVPATRQSGKSLRVRAGISPMGHAELRHALWMPVLTAVRRNPWLRQHYRRLRANGKPAKVALIAAMRKLLHAIYAVSRDRKPFSPRLAGAPA

SEQ ID NO: 415606 - protein, 428 aa, unidentified
MRGLGLDVHRDFCEVAIAERGRVRSAGRVQSRVDALELFAQSLAPDDVVALEATAGSDRIVSVLQRHGIRVVVANTRKLKSISEARAKTDRLDARTLARLLVSGLLDEVWTPDERTRALRRLTNRRERVVRARTRAKNEAHGVLARNLCERSPVTDAFGKAGRRWLAGLELPVDERLTLDGCLRQVDFLDVEVEALDREIAKQALAWPEVLRLMTVPGVNVQTAATFMASIGEVGRFSSPRKLVSYLGLDPRVRQSGNGPARHGRVSKAGASETRHMLGEVAWKVMQTPGPLRAFFERVRARRGEQIAATATARKLAVLFWQLLTREEDYAFQRPAMTRNKIRRLELLAGAPPQKGRKGVAGAKSKKVFEAERELSRQAEAAYRRMVDDWQASGPKRTGAGATPGRASQRPSKRQAARQTSKPQQPAL

SEQ ID NO: 415607 - protein, 425 aa, unidentified
MSDDVMIAVDPHKASNTAAVLDPVTKAVIETARFAHTEEGYAQLTGFAVRWSQRRWAVEGCHGAGRSLAQRLVADGELVLDVPAKLAARVRVYSRGHGRKTDKDDAVSVGLAALDGTGVTAVARDDATVSLRLLCDRREELGALRTQAVCRLHRLLAELTPGGMRRELTANKAQALLARIRPADDVAAIRVHVARDHLADIRALDARMKYIGAQIAALVAASGTGLTGLFGIGPVIAGRILAEVGDVARFPTKDAFASYNGTAPIDASSGEQIRHRLSRAGNRRINHALHMMAVTQIRYPATPGRRYYERKRREGKTPKEALRCLKRRLSDLVYYQLLADRRGTIGRCGSPTTRPPTRSTSTSPVTRSRRAAPPPRPAPRPASKGSSRSTGKTAGSSASRSSTPAPASATTSSTKPKPTTKQRPS

SEQ ID NO: 415608 - protein, 347 aa, unidentified
MLHAGLDLSRKKLDVCLLSDRGEHLDQLAVPPDVDSLRRLACRIEEVHCQQVCAVIESMTGARIVHDTLEQQGWSVEIADAQKVKGLAPLACKTDKIDSKVLAVLSHRDLVPAIWLPDPSVREERELARFRLHLVKHKSALKNRIHSTLINFGKPCPVTDLFGLEGRRLLKRLQVPEPWRGNITASIELIDDLERQIAEINRRLKEGHAEHPYVPLLLTVPGIGWVLAFTIAAEIGEIERFSTPEKLTGYTGLCPRVNQSGEKDRRGPLTKHGPTYLRWALLEATMHALRHPAYSERYQRTKRRLGKQRGAKVAQVDLARRLAHAIWHMLSRKEKFAPRGAAFRLAA

SEQ ID NO: 415609 - protein, 415 aa, unidentified
MNNTISDIDIDLTAVCEAEDDAAQAEAQPAQNESDDTYAQKMQEQLALARSSANCRYIGIDLHSNNIWLSVIVNEQRPSGSVGKVIFSRSIGTQRVDGTLPEDLIKPVIERFCKDQPHIACVEATYNWYWLADLFERNGWNLVLADPSTVSEAKTKAADDRKDAEYLADRLRYNALRYAVIMPKQLREIRDLVRTRGTAVKQRAREKIIVINKLTNLIGRKITGKELRELIKEHAEFGTEAPMLLNWGLTEEVRCILNYHLAMATNIDQEIQKLEEHINAVGKNLRYTKELQKMPGCGPVISSILASEIGSIRRFATAANFVSYCRLASTSKLSNGKSKGLGNAKNGNAYLSWAFTELATLMVRYSEAAKRHFEKLMRKYGQLRVKAIRVLAAKLARSVYQCLSKNEPFDVLRCF

SEQ ID NO: 415610 - protein, 340 aa, unidentified
MSEITTVGLDLAKNVFQVHGVDAEGSTVLRKQLRRAQVLAFFSGLPRCLVGMEACATAHYWARELRALGHEVRLMPAQYVKAYIKRNKNDAADAEAICEAVVRPTMRFVPAKTAEQQAALLLHRGRERLVRQRTGLVNALRGHLAEFGVIAPQGLRNVGKLIAVVRDVGDARLPDLARQVLEVLAAQIEQLEGAVAAVEKQLMAWHKSNPVSQRLATIPGIGPIIASAIAASVAEPGGFRSGREFAAWLGLVPRQNSTGGKHRLGGISKRGNQYLRRLLINGASANLLRSKATKADPWVIGLRRRRPSLVVAVALANKTARIAWAVMQRNENYQRMAAAA

SEQ ID NO: 415611 - protein, 355 aa, unidentified
MNKIKTNFAGQTIYVGMDVHKASWNLGIHLNDQFVKNVHQKPDPVTMASYLKQQYPNARYQAAYEAGKFGFWIQRQLTQLGIECLVINPADIPKSQKDTLQKTDPRDARNISLRLQSGVLHGIHIPDEQQEADRVFFRHRKRIWKDLTRCKNRIKGLLAFSGIDIPEQYDNASWSHNFINWLKALDCKQISRRAALNYMIVQLEFLRKELLSISNAIRKMMREQRYKTNYYLLRTIPGIGPLTAASILVEIGDVKRFETFYHLNSFVGLLPMEHSSGQNENKGILTVRKHRQLRSDLVESAWTAKRTDPAMALYFNEQLKRKDSKIVIIKIARKLLNRIRYVLINQQPYEYGVIK

SEQ ID NO: 415612 - protein, 407 aa, unidentified
MIFVGVDWAEAHHDVCVQDEAGKRLGGGRLPEGVDGIARFHDLVARHVGEPGEVVVGIETDRGLFVAALVAAGYEVFAVNPMSTSRYRDRHSTSGAKSDPGDAKVLADMVRTDRHNHRRVATDSEAVQAVKILARAHQSMIWSRVRQTNGLRSTLREFYPAALGAFDDLSCADALEVLRVAPTPELGRALSRSKIAAALRRGGRQRRIDARAAEIQAALRTDQLAVSAAVSTAMGASVAASVAVIATMVDQIAGLATELAAGFEQHPDAEVVRSLPGLGTVLGARVLGEFGDEPNRYANAKSRKNYAGTSPITRASGTKRVVLARYARNHRLADAIDLWAFAALSASPGARTFYDTRRGAGYTHHAALRALGNRLVGILHGCLERHSAYDETIAWGHRSAPKVSEAA

SEQ ID NO: 415613 - protein, 391 aa, unidentified
MSMYFIGIDISKYKHDCCIISAANQKVVSKVIIKNNKAGFNELLTIIHSLANPADIRIGFESTAHYALNLELFLENANHSFMEINPVLIKDFKKSQTLRRTKTDSIDCELIARWLMTVEYKPHSKGFYHAYSLKSLTRLRDRLVRQRSFYLVKITNVLDHTFPEFKPFFHERLSKTALYLLENYGSAEKIARMNSASYEKLRSISRGKFSPQQFIRLKELAANTVGVNNSIFDVELNSLLTLYKSLVDEIKTLESEINRLVDEVHPHYMSIPGIGPISAAIIYAEYGDISNFSSPNQMLAFAGIEPSVHESGTEAYNGKMVKHGSSQLRYVLINCCLPLIRFDVTFATYYARKRSENKPHRVAITHVAKKLVRVIYALERQDVDFNAQKLR

SEQ ID NO: 415614 - protein, 345 aa, unidentified
MKITTIGIDLAKLLLQVHGVDEHGKVVLRKQLKRKDVLSFFANREPCLIGMEACGSAHYWARKLAELGHTVRLMAPQFVKPYVKTNKSDRNDAEAICEAVGRPNMRLVPVKTAPMQAVLAVHRARQGFVKARTAQANQIRGLLAEFGLVMAKGIVHIGKRLPEILEDGENGLPGMMRELLQRLGENLKEMDQQVGELERQIKLWHRDNESSRKLEAIAGIGPLTASAFVATVGDAKNFKNARQVPAWLGMVPRHEGTGGKAKLGAISKRGDVYLRTLLIHGARAVITHIERKPDHTDEWLKKLLARRNKNVAAVALAAKNARIAWALLAHERGYQHDYVATRKAA

SEQ ID NO: 415615 - protein, 365 aa, unidentified
MVWTLLLKRRGDILAVITLHQQEGFMNTITTIGLDLAKRVFQVHGLDQDGEPVLRKQVRRGQVLKFFATVSPCLVGMEACGSAHHWARELQAQGHDVRLIPPQYVRPFLKTNKHDAADAEAIAEALVRPSMRFVPIKSTAQQAVLMLHRSRELLVKQRTMFINAIRGHCSELGMVASQGASRVKDLITIIEDPEDPRLPAVAREALSVLIAQLAVVKEAIRTLESKLQAWHRSQQASQRLTTIPGVGVITATALVATIGDGTQFKSGRHLSAWLGLVPRQHSSGGKSRLGRISKRGDGYLRRLLVHGARAVLRWQKGAPKQPSPWIGELLTRRPTNVVLVAMANKTARTVWAMMRDQQVFAAVVR

SEQ ID NO: 415616 - protein, 340 aa, unidentified
MEKVSIVGLDLAKNTIQVHGAAADGSVIFRRKVSNGKLLEFLSGINPCTVAMEACAGSHYWGREIGRLGHHVRLIAPIYVKPFVKRQKNDAADAEAICEAALRPTMRFVAVKSEAKQASATLFKVRDLLVRQKTQIINVLRGLLAEFGVVVAQGPAHMGILIEYVEDPCSNLPEAARAPCLALVATLRSLVGEVRELDRKIARRSRQDDVAKRLMTIPGVGPIIATALEALAPPAETFSRGRDFSAWMGLTPRQHSTGGKAKLGKTSKMGKRDLRRLLIIGASAVVRWASKHGAAEGSWLSRMIGRKPPMLITVALANRMARIAWALMTNGSRYEATRAA

SEQ ID NO: 415617 - protein, 338 aa, unidentified
MKIATVGLDIAKHVFQVHAADLEGRLVLRRRLQRNRVAEYFANLPPCLVGLEACCGSHYWSRVLSRFGHTVKLIAPQFVKPYVKSNKNDANDAEAICEAVSRPQMRFVPAKSVEQQDIQSLHRVRSRLVSSRTQLASQVRGLLAEYGIVLPPGISQLRRGLPLILEDAENELTDFSRRLFASLYGELVQLDEKIAALDEQVRTVYRASEPCQRVAAVEGIGPLIATALIAAISDGKSFKNGRQFAAWLGLVPRQHSTGGKARLFGISKRGDPYLRTLLIHGARSVVYRASHKTDPRSLWIADKQRRLGTSKACVALANKNARIVWSLIARGESYRRAA

SEQ ID NO: 415618 - protein, 434 aa, unidentified
MDRVVIGVDPHKKSVTFEARDTSEILRGTGSFPTDASGYRLLMRYAAQWPDRVWAVEGANGIGRPLAQRLLAAGERVLDVPAKLAARARVFDTGQGRKTDPADAHAIVMVALRDKGLREVRDDPELTVLRLLCDRRDELSRARAQALNRMHRLFLELVPGGAPVKKSASQYKCLLAGVRPRDQAGKMRRRMAAEELADIDRIDARLKAMKAELKAAVLATGSTLMDVHGVGPAGAARILADVGDVARFPDRGHFASWTGTAPIDASSGQHIRHRLSRAGNRRMNHVLYMAGLVQLRNDTPGRRYYRRRLADGKTPMEAMRCLRRRLSDVVYRQLAHDAAVRALREAGPGGHSGASVSSSAADLTPDIGSSDKPLPGPAQPTLPPTAAATNPSGPGAGATTRQRARGVNVERPAGRTTLTPTSAAAPLQASRTAT

SEQ ID NO: 415619 - protein, 346 aa, unidentified
MTIVEDACAITGGVDTHADVHVAAALDSTGGLLGVCEFPATAAGYSGLLDWLGGFGQVALAGIEGTGSYGAGLARHLAAAGIRVVEVDRADRQDRHRQGKSDPLDAVSAARAAQSGRAAGAPEGRDGAVEAIRALMVAKRSARHERTQAISQARALIVTGPEELRARFARHSPAQLVAALAALRPRPGDVTGYATRVALRELGRRARFLDAQIGQLDELIVPLVTARAPGLLALHGVGADTAARLLIAAGDHPARLRSEAAWAHLCGAAPIPASSGKVTRWRLNRGGNRDANHALWRIVICRMSSHPATRSYVARRSKEGLSKKEIIRCLKRYVAREVYPYLRPAR

SEQ ID NO: 415620 - protein, 337 aa, unidentified
METKLFMGCDIAQDTFAFCLRDHSKVVCQGEVSNSKKAIQAWLKELKQIYHVDLSSVIFCLEHTGIYGMILMRTLYTRSLIVCVEGASNIKLSLGLQRGKNDRVDARRIAEYAMRYTDRLKQWKPKREVLERLQLLNGMRSRLVKALKVLNSHTKEAGRFLGKNEYMLLKKGTQDSINAIESNIKKADKSIEALIKSDENLKRLSDLVTSVASIGMVTCAAILVKTNEFQDFREAKKFACTSGLAPFEHTSGKSVRGKTRVSHRAHKDLKTLLHMCALGAISRKGELQDFYQRKVGQGKNKMSVINAVRNKLIHRVFAVVRDGVMYQKNYQYNLVMS

SEQ ID NO: 415621 - protein, 390 aa, unidentified
MEARTVNNLPPAAADDDAVRCSFAIEMSKKSWIVAVNTPLADKISRYRLQPCDWRGLLELMARIRRRVAKELNRRVEIVSCYEAGYDGFWLHRLLEAHGVRNYVIDSASVQVDRRARRNKTDGIDAGQMLRSLMAHLRGEPKVLSVVRVPSIAEEDDRRLHRERHRLINERIQHVNRIKGLCALHGIYHYEPMRPLRMRALEHLRTPDGRRLPPRVKAEIIRELQRLELVLKMLDAVEAERDAIASDKNTLAHRNAKKIQDLVKLKCLGPEFASVLVGEVFYRSFANRRQLGSYVGLTPSHFQSGPMCHDQGISKAGNAKARSTMIELAWLWSRHQLKSQLSVWFHRRVGGLKGRIRRITIVALARKLLIALWRYLETGVVPAGAALKKV

SEQ ID NO: 415622 - protein, 338 aa, unidentified
MSIVTAGIDLAKNVFAVHGVNETGRAGLVRPAVPREKLHELIASLPPCVVGMEACSGAHHWARLFQAAGHTARLIAPKFVTPYRMSGRRSKNNAADAAAICEAVQRPHMRFVPIKTLDQQSHLMVHRARQGFVEQRTATLNRIRGLLAEFGIVLPLKAATVRKRAGECLEELPGWANTVIGDLLSEVGRLDERIAQYDLRLRHIARQDSRAQRLTRLSGVGDTTATCLVAMIGNGHDFECGRQFAAWLGLVPGQYSSGGKARLGRITKAGDPYLRSLLVMGARAVLAAAKNKTDTLSRWAMALQQRRGYWKAVVAIAAKNARMAWAVLRRGEAFVLPA

SEQ ID NO: 415623 - protein, 370 aa, unidentified
MNDNTIYVGLDVHKSTISVAVAEDGRGGEVRHYGVVENRADLLVKLVERLGRRGQRLHFCYEAGPCGYGLYRLLSGLGQDCTVVAPSLIPKKAGERVKTNRRDAAMLARLHRAGELTAVWVPDAAHEAMRDLVRARATAARVLGKARQHLTGFLLRHGQIYAGQRAWTVAHRRWLTTVRFAHPAQQIVLQDYIHAVEDAETRIVRLSEQIEQLFGHWSMAPVVTAIQAMRGVAFINAITIIAEIGDFARFTNPRQLMAYVGLVPSERSTGESVRRGGITKAGNNQARRALIEGAWSYRMQARVSRKLHDRIVGLPKDIRDIAWKAQVRLCARYRRLVATGKKTVVATTAIAREMLGFIWAIARQVQPQSS

SEQ ID NO: 415624 - protein, 367 aa, unidentified
MAKRSTTVGLDVQKETIDVVVAEPGAQGEVRHFGTIGGDLRAVDRMVKQLQGGGRRLQFVYEAGPCGFHLYRHLQAQGLECTVVSPSMTPKRSGDRIKTDRRDAEALARLHRAGELRGIYIPGPDDEAFRDLVRAREDAVTSQSRARHRLKALLLRHGYRYEGRAAWTFRYRQWLSNLKFATAAQQMAFQEYIDTIGEAERRVERLTEQIRVLLPEWKRAPVAAALQALRGVSMVTAVTLVAEIGDITRFSNPRELMAYLGLVPMEYSSGPKTRRGAITKAGNGHVRRVLAEAAWAYRGQARVGQALMWRQNGLPRPIIDIAWKAQLRLTGRFRRLAARGKSLPKVATAVARELTGFVWDIARHAAA

SEQ ID NO: 415625 - protein, 369 aa, unidentified
MKDAREGFVALDVAKLKNAVAIAEGGRAGEVRYLGEIASTEAATRKLVAKLSEKYERLTFCYEAGPTGYGLYRLIRLLGHDCVLVAPSLIPTRPGDRVKTNRRDAEIMAKLLRADELTAVWVPDERHEAMRELTRARDVSQKDLRVKRQQISGFLLRIGDHYPGKKTWGKAHLNWLSSRKLDHVEQRFAFEELLLGMRQASERSGRIEQAIRDALPDWSLASSVEALQALRGIGLITAVGFLAETGDLSRFDHPRRLMAWLGLVPSESSTGDRVRRGAITKAGNTRARRFLIESAWSYRFPARVSKEKLVQVEAAPGPVREIAWKAQTRLCGRFRTLTRKGKRTTVVATAIARELSAFIWAINQEVMNR

SEQ ID NO: 415626 - protein, 360 aa, unidentified
MNLYQTKTKFNCGIDLHGRNMYACVMNIEGKVLIHNNIKRNDFDYFLRIVDPYRSDLTVACESTFNWYWLADACEANDINFVLGHALYMKAIHGTKTKNDKIDSKKIAHLLRSNMLPEAYCCSPEKRAIRDLLRRRIYFVRQRAQLLGHISSSVQVYGQTPLTVKEKRKSDRKESINARFSDATIKYTMSVDADLSDYYDKIIKNVEKAILSKTKLMFSSTFNLLRTAPGIGEIIALIILYETDKISRFPTSRDFCSYSMLTPSDATSNNKKVGSQGRKIGNHYLKWAFSQATVLGKGRSIPLKKYADKLTLKYGKRKANAIYAHRLGIAIYYMLKTRTVFDIDIFLKGKINIKHLREVS

SEQ ID NO: 415627 - protein, 423 aa, unidentified
MNTDWNQHSHFAALDWASDHHDVIVLDRTGAVVAEFRFAHSAAGWAEFTDQMKPFASVPLTLETSSGPAVDQLLQRGFTVYPLAPGAAAGYRARKVPSGTKTDRHDTWAMADALRTDGHAWRVLRPQDEATATLRALCRDEIGLIEQRTLLVNQLRAALREYYPAALEAFADWAVPAPWAFLQQFPTPVALQTAGKRKWEKFLHTHKLWRRQTRDERLGVFAAANALPASAAVVSAKSLLAVSLARVLVTLQHQIDEYRRRIVEAFQAHPDHDIFGGLPGARDVLAPRLLAELGSVREEYPDADALMCQSGVSPVSYQSGQVERCRLRRACVKMLRFTVHLWANASRKRCAWAQAYYEQKRAEGHSHASALRCLGKRWLKILWRLWQSRERYDESKHLRSLERRAAKVWERIKPAARPVTQTV

SEQ ID NO: 415628 - protein, 342 aa, unidentified
MLIIGCDYHPGMQQIAWFDEESGECGELRLEHSTGEAERFYRERKRRGVQVRVGIEASGHARWFERLLAELEMELWIGNPAKIAAQRVRKQKTDRGDAQLLLQLLREDRFPRVWVPSPENRDLRQLLWHRHRLVQMRTRVKNQLHAMALNEGVQRRSRLWSKQGRAQLESFALDRWTARRRHDLLELFDQLTPQIAELSQAIEQEAERRPEVQRLMTHPGVGPITALAFVLVLGTPDRFRCGKQVGSYLGLIPCEDSSAGKQRLGHLSKQGNTLLRYLLVEAAQAAVRCDAQWRRCFVHLAMRRQRNVAIAAMARKLAVSLYWLWRNAEDPPAAPQSGSHVG

SEQ ID NO: 415629 - protein, 335 aa, unidentified
MSKLIIGLDIAKEDFKACIQSQLPNGEIKIKGSRTFKNTSTGYTELLEWTEKRIKPYHDSILFVMEATGVYYEDLAYYLFDKNHKVSVLLPNKVKHFTKSLNIVSKTDKIDARIIAQIGIERKLKYWEPMCPQYKELKSLNRKRLSLDKEKKRAKNQLHAMNHAHKTSESVIEVTKKQIEFYLHQIQVLEEQIEGVIMSNPELDEKINKVATLKGVGRSTIITILCETNGFGMVRNIRQLVSYAGLDIVFNDSGQFKGKTRISKRGNSRIRECLYMPALSAKQHNAKIKNLNDRVVAKNPKIKQKGTVACMRKLLVLVYTLWNKNEAYDSTYEAA

SEQ ID NO: 415630 - protein, 351 aa, unidentified
MKVTTIGIDLAKSVFQIHGIDERGNVVLRRQLRRAQMVLFFSKLETCLIGLEACGSSHYWARKLAALGHTVRLMAPQFVKPYRKNDKNDGNDAAAVCEAVGRPSMRFVPVKSPEQQAELSVHRVRQRLMRQRTALINQLRGLLAEYGLVLAQGATHVRSQLPALLENSSDSLPPLALELFQDLYEELCQLEQRLADYDRRVERLYRGNPLCQKLGELDGIGALTATAFVATVAHAAQFHNGRQCAAWLGLTPKQDSSGGKTRLLGISKRGDVYLRTLLVHGARSIMRHTPKRDDPKSRWVEQLRKRRGENIAAVALAAKHARILWALMVRSEPSAQLIAAHSIEPPAQPNL

SEQ ID NO: 415631 - protein, 338 aa, unidentified
MAIIATGIDLAKNVFAVHGVNVAGTVQLRQPKVGRAKLGALIAALPPTVIGMEACSGAHYWARQFQAHGHTVRLMAPKLVTPYRMTGKRGKNDAADAAAICEALQRPNMRFVPIKTEDQQARLMVHRARQGFVTERTACVNRIRGLLSEFGIVLPLKAEVVRREARNHLEDLPGFANLVIGDLLSEVAHLDERVKQYDVHIRTMARDCTAAQQLMQLMGVGETTATAIVAMVGNASEFKCGRQFAAWVGLVPGQYSSGGKARLGRITKAGDPYLRSLLVMGARSVLNAAKGKTDSLSRWAVAVEARRGYWKAVVAIAAKNARMCWAVLSRGESFKLPA

SEQ ID NO: 415632 - protein, 343 aa, unidentified
MQTVTTIGLDIAKSVFQVHGIDAAGQVVIRRQLKRRYVLAFFQKLPPCLIGIEACASSHHWSRELQALGHTVRLMPPAYVKPYVKRQKNDATDAEAICEAVTRANMRFVVTKTPEQQSGLVLHRARHLFIRQQTAVINAIRAHLAEFGIIAPVGRHGVEELLNVVADPNDKRVPEIARACLLAFGAQLRRLKEQILEFDRMIRAWHRSSETSRRLDDCPGVGPVLATALVATVADPKSFRSGRNFSAWIGLVPKQHSSGGKNRLGSISKQGDRYLRGLFVAGALAVIRYAKIHGTKHRPWLTALLARRPTKVAAIALANKIARMAWAMMAKGERYKEPIALAA

SEQ ID NO: 415633 - protein, 400 aa, unidentified
MLSIGIDVSKGKSTVCGMKPGGEIVYTPFEVQHTREGMSELVSLLRSSGEEVRAVLESTGSYHCPVVAALLENGIFVSVVNSLRMKRFCSQSIRKVKTDRIDAMQIALYGLAYWQELQPTRLPEDTYRELQLLARQYYQMTSMLIKAKVDFNAICDQVLPGMQELMSDHAGRHKLSDFVLRYRHTTHILEMGETRFRKDYCKWAEKKGYRNCERMAALIFATAQNGIPVLPNAPSTQIVITEAIRVLHTVEASRDAILTQMQALAKTLPEYSLVREMPCIGDTLAPRLIAEIGDVRRFHSKRALIAYAGIDAPPYQSGKFCANNRHISKRGNRYLRKTGYEVMQSYVMHKPANDPIFTFIEKKRGEGKSGKLAMVAGLNKFLRVYYGKVTELYRSLPAIE

SEQ ID NO: 415634 - protein, 343 aa, unidentified
MQVVRIGLDLAKYVFEVHGVDAHGNVVLRKTLRRGSVATFFANLPSCLVGMEASNGAHYWARVLTDLGHQVRLISPQFVAPYVKSNKNDRNDAEAICEAVGRPTMRFVLPKSPEQLAIQALHRIRQRLVRSRTRLVNQIRGILSEHGIVIARDIWRLRRALAEITGNSTDDLNALVRVLVMEVQTELIGLDGRIESCDRRIRELHRNSELCQRLGDIEGIGPVTATALVAAVGDRCCFKNGRQFAAWLGLVPKQRSTGGRTRLSGISKRGDRYLRTLMIHGARAALGKAGGKQDPRSRWLASLRQRRHPNVTAVALANKNARIAWAMLAGNLSYEPARSVQAA

SEQ ID NO: 415635 - protein, 361 aa, unidentified
MFATCDRKTTLFVGVDVHRDTHTAVGLSPFGERLFELTVGNYEKDFRLLTEKVGEVSRSTMLSPFYGLEDCQSYGERLSAHLVSEGLLVVSVPPVLVDERRKHETHPEKSDSLDALGVAKVMIQRIDTLPMFRISETSRKAKQIKELSQDREFLVSERTRLKNQLHTLLHRIWNSEYRTKFKDPFSKKALVFWGRHVPKGCDPFLVRSMKRKVRRLEDIREEVNEMEVELETLLADCGSTLATASGLGTVIAAEIVGEISDVHRFHSPAALAKYAGCSPRECSSGKTTRYRKTRSGNRRLNRAFHRMALSQISRLGNDKARAYFKRKVSEGKSKSQALVCLRRQMVNIVWMMMKHQTEYRP

SEQ ID NO: 415636 - protein, 317 aa, unidentified
MEHPAQPVVVVGIDVSKDRLDVALHPSGEVFAVARDAAGLDELVARLTPLAPIAVALEATGGFETVVAASLGAVGLPVVVVNPAQVRSFARALGQRAKTDPIDALVIAQFTVATRPAIRPLPDEATQRLADLVARRRQIIAMMVAERQRLKRFPQRRLQKSIARLLDALQRELSEIDRAIDGEVRGSPAWRETEDLLASVPGVGPTIARTLIAEMPELGRLDRRQIAALAGLAPWTRQSGQWKGRSFIGGGRAAVRAALHMGAVTAARHNPALKAFHDRLLAAGKPKMVALVAVARKLLTMLNAILRDKQPWHAQSA

SEQ ID NO: 415637 - protein, 353 aa, unidentified
METEYDGRQVVGMDLHRRRSVLVRMTEDGRWLGTARITNSPQELRREIARAGKSPRVVLEATFGWYWAADTLTAAGAEVHLAHPLGVKAFTYRRVKNDERDAADLADLLRMGRLPEAWIAPAEVRELREITRYRHKLVHLRTSCKDQVHGVLAKLGVPVTCTDIFGTAGSAWLDALGLPQPYAGKVTSLRQLTGELTTEITMLSEVIADLLRGDRGYQVIQQLPGIGPVLAAVITAEIGDVTRFQNAGQLCSWAGLTPRHRESDIKVTRGHVTKQGSRLLRWALIEAIQRVPRDSVAGAAKNAIIARRGREAKNIAKVAAARKLLTLVFYGLRDGQIRCLPRSAAGQPPARAA

SEQ ID NO: 415638 - protein, 343 aa, unidentified
MKLHVLGIDLGKTVFHLVGLDSTGKVVIRKRCSRRQLLAFTANLQVQLIGMESCSGSHFLGRALRNQGHEVRLMPAQYVKPYVQTNKSDYIDAEAIAEAVQRPRMRFVPIKTEEQLDLQALHRVRERWVMRRTAVVNQIRSLLLERGLTLPKGRRYVEQALPRILEDAELPLSGSFRLLLAQLKLELEQLSARIDQLDVAILQRAKEDDACQRLTAIPGVGPVTATAVIAAVGNGSAFGRGRDLAAWIGMVPGEHSSGGKQTLLGISKRGNSYLRRLFVQGARSVLQQRHRQAPALSSWLTQLLARKHQNVVIVALANKLVRMAWAVLCKGERYRAPVFAMSA

SEQ ID NO: 415639 - protein, 415 aa, unidentified
MEQVYERCAALDVHKAQVTVCVHVPDQAGERAELRAEFATMTGDLLGLRDWLKGLGVTHVAMEATGVYWKPVYYLLEDDFELLLVNAQHVKNVPGRKTDVQDAQWLCQLLEHGLLKSSFVPPQPQRELRDLTRYRKSLVWERGREANRLQKVLEDANIKLASVASRPLGASGKAMLRELCEGNNDPVALADLAKGKLRAKLPLLRQALEGRFRGHHALLVSHLLAHIEYLDQTIGELSEEIEERIRPFARERELLCTIPGVAERTAEVILAELGPDMSRFATHRHAASWAAVCPGHDESAGKRRSGKTRKGDSWLRVALIEAANSAAARTKDTYLRAQYLRIRRRRGHKKAIVAVAHSILVSAYHVLHEGVSYQELGGDYFLTREDRQRMTRRLVRQLERLGQSVTLEPMAAEAG

SEQ ID NO: 415640 - protein, 416 aa, unidentified
MTHELKIGVDVHRQQNVYSVLDSGVEEPIATFACDNNRPGTEEAAGRIAGIMGRGGYDRLGIAAESTGWYWFHLFLALSQNPLLNQWPVSLYAFNPRITANYKKSFSDLDKTDEIDAYVVGDRLRINRDLPAPFIYDPLAFPLRMLTRHRYHVVHELAREKSYCLSILYLKASEYTRQDRKPFTDPFGVTSKAVLQEFASLEEIAAVPFHDLVEFIDRKGKRRFADPSQNARRVQQVAQDSYPLPPELLDSVNLILGLSFQHIAHLERLQKRLDTAIAQRMAAIPHTLDSIPGIGPVFAAGIMAEIGNLQRFDYDQAKVANFAGFKWRKTQSADFVADESPMTRKGNRFLRYYFCEAANIVRMRDADYKAFYLRKFKEVRKHQHKRAIVLTARKLVRLVVRLLTSNQPYRPRRVSI

SEQ ID NO: 415641 - protein, 356 aa, unidentified
MPPIAPADVVVGVDTHKHVHAAIALSGLGVRLGTITVPASLEGYRELEAWACSFGTVHAFGIEGTGSYGAGLARALVERGHAVIEVNRPNRQLRHQQGKSDPLDAESAARAVLGGQATARPKSGTSTVEMIRHLKVARDTAVKSRTRAMITLKTLIVNAPAPLREQLDHLSSRMALIRHLAALRPGALTSTTASTKAALRALARRWLLLDAEIKEHDLALDALTDACAPGLKRAHGIATGTAAEMLILVGDNPERIPSEAAFAKLCGTCPVPVSSGKTTRHRLNRGGNRQANAALYRVVITRMRGHPPTLAYVAKRLAEGRTKREIVRCLKRYVAREIFGHLCGPGLRTQCRPEAA

SEQ ID NO: 415642 - protein, 370 aa, unidentified
MKKNSTRAQSPKRAAARSKGPITIGMDLGDKTSRYCVVGDHGEVVSEGSVATTRKAMGQKFAGMRRCRMAMEVGTHSPWLSRMLTGLGFEVIVANARQVQLISASSRKNDRLDARLLARLARVDPELLRPIRHRSEQAQADLMTIRIRAALVEARTSLVNAARGFAKALGERLPACDADAMDVEKLEALPPEMRERLRPLLEPVEALTDQIKKLETTIEQIARTQYPETKLLTQVHGVGTLIALTFVLTVEDRERFQKSRDVGCYVGLRPKQSESGESQPQLRITKEGDRYLRTLLVQGAHLILNRRGPDTDLKRWGLKLAERGGKNAKKRAIVAVARKLAVLLHRLWVGGEVYEPLRNPQPAAASKKAA

SEQ ID NO: 415643 - protein, 339 aa, unidentified
MNRIVVGVDIAKRVFQLHWVEPATGEIVALQLKREKFLEHFANRSNCLIGMEACGGSQHWARSLQKLGHEVKLLSGRMVKPFVVGNKNDAADARGIWMAVQQPGIKAVAVKSEAQQAVLALHRMREQLVKFRTAQINGLRGLLTEYGEVMPQGRAGIKRDIPGALGRLSDRLPGIVIETLREQYARLSELDEQIGQIERRLRHWLREDAATQRIAAIPGVGLLSATAAVATMGDAKAFKSGREFAAWLGLVPGQTGTGGRVRLLGISKRGDKYLRTLLIHGARAVLTNSKSPPEWITELAKRRPKNVAVVAMANKMARTIWALTAHERAYQSRYVSRPA

SEQ ID NO: 415644 - protein, 341 aa, unidentified
MDQFAGLDVSVKETSLCIVDDAGRIVREVRVASEPEALLAVLTSYQIKRIGLEAGPLSQWLFNALAEAGLPVICVETRHMRAVLKAQINKTDRNDARGIAQMMRAGLYRPVHVKTLRSQKLRMLLTHRKLLQSKAIAIENDLRATLRNFGLKVGVVGTVKFEARIKELVENLPDLAVLVEPLLLVRRVVREQIDVLHRRLLAIVRDDEVCKRLMTIPGVGPVVALTYRVTVDVPSRFRNARAVGAAFGLTPSKHQSGESNRTGGISRCGDEMMRAMLYEAAQILLVRSTRWSWLKAWAMKIARRRGVKKAIVALARRLAVIMHRIWMDGTEFRWTREAVAA

SEQ ID NO: 415645 - protein, 345 aa, unidentified
MLVIIGVDPHKASHTAVAICGDEREVAKVTVRATSRQTAKLLAWAEPFVERTWAIESAGGLGYLLAQQLVEAGEHVLDVPPTLASRVRVLGTGRSEKNDPNDALSVAVAALRSDSLRFVEIADHSEIMRLLAKRNHDLGRMRARLICRLHNALADLSPGGIAKELYVSDARALLVALEPATPIEHMRHELALELVDDVRRLDEQIKESHRRIRTAVRASKTSLIELFGVGPVVACAVIGYTGDVRRFANRDHFAAYAGVAPIEHSSGGRVAHRLSRRGNRKLNNAIHIAAISQIRQPHSDGRAYFDPKVAEGKTKREAVRSLKRQVSNALYRQLVLGAERGPGGH

SEQ ID NO: 415646 - protein, 344 aa, unidentified
MKVKTLGIDLAKETFGLHGVDALGRVVVHKRVTRKQLLDFLVKLEPCLVGMEACGSAHYWAREIEKLGHTVKLMSPQFVIPYRKGNKNDPNDAEAICEAVTRPSMRFVPIKNEEQQDLQALHRVREQLVKNRTALANQIRGLLRERGVVVAQAIARLRAALPVILEDQSNRLSGLMRELLGELAERLRMLDDRLRQYDQRIARICQQDERCRRLVKVEGVGPLVATAVVAAIGNARQFTNGRELSAWLGLVPREHSSGQRTVLLGISKRGNRYLRTLLIHGARAATRVVERKRDARSIWLSRLKLRGGPNVAAVALANKNARVMWALLARGDSYRVRTDTAAAA

SEQ ID NO: 415647 - protein, 342 aa, unidentified
MQITSIGIDLGKTTFHLVALDQRGKVVSKQKFSRKQLLAYSANLPNSLIGMEACAGAHFLGAALRDQGHDVRLIPAQFVKPFLKSNKNDFLDAEAIAEAVARQNMRFVPIKTDDQLDLQALHRVRDRLVHRRTAVINQIRGFLLERGITFAKGPAKLRQQMPAILENADENLTPRLRSLLDHLWQEWKGLNSDIERVSDEIDAIADQDAACRRLRQIPGVGPLVATATVAAIGNGAAFRKGREFAAWLGLIPRQHSTGGKAKLLGISKRGNVYLRRLFIHGARAMLLRVKYDTGRLGQWAHQLELRAPRNKVIVAVANKLARIAWAVLSTGNEYRNTAVTAA

SEQ ID NO: 415648 - protein, 411 aa, unidentified
MVKENFIYVGIDLHKETHTAVMIDCYNQKLGEITFPNRPADFPKLVTKVKKCNTDAKEVVYGLENAYGYGRPLAVWLIDKGYFVKDVNTAISHRQAKHRGAMYRKSDSDDAEAIALATLNMLDKLPDACPNDAYWSLGQLVHRRDNIMKQRTRLVNQLHEQLCIAYPSYKSFFNDISRPTALYFWEHYPSRKYLRGKSVEDLRKELVPVSHNRCSTKNCEKILDAAASDKVKNNAYQDARDMVTLSIVSDLQHYDSQLAEVDKMLEQMYKMLGCTLTTIPGVNVITAVKILAEIGDIKRFSNANKLAQFAGIAPLHLSSSGKGKDVATKQGNRRLQATIYFLAIQMVQVSSKGTPRNSVVRAYYEKRKAEGKTSQQALICISRRLISIIYGMLKHGTEYRMPVVESAGENR

SEQ ID NO: 415649 - protein, 423 aa, unidentified
MMTHTTEQSEQEFAAYIGIDWADTKHDICLQAAESSQREFAVLPHRPRDIDEWAGSLRRRFHGRRVAVCIETSRGALVYALQKYDFVVLFPINPATLAKYRQAFKPSRAKADPTDAQIALEILLGHRDKLKALQPQSPAVRELAMLLEERRQIVDDQRRIINRLISNLKHYYPLAHDWFEDKGTVLFCDFLTRWPTFKQLHQARRTTLEAFFRTHQCYHPKLIEERLATIRNAAPLTEDPAIIRPKQLLVEGLVEQLRATLKTIAHFDTEIARLAPTLPDYELFHALPGAGPTLAPRLLVAFGEQRDRYASAAELQMYAGIAPVTESSGKQHWVHWRMQCPTFLRQTFVEWAALTIPCSFWAKAYYRQQRARGCAHQAAIRALAFKWVRILYRCWLTRTPYDESTYLNALKRRGSPLLATLAA

SEQ ID NO: 415650 - protein, 374 aa, unidentified
METIYIGVDFHARQQTICYLKTETGELVTCELKHEDKDKVRAFYAQFRGQVIVGLEASGYSPWFERMLEELGCEVWLGHATEIRRRARWRQKNDRRDAELILDLMLHHEFPRLHRGAVQSREVLRMLRYRQKLIKMRTMSKNSLQALALQAGLARRSQLFTREGQQELTAALMSPAMQWQREHWLQLLQPLNQQVLESMGWLTAQSKGDVCVARLRTHPGIGLLTSLCLAHTLQPIGRFRNTRKVVAYAGFDPVERSSAERKRFLGISKAGPRLLRHLLVEAAHIAIRKDEDLKRFYQRLADRRGRPKAKVATARKLLIRAYIMLRDEIDYAEFRRRAVAARLARLPHGPQIPEVVIGQPASSERQEQLSRTRK

SEQ ID NO: 415651 - protein, 367 aa, unidentified
MEWMASAANRRVLRQDAEIIFCQERNPTMEVTTVGLDLGKDVFQAHGITADGTVVFNRTIRRRQLLKFFETLPSCLIGIEACGSAHHWARELTAIGHDVRLMPAAYVKPYVKRGKTDAVDAEAICEAVTRPTMRFVAVKSKEQQALLSIHRVRQLIVRQKTQMLNVIRGLLREFGHVIGNGPVAAMRFIKAFETDDCPDIPDVAKSMLKTLCDQVVALDDRVTFYNKLIEYHARIDERAKRIRTVPGVGPITASAIVATIGDGKQFKNGREFAAWLGLTPLNRSSGGKERLGRISKKGDRYLRRLLVIGMTSQVQRARGYPERVHPWIMQLLERKPVRLATVAMANKAARIIWAILTKDTYYRQAAA

SEQ ID NO: 415652 - protein, 338 aa, unidentified
MKTYAGIDLHSSNNYIGIIDEQDHRVYQKRLPNQLAHIKQALKPFKESMEGVVVESTYNWYWMVDGLKEDGYKLHLANPSAIKQYEGLKHTDDKWDSFWLAHMLRLNILPEGYIYPKEQRPVRDLLRRRLLFVKHRTSHILSLQSMITRNLGYKISGNDIKKLNESDADKLFNEPFLVLAAKNNISTIQFLGKIITDIEKPVKSHVKLKPEFEYLLTMPGIGDILGLTIMLEVGDISRFPTVGDYSSYCRCVKSERLSNSKKKGKGNSKNGNKYLSWAYVEAANFAIRHYPECQRFYQRKKATTNGIVAIKALSNKLARASYYVMRDQVAYDEKQLFR

SEQ ID NO: 415653 - protein, 427 aa, unidentified
MSYKIAGIDVHKRMLALVVSDVEVEGEYHFERRQFGSNPAQLRSLAEWLIGQQVEEVVMESTAQYWKPVWGVLERYWKPICLKRDGAGPMSGTLHLAQAQSNRARQGRKNDFADAERLVKRLVAHELVLSFVPDPEQRLWRTVTRTKYQLTRNRVQLQNRLEALLEEAHIKLSSLVSDLLGVSARRMLHALAEGETDPAVLATQADGRLRATPEQLCDSLGACQELNPTYRRLLKMALEDLHLIEKQIGQLDEEMAELLRPHQDQVQRLAEVPGLGVDSAQQIIAEVGVTAATFPSERELSSWVGACPGDNESAGVSHGHQSPKGNRQMRRILNQAGNAAVKYKGSIFQILYRRYVPRLGHNQTIGVIAHRLCRLVWKILNRGVRYEERGPSVSQRSRHQRAARMIRELRNLGYRVELPIPQRSIPA

SEQ ID NO: 415654 - protein, 390 aa, unidentified
MSYFVGIDIAKNKHDCFIATGDGEVVRNSFTFPNNDEGFRTLKATLDQLNHSQKIKIGLEATGHYGKNLKQFLTSIGYEYSELNPYLVKKFTQSITLRRTKTDKVDAQMIAKFIQLEASKPTTPPSYNTMELRTLVRNHDRLVRSRSDELVKITNSLDRIFPELKKFLNDRIGEWALYLLEHFTTPEKISRLTSGQIQKLHNVGRKVTVNRITMLKELAAKTIGHPSPADELVIKQSVKMVRAINDSIEAYRSRIEAIMKEVDSPLLSIPGIGMMTAACLHAEYGDLRRFSSPAKLLSFAGLECSKNQSGQSDRKGHMVKHGSAHLRYVLMNAAISVKNHCPAFSAYFQKKYSEEHKNYRVALNHVVRKFLRVAFKLVTLNESYSLELSK

SEQ ID NO: 415655 - protein, 411 aa, unidentified
MDKVYDKCCGIDLHKKLIVACFKQGNRQEIRDFGATTRELLEMADWLKEGGCEMVAMESTASYWKPLYNILETCGLKAMVVNAQHMKAVPGRKTDVKDAEWIADLLQHGLLTASYIPDKDQRELRELVRYRKSLVGERARELNRLQKMLEGANIKISGTIRDINGKSARNILEHLLSGKQIDSAEYDILYEKKVIAHNLKATKEQIIDDLNGVMSALQKKMMRILLNHLDELNAHIRELDDDIDNFMKPEEKEAAKVIQDIPGIGNTSAQAIISVIGADMSRFPTDAHIASWAGLCPGNNKSANKRKSGKTRKGNGLLRDTLIVCAHSAVKNKSSYFHAQFARISAHRGSKRAYVAVAHSMLVAIYHILKEGVVFKDLGADYYNQFNRERKINAYLKKLKALGWEVPVVAA

SEQ ID NO: 415656 - protein, 413 aa, unidentified
MDKIYDICCGIDVHKKLIVACLNHKRKKELREFGATTRELMELAEWLQKNKCEIVAMESTGSYWKPLYNIMESYGLHAIVVNPAHMKAVPGRKTDVKDAEWIAELLQHGLLQPSYIPSKDQRELRELVQYRKSLVGERTRELNRLQKMLEGANIKLSGTVTNINGKSARKILEYILSGNEIDEKKYDEMYEEKLIAHNLKASKEQILDDLKGFMSPLQRRMLKELLQHLDELNVHIENLNDEIDNFMKPEEKQASQVIQDVTGIGNTSAQTIIAVIGTDMERFPSDRHISSWAGLCPGDNVSAKKRKSGKIRKGNALLKSTLVLCAHAAVRHKSSYFHAQFKRISTHRGKKRAYVAVAHSILIAIYHILKDGVKYQDLGAEYYNQFNAERKIHAYLKKLKALGWEPPKEAVPA

SEQ ID NO: 415657 - protein, 351 aa, unidentified
MILIGVDFHPSVQQVAYVDTETGETCERRLNHSDGEAERFYCDLERRQVKVRVGIEATGHARWFERLLAELKFELWIGDAAKIRAAGVRKQKTDGQDALLLLKLLIEDRFPRIWVPTRENRDLRQLIWHRHRLVQMRTRAMNQLQATAMNEGVRRKKTLWSKAGRQQLESLKLAPWATRRRQDLLDLVDGLNGTIAELTAAIEQEAHKRPEVLRLMTHPGVGPITALAFVLVIESPDRFACGKKIGSYLGLIPEEDSSADRRRLGHITKQGNSLVRYLLTEAAQAAVRYDPDWRRRYIHLSKRRERAIAKVAMARRLAVSLYWMWRKGYDYQQHLKFGSYAGELEFGHGVK

SEQ ID NO: 415658 - protein, 418 aa, unidentified
MTKSFDSTFIQIIHPVCCGLDVHKDKISACLITLDNNGKEKYEIKEFSTFSKDLLKMKKWLIENDCPILAMESTGVYWHPIHNIIEGTMEVILVNARHIKNVPGRKTDISDSKWLAGLLRHGLLRGSFIPPENIREWRDLTRLRKTYTESFADYKRRIHKLFITANIKIDSVVSDLFGLTGRNLINLLCNESDLTLKNIEQCTKGSLKKKSLELYESLQGFFKEHHRFQLIGMMDTIIMFEQRVAEINARLELLTKEHQDLLDRLDEIPGIDKKSAQSIVSEVGITLDEFKTMSALVSWAGLCPGNNESAGKRKSGRNSVRNHPLKTILVQVAWAAIKTKGSYYKAKYYKLKARRGAKKAIVAIAHRIAKAIYKIIKHGDSYRDLGEDYLAAPSRQKVLMNLTKKAKEMGFKLVLCEV

SEQ ID NO: 415659 - protein, 483 aa, unidentified
MVNHKGKSSPHSKRSARPQKAKKVVVSDDLRIRHPHGAGIDVHSREHWVAVPASCAPVRPKDHPVHLPAHVRQFGTCTADLELLADWLTECGITTVAMESTGVYWVPLFELLERRGFEVILVDPRQTRQVSGRPKTDILDCQWIQRLHSYGLLAPSFRPSDEVCVLRGYLRQRQMLIGNAARSIQHMQKALEQMNIKLTEAVSDVTGVTGMLILKAILRGERDPKRLAKYRHENCKRTEEQIARALQGNWREEHLFALKQAVKAYEFERRQLKECDAAIENYLKTMEDKSGGEVLEPKPTKGKKTAATAPQFDARNLLFQVSGKDLTLIEGIEQSSALTILSEIGFDMSKWATEKHFTSWLGLCPQHRGSAGKIKNRRLRGGANRAARALRMAAQGCHHAKNAMGAFYRRVQARAGGAKALVATARKIAERVYRLLKYGENYVRQAMNDYENAYRIKLTKGLAKKAAELGYKLVPNAEAASTV

SEQ ID NO: 415660 - protein, 268 aa, unidentified
MLYVGLDVHKEFCQASVLDENGKELSNEKFLSTNDALDEFLDGFEDAKFVLESTGIWEFIYEGIERRGFQAVLAHPLKVRAIAEAKIKTDKVDARTLAHLLRADLVPCSYIPSKDIRDLRQLVRQRTFLVQRQTSFKNKVHAELTRRGIRRPEYLKAPFTNKSIEWMRSLKIVTIDVNLDCIQAIQKQIEGMNEKLYVEYLKRPEAQLISSFPGIGYYGALLIWAEIADIRRFPDPEHLCSYAGLTPTVSQSALTVHYGRSARKVRSI

SEQ ID NO: 415661 - protein, 317 aa, unidentified
MSKHNTVCAGIDTGKRKLDAALQGSERRLQVDNTPEGHVVLLKWLREHRVKRVGIEASGGYEQVVVATLRKCRIVVIVFQPAQVRAYAQFHLQRAKNDKIDAALIADCTAAAKKIHEAPDPRLAAFAQHLTLIEQLGEDMSRLKNRCETCRDPRLLAFWKSEIARLKKLEKAELKLLVKSIRQHKDLAERLDLIASVDTVGLPTAVSILVRMPEIGRISREEAAALAGLAPYDDDSGDHAGERHIDGGRERLRKAVYSAAFAGAFHWNPQLQAFYQRLIAKGKKHKVALIACARKLLIFVNTVVARGTPWTSSPATT

SEQ ID NO: 415662 - protein, 402 aa, unidentified
MNAVGIDVSKGKSMVAIMRPFGEIVSAPFEIKHTASDIHSLVELINSVEGESRIVMEHTGRYYEVLAHQLSEANLFVSAINPKLIKDFDNDSLRKVKSDKADAVKIARYALDKWQNLKQYNVMDELRNQLKTMNRQFGFYMKHKTAMKNNLIGILDQTYSGVNTYFDSPARSDGSQKWVDFASTYWHVDCVRKMSLNAFIDHYQNWCKRKKYNFSQSKAEEIYGKAKELVPVLPKDSITKLIIKQAVDQLNSASTTVESLRTLMNETASKLPEYPVVMAMKGVGTSLGPQLMAEIGDVSRFTHKSAITAFAGVDPGVNESGTYEQKSVPTSKRGSSDLRKTLFQVMDVLIKTHPQDDPVYQFLDKKRAQGKPYYVYMTAGANKFLRIYYGRVKEYLSSLPES

SEQ ID NO: 415663 - protein, 348 aa, unidentified
MGSIAPTGGDVIGGVDTHQDLHMAAVVDPDGTVLAVQPFSTTRAGYRAMLAWMRGFGELLRVGVESTGSYGAGLTRHLALSGVPVLEVTGPDRTQRRAKGKDDTLDAIEAARAAASGRRVAVAKDRTGAIEALRVLRTTRHTAIKVRRSALQLLHATVVAAPDEIREQLRSLTRMQLIRTCAALRPDQIAFRDPVVATKIALRSIARRILDVNDEIAELDRLIVPLVSELAPSLVATKGIGPEIAGCLLVTAGDNPERLRSEAGFAMLCGVAPIPASSGKTERHRLNRGGDRRANSALHMAAIYRMREDDRTKAYVARRLAEGLTKREIIRCLKRYIAREVYQLLIAA

SEQ ID NO: 415664 - protein, 342 aa, unidentified
MAIVAVGVDLAKNVFAVHGVDETGKVVLLKPRVKRADLLPLLKSLPRCLIGMEACSGGHYWARELIKHGHDARLIAAKLVAPYRDGGKLKKNDAADAAAICEAVQRKTMRFVPVKTEDQQGRLSVHRARQGFVEQRTATINRIRGLMSEVGIVMPLKADTVRKMAREHLEDLPGYLNQVINDQLDELAHLDDRVAKCDATVKEMARSNDRCKRLMQIGGIGEITSSAIEATVGNAHDFKNGRQFSAWLGLVPRQKGSGGKVHLGRITKAGDPYIRTLLIMGARAVLNAAEKKSDRLSRWALEVKARRGYGKALVAIAAKNARMAWAMLSKGLDYREAEQLEA

SEQ ID NO: 415665 - protein, 291 aa, unidentified
MSSIAHRGFVHLGMDVSKDSIAVAVLSPDRDTAEIDKIFHDAESVRRLIKRLGKPKEMWACYEAGPTGYDLQRLLSSMGVRCDVVAPSLIPKGSGDRVKTDRRDARRLAGLHRAGELTPIAIPTPAQEGVRDLCRTRGDMVQDLTRARNRLSGFLLRHSVVWRGGSKWTGRHRRWLATLSFDDPAIGATYSHYLSTVKLRDTQLESVETDLLPWCTTDPFGGQVARLAAYRGVTRIGALCLAAEVFDWRRFPKARPFMSFTGLVPGENSTGLTQRRGSITRAGRPSPGPAL

SEQ ID NO: 415666 - protein, 334 aa, unidentified
MHHKQRHIYVGIDLHKHHHTAVIINCWHERLGEIQFENKPAAFTDFFIKVRQLVPENMTLVFGLEDVGGYGRALATFLVDHGQMVKEVNPALSYAERNSYPMMQKSDSWDAECVARVLVNKLDFLPDAEPKDVYWSTKQLVTRRNALVKAQGALKNQLHVQLSHHYPSYKKFFAEVDGKTALAFWERYPSPSCLEGVRIDELTAFLQAVSHNTCSRKKAKEILELVKTDGTTTKQYQETRDFLVQSMVRDLRFKKQEMSLVEGELRKLMKLLDYQLETMPGIDVVTASALVAEIGDIQRFVMRELRLCILALEEKEKTTKANKAIERYMRYFIN

SEQ ID NO: 415667 - protein, 366 aa, unidentified
MKKLTTKGICRNGKLQDQQLTIGLDLGDRSSFYCVLNGAGEVIAEQKVSTTPDAMKKCFGKMARSRIALETGTHSPWVSRLLADLGHEVIVAHARNVRLIGESRRKDDRLDAQTLARLARIDPQLLSPIQHRSAQAQADLSVIRARHALVRARTALVCAARGLTKSFGERIRGYSAKGFKQATGEALSPQLQVALAPLLSALETINERIREYNVQIEKLAEQSYPEVALLKQIKGVGTLIALTYVLTLEDPKRFRKSRDAGCYVGLQPGRRNSGQSEPQLHITKEGDSYLRMVLVQGAQHILGPFGEDSDLRRWGLKLAERGGKNAKKRAIIAVARKLAVLLHHLWVSGEEYQPLHNGQKRTLAAA

SEQ ID NO: 415668 - protein, 414 aa, unidentified
MDIVHDRCCGLDIHKKTVVACLIAPGPDGKPKKEIRSFGTMTGDLLGLADWLQRAGCTHVAMESTGVYWKPIYNVLEDRFNLLLANTKHLKMVPGRKTDVKDCAWIAELLRVGLVQPSFVPERAERESRELTRYRSSLVRERTAEINRLQKTLEGANIKLASVASEVMGKSGRAMLEALVAGIADPTVLADLALGQLRRKIPELQRALVGRFGAHQCFLVVEQLAHIDELEQRIERVSQEIRERMRPFETEIALLDTIPGVNRWTAEVLLAEIGFDLSRFPSAGHLASWAGLCPGNRESAGKRKSGRTRKGSPWLRVALTESAHATGRGKTYLAAQLHRLIPRIGLKKAAIAVGHSILVIVYHVLTRHQPFHDLGALYFDHRHRASLEQRLIHRLEALGNTVTIERTQAPASAA

SEQ ID NO: 415669 - protein, 456 aa, unidentified
MEKTKVKNQKKRPAIDFDIINPFAAGIDVSVSEHVVAISPGLCQERVLKFGTMTSDLKELSGWLKKHGITSVAMESTSVYWKPLFSHLLSEGFHVCLVNAKVARNISGRKTDENDAMWIQKLHSCGLLPSSYLPESEQEALRTLVRFRRSLVQDCSRHINRIQKAMELMNIKFHTIISDVMGQSGRAVLDAILQGERNPEAFLPLLSRRIKASRESIVKSLEGTWQSEHLFTLGQSYHFWKHYQQEIEKLDAEIERYLRRYEAKNNVGVVQSIQEGTSTEILKKKEKNHPKVDVRGYLKRIHGVDVLAIYGLSDIGGLELLSETGTDLKKKWPFDSQFISWLNLCPKTKISGGKVLSSKIPKRKTNQASQAFKQAANSIQRSDHWLGDYFRRMKAKGGNKYAIVATANKMARIYYKMVTEKLEFTPLDLEKYQSQYKQAKILYLERKLQLLKNQAA

SEQ ID NO: 415670 - protein, 351 aa, unidentified
MMIIGVDYHPSFQTIAFFVEETGEYDERELNHSEGEAERFYRDLQQRGIRVRVGMEATGFSRWFERLLAELGFELWIGDPAEIKAKRVKKRKYDREDARLLLRLMREDNFPQIWVPSPENRDLRQLLWHRHRLVQMRTRIMNQLQALAMNEGKRRKSKLWSTQGRAELEKLALAPWASRRLEELLKLLDQLNPSIEELTKAVEQEARKRSDVLRLMTHPGVGPLTALAYVLIIGTPERFQCGKQIGTYVGMIPTEDSSAGKQRLGHISKQGNSLLRYLLVEAAQAATRINPHWRRRYLHLAMRRHKSIAKVAMGRRLGIRLYWMWRNGCEYSSSLEFGSYAGKPETSHGVK

SEQ ID NO: 415671 - protein, 392 aa, unidentified
MTYFIGIDLAKYKHDCFIMDENGEVIRDSFSFNNDKEGFNTLLNVLNSLDSNQEKRIGFESTGHYGSNLKIFLERNGYSFMEFNPLLVHRHFKSETLRRTKNDKVDARKISSYLYTREYKPNPNSSYHLNCLKSLTRTREALIKDRTRHIIHMINVLDKMFPEFKLQFGNQGLNAASAMYLLENYGSPSKMSNMTRASYDKMKSELRRTISYAKFLRIKELARNTIGNEDEILVFELNTYLELFKELDKKILKVEDKITKEFSIMKCHIASIKGIGIITAAGILAEIESIDRFDNPGQLCAFAGIEPSENQSGTHDGGGKMVKHGSPHLRNYLMQSAGYMLIHNPVLYEYYLKKRNEGKCHTVALSHVAKRLTRIIFYLEKNDTDFNIDKMR

SEQ ID NO: 415672 - protein, 400 aa, unidentified
MHLTANISIPQKNFIAIDLHSDNAVICVRRNALNKAGELVGKNIWCGRVSIRDGLDNFIKVLVPHCQDFDHVAVVESTYNWYCLADAFEERGWLLRVADPSTVSQANLKSSDDRTEAQYLAERLRVGSLKHYLPLNYSSRALRDLCRYRMAMVQDCASLKIKLINLYRNQLSKNVRVADLLERCQPHMQPNYRFNSDILEEFKDPNVRLRVAFEISRIAMFEEMIEECNAEIQKQCKDQELVKLGKTIPGCGPVLSAVICTEIGTMQRFKSAGDFVSYCRLCSTSKLSNGKSKGLGNAKNGNAYLRWAFTEVAQYASRNPVIREILQRLLRKYGGLRVKAIRTLAAKIARVTFYVLKNKQPFNAAKCFGIELTKSIKKKLAHKPLREDAAVVLPTMTGQA

SEQ ID NO: 415673 - protein, 309 aa, unidentified
MEQQVKFDQIIKCGCGIDVHQKKVVATIRRSDVDFETKEFNTYTRSLKLLREWCKSEGVTHIAMESTGIYWRPVYNIMEEDFEIILVNARHIKNVPGHKTDKKDSRWISKLLLSGLLKGSFIPPREIRELRDLVRYKKKVVGQIASDKNRVIKTLEDANIKLSSVFSDVSGASVSKMILDIIEEKDDIDGLMEHIHGKVQAPRPEIRQALEGTLTDHHRFMLKLVKESIDEKEKIIEKLDKQIEKAAKEYTVEIDLLQTIPGVGKESAIRMISEIGVDMSKFPNENHLSSWAGMSPGSNESAGKKKVPE

SEQ ID NO: 415674 - protein, 339 aa, unidentified
MRLYVGIDLHSNNSVLVILDEKDKVVYERRHANDLKIILEQLAPHRKNIQAIAVESTYNWYWLVDGLMDAGYEVKLVNTVAVKTYDGLKYSSDEHDARHLAHLLRLGILPTGYIYPKQERAVRDLLRKRAQLVRNHTVHILSIKNLVIRNNGKGIASDAIRKLDDAAIGRICGGDAMLAMAIQSSLVVLRCLNKQIRELERVILAQARLKPEFTNLLTVNGIGEMLGMTIMYEAGSMERFAGVGQFASYARCVASSRWSNGKKKGEGNRRNGNKYLCWAFIEAAHYAVRYNERIRSFYQRKQAKTNKIVAAKAVAHKLARACYHVIKEKTPFDEARAFA

SEQ ID NO: 415675 - protein, 415 aa, unidentified
MEATVERCAGLDIHQASVVACVLVGPPGCKPRKETRSFGTSTRELEALRVWLEELGVTHVGIESTGVYWKPVHAVLEGGFELIVGNAHHIKAVPGRKTDVKDAEWLADLVRHGLIKPSFVPPPPIRELRDLVRLRRSLTEARSTERDRTLKLLETANIKLASVASEVFGVSGMAMLRALVEGEAAPAEMAELARGKLRSKRERLTLALEGRLTEHHRYVLAFHLRRLAAIEEDLRALDARIEAKAEPFQAQRRLLQEIPGVDALVAVTIIAEVGVDMSVFGNAKRLAAWAGVCPGNHQSAGRRRSGATRRGNVHLKTALVTAAVSGSRRKGSYYRDKYHRLRARRGRLRAAVAIAHKILVAAYHMLAGGVPFRELGEAFLDQQARQRNVRHLLNRLNHLGYDVLLQPRAVEAAGP

SEQ ID NO: 415676 - protein, 354 aa, unidentified
MPRKTTSFEAVATIGIDIGKNTFHLVGFDKIGAIALRQKLSRSQVDTRLANMLPCLIGMEACVGAHHLSRQLKALGHDARLMPARYVRPYSKGQKNDFRDAEAIAEAVLRPTMKFVAIKTVEQLDLQGLHRVRERLVCQRTSVINQIRAFLLERGIAVRQGLRALRTAMPNVLAMTDKLSPRMIHMIEDLCTDWRYLDTRIATVSNEIETLSEQDDGAKRLMTVPGIGPIISTATVAAIGSGDVFSKGRDFGAWLGLVPRQMSTGGRTVLGPISKRGNRYLRMLFVQAARAVLLRPQSWEKHGLKSWIEAAARRLNRFKLAIALANKIARIAWGVLHGGRNFEVRSMSTAPQAG

SEQ ID NO: 415677 - protein, 416 aa, unidentified
MNAAGIDVSSRKSTVAVLRPLGEVVRLPFDVAHNTEGLASLAEQLKALDGETRVVLEHTGRYYEPVAKALHEAGLYVSAVNPLLIKEYGANSLRRVKTDKADALKIARYALDNWTDLRDYTPMDTIRYDLKTLNRQFQLASKQRTACSNNLIALLEQSFPGIRRCFDSPVRSDGTQKWVDFAHTFWHVDCVRKQSYNAFSERYRKWCKRHGYFFKQNNAEEVYALAKNAVVLVPKSKVTKVLVQEAANQLTSTSRSVETYRTEMERLASMLPEYPVVMKMYGVGKSFGPQLMAEIGDVRRFERKQALVAFAGIDPMPNQSGDKNVRSNRSSKRGSPYLRKTLFNVMGIYLKCAPLDEPVFQFLDRKRSEGKPFYVYMTAASNKFLRRYYAQVRDYLAALDDLPPVDMDSTGLKTSD

SEQ ID NO: 415678 - protein, 418 aa, unidentified
MADEIMAEETIRWFAGIDWGSATHQACLLDEAGTVVGERAFAHGGAGLAALCDWLVSLAGDPGSVAVAIEVPHGPVVDALLDRGFAVYAINPKQLDRLRDRISVAGAKDDRRDARVAAAGLRTDPHLFRRVLAGDPSVIELREWSRLAEEVQQERVRQGNRVRQQLWRYYPQLLALSDDVTAEWVLALWNMAPTPAQAARLREATLARLLRQHRIRKLDAPAVLAILRQPAIPVAPGVTEAAVLHLRSLVARLRLANQEFRQAERKLEELCTALSETQPTAQDSGPGDATILRSLPGVGPVTLATLLTEATGPLARRDYPALRTLSGVAPVTKRSGKSCIVVMRYAAQVRLRNAVFHWARVAVLNDRRCRGRYEALRARGHSYGRALRGVGDRLLGVACVLLRRGTLFDPDYGSSASA

SEQ ID NO: 415679 - protein, 363 aa, unidentified
MLGNPFEKGKVMDKITRIGVDLAKNLIQVHGVDSMERVVVRKAISRQKFLEWFANLAPCLVAMEACSAAHYWARKLRALGHEVRLIAPQFAAPYRKGGKHVKNDRLDAEAICEAAGRPHMRFVAVKTADQQNVLVMHRMRDGFVEERTALVNRLRGELVEFGVFLPQGIDAFRAHFVEALEDGDTELNGVARTALLRGWEHLQALDQQIAWCDAQVATHVKHDSNAQRVMAVIGIGPLTASAAVATVGDAHLFKNGRQFAAWIGTVPKQKSSGGKTRLGRITKQGNTYLRTLLFQGARSAVTSAHRRTDRLSRWIVQLQARVGWYRTLVAVANKHARILWAILAKGERFDPSYVPTRPAPRSS

SEQ ID NO: 415680 - protein, 331 aa, unidentified
MDEVRRFVGIDVAKAALDVFIGSAGAAFSVANDEVGIRELLRQLEPADFVILEATGGLETPVASALAAAGIAVAIVNPRQVRDFARATGTLAKTDRLDAKVLAHFGEAVRPEARPLVDEQAQVLEALVTRRRQLVEMLTAEKNRRARAPKVLHRSIDEHIRWLEKRLSGFDDEVGQLIRNTPLWRERDELLRSVPGVGKVLSSTLLAQLPELGMLNRKQIAALAGLAPFNRDSGSMRGSRCIWGGRAQVRRVLYMATVAGVRSNPTVRTFYLRLRANGKHAKPALIACMRKFLVILNAMLHDKTHWQTPALTSPTSPLSPLLGAVSEHGCW

SEQ ID NO: 415681 - protein, 317 aa, unidentified
MNSFVGIDVSKAQLDVSIRPSGERIQVTNSEDGITQLTARLTALAPTLIVLEATGGYQATVVASLGLAKLAVAVVNPRQVRDFAKATGRLAKTDLLDADVLAHFGEVIRPNPKPLLDEEMLALEALFTRRRQVVEMITAETNRLAQARKSVRPSIKAHINFLKRELQDINRDMDEAQRRSPLWREQEDLVRSVPGIGRVTSTTLLVGLPELGRLNRKQIAALVGVAPLNRDSGMFRGKRSIWGGRASVRAVLYMATLVATRYNPTIRSFYQRLCASGKAKKVALTACMRKLLTILNAMVRSKTPWQALPVSNAQDSC

SEQ ID NO: 415682 - protein, 421 aa, unidentified
MSVHAAPVTASTVVVALDVGKASAALSVTDAARRRPLGPVEFAMTRSALVELVGRVRAVLPGAEAAVKVGVEAAGHYHRPLIELSAWPAGWEVLELNPAHVTAQRRVQGRRRVKTDAIDLEAITDLVLAGRGVPVTGRDLVIGELAAWSGHRARRIQTRTATKNQLLGQLDRSFAGLVLVLPDVLGTKVGRLVAAEFADPARLAALGVVRLIRFAAARGLQVRRPMAERLVRAARDALPTADAAVARRVLTADLALLVDLDTQIAAAEAELARLLPVSPFQPLTTVPGWGVVRASSYGAAVGDPCRWPGSRQLYRASGLSPMQYESAGHRRDGAISREGSVELRRALIDLGIGLWHSDRAAKAYAAGLKARGKPGTVIACALAHRANRIAFALVRDHTGYDPGRWTDPAPAGARANSLTTA

SEQ ID NO: 415683 - protein, 350 aa, unidentified
MTRYVGVDVGKARCRAALMDQKGKIEQEFFFENTPKGIQHLTSLLTSEDRVVMESTANLWLSLYDALDSKNVKVVLANPMKTKAIASARVKTDKVDAKILAHLLRADLIAESYVPPRQLRDMRGLVRHRLSLTKMRTMVKNKIHALIDKYGYHCEFSDMFGVSGLMWVKTLEMSALDRLVLENHLSHIESVDLQLGRVDEAILESACEDEDVRLLMSLPGVAVHTALLLKSEIGRIDRFLDYKHLVSWAGMAPRVHQSGNVLWNGSITKCGSGILRWAIIQSARTAVRCDEKFGEFYRRVAARRGDQKAIVAVANRMLKVVWVMLVRREVYGGVNRVRYERKLNRAGFDM

SEQ ID NO: 415684 - protein, 406 aa, unidentified
MLGKRNDLILFYLFEFEQNVRNTVNLYIQNIQPGDKTKGRFSLFSFSVHQIIDMKKIVKQVVGIDVAQKELVVSLGRMYDDWTPELYAGKSFANTQKGFEKLMQWVNKQMDEFVCIGYVMEATGVYHEPLAYFLDEKSQQISIILPNKMSNYMRTLDVKTITDKTASEAIAKFGLERKLDLWKKPKEIYRSMKQLTRERDQIVEERSMVKNHLHAEESEAYPNKSSIERINERIRMLNKQEKAIKNEIAALIASEKEVKGLVEKMTSIPGIGDLTAAIILAETNGFELIRNKRQLASYAGFDVKEKSSGTSVKGKARISKKGNRHLRKAMHLPAFSAIKYDERFKAIYARIVAKQGIKMKGAVAVQRKLLEMCYTIYKTNDLYDREYLKKREQKGTVVDLNQESGQ

SEQ ID NO: 415685 - protein, 367 aa, unidentified
MVTAALDLGDSESLATILSPDGDVVDSFSISMSDDGYSSFASKVPKDARIAFEATSMAYPVSRRLTALGYSDITVAHSKELAWIVKSKKKNDRIDSLKIARLHMAHMLPESHLLSREEQVKRDLLIQRVTLGKEIGKMKLKLIAYLKREDVYLSLPESSDSFSRERRQAIRSMRFGGDGDDDDGRDLVVGTMMDRLEFLERQCAPLEEKVRTIVRDSEDIRRLMSIKGVDFYLASLASSYVGDVNRFPDDDHLASFLGIIPESWDSANVKRRGHMSKEGPSTARWAFSVMTDTVMRYNPRLKTYYLSVKKRKNSGSLAHVATMRKLVRMIDHMLRYKENWRWEDEASTAKKLANLDREAEAKTTGGD

SEQ ID NO: 415686 - protein, 389 aa, unidentified
MFYVGIDVASEKHDCCILNEKKKIIRSFSFLNSPVGFQSLLSALSGIQPDEIKIGLEATGIYSENLSVFLRRKGFNVTTINPLLLKKHQCATTLRKTKTDKADAKGIALFIAEEGFQPDLPVSYHIQELKSLTRARFSFVQDRSALKNKVKRLVVLLFPELLEQFSDIFGASATALLKQYPSAEKLAACHTDALAALLRKSSRGRFGRAKAAYLKQLAKCSIGNHSPARVMELKMLLARIDLLSEQIKDYDKQIKIIMDELDSPVLTIPGIGYTLGATIIAEVGNISRFSSPAKLLAFAGLEPSIYQSGKFVPASGRMVKRGSPFLRWALLQAAGYVPNYSSTFALYREKKLSEGKSAAVARSHVAKKLVRIIHSLMTHSAAFSDQLTA

SEQ ID NO: 415687 - protein, 335 aa, unidentified
MNFVGIDLHKKTITVEALNQQRQLVRRQRLACSDVEGIRRCFDGLRPFQAVVEATASYEWLWQLLEPLAQRLVLAHPGKLRIIAESKNKSDKLDAHVLAELLVLDLIPPAFRPGPRQREHRRLVRQREYLTHRSTAVRNKIRRLLSDYNADRPDLFTHDGLAYAQAVPVSEADRFILELLLAEWHHHQQQLRAIDQRLRQFAQAGPAQERVARQVLASIPGVGPVTVDVVLSEVGDVGRFRSAKQVVAYAGLAPGQRESAGKRKELGITKQGSRALRWVLVEAAWRLVRCSRRWQSAFERLQRRGRKKAIVAVARRLLTVMVALLRTGQRYRLAA

SEQ ID NO: 415688 - protein, 346 aa, unidentified
MENYAGIDVSLELSSVCVVDAQGKIVKETKVSSEPEALVSFFKGLGFPMKRIGLEAGPLSQWLHAGLAQAGFETVLLETRHVKAALSAMTVKTDRKDARGIAQLLRMGWFRAVHAKSIGSQEVRALLVARKQLLGRLIDVELSIRGILRGFGLKVGPVTRKEFEARIRELVMGQATLERIADAMLSARAALKAEYEKLHKAVLAIVREDAVCRRLMTVPSVGPLVAITYKSAMDDPNRIVKSKAAGALFGLTPKKYQSGEKDVTGGITRTGDEMVRTALYEAANVLLSRITRFSKLKRWGMDVAKRRGSKRAKVALARKIAVILHRMWVDGTTYRWAAAEPIATQA

SEQ ID NO: 415689 - protein, 345 aa, unidentified
MKIVGCDLHTRYQQIAMLDTETGELRECRLEHAKGEVHAFFASLPDKARVGIEATGYSRWFERLLAELGHELWIGDAAQIRATVVRKQKTDVRDAAHLLQLLVEDRFPRIWRPTLAERDLRQLVWHRQKLVWMRNAIGNQLHALAMGEGLCRKKQLFTKKGRAELEGLGLGAWASYRRQELLQMIDQLDLSLKKLDEAVEEQAQQNAAAVLLRTHPGVGPVTSLAFMLTLGPVERFAGSKQVVSYLGLNPREHSSGGRQRLGAISKQGNPMMRSLLVEAGHSAARLDAELHRDYQRLKLRRGSGVAKVAIARKLAVRMYWMLRCQSNYAQLVRMQASLRGTLVQK

SEQ ID NO: 415690 - protein, 414 aa, unidentified
MALKIVYPICCGIDVHKTFVVACIASTIKGVTTYKRHRFSTYTKGLNELSQWLCENNCKDVCMESTGKYWIPVFNVLEASCNITLAHPKYVKAIRGKKTDKKDAKWIADLFKHDLVAGSFMPPLEIRQLRDLMRYRFKLTNFMSSEKNRLQNSLTVSNIQLGNVVSDTFGKSSMNIIEKLLKNPLDTSFDIEPLIHGSMKSKLPELELAIDGFITPEQAEKLKVMKQHYEDLQSRKADLEKIILSLAASYTEEMNLILTVPSFKNIFSAIAVVSEIGVNMDVFPTAKHLCSWAGLTPTNNESAGKKKSVRISRAGCYIKPLLVQCATAVVKSEKHPEIRNRYLKLKKRRGHKRAIIAIARMLLTAIYNILKKKEPYNPNLYKKADVLPVNREITVEQALLLAKSQGFRIITVAT

SEQ ID NO: 415691 - protein, 342 aa, unidentified
MEKANIIGLDLAKRSFQAHGARADGGVVFRKKLSREKVLAFLAEQSHCIVAMEACGSAHHWGRAIGDLGHEVRLIPPVYVKPFVKRQKNDAADAEAICEAAGRPTMRFVAVKTEEQQARAMLFRTRDLLVRQRTQLINALRGHLSEHGVVAPQGPANVKVLSEAIEETTTSLPLLVVELSRVFLDQIDGLSKKIAELEKATVHEAARGATTRRLQTMPGVGPITAMAIETFAPPMTTFKRGRDFAAWLGLVPRQHSTGGKQLLGKTSKMGQRDIRRLLIIGAIAVVRWACRKGAPDGTWLHRMLARKPRMLVAIALANKMARSIWAMLTKGEDYRAPIAVTL

SEQ ID NO: 415692 - protein, 345 aa, unidentified
MIIVGVDYHPSFQTIAFWMEETGEYVEQELNHSDGEAERFYRKLKEKGVSVRVGMEATGHARWFERLLAELGFELWIGDPAEIKAKRVRKKKTDREDARLMLKLLLENRFPRIWVPSPENRDLRQLLWHRHRLVQMRTRIMNQLQAVAMNEGYRWKKKLFNAKGRGLLEKLPLAPWASRRRKELLELLDQLDPKIAELTAAVEQEAKKRPEVVQLMTHPGVGPITGLAYVLVIGTPGRFPCGKQIGSYTGLIPCEDSSAGKQRLGHISKQGNTLLRFLLVEASQAAARCNPDWRRRYAHLMMRREKRIAKVAMARKLAVRLYWLNSVRTRESSDTSMACSRTSST

SEQ ID NO: 415693 - protein, 282 aa, unidentified
METTKFYLGIDVSKLWFDASLLTLIHHQKQPIITQRFDNSTDGMKTFKSWLKSNAVSYDENTLIVIENTGVYHRLIWSFCSKHNLNLHIGNAAHIKWSLGITRGKNDVIDSQRLCMYCYKQADELQATPPLNPIFIQLKDLMTSRTRLIAQLHSTKNYVKEIKSTNDIYLLNILEKSHKAAIDGIKKSITQIEAAIRKIVQEDEKIKANYELITSIPGIGEMTAIYIICCTTNFAAKISGKQLASYAGVVPFEHSSGTSIKGKNRVHKMANKELKRMLHMCA

SEQ ID NO: 415694 - protein, 430 aa, unidentified
MRRSNDHRNGKLAHGLPNHDVSVTNERSEKLGAFRIAHSVEGFDLLVKRLQALGAERSAVRVAVERPDGLLVAALLDQGYAVYPINPKSVDRYRDRHHTSGAKDDTRDAQTLAHILRTDGEHFRPLVPESDLAAELRLTIRAYRDLVAEGVRLTNHLHACLADYYPAAIGLFGELDAAISLGFLVAFPTPEAARTAGSEQIVAWLGQHSYSHPQRAAQVAERATTKALAAGAGVVRARSRQLVGVVAALQAVIAAKQAHVKALEELLGQHPDGGLFLGLPGAGVVTAAALLGELGEDRDALPNAQALQAAPTPAAGERSETVQCTAPVTIQSGKTRRVARRHACNRQLHEALIQFARCSLMRAGCGDAGVAWVKDAYLARRQAGGTAQQAYRVLANRWATILWAMWTHREAYDHARYAKARAARALPKVS

SEQ ID NO: 415695 - protein, 349 aa, unidentified
MGEVITIGVDIAKLVFQIHGVDAEGTVVIRRRVGRARVLEFFADLPPCRVGLEACATAHQWARELAKLGHDPRLMPPTYVKAYVKRGKNDAADAAAICEAVTRPSMRFVPIKSVEQQSMLMLHRARDLLIRQRTQLTNALRAHLAELGLVAAKGREGLHQLAAVVTECGNERLPSDARFACQAIVTQLHSVQIEISGLDKRISQTHRANADSKRLATIPGFGVILSTAVAATMADPKAFRTGRDFAAWIGLVPRQNSTGGKERLGSISKQGDRYLRRLLVIGATSVINSARARPYKYPWVIELLGRRPTKVVAVALANKMARIAWAVLAKGERYRAPTPLSNAVVPAAA

SEQ ID NO: 415696 - protein, 400 aa, unidentified
MLSIGIDVSKGKSTVCGMKPGGEIVYTPFEIQHTREGMSDLVSLLRGSGEEVRVVLESTGSYHCPVVAALLENGIFVSVVNSLRMKRFCSQSIRRVKTDQIDAMQIALYGLAYWQELQPTRLPENTYRELQLLARQYYQMTSLLIKAKVDFNALCDQVLPGMQELMNDHAGRHKLSDFVLRYRHTTHILEMGETRFRKDYCKWAEKKGYRNRERMAALIFATAQNGIPVLPNAPSTQIVITEAIRVLHTVEASRDAILTQMQALAKTLPEYSLVREMPCIGDTLAPRLIAEIGDVRRFHSKRALIAYAGIDAPPYQSGKFCANNRHISKRGNRYLRKTGYEVMQSYVMHKPANDPIFTFIEKKRGEGKSGKLAMVAGLNKFLRVYYGKVTELYRSLSAIE

SEQ ID NO: 415697 - protein, 411 aa, unidentified
MKALYERCCGIDVHKRIVVACLKCGKKQEIREFGTTTEELRSLTEWLSDSKCQMIAMESTGSYWKPLYNIFELSSLAAIVVNARDMRNVPGRKTDIKDAEWIADLLQHGLLRASYIPNREQRELRELSRYRKSLIEERARELNRLQKMLEGGNIKLASVVSDINGRSARNLLTHMLKRDTSLTKEEVSSLVRGRLRHKVESIMKALDGFLTPLQKQLMLKVVDHIDDMTKRIGEMDDLMNQYLTEYHEAIQKLDEIPGIGRQSAETILAETGLDMSRVPTAKHFSSWAGLAPGNNESAGKRRYGRTTKGNITLKTTLIQCVKAAVKKTDSFLSAQYQRLVVRRGTNRATVAVAHTMLISIYHMLKNNVPFTDLGADYYNRFNTQSKIQHYLKKLKQLGWELDSATIPTAAV

SEQ ID NO: 415698 - protein, 385 aa, unidentified
MTNQLQDTTFIPRDYDIFGGLDVDKKSMAVTFRDHGTMRKSLRLPYSANQLLNYTRKHFPGQRVAFVYEAGPTGFGLHDELTAASHPCLVVSPSMVPTVARKRVKTNRLDSNKLSDGLRGGQLRGIHVPPPSYRELRHLVQLRDTQVAQLRASKCRIKSLLLYEGIPFPAVNGKWSGQVLRQLEALPCNATVRFKLDQLIDAMQFHFLAAAKVQKQIRHFCQNDPELSQCISFLVSLPGVGTITATHALARLGDWRQIKDVRQIAGFLGLVSSEHSTGDKENRGEITRIGDSRLRNKLIQCAWTAIRKDPELRAFYRRIYERQPKKVAARKAIVAVARKLTTRMYAVLKEQRPFVIRADSSIAPLTAEETVGPRERLDGAQNDQS

SEQ ID NO: 415699 - protein, 372 aa, unidentified
MEQRSKIHLGLDVHKDSITIARADPGRDPGRIVGKVAHDVNKLMKVLLKIGPADQLHLVYEAGPTGFGLQRWLGESGYSCEVIAPSKTPRKPGSRIKTDGRDAIGLAQASRAGELHAVWIPDPADDAMRDLSRAREDAVKACTRAKQQLGGFLLRHDLRFGGRTSWSKAHFVWLAELSLDTSAAQTALTEYLLAVQAAMQRVARLDQALQDNVQGWRFEAVVGALQALRGVALVTAIGLVAEIGDLSRFEHPRKLMGYLGLVPSEQSSGQRVRRGSITKTGNSHARRLLTEAAWSYRHRARIGTEAWQRQAALSETVRATAWKAQLRLTKRFTALNARGVQRNKICVAVARELTGFVWAVGTQALRESRTAH

SEQ ID NO: 415700 - protein, 347 aa, unidentified
MNFYTTEHSHYCGIDLHARSMYVCILNQKGETLVHKNMRTEPDAFLKAIAPFREDIVVCVECMFTWYWLADLCAKENIRFVLAHALYMKAIHGGKTKNDKIDSRKIAGLLRSGMIPQAYVYPAEMRATRDLLRRRNYIMRRRADLLAHIQNTNSQYNLPEFGKKIAYKANRHGVPEHFTDPNVSISIKTDLELIDHYDQLLNKLELYILQNARHHDPNALYLLRTVPGIGKVLSLVILYEIHDINRFPRVQDFASYARLVKCPRESAGKRHGTGGNKIGNMHLKWVFSEAAVLFLRNNPEAMKFKKRLEKKHGKSKALSILAHKLGRAVYYVLRQQKAFDMKQFLTT

SEQ ID NO: 415701 - protein, 345 aa, unidentified
MATMPQTLGGVTVGVDTHGKIHVGAVADPLGRILGTIEVTTDERGFRQLENYAKGFGTIERFGVEGTGAYGATLCRWLTNRGHEVLEVDRPDRKIRRLRGKSDPIDACAAAQAVLSGRASGVPKARDGAVEAIRVLRMARGSAVRGRTQTMNQMHALVTSAVDPLRMQLRSCSPAKLVERCVGMRPGKLDSPAAATKFALRELARRHRALDEEVERFDEELSRLVAKRAPRLVALVGVGTDVAGALLVTAGDNPDRLRSEASFAHLCGVSPIPASSGRIHPHRLNRGGDRSANQALWRIVMVRMSWDERTRAYAARRTSEGLSKREIIRCLKRYVAREVYEVLVA

SEQ ID NO: 415702 - protein, 316 aa, unidentified
MSDAQVLVGIDVSKVQLDVALRPTDDCWHVSHDALGIAGLVERLRTVQPTLVVLEATGGLEVPVTGALAEAGRPVVVVNPRHARDVAQATGRLAKTDTLEARGLAHVAEAVRPTPRPLPEAQAQALSALLTRRRQLVQRLTAERRRLQTAPQPIRADIQAHITWLACRLARTDDDVAAAIRSSPLWRAKDEIVPSTPGVGPILSRTLVAEVPELGVLNRQEIAALIGVAPFNRDRGTRRGKRAVWGGRAHVRAVLYMSTLAAVRHNPVLKAFYERLRSVGKAPKVALTACMRQLLTILHAMLKHRTPWQENYAHHS

SEQ ID NO: 415703 - protein, 319 aa, unidentified
MSRTLIGVDVSQKHLDVCVRPAAVRQRFDNTTEGIAALVAWVRPHAAERIVFESTGPYQKAAVGALLAAGLPAVVVNARQVRDFAKAMNYLAKTDAIDAAVIAHFAEVAATVVRPLESQELCDLRELYDRRGQLVRMLAAEKNQRHSATVARASAKVLKSIDKHIDYLENHIHDLEKRMDGIVEGSAAFRARDEILQTITGIGPQVSRTLLAYLPELGRSSRQSITALVGLAPFNDDSGEHTGQRRIRGGRSKVRVGLYQAAIAAIRHCPHMRAYYAALKARGKASRVAIIAVARKLLVLANALVRDMTPYKAPANSVC

SEQ ID NO: 415704 - protein, 357 aa, unidentified
MRSIQSVPHGEQAVQQDDLFMSLELGDKRWKLSIGDARHGVSRYDVAAADTAAIAKCVAKTRERFQTPRAVVHSCYEAGRDGWWLHRWLTQVGVDNIVVDASSIEVNRRARRAKTDRLDADKLRTMLVRHHGGEHVWSVLREPTEQDEDARRVHRELQRLTHERTSHINRIRALLVLHNVRPDIVLAGRDWPAWWQKNSGQVSPKLRAEIEREVARLTLVKDQVRSIELARRRELASGMHPMVSQLTRLAAIGPTGAWVLVHEVFGWRRFSNRRQLAGCLGLAPTPYASGDTETEQGISKVGNKRVRALLVEQAWGWLRRQPTSALTLWFNRRFAHSGARMRRVGIVALARRLAIAL

SEQ ID NO: 415705 - protein, 353 aa, unidentified
MMYIGLDVHARTFAMAVLNGRGRIMFEGEWETSCESLCEAVGAVAGHKRVALEESTVASWVYRVLKPHADQVVVADPWHNRLIGKDEKLDDKEAARKLARLLRSGDLSPVHHTDQLERQVFKELVQMYHDAVAETTRCKNRLKAKFQQHGVRCPSRELYRSDQRASWRKQLPNPGTRYQVDLLWEALDQAQERRARLHARLTRQARAFEPIRRFQAVPGIGGVRAATFYALVDTPHRFATRSKLWSYCGIGLARRESGQQSGPAHLTARYNRLLKDVIKGAALSAIQLGDNPFAAKHQRQRAEGMSAEKAWLAVSRSLLSTLWAIWLTGDEYRPRGADDPSSWPIPRSRRPAA

SEQ ID NO: 415706 - protein, 375 aa, unidentified
METIYIGVDFHARQQTICYLTTESGEFVTHELKHQDKDEVRTFYGQFVGRVIVGLEASGYSPWFEQLLEELGHEVWLGDATEIRRRARWRQKNDRRDAELILDLLVHDEFPRLHRPSLESREILRMLRYRHKLVKMRTIIKNSLQALALQSGLSRRTKLFTKIGQQELRAAPMSPVMKQQQEQWLELLLVLNQRIVETTLWLKQQSLNDARIRLLRTHPGIGLLTSLGLVHTLDPISRFRNQRKVTAYAGLEPMERSSAERKRFLGISKAGSRLLRFLVIEAAHTAVKKDDDLKRFYRRLQERRGRPKAKVAVARKLLVRSFIMLRDEIDYAEFQRRAVVARLARQSSRPAVPDSLIGQPASSESQERVLSAAKK

SEQ ID NO: 415707 - protein, 317 aa, unidentified
MTQSSTTTAGIDTSKGKLDVAVHGRTGHWQVANSLAGWRVLATKLTEAGVSRIGIEATGGYERGVVEHLRAAGFTVLVLQPIQVKAYGRVHLRRAKNDVLDAVLIAACAAALDQVRTAPDQRLAELAERLTFLEQVEEDIRRCKTRLEHIDEPGLRRLVLGDIARSKARRLAQIRHLAKQLRSHPDLAARLDLVLSIPGIGERTALALLIRMPELGRVSREQAAALAGLAPFDNESGQQKGQRRIAGGRARLRRSLFAAALPAAFRWNKALIALYARLIAAGKAHNAALVACARKLLIYANTVVQRGTPWAEKPLST

SEQ ID NO: 415708 - protein, 372 aa, unidentified
MEEISKIHVGLDVHKDSISVAAAEPGRTPARLIGKVTHDVNKLLKVLAKIGTAEQLHIVYEAGPTGFGLQRALKGRGYVCEIIAPSQMPRRPGDRVKTDGRDSIQLAECSRAGQLSAIWIPDPGDEAIRDLSRAREDAVNSRMQSRHQLKGFLLRHDVRYTGKTSWCGPYYRWLATLNFGAGAAQTAFTEYWQAVKSADDRVERLTKALQSSITGWRFEPVVGALQALRGVAAITAIGLVAEIGDLSRFAHPRKLMGYLGLVPSEHSSGERTSRGSITKTGNAHARRLLTEAAWNYRFKARIGKEAQLRQQELSEPVRTMAWKAQLRLTQRFAALNARGVQANKACVAVARELAGFVWAIGMQAQREKLTTI

SEQ ID NO: 415709 - protein, 419 aa, unidentified
MSNHVAKHLAAIPAGTLFAGVDLGLDDFVVVVLNTTANRLDRFRSANNAEGYAEFRQRVQRTVAKHGAAGVWVGMEPTNYYWKQLGYDLERHQIPFRLVNALTVKRHREGDQLDRSKDDWRDAFTIADLVRQGKFTETRLPHGVYAELQAGYTAYQRLRRDRGRQATLLVNAVRQLFPEFEQVFQDVTGATARAVIDAGLAPHLIRTHGEHTFLASVRSQFTGQRLSVHQVRRLYALAAQSYGLTEATQSLRQMAHQHAQMIELLDTQATQWRQTLLALFATLPEAAYLLSIQGLTAPAALGLVAHTGDLAQYTHGGALIKLAGTQPTPNTSGRKTYSPTPFSHQGRSGLRTVAYFITLRLIRQNDALHYHYQRLTTRAEHPLPKMQAIGACMNKLLWYVWHVAKRRERYDCQRWRTLN

SEQ ID NO: 415710 - protein, 408 aa, unidentified
MKLLVGIDVSSEKLDTCFLDSEDQILLEESLSNTISGASKIKEYILQFNDSNLYNRIIIGMEATSVYSFHPSTFLAEDRELKALNVEVVVMNPKAIHRFKGIFDEDKTDRIDAYRIADFLRFDRFNVSLHKEEQYVALQRLTRSRYQLICQLTEMKQHFLENLYYKCNTLTKEVDTSIFGSTMMNLLTDSLSLDEIASMPLEELAALLQEKGRGRFSNPDKLAQSIAKAVRDSYRLGKVMQDSVDVVLASYAMMIKTIKDQIKTLDKAIQNLIVTLPESQSLLSIPGIGPIYAAGILAELGQIERFEDEAKIAKYAGLYWKRKQSGNFESERTVMTKTGNHYLRYYLVEAAGSVMRNEPVYREYYLKKYHEVPKHQHKRALVLTARKLVRMVDVLLRNHQLYALERSV

SEQ ID NO: 415711 - protein, 391 aa, unidentified
MVQIQSMSLHYCPRDYDVFVGIDVDKKKFVVTMMDHANTRKTVTLPYSAEQLLRTVKGRFANTRAIYAYEAGPTGYGLYDRITQEGQRCLVVSPSTIPHPANERVKTNRLDSLKIAENLRGGQLKTIHVPSQSYRHLRHLVQLRDVAVNQVKANKCRIKALLLMEGIPFPALAADVQWSRAVLSRLKDLPCDPPIRFKLDRLLAALDFARREVLEAQREIRRFCQQDEELNRCIDFLKSVPGIGGITASHFLARVGDWRLLGNVRQVASFVGLVTCENSTGERVRRGSITTSGDPRLRSKLIQAAWVAIRQDAEMREFYRRVFRSNPRDYAACKAIVAVARKMTMRLHAVLKQQRPYEVREAVPTPLTEEETIRPQERLDVTAESGGFCPT

SEQ ID NO: 415712 - protein, 372 aa, unidentified
MARFIGVDLHRNCFTTATLAENGREYLRGWKLGQLDRFVQGLRKDDRVAVEMTTNVRLFHDAVRPHVDRVDVVNTRKFKVITASVNKTDRNDAVRLMRFLSKDLLPTVQLKEKHLAELASLTRTRDTFVKQRTTLKNKVNNRFAARGKKIEREQMSSNKALDELEGAAREFGAVEAVELGVMFQQIRALNDGLAKLEKLIKAEGAKLEGFKNLVSIKGIGPLSATVLLTVIGDVRRFAEEGKLAAYLGIVPRVSDSNQVEHRGRITKLGSKLARTTLVQCGLIAKKYSPYLAAFHERIKKRKGGGKANIALARKLLAVVYRTLWNGWEFADFGNYRLKDGRVPTREAMRSMKDRDAASRRDLSHGGQARRKR

SEQ ID NO: 415713 - protein, 388 aa, unidentified
MIYVGIDIAKLNHFASVVSSDGEVLVEPFEFSNDVEGFRSLSSKLDPFEKDNLLIGLESTAHYGNNLVEFLFSKGYRFCILNPLETSALRNNNVRRTKTDRADTFLIAKALLVNSHRLFEKQDLDLLHLKNLCRFRQVLMKKRTTNKIKLTSFVDQAFPELQYFFHGVHHKGVYALLKEAPSPELIASMHMTHLANLLRVASHGHFKKEKAQELRVLAQRSVGSNDSSISIQITQSIEQIELLDRQINDDEAKIEEIVKAIGSVIMTIPGIRYVEAGMILGEIGDINRFPDYHKLLAYAGLDPVIRQSGKFNASRTRMSKRGSRVLRYALVYSAHNVVKNNETFRKYYDLKCSQGRGHYAALGHCAGKLVRIIYKLLSEDIAFDPNRL

SEQ ID NO: 415714 - protein, 367 aa, unidentified
MTALVSSEVQVTVGVDTHADVHVAAALDQLGRLLATQSVPSTPAGYRVLVAWASGLGTVERFGIEGTGSYGAGLARWLRSRGLDVLEVERPKRQNRRRHGKSDAIDAEAAARAVQAGTATARPKSGDGPIEMLRTLQAARRSAIKARTQAVNQLHALVVTAPDTLRTRLRGLSRARLVATAMAFRPRLPLTSKIAATQLALKSLAVRHQQLTAEVEALEAQLELLVARTAPDLVAVKGIGTDIATTLLATAGDNPDRLRCEGAFAHLCGVAPIPASSGKTNRYRLNRGGDRDANRALYLLAVGRMGWDPATRAYVERRTTEGLSKKQILRCLKRYIARELYPLLARNPALLTLRQKCASARPLIGQK

SEQ ID NO: 415715 - protein, 420 aa, unidentified
MVYLERGYNLKELPWSKIVSNSFLFKEACMILVGVDVAKDKHDCYIMTSEGEVLFKSFTIANNMEGFNQLYEKILSVIDNFDNVKIGLEATGHYSYNILGYLLDKGLTPYVINPLHSNLYRKSLSLRKTKTDKVDSHIIASMLMSDVSLKPYSNTLYHNEELKSLTRYRFTKVQERAKLKISISRLVTILFPELEKLVPTLQMNSIYALLYEFPSAHAISKAHLTRLTNLLNTTSKGHYIKDKAVLIREAAKNSIGSNMPAKSLELKHTIKLIKELTSEINEIEEEIKIIMNKINSPILTIPGIGLSTGAQILAEIGDFKNFSSPDKLLAFAGLSPSTYQSGNMYSSNAKMEKRGSKYLRFALFNAAIYVSYWEPTFSQYLKKKRVESKHYYVAISHVVKKLVRLIFHLEKTNERYSTVV

SEQ ID NO: 415716 - protein, 334 aa, unidentified
MENIALIGIDLGKNSFHIHCQDHRGKAVYRKKFTRPKLIEFLATCPATTIAMEACGGSHFMARKLAELGHFPKLISPQFVRPFVKSNKNDFVDAEAICEAASRPSMRFVQPRTESQQAMRALHRVRESLVQDKVKTTNQMHAFLLEFGISVPRGAAVISRLSTLLEDSSLPLYLSQLLLKLQQHYHYLVEQIKDLESQLKRKLDEDEVGQHLLSIPCVGTLTASTISTEIGDGKQYASSRDFAAATGLVPRQYSTGGRTTLLGISKRGNKKIRTLLVQCARVFIQKLEHQSGKLADWVRELLCRKSNFVVTCALANKLARIAWALTARQQTYEA

SEQ ID NO: 415717 - protein, 410 aa, unidentified
MDVLVERVAGLDIGKKIVVVCVRTPGPGGKRVSQTRTFPTMTRSLGVMADWLVECGVTLAAMESTSTYWKPVLYCLEEHMTTWLLNAAHIKAVPGRKSDVRDAEWIAQLLEHGLVTPSFVPEAPVRRLRNLTRYRLQLQGDRTRDAGRLEKLLEDASIKLSAVASNIVGVSSRAMLAALVAGERDPKVMADLARSKLRRKIPDLTEALTGHFDDHHALIVGQLLARLAATEQAVADLDVHLEAAMAPWAHEIELLCTIPGVGRLVAWTFIAETGGDMSRFHSPGHLASWAGVAPAMHESAGRRRPVGARPGNRFLTSMLVEAAQSASRTKGTYLAAQFAHLASRRGHNRAQVAVAHSILVAAYWMLVRDEPYADLGPTWLTDRGAEQARTRRLVQQLQALGHTVVLDPAA

SEQ ID NO: 415718 - protein, 412 aa, unidentified
MEVLHERCAGIDISKADVKVTIRVPGTGKRRRSETRTFTTMTRDLLAMRDWLLAEGVTLVGMEATGIYWKPIFYLLEHDLECWLLNARHMKGVPGRKTDVKDAQWIAQLVEHGLVRPSFVPPEPIRQLRDLTRYRTEVIRERTRETQRLEKLLEDAGIKLSTVVSNILGVSGRAMLEALIAGQRDPRVLAEMAKGSMRRKTDTLIEALTGHFADHHAFLARTMLDRIDACTATEARLSEHIDQQIEPFRRRVELLLTVPGISTRAAEVILAEIGADIARFPSAGDLASWAGACPGNHESAGKQPTGKTRHGDPWLKAALGQAAVSAARTKDTYLAARYRRPAARRGKKRALVALEHSILVSVWHMFTNDIEYADLGSDYFLHRVGRARQTRRLVSQLNQLGCQVVLQPVEAA

SEQ ID NO: 415719 - protein, 400 aa, unidentified
MNAVGIDVSKGKSTVAVLRPFGEVMASPFDVIHNDNDLNRLVALIRSLPGESKVVMEYTGTYFEPIAQYLHNNGIFVSVVNALLVHDYGGNSLRKVKTDKKDALKLAYYALDRWTELEEYVPADEQRKTLKMLNRQYNQSNKIQTMMKNNLISLTDSVFPGINKLFTSPERQSDGHEKWVDFLNAFPHKDCIAELYLSVFKTKYKSWCKKNKYNYSDSKAEEIHAFAKSIIAVLPLNDSVKLLVTHSVMQLNAILETASSIRKEMDRIASSLPEYETVMAMYGVGKVYGSQLIAEIGDTRRFRNRRAITAFAGLDAPPYQSGQLDITSRHISKRGSSALRKVLFQITEVYILNKPADEPVYQFIDKKRSEGKHYYSYRIAAANKFLRIYYAKVNQVLNSQ

SEQ ID NO: 415720 - protein, 339 aa, unidentified
MRFYTKQHPFYCGIDLHARTMYICILDQAGETLVHRNMPATPEALLKTIAPYREQIVLAAECMFTWYWLADCCADHGIPFVLGHALYMKAIHGGKAKNDKIDSQKIAALLRGGMLPQADVYPAEMRATRDLLRRRMHLARKRGELLAHVQNTNSQYNLPAIGKKIAYKANRDGVAERFADPAVQKSMEIDLALVGHYDALLRDVELTIVKTAKHHDAQTLYLLQTVPGIGKILSLVLLYEIHDIARFPRGQDFASYCRLVKCARESAGKRSGTSGDKIGNAHLKWAFSEAAVLFFAGQSRRAKIARPLGEKTQQGESVDHSRAQIGPGRLLHAETPNGV

SEQ ID NO: 415721 - protein, 433 aa, unidentified
MGLIVPTAMHPERDDQPMPYDWFVGIDWGSQQHQVCVLDRNRRLVGERAVDHDGASLAQLAAWLWTLSAGQPQRVSVAIEVPRGAIVEGLVERGFHVFAIHPKQLDRFRDRHSVAGAKDDRRDAFVLADSVRTDRPSFRRLHLDEPQLLLLRELSRAEETLLEEFRRSANRLREQLHRFYPQMLQLCSAADEPWLWDLINLAPTPAHAVLLSAEQVQHVLQAHRIRRVKATEVLACLQARALPVAPGTAEAAQAHCGFLLPCLRVLAEQLQACSQQVGTLLRTMADEPSEGESPSDGAIVQSLPGVGRKITAWLFAEAAQPLAERDYQVLRTHGGVAPVTKHSGKRRQVVMRHGCNPRLRHALYHMARVAMQRDAHFSGVYAALRAKGQRHGQALRNIGDRLLRILMAMLRHRTCYDASRIRREPVGQMGQKI

SEQ ID NO: 415722 - protein, 336 aa, unidentified
MNEAACAVGIDVAKRKFDIALLINNKIRTKVFDNTPAGHRAFSGWLDERGAIREEAHLCMEATGPYSETLATNLVADGWRVSVVNPARIKGFAQGELARNKTDRADAALLARFCAAMRPSLWTPPPAAWRELRGWVDRLQALKDMHQQESNRLEAHRASGQASLVQDVQIHLDWLDRQIKELERNINDHIDRHPDLKRDAELIGSIPGIGATTVAKVLAYAGDVRRFANAKALAAFIGVTPRQRLSGSSVKGRTMMSRTGHGELRRALYMPGLVARRHNPALKVFGDRLSAAGLAPKAVVGAVMRKLAHLIYGVIKSGEPFDANFHQSGLAIQDGI

SEQ ID NO: 415723 - protein, 352 aa, unidentified
MRIVVALDVHRRQITYKTLERESGEVRRGRIAPATRGAVREWLERFAGREAEFVLEGTTGWRFVVEEIERAGHRAHLADPAETASKRGRKRRAKTDNADCDLQLKLLLAGELPESWIPPAHILELRTRVRTRKLLIDQRTAWQQRLHAQLLHQGVAGLKPRTRAGREALARAELSPAGRELVALALRTMDAIDRELAPLDRALRSFAHRQPACRALIANLYGVGAISATAILAELGDCRRFASSDDAVRHSGLDVTVHQSDNKRSAGHLSHQGPELLRWALFEAAHQSARRGSPDHDYYLQVARRIDHNRACLSVARKLCRRSHHILRELGDAALAPVERERQTDEAIQAAA

SEQ ID NO: 415724 - protein, 409 aa, unidentified
MRLFVGLDVSSFDMKVCFLNEEGDKIDAFSVSNDLPGATTLKEKLLKCVAGKEVEMLKIGLESTSVYSFHPSMFLHHDTDLQQFGAKVFLLNPKQIANFKKSYSDMDKTDELDAFVIADYLRFGRNQMSIVKESQYVALQQLTRTRYQLVKMLTKEKQHFLQHLSFKCNTFSQEVDSSVFGNAMMELFLEKFSLEELANMPLEELAEFLQEKGKNRFGDPRCIASSIQRAVKASYRLDKVVEDSIDVILGTSITVIRTFQQQIKELEKSIKKIMAGLTQTLESIPGVGPVFAAGIIAEIGQIERFEDETKIAKYAGIYWRKHQSGRFTAEDTSLTRTGNHYLRYYLVEAANSVRRHVSDYQEYYIKKYNEVPKHQHKRALVLTARKFVRLVDALLRSHQLFTPERCVKI

SEQ ID NO: 415725 - protein, 310 aa, unidentified
MDAIYVGIDVSKDRLDVHMRPSGEAFAVARDGKGLEDLVARFAACPPSLIGVEATGGFETVVAAALAGAQLPLVVINPAQIRHFAQAVGQRAKSDPIDAAVIARFVEAVKPALRPVPDERARLLAELVARRRQIIEMIVAERQREKRAENVRVRKSLARHIKVLEKELPEIDNDIDTLVRGSPAWRDKEDLLTTFPGVGNTLARTFLAEVPELGALNRRQIASLAGLAPFVRQSGRWKGRSKIGGGRTTLRPALYMAALSAIRCNPQLKLFYRHLVSAGKPKMVALIAVARKLITILNAMLRDQKPWQPA

SEQ ID NO: 415726 - protein, 351 aa, unidentified
MQITTIGLDIAKNVFQVHGIDGNETVVVRKQLRRGKLIAFFESLAPCLVGIEACATAHHWARELTRLGHQVRLMPAKDVKAYVKRNKNDAADAAAICEAVRRPTMRFVRIKSTDQQCQLMQHRTRDLMMRQRTQLINALRAHLAELGIVAAMGDKGVTELLMIVADEDDGRLPVEARASLALLAAQLNALQMLIGSLEKQIKMQHRANPASQRLETIPGIGIIGATAIAATVADPTVFRSGRDFAAWIGLVPRQESSGGKHKLGSISKRGDRYLRRILVVGAHSVLRRAMEKPGKYPWLTQLMARRPFKVVAVALANKMARMAWALLTYGGTYRAPAFDCSIGCWPMEGCV

SEQ ID NO: 415727 - protein, 339 aa, unidentified
MELYAGMDLHARNTYVGIMDSNSRRIFKKRVANDLQLILNTLEPFREDLRGIVVESTYNWYWLVDGLMDAGHGCVHLANPSAIKQYEGLKYTDDRHDAFFLAHLLALGILPEGYIYPKEDRPVRDLLRKRSFLVKQRTEHIHSLQSMIERHTAQRLNGNEVKKLYLPDLERIFEEQYVLLSARANNATIKFLSEQIQQIEKAVKAKVKLSEPFKLLLTVPGIGEILALTIMLEVGDIHRFPTAGDFASYARSVPTDRLSNGKSKGKGNRKNGNRYLGWAFVETCHFARRFYPKFRSYYQRKAATTNPFVATKAICNKLARICYYVMRDQVSFREEAIFC

SEQ ID NO: 415728 - protein, 382 aa, unidentified
MNDLSRSLTPLDPDHTLIAVIEMSQSSWLVAGIVPGIERHPLKKLQPNEAELLRLLMRWRAEATKMGRTITRIAVAFEAGRDGFWLARWLRARDIEAHVIHPTSVAVSREHRRAKTDRLDTGLLKRVFIGWLRGEPDHCHMAAIPTLADEDAKRPNREREGLVRERTRIVNRMKSCLARFGVRNFKPTLRKAPECLATLVTPEGVPLPPNTLLELRRDMARLRFVMDQIKEVEEARAQRLEQAPQEKSHAMVRLLARVIGVGIETADMLVHEILSRSLRDRRAIARYAGLTGAPDESGRKRREKGLAKAGNARVRRGMIQLAWRFLLFQKDSALAQWYRARTDSAGKKRKTMIVALARKLLIALWRLVTIGEVPAGVVLRAA

SEQ ID NO: 415729 - protein, 392 aa, unidentified
MVVSVGVDVSKDKHDCFILSSEGEVLADVFTIPNNLDGFRFLLRRIRDCTHAQDKIKVGLEATGHYSYNLLGFLLDNGLPTYVLNPLRTNLYRKSLSLRKTKTDRVDARTIAAMLLSDAGLKPYTNTAYHNEELKSLTRYRFDKVKERAKLKSSIARLVCILFPELEKLVPSLHIASVYALLEEFPGAKQIAAAHLTRLKALLETASKGRYKRDMALEIRDAARNSIGSWMPAKSLELQHTIRLIRELDVEIAEIEEQIQSIMDELHSPITTIPGVGFRMAAMILAEVGDFTLFDSPDKLLAYAGMSPSTYQSGQLKNCYPHMEKRGSRYLRYALYNAAKYVCHWDPTFAAYLAKKRAEGKHYNVALSHAAKKLVRLIFAMEKSRQPYCSAS

SEQ ID NO: 415730 - protein, 421 aa, unidentified
MTQSAPDTFAAFVGIDWADAKHDVCLQAAGSAKRECFQLEHTPEAIDAWVTTLRTRFNGQLVAVCLELNKGPLVFALRKYDFLILFPLNPLTLARYREAFTPSRAKDDPTDAELQLELLLTHRDKLRPLNPQSPTMRALAQLVEHRRRVVGDKVRLTNRLTSTLKNYFPHALQWFQDKDTLLFCDFLSRWPTLKAAQLARRSTLETFFRDHHVRSSDVIDKRIHAIHAASPLTIDEGVIAPHALLVQALVSQLRVTLQAIETFDNAIAQRAQSHPDFPLFQALPGAGPVFASRLLVAFGEQRDRSASAAELQRYAGIAPVTERSGKKSWVHWRLQCPKFLRQTFVEWAAESTRHSFWAQVYYQQQRDKGKAHQAAVRALAFKWIRMLFRCWQDRTPYNESAYLQALNSRGSSLLHNLAKEA

SEQ ID NO: 415731 - protein, 337 aa, unidentified
MERQYVGIDLHRRTSTIHRMSPDGEVLGCVRVPSQPMELAQAMADAGPEPEVVLESTYGWYWAADLLQELGANVHLAHPLGNNWGNRRVKNDERDARDLAAMLRLGRLAEGWIAPPSVRELRELVRYRFRLVLHRTSCKAQIHGVMAKNGILPVRGCMWGPSGSAQLDDLELPMAYTLRLESLRDLLAYYDREIAMLNRRIHRELEDDPGYNAIRQIPGVGRVLAAVFCAEIGDVSRFPSPDKLCSWAGLTPKHRESDDKVTRGPITKQGSPLVRWAAIEAISKYRGGPTLRADYHRIAARRGKFKARVAVARKLLTLVFYGLRDGKVRCLGAAQSA

SEQ ID NO: 415732 - protein, 364 aa, unidentified
MKKITTKKTMTSKRLERQDEFSSYLGIDLGDKHSSVCVLDRWGKIAEELRGRTTVKEFEEFFRKLPRSRVAMEAGSQSRWVSELAEKYGHEVYVANPHKVQYISGGDDKNDPGDAYKLAELSYVRPSMLHGISHRKREEQVHLEAIRARDLLVRSRADMINAVRGMSKAFAETLVKCSAESFTTKAARKLPEDLRTATAPLLRVIDQLSEEITELDQWIEHVARQHYPAYGLLEKVNGVGTLTALTYMLTIGDAGRFQRSREVGAYLGMRPRQKDSGSSSPQLGITKTGDAYLRKLLVNCAHYILGKFGADSDLRRFGLRLAARGGKNAKKRAAVAVARKLSVLLHRLWVSGEAYEPLRNSQAA

SEQ ID NO: 415733 - protein, 367 aa, unidentified
MKEQENKRNKITIGLDLGDRRHRFCVLGEKGEVLEEGSVGNNRAALSELGGRYPEALVVMEAGCHSPWVSRHLEQAGCEVVVSNPRKTRAIYQHERKSDRRDALMLARIARMEPALLYPVRHGSEEAQQELLRIKLRDSVVRARVALINSLRFTLKSLGYSIANPSTERFHKVIQSALPQSVAQVIAPSVQALEELTLRIKLLEREISDQARSKYPDTAWLEQIPGVGPITALYFVLKIEDPARFKRARDVGAFLGLCPRRDQSGENDPQLRISKRGDAYLRRLLVSSAQYILGPFAPPSALRQYGLALASGATARAKKRAVVAVARKLAVLLLTLWKNKSSYQAFPQRSSREKMRTNDLERLRCIA

SEQ ID NO: 415734 - protein, 347 aa, unidentified
MTIVEAVRGVTGGVDTHLDVHVAAALDPLGGLLGTESFSTDLAGYKALLGWLESFGDVSKIGIEGTGSYGSGLSRYLRRVGVEVIEVDRPNREERRRSGKSDPLDAVEAARAALSGRASGRPKSRDGAVEAIRVLVVAKRSARQARVKALIQMRHLSYSAPEQLRCHLKGLSVCALVAEGTKLRPTRSADPVTAATKASLSSLARRIETLGRELAELDARIEVLLVATVPELLRCFGVGPDTAAALVMAAGDNPERLQSEAAWAHLCGVSPIPTGSGKKGGKVRAHEGGDRQANSALWRIVMVRIAHDPRTQVYFERRLKEGMTKPEVIRILKRYVAREVYRYLPRG

SEQ ID NO: 415735 - protein, 425 aa, unidentified
MKIQTIHSKTISDNKLVVAFDVGKDKLNAYCEYGQHCFQDSFANNTLKIEQKLITFSGIADSTGYDGLRIIAEPTGIYHLKLFRTARRLGHQTAIVNPESVHKFKVVESNDAGKSDEKDPRVINLLAKYGKTLIDRDLRDEYLLLRQLNTMIIDEEKAYTSTRCKIHRVLAELFCDYSFKKDFLYSNTGRIFMEKYHANPYRVVQRGYGVFYQRLKRAAPRIRKTTLQRLWQDAQCSVRHQLPADYVQILESRLNYLWEELLLRENRMAEIEDAMISVTDELRLKEPNIPIPVKGVITAFRIAQLLAETGPLSDFKSIDQLMRYAGLNIRECQSGYYRGNNKISKKGRSNLRRVLGYIVLPLVKKKSLYGTVYHAKKDSGMVGNKAMVAMMRKFLRMFYGWYKSGLPFDENRVFADEVNCVQITQ

SEQ ID NO: 415736 - protein, 342 aa, unidentified
MKFYCGIDLSARDCHVCVINEQLKVAIQQKLRNELPKICQLLAPYKANLKIVVESTFNWYWLIDGLQAAGFEVVLAHTLGLYLITGAKVKTDRRDAYSLAKLLLVGAVPAAYIYPVETRPVRDLLRRRLHLVQVRAGEYGSLRRLLLRQGILSSKQQEIKTATEAELEQWFEHPLVRLHASQELERIELYSQQIAELEKTILELAKTERAYELLLQLPGVGQTIALTILYEVGELTRFANVKVFSSYCRVVPGIAQSGNVTGRGRASKQGNHYLKAAFSQAAVHAVRCYPKVRRYYERQLKRHQGRGRQMICYNIIAHKLAQAAFHVLKEQTEYREELLFGR

SEQ ID NO: 415737 - protein, 343 aa, unidentified
MDEISMIGLDIAKNVFHIHGVDASGAPVLRRQVRRGQVEKFFAKLPPTLVGLEACGSAHHWARVIGRYGHQVRLMSPGYVKPYVKRNKNDGRDAEAICEAVGRPTMRFVAVKSVEQQATLAVHSTRALLVRQRTAAANALRAALSELGIVAAQGVRGLRALMQQLEQPSEAIPELMRNALLLLARQWEALDAAERMLEQQITRAIQADREARRLMAVPCVGPMIASTVLAKVSDARVFRSGRDFAAWIGLTGRDHGTGGKHRVGRISKQGDRMLRTLLINGASAYLLHQKRRGLTDPWLRDLLARRPYKVVMVALANKTARIIWALLAKGGEYRARASVPAAA

SEQ ID NO: 415738 - protein, 351 aa, unidentified
MMIIGCDFHTRFQQIAMMDTTTGELVERRLEHATGEAERFYAALAVPARVGIEATIATQWFEKRLTRYGHELWFGDAAEIRAAMVRKQKTDTRDARHILSLLMEDRFPRIWVPSAAERDVRQLVRHRHKLVRLRTSVMNQLHALAMGQGLCLSKKLWTRVGRQKLESLLLDPWASLRRKELLGLLDQLDPSIQRLDRAVSSEAERRPTAVCLMQQAGVGPVTSLAFVLTVGPVSRFANSKKLVSYLGLNPSEESSGGRQRLGAISKQGNTMMRCLLVEAAQTAARLDPELRRDYQRLKFRRGHSGVAKVAIARKLAVRLYWKLREAARPVPLAPMQGSPAVAVVGENLSCF

SEQ ID NO: 415739 - protein, 460 aa, unidentified
MKKTTKSSKTKPAQLTSLNPKCAGIDVGAGELFVCIAKNSAEQEVRSFPTFTADLRHMLEWLKENDIESVAMESTGVYWIVPYEMLDEAGFEVLLVNARFFKSVPGRKTDVQDCQWIQQLHSYGLLRGSFRPSNEVVELRSYVRQRSRLFESAGIQVQLMHKALTQMNIQLNNVISDITGVTGLNIIRAILKGTRQAQILAELSVGACRKNMNLIEKALEGNFRKEHIFALEQAHEAYEFFHKQIHRCEKAIEKILSSMQIGVQLSLSKSDVSTKSILPQKCAKKTASNRSPYCFDAPAAIKKVTVSDLTTIPGIDANTAMKILSEIGTDMSQWPNAKAFASWLGLSPGNKISGGKLLSSRTKPSDNRAAQALRMAAAALYRSRTAIGAFFRRLRARLGAPKAITAAAHKLARILYRMLANGTNYREAGENYYEQQYQERVIDNLVKRAKEFGYTLVPAQ

SEQ ID NO: 415740 - protein, 492 aa, unidentified
MPGPSLGIDLSINGAHDCTVLDATGQVTQRFTFDSSEAGMRKLEHHVRVIEASHGAPVVVMEPTGLAWFLPCLYLRAEHPAVKIVRIKTSKVAALRRYLKQDAKSDRLDSFTLAKMPFVDPEKLYAVDLPPAALQGLDRMTRQRARLVEDLTGRKNRLQALLRGYLPGLMEAVGKPWELEFRAVLTVSLNPFTLVGRDAARLRKALQDKLSRRARLEELVPQLRTACERLTRLYHPIVEAGQLTEAFFDDVRDEVTRELRLMEGEEREVKELEMAIARRYQEVAPKDHLGTMKGFGAVTAPTILAAVGTSKRFKSQAAFRGWTGIVPYASQSADSDAKGLTMTKAGPKRVKLALYQAAETARRWDPQLAKIYHDQMVTKGKPHYKAIGAVMSHLASRIHAVLTEQRDYVLRDVDGREVTTREARTIILTRYQVPAEIRAERRKSRRRRKQDVSTEHHRGSAKRSSRRSSRSSTLHSTRAQEVEQTGAAAISH

SEQ ID NO: 415741 - protein, 326 aa, unidentified
MSFDIGIDVAKDKIDCLWLRDSVNLKVKTKVFANTSKGFKSLKLWVEKNVSTEFENIFVSLEATGVYHEALSYALFDMGLQVSVVNPAFIRDFAKGLGVRGKTDKKDSMVLARYSNMVRPSLWSPEPKEIRTLKAMISRLAGLEKDLQRESNRLEKAEISNASIIVIDSIKSMISHLELEVKRIEKMTDDHIDQNPELKKDRAILRSIPGVGDVLSREMLSVLRSRNFVKASQAAAFMGVVPKLWESGKMKGRTALCKNGPGRLRANLYMAAVVATQHNPDIKIQYERLLQAGKTKMQALGAAMRKLVQICFGVLKHQCEYRQQTI

SEQ ID NO: 415742 - protein, 384 aa, unidentified
MKKNTTAKKNQKAVSKTYKNQIRQMAAKQRLTIGLDLGDRTSRYCILDEAGEVVSEDQLPTSKTGFRSLFEKMPASRVALEVGTHSPWVSRHIASMGHEVIVANPHKVKLITQSVRKNDRIDARQLARLARVDPKLLSPIRHRGEAAQADLAVIRARAELVECRTGLINCARGLAKPIGERLKKCDADQVKEALADGLGEAVQTVIRPLLKSVEAISEQIAVYDEKIGGIAKRYPETELLTQVYGVGTLIALTYILTIEDAQRFEHSRDVGPFLGLQPKQRDSGSSQPQLGISKSGDRLLRSLLVQGAHCILRKGAPDSDLRAWGLGKLASGGKRAKRRTVVAVARRLAVLLHKLWVNGEVYDPLYNRKAMAAAKARAKAKAAA

SEQ ID NO: 415743 - protein, 389 aa, unidentified
MIYVGIDVAKHKHDCYIITSDGEIIEDVFTISNDLSGFTQLLNSIPNVSSENIKIGLEATGHYSINLLNFLKDRYHHIVVFNPLQTNLFRKAHTLRKNKTDKIDARFIALMLHSNDYNSYLDISYHLQDLKSLTRHRFRLKSQSSKLKVSLTRLITIMFPELTSFVYSIHQKSTYALLEHFPSTTEIANAHLTTLSNLLYKASKGKYSKEKALLIRDTARSSIGSDSRATSFELKQTLRLIKSIQDEINSLDSEIESIMNDLQSPITSIPGISNTLGSMILSEIGDISRFDMPSQIQAFAGLEPSTHQSGNFTASNSRMVKRGSKYLRWALLEAARLIVMRDTTFKLYYQKKKAEGKHHFVALSHVAKKLIRVIFHLLSNNLNFLPQLA

SEQ ID NO: 415744 - protein, 390 aa, unidentified
MSYFVGIDIAKNKHDCFIATGDGEVVRNSFTFPNNDEGFRTLKATLDQLNHSQKIKIGLEATGHYGKNLKQFLTSIGYEYSELNPYLVKKFTQSITLRRTKTDKVDAQMIAKFIQLEASKPTTPPSYNTMELRTLVRNHDRLVRSRSDELVKITNSLDRIFPELKEFLNDRIGEWALYLLEHFTTPEKISRLTSGQIQKLHNVGRKVTVNRITMLKELAAKTIGHPSPADELVIKQSVKMVRAINDSIEAYRSRIEAIMKEVDSPLLSIPGIGMMTAACLHAEYGDLRRFSSPAKLLSFAGLECSKNQSGQSDRKGHMVKHGSAHLRYVLMNAAISVKNHCPAFSAYFQKKYSEEHKNYRVALNHVVRKFLRVAFKLVTLNESYSLELSK

SEQ ID NO: 415745 - protein, 366 aa, unidentified
MKKISTVEIDRVQIFKENQLTIGLDLGDRTSHYCILNEAGEVILESKLPTTPRGIEEIFSKIPRSRVALETGTHSPWVSRQLTQLGQEVIVAHARNVRLIGDSSRKDDQLDARTLARLARIDPGLLGPVRHRSAQAQIHLTVIRARSGLVGARTALVNAARGLTKSYGERLQKCGTHQMSRESAQGLSQELKDALDPLLGEIESLTERIAEYDRRIEKIGKEIYPQVALLKQVKGVGTLIALTYVLTLDDPYRFRRSRDAGCFVGLRPGRRNSGMSQPQLHISKEGDAYLRTMLVQGAHYILGPFGQDSDLRRWGLRLAERGGKNAKKRAVVAVARKLAVLLHKLWVSGEVYEPLRNNRQVVSAVA

SEQ ID NO: 415746 - protein, 293 aa, unidentified
MGIRIIGLDIHRDFAEAVTWENGKLKRLGRIDMRRDRLAAFAATLSSNDIVVVEATGNAAAVAEVIGPYVRRVVIANPKQVRIIAHAKIKTDTIDAGVLAQLYGSGFLPEVWIADQPTQALRRQVTRRNQIVRQRTRLKNTMQSILHAHLIPACPHQDLCAPKGRAWLGEQVLPADERRAIERHLREFDRLGEDLRVVERDLARSALADERVARLMTVPGIDMVVALAIVAAIGKAERFERPQKLVSYLGLNPSVRQFGPGPAHHGRITPDRVRIRDARDGRDTPCRGRSASD

SEQ ID NO: 415747 - protein, 473 aa, unidentified
MGKGNGMTRGDRRRNARREQLRGMLPRDGAVIGIDLADEKQALAVIDHDVRVLARKTVRVKAFRLGEALDWAVAQARAKGFTSVTVACEPTGPRWLQVQRLCAERGLRLVCVQPLVSHIARQQQDYTAHKTDEADCVMIARLAVELHCYVPEELDEVWADLRHLGRRRAALITSETASVQRIRDFLSVAWPVVPEACAQPFESMTWLAALQAVTSRCGGQPGELAVIGLQAFTALVRDALPGWGGQRIHGPICRAVFAALTSTEGVVRGHRRGLLRRVAAELGDLQRARTQRQETEAAMIAALGDLGLARLGDIPGLSATGAAAILAETGDPKRYDTSSSVVKHAGLSPSDNASGAFDGEAHISRRGRPGLRLTVWRAVWAVLIHNPVMAAKYAAMTQAADQAAADTRAGSSGHATSAAEAARRRRAKARVACAAALLRWIYSMVVHGTCWDPGVAAGRKDTLAAPSCQPEAA

SEQ ID NO: 415748 - protein, 382 aa, unidentified
MQASTVGTPTAGHSGTIFVAIELSQKTWLVTLHSPDRDRISRHKIEGGDHVELLALVEKVKARAAEKLGSAPHVVSCYEAGYDGFWLHRLLQAAGIANFVFDAASIAVEQRSRRAKTDRIDGELMLRTLMAYLRGEPRVVRVVRVPSVEAEDARRASRERDRLIKEQTAHTNRIKALLRLLGVAVGNPRRRNWLSFLEQQRDWQGQPLPPHLLAEVKREHARLTMVREQIAALEQAQAAQACPVPAPMAERRSSLQRLKALGPAFTATLVDELFYKDFRNRREVASYCGLTPSPWKSGGIDREQGISKAGNRRARNKAIELAWLWLRHQPDSALSRWFRTRTANAGKRAKRIAIVALARKLIVALWRYLTTGLIPEQATMKA

SEQ ID NO: 415749 - protein, 423 aa, unidentified
MDIMHARCAGLDVHKAMIVACVRLTIDGKVNRECRTFDTTTAGLLALLAWLTESGCTHVGMEATGVYWKPVWNILSDGAFELILANAAHIKNVPGRKTDVNDATWIADLVACGLIKASFVPGEAIQELRSLLRARKQLTREQTSHIQRIQKTLEEANIKLDSVISDIVGLSGRRMIEAMIAGVTDPSKLAALADRRIKAKPKELYDALHGRLTEHHRFMLGLYLGQYDTLDKAVVEIDRRVEASVARMDEEDKAGQAPFRSLIDLLCTIPGISLLGAMVILSEIGRDMSRFPTAGHLLAWAGLCPGQNESAGKRKSSRLRKGAPWLKTLLVQCAWAATRKKDSYYKAQFHRLRGKHGPKKAICAVAASMLTAIYHILKDGVPHEDLGIDYFNNQKPEAKVKRLVAQIAKLGFEATLKPLPKVA

SEQ ID NO: 415750 - protein, 384 aa, unidentified
MIKHSILFIGLDTHKVSTEVAHVEDQRGAKPVHLGKINTTKAAITKLARQYQSKYPHATLHFVYEAGPCGYWIYRLLTSLGHCCYVVAPSLIPKKPGERVKTDKRDALKLAKLLKDEELTPIYVPEPEDEAIRDLSRSRETAMKDLKDAKYQLKALFLRNNITCKVNDNWSLQHLHWLTELILPHPSQQIVLQEMIQTITERIAREKRLANELFHQVKHWRFYPVVKALQAVRGVRLLIATGIIAELGDLRRFDHPRKLMSYLGLVSKEHSSGDKRRLGSITKCGNGRARRLLVQGAHTYKHKANISTELQKRQEGLPKEINDIAWQAQLRLCRRYNRLMSRGKHRNVVVIAIAREMAAYIWAIAREVIISPVNSRLRVSRVPA

SEQ ID NO: 415751 - protein, 387 aa, unidentified
MGRVVIGMDPHKRSATIEIIDDRETVLAGGRFGTDRDGYRAMLAAGRRHPERIWAVEGCNGIGRHIAQRLVADGETVVDVPPKLSARVRVFATGQGRKTDPVDAHSVAVAALRAKGLRQVVVDDETVALRLLVDRRDELGRARTDLVNRIHKLLLELLPGGAKTFLRADQARVLLATIRPRDLVGRTRRRLASELIAELVQIDKKIKAANTELTDLVTASGSSLQDLNGIGPSGAARLIGDIGDIRRFASRGHFASWNGTAPLDASSGDQQRHRLSRAGNRRINRVLHIMAIVQLRHDTAGRAYYRRRLAEGKTAMEAIRALKRRLSDVVYRHMLRDIQRTATGPGGQPGATLQSSAADPNPEVNTSEKSLPGPADHHPRTPNTDAA

SEQ ID NO: 415752 - protein, 370 aa, unidentified
MLDTTTFVGLDVHARSIKAVSLDVMTGEVRCATFGYDAGAVAEWVRSVDPGARCVYESGVTGFDLQKRLSGLGVDCVVGAVSKMIKPSADRRRKNDRNDAEFLARMLSVGNVVEVWVPDDECEAARDLTRALEDARDDLSRSKQRLSKFLLRHGLVFDERTPTGRRKGNWTRAHWSWIESIRFAEGADNDVLAYYVDAVRRAAEEKARLEGLVEAEARKPRWRRRVDSLRCLKGVDTASAADLVFEAGEFSRFRNARSFAAWVGLTPSEHSSGESDRRGAITKAGNKHLRKTLVEAAWHYLTCSGRPKDLAKGQAPDRGARRHAAKGVRRLVERREALLARGVHGSKANVATARELACWVWAVGLMAEEA

SEQ ID NO: 415753 - protein, 427 aa, unidentified
MDYTQNAKIAQVTEKTLIIGVDVGSETHYARAFNWRGQEFSKKAFSFGNDLGGYLAFVKWLDAYRQSMNAEKVFVGCEPTGHYWFNFARYVKQGSMTLVLVNPYHVKQTKELDDNSPTKNDRKDPKTIAKLVSEGRYTFPYMPEGIYADLRQAVSSRDRIVKELNATTNRIQRWLQIYFPEFLKVYNKFSAESALLVLETAPYPADIIALGADGVNQIWREHRLRAVGMKRAMTLVEAARKSVGMDGGVCARLDLQMLLEDFRRKQAQLKQITELLETETRKVPHIEKLLAIKGVGFITVAGFLAEVGNVGRFDSPKQIQKLAGLELKENSSGKHKGQSSISKRGRKNLRKILFQAVLPLIRSNDEFREVYHYYTTRQKNPLKGKQAIIAVGCKLIRVFYAILTHGADYDANRLRTDIIRPQEQQAA

SEQ ID NO: 415754 - protein, 421 aa, unidentified
MKSTIPTILAGVDTHSTTHTLALLDEHGRVTDTETFNADPKGYERLIAMIGGPALCLGVGVEGTNSYGAALSRRLAAAGYTVHEVLRPKRSVRRSDGKSDPIDAIAAARSVLAGDGISTPKASDGWCEALRHLIAAREQLVTSMTAISNCLAGLLTTAPEGIRERYRSLPSKRRIGKLAACRPSGGIVERNVLSSLKTLASSWRELHDRADVLECRMRQIPEENARPLLDVYCMGTMSAAQLAVIGGDNPERIRSEAAFSKLCGACPLPASSGKTNRHRLNRSGNRQGNRALYNVALVRMSHHQPTKDYVVRKTKEGKGKLEIMRCLKRYIAREVYRALIAIRNGEAGREPAVERGARLRKVRVSLGKTQQQVGDALGVPSSRVSEIERGVRDLPELERQIIEWMDSILGQSQHSNTFDNV

SEQ ID NO: 415755 - protein, 467 aa, unidentified
MSEVRLGIDVACRADHRASLADERGEFIWSSWKFRTTTADLERLWAKIPDGASVTVILEPTRNAWVPLSAWLQARGATVILVPPEQSADLRDYYNKHTKTDRLDSRVLARLPMLHPEGLRGIDNLGPAQSLRRAVRHRASMVKRRTAASLRLDALVELLGPGWADCLGSATASKTALVILEKYADPRALKRLGRGRLAALLIRSSAGLWREDKADELLAMATETLELWACGGIDFTDLAHDIASEVRVLRQLDDEITAADKRIAALYDEADPKGIVRSAPGLGPVLSAAILGNAGDFNRFANLAGVRSFTGFVPKIDQSGLVNGRKGITKAGDAGLRQALYLATDHARHIDPTLAQRYHRLVMVEGKHHNSALCALSAVLITRIAACWRKGEHYQLRDEYGEAITEAEGKVACADRFKIDPKVRAARRRNTPAKVLKNRAGRGRKESAQKVAPAFDPPDEKASENVA

SEQ ID NO: 415756 - protein, 347 aa, unidentified
MYPFYLGVDLHLKRSYVVLMKDDGQIIDQRGLPNDRMKEYLTKHVPVSTYAVLEATRNWPFMYDLLIEHVERVELAHPKELKAIASAAVKTDQIDARVLAHLARLSYLPTSYAAPLEIRDLRQFTRHRTWLIGQCTQAKNRIHAVLAGYNLVSPVSDLFGVQGRECLAQWMKDGLRPAAMRVIQDNLTLIDTIHQQLEVLEKNIQISPAADQAITLLMSVPGIGKITATTIVAEIGDINRFGSSKSLCNWAGLTPRVRKSDVIVRHGKISKEGSPYLRAAMVRAATAAVKKSPRWRTVHKNLSRRSGKRAARVAVARRLLTVAYHMLQRNEPYQEDYGQKGHSDRGA

SEQ ID NO: 415757 - protein, 390 aa, unidentified
MGCYVGVDVAKHFHVAAIVDEAGQVLHTLHFDNNLTGFQRFDQILSSEMLVALEATGHYGNALRDWLLSCGFEVHVFNPLKTNRFRDFNIQWRKNDERDAIAIAHLLRLGERQLYHPFPPKSRALRQLVRHRALLVQARARAKNQLRAMLDEVFPEYQACALFSDVFGSTSLALLSHYPSPAHLIGLSEAQLASFLSQHSQGRVKAQRAQLILEAARQSIGSPAAGEAYAPILPAFVAGYQALTAQIDQSTTQIEAQLAQVDQTLTTIPGIGPVLAATILSEIGHIDRFPSADHLVSFCGLALSESQSGQSRTFRFLSRRGSARLRSAFFQAALVAVKYDPHLKSYYQRQLQRGRSKRSAVLSTARKLVRICYALLKSGQAYQPPNATVG

SEQ ID NO: 415758 - protein, 340 aa, unidentified
MSSSQSTTARSIIYLGMDVHKDSITIAVLPAGAKAPTRIERLPNDLAKLKRFLDRLGREGELRACYEASGAGYVLHRALREWGYACDVIAPSLIPKRPGVQRKHDKRDASELARLYRAGELTPVRIPSEAEERVRDVVRCRETFQREILKSRHYILKFLARRGLVFREGTNWCTPHLRWLQHLTTEQSPLAPADRLVFREYHALLEYKLQRRDDLDREIAHLAELPTLAPMVRRLQCFRGIALQGAMVLATEIVDWRRFERPTQLAAYLGLVSREDSSGDRERKGSLTKAGNSHCRHVLIQAAWSYHHRPAARPNCGATLCGQCMNMYSRWCLEPSNAPS

SEQ ID NO: 415759 - protein, 326 aa, unidentified
MEHELHYIGIDTAKEKLDVDVLRPDGRHRTKKFANTTKGHDELVSWLKGHKIDHAHICIEATGTYMEPVAECLYDAGYIVSVINPALGKAFAQSEGLRNKTDTVDARMLAEFCRQKRPAAWEAPHPLERALRALVVRHQALTDMHTQELNRTETAREVQRPSIDAHLLWLEAELKRLEKQIKDLTDDDPDMKHRRKLLESIPGIGEKTSAVLLAYIGLKDRFAHARQFAAFAGLTPRRYESGSSVRGASRMSKAGHVSLRRALYMPAMVATSKTEWGRAFRDRLAANGKKGKVIPGAMMRKLAQVAYGVLKSGVPFDASRHNPVAA

SEQ ID NO: 415760 - protein, 341 aa, unidentified
MKRWIGVDLHKTQFTVCYLHKNGEHKIQVFKVALKDIEAFKKTLSKADEIAVESTGNTGYFAREIKSQVKAVRIINPTQFKIISSSVKKTDEHDAVTIARYLSKGLIPEVRMRTKAESQIASLIGTRDKFVKLRSCLKNKIHNILNANGIVTKREIFGSEKGLDKVLAHDIEASYQFELKIIVEQIRSLNKSIDDIDKEMTERGKKLDGHKSLTSLTGIGDISATILLNTIGDVNDFADDKKIAAYFGIVPRIAVSNETSHYGKITKMGSKIARTALVQSTLIAIRYNPYLRKFYFKLKAKKGSGKAIVATARKFLTIIYRTLKNKWVFEDFNKFKLAPSI

SEQ ID NO: 415761 - protein, 335 aa, unidentified
MVSGNGEILREDQVPTTKAGMTATFGSLGRVRIAIEVGTHSPWVSRLLDSLGHEVIVANPRQVKLITESSRKDDRLDAQTLARLARIDPQLLRPIQHRSEKAQTALMVIRVRAALISVRTSLVNTARGLAKAMGERLPKCDADQMGVLKAESVPAKLRHLLEPLLKEVESLTEKIKDGDRQIEQIAREDYPETTLLQQVGGVGPLIALSFVLTVDDKNRFQKSRDIGCYIGLRPRRSDSGQRQPQLRITKEGDPYLRTMLVQGAHYILSRRGPDTDLKRWGLRLAERGGKRTKKKAVVAVARKLGILLHRLWVTGEVYEPLRNHKLRQEQKKIAA

SEQ ID NO: 415762 - protein, 358 aa, unidentified
MQSNKINFKGQNIFIGIDVHLNSWSVTTITPSGYKRQTSHRADALELYAYLTKNFPGGIYHAVYESGFCGYSCCYELRELGIDCVIVHAADVPSTQKSRLSKTDSNDSMRLAMSLSNGELNTIYIPPKEVLGDRDILRYRTIVQKGMSRTRSRIKHLLHTNGVSYPLEFREPYKHWTRRFIKWLREDVRLLSGKRLELDFLLEDLEHQRSQLLKATGKVRELSRTSRYAEDYGNLISIPGIGLITAMTMLTEVTDIHRFSSQKKFMSYVGLIPVMKDSGETIRQNEITPRGNQRIRRMLMESAWSAVRYDAQMAAAFGAFCRRMKKNRAIVRIARILASRTYHILKTRIKYDTALCTA

SEQ ID NO: 415763 - protein, 371 aa, unidentified
MKDKKNNAVSGDGSSQASVEFNGDRVLKLGLDMHYHQVTVAMQEDGGRIKTVGKMSHPAFGNWVEKKLKAGWQICSCYEAGASGYWLHRDLEQMGVENLVVAPKAMGQGGKQQKTDRRDSGELTDALERYLRGQDRALSVVGVPSVEQEQKRALIRYHRQIMADRNRYEARGKGLLCAQGIEVYGLWWEAKGWEELKHHPRLKEWMKEQLEGWRSKLLSAEGEQRRLRERVEALAPALLPKGLGTYSAVVLEYEMKGWERYENRRQVGSYTGLCPGIHLSDGRGKEGSINRCGNRAVRWTLVEAIWRLMIWQPHYRPVRQLAAGLVRSKRAKKRLVVKAARQLAIDLWRLHTGQTTAEKLGLIMQFHPHGD

SEQ ID NO: 415764 - protein, 346 aa, unidentified
MLHVGLDLSRTRVDVHVMDETGAPVLVTTAAPDSGGLASLASRVGEFGQPVTAAIESMTGARFVHDQLELRGWQVEIADAVKVKGLAPLAAKTDKIDAWVLAELSRRDLVPAIWLPDPAVRGERERVRWRLHLVRHRTALKNRIHATLLAFGHPCPVADLFGAAGRRLLAGLELPEPWAGDVAAALRLIDSLDAEIDGCEAALRTAGADHPYVPLLTTVPGIGPVLGYTIAAEIGDIARFPTAKKLVGYTGLCPIVRQSGRKDHRDSLAKNGPKYLRWALIEAATHAARHPAYAERYQQTKTRLGRQRGARIARVDLARRLAEAIWYMLTTSQPFAPAGAAKPLAA

SEQ ID NO: 415765 - protein, 343 aa, unidentified
MDRTTVAIDLAKTIFEVAISRQPGHIHQRRRLSRARLGPFLAELPPATVLLEACGSAHFWARLAQAHGHQAVLLPPHATRPYVLRDKTDRADARALLEAFRNQDIHPIPVKSVDQQALTALHRLRSAWLATRTARLNALRGFLREFGVVIPLGARFVLPQVHQLLGQSDSPLPATLQPVLADTCAEIEELESRIRALEHQLATLAQDLPVVAQLRSVPGVGLLTATALVAFVGNVHRFRSGRRFANYLGLTPREHSSGSTRHLGKISKRGDPYLRMLLIHGARAVLCHAHRLPRPDRLRAWALHLEQLRGHNKAAVALANKLARIVWAVWKSETRFQEEELAA

SEQ ID NO: 415766 - protein, 358 aa, unidentified
MIFIGVDVHVRNSYLHVSDETGQRLAHGRVGNTLGEFAQFLGPFEGRGPIVASMESTTNSRAVVRLLERYGHEAGVDLTARVLDARRLRVIAESVCKNDQVDAAVLNELTRSGLKLPTCYVPDDEVFALREHLRARSDLVRMRTMVKNRVHAVLHRRGVITPAKLDLFTKAGRAYLQAVELDAAGRAILDRYLGTFDAIQAVIKQSTDDLKALSRQDRWCKRCALLQTMPGVGLITALTILAELGDLQRFTSRSAVANYAGLVPVVRDSNDKRYRGSITKRGSTHLRHVLTEAAWVAVGRSVKYAGVYQRISDRKSKPIAIVAVARKMLEDAFMMIRKDQVFREAGVERPRAASSAVG

SEQ ID NO: 415767 - protein, 384 aa, unidentified
MKQNQETLRIKDNIKEAILHIAFELSHLKWKLAFSNGEKMRTVTIEARHLDKLHEEIEKAKQRFGLEGQIRMVSCYEAGRDGFWLHRYLLSCGIENVVVDSASIEVNRRKRRAKTDRIDVRKLLHKLLRYHGGERLVWSVVNVPSEQAEDGRQLHRELEVLKKERTMHRSRLKSLLIQQGIVAPNPSSRKFLIQLETFRRWDGTELPADLKSRIIREHGRLRMVEEQIYTLNKERENRVAAADNMSMQQVAHLMTLVGIGMNSSWKFVMEFFAWRDFKNGKQIGALSGLTPTPYDSGSSLREQGISKAGNERVRTLAVEMAWVWLRFQPQSKLSQWYLKRFAEGGKRMRRIGIVAMARRLLIDLWRYLEHGVVPEGARLVNIVK

SEQ ID NO: 415768 - protein, 358 aa, unidentified
MNRSTGVNAGQIIGTMNGLQVVGLDIAKHVFQIHTVHMGTGEISNLQIRRAAVAEYFANKSPCLIAIEACGGAHHWARELKKLGHTVRLIHAKVVRPFVVGNKTDATDARAIWLAVQQPGVKFVGVKTAAQQATLTLHRQRELLMKMRTMQTNALRGLLYEFGATFAKGRNALFKDIAQTLENLADKLPQMVRDSLREQLERIKALGQDMLAIEKRLALQLKADPQMQRIVQIPGVGVLTATAALATMGDANAFKSGREFCAWLGLVPTQTGSGGKVRLGNISKRGDIYLRTLLIHGARSVLHHVKEPGPWLQQIKQRRPANVVIVAQAAKMARTIWAVTAKQQDYQRGFKSVRPLAA

SEQ ID NO: 415769 - protein, 325 aa, unidentified
MSLPCLGIDVGKHKLYAALLFTADRKPKRKTLSNDASGHQALLQWLAYHRVDRVHVCVEATSTYAHPVARYLHEQGHVVTIANPKQVKAYGESLLVRTKTDRVDAAVIARFCLERKPRAWTPPTPEVEALQALARRLDALDKMISQERNRLETTSSELVEDIKAHLEFLKQQRKSLLEKINHHIECHDTLNHQRDLITSIPGLGDKTAAIILAEIGDIHFFKSARQLAAHAGLTPKEHESGSSIHKKPRLSKVGNARLRKALYMPALASINHNPVIAQFRERLLGAGKLKMQVVGAIMHKLIRWVFGVLHSGQPFDANKALAVHA

SEQ ID NO: 415770 - protein, 370 aa, unidentified
MLNVTTFVGLDVHARSIKAVALDAMTGEVRCAAFGYDAAAVADWVKAIDPKAKCVYESGVTGFDLQKRLAALGVDCVVGAVSKMIKPAADRKRKNDRNDAEFLARLLSVGNVTEVWVPDDECEAARDLARALEDAREEVARSKQMLSKFLLRHGLVFDETNPSGARKKNWTAAHWAWIKSVSFAERADNEALAYYIDRVNQATEDKARLERLVAAEASKPRWKRRVDSVRCLKGIDVTTAADLVFEAGEFSRFKSARSFAAWIDLTPSEHSSGEGVHRGGITKAGNRHLRKDLVESAWHYLSCSPHSKDLARGQVPDPRARSHATKGVRRLVARREDMLARGLNKNKANVATARELACWVWAVGRMAESA

SEQ ID NO: 415771 - protein, 352 aa, unidentified
MRKECSTVSFKNQVIYVGIDVHKSSWQVSIRHCRHHLANFSMNPDALKLAEHLSRNYPEAEYRSVYEAGFCGFEIHRSLCGLGILNIVINPADVPTSGKERANKNDCLDSRKLARELENGSLEGIYIPQEDNLVLRNLTRRETQLTGNITRVKNRIKSHLYFNGLKFRSWSGSSLKIMESDAVKRHDFALCSLLRELRFLRLEKLQVVRDEKECLKFLNREKTQKNLQSIPGIGFRTAVVLQSELWDLKRFPDKDHLKSYVGLAPRLVGSGEHEEVKSAGNRKKKQLHYLLIESAWRAARFNLEYRARYGLLIAKGTNPQRAITIIAKKLLMSIHAVWTQDRNFKVLLPRTK

SEQ ID NO: 415772 - protein, 339 aa, unidentified
MGIVGAFDVHRRQLTFDYLDTGTGELMRGRVVPADRDHLRQWLARFAGQDEVHFALEGCTGWRYVVEELRAAGITAHLAEPTDTAALRGKKRHAKTDKADARHMRVHLAAGDLPECWIPPAHVLEARGVVRLYKDLLDERGCWHQRIAATLFHQGVPAGPSMCTAAGREAVGQMDLSAAGRQAVETGLRQIDRLTGELDPLRRQLDMMSRRQPGCRALRATQFGVGAVTAVAIWAELGDVRRFASSDDVVRHTGLDITVYSSDGKRSPGHLSRQGPQLLRWALYESAKCAARPSAPDYGYYIAARERRNAGLATLSVARKLARRCYHTLRELGEQAMAA

SEQ ID NO: 415773 - protein, 341 aa, unidentified
MGRWIGVDLHKNRFTVSYLGANGEYELLEFTVSAKGIKSFKETLTKDDEIAVESTGNAGYFVRQTENAVKVVKVINPLQFKIISSSVKKTDEHDAVIIAKYLSKGLIPEVRMRTKEESQISSLISTRDRMVKLRTALKNKVHNILNANGIVTKREAFSSDKGLNNVLVLNIDEAYLFELRIIVGEIHSLNKAIDEINKELTNRGKKINGHQNLTSITGIGDISAAILLNTIGNINDFDSDKKLAAYIGIVPRVYVSNETSQYGKITKMGNKIARTALVQSTLVAIRHNPYLRSFYSRLKAKKGSGKAIIATARKLLTIIYRTLKNDWVFEDFNKYKLAVSI

SEQ ID NO: 415774 - protein, 338 aa, unidentified
MKVTTLGMDLAKSMFQLHGVDAQGKVAVHKRVTRSKLRETVAQLPPCMIGMEACGSAQYWAREFQKLGHTVKLRSPQFVKPYVKGNKNDSRDAEAICEAVSRPHMRFVPLKTVESQDIQAIHRLRSRLVKDRTALVNQVRGLLAERGIVIAQGITRLRQQLPMIVEDQGNEWTPLSREVMRELYEQLVALDERIARADRMVQRVFTENAPCQKLAQIAGIGPVVATALIAAVGNAQEFDNGRHLAAWLGLVPRQCSSGGKERRLGISKRGDRYLRTLLIHGARATGHRARHKTDARSRWIRSLEQRRGKNIATVAIANKKARIAWALLTSEAEYRKAA

SEQ ID NO: 415775 - protein, 369 aa, unidentified
MTIYTLKAAPTASAVELKNNNKSTKAKRILVGCDVHLRGYQAARKIDEGAIGVVDNFRSEEALLLYIEKQRQQAEQVVVVYEAGPLGYTLYRKLRATGVLCYVCAPDSTQQRKKRRKNNQIDARSLTSKLFNYLNGDQHALQLARVPSEAQEQQRMASRQHDQLVEERKRLGAKGNAMLLSQGIGSWSNWWRPKAWSQLSRVAPQWLLERLQIWVDVLKILDEKISQAKAALARACSGPRPKGVGALSQMQLQSEVLDWSLYGNRRKIACLAGMVPSEWSTGDKASRGSITKVGVPALRRIIVEMVWRMVLFQPQYKPVQKWQAVLKGPNPALKKKAVVAIGRQLMVDLWRLQTGRVTAQDLNLIMVEN

SEQ ID NO: 415776 - protein, 356 aa, unidentified
MSRDVKYIGMDVHKEAIVIAVLNDGGKLTMESIVETKASSLLQFIHGLRGELHVTWEEGTWAAWLYDLLQPHVTEVLVCNPRKIPLQKQGNKSDKIDARKLAERLRLHDLKPVHHGESGIRRLRELARSYLTIVKDLSRVMNRLKALYRSWAIPCAGWDVYYTPRRSQWLDKIPEPGVRYRAEQLYQQLDMLQHLRQQARRELLVESRQHAITAKLRQIPSLGPIRSALAVALIQTPHRFRSKRQLWTYSGLGLETRDSGEYQFVQGQPRRRKKQATIRGLNKDYNHDLKGLFKGAATRASVKPGPFQEFYQRSLAKGIKPTMVRLTLARKIAAITLTLWKKGEDFDIAKLNSQAA

SEQ ID NO: 415777 - protein, 328 aa, unidentified
MDRWIERCCGLDVHKQTVAACVRVPGAQGRRTQEVRTFGTTTPDLLALQDWLAAHQVTHVAMESTGVFWKPVYYVLEARFTVLLVNAAHVKQVPGRKTDVRDCQWIAELLEHGLLRGSFVPPPVIRDLRELTRYRRTQIQERTRVANRLHKVLQDANVKLSNVTHHVLGVSGRAMLDALVAGTTDPDVLAELARGQLRKKLPALRQALTGRFRAHHAFLLGQILAHLDYLEEAIAAVSAHIEEQLRPFAPQVERLMTIPGVQRRTAETILAEIGTDMAVFPTAGPATSASCRTVSSGRWRSPCTRARCRGSAGARPCPAPPASRPRRR

SEQ ID NO: 415778 - protein, 408 aa, unidentified
MKAMHRRCAGLDVHQQEIVACRRLVAGRKIQTQIRRFATTTRGLLELADWLEDGKVTHVAMEATGIYWKPVWHVLHGRFTLILANAAHIRNVPGRKSDVNDATWIAELLAHGLIRASFVPPQPIQELRDLTRTRKELTREIVRHTQRIHAVLEEANIKLASVITDILGLSGRRMLQAIVAGETDAGRLADLGSSRLAAPREALVAALDGRIRDHHRFLIGQHLKTIEQIETTIGEFDARIEAALAPFRDAVERLTNVPGISWTAAQIVIAEIGADMSQFPTADHLISWAGLCPRLDESAGKRRSTRLRKGATWLKPVLVQSALAAGRKKNSSFKTRYHALKGRIGPKKAAIAVAANLLRVVYHMLKDGTCYQDLGEAYRRPRNPARAAANLANRIRALGYQVDIRQAA

SEQ ID NO: 415779 - protein, 358 aa, unidentified
MADNVTEATVVAGVDTHKDLHVAAVVDQNNKVLGTQYFSATRQGYRQMLVWMTSFGALKRIGVECTGTYGSGLLRYFQNAGLEVLEVTAPDRMERRKRGKSDTIDAECAAHAAFSGIRTVTPKTRDGMIESLRVLKTCRKTAISARRVALQIIHSNIISAPDELREQLRNMTRMQLIRTLGSCRPDASEYHNITNVYRIALKSLARRYLELHDEIADLDVMIAAIVDELAPELIKRNAIGYESASQLLITAGDNPQRLRSESGFAALCGVSPVPVSSGKTNRYRLNRGGDRAANSALHIIAIGRLRTDAKTKEYIARRVAEGHTKMEAIRCLKRYISREVYTLLRNQNRQVNSIQIMT

SEQ ID NO: 415780 - protein, 346 aa, unidentified
MQYYAGIDISLEQSSVCVVDAAGKITKEAKIASDPCVLATFFKGLGFPVTRIGFEAGPLSHWLYAGLTQAGFDVVLLETRHVKAALSAMVVKTDRKDARGIAQLLRMGWYQAVHAKSASSQEIRALLTGRRLLLDKLRDVELSLRGVLRGFGLKLGKVTQRAFETRVRELVANHPMLQQITGSMLLARATLQREHNMLHKALLKIVRRDKVCRQFMTAPGVGAIVAITYKTAVDDPQRIKKSKGAGPLFGLTPKRYQSGETDVIGGISRIGDAMVRAMLYEAANSLLSRTMRFSALKRWGLAVAKRRGMKRAKVAVARKIAVILHRMWIDGTSFRWSNKEKAAAHA

SEQ ID NO: 415781 - protein, 409 aa, unidentified
MEPIVERGCGIDVGQATVVACLLVGRAHERPRQEVRTFLTFTRDLEALRDWLLAEGCTHVGMESTGVYWKPVYAVLEGHFELIVGNAQHIRNVPGRKTDVKDSEWLAELVRHGLIAKSFVPPPPIRELRDLVRYRRKLVESRSAERNRLLKLLESANLKLASVASNVFGVSGMRMLHAILDGVSTPEQMAQLAQRRLRSKIPALERALVGRIETHHRLLLGLQLRRLEQLEVEITALDQLIDQRLEPYRSWRTLLTEIPGVDRVVAAVIIAELGVDMSVFRSVHHLAAWAGVAPGNHESAGKRKSGRTTRGNLHLKTALVEAATSAARTSGYLKDKFYRLKARRGYKRAALAVAHKILVAAYHMLATGVAYHDLGEGYLDRVGHQHVTRNLVRRLERLGYQVQIERKAA

SEQ ID NO: 415782 - protein, 352 aa, unidentified
MATTAQSAIAVIGIDIGKNSFHVVGLDGRGAIVLRQKWSRGQVEARFANMSPCLIGMEACVGAHHLSRKLKALGHDARLMPARYVRPYSKGQKNDFRDAEAIAEAVQRPTMKFVVTKTADQLDLQALHRVRERLVSQRTGIINQIRAFLLERGIAVRQGQRFLRVELPRILATPPDVLSPRMVRVIEGLASDWHRLDERIEVLSSEIEELAKRDAGCERLMSIPGIGPIISSAMVAAIGTGDSFSKGRDFAAWLGLVPRQISTGDRTILGKISKRGNRYLRVLFVQAAWVVLVKVKPTRWEGHGLRPWIEAAKKRLHHNVLAIALANKLARIAWSVLAHGRAFETNKLQAAA

SEQ ID NO: 415783 - protein, 404 aa, unidentified
MDVIHPRCAGVDISKRDAKVAVRVPGSGRKRAQFEVRTFGSTTGQVLALRDWLVGEQVTCVVMEATGDYWKQFYYLLEDGGFEVLLANPRQVRGMPGRKSDVIDAQWLAELGSLGLVKGSFVPPPLVRQLRDLTRLRTQVGRERAREVQRLGKVLEDAGIKLGSVATDLSGVSARAMMRALGDGLAVDDIVELARRPMRAKRAELADALVGRFTAHHAYQVRLLLGRVDAQDKDMVDLTRQIDALMVPYEHAHDLLVTIPGVSDLVADVIIAETGGDMSQFPTAKHLASWAGVAPGCDQSGPRAKSARTRPGNTHLRGALGIVALAATKTSKTYFSAQYRRITSRRGPVRALVAVENSVVTAVWHMLTNATVYTDPGPVNAGRILTPFRRLNLDPPAWWLCGST

SEQ ID NO: 415784 - protein, 351 aa, unidentified
MKKIFIGIDFAKEKFDAAIIEACGLKEFGERQFGTFINGKKGYTRFMKWVKAKAGSTTEQEWLFCGEDTGSCSLGLSKWLYGKGLDIWIENAYSIKHSSGIQRVKTDRADASMIAEYAWRHQDKAVLFEPLSESLTQLREVFLYRHKLVQQRVAMEVRKQDKETIQSSKAITFINRKSKHLITEIDKAIKECDTMIDRIIETDMELKENYSIITSIKGVARQNGACLLIFTNNFKRFDMDARKIACYYGVAPFGKESGSSIHTPARTSHFANRLIKALLSQAAQIAKIFNPEIKDYYESLIKRGKKHSVALNNVKNKLLRIIVALVKKKVRYDPETYKFYRNRLEKQFAPS

SEQ ID NO: 415785 - protein, 309 aa, unidentified
MEHFVGIDVAKDRLDVHIRPSGEAFTVARDSQGLAMLVKRLQALAPALVVMEATGGYEMVVASALGAAQLPLAVVNPRQIRDFARATGKLAKTDRIDAAANAHFAEAVRPAARPIADAQAQALGELVARRRQVIEMIIAERHRRRMASQRRVIRAIERHLALLQAELSELEGDIDDAIRKSPAWQADADLLASVPGIGKATLRTLIAELPELGHLNRRKIAALVGVAPINRDSGTLRGRRTIAGGRPAVRTALYMAALVASRANPVIAAYYAKLRAAGKTGKQALVACMRRLVVILNAILRDRKPWQPA

SEQ ID NO: 415786 - protein, 457 aa, unidentified
MGKKGFFGIDVSKGYADFLLLDSEGNVMEENFQLTDCKEGRQRLKEIITGWQQQGLEELFCGVESTGGYESNWYSCLKAGFKDSKVYVCRINPRGVKSIGEASLKRTITDAVSAENIATYMISFPKKLDYGIDAAPVNPVFKEGRQHVTYIRMLQKQKVQLSNQLEKLLYQYFGEVLVYCRHGSPIWLLNMLAKYPTAAMVIKAGMVKLSAIKNINEGKAKSILVKAKNNTQGVSRQTAHVIMATAKEILHKEILIKEEKEYLTELHAESEEVRLLSSIPCIGLNSAVTIALEAEDITRFETSKKMCSFFGVHPTFKQSGDGIWGNHMSKKGRGEIRAVLYMAALTGIRHNPILKQIYARSRSKGMKHYQAMGVAMHKLLRIIYGVLKNKTAFNAETDDLNQQKSIDKQHQNEQKEKAKGIVKKQKKHRFQEISTDAPISRRAEQKIRKQIASQAPK

SEQ ID NO: 415787 - protein, 454 aa, unidentified
MKPEEIPDTDHELVVERVCAIDVAKASGKVCTRIPPQTRAGRRVSRVWDVPATANAVTELAEHLIDQGTERVTIEATSDYWRIWFYLFEAVGLEVQLVNAREVKNVPGRPKTDKLDAVWLAKLTEKGMLRPSFVPPAPSRNLRDYTRLRIDLTRERTRHWQRVEKLLEDALIKVSSVASSIDSRSVRDMLEALIGGERDPRRLAELARGRMRTKKAALVEALTGRFDDHHAELARILLDQIDALSAQIATLTTRIEQLLAMIATMVPDPNSAKDNPVTGPGNAGPPRRIAAGLTAVERLDEIPGVGPLGAQVIIAEIGLDMTRFPTPAHLVSWAKICPRTVQSGPKLRSGTPGKGNPYLKGSLGEAAAAAARTDTFLGERYRRLVKRRGKLKALVAIARSILVTVWHLLADPTARFHDLGVDYYTSKINTQRRIRDHIHQLAALGYTVTLEPAA

SEQ ID NO: 415788 - protein, 343 aa, unidentified
MYYIGLDVHKRTISYCVKDAAGHVHREGKIGSTRRELDGWIKTLPEPRMMAMEATIFSGWIYDHLLPHAEKVKVAHPLMLRAIAAAKKKNDRIDAGKIADCLRCDFLPECHMASTEIRDRRRTLRYRGLLVKQMVQMKNRVSGLLMESGVSYNKQRLHKLGYFTDLLSTNEEISQSILPLLKLGREHIVRAQRLDSALIGSLEKDPLLSERLRRLRTIPGVGPITALTWALEIGDYTRFRSVKEAISYCGLCSAEKSSADKVMRMPISKQRNKHIQHVLVEAAKMAPRYSPELALVREREIQRGNKNRATFAVARKMVAYMLAVERRKQDFVPAEDMAGRAVA

SEQ ID NO: 415789 - protein, 317 aa, unidentified
MTQTSMTTAGIDTSKGKLDVAIHGRSERRQVANSPAGWRKLAASLAEARVGRVGIEATGGYERGVVAHLREAGFTVLVLQPAQVKAFARVHLRRAKNDRLDAALIAACAAAMKEPRIPPDKRLIELADILTFVEQIEEDIARFKTRLEHISEPRLRRVTLEQIAQFKVRRLAELRLLARQLRAHPDLAVRFDLVLSVPGIGERTALALVIRMPELGRVNREEATALAGLAPFDNDSGQHNGPRHISGGRGRLRRSLFAAALPAAFRWNHAIIALYQRLVAAGKAHKVALIACARKLLVYANTVVARGTPWTQTNAAT

SEQ ID NO: 415790 - protein, 420 aa, unidentified
MDTLNTTSFTAFIGIDWADAKHDICIQSAADDDEREFDVIPHKVELIDEWACTMRQRFGSPIAVAVELSKGPIVYALQKHDCFVIFPVNPSTLARYREAFQPSRAKDDPTDAELAVDLIIRHHERFKPLQPQSVEIRMLVSLVEQRRNLVADKIRITNRLRVALKQYYPQMLEWFDHIDTLLFCDFLTRWPTLLQVKRARQSTLRKFFHEHSMRFEHVLEQRLIAIKAATPLTLDEAVVVPHRLQALVYVEQLRVLLDAIKRFDIQIESVAKQHDDYALFTALPGAGPSLAPRLLVALGEQRERYKSAAEVQKYSGVAPVTERSGKKHWVHWRWQCPTFMRQTFVEWAAQTINKSYWAGEYYRQQREKGSTYQAAVRALAFKWIRILYRCWQTRTPYDEVTYLKALERRGSPLLAARKLT

SEQ ID NO: 415791 - protein, 344 aa, unidentified
MSEVITVGLDIAKHVFHAHGVDDRGRPIFSKRISRGKLLDFFAAQPSCMVALEACGGAHHWARQLIQLGHQVRLIPPAYVKPFVKRQKNDAIDAEAICEAALRPNMRFVAVKSEQQQAAGLVFRTRDLLVRQRTQLINAIRGHLTEYGWIAPKGPSHVAMLADLIEREAIASSLPEAARAMFRCMLDQLAGLNGKIADLDKEIARRAREDEVSRRLMTIPGIGPISATAIAALAPPAETFAKGRDFAAWLGLTPLQRSTGGKQKLGATSKMGERTLRRLLIIGSSAVVQQASRRGAPKGSWLEQMLARKPRMLVTVALANKMARIVWALLVKRENYKAPVAAKA

SEQ ID NO: 415792 - protein, 446 aa, unidentified
MATRTVGIDLGIRGPHVATMVDGEGYPIGVPLRFRLVAAELRQLVQQVRHGLAADDQVVVVLEPTGMAWLPLARWLGRAGCTVIRVKGQRVKALRRYLSEHAKTDLRDAELLGQIPRFGAQGLRPLYVPSAAQHALNRLTKQRLRYQEEMCSIRRRLLDLIRWAQPALERALPDLQTTVALAVLEQYFDPQRLHRLGPRRLEGFLREHVGGNHPGHGPFIEALAHRLLEAAEATLALHGPDDVDFGRLQLEVDQEITLLRMHRTHMVALEREIEPLYTALHTPAVLRTLPGIGNTLGPSLFAVLHTWQRFGSQRRLRGFCGLFPTRNESGGVDRPGQSITQGGHNRLKRDLILAADVARTVDPELAAVYYRCMVEKGHHHRQALCAVATRLINRLHAVWKSGRPYVLRDLQGQPLTVPEAKALIAATLRVPDVVRRTRRRNLAPAA

SEQ ID NO: 415793 - protein, 438 aa, unidentified
MKVMYERVAGIDVHKDMIKVAVRSPGDKPWTRKTEILTFRTFYGVLRAMARELRRRGVTHVVMEASGVYTEPVYYALCEEDFTEVAVVNPAHAKALKGHKTDAKDCARLAELFECGLLQGSYIPAAGLKEMRDLSRYRMKTVQARTSEIQRLAKALESAGIKLGSVASEITGKGPVAMIEALISGERRGAVMADLARGRARTAGKLADLSMALEGRFTDHHALMCRLHLDRITALDAAVADLEARIAATAADWQREIDLLKTIPGFGDIVAWAWIAEIGPAPHQWFASHHKLASWVSLAPGNNVSAGKRKYGRTGDAGTYIKPMLIQAAWAATQVRGRLQARYNRLVRRMGGPKNPAAKKKAIVAIAHTLLKIAYTVLKTGTGYQEPGADFYTRRESPGHRQAWLERQIQKLHPGCTVTITISPSPDPAPEAALPPGA

SEQ ID NO: 415794 - protein, 323 aa, unidentified
MLILGCDVGSETHYVRAIDPRGRELSKSAFSFNNDSEGFQSAKEWAVKIAAEHNKNQIVLGLEPTGHYWFCLATWMISNGISVVQVNSYAVKQTKEIEDNSQLKDDTKDPKLIANLVKDGNFAMPYLPEKVYADMRRLSMFRDQLTEDRIRNINRLHRELKIYFPEYMDAFGKIDGAFTLEILKVSAIPSDITALGAEGMKNIWHNAKLRGRGYSRANEIVSYAEKSVGLTDGTDAGREAVKWYAEQILRLDEQLAEIESALHEKCREIPYAENILAINGVGENILAGILAEMGDISRFDDVKEIQKLSGMGLVACSSGKHKG

SEQ ID NO: 415795 - protein, 337 aa, unidentified
MKLYCGIDLHANNSVVAVLDEGDSAVYEKRLPNDLSTIIDVLRPYQADLTGCVVESTYNWYWLVDGLTEAGFPVHLAHTGAMPQYAGLKYTNDFSDARHLAHLLRLGILPTGYIYPKEERALRDLLRRRLLLVRQKTLHHMSLQSMIARHSGQRLCANEIKALETKQLADFLPPPILLGGQITHQARCWMDTAIKRIERELQKRVQPRMDYQLLQSIPGVGPALGTTIALETGTIQRFPGPGNYASYARCVRSEKISNGKYKGQGNKKNGNKYLAWAFMEAAHYGAIWNPQIKRYYQRKQAKAHILVAKKAVANKLARACYHMLKRGEVFDVTRAFG

SEQ ID NO: 415796 - protein, 339 aa, unidentified
MNEVTLIGIDLGKYSFHLHAQDATGRMVFRKKLSRQQLLRTLANVPSCRVVMEACAGSHWLARQLAGMGHEPRLISPQFVRPFVAGNKNDFGDAQAICEAACRPSMRFVSPRNEEQQTVSALHRLRERLVRERTATVNQIHGFLLEFGISLPRGAALMSRLPTVLDHETLPPRLVGLVVRLHAQVHYLEEQIRQVVQDLKASLREDDKGRRLLEIPGIGPITASALAVELGDARQFANARQFAASIGLVPRQYSTGGKPTLLGISKRGDRNLRRLLVQCARAVMQHTASRTDALSLWVKTLSTRRHSNVVACALANKLARIAWAVLARGTHYEARALTT

SEQ ID NO: 415797 - protein, 462 aa, unidentified
MNSQPSTLEFAALVAIDWANQEHSWALQAADTQRVEGGELENTPEAVEQWAAELAQRFGGRPVAVALEQPRGAVVAMLSKYAHLVLYPVHPGTLAHYRQSFYPSGAKSDPLDTDLLLELLRCHRDRLRPLELDTVETRTLQFLVEDRRKAVDEKTRLTNRLTDMLKRYFPQIPHWFDDVASPLVGDLLERWPTLQELQKARPETLRRFFDQHNCRSQERIEERLQSIRQAIAATQDPAQLEAGTLAVGGLVRFLAQLRQTIADYDKRIAQLAQAHPDFSIFDSFPGAGPVLAPRLIAALGTNRDRFESAQQLQCFSGIAPVVESSGQKEWIHWRWACPKFLRQTFQEFAQHSLKACPWARDYYQRQIARGKSHHAAVRALAFKWIRILFRCWKDRSPYQDPLYQQALQRRAPTNPTAPTPASPKPKSTSPKGRNPQLPQFLQLQWESCAGFSKLSGFTLLTE

SEQ ID NO: 415798 - protein, 364 aa, unidentified
MSTITIGVDLAKSVFSLCEMDGAGHVLRRLELKRDAFAVWLSQLPAGSVVAMEACSGAHHWARRSLEYGLQPRLMAAQFVTPFRKSRTSKNDRNDAEAIATAARQGNMRFVPVKEVDQQARLAWHRVREGYKTESLAIGNRLRGLLAEFGIVVAQSDAALRHVLADLDQAALPDEFKELIRGLQAHWAQVRMALDACDARVEAHARADARCVRLRAIIGVGPITADALVASVGNAREFKNGRQLAAWLGLVPTQHSSGGHTRLGTISCRGDTYLRTLLIQGARSSLQRAKAVSVETSTPEQIWIRQLSGRMGFGKLLVAIANKHARQLWAMLAHEETYDPDAWLKHPMVQRPAGKHASTVSAMA

SEQ ID NO: 415799 - protein, 350 aa, unidentified
MRFAKVDARHYCGIDLHSRSMYVCVMDREGEIRFHRNLPNNFDIFHKYINPFLPDMAVGVESSCYYYWLADSCREAGIPFYLGHAYYMKSIHGGKVKNDKVDSKKIADLLRCNLFPLAYPYPREMRPTRDLLRRRHYFMWRRASTYSHLQLVCAQHGIVDLASNMVKDKSKRNQLLKLFDDKELQMMISLDLLFIEFLDPLIAKLERHIRQQARYHSHLAYQILRSIPGVGEILALIILYETHDIKRFKTVQRYSSYSGVVKCDRESGGKKMSAKNTKIRNPYLKWAFGEIILKAQVCEPKIAKLYNRMKSKYGVGRAKSIMAHRFAVATYFMLKNKQAFDVDRFVQTSK

SEQ ID NO: 415800 - protein, 417 aa, unidentified
MEEGEKASPCRYVALDIHKYYSVVAGVDREGEEILPACRVEHMDLEDWLAKHLLPTDRVVIESTTNAWHVYDLLEPLVAKVLVANPIKVKQIACARVKTDKKDTLILARLLAANLVPTVWVPPEHVRELRQLVSHRRRLAGMHTQVVNRMHSVAHRHHLNHPKGKDFQPKNTGWQRDESLSRLEKMQLELDMETRAHLEKQMERMTRELGRMSHEEPWASDMLYLMQVPGCGVVTGMTILAAIGDIARFETPKALASYSGLTPGLEQSGVKLRGKGITKEGRKELRWVLVEVAWRAVKADPHWKKYFEELKRRMHPNQAIVAIARHMLTMIWYVLTRHEPYSHYSPERIAYKYLTWSWALDEEQRQGMTRPQFARYYLMRLGIGNELKRVALNPKFPYKLASVEEVLALRPELRPPE

SEQ ID NO: 415801 - protein, 342 aa, unidentified
MKFYCGIDLSARDCQVCVIDEQLKVLVQQKLGNELPKICRLLEPYKANLKIVVESTFNWYWLIDGLQAEGFEVVLAHTLGLYLITGAKVKTDRRDAYSLAKLLLVGAVPTAYIYPVETRPVRDLLRRRMHLVQVRAGEYGSLRRLLLRQGILSSKQQEIKTATEAELEQWFEHPLVRLHASQELRRIELYSQQIAELEKTILALAQTAPSYDRLLKLPGVGQTIALTILYEVGELTRFANPKVFSSYCRVVPGIAQSGSVSGRGRASKQGNHYLKAAFSQAAVHAVRCYPKVRRYYERQLKRHQGRGRRMICYNIIAHKLAQAAFHVLKEQIEYREELLFGR

SEQ ID NO: 415802 - protein, 377 aa, unidentified
MHSENIAAYIGLDVHKETLAVAIAAPERLGEVRYYGTINNEAQAVRRLFQKLQGLYGNILSCYEAGPCGFGLYHQLTAMNIKCQVIAPSRIPKSPTDRIKNEHRDAISLARLLRAGELTPVWIPDLTHEAMRDLIRARAAAKRDSRVARQRILSMLLRTDKRYAGKHWTGKHRTWLANQSFSQPSQQIAFQHYCQSLEQIEDRILQLDQEISRLLPEWSLCNLVCQLQALKGVGQLIAITLVAELGDFSRFSSPKQLMAFLGLVPGEYSSGNSIRPRGITKVGNSELRRLLYEAAWSYRTPAKVGAWLIYYRPDSVTQYSKDIAWKAQQRLCSRYRSLTAKGKKSQVAITAVARELTGFMWDIALAAQSSFSQQKQN

SEQ ID NO: 415803 - protein, 370 aa, unidentified
MLDTTTFVGLDVHARSIKAVSLDVMTGEVRCATFGYDAGAVAEWVRSVDPKARCVYESGVTGFDLQKRLSGLGVDCVVGAVSKMIKPSADRRRKNDRNDAEFLARMLSVGNVVEVWVPDDECEAARDLTRALEDARDDLSRAKQRLSKFLLRHGLAFDERTPTGRRKGNWTRAHWSWIESIRFAEGADNDVLAYYVDAVRRAAEDKARLEGLVEAEARKPRWRRRVDSLRCLKGVDTATAADLVFEAGEFSRFGNARSFAAWVGLTPSEHSSGESDRRGAITKAGNKHLRKTLVEAAWHYLTCSGRPKDLAKGQAPDRGARRHAAKGVRRLVERREALLARGVHGNKANVATARELACWVWAVGLMAEEA

SEQ ID NO: 415804 - protein, 387 aa, unidentified
MQKPHDNSKATPAAFMQDNTLIAVIELSLSNWLVAGLIPGVSREPLKKLEPNPEDLLKLLHGWRDEAIKAGRPITRIAVAYETGRDSFWLARWLRERGIDAHVIHATSVAVSREHRRAKTDRLDTAMLKRGFLGWLRGERGHCTVAIVPTMEEEDAKRPHREREGLVHEQTRVVNRMKSALIQFGVRNFNPKLRKATVKLETVRTPEGKSLPPNTIAALRRDMERLKIIKEQIKAIEQARLQQFEQKPEALANRMVYLLVRIYGLGWETADLLVHELLSRTLRDRKAVARYAGLTGSPDESGSKRREKGLSRSGNARVRKIMIQLAWRMVKFQPDSALVQWFKQRTENAKGSRKPMIVALARKLIIALWRYANDGVIPEGFRLHSAA

SEQ ID NO: 415805 - protein, 360 aa, unidentified
MPETFIKTKAVNKLFIGMDLHKNTSTFVVKDETGKLVNSAKVLTDKNDVTRYLNAIKKVGGDLSLVVEPVSQWYYFADLIEKLGVDVHLAHPMKVKAIASARVKTDKIDAGVLCDLLRGNLLPEAYFSPKEVRGWKEQCRFRASLLNLRTQVKNKVHAILFKHGLRHNFSNLFGKGGRIWLAGLKLKEPFKSNLDKYLLLIDQLTDLIIQAEKIIQTTVTNHPQANLLVSIPGISYCSALTIMAEIGDVSRFPSAKKLQGYAGLVPSTYNSGDRQIHGKITKQGSKWLRWIMIEAAYHQERCKKIPGFGSYYSSMKRRKGTKTAAVATARKLLAVVWRLLKDNRPYEVIPPRSRKSGTLA

SEQ ID NO: 415806 - protein, 346 aa, unidentified
MILIGCDFHPSWQQVCWLNMASGETNNEKLVHSSGDAEKFYRRLTVPVRVGIEATGNCQWFLELLGKLGHEVWVGDAAKIRACDPRQQKHDPRDARLLLQLLVENRFPRIWTPSSEEKDLRQLLLHRYKLVRMRVQVKNELQHLAMNKGITKGRRLWSAAGEKVLCELPLAPWASRRREDLFKLRSMLNEQVAALDQAVKHVAEENDRARLLMTQPGVGPITSMAFVLTIGDVSRFPRGKQVASYLGLIPREYSSGGHQRFGSISKQGNRFMRMLLVEAAQSVVRYDEGFRNEYLHRCHRKPRGVAKVAAARKLAVRLYWMLRTNTAYPEIARVGSSSRVPLDGAS

SEQ ID NO: 415807 - protein, 387 aa, unidentified
MAVTTQRAECIASGECRLLLAIELGRRQWKLGFTTGVGQRPRRRTIGTDAWDRVRDEIAAAKVRLRLPADTPVMSCYEAGRDGFWVHRYLTALGVTTLVVDSSSIEVSRRARRAKTDRIDVEKLLGMLRRYVGGERPVWRIVRVPSETDEQRRQLHRELAALKRDRARVTNRIAGLLATVGILLKVDTTFPGRLEQLTQWNGESIPVPLRARLTREWQTVQLMTTQIRELERGRRAALQESREAAVALVRRLLALRGIGETAAWLFVMELFAWRKFRNRREVGAITGLVGTPYKSGRLDHEQGISKAGNRRVRALAIQIAWGWLTYQPQSGLTQWYTRRFAQGGTRARKIGIVAVARRLVIDLWRYLDAGVIPDGAVFKESSGVATG

SEQ ID NO: 415808 - protein, 380 aa, unidentified
MASIGDDVRSNTTVYAAIELSKKSWVVAIAHPDRDRPSIHRIAGGNVADLIGRLRKAAGKNQRIVVCYEAGYDGFWLARSLANIGIDCRVLDPASIQVNRRARRVKTDRIDSLALLRALIAVDRGERHVCAVVRVPTVEEEDARRSHRERQRLIRERTGHINRIKGLLFAQGIRGIEPKRRRTRIDFGQMTTAEGRPLGERLRRELEREYQRLELIESQLRIVEKERDTVDAQDPAVERKRELLCALHGVGGASAAILVREVFARPFASRRHLGSYLGLTPSAYDSGSTTRCQGISKAGNSWARRVLIEIAWLWRKYQPASPLSEWYARKTADQSPRIRRIMLIALARKLAISLWRYVETGLVPDGAVLAKKTPHQTAAT

SEQ ID NO: 415809 - protein, 351 aa, unidentified
MIIIGVDYHPSVQQIAYVDTETDETCERRLNHSDGEAEHFYRALERRQVSVRVGIEATGHARWFERLLAELKFELWIGNAAEIKAARVRKQKTDRQDALLLLKLLVEDRFPRLWVPSPENRDLRQLIWHRHRLVQMRTRAMNQIQATAMNEGVRRKKALWSKSGRQQLESLLLAPWATRRRQDLLELVDRLNGTIAELTIAIEQEAHKRPEVRRLMTHPGVGPITALAFVLVIGSPDRFACGKQIGSYLGLIPCEDSSANRQRLGHITKQGSSLVRYLLAESAQAAVRWDSDWRRRYAHLSMRRDRRIAKVAMARRLAISLYWMWRKGYDYQQSLKFGSHAGEPGYRHGVK

SEQ ID NO: 415810 - protein, 404 aa, unidentified
MIFVGVDWAEAHHDVCVLDEGGAVLGSRRVLDTLEGVRQLHELVADHAEEPGQVAVGIEKDRGLLVVSLVAAGYAVYAVNPLASSRFRDRHQVSGAKSDRGDARVLADMVRTDRHQLREVAGDSDLAEATKVLARAHQSAIWSRQRHLNQLRNALKDYYPGALEAFGTDLASNDAVAVLTAAPTPAAGRALGTGELEALLRKGGRQRNVAARARQLRDALCRGQLEQPGIVADAYGAVTASELRLIAAATAEVATLEEALSAAFEQHPDAKVVLSLPGLGTVLGARVLGEFGDDPNRYASAKSRRNYAGTSPVTRASGLSRVVLARVSHNRRLVATCDQWAFCALTSSPGARRYYDELRQRGKTHRVATRALGNRLVGILHGCLEDHVPYDEATAWRHRAQLAA

SEQ ID NO: 415811 - protein, 344 aa, unidentified
MYHYAGIDVSLECSSVCLVDGTGKILREAKVASEPEALIGWFRSLGLVLERIGLEAGPLSQWLYAAMQDAGLAVELLETRHVRDAFKAMPVKSDRNDARGIAQLMRLGWFRPVHCKSIEAQETRAVLTARKLLQSKLRDIENSLRGVLRGFGLKVGPTTERTFAERIRELVAGHPGLEVVAQALLEAHAVLRREFNGLDKHTQRLARSHPQAKLLMTTPSVGPIVALTYASAIDDPKRFRSSKATGAHFGLTPKKYQSGETDYTGRISKIGDASVREALYQAAHVMLTKPVRNCSALKGWAMRIARRAGMRKAKVALARKLAVILHRMLADAKPFNPMAKASAT

SEQ ID NO: 415812 - protein, 371 aa, unidentified
MNSIVYIGMDVHKENYTLCCYSYDEDKLGYQQKIEPDYKMVMKYIEKIRKNYPSEVEIECGYEAGCIGYTLYRQLTEHGVKCVILAPTTMAITNKGRIKTDKRDAGNIARCLAFHTYSEVRVPTAEDEAVKDYIRMRDDQKKALKIIKQQILAFVLRHGYRYEGGKNYWTGKHVKWLKSLDLGGTLQESLQEYLVTYDYLADKVERLDKKIEEIADDEKYREQVKKLICLIGVKPLTALSVIVEIGDFVRFASAEQLAAFLGLVPGEDSSGEKQNRGSITKAGNSHVRRLLVESAQSYTRGAIGYKSNDLKIRQSGNSPQVIAYADKANERLRRKFYRMTLKNGAKRNVAATAIARELACFMWGLMTDHIA

SEQ ID NO: 415813 - protein, 347 aa, unidentified
MTIVEAPPGITGGVDTHLDIHVAAALDPLGRLVGTESFNADTTGYKALLAWLEEFGQVTKVGIEGTGSYGVGLARFLRHKGVEVVEVNRPNRQARRNHGKSDTLDAVEAARAVISGRALGAGKTKDGAVEAIRVLVVAKRSARQARVKAIVQMRHLVITAPDQLRSRLKGRSVTALVAEAAKLRATRAPDPVTAATKASLSSLAHRVQALDAELAQLDEKIESLLLATAPDLMARFGVGPDTAAALLVAAGDNPERLHSEAAWAHLCGVAPVPADSGKHAGHLRRHNGGDRQANSALWRIAMVRIAHDPETTHYFERRVKEGRTKRDVIRILQRYIAREIYRYLPRG

SEQ ID NO: 415814 - protein, 423 aa, unidentified
MMKLKYSICCGLDVHKNVIVATIVTTNKDGISEYLQKSFSTINSDIQRFHNWLIENNCFHVCMESTGKYWIPIFNYLENDIDVCLTHPKYVKAIKGKKTDKKDSKWIADLYKFDLVRCSFIPPKDFRQLRELSRYRFKLVCMKSSEKNRIQNCMTISNVGIASVLSDPFGKTATEIISYLLEHTADSMDEKAVRKLIKKGAKSKSDEIIEAIKGYTIETDQAKKLELARGHLEYLDDMITQTEVELYVRIKPYYEFVEFVSTMPGMTELSSTIVLAETGVDMDIFDDAKHLCSWCGLSPANNESAGKKKSVRIAKAGDYLKPMMVQCALAAIKSKKQPYFAIKYGRIKKRRGHKKAIIAIARMMMVCIYHMVSEKKPFTPTDYEELMDPQNHVESVVLNENNVFAYLESLGYDSSKLVKRNDN

SEQ ID NO: 415815 - protein, 342 aa, unidentified
MNDVNIIGVDLAKRVFHAHGAHSDGSVAFRKRLSRSQMLTFFAKQPHCTVAMEACATAHEWGRAIGELGHKIRLIPPAYVKPFVKRQKNDTSDAEAIAEAAARPTMRFVAVKTEEQQARSMIFRTRDLLVRQRTQLINALRGHLAEHGVIAPHGPANVKLLAAALNDADRSLQSLVRDIGAVYLEQISTLNGKIGDLEKVLRREAQRGADTSRLQTMPGIGPITAMAIETFAPPMQTFQRGRDFAAWLGLVPVQHSTGGKQRLGRTSKMGQRDIRRLLIVGAMSVIRWASRRGAPEGSWLSRMLARKPLMLVAMALANKMARTAWAMLVKQENYRVPVMRAT

SEQ ID NO: 415816 - protein, 365 aa, unidentified
MKKTTTAAATGKKNFAGKLTIGLDLGDRSSWYCVLDETGEVIAEHKLGTTPRVMKEVFAAMPRSRVALETGMHSPWVSRLLAELGHEVIVAHARNVRLIGESRRKDDRLDARTLARLARIDPQLLAPVKHRSRQAQADLMVIRARASLVRARTALVNAARGLTKSYGERIRGCNPRNMDLEKIQTLSPELQTALAPLLQALEALSEQIAECNRQIEDIAKQRYPQTALLKQVKGVGTLIALTYMLTLEDPHRFRKSRDAGCYAGLQPGRRNSGQSAPQMHISKEGDPYLRTLLVQGAQHILGPFGADSDLRRWGLKLAERGGKNGKKRAIIATARKLAVLLHRLWVSGEVYEPFHNSRATLMATA

SEQ ID NO: 415817 - protein, 315 aa, unidentified
MDGSFTSFVGVDISKRSLDVHAIPQGTTASVSNDTHGRQQLRDQLPPPRTCLIVVEATGGYERSLVAELVDDGHIVSVVNPRQVRDFAKGLGLLAKTDRLDARVLAEFARVIKPRPLAEQHEKQPELEQLVARRRQLVALRTAERCRLETTTALTVRKSLQQSVDHLNKQIRHLEQAIRALVDSHDEWKGKSEVIQSVPGFGAATSACLVAELPELGRLNRQQIAALVGLAPFNRDSGQSKGPRRIWGGRASVRAALYMAALTARRCNPVIRAFADRLAKQGKKAKVILTACMRKLLVILNTMLKTNTHWNPKSV

SEQ ID NO: 415818 - protein, 323 aa, unidentified
MEIWVGIDISAKFFDAAWYDKDGKRHIKVDNTPEEFHKLLEAVPEQSGFVMEATGTYYLNLALFLSEEGRYVSVVNPLRIRSHLKADMARSKSDKSDAYAIARFGCEKRPKPWRPVTQDMAAIQQLRAVADKINMQTTQLSNQRHAFSQSRLANLDALHVLDTAIKLHHKLVQVTMKELEEVARRAFPRELELATSIPGVGEETATRLMSIVGNFSRFESGRQLVSFLGISPTLKQSGSSVHSRGHISRLGNAHVRRSLYFCAITATRFNPQCRAMWLRLKEQKKPTKVILMAIANKLIRQIHALIRTNTPYDPNFSNLALAN

SEQ ID NO: 415819 - protein, 351 aa, unidentified
MRILAMDLGCASRTITKTSITVLDTDTGAIERTAVPTSPHDLLGVLRAHQPHRVVLEATRGCGWVVDLSRAAGISEVHIANPMDEAWRNRTSKTDRKDADLLARLSATGQIRLVHVPERPIREWRELIDYRHFLVHQRTRIKNRIKAILINQGISTGRLWNERGMASLAALGKPLAICEIDELWRGALWTEQMRLREMEEHLKTVTKRLDALVLSSEPAKELLKVDGVGLRAAEIVVATIDNPLRFHHRKQIGSYFGLAPRVHQSGNKLQHGRISKTGDALARAVLVEIVHLGTHNDGWIRDTYKKHLNDDPMRRKRAIVATARRLVVRLWAKLRDQRKEHPDMTTLPVAA

SEQ ID NO: 415820 - protein, 336 aa, unidentified
MFQLGIDVSKKTLDLCLLREGVKGRVKTRKLQNDINAVSAVIAWLSKQHCKPEDVHIIMEATGVYHESLAYGLHKAGSRISLANPHRAREFARGMGMLTKNDRVDAYMLACYGALKAPEPWLPPPEEVRHLSTLLRRRDALVADSTREKNRLEKYLATDTPSVIAESVEAMIGQLNAEIKRLDSLIRSHLNQHPELKKDFDLLTSIKSVGYQLGLNMLVILRSHDFATAEQAATFLGVVPVEKYSGTSVRGCPKLSKIGPPGIRAKLYLASLCGLRFNPLMKAMYERLCLRGKTKMCAIGALMRKLVYWCYGVLKPQKPFDVGYLSSYARSACKAA

SEQ ID NO: 415821 - protein, 446 aa, unidentified
MNRKAYRATGVNDVNWEQLAHGKEGLGVTLGVDVGKFDVLVVCRWADGHFERPWRVKNPREIPTLVALAKRVQAERKLAVAMESSGTYGDVLRQALADNGIETKRVGGKAAHDYAEVFDGVPSQHDGKDAAVVAELAALGKGKAWPYEAADSWEEELIYCVEEMVTQRQIVTLWQGRLEGLVARHWPEALQVLKLSSGTLLRILKRYGSPQALALDAGAPKQLARWGGGLLSPKKINELLAGARSSVGVRVGPWQQRRIQEYAERALAARQQSNRAQRRLRQLAVGHPVLQAQGKVVGVPTACVFWVCTGDPRKFDSAVAYRKAMGLNLVERSSGTYKGQLRISKRGSARTRQWLYLAALRLVQKCGVRPWYEAKKARDTGDAPRVLVAVMRKLALALYHVGVRNEEFRPRRLFGRIRNRRGRPAPRVKVGMEQSKSEGQHSPNLE

SEQ ID NO: 415822 - protein, 462 aa, unidentified
MKRNRRRNGRPRPKSPSLLERINVDVAGIDCGAEAHYVAVPTDRDSEPVRSFRTFTADLHRLADWLTECGVRSVAMEATGVYWIPVYEILEARGIEVRLVNAQHVKNVPGRKSDVQDCEWLRELHSVGLLRGSFRPADQIVALRGYLRHRDTLIENMSDAIRRMQKALDQMNVQLARVISDITGVTGMAILHDIVEGRTHAEQLARHRDRRCKASEAEFVAALTGNYRPEHVFALKQNLQLYELHQGMLRDCDMAIEAHLQALTAEVDSPSEPLPPRRSKRQHKGNEPAFDLRGYLHHLAGIDLSQIHGIGPYQSLRLISEIGTDMTRWPDEDHFTSWLTLASQNKITGGRRISSRTQPSQNRAAEIFRMAAMSVGRTQTALGAFYRRMAARIGNAKAITATARKIAILVYRSLKGEIVYQDPGPDAYNAAQRQRALKHLRKRAKYLGFALVNVETGELVPS

SEQ ID NO: 415823 - protein, 324 aa, unidentified
MFVGLDVHKKYTEVAIVDEEGVVEKQERIENDPGWIEEFSNTLSNADMVLESSSSWYWLYEILSRRHRVVLSNPAKTKAIASAKLKADKVDALMLVNLLRGGYIAESYVPSRRVMGLRELVRYRANLARMRGTVKNRVHAYLLMNNIRIGYGPFTKGFLEELRKVDDARVEGYLRIIERLNLEIHEASKRICSEALNDEAARLLMTIPGISFYSALLLVSEIGNVDGFPDSAHLVSYAGLASSTHSSGGSTYHGRITKAGSPYLRWVLNQCTWVHVRSEPEGSVASFYRRLAGKKGHSKAMVAASAKLLKIVYWVLKEKRPYQG

SEQ ID NO: 415824 - protein, 407 aa, unidentified
MMIKLSGPKQLPNIFKGCGPMIYVGIDIAKQKHFAAATTADGEVLIPPFGFSNDAEGFKLLLSKIKSFKKESTLIGLESTSHYAENLICHLFDLGYHISVINPIQTSTLRKTNIRKTKTDKVDCLLIIKSMIVNKPRLYSKTDIDSLRLKSLCRFREKIKKAKAKLKIQLVTFVDIIFPELQYFFKSGIHTNTCYQLLKKHSSPDDIAALHLTYLANLLQKASHGRFGKKEAIALKGLAKSSVGTGNTAVSIQITQSIAQIELLEQQLADLDRAIESIMLEMDSVILTIPGIGFLNGAMILGEIGNISRFSNPSKLLAYADLDPTVNQSGKFNAKSTKMSKRGSKLLRYALINAAWNVSLNNKTFNDYFNLKRSQGNNHYAALGHVAHKLVRIIFKLLKDNVTFNLD

SEQ ID NO: 415825 - protein, 338 aa, unidentified
MKKYSGIDLHSNNCVVAVIDEADQVLYRKRLPNELSVIVAALGVYRGELHSVVVESTYNWYWLVDGLMEAGFEVRLANTAAIKQYEGLKHTDDGDDAVWLAHLERLGLLPQGHIYPKAERAVRDLLRKRSQLVRQRTANLLAIENLVARNSGRLINGNQVKRLSPADLPAIEPEADRRLAIAANLAVMGTLNEQIKQLEMAVKARTKAHEALPPLKTVSGIGETLALTIALETGGIERFAKVGNFASYCRAVDSRRLSNGKKKGEGNAKCGNKYLAWAFVEAANFAVRYCAQAKRFYQRKRAQTNNAVAIKAVAHKLARASYYVMRDRVPFDPARCFS

SEQ ID NO: 415826 - protein, 415 aa, unidentified
MTESYRIFVGIDWGADAHQVWVTDAAGTAVGEQTVDHTGTAIAALVDWIVGLAEGDARAAAVALETPRGPIVDAFLARGCQVFAINPKQLDRFRDRFSVAGAKDDARDAEVLSSAVRTDRRAFRHVTAEDPLTVQVREYSRQDTELGEDLRRLANRLRDHLLRTWPELLRLVPAADEPWFWALLKRAPTPVEGRRMRPAQVRQLLRDHRIRRITAEALLTVLRAPSVSLAPGVREGVRVRILDLVDQLPVLARQRRAAERRLATTLEAMTQGPDGESVREHTDVTVLQSLPGIGTRIAATMLAEAADALRDRDYHALRLLAGTAPVTKRSGKSCVVIMRYACNHHLQTALYHWARGCMQRDPRSRAHYAQLRRAGHGNARALRGVADRMLTVLIATLKTHMPYDATRRRPRAAGA

SEQ ID NO: 415827 - protein, 423 aa, unidentified
MRVVYQVCCGVDVHKSFLVATIITTVSNSIFPSYKKKRFSTFNKGILEFKAWLLENSCHHVCMESTGKYWVPVYNLLEDTIHVTIANPKWVKAVKGNKDDTKDSKWIGDLFRLGLVPGSFIPPKDIRQLRELTRYKAKLINARTAEKNRFQNALTVCNVARDSVVSDIYGKSATGIIDYLIESPDNFIVEEEITSRLLRSLKKKSATVIESIEGYTMTDSQKERMRIIRSHFDSINESIKRIDAQIDLLIAPYENCITLLCTIPGVDRNAAIVIISEIGTDMSQFSNTKRLCCWAGLTPGNNESAGKKKSVRITRAGVYLKPALVQVAHASVICVDQPYYANKFRGIMKRRGKKRAIIAIARMILTAVYHIMKNGEVWNPSDLSEIDLTPEMAEKRRTRDIKRAVNLLVAEGIISAESQLSLS

SEQ ID NO: 415828 - protein, 343 aa, unidentified
MQAITTIGLDIAKSVFQVHGVDCNGQVVVRRQLKRRYVLAFFEKLAPCLIGIEACASSHHWSRQLQALGHDVRLMPPSYVKPYVKRQKNDATDAEAICEAVSRANMRFVPTKTPEQQSGLVLHRTRHLCIRQQTSVINAIRAHCAEFGIVAPVGRRGIEELLNVIANANDEQVPEIARACLSALGDQLHRIKAQILAFDRMIGAWHRSCAASKRLDEIPGVGPALATALVASIADPRTFRSGRDFAAWIGLVPKQSSSGGKPRLGSISKQGDRYLRGLFTAGALAVIRYAKIHRIGHRPWLTALLARRPTKVAAIALANKIARMAWAMMARGERYREPAALAA

SEQ ID NO: 415829 - protein, 428 aa, unidentified
MKYTQNEKILQVTEKTLVVGVDIAKEIHVGRAFDFRGVELGKRIEFENRKEGMEKFLDWANKIMKAHGKENVIVGIEPTGHYWLCFEQYLRENGIKVVLVNPFHVKRSKELDDNTPTKSDIKDPKTIAMLVKDGRYTEPNIPAGIYAEMRVAMNIYERLQKRLSVLKNQIINWLDIYFPEFLEVFSDWEGKVALLTLKEMPLPCDVVEKGVEGIIECWRDKVDKRAISRKRAMELVEAAKRSIGKKEGRKLARQEMRYLLEEYELLRKQLEGIEDEMAKLLKDVPNGEKLLEIKGVGVKTAVGFISEVGDIMRYEDAKQIQKLAGLNIVENSSGKHKGQTCISKRGRGRLRSSLFKAMITIVAKNEEFKKLHMYYTMRQNNPLKKKQSLIALCCKLIRIFYAILKKGIKYDGNKMLSDIKREALATTA

SEQ ID NO: 415830 - protein, 326 aa, unidentified
MEHELHYIGIDTAKEKLDVDVLRPDGRHRTKKFANTTKGHDELVSWLKGHKIDHAHICIEATGTYMELVAECLYDAGYIVSVINPALGKAFAQSEGLRNKTDTVDARMLAEFCRQKRPAAWEAPHPLERALRALVVRHQALTDMHTQELNRTETAREVQRPSIDAHLLWLEAELKRLEKQIKDLTDDDPDMKHRRKLLESIPGIGEKTSAVLLAYIGLKDRFAHARQFAAFAGLTPRRYESGSSVRGASRMSKAGHVSLRRALYMPAMVATSKTEWGRAFRDRLAANGKKGKVILGAMMRKLAQVAYGVLKSGVPFDASRHNPVAA

SEQ ID NO: 415831 - protein, 344 aa, unidentified
MSIKVVGIDLAKNYFQVCVLNIDGTISSNRKVHRDRLLHTIRQLPGNTPLAMESCASSHYWGRVFLGLGFKVSLIPAQHVKPFVGRQKNDANDARAICEAYSRPDIHFVPVKSIEQQDLKALRSVRSRLVEQRTGLANQIRGLTAEYGIVFPTSIRALRNHLPLIIEDAENELSHVMRNLLQTLYCDFINISSKIDDVTQDIITLSQQSPRYKAIKNIPGCGPILTAAIVSEVGSGQQFQNGRQFSAWCGLVPKQNSTGGKNSLGALSKSGNRDLRTLLIHGARAVLRCRTSSMDPMGAWLRGLIERRGKAKAIVALANKLGRIVWRVLTTDCEYDVNRAFKPA

SEQ ID NO: 415832 - protein, 339 aa, unidentified
MDTIRFLAIDLAKNVFQVHGVDAAGKLVLRRRVGRAQLAELVLRLAPCTIGMEACSSAHHWARQFLQQGHTVKLISPQFVKPFVKGNKTDGNDAEAICEALQRPSMRFVPIKSVEQQDVQSLHRARSRLVSNRTGLVSQMRGILAERGIVLAQSITRARREIPVIVADTSNALTPLAREMLADLMDQLRELDRRIAGFDRRIDLVFKASETCQRIAQIEGVGPKTATAIVAAVSDPKDFRNGRHFAAWLGLVPRQSSSGDRTHLLGISKRGDRHLRTLLIHGARAVLRTALTKHDKKHAWALALKARRGANRAIVAIANKMARVIWSMLATGQSYQKAG

SEQ ID NO: 415833 - protein, 392 aa, unidentified
MHKDMHCAVVIDCWMEKLGEVSFENKPAKFPAFVEDIRKICGTKDFVFGLEDTRGFGRNLAAYLVGRKFDVKHVNPAYTSAVRLSNPIIYKDDSYDAYCVARVLRDMVDKLQDAKHEDIYWTIRQLVKRRDLVVKTNVMNKNQLHSQLSYSYPSYRKFFALIDAKSALCFWENYPSPNHISNTTPEKIYETIKPVHQALKMGRILEILALVETDGDTRKDYQEQRDFIVRNIVKEIRNNQELLKEIDGQLKGLVAQTGYKLQTMPGIELITEAHLVSEIGDINRFPDSDKLARFMGLAPVHFSSAGKGRDERCRNGNRELNAIFHFMAIQMVAISPSGKARHPVFRKYFDAKVKEGKNKPRALVCVARRLIRIIYGMMKTKTEYKPYEKQQL

SEQ ID NO: 415834 - protein, 429 aa, unidentified
MQYAQIQVLPPTPPGGVTAGIDWATADHAACVVDEAGKVRSRFSAVHDRDGIRKLVAGLRAAGAAEVAIERGEGILVDALLAAGLTVVVITSRQVKNLRSRYGSAGAKDDRFDAFVLADVLRTDRARLRPLVQDSPATLALRAAVRARRDLVAHRIAACNQLRAHLNASFPAGTGLFSELDSPISLAFLSRFCTQDAADLLTEDDLAAWLKTLPNRGRTSGPGQLLGRLRAAPAGAAGADGAARGVVTSALVATLTTLTAQVKTLEAEIAAQLAAHPDACVFTSLPRTGTLRAARLLAEIGDCRPRFPDPESLAGLAGVAPVTRQSGKHSAAGFRWAVSKPLRDAVCDFAGDSRHASLWAAALYDGARDRGKDHPHAVRITARAWIYVIWRCWQDGTAYDPAKHRALQRILDQQHPADDGSPAGTENGQ

SEQ ID NO: 415835 - protein, 353 aa, unidentified
MDVSKNVIVAGVLTCDVGTPVVESFTHDEASVRRFFGRFDRPERVAACYEAGPTGFELHRLLTSLGVGCAVVAPSLIPKGSGDRVKTDKRDARRLAVLHEAGLLTPIRVPTPREEAVRDLCRVRADMVGDLTQAKNRLFAFLLRHGRVWREGDMWTLKHRRWLAAQHFDDPALATTFAYYRAAVETREAAIEGVEADLQLWFERDPFGWQVARLGAYRGFTHLGALAMAAEVADWRRFASARHFMGFVGLTPSEYSSGDTTKRGRITKAGNAHLRTQLVEAAWSYRHHPHAGVTIRRRQHDLPPDVVARAWNAQQRLCRRYRHLVERKVNKKVVVTAIARELAGFVWAEMTAA

SEQ ID NO: 415836 - protein, 344 aa, unidentified
MAQYAALDVSQEATAICLVDEHGAVRREAKVMTCPETIAQWLAKNAAGLVRVGMETGPLAVWLWNELHAKGLPIVCMDARHANAALKMRANKTDRNDAAGLAQIVRTGWFKQVRIKTRTSYEIRSLLAAREVLVRVRVKLENEIRGLLRTFGVLFGKAAGGFARRAHEIIAGELDASPPMQIVVETLMQARVAILDRIKLLDRQVLAIARTNATARLFMSAPGVGAITALSVASAFDDAARFKRSSSAGAYLGLTPRRYESGEVSRNGRISKHGNKLTRKHLYEAATTLLTRTTRFSRLKAWGLRLAKVCGFKKARVAVARKLAVILHAMWKTNTTFRWSEAVA

SEQ ID NO: 415837 - protein, 441 aa, unidentified
MRVMYERCCGLDIHKASITACALISEKGKTQEETRRFGTMTADLRELAGWLQQKGIRHVAMESTGVYWKPVWNILEPAGFELLLANAQEVKVVPGRKTDQKDSQWIADLHKHGLLRNSFVPPRAIRDLRDLTRGRAILTQEHTSVCNRIQKVLEDANIKLRSVASDVFGASGRAILRALMKEENDPEALANLSKGKLRNKIPQLRRALEGQVTAHHRALITGHWNRMEFLERQIADLETQIAERMKPTPAEMAPTMQNPSEEAPVPLSPREEAIQLWMEIPGLSWTSACSMVAELGVNMDQFPTAAHAASWAALCPGNNESAGKRLSGKTRKGNIWLRRTMCEVAWAASHTNDSYFAAQFHRIASRRGRKRALMAVAHSILVTAYSMLKHKRHYKELGADFFDGINRDKVRDRLVQRLAKLGFNVTLESKGNVESVSDVTE

SEQ ID NO: 415838 - protein, 349 aa, unidentified
MIVIGIDPHKQTHTAVAVDGATGTVLGELTIKARTPGFERLVEWARALDDERLFAVEDGRHVSGHLERHLIGRGERAVRVSPRMMGEARRSDRVAGKSDPVDATAVARAALRHPDLPQATLAGPERQIGLLVAHREMLINERTDRICKLRWLLHDIDPDLAPGLRSLDRFKTLDRLAEALQVLDPAVEVEICLELLTQCRQITARANELERRIGALVRTHAPALLQIPGCASLTAAKIVAEAAQVRRFPTEGHFARYAGTAPIPASSGARHRQRFNRGGNRQLNAAVHRIAVTQIRMHDPAKDYLAKKRAEGKTKTEAIRALKRHITRVVFKTMTSMSWPADRLTAAAA

SEQ ID NO: 415839 - protein, 408 aa, unidentified
MEKRLFVGIDTSKMGHQVCLMNPTKIKQDVYIENNRAGFDRLATILSQYREEGYQVTVGCEPCGHYWENLGYRLVEDGYAVQLVNPFHVNRYKEIFDNSPQKDDRKDSRIIATLVKEGKSLHNNLPRDGYAELRHLTHLREQLLKEGTRLRNRLHGWIDRYFPEYSTLFCDLLGVTCLGLLKKYGGPRGMVEVCVGELTGEVRSLSRGKLGRKRAQEVQARAARTIGQTIAPRAARAELNWSLTRIESWREEVKGVERLIKAELIQQKEDKYLQSIPGVGWWGSAVFLGEVEDIGKYPRAKSIEKLAGLNLYHKKSGKTESSLRITRRGRSLLRKMAYQLAVSGTHGAEEFREFYQRKLNKGKPKVSALVALAAKILRVMYGVVKNEEEYRPLKERAGDAGGFQEGPC

SEQ ID NO: 415840 - protein, 352 aa, unidentified
MQTQSNKLDFNGQNFYCGIDIHKKCWSVTIETDDITLKTFSQEADPEQFVKFLRRNYPGGNYIIGYESGYFGFNLQRYLSNQKIDCKVIHPADIPTTHKEKDQKRDPLDSRKIARALRTGEVDSIWVPPLYLEQDRQLLRVRRILTKDITRVKNRIKAILQIHGIKYPDTFERNGSHWSKRFIAWLESIKLDETTGTEALQVVVRYLNYLREEQLTVSRKIKSLAFTERYNAGYSELIKLPGIGMLIAMIILTEIGEISRFKSADNFRSFIGLIPRSHSSGDKDYQGRITNRSNTHLRALIIEATWSAIKKDPYYLNIYCNYKSRMKPNKALIRTARKLVNNIYYTLKGVNE

SEQ ID NO: 415841 - protein, 316 aa, unidentified
MAEELYVGIDVSKAELVVAVRPSGERMTLANERAGIKRLVGRLGELKPQLVVVEATGGLQRQVVAALWMAGIAVAAVNPSWVRNFAKGRGVRAKTDRKDAELLALFAERERPEARRPADAETQALQELVMRREQLLEMRVAEKQRLTRASATMRKELRHHIAYLEGRIKEFEQDIDKTVRRSEAWRRKSEIVRSVPGCGPHFSAMVLAKVPELGTLNRKQIGALVGVAPMPDDSGSRHGRRVIAGGRFEVRNKLYMCAMVAARSNPVLKQFYERLVARGKPKKLALAAVMRKLIVTLNAMIKTNSLWRPPCPDLSV

SEQ ID NO: 415842 - protein, 351 aa, unidentified
MVVVGADVHKRTHTFVAVDEAGRRLGEKVVKAISDGHAEAVMWARERFGADVIWGIEDCRNMSARLERDLLSAGQKVVRVPTKLMTQVRASARTRGKSDPIDALAVARAVLREPDLPVACHDEVSRELKLLVDRREVLLAQRTSAINRLRWWVHELDPTKGPKPRSLDRAKPREALRVWLDTVVSVVAELARDELADITRLSEQIDALAERIGARVRDVAPTLLAIRGCGELTAAKIVGETAGVTRFKSEAAFARHAGVAPIPVWSGNTEGRVRLSRSGNRQLNTALHRIAITQIRLNGSPGQAYYRTRIAAKDTTAGSRRCLKRHLSRVVFRALHIDDQIRNQSPQTAAA

SEQ ID NO: 415843 - protein, 429 aa, unidentified
MNYNTQNAKIASITEKTLIVGIDVGSETHYARAFNWRNYEYSKKPFAFSNDEAGFSSFKDWMDDIAEKHGMKVVIPGMEPTGHYWLNLGAYLQEQGMKPVHVNPHHVKKSKELDDNNPSKNDRKDPKTIAGLVNEGRFSYPYIPTGIYAEIRNLSNLRIQTQEEITRIKNRIARWFSIYFPEIKDVYRNPDAVSGLMVIKQAPLPCDIKELGVNGVNKIWRDARLKGAGIKRATTLVTAAEHSIGNTEAPRSARKEIRNLLNDYETYKNRMDELMQEIKETLSEIPYIDKLMEINGIGIKTVSCVIAEVGDIGRFDNPKQVQKLAGYAIVADSSGKHNGESRISHRGRKRLRYALYEAAISVIGKNKEFKEIHSYYRTREKNPLKKMQSVIAVACKLIRIFYTILTKGVDYDGQRMLADIVRPEMQLAA

SEQ ID NO: 415844 - protein, 403 aa, unidentified
MYQNTCITIDVSQNISHIQGFIGPNKPLCKARTMRHSNQGFQFILTLKDIIESKSNETPLIIFEFTGIYHKSLEKFLISQNLKYHIVAPLRAAKARNSEIREQKTDAKDCLTLSKLFYTHSLGIFYSENQTYSSLRKLNRYYDTCMKHLIKIKVNFRETLAVIYPNYNKLFTSVYSDESLTFLKLFPHPSLYTSKSEDEILTILNEKWNHLESWSSSKVKKITPLVDETISGCSITEPETLILLSYITQIEYYLNQIKATIIKMNQLASKLPLYNLVHSLPGIQDILTCKFIAELGDISRFTNYKQIVAYAGIDPMIRQSGDKDGLHLKMSKKGNKRLRTILHLMVSSLIKANRKPNAIKTKYQKKTHQLNPLKPKVASMACANQLVRIIFYMHKTSSTYQYK

SEQ ID NO: 415845 - protein, 343 aa, unidentified
MEQYVGLDVSLEQTALCVVDGGGKTLWQGKCASTPEAIAAAVRARAPEVARVGLESGPLSTWHWHELKRLGLPVVCLDARHAKAALSLQLNKSDRNDARGLAQIVRTGWYREVAVKGWDSQLVRSLLTSRAQLVRLRVDLANQIRGVLKPFGLVAGKGGGRLFVERVRTLVADGPLREVAEALLAAWQAINDQVATLSRRLLAIARQDQAVRRLMTAPGVGVLVALAYVSVIDDPERFAKSSSVGAYVGLTPRRFQSGEEDYTGRISRCGDKLLRTYLFEAAGIILHRVAKWSALKVWGTRLLKRIGAKKATVAVARKLAVILHRMLRDGNEFRWSAKEGQAA

SEQ ID NO: 415846 - protein, 389 aa, unidentified
MPGLSFHQGSTLGQYDIFSGLDVDKTSITVTYADSQQILCSLRVPYEASHLIAYVRKHFADRRVIFAYEAGPTGYGLYDGLTAAGFPCLIAPASMIPVAPGQRVKNNRLDSKKIAIALRNGELKSIHVPSPLYRHLRHLTKQRDLLVRQITATKIRIKALFLFEGMAFPPGKWSRQVIGQLQRLSCSEAVRFRLDGLLAALEFNQHQLLQTMRTLRRFCRQEEELWRCLGYLRSIPGIGIIVGTDLLARIGDWRQLADHKVSQLGSFLGLVPTEHSTGEKVHRGSINRAGDRRLRSKLIQSAWAAIRNDPELLEFYQSVYKRHSPNQAARKAIVAVARKLTARIFAILKEQRAYEVRPALRSRPLTAEEIRPGESLDGPKKQEEAPKSS

SEQ ID NO: 415847 - protein, 432 aa, unidentified
MPKHLEHINPHAAGIDVGSRSHFVAVPPGSCEHPVREFTGFTDDLHRMADWVLECGVTTVAMESTGVYWIPVFEILESRGLEVRLVNARHVKNVPGRKSDVLDCQWLQQLHSYGLLEGAFRPSEEVCTLRGYVRQRGNLVRYAAAHIQHMQKALSQMNLHLSTVIKDISGVSGMRIIRAIVGGERDPVSLARLRDGRCKSSESTIARSLHGNWRCEHLFSLKQALELYEVYQAQIAACDREILEQLARFEGSSGSGGAPPVDLNEALLRISGADLTAIDGIDTLNALKIIAEVGTDMSRWKSAKHFASWLGLCPGTKISGGKRLSTKTKRIVNRAAVALRISAVSLKRSKSALGAYLRRQWARLGGAKAVTATAHKLARLVYSMLKHGSAYVDLGQSYYEERYRDRVVKNLKRKANTLGYQLVRNADQPASI

SEQ ID NO: 415848 - protein, 413 aa, unidentified
MELERLIERCAGLDVHKASVTACVRIPGDADARVAHTQTFATTTRGLIGLHDWLASFNITVVGMESTSVFWKPVYYMLEDDFECWLLNARHLHNVPGRKTDVADAAWICQMVEHGLVRPSFVPPPPIRDLRNLTRYRKAQIQERTREGQRLEKVLQDAGVKLSSVASKVLGVSGRAMLEALVSGTHDPEVLADLARGVLRRKIPALQEALEGRFRAHHALMVSQMLAHIDYLDEAVETLSAEIERLIAPFSEKVQLLCTIPGVDRRSAEMILAEIGPDMQRFRTHRHLASWAAICPGNNESAGKHQSGRTRNGSKWLRSGLVQCAKAAARSKGTYLASQYARLKGRRGHGKATVAVAHSILVACYYILLRNQPYTDLGPDYLLTRDSTDAHKARLVRQLERMGHKVTLEPVAA

SEQ ID NO: 415849 - protein, 342 aa, unidentified
MLYVGIDVAKNKHDVTALNVPGKTVLKPLTFSNNKAGFELLDLSIRQINQDCLIALENTGHYAFNLLNFLHEQGYKVYTYNPLLIKEFAKSLSLRKTKTDKKDAHGIALKLLSDPNREQFQHDNRQVDLKILARHIHRLKKNSLIGKYNTLVVLISSFLSWIKSLESIQNIPTNLLTRYPNPQKRLEARFDKLIEIKRLTASKIQDILSIAPRSIGTTSPAREFEIIEIIKHYKRLIDKAETCVNDLMAEFNSVITTVTGIGGRLGAVILAEIRNIHAFDNPAQLQAFAGLDSSIYQSGQIDLAGRMIKRGSPHLRWALIQAAKACARFSPAFKAYLKTKLE

SEQ ID NO: 415850 - protein, 371 aa, unidentified
MGKSSKSLFIGLDVHKDSIAVAYAAEDRGIEVVSLGMIGTRQYDIDKLIRKLEAKGATLLFAYEAGPCGYWLYRYLTRRGLSCAVVAPSLIPRKPGDRVKTDRRDAVTLARLLRSGDLSSIYVPTVDDEAIRDLSRAREDAVRDLKRHKVRLKAFLLRQDIRYEGRANWNAAHLRWLARVVCPTPAQQIVFQEYVHAVSEQTDRLGRLETELQTAVTTWRLYPVVAAVQALRGLNLTGAVTLIAEVGDLTRFDTPRKLMSYLGLTPSEYSSGEHRHQGGITKAGNGHARRALVEGAWAYRYPAKVSRHLQLRLENVPAEVRAIAWKAQLRLCKRYRLLSARGKHVNQVVVAIAREMAAFAWAIARTVPIAA

SEQ ID NO: 415851 - protein, 520 aa, unidentified
MTTTKTRRRFSTRRPPTSLGKPRGVLHPRVQQVGPDHFGIVCFDCHKVSSKFLLADFYGQVLIPPTEVAHTRPELDAAVAQIRQAFTQYQLRDGLVAIERTGRYHRVVQRTFAAAGFETRILHPFVTKQYRQPVDPGNKTDDADLGAIHRATVTGCALLEATRDEAWTTLQLVIRHRRDLVVKGAALNCQIRDHLEAALPGYAACFDKLWESQIPWHLLRHFPSAEQLRTAGVTALCHSLRQAGIRFQQRTLQTVCDGATQAAPGDVAASQHLRIALALYDDRQRKTQEIQALEREIAGRLAQTPYVLLLSFPGINVVSAADFAGEAGPMEHYAKPKSITGRAGLRPCRYQTANVDKADGPLVRNCNRSLRAAILAIADNLILCNHHFQHLATRWAAAGKDSRDIHIRVGLRFCRIAFHMVAGRQVFRHPCLQGRHYIVDKLLAFHREHDTPMPETLRDLQAAIGQVPPREHAAEAKPLQQELEKIQTNRRRGPQLIGDILPIVLARLGVGAIQSTESEE

SEQ ID NO: 415852 - protein, 390 aa, unidentified
MPIASDRLEVSTAIHTDLGAIFVSLELSRSSWLVTSLSPGGREKMSKHAVGGGDVAGLLTRFRLLQDKAQARTGKLYPIVVIQEAGLDGFWIHRALEVNSIESHVVDPASIAVSRRHRRAKTDKIDGEALVRTLLAYKRGEARVCAMVTVPSPEDEDRRRICRERKVLVAERVEHGNRIKGLLFAQGVGDYEPLRRDRRERLEELRTGDGRPLPPLLKAQIGRELDRLDVLSGQIKAVEEVRDALVATDKKTQSRPTPAAMLLDIRGIGPEFAAILWSEGLFRHFDNRRQVAAYAGLAPSPWQSGSVDREQGVSKAGNPRLRTTLVQLSWLWLRHQPKSALALWFEERVKRTGGRFRKSAIVALARKLLVALWKYVTAGVVIEGAVLKNA

SEQ ID NO: 415853 - protein, 410 aa, unidentified
MQTLVERGCGLDVHQATVVACLLIVLKSGKVHKQIRTFGTTTRELVSLREWLLSEGCTHVGMESTGVYWKPVYAILEGAFEIVVANAQHVKKVPGRKTDVKDAEWIADLLCHGLLRASFVPPKPIRELRDLTRYRRKLVESRSAERNRLLKVLETANIKLASVASDVFGVSGLLMLQALVEGQATAQEMAQLAKRQMRKKIPELELALEGKMEEHHRFLLKLQLDRLQAVEKDLAFLEQRIQEKLKPYAAEVTLLDEIPGVDATLAGAIIAEMGVDMSVFESVSQLASWAGVCPGNNESAGKRRSSRIPKGNVYLKTALVEAANAAAKAKGTYLRDKFYRLKARRGYKRAAVAIGHKILVAIYHMLSHCVCYNELGDLYLDKLNKHHLTRNLVHRLERLGYTVTLEQKAA

SEQ ID NO: 415854 - protein, 423 aa, unidentified
MEQNDDNRLKEFRQLKREIRMSGEFLVIGVDIAKERHHAFFGTPTGNTLLRRLVFENTKEGFEDLCFQADTLKTRHALKKVVFGLEPTADYHKPLAEYLIRQRHMVVLVGGAAVKKNRELLDGRWDKNDTKDAANVADLITQGKCLFYDFPSSDLRELRNLLSLKRRLKKQKQGYRVRIRNHLIAQYFPEMDDYFSYGEGPAIVKWCLDPAELTNLPFEEFVRMVSSRNGGENQRRRLLEIQKKAASSIGCKVTPSVSFESKTLLEELQQLHRMIQETDKKIVGICERFPEYTFLLSIPGFGPDISAKVLGAIGNPHRFDNERQVLKMAGLDLSADRSGKKSETVPVISKKGKADLRYGLYQAALIASTRNRCFMTYFTNKLKGREREKGILTNRRVKLAAKMLVIAWTLMKKKEVFDPGYIK

SEQ ID NO: 415855 - protein, 400 aa, unidentified
MRTVFGIDVSKASSEVAIVINGEKIHGYTMPNDTIGFTRLLDDLKTVQKPEIIFEATGVYSRRLQAFLEENGYAYTQLNPLEAKKQLDSLRVRKTDKIDAETLAISQFVLNRKPTYIQEEVYQELRDLSRFYQNLTEDIVRTKNRLHKVLQVTFPEMENILSTPTREQYWNLVMTFPYKDFVLELSKDELLEGIRQSTSKHISDKRVAYLAQKLAALANQSYCAVKKNSPILEEVRYYAKELLRLSEQRQAVFEQMVELAQPLPEYEILLSIPGIAETTATSMIGELGDIRRFQSANQINAFIGIDLRHYESGNFLAKEHITKRGNPYARKILFKCIHNIAAASHTNHCHIADFYEKRKRQSQTTSTKPHTIASIHRLIRTMYYLITHNKLYDYTSTQNR

SEQ ID NO: 415856 - protein, 338 aa, unidentified
MNNSHIIGIDLGKNSFHLVGHDQVGHQLFKKKLTRQKLLEFLSLHEPVIIAMESCGGSHWLARKCAEFGHTAKLIPPQYVKPYVKTNKNDFIDADAIAEAASRPTMRFSSAKTESAQMVSTIRKIRSGYIRERTACMNRIGSILLEFGISLTKGHASMKGLFQWLVDKNQHLPPLIIFELSELHEHYQNLNERIDSQTDKVERILADNEQMKQLQTVPGIGPVIASACISTVGNPNDFKNGRNFAAWIGLVPIQYSTGGKSTLLGISKRGNKELRTLFIHAARSILWRDKSVEKYFGSWLIELKKRKPFNVAVVALANKIARIAWAILVHKKSFEIRT

SEQ ID NO: 415857 - protein, 385 aa, unidentified
MAPIRMPEAVIGLDVGKSSHWACVATRDGEVLLSAPVANREDDLDSLFGRFPDALVVVDQSRNIGALALARARAAGMSAAYLPGLAAHGAARLFAGDAKTDERDAMVIAKTALGIPDALLPVGDPGPTVAAARALAAQRNFLTCENTRNKNRLRSILLESCPAFETLVDLSDGPQLRLMASLGGAWSVADAGPRRAAALTRGAARGKIEALVRSTTSSTRPDASVVAAEDRAVKLLARRISENSAEIEAITAEISALLEGDDTYRCLLTVPGIGPKTASELAISIDIEGFPSHDRLASYCGLAPRNRQSGTSISSVTASRQGNKRLKNLLIFSCNCLTRTEGRWGDYYTRCRERGMSHGKALKALARKRLKVIYAVMRDRVPYAA

SEQ ID NO: 415858 - protein, 389 aa, unidentified
MIYVGIDVAKDKHDCCILESEADKLYPVFTIPNNKAGFDELYEKIFTVTDDKTKIKVGLEATGHYSLNLLGSLIDKGLPTCVINPLHTNLYRKGLSLRKTKTDKVDARSIAMMLMTNKTLKPYSDTSYHSEELKSLTRYRFDKVQERAKLKSSVARLVNILFPELEKLVPSLHMASMYVLLSKLPGASYITECHLTHLKNLLETASKGHYGRDMAITLRNTARDSIGSVIPAKSMELKHTIHLIEVMTEEIDEIEDSIKSIMDTCNSPIMTIPGISYRMGAMILAEIGDFTRFNYADQILAFAGLSPSTYQSGQLDSSYSHMEKRGSRYLRYALFNAAKFVCKWDENFGAYLSKKIGEGKHYNVAIGHATKKLVRTIYQMELTGEAYRR

SEQ ID NO: 415859 - protein, 340 aa, unidentified
MSIVMTYVGLDYHKDSIRVCILDESGQELFNRNCPNDVEAVAEKIAEFGRPSAVAIEACCGAADFAYELQQRCDWNIKLSHPGYVRRLKQSPDKSDKSDGYLLADLVRVDYLPEVWLAPLATRQLRRLVRFRQQLKRERTEVKQQIQGLLADERALEAPANPWTKAWLAWLDKTTQLGEEARWVLQRQLARLERVEKEINAVDERLAEVTKEDPVYQKLLEQPGVGPVTAATLRAEIGSFDRFQSGKQLARYCGVTPCNASSGKRQSDAGLIRASNPELRTILVETAHRLARYDERWKQFKAKLVKRNKPGSVAAAAVANRWVRGLYYQMASGKQESKAA

SEQ ID NO: 415860 - protein, 356 aa, unidentified
MENLNKLDFSGQQIYVGMDVHKNSWSVSILTEQFEHKTFCQPPEVNVLVNYLKRNFPGAVYHAVYEAGFSGFWTHDRLVEQGINCMVVNPADVPTKDKERATKTDKVDCRKLARNLRSGELKAIYVPPRTKVEDRQLLRTRQGMVKKQTRCKNQIKSLLYFYGIQIPEELTQSRWSNKFIIWLDEIRMNRASGDLAFATHLEELRHIRQLIAKLNLGIRALAKGDEYRKNVQLLKTVPGISLLTAMTLLTELYDINRFKNLDKLSSYVGLIPDTDSSGEKELATNITNRRNPQLRCLLIESAWVAVRKDPALLMAFNRLSKRTTKNKAIVKIARKLLNRIRYVLRNQKEYVPAIVK

SEQ ID NO: 415861 - protein, 344 aa, unidentified
MHATIAVDLAKNVFEIAVSHHPGRVATRKRVSRSRLPAFFVQQPAATVLLEACGSSHYWARQIQAHGHQVRLLPPHQVARYRTGNKTDRADARALLEAHRNEEIQPVPVKSVEQQTLTALHRLRSRYVATRTSRINTLRGVLREFGLIIPRGGPRAVLRLEAVIGDTESDLPALLRPGLTETCLEIRALTERVEAIGRQLEASGHLMPVVARLSSIPGVGVLTATALVALVGDVRRFRSGRRFASSLGLVPREFSSGETQRRGRITKRGDSYLRMLLIHGARSVLVSASRYLKRDGLRDWALALSCRRGHNTATVALANHLARIIWRVWREDRDFMERRVAATA

SEQ ID NO: 415862 - protein, 385 aa, unidentified
MFYVGIDIAKTKHDLACINETGETVITNFRFANSYQGFHQLKLKLKQLSPITQDIHIALESTGHYNYNIVAFLRELGYTVFAYNPFIIKQFAKSQSLRKTKTDKKDALLIARKLRSDVTPEYYQTDKVMDELKELTRYQNRLIQSRSKCKNLYIRLLDIIFPEINSYVSNLHSHFVYELLTKYPSAQKIARARVSSLLKIKRLTADKAHQIQETAKQTIGNASSALSLELVQLIDSIQHYDKQINQTQEEINRLMTGLDSPITSIPGIGNRLGAIILAEIKTIYNFKNPNQLQAFAGLDPAIYQSGQMDNTGHMVKRGSSYLRYALIQAAKLISIYSPHFKTYLKLKISHGKHYNVAVTLIAKKLIRVIYHLLKTNQTFDEAKLR

SEQ ID NO: 415863 - protein, 384 aa, unidentified
MTEQSAAATAFDHTSTLVLALELSGKGWQVGAVLPGVARRPRRSVAPRDVAGLLAQIERWKAEAQRAGRTVLRTVLAYEAGRDGFWIARCLLAHGIEVQIMHPASIPVERRGRRAKTDRIDLDTLLRTLLAWLRGEPRVCSMVRIPSETEEDMRRPERERERLVSERIALENRIENLLCLHGIAGFKPRLKKAAERLDGLRSFAGAPLPPMLREELKRLMMRHRMLSEQLREIEAAREQAAMAAEPDCAVQQIQMLARLVGLGLATASGLTREVFCRSFADRRAIAGFVGLTGTPFNSGGSEREQGISKAGNPRVRRILLQLAWRWLRFQPDSALSCWFVERTGGAKGRIRKIMVVALARKLLVALWRYVETGEVPAGARLAAA

SEQ ID NO: 415864 - protein, 416 aa, unidentified
MQVLYPCCCGLDIHKKFVVACVLRTAPDGKVQKETRTFSTMTGELLALGDWLRAEGCTHVAMESTSSYWRPVYNLLEGQFDLLVANAYHIKTVPGRKTDVKDAEWIADLLRHGLLRGSFIPAPEQRHLRDVTRYRTHLVEERARVTNRLQAVLEDANIKLASVVTDVRGVSARAILDALVAGESDPVLLAELARGRLRAKREQLAQAVVGRFAAHHAFMITEQLSHLDYLDEAMERLSTEIEQRLQEEWAAVELLDSIPGISQRAAEIVVAELGVDLQRFPSAKHLASWAGMCPGNKESGGKRLSGKTRKGNIWLRQVLIEIAHVASKTKDTYLAAQYRRIAARRGKKRALIALGHTILVIIYHILTERKPYHELGGTYFDQRERAQVERRLVRRLERLGYNVSLQPADSSPQPAA

SEQ ID NO: 415865 - protein, 414 aa, unidentified
MVRRLYVGIDWADDHHDICVTDETATTLAQCQIAHSAEGFAALHRQIAQHQADPTVVLVALETSRGLLVYDLLCQGYQVYAINPKAVNRYKDRHVLSAAKDDRLDALAMAHLLRTDRHRFKPLAPQPEQYRLLERLCSDLRKLIDAKTCLSNQITSCLKEYYPQAVGLFRDVASPISLAFLRAFPDPDTVRQTDRSGFAAFFRTHRYTHPRRVDALYERTHTSAPAADPVVVRAASVRLAALVDQLGVVRAHQGVYEHTITSLLEELPEAQPVATLPGIDTRWVPELVAALGPHRPEQPKRFATVSDLVKFSGCAPITRASGKRRTVLRRRACDKRLRRTFYDWAMASLSWSRWARAYYDHRKAQHHAHATILRGLGQKWAKILYAVWSSGGAYSEVQHITQLKRYQVVWALSL

SEQ ID NO: 415866 - protein, 373 aa, unidentified
MPMYSTAFGMDVHLRSTTVCALDADTGEAVTRRFPGNPWGEIAGWMDGFPGPSLAAYESGYLGFAPQRELAGLGVECVVAAVSKIPRSAADSASKNDRNDAARMAKAILAHDISPVWVPSPEVEGIRDLAGAYDGATARLATAKQRLLAFLAKRGFVYGGTTPAGNPRKYWTYDFLRWLDKVRPEDDGGVRTLAALRNEVEAAAEARADLLSEYRAAVDASPIAAEVAALQSIKGCAFALAAAFSAEVGDFTRFRSGRQVTAYFGLAPSQRSSGDSVRLGGISGAGNALVRKLAVEGSWCYAAARHQPKLMPRDTGVPLEIRMHGRKGSERLLRRREEMLARGMPAAKANAATAAELVRWLWALGTMCREATE

SEQ ID NO: 415867 - protein, 329 aa, unidentified
MTTTVGLDLAKASFDATLRFPDGTLHHHTFANTADGFTALTTWLATLVTTPVHACMEATNTYWEALATFLDAAQHTVSVVNPARINGFAQAEMQRNKTDTLDRALIAAFCAKHHPSAWQPLTPEHQYLRALVRHRDDVVQTRTQLEQRLTDSQAAALRESLTTCITTIKTHITAVETQLKAHVAAHPSLQADVQLLTSIVGIGLVTATKVLGELAPIASYTAAKAVATDAGVTPQEYSSGTSVRRTARMSKQGKAPVRAGVYMSALTAMRHCPGCRAFVDKLSARGKAKKVMIGAVMRKLLHMIYGILKHRTPYDPVKAWGETPSQGNI

SEQ ID NO: 415868 - protein, 393 aa, unidentified
MICVGIDVAKDKHDCFILNSEGEILSNVFTIQNNREGFENLLQRIQSCTQKSDKIMVGLEATGHYSYNILGFLLDHGLPTCVINPLHTNLYRKSLSLRKTKTDRIDAKTIATMLMSDVDLKSYTDTAYHNEELKSLTRYRFNKVQERAKLKQAVARLVNILFPELEKLVPTLHMASVYALLKEFPGAQQIATAHLTHLKNILTEASKGRYNKDKALEIRDTAKNSIGSIMPAKSLELRHTIQLISELDTEIDEIEAAIEEMMNSIQSPITTIPGIGLRMGAMILAEVGDFSNFDSPDKILAYAGLSPSTYESGKLSLAGTYSHMEKRGSRYLRYALFNATKYVCKWDSTFATYLAKKRTEGKHYNVAISHAAKKLVRVIYALQKTGNPYITAT

SEQ ID NO: 415869 - protein, 366 aa, unidentified
MSAIDNVDGSPTGPQDDLRMSRKESNDERCGSDWFGSREVGFQVHGVDAAGQVVVRQRLTRGRLLKFFSRLQPCLIGMEACASSHHWARELIALGHDVKLMPAQYVKPYVKRGKNDAADAEAICEAVTRPTMRFVGIKSPEQQSAMMLHRVRLILTRQRTQLSNAMRAHLAEFGIVAPVGRRGIDQLLAVVADAEDSRVPANARACLDMLAAQLCLVKEQILENDRRIIANARDTEVGRRLMDIPGVGPLLASALVATVSEPILFRSGRNLAAWVGLVPRQNSSGGKERLGGITKAGNRYLRQILIVGAMAVVRYAERNGTKRPWLVQLLARRTAKIAAVALANKTARIAWAMMTSGERYREPQVA

SEQ ID NO: 415870 - protein, 337 aa, unidentified
MYNHVRDPDPTNMMEVGMDGKRLIGVDIGKHWLDVAREGVTAVERHANSTAATAALVGTLDAARDIVVFERCGGYERELEAALAAANVPWAVVHSLQVKAFRQAQGVKAKTDAIDGQLLRAFGRDRLDAGKLRLGRVEDVVLDTLMARHRQLKAALHAERCRRETAAIASVRASIERMIAQLEAELAGIASELAAHEAKDSQLAFKEKVMCERKGVAQATARALLAELPELGRLSCKQVTALGGLAPRVHKSGRTERRRGLDPGRSSVKVILFNPARSAMRWDPEIKAFCNRLRARGKPGKVIMVAAMRKLLVRLNAAVRDALSHAEMQSPATQVAA

SEQ ID NO: 415871 - protein, 456 aa, unidentified
MAHRKNKIPAQLVEDEEYQLRHDRTAGIDVAKASGVVCTRLPAAREGGRRRSRTEEVPATAGAIMALAGRLIADGVELVSMESTSDYWRIWFCTLESCGLNVQLVNSAAARQLAGRPKTDKLDAQWIARLTEMGLLRPSFVPPAEIRALRQWTRTRLQLVRDRTAEWQRLEKLLEDALVKLSSATSKLAENKTARAIIGALIEGNRDPRALAGLAKGSLRGRRAALEQALDGMAFGEHHAWLARMHLDRIDALDRHLAAINDEIEACLDAIPAARGIAADGTRTPDPGPDAAVLPAAARLAEIPGVSPELARAIIAETGLDMSVFPTAHHLVSWAGLAPAARQSGPRARKPKKGQGDGYLRRYCTQAANGTGKTDTFLGERLRRLDKRLGGTRARCAVGRSILVIIWHLLNDPQARFTDLGPGWHDRKTSRDKKIQGHLRQLHALGLQVTITDPAA

SEQ ID NO: 415872 - protein, 414 aa, unidentified
MDLIHPRCAGIDISKRDAKVCVRAASTGRAKATETVTTWGAVTNRILALRDHLVAEEVTLVVMEATSDYWKPFYYLLEEAPFELMLVNARHAKNLPGRKTDVSDAAWLAQLGAHGLVRGSFVPPEPIRQLRDLTRTRSTLTHDRAREIQRLEKLLEDSGIKLSSVASDITGVSGRAMLEALIDGVRDPAELADLAKRRMRSKIPALTEALTGRFSAHHAFLTRMHLDLIDNYTDALDELTTRIEVVMEPFRAARDLIVTIPGISTYVADVIIAETGADMSRFPTAGHLASWAGTCPGSNESAGRVKSTQTRPGNPYLKGALGVAALSVARSKNTYLAAKYRRIASRRGPMKALVALEHAMLIAIWNMLDTGSLYTDPGEEFFTRLNPDRAKSRALDQLRRMGYAVTLEPLAAEG

SEQ ID NO: 415873 - protein, 348 aa, unidentified
MNLKRIGLDTSKAVFTLHGVDQDEKAVLRRNLRRAEMEAFFAKLPPTHVALEACGGSHHWGRRLASLGHTVQLIPPQYVKPFVKRGKNDRNDAEAISEAAARPGMPSVAVRSAEQQAEAIVLSARELLVRQRTQLVNAVRGHAAEFGIVAAKGTSQLPALLEVVAAGEAVPIAAKEMLAFLGGQVAQLDERIAELERRMKQQHKANPVSQLLAEVPGIGPIGALSLALTIDPGRFQSGRHFAAWLGLTPKEHSTGGRQRLGGISRAGNERLRQLLVLGAMAVIRYAKPGSETASPWLLALLERKPRKLAAVALANKMARIAWAMMATGEAYRGSKTVATQAAGVAVIA

SEQ ID NO: 415874 - protein, 351 aa, unidentified
MQIVGALDVHRRQITFKTLVLASGESSRGRISPAAREPLRQWLERFDGLEGEFVLEGTTGWRFVVEEIERAGHVARLADPAETAARRGRKRRAKTDDADCDLQLRLLLAGELPEAWIPPVQILELRTRVRLRKTLIDQRTAWLQRLQAQLFHQGAPAGLKPGTAAGRAALARIELSPAGREDVELCLRMLDQLDRELVPIDRALRAFARRQPGCRALTGQLYGVGAVTATAILAELGDARRFRSSDDAVRHCGLDVTVWQSDRKRAAGHLSHQGPSLLRWALFEAAQCAARRTSPDHAYYLDVAKRIDHNRACLSVARKLCRRAHHILRELGDDALAPSDPPRAKLVDAAA

SEQ ID NO: 415875 - protein, 344 aa, unidentified
MNVSTVGLDLAKNVFQVHAVDDGGEVIVRRALRRRQMLPFFAKLEPCLVGMEACGTSHYWARELSGLGHRVKLMPPAYVKPYVKRGKTDAGDAEAIAEAVTRPTMRFVAIKSPEQQSILALHRTRDLLTGQRTQLVNMIRAQLAEFGIVLPKGIQHALKLVDRLLVGEVPDIPTLACKVVIILAEQIRDLELRLGELEKGLTASSRGNEMVQRLRTIPGIGPITASALAATVTDPHQFRSGRQFAAWLGLTPRANSSGGKERMGRISKMGDQYLRRLLVIGMTSQLQAARRKPDAHPWITSLLTKKPHKLVAVAMANKTARIAWVIMTRDEIYRAAMPATEDTA

SEQ ID NO: 415876 - protein, 342 aa, unidentified
MSENNNHEKCHWVGLDVAKNTFDAALVLPHQHFPSTPLHKIPTRKFKRTPEGVTKLLTWLDQKCPDHDNVRVIMEATGNYSPELALWLIEQRPTLQPAIANPYHTSSYIKSMGVRNKTDKLEARALGFYGVERHPLPYEPPTPERAQLRELSRCRDYLVKESTRLKNKLKENSDSIEVTKMFTKRLRLLKNDITRIETSMRELVETHEELKHDIELLNTITGIAFISAAMIIAELGDLRRFKRSRQLSAFAGMSPKHHQSGTSINGRSRLCKQGNPRVRQGLYLSAMVTIRSNNQFQHLYQNLIAQGKAKMVALGAVMRKLLTVMRAMLIKNQTFNPMGITR

SEQ ID NO: 415877 - protein, 425 aa, unidentified
MSSAHIRTASVMSKELDKGGGLDIHKKSVAAAIASEDGSILEAEFGMTIDQIYQLKKWLLENGCKRVLVESTASYWYRIDQVMRDEINVIVVNPRDIKSPSSKKTDKIDARKLASRCLSNYEIHPSRKFTSEQLSLKRLTRSRQQYVQTRSKLKNQIHKVLDAAGITLSIFISDIFGVSGRYILNCLVARKSLKELIPGIPTNRIRKRAQELPEHITVQLDDTQVFLIRKALHTMDDIQKTIDEIDAILYERADAYIEDLKILMSVPGVKFIAAITILAEIGNYKDFGDGDQLACYAGLTPDVNVSAEKNIIGKITKHGPKGLRWILNQVAHGASKTNKSRLKKVYLRLLRRKGKPKAITALSRKILSIIHHLLVNREMWEEEGFKKKRLDFDFDRKSSPLQLTWLDLVVNNVVLVGKGKPGGGG

SEQ ID NO: 415878 - protein, 349 aa, unidentified
MIIVGVDYHPSVQQVAFLDTETGETGERRLNHSDGEAERFYRDLQRRQVKVRVGIEATGHARWFERLLAELKFELWIGDPARIKAARVRKQKTDRQDAELLLRLLIEGRFPQIWVPSPENRDLRQLIWHRHRLVQMRTRAMNQIQAAAMNEGVRRKKTLWSKTGRRQLEALPLAPWATRRRQDLLELVDRLNTTIDELTAAAEQEARKRPEVLRLMTHPGVGPITALAFVLVLGSPDRFGCGHQIGSYLGLIPCEDSSADRQRLGHITKQGSSLLRFLLVEAAQAAVRWDPDWRRRFVHLAMRRDRRIAKVAMARKLAAASTGCGVRDSITHRLCSSVRTRESLDTSMV

SEQ ID NO: 415879 - protein, 385 aa, unidentified
MAPIRMPEAVIGLDVGKSSHWACVATRDGEVLLSAPVANREDDLDSLFGRFPDALVVVDQSRNIGALALARARAAGMSAAYLPGLAAHGAARLFAGDAKTDERNAMVIAKTALGIPDALLPVGDPGPTIAAARALAAQRNFLTCENTRNKNRLRSILLESCPAFEALVDLSDGPQLRLMASLGGAWSVADAGPRRAAALTRGAARGKIEALVRSTTSSTRPDASVVAAEDRAVKLLARRISENSAEIEAITAEISALLEGDDTYRCLLTVPGIGPKTASELAISIDIEDFPSHDRLASYCGLAPRNRQSGTSISSVTASRQGNKRLKNLLIFSCNCLTRTEGRWGDYYTRCRERGMSHGKALKALARKRLKVIYAVMRDRVPYAA

SEQ ID NO: 415880 - protein, 402 aa, unidentified
MARNGHTEVVALCPFLAAERTSGNSAAMSESDAVDGSSTGTRVPRLWEQLRLPRFGGAIHADDHDNRFRHAKSVFQVHGVDGAGQVFIRRQLKRRSVLAFFQKLPPCLVGIEACASAHHWSRELQALGHKVRLIPPAYVKPYVKRQKNDAADAEAICEAVTRANMRFVPTKTPEQQSGLVLHRTRHLFIRQQTAVINAIRAHLAEFGIVAPVGRHGVEELLNVLADPNDKRVPEIARACLSALGAQLRRIKEQVLEFDRLIRAWHRSDEMSMRLDEAPGVGPVLATAVVATVADPKSFRSGRNFSAWIGIVPKQHSSGGKNRLGNISKQGDRYLRGLFVAGALAVIRYAKIHGTKHRPWLTALLARRPTKVAAIALANKLARMVWAMMVKGERYKEPVALAA

SEQ ID NO: 415881 - protein, 350 aa, unidentified
MPRKFDTAVVTIGIDPGKNTLHLVGLDARGEIVLREKVARTKIVSRLANVPPCLIGIEAGMGTHYVTRELLALDHDVRQVPPVYAKPFWQTHKNDFRDAHAVAEAVQRPTTRCVPPKTDEQLDLQALHRVRYRLVGQRTAIINQIRCFLLEHGITVRQRLHWLRHALPDILAQRIDVLSPRMVRILEDLAQDWRRLDDRIEAVTDEIDALSKNTEPCRHLMTIPGIGPIISSAVVAAIGNGTAFACGRDFAAWLGLVPKQISTGDRTILGRITKRGNRYLRMLFLQAARVVLLRPKNWMKHGFGPWLAAAAQRLHHNVLATALANKLARIAWSVLVQHREYEARLSVAAI

SEQ ID NO: 415882 - protein, 327 aa, unidentified
MMFIGIDISKEKIDLSWLRDQLTNKIKTKVFKNKRQDFLAIEKWLLNTTKSAASELVITLEPTGVYHEALMYFLHEQGFNIILANPGKAKKYADALNIIHKTDKSDATMLAHYGCAKHAVVNYWQPEALAIRELKALIRRLDALESNRQREANRLEASEFSNVSARVCQSIKVTIAFLDDEIKQLKSDIDNHIDNEPDLKRNRKLLESIPGIGPVLSRELTYLFAAKKFNKAKEAAAYCGLIPRHNESGKLKGRTSISKLGPARIRCKLYMAAIVAGQWNKTIKRHKLTLINNGKTPMQAVCANMRKLIHICFGVIKNQEAFKLQES

SEQ ID NO: 415883 - protein, 386 aa, unidentified
MKRDDLSRSLVAFDQASTLVAVVELSLASWLVAGLVPHLSRQPLKKLRSDPEALLGLLSRWRDQATKAGGRIKRIVLAFEAGRDGFWLARWLRARGIEAYVIHPSSIPVSREHRRAKTDRLDAGLLMRAVLGWLRGEPKHCSMAAIPTVAEEDARRPNRERETLVREQTRAINRIKSTLIRFGIRTFKAKLRQASKHLEELRGPEGEPLPPNTMAELRRDLVRLQVIRGQIREIERTRLERLKRAPHQGTHPMIRMLARIVGIGIETADMLVHEVLLRKLRDQRGVARYGGLTGSPDESGSKRREKGLARAGNARVRRGMIQLAWRWLMFQSKSALTKWYRARTAGAKPGLRKAMIVALARKLLIALWRYVTIGEVPAGAVVRPAT

SEQ ID NO: 415884 - protein, 355 aa, unidentified
MNFTAIDYHKRYSFASALNEQGQRIGEARIVGNSPAGFVQFFRSLGGPSKVVVEACWNWGWLYDQLQQIEQVTEVILAHPYKTRLIAEAQVKTDRLDARTLAQLLRADLVARSHVPSAATRQRKNVLRQRLFWVKLRTAIRNRLHTLLARQRHLSVPERSDLFGKKGQQWLERVELPAPDGWLLRQDRELLALLDTHVREIERYTDTEIANDPNLQRLRSIPGIGAVLAAVIGTEIDTLDRFARPAKFTAYAGLMPTTHASGGHCYHGPLVSGCNRWLRWALVEAAWIAVGGDAYFGAFYRHHRARGKSATIAITIVARRLAEIVWHVLHEARDYEERNWQITSDRSGVILAGCS

SEQ ID NO: 415885 - protein, 537 aa, unidentified
MVTQGGALRAYPDTLSKVIRSRAERASEAERSETVNNFAAMGFENNLRPGQNRSGRKARGRTRSACPDPTRIEPRTPIDPEALVKKSERTSPHEGHRIRTTHDKRHGPQASKPMPEIIKTETVSWESITHYAGFDWAKDHHDVVIVDQKGKITKDLTFEHTAEGWAKWKELVAAHPQVAVAIETSQGAAIEQLLESGVVVYPVNPKSAERYRDRKAPSGTKTDFLDAWSLADALRVDGHGWRALKPLDPLIQELRLLCRDEVELIGKRTEMVNQLQAALLEYYPAALQAFEDWTATPSWSFVQQFPTPELLRQAGRRRWEKFLHVHRLYRPELNEKRLEIFAKAHEFCGPAAVTRAKSRLALTLIKLLQALDKQLEDYRKEIRRLFNEHPDHDLFGSLPGAGEKLAPRLLSELGSDRTLFQSAQALQCYVGTAPVSFESGQVRQVYLRYMCNKPFRHTVHLWADLSRKFCAWAQVYYQQLRARGKSHASALRCLGQRWLKILWKMWQTKTCYNADFHMANQLKHGSWVLAVKPAPSK

SEQ ID NO: 415886 - protein, 354 aa, unidentified
MKGAFENSRVIVQRKEVFIGVDVHKVSWHVTARAGGEEVFNGGIPGQYHPLRKLLDRFEACQIKVAYEAGPCGFWLHDKLVEDGIEVTVVPPSLIPVESGNKVKTDKRDSRKLARLLQSGLLKKVYVLTEEDRIDRELVRTRRQVLEHRNDVARQIKSKLLFHGITSPFSSKAWSQGYLRWLKGLTFEREVLRISFDVLIELYDYLTTELVKLRKRIMELSQSDKYRDKVKLLKGVPGIGTLIAMEILVELADIERFARADELASYMGLTPSEFSTGEYVHQGRITRCGNKRVRTCLVEASWILIQKDPWMRSKYDRLKGIKGGKRAIIAIARNLIIRIRRILLNNEPYVVGVC

SEQ ID NO: 415887 - protein, 430 aa, unidentified
MKQYELLHSLFVGIDVSMKENVVHAMPFSPEDHPGHAHLRFSAPNTPAGSVVIVEKVSDFLKFYPDVIQVVIALEATSVYSFHLATFLSVAHFNGHIPAIVYSVNPKEIHAYKKTFTDVGKDDYVDAMVIADYARSNKIRSRPWKGPELLGLRVLTRLRFRIAKLMGIVKNSTGNSIYLECSGLMTGENPFCNVWTTTCQELLTTFQGPDEILSLSDEELLNFITEKGHGRFSHPLDVVEKVKKAARNSYRLDKRVYEPLTSGLSVSFFIIHSLEAAIKKLDKSIETMAKSFSSDSYQILLSIDGVGPVIAGGLLAEIGDIKRFKTDDALAKYIGLTWRGKQSGQSESPVKHLSKAGDVYLRYYVLLATGQIINYSAKYREAYERIRSRKTLFPYRAALNLVARKIVRLIFTLLDKHQLYSDNKVMVTLE

SEQ ID NO: 415888 - protein, 318 aa, unidentified
MNSHHKAESTEPVSYVSLDVSKARLDYAIAGQQCRKVPNTAAGIATLITAIEPLPGVRVVCEATGGYERRLLEQLHQARVPVCRVQPGRVRHFAQAEGTLAKTDRIDVGVIYRYACSMHPRVEKPPLPEVTALRELLDYRRQLVEQVTQTANRLETAGATLQTLLETQREQLAAALVKADALVAEHLRAHPALQAKAERLQQLQGVGPVLAMTVLAYLPELGEEDDKRIAALVGVAPHAHDSGETSRPRHVRGGRIEVRNVLYMAAVSASQHNPVLSVFYQRLRAAGKPANVCLLAVMRKMIVVLNRMLKNQHFTLVS

SEQ ID NO: 415889 - protein, 399 aa, unidentified
MNFKLSLYVKGFGVAAVRKSAAMKNFAIKLKIMKQQTSATSETLIEGRNIIDFTGKTIYVGIDVHQKDYQVAKVYDGICLGNHRMAANSEALIEHLRSHYQGADFKCVYESCAWGFNLQRKLTAANMECMVVHAADVSTNDKERKRKTDKVDALKLARNLAAGELKAIHVPDETIQKERNLIRYRTRLVGDINRSKNRLKSLLKYQGIEIPAPYLKNNWSQNFMAWVEEQAAKDDLLKDSLLLMLEQMKLLRQLLLKIERKLRVLRKGKYETKAKLAMSVPGIGPLTAMLFLLEVGDVKRFKGFDTLNDFVGFCPDTASSGETDRDKGISARRHKQLRSALVEAAWQAIRIDPAMMNTYQMLTKRMKGSQAIIRIARKLLRRLRAVLLTGIEYQKGVVA

SEQ ID NO: 415890 - protein, 464 aa, unidentified
MRTRRGRTSQPGSEREVEGLPVVRPHVAGIDLGSTKHWVCAPKLSGPGREEEEFGATTPELERMAAWLKERNVESVAMESTGVYWIAPHEVLERHGLEVMLVDTRQLARVPGRKKTDRVDCKWIQRLHSCGLLIGSFRPNEQVCMLRTLVRDKGSLVTEAGDWLRRMQKSLDQMNVRVHRAVADIDGMTGMAIMRAIVAGERDARQLAKLRDRRCHKSEEEIAEQLSGHWRADHLFSLQQGLKMYDAIQERIGEYEREIMRKLAEMEREECRGQVVPPVNNPQKAKTIRKRGEEPMRQALYRMSGVDLTGIDAIGVETVQLVLSEYGADLSRFPTEDQFVSHTTLAPHKPMSGGKPVKKQKKRGSASSRVAAGLRMAALSLRHSETALGAYYRHIACRKGGDVAVFATARKLATLIYRLIRWGQPYVDEGSAAYEKRYQQARIKSLTAAAKNLGYQLAPQVSPA

SEQ ID NO: 415891 - protein, 364 aa, unidentified
MKRRKVNMENMNDHAVGIDIGEKESVATYMSPSGDVIEQFAFPMNPEGYKEFREKIPSETRIAFEASGMAYVVFNKLKSLGYESITVAHPKMISWIVKSKRKNDHVDSVKLAKLHLVNMIPESHLLSEEDRIFRDLLIQRAKLGQEVSSMKTSIISYLKREGLFDSLPESSENFSDKRRKAMESIRFNNDKDVVFKTMLNRLKFLEDQIPPLEERIKSRARESEDVILLMTIPGIDYYLASLLSSYIGDVHRFPSESKLASFFGIVPSNRDSSSITRRGHMSKEGASTARWALSIAVDTVKIRNKPIMEYYDHQKERTVSGKLAHVLTMRKLIRMIYFMLSNGKSWKYENVMLTERKVSDLEDD

SEQ ID NO: 415892 - protein, 407 aa, unidentified
MDVVYPRCAGLDVHKKTVTACVITPEGREVRTFGTMTAELLALSDWLQNQGCTHVAMESTGVYWKPIYNLLEGTGMQLLVVNARDIKAVPGRKTDVKDAEWIADLLRHGLLRGSYIPDRSQRELRELVRYRRDLIRERAREVNRIQKVLEGANIKLGDVAADVLGKSGRAMLEAMIAGKTDPQELAQLAQGRLKSKKETLGKALHGVVGSHQRMLLSTQLQHIDFLDGQIERLSQEIEERMRPFENALAAADTIHGIGRRTAEEVLAEIGCDMSRFPTAGHLASWAGLCPGNNESAGKRRSGATRHGNPHVRAALVDAAHAAARMKGTYLSAQFQRLAARRGTKRAAVAVAHTILVALHHMLKHGTTYRDLGANYFDKLNRERTMRNAIRKLESLGYKVTLEAPDAA

SEQ ID NO: 415893 - protein, 339 aa, unidentified
MDTVRFLAIDLAKNVFQVHGVDAAGRLVLRRRVGRAQLTELVLRLAPCTIGMEACSSAHHWARQFQQQGHTVKLISPQFVKPFVKGNKTDGNDAEAICEALQRPSMRFVPIKSVEQQDVQSLHRARSRLVSNRTGLVSQMRGILAERGIVFAQSITRARREIPAVLADTSNALTPLAREMLADLMDQLRELDKRITGFDRRIDAVFKASETCQRLAQIEGVGPKTATAIVAAVSDPKDFRNGRHFAAWLGLVPRQSSSGDRTHLLGISKRGDRHLRTLLIHGARAVLRTAPTKHDKKHAWALALQGRRGANRAIVAIANKMARVIWSMLATGQSYQKAV

SEQ ID NO: 415894 - protein, 429 aa, unidentified
MNRRIAQNLSQLSPNTLFVGIDVGKKAHQVSIMTEKANIVARLRIENSREGFERLIGQAGYFKENLGCQAMLFGSEPAGHYWRPLAYYLEANGFAFKLVNSFSVKRFREGMDIARIKNDRRDADAIADMLRSGRFIQTVLPYGVHAELRRSYRHYCRVRGDRTQKRNLLIAAVDSLFPEFRKAFKDILGKTATAVLRACPSPDVIRKLSIEEWESLVRSHYQGQIFRYKKKVRLVYQLAQESIGIPVEGQSLLREISLLLDSLASIESQIQLLETDILFHLYQVQGHELLLQIPGIGIITAAGILAEIGDMQRFRRIKGPVKLAGINPTEKQSGDFRGRSVMTKKGKALLRSALYSAAVGLISNNQAFREYYYSLRKREVRPLTRMKAIGAVMNKLTRVVYAILKKGEPFNAEMVYSTNQQKEVVLQTA

SEQ ID NO: 415895 - protein, 366 aa, unidentified
MKKNSTIAVGRKQILKQAQLTIGLDLGDRSSHYCMLDEAGNVILERSLPTTSNGMRQAFGRIPRCRIALETGTHSPWVSRQLAQMGHEVIVAHARNVRLIGESSRKDDQLDARTLARLARIDPGLLGPVRHRSAQAQIQLTVIRARAALVSTRTALVNAARGLTKSYGERLKKCGTEQMNRDSSEGLSQELRDALDPLLREIESLNERIAEYDRRIEQIAKEVHPEVARLKQVKGVGTLIALTYVLTLDDPHRFRRSRDAGCFLGLRPGRRNSGQSEPQLHISKEGDRYLRTLMVQGAHYLLGPFGQDSDLRRWGLKLAERGGKNAKKRAVVAVARKLAVLLHKLWVSGEVYEPLRNDHKVVSAVA

SEQ ID NO: 415896 - protein, 322 aa, unidentified
MQPFQLGIDVAKAKLDCALRLESGKFRHKVVDNTPAGFKALDTWLAKEGAAALQVCMEATGIYWEAVAEHLAARPETTVSVINPAQIKAFGASRMVRTKTDKVDAKLIAQFCAERTPEPWQAPTPAEKTLRALVLRLDALQTMRTQESNRLEVARESVAEGIAQHLKWLDDEIARISKAIRDHIDNDPTLRDKHRLLDSIPGLGERTTAVLLAFLAEPARFENARQAVAFAGLDPRQHESGSSVRGKPRLSKVGHGFLRKALYMPAMVALYRTDWGKVFRDRLAAKGKPPMLIIGAMMRKLVQVSYGVLKSGQTFQPGLHGA

SEQ ID NO: 415897 - protein, 337 aa, unidentified
MTKITLIGIDTAKQVFHLVGVDAKGHYGWRRKLRRTQLLSTLAKREPCDVVLEACAASHHWARCIGELGHHVRLIAPQHVTPFRRGQKNDYRDAEAIISATLSPGMRFVGIKRVEQQSEQALHRVRSRVMSNRTAAANSLRGLLGEYGQVYAKGIKALREGARCFAGTELARELGLVALIEDVLDEIHILEQRMDVYECQIKQHVKTDAISARLRNELHGVGPLGASALRVKVADVREFLNGRNFAAYVGIAPAHRGTGGKVRIGKLKKGHDRYLRQLLIHGARSVVRHLGDKQDAQSCWLREIAARRGPNIAAVALAHKNVRQAWAILAQEQALLH

SEQ ID NO: 415898 - protein, 343 aa, unidentified
MQTITTVGLDIAKSVFQVHGVDAAGQVVVRRQLKRRYVLSFFQKLPPCLVGIEACASAHHWARELQALGHTAKLMPPAYVKPYVKRHKNDAIDAEAICEAVTRANMRFVATKTPEQQSCLTLHRTRHLLMRQQTSVINAIRSHLAEFGIVAPVGRNGVEQLLGVVADPNDKRLPELARACVAALGAQLRVLKLQILEFDRMITAWHRSSEASKRLDQVPGVGPLLATALVASVAEPKAFRSGRDFSAWIGLVPKQNSSGGKERLGNISKRGDRYLRSLFTTGALAVIRYAKIHGTKHRPWLTALLARRPTKVAAIALANKLARMAWAMMARGERYKEPAALAA

SEQ ID NO: 415899 - protein, 341 aa, unidentified
MNDTIYDHYIAIDWADKNMAIARMTKKSNKISVIDVPSDLEELKFYLKQLKGSKVLTIEETTTSQWLYTELKSHVDKLIVCDPHRNKLLNDGPKNDKIDASKLVQLLKAELLKEVYHSNDEFIQLRRLVSGYDDLVKSGVRLKNQRSSLLRACGQKKSKQEIEKLGSRNEDYVLASLNRQISAYEEEKAGYEKEFKHLAQKHPAIRHQKSIPGIGPINAIKIVAQVVSPYRFVKTGHYWSYTGLIKHEKISGQKSYGKRTPRYCRRLKEVYKTSVKAAIGGNNPINDYYQHLLKEKGLPEYKARHKACRRLATLSLGVFKSGQQYQPYKRDTATKTKQSGL

SEQ ID NO: 415900 - protein, 414 aa, unidentified
MEVVFAHCAGLDVHKKTVVACVFPQGEIQRLIKTFPTTLAGLEALAAWLSGLGVTHVAMESTGVYWKPVFNVLVPFFEVWIVNPRELKQVPGRKTDVKDAEWIAQLMRHGLLKRSFIPDMEQRDLRDLTRYRTRLIAERSSASNRLQKILEDANIKLSSVATDIQGVSARAMLAAMIDGETDVSQLADLARGRMRSKIPDLEAALAGSIRQHHRFMWREVLYHLDELNARLATLDAQIRQLTAPYESLIARLDAIPGIDRRTAEVILAEIGPNVTPFPTAQHLASWACLCPGNNISGNKRRSGKTRHGQNWLRAALVEAAWAASRTKDTYLSSQFHRLRARRGDKRAAVAVAHSILIVVYHLLAKPEAVFTELGGDYFLKRNAEQEERRAVRKLTALGFTVTLTPAPAAAPVPS

SEQ ID NO: 415901 - protein, 394 aa, unidentified
MKLVGIDIGKNKHFFCIMDKDSGEVLLQPSSFSNTKDGFDSLIQKLSSYSKDSILIGMEDTGHYHFALLKYLLEKNFTVALINPKTTDYTRKIQNGITKNDKLDTLTICDVLDTPVRKKQYRITKVNSFDLYEQKQLTRHHHNLKEELNVYTNRLQKCIDIVFPEFNSLFSSKYGIIYMNVLKTFGSAENIASTDIRTIRKCFEIKGRGNRISLTAQQLKDSAKSSIGISSAAEVIKIKHLISQIELINEQLAETDKKIEEFSIQNNSPILSIPGISHFFGTSILAELGEISNYSKPSKIIKAAGVAPYHYESSQYNAQHTAITKKGSPYLRKTLYQIILPVINNNPVFKQYYDLKISQGKGHRCACGHCVRKLLRIIYHLSSTNQQFDDALLR

SEQ ID NO: 415902 - protein, 378 aa, unidentified
MYRIIKIGMDVHSKNYTLCAMEPVIGAEDRIFANIKVTADYKNILMFIENLKLKLGINDTYDIECGYEAGFLGYSLYNRLTEAGIKCVILAPTTMLTQQGQRIKTDTRDAKMIAQCLSYGGYHPVHIPTEEDDSVKEYLRMRGDHKLALKKIKQQINAFCLRHGYCYDKTKWTITHLTWLKQLDMSGLYRETLDEYLASYDEHTAKIERFDKRIEELSSQERYCEKVKKLGCFLGIRTHTALSLIVETGDFERFAKGNIYAAYLGLAPGERSSSDNINRLGITKAGNSHLRRLLIEAAGGICKGAVGHKSKDLRQRQKDNTAEVIAYADKANTRLRSRYYRFLRHGKRRNVAVAAIARELACFIWGMMTDHIGMKGER

SEQ ID NO: 415903 - protein, 366 aa, unidentified
MKKISIVATNRNEIFKEPKLTIGLDLGDRSSHYCILDEVGEVILEHGLPTTPKGIHQVFSRIPRSRIALETGTHSPWVSRQLTQLGHEVIVAHARNVRLIGESSRKDDQLDARTLARLARIDPELLGPVRHRSAKAQIHLTVIRARAALVSTRTALVNAARGLTKSYGERLRKCGTGQMNREIAKGLSQELREALEPLLEEIESLNERIADYDRRIEKVAKEVYPEVALLQQVQGVGTLIALTYVLTLDDPHRFRRSRDAGCFLGLRPGRRNSGMSEPQMDISKEGDRYLRTLMVQGAHYILGPFGQDSDLRRWGLKLAERGGKNAKKRAVVAVARKLAVLLHKLWVSGEVYEPLRNNQQVVSAVA

SEQ ID NO: 415904 - protein, 347 aa, unidentified
MRGAVHMQVTTIGLDIAKNVFQVHGIDATEKVVVRKQLRRGQLIKFFEALAPCLIGMEACATAHYWARELTKLGHQVRLMPAKDVKAYVKRNKNDAADAEAICEAVRRPTMRFVAVKSAEQQGRLMQHRVRDLLMRQRTQLINALRAHLAELGIAAAQGREGIKELLAIVAQDGDSRLPADAHASLIALAAQLQAVQTMIGSIEKRVVVQHRSNEESKRLESIPGIGVIGATAIAATVLDPKVFRSGRDFAAWIGLVPRQDSTGGKQKLGPISKQGDRYLRRILVVGACSVLRRARQQPEKYPWLIQLLARRPFKVVAVALANKMARIAWALLAKGGTYRLPQLAAA

SEQ ID NO: 415905 - protein, 308 aa, unidentified
MTTIYAGLDIAKLNLQLHLAGRFHDLPNTAPGHRRLLKLLAKPAGGHVVCEATGGYEREVVAALQEAKVPVSVLNPARVRHFAKATGQCAKTDHIDAAVLSAYGQALQPKPTAPRTEQEQQLTELIRRRGQIVDLLVSQRLQGEHLTVPALRRQAQSLVRRLEREVKQIEAQLQALRAQAAPLDARVQKLEAIVGVGTITALGVLAELPELGTLNRRQAAALAGVAPHPRESGQWHGRRSVGGGRAPVRRALYMAALVAAHANRQLKEFYQRLRAAGKPAKVALTAVMRKLIVLMNHILKNPNFELAN

SEQ ID NO: 415906 - protein, 414 aa, unidentified
MNDWKTFKHFAGFDWASRSHQVVIVDAHGCVVADFQFEHTAAGWELWREKIKPFAPLAVCIETSQGALVERLLQTEDCTVYPINPKAGKAYCTRKAPSGVKTDFRDAWAFADALRVDGHGWKQLQPADPMVTELRLLCRDEVALIAERTALVNQLRRALEEYYPTALEAFEDWTAPSAWSFVQRFPTPGALVKAGRRQWEKFLHTHRLYRPETAQKRLALFARALEFTAGESITQAKSRLAQTRVRQLLLLQHELDGYREKIEALFASHPDRTLFGSLPGAGPKLAPRLLAEIGANRSAFGDAQSLQSYAGTAPISFQSGQLHKARIRWHCNTLLRATVHLWADLSRHQCSWAQVYYKAARERGKTHACALRCLGQRWLKILWKMWQSRSSYNAELHAQNQLAHGSWLLQLKPS

SEQ ID NO: 415907 - protein, 385 aa, unidentified
MDQTSSSAISTNTLQCALELSRNSWLLAIQFPDREQPSLYPIEGGNTEKLMAKLAAARDCWAKVSGSPPAITVCYEVGYDAFWLARFLMGRSIECLVIDPGSLQVNRRGRRVKTDRVDVKMLLRTLIAWCRGERHVWSLVRIPSIDEEDLRRSHRERGRLVRERTAHINRIKGLLFGQGIRGINVKSQYKTLAVDNLVTGDGHRLPPRLACEIAREIQRLAMVQEQIAKIERERDTAPTRCEATERKRHLLLQLKSIGPAISALLSREVYYRQFANRRQVGSFLGLAPSPYNSGAEERCQGISRAGSGHVRAIMIETAWLWIRHQPKSALTRWFVERTAGQSTRVRKILIVAVARKLAIALWRYVEHGMVPQGAILNPPTTGNAR

SEQ ID NO: 415908 - protein, 388 aa, unidentified
MNVGADKSEPLTAIHTDLGAIFVSLELSRSSWLITSLSPGGGEKMSKHSVPGGDFAGLMERFARLQEKARLRTGQSFRIIVVQEAGLDGFWIHRALQNEGIESHVVDAASIATSRRRRRAKTDKIDGETLVRALLAYKRGEPRVCAMVKAPTPGEEDRRHLCRERKALTAERVRHVNRIKGLLFSQGISGYQPLRRDRRQRLEELQTGDGRAFPQHLKALVNRELDRLELLLKQIKTVEAARDALLAAEQTAKPAPAAMLLDIRGIGPEFAAILWSEGLFRHFENRRQIAAYAGLAPTPWQSGAVDREQGVSKAGNPRLRTTLIQLAWLWLRNQPRSALSVWFHERVSRNGGRLRKTTIVALARKLLVALWKYVTAGVVIEGVTMKVA

SEQ ID NO: 415909 - protein, 393 aa, unidentified
MNKTVHYLGLDVHKESIAVAIAPQNTTEVRSYGIIGGTLEAVDKLVKKLWSESIELRFVYEAGPCGYVIHRHLKSKGIPCDVVSPSLIPKKASDRVKTDRRDAEQLARLYRAGELTAIHVPDQEDEAMRDLIRARTTAMDDQRRARLRLKGFLLRLGFRYTGKSSWNDAHKRYLSGLLMPQPAQQIVFQEHIHAINDASARLERLTQAMQDALPDWKWEPVVRALMSLRGVQELTAMTLVAEAGDMSRFKEARQLMNFFGLTPSEHSSGGKRVQGGITKCGNTHCRRVLAEAAWHYRLKPLVSEAMQKRQENQSKEVRLIAWKAQQRLHKRFKRLATRKKSVVAASAVARELTGFVWAIACAVKRPEKAAAPEVIRTCRGRVYQLNPETKMQK

SEQ ID NO: 415910 - protein, 430 aa, unidentified
MAPLSNQQFKAFVGIDWADTKHDICLQQAGDDRREFDCIPHQVTRIDEWAKALHQRFGGPIAIALELARGPIVSVLQRHAFFTLFPINPAMLAKYREAFKPSRAKDDPTDAELALDLLLRHPERFSALRPQSAGMRSLLSLIEQRRELVGDKTRFTNRLTNALKQYYPQALEWFEDIDTVLFCDFLTRWPTLPAVRRASRKTLENFFHAHNCRRAQLIEGRLQLIRCAVSLTDDPGIVAPHRLHALMLVAQLRTALAAIDVFDKEIATVARTLPDFDLFDSLPGAGPHLTPRLLAAFGEQRDRFKGADELQKYSGIAPVTERSGKKCWVHWRWQCPTFLRQTFVEWAGQTINKSFWAGAYYRQQRAKGSSYQAAVRALAFKWIRILYRCWQTGTRYDESVYLNALRKQGNRIKRPAFQALEPDSVHRIRP

SEQ ID NO: 415911 - protein, 409 aa, unidentified
MIKRIMFVGMDVHQHSIDLTVAESGHDGAVTHFASIGGDLAALDRAVSTLRERRAELHFVYEAGPCGYGIYRHLRAAGLTCAVVAPAQVPKKAADRIKTDRRDSRTLALQHRAGTLRPIYVPDEDDEAMRDLVRAREDTVHGRRRARQRINSFLLRHGRPYPCGKKNWGARHRRWLAEQSFERVAQRITLEEYVGAADEAEARVTRLTEQIVSLLEPWRWRDVVAALQALRGVSLIVAVTVVAEVGDLTRFTPRALMAFLGLVPSEHSSGGRRRQGGITKTGNAHVRRVLAEAAHAYRATPALTQFVRQRHVHLPQAIREVGWKAQLRLCGRFRHLSAARKHPHKIRMAIARELTGFMLDIAHRVAAPASITAATIPPTDTIVLRRRPRPAAAPGSRRARAARPAVGAP

SEQ ID NO: 415912 - protein, 370 aa, unidentified
MKDGSKYVGLDVHKETIAVSIADADGGDVRYYGEIKNTPEALKKLCDKIKPKQGGLFFCYEAGPCGFGIHRQLIDLGWDCMVVATSLIPRKSGDRVKTDRRDSEMLARLLRAGELTGAWVPDDAQEAMRDLTRGREDMKRLQKQSKQYLLAFLLRHGRRYSGKSHWTKMHYAWLENQTFANASQQIVFQEYINTIKSLNLRVDAFDRQIEKVAVESVFKEVIEGLMSLRGINLLTAVTIVAELGDLRRFESAPQLMAYLGLVASEYSSGGSRNRGGITKTGNGHVRRVLVESAWTYRHPARKTRHLERRAKEASEAVQEISWKAQVRLCGKYKTLDSRGKLKVQTCTAVARELAGFIWAVGQEYPSPKAA

SEQ ID NO: 415913 - protein, 341 aa, unidentified
MKKFIRIGIDLGKRYFQVHCLESEGGLSISRKLKRSKMLEFFSQIERCRIGMEACGSAHHWARELVGIGYEVVLIPPAYIKPYVKRGKNDAVDAAAICEAMSRPDMRFVPIKNVDQQAVLMLHKTREMFVKQRTMSVNALRGHLAEFGIVVAKGIGRVDELLALAQSDGALPQVAKSAVAELAQHLEGLDQSIEAVDDEIARAHGQNPTSLLLDEVPGIGTLIASVIAASVPDPDVFKSGRDFAAWLGLTPRQNSSGGTEKLGAITKQGNRYIRKMLVTGSTSVLRVAGKRKGALADWINALRARKPERVVAVALANKLARICWAIMTTGESFRTDTYAKA

SEQ ID NO: 415914 - protein, 420 aa, unidentified
MEVAQDDQQIIARVAALDIGKAEVVCCVRVPGVGPRARRMQEVRTYSTMTRSLLAMADWLTGLGVTRVVMEATGDYWRPPFYLLENSFETWLVNAKDVKHLPGRPKTDRLDAVWLCKVAERQMLRPSFVPPPAFREFRDLTRYRVDLIEARTAEKQRVEKLLEDALIMMSVVVSDIFGVSGRDMMAALVAGERDPKVLADMARGSMRAKTGRLEEAFTGRFTDHHAFLLRTMLARIDSITADIDVVQTRIDEQIAPFAATVTRLDEIPGVGVTTAQAIIAEIGLDMTRFPTPAHLASWARFAPGVSESAGRKKGNSGTGKGNRYLARVLGEAAVGVRRTDTFLGERYRRIAHRRGKKRAIVAVGRSILMIVWHLLSDDDAKFVDLGSGYYESRVNLNRRTRNHVRELQALGYKVTLEPAA

SEQ ID NO: 415915 - protein, 417 aa, unidentified
MEQFAAFVAIDWSDTKHDICLVDVATGKKESLILKHTPEELDAWATALRIRFGGRPIAVCLEQSRGPLIYALLKYDFLVLYPIHPTTLAKYREAFSPSRAKDDPRDADYLLELLVQHRDRLKAWRLDNAKTRTLQSLVEYRRRLVNDRTRLSNRMTALLKAYFPQVLQWFDDIRPLLVCDLLLHWPTVEALKKVRPATLEKFFHEHNSVRRETISLRIAAIKAAVPLTTDQAVIHASVLMIKALATQMKTTIEAIRAFDHEIEQLCSTHEDYHLFASLPGAGPVYAARLTAAMGTVRDRWTTVDELLCFSGVAPVLERSGKSTSIRWRYFCPKFLRQSFHEYAGESVHHSFWAKAYYMSQRARGKSHQAAVRALAFKWIRIIYKCWQTRTPYSEVRYLESLRKKGSPLLSFAANNPS

SEQ ID NO: 415916 - protein, 386 aa, unidentified
MSRPSNILVRVINYDHTLALSVELSNKSWVLAAQVPGLPRTKAQRTIEPNKNALLAAIDGYRARAAAVGYTVDRVITTYEAGWSGFWLARWLMAQGVEVHVVQPSSVPVDRRLRRAKSDGIDAELLLRTLLAWLRGEPRVCSMAPIPDEADEDARRCVRERTELLSDRVGLTNRIGAVLATLGVNDYNPLLQSRRRRLAELRTGLDKPIPPKALAKIERLLARLELVLAQIAELERERDEVAAADAPDRAGKMIQQLASLRGIGVQSATVLVREAFVRHFPNGKALGSYAGLTSTPYSSGGIDREQGIGKAGNRRLRTVMVELAWLWRRYQPGAAQVAWFRDRVGSTGRRLRKVMVVALARKLLIALWRFVIDGVMPEGAVMKPSI

SEQ ID NO: 415917 - protein, 345 aa, unidentified
MTESKIVAFDLAKRIVQACVIDGTGAVIAEERMGPERVLSFTARHPHATVALEACGGAHHWGRALERQGHRVLLLPPQRVKSYGDPACKDDRRDARAIAEAASRSYLRPVPVKSEEQQALQSLDRVAALLARQRTQTVNALHGHLSEFGITLPKGPHLLKRRFTELEASPRWRELPEELGAAMGELFAAFLALEDRLSAIKARLAKGAKQSKLGRLLLEIPGIGPMTAVSLEAAIGDDPGRFASGRQFAAWLGLTPRVSASGERRQLARITKRGSARLRSLLVVCAQAMLRQYRQGRHGDPLACWARHLLARKRWNVAVVALANKLARIVWKVASSGAAYQARTA

SEQ ID NO: 415918 - protein, 366 aa, unidentified
MLYCSTGVRKIQPQDYDVFLGMDVDKRSIVCLQIDHLGIEHSVRIPYDAAKMLYYLGHRLKNQRVALVYEAGPTGFGLADTLLAAGYPCMVVNAAQVPTERGKRVRTNRLDARKLAYQLRGGNLHGILVPGEIYRHLREYVTLRKMHVTDSTKCKQRIKALFLRYGFPWPDPRESGTWSKALIRQLTDYECAPALHFKLQSLVASLAFSRSQALTAQQDMRRFVEATPELAESVRYAMSIPGIGWIVATYAIARLGDWRELRTSDQTASFMGLVQTEDSTGDTNSRGSITKAGDPVLRSLMIEASWTAIRKDHELAAFYERIKKTHAKDKASQIAIVAVARKVATRLHCVLKERRVYQVKIVSSVP

SEQ ID NO: 415919 - protein, 310 aa, unidentified
MDAVVVGIDVSKDRLDVHVLPIGAAFFVSNDTAGIEDLISRLAELAPALVALEATGGFETLAAVQLGAAGLPAAIVNPAQVRSFADGLGRRAKTDAIDAAVIARFAVATGIEAKPLPGEQTRFLADLVARRRQIMTMIVAEEARLKRALNRPLKKSIARLLAALRRELASIDADLDAQIRNSPAWRIKEDLLSSVPGVGKAISRTLIAELPELGSLDRRQIAALVGLAPFTRQSGKWRGNSFIAGGRASVRTALFMGALVASRHNPVLKAFRDKLVANGKPKMVAIIATARKLLVILNAIIRDQKPWQTA

SEQ ID NO: 415920 - protein, 399 aa, unidentified
MSMAELRVALDIGSKQHRVGIGTADGKLLEEFEISHDRKGFELFFSRIAVYEKRLGLPVVVAMEGVGGWARPLDRLILRHDYELLNVNNVKLARFKEIFAAPAKSDKIDTRKMLELMRMREVLPLAKAVVHRVEAIPAENEQLKRFTRRRRQLVEEKVRVVNRLQSDLHAVSPGLLEITVSADNLWFLNFLSCREDLTKLAGLKRASLLKIAGVGKAYAAKIEAWQKHATFAEETAWVGEMIIADTKRLLDLVKQIHALEDRIETISASSEIATRIRTIPGFGLISSATLAGEIGILDRFAFETSLALYTGMTRLDNSSGAYVGTKNTRQVNTQAWAALMTATARHIDNVPESRAYYDKKRAEGKTHNQAVRSLGRHLIRVIWSMITHQRNYLSKNPIT

SEQ ID NO: 415921 - protein, 374 aa, unidentified
MKKDIIFVGLDVHKNSIDVALADAGRDGDVRFYGSIGGDLESLHKVVRKLQSTGSTLRFVYEAGPCGYDIYRFLTKQGLDCIVVAPSKIPRKSGDRIKNDRRDALNLARLHRSGELTAVYVPFEEDEAMRDLTRGREDAVTALRIARQVLLAFLLRHGYRYSGVSYWSKAHWNWIADIKVPHRGQQIVLQEYVHAVQEQLERVQRLTMQIQELIPQWYLAPLVKALQSLRGVSLIVSATTVAEIGDLTRFDSAKHIMAYLGLVPSEHSSGGTTKRGSITKTGNGHVRRALIEAAHAYCHPARESRALLARLDGLSQEVRSIAWKAQLRLCGRFRKLTARGKNKNTVITAIARELAAFMWAIACTFLSIPDGEPL

SEQ ID NO: 415922 - protein, 430 aa, unidentified
MKSNTQNAKIEAITEKTLVLGIDVGSETHYARAFDYRGIEYSKKPFKFSNTEAGFVTFKEWILDLKERHEKDKVVPGMEPTGHYWFNLGKFLQDNEMKPVLVNPHHVKKSKELDDNNPTKNDRKDPKVIAGLVREGRYMIPYLPDGVYADLRTASNIRFQLQAELTRIQNRISRWFHIYFPEYKTVYGKPDAKSGILILKTAPLPEDILTLGVDGVNQIWRDAKLRAVGKARAKTLVEAAEHSVGNKEGAVSARMEIRMLLEDYESRNIRLQEVMALIEELVDQIPMAEKLLEIKGVGIRTVSGFLAEVGDISRFNNPKELQKLAGLALVENSSGKHKGETTISRRGRKRLRYLLFEVAMSLVAKNQEFRELHVYYTTRKLNPLKKMQSLMAVATKLLRVFYAMLTKGVDYDPKKMVSDIKRPAAYLQTE

SEQ ID NO: 415923 - protein, 327 aa, unidentified
MQLYCGIDLYAKNSYLAIIDERRQRIFKHNVANDRQLILSFLSPYKAELAGVVVESTFNWYWLVDALMEEGYTVHLANPCAIQQYKGLKYIDDKHDAFWLAELLSLGILKEGYIYPRQERPVRDLLRKRGHLMKLRTSLLTSLHNTMANACGRKIPSHHVLGKEDRLSSHLSGNESLALMGQVSKASIDALTLQIKTIEAHAEKQYTIEPAYVGLLSLPGVGEILGLTILLETGPISRFPAVGNYVSYCRKAESTWKSAEKVKGKGNIKNGNRYLSWAFAEAAEHARRFDTASRNFYNRKVHERNGAVAHSALANKLARAAYYIMRD

SEQ ID NO: 415924 - protein, 339 aa, unidentified
MTVKTVGLDLAKDVFQVHGISENGRVIFNRAIKRAKLLAVFETLPPCLVGMEACGSSHHWGRQLRKLGHEVKLMPAGYVKPYVKRGKSDAVDAEAICEAVRRPTMRFVEIKSEEQQAVLAIHRSRDLVVRQRTQVVNMIRSILREFGHILPIGIEAVAAFAKRHLDGDHPDMPEIANGLLGVQCYQFLGLNERIAGYSKMIEQHAMMSADARRLMRMPGIGPITASAIVATIGDAKQFRTGRDLAAWLGLTPLNKSSGGKERLGKITKQGDRYIRKLLVVGMTFRAVMAKRSPQKVDLWTVKIVADKPFRLATVAMANKAARAVWAMLTKKQEYRQPAF

SEQ ID NO: 415925 - protein, 398 aa, unidentified
MLSIGIDVSKGKSTVCGMKPRGEIVYTPFEVQHTREGMSELVSLLRGSGEEVRVVLESTGSYHCPVVAALLENGIFVSVVNSLRMKRFCSQSIRRVKTDQIDAMQIALYGLAYWPELQPTRLPENTYRELQLLARQYYQMTSILIKAKVDFNALCNQVLPGMQELMNDHAGRHKLSDFVLRYRHTAHILKMGETRFRKDYCKWAEKKGYRNHERMAALIFATAQNGIPVLPNAPSTQIVITEAIRVLHTVEASRDAILTQMQALAKTLPEYSLVREMPCIGDTLAPRLIAEIGDVRRFHSKRALIAYAGIDAPPYQSGKFSANNRHISKRGNRYLRKTGYEVMQSYVMHKPANDPIFTFIEKKRSEGKSGKLAMVAGLNKFLRVYYGKVTELYRSLPQ

SEQ ID NO: 415926 - protein, 350 aa, unidentified
MVMIGTDSHKRTHTVVAVDDVGRRLDVKTVRTNSEGHLALVRWSAQFDEVTFAVEDCRHLTRRLEADLLAAGCRVVRVPTKLMAGARRTAREPGKSDPIDAEAVAVAALRHPDLPRAELDGPAREVRLLSDHRHDLVVQRTRIASQIRWYLHELDPDLVVPSRGLRRHRVVAELTAELDRFNGVVARLARNLLARCDELNRQINALETELRRLVRAIAPTLLSIPGCGVLSAAVIIGETAGVHRFRDKDAFARFTGTAPVPVWSGASKGKVRLNRGGNRAMNCALHMIAITQARGVGPGRAYIDKQLARGKDTTAALRLLRRQLSDTVFTGLRADQHSTSPKPLKTDLAA

SEQ ID NO: 415927 - protein, 347 aa, unidentified
MRFYTQQHPFYCGIDLHARTMYVCILDQAGETLVHRNMTATPEALLKAIAPYREQIVLAAECMFTWYWLADLCAEHGIPFVLGHALSMKAIHGGKAKNDKIDAQKIALLLRGGMLPQAYVYPAEMRATRALLRRRMHLARKRGELLAHVQNTNSQYNLPAIGKKIAYKANRDGVAERFADPAVQKSIEVDLALIGFYDNLLRDVELTIVKTAKHHDANTLYLLQTVPGIGKILSLVLLYEIHDIARFPRVQDFASYCRLVKCARESAGKRSGTSGTKIGNAHLKWAFSEAAVLFLRDNPAAQKLLARFEKKHSKGKALTILAHKLARAVYYMLKRQTAFDVDTFLRG

SEQ ID NO: 415928 - protein, 410 aa, unidentified
MEAITECCCGLDVHQATVVACLLTGRADERPRKQVRTFRTVTQDLLALREWLQQEGCTHVAMESTGVYWKPVYAILEDTVELVVGNARHIKSVPGRKTDVKDSEWIADLMRHGLIAKSFVPPKPIRVLRDLVRYRRKLVESCSTERNRLLKLLETCNIKLASFASNVFGVSGMAMLRALVTNASTPTEMAQLARGRLRDKLPALALALDGQLDDAQRFLLQMQLDRLDQVGEHLAALDRRIDQHLAPLRAAHERLKTVPGIDRIVAVRVIAEIGVDMAVFQSAAGLASWAGVCPGNHESAGKRHKGTARPGNVHLTTALVEAAQAAIRKKNSYLREKFHRLRVRRGYKRALMAIAHKLLVAVYHMLRTGTDFTELGADYLDRTDARRTTRKLVQRLERLGYDVQLTRNAA

SEQ ID NO: 415929 - protein, 346 aa, unidentified
MIVIGCDFHPSWQQICWVDTTTGETEEKKLDHASGEAERFYRRLQGPVLIGMESTGNCQWFVELVTSLGHDLWTGDASKIRACDPRSQKHDRRDAALILKLLLEGRFPRIWTPSGQEKDLRQLLIHRYKLVRIRAQVKNELQHLAMNQGITRKRKLWSKAGEKVLRELPLKPWASRRREDLFRVREMLNGQIELLDQAVMEAAEKNERARLLMTQPGVGPITSMAFVLTMGDVSRFQRGKQVASYLGLIPREYSSGGHQRLGSISKQGNRFMRMLLVEAAQVAVRCDPQMRNEYLHRCHSKAKGVAKVAAARKLAIRLYWMLRTNTGYPEVARVENSSRVPLVSAS

SEQ ID NO: 415930 - protein, 375 aa, unidentified
MRDHSEVFVAFDTSKLRNAVAIAEAGRSGEVRFLGEIDNTPAATNKLVSKLAARYQRLWFCYEAGPTGYGLYRQIAGLGHACMVVAPSLIPKKAGDRVKTNRRDALGMVTQFRAGELTAVWVPDPRHEAMRDLTRARGAAVEDLRAKRQHVSSFLLRLGLHYPGDKTWTKTHMTWLVKQKLEHAEQRIAFEEMLLAVRQAQERIGRLEEAIRGAVPDWSLAAVVEALMAMRGIDLVSATAFLAEIGDLSRFRSPRELMAYLGLVPSEHSTGDKVKRGGITKAGNRRARRILVECSWAYRHPPRVGKKKQDKVAAAPQAVRDIAWKAQHRLYGRYRALIRKGKLKTVAVTAIARELCGFIWAVNREITTADAVARP

SEQ ID NO: 415931 - protein, 327 aa, unidentified
MPYDLHDCPRRAQARDPGLPDEAGNLVEKRFRTSPKSFRRALARYAPCPVILECVGFYRPVTTWLMELRMDVHVANVARIPKPKVKTDKKDARHLLKLWRGDTLPESYLPPDDVHQLRDLTRHRIYLANEVRRFKGKIKHDLYKHGHFVDTNPVNSQKGRTWIDSLAAPEIASSKRVWETLQREIDDLQSRLEAITTTNPHAQRLMTIPGIGAYTALVVLAEVGDFARFETGDQVASYAGLTPSIHQSGDNCRTGQITKQGNPTLRFILVEAAHSHVRHCPGSAISQRHRRLAEKKGAGRAAVATARQLLTVMKAMIDKNEDFQVNP

SEQ ID NO: 415932 - protein, 339 aa, unidentified
MSTTYCGLDVSDKTTHLCVVDADGKVIWRGVCATDPEALSTVLRKRCPDVARVVLETGALSAFLYHGLIERNVPAICVCARHAKGVLSTRVNKSDPHDAEGLAQLARTGWYKAVHIKDTATHMDRAQLAVRDQLIKAHGAMLGQLRGLLKLFGQRLGKVTTPSKRTERLEVLFAQKPELRAILTPLIEALTALEKQIRLVSRSLKLRAAVDPVCRRLTSTPGVGPITAFQFKSSIEDPTRFERGDSVGAYVGLAPRRSQSGERDVKGHISKAGDRRLRSALYEAANVLLTRVKRPCALQTWGKALAATKGAKRARVAVARKLAILLHKLWRTDSNFQWA

SEQ ID NO: 415933 - protein, 357 aa, unidentified
MTTQQKNQCMFVGIDVHKDTHTAVGISPYGEKLFEITVGNYKEDFESLTDKVEEMKGMLSPYIGIEDVRGYGERLAGYLYERYPVCHVPSVIVDRLRQNATHPEKSDSLDALGVAKAMVLNTGRLLPYTISEESQKAKQLKEISIDREDLVLERTRLKNQVHTLLYRIYNTEYADKYKDPFALKALRFWRNAKPSCDPFLLKTMKRKVRRLLDIHVEVADLEKDMDRLLTEGSYTIQTASGCGVVLASTIVGEIGDINRFTSPGALAKYAGCAPRERSSGKKIRHVKSRSGNRRLNCAFHRVALSQISRMGNDKARDYFKRKVSEGKSKSQALVCLRRQMVNIVWMMMKHKTIYRNA

SEQ ID NO: 415934 - protein, 441 aa, unidentified
MLRPNVAGIDVGSEQHWVCAPTKTGGGREVAVFAATTPGLERLAAWLKARGVTSVALESTGVYWIALHEVLERHGFEVVLVDTRELGRVPGRDKSDRRDCEWVQRLHSCGLLRGAFRPGEHVCMLRTLVREKGTLVAERSDWVRRMQKSLDQMNVRVHRAVADLDGTTGMAILRAIVGGERDPHQLATFRDPRCHKSEAEIAEQLTGHWREDHLFALRQGLKMHDAIAETIEAYEQEILRQLEAMTRADRRDDQAPPPTNPRKAKGIKTRGEDPLRHALYRMSGVDLTSIDALGVTTVSVVLSEYGADLTRFPTEHQFVSHVGLAPHKPISGGKVLKRKRKPRSASARVGAALRMAALTMRHSQTALGGYYRQIGRRAGADVAVFATARKLAQLIYRLLRWGQPYIDEGATAYEKRYREARVHRLAATAKDLGYTLVSAEA

SEQ ID NO: 415935 - protein, 393 aa, unidentified
MDEAGRVLARKRLPEGVAGMTRLHALIGQQLGDDGDDAEVAVGTETDRGPWVAALVAAGCTVYGVNPLQASRYRERHGVSGAKSDAGDAHMLADMVRTDSHQLRAVAGDSADAEAVKVVARAHKTLVWERTRQAQRVRHQLREYYAAALEAFDDLDAPDALELLGKAPDPARAARLTRAQVSAALKRARRRDIPGKATAILAALRSEQLAQPPAVTAAYAVTVLSLIALITVLNEQVKVLEEQVGAHFGRHPDAEIYLSQPGIGLVLGARVLGEFGDDPGRYASGKARKNYAATSPITRASGKKKVVAARFIRNDRLTDALMSQALSAISASPGARALYDAERDRGAGHNPALRKLANRLVGILHGCLKTRTLYDEATAWPRQENVLQSDLAA

SEQ ID NO: 415936 - protein, 373 aa, unidentified
MKKRSSSKQSPKRVAKANHKQEPITIGMDLGDKNSCYCLLGSDGQVLREGQVATTKKAMMQVFSSIVRARIAIEVGTHSPWVSRLLQGLGHEVIVANPRQVKLISDSSRKDDRLDAQTLARLARVDPQLLRPIRHRSEKAQADLMIIRVRAALVEARTGLVNTARGLAKSLGERLPICDADQMGVEQAKSLPAELRQALEPLLQEVESLTEKIKASDRKVEQIARKDYPETELLRQVSGVGPLIALTFVLTVEDKSRFQKSRDVGCYVGLRPRRSDSGESQPQLRITKEGDSYLRKMLVQGAHYIVSHRGPDTDLKRWGLHLAERGGKRAKKKAVVAVARKLGILLHRLWVTGEVYEPLRNQKIKQERKKIAA

SEQ ID NO: 415937 - protein, 385 aa, unidentified
MSIDHPAIGPVGENKITLFASLELSKSSWLLTTNSPGVEKMSKHAVTAGDGGALLDLLARLKAKGERRIGTVIRVVVIQEAGLDGFWVHRLLEAAGIESHVVDPASIAVDRRHRRAKTDSIDGETLLRTLMAWTRGERRVCSMVRPPSPEEEDLRRLTRERGILVKERTQHTNRIKGLLSGQGIYEYEPLAKNCLGRLDALKTGDGRRLPPRLKAEILRELDRIQVVTKQITVVERERDALVKTRTEATPENPAAMLASLKGIGAELSSLIWLEALFRHFTNRRQVASYAGLAPSPWQSGRTARDQGISKAGNRRLRHAMIELAWFWLRHQPGSALSRWYQARVGNGRGRIRRIAIVALARKLLVALWRYVTQGIVPQGAVFKTA

SEQ ID NO: 415938 - protein, 315 aa, unidentified
MEHQEQFVGVDVSQAQLDYAVRPSGEQGHVPNTEAGLAELVQQLKAVQPTLVVLEATGGLELAATAALASAGCPVAVVNPRQVRDFARATGELAKTDQLDARILAHFAEAIRPRVHTLPDEQTQHLKALLTRRRQLLEMLGAEQHRLSVTHREVQGRVQAHIHWLEQELDQLNHDLDDEIRHSPLWHEHDDLLRSVPGVGKVLAMTLLGYLPELGVLDHKAIAALVGVAPFNHDSGKAKGTRRVWGGREQVRYALYMGALSATRFNPVIRVFYQRLRQAGKPFKVAITACMHKLLIILNAMMKHQTRWSPTTVTP

SEQ ID NO: 415939 - protein, 341 aa, unidentified
MGELYVGLDLHSSNTYIGIMEDESKRRVYQNRHRNDLGEILQVLEPYHDEVKGIVVESTYNWYWVVDGLMDAGYDCVHLANPAAIKQYEGIKYTDDRHDAFWLAHMLILGILPEGYIYPKEDRPVRDLLRKRAFLMRHRTANILSCQSMIERNTGLRIAGAGIKKLCTDDLRKLFTDEHLLFTGKMSTNIVDFLGHHITGIEKAVRKVLKIRPGFENLLTVIGIGDILAMTIMLEVGNISRFPSVGNFSSYCRCVSSVHTSNGKKKGIGNKKNGNKYLAWAFMEASNFARMYSERANAYYQRKSRETNPIIARKALANKLSRACYYIMRDQVPFREEALFS

SEQ ID NO: 415940 - protein, 424 aa, unidentified
MNLTQNDRLKQVTSDTLIVGVDIGSQTHFCRAFDWRGFELSRRVFKFSNTGTGFLTFLRWTEELMNKTEMKKVIVGCEPTGCYWLTFQKFLQDHDIQLVTVNPFTVNRSMELDDNSPEKSDLKDPKTIALLVKDGRYSTSYLPSGVYAEIREASVCRDQIMKQHVRLSNQIQGWLQKFFPEYFECYADWDSTSGLMLLKEAPLPQDILRIGAGGINQIWRDAKVRAAGIKRAQTLVEAAQNSVGLEAGEAARLEIWVLVNDYILKAEQLKRLDEYLEEKVKEVPNVEKLLAIKGVGMSTVIGFIAEVGDIGRFTDPKQIQKLAGLEIVKKSSGKKKGQPRISKRGRRKLRRTMYESARALMTWNPAFQDVFLYYRNRQRNPLGGMQAKIVVACKAIRVFYVVLQTGCDFDEEKFRRDIIRPEAA

SEQ ID NO: 415941 - protein, 358 aa, unidentified
MVQRKELNFEGQNIYIGIDVHLKTWHVSILTESGCLKKHSQQSSAQALFEHLKKHYPNGNYLSAYEAGFSGFSTYYSLLDFGIECLPVHAADIPTGQYESVMKTDAIDSTKIARALKSGLLRGIYIPKKEVLDDRNVMRLRMTLKRQLSGYKSRVKHLLYNNGVIYPECFQNSKSHWSKRYLKWVHEDVQLLSESRNSLDLLLRQVELFRKSLLEITRLVRTLSRNGRYGEAYENIVSIPGIGMITGMCLLTEIGDIHRFRNERQFASYLGLVPTSHSSGEKTSHGEMTFRGNKRLGPLLVESALVAIRQDRALAAAYREYCKRMLPQEAIIRITRKLSNRILIILKSGKKYEHDRCY

SEQ ID NO: 415942 - protein, 402 aa, unidentified
MTYDYVIGMDACKYFHHACVLDIDGTQVLSKRINQNEQSLRALFSAFSAYDHKVLVVVDQPNNIGRLTVAVAQDIGIDVRYLPGLAMRQLSRIHAGNAKTDIRDAYIIAHAAKNLPESLRSVDRVEEAFLQLKVLNGIDEDLARSYTRLINQIRSALVGCYPQFEQALRGQIIHRKWVLHLLARYGGPTKIKRLGKAKAAAFARRYKARNPEPVLDAIFAAISEQTVTIAGAHYAEMGVAMSAKDALLKLEHRQQIEKEVIELINDIPHTQFLLSMPGIGPKTAAQILMTAGDMSDFPSAGHLASYAGLSPRTNQSGTSIMSNSLNRAGNKKLKNALWQSSFASIRFHERSRQFYERKRREGKRHNAAVVALARRRLNVLYAMMRNHEHYHDPAPSQEDLAA

SEQ ID NO: 415943 - protein, 313 aa, unidentified
MERIIGVDVSKDYLDADTLPSTQKRRFTNNAAGIAELVEWARPFQPERIVFESTGPYQKAAVGALLAASLPAVVVNARQVRDFAKALGILAKTDAIDAAVLARFGQVVPTIVRPLPAPEIQAFQELYDRRGQLVKMLATEKNHRHAASSAKVIRNIDAHLRYLEKQIQELEDRMDHFVENSEAFRARDEILQSIPGIGPHVSRTLLAYLPELGLGTRQQISALVGLAPFNDDSGTQSHTRHIRGGRGKVRLGLYQAAVTAIRHCPPMKEFYIRLKQRGKASKVALIAVARKILVLANALIRSMKPYDPANSVC

SEQ ID NO: 415944 - protein, 343 aa, unidentified
MEHYVGLDVSLKQTSICVVNQAGSVVREGVVDSEPEAIAAFVRSKAPGAVRVGLETGPTATWLWSELKQLGLPVICIDARHARAVLKMQINKSDRNDAAGIARIMQTGWFKEVRVKGLDSHSVRALLASRALLVKIKRDLENQIRGLLKNVGLVIGRAKFNVFAVRAEELIEDRPELIAVVGPLLKARQAIEQQTDDLDRKVLKLARHDAQVRRFMTVPGIGPITALCFKATVDDPTRFKRSRSVGAYVGLTTRRHASGEIDWTGRISKCGDAMLRSYLFEAAGVLLTRVPKWSALKAWGMRLAKRNGLRKATVAVARKLAVILHRMWIDRTEFNWSKKEVAA

SEQ ID NO: 415945 - protein, 427 aa, unidentified
MNFTQNEKLNQVSVNSIVIGVDIASELHYARAFDWRGVELGKVFKFENNVEGFTSFNGWINDLKEQAKKDAILIGAEPTGHYWFGLAAYLKEQSIKLVLVNPFHVKRSKELDDNHPGKTDSKDPKTIAKLVIEGRYNEPYIPEGVYAELRITTSCRLRIIKELNGVKNRIQRWIKIYFPEYTKVFGSFEAVSSMIVLETAPLPADIIALGAEGINKLWRDKKLRAVGIKRANCLYDAGKNTIGCTEGSASARLEIQLLLEDYRNKIKQYDSVMKAIEDLCMQIPEVEKLLKIKGVGIVIVAGFVSEIGDIRRFHSPKQIQKLAGLALKETSSGKCKGQTTISKRGRSRLRAVLFQAVMPLVAKNAEFAEIHRYYTTRIKNPLKKKQSLIALSCKLIRVFYAILSKGIAYDSTKLISDIHRPEEMIAA

SEQ ID NO: 415946 - protein, 355 aa, unidentified
MNEAKYIGLDVHQATISVAVRDSDGKLVMEAILETKAETILQFVRGLRGSLHVTFEEGTCAAWLYALLKPHVTQVLVCDPRKNALLKVGNKNDRIDSRKLAELLRANLLSSVFHEDTGLRAVKELARSYLTMTKDLTRVMVRLKALYRSWAIPCATKQVYAPRHRAEWLAKIREASVHRRAELYYQQLDALRSLQQQVKKELLIEGRKHSATKLLRQIPSIGPIRAVLLLALIQTPHRFRTKRQLWSYCGLALETRTSAEYRVVHGQLQRSKKPVAIRGLNKNHNHDLKNLFKGAALRAAAVEKPFQEFYAALIAKGIKPEMARLTLARKIAAITLIVWKKGVRFDAEQLKQQAA

SEQ ID NO: 415947 - protein, 442 aa, unidentified
MAVRKRELTVMFPNAAGIDVGSASHYVAVPPEREQPVREFQSFTADLAALADWLSECGIDTVVMESTGVYWIPLYELLEGRGFKVYLVNARHIKNVSGKKSDVLDCQWLQQLMSYGLLAGAFRPSGEVCALRAVVRQRDSLIEAQAQQTQRMQKALTQMNVQLANVISDIAGQSGQDIVRAIVAGERDPYRLARLRNYRIRASEETIAKSLMGNWREEHLFCLAQALKLFDTHQALIQEADAKIEGLLARMQRHGAQLAPNKNKGRTKNAPRFDARSALYAWAGVDLTRIGGIDVSTALKILAEVGADLSKFKSGKHFASWLGLCPGTRITGGKRISGTTKRIANRVSQALKLAAHGLHRSQCALGAYYRRMAARLGAGKAITATAHKLSRLVYAILTKGEEFVQRSQDHYEDQVRARTIRYLQKKATSLGYNLQPTVAVCA

SEQ ID NO: 415948 - protein, 297 aa, unidentified
MKRKRLSGNHLLDFVGADEKTPVWIGLDVHKKNYHVALRRADGVCESWVSPANPIALVRQFSKISERISLIVYEAGPTGYFLERVLKTNGYPKAVVAPSRIPRPVTNQAKTDKLDCLKLAEYAAKGMIEAIITPTEQESAERNVLRRRNQLVDSTRKTKQRIKSFLLFHGIDEGAVLRTWNRAAQERLSKLTLHSDLKFVLKSLLRQLSYEEVELAIITSRLTRITKRRHHLEVVKNLKTVPGVGDIVASAFRMELFRPERFKRAEEVCSLLGLAPAIRQSGKNGEADGSCAQAKRD

SEQ ID NO: 415949 - protein, 401 aa, unidentified
MSKKNTRNALDTSLSYAVIGLDLAKADCAVAAVPCSDDDLGLIDRMDYESLFEQAEKLEPTLFAMEPCCGYSQISLRLQNMGHEVKVISGHAVKNWIATHKSNQKTDLNDATALAKLALYDHDLQPIRVKNVEECRIASVQAIRIQLRTQATKSLVCFKSLCQCWGIVIRRGSSNTKKMAEAVAAVEKLLGAEVASSLMILRDAYKFTMKQINALDKLLDALVEANEQARTMKTVLGIGTQTAARLAVTTGDIKRFPMPRSYVAYFGLAPRNIITGHSGTPSPSKRGALKPVSSRGQGKVSRRGDRVARSFIIQGAATIYMLYCKDMLPECQLRRWLHEQIKRGKPYGKIIVSLAAKLLRIVWALLTYGEKFDSHKAGVPRSVLAAMEKPLKHDVAAESAA

SEQ ID NO: 415950 - protein, 421 aa, unidentified
MKSNAARKLRQVPEGYLVIGVDAHKKKHAAAVVTQDFTTHSKFKFDNSREGFEMVMERARMEMVRTGSRGVMFAIETGGHYWRNLAYFLDERGIPFRFINQFTLKRRREGKDLNRRKNDYRDSEVAAQLLCTGEFVETRLPQGVYAELRAAYNTYRRLVKERTRITNLVKGLLDGLFPEFTQIFKDPCGLTALSVLSTCPVPGIIARMEEEQFLNLIKLGHRGRLMRRKLVALHNAAVASIGVEAGAYSVSTELSFLVEKLLLIRRQIRSLEETLVGLVDETEEGRYLLSIRGLNYVSVAGLLAELGSFRCYRSAKQLIKMAGSNPTESESAGKRGIHTPMSKHGRPVLRYCAWTAVIPMLRFNPDFRAWAKRLRERPVHEHPLNGKEIVGAALNRLLRLAFTLVKKQAFYQTPQMAAIVS

SEQ ID NO: 415951 - protein, 409 aa, unidentified
MRYYLGVDWADQTHAVWVVEERGTKVTMHTVPHTAEGLSEWGRELDEWRAQGIELWAAIERPEGRVVDFLLDHGVVVYPVNPKALDRARDRFRQSEAKSDPFDARVLADFLRTDHLHLRALQPSSEAAQELKLLTDDYQRQIRQQTRLVNQLTTTLKAYYPRGLEVAELTTALAREFLQAYPTPAALTALTERQWQRWARAHRLSEARTRELWAGLQRPQLPVPAHVVRAKVRLMQSLVAQLTLVVEVVGAYREAIEDFFARIPAAQWIRTLPIGDHGITAPTLWARLGDAPGRWESFRHLQAQAGTVPVTIRSGKQQVVRFRFACDKSLRYVIDHVAFLSLRWSEWARAYYDEQRARGHSYRQALRALSAKWLKIIFVMWERHVPYDEQYHLASMTRQQLRLRQKKLA

SEQ ID NO: 415952 - protein, 364 aa, unidentified
MKKSIKGSEKKDRGPVYASTGLDIGDRKSCWVALDEAGKAVGREKVSTRAPELEAWGMSIAPTVIAIEAGPHSPWISRLLSRCGHEVIVANPAKVPSISRSRSKSDWRDAEQLARLARFDRTMLHEIRHRSEQAQKDLQVIRSRDAAVRARSKLISHVRCTVKAHGQLVERCSTDAFASRARATIQAELLEVVTPVLEAIDQLSRAIHVYDQRIEMLARTRYPDSSWLTQVRGVGALTALAYMLVLDDASRFRTSRMVGAYLGLTPARDQSGEVDPQKGISKEGDRLMRRLLVQSGHYILGPFGVDCDLRRHGEAIAKRGGKNAKKRAAVAVARKLAVLLHHLWITKNVYVPLFNALTTEHKAA

SEQ ID NO: 415953 - protein, 429 aa, unidentified
MATCHLSAQEPVVLVAIDVAKHQHQALIETPNGKRRTLAFANSRKGFAELADELKRQHLPVHAAFEATGDYHRALASFLYQCGFELHLVSSVATARTREALYNSWDKNDPKDAQVILHLLKTGATQVFHDPFVRGYNDLQELASTYYQAGRRKVAIYNALITHYLPIYFPEAEPYMCTSRSSWLIRLLLIAPCPSAVLAYSKGSFIKAASAIQHRKFDRTRWLSDFYESARTSIGVPILERSTSIAMFRFVLSEYLHACEIRERLQAQALERLGDNPDFQRLQTIPGIGPILALTIMAESGDLRRFGHYRQYLKYCGLDLCTDQSGRSRGSSRLSKRGNGRLRYAFWMAGVVAVRRRENSFRAKFERYVSADPRNADLKRKAYTAVTAKVARVAYGLLKAGVDYRRFHELAIPSGRTSLTRAFEAATTS

SEQ ID NO: 415954 - protein, 401 aa, unidentified
MKVSGLDVHKDTIFCAIYNGKQYGEVKEYGTFSSEIRTLGKDMLTAGVKRIAIESTGIYWIPVWNILEEMGMELILVNPYLIKQMPGRKSDVKDAQWIAKLLHKGMLRGSLVPDKTIRQLRTYSRRYVRTQGMITRVTQDIERTLELCNIRITSLVSNNNSVSIRKVVEKIICGEDTVEELACCIHSRIINSKGDKVRLALEGHIQEHHRISLSMAYDQLKLYTKQCAELEELMSQICEGHYHHEMELLMSIPGVAKHAAMQIIAETGGDMKAFENSGKLTGWTGLRPRNDESAGKYKSTATTHGNKYLRRILVQSAWAASRIKESYYKSKFEQLCVRKSRKKALIAIARKLLTVVWHVLEENKPFNPRFLPVYNPKKLEMKMKYHQREIEKLTQLGFNIT

SEQ ID NO: 415955 - protein, 399 aa, unidentified
MVSKVSKLILFAGTDIGKKENALTLMLVSDSSYTEKNRVLGEKSMAKAQKKGNKSAKAFMKDPSIVYRGMFKNQLSGFRKMTTEINRAVRNLGKDAEVEVHVAMEATGTYYLKLARYFHDLQQKQEEGSNRKYMVYVLNPKQVKHFAGFLSVDNQNDKVDSGIIARYIRSAIVARDVEAREWIPAKEGASQMRNLARTRESLIKMKTMEQNRIEALSQDPDHCRIAMKTHKDLVEYLEERIDELEYVIKDNAKQGIYSDMQEDIELLCSIPGISEVTAINILSEIVDIKRFEKAKNFVGFSGMHPFRKTSGTSVNHRGKLSKHGNNRVRHSLYMATMCAIRHNPVIKDYYQRLLNREGQDKKKKIVALVACMRKMLHIIYGVLKNKKAFDPEIAMVHCK

SEQ ID NO: 415956 - protein, 361 aa, unidentified
MPSMRWVGLDVHARETCAAVFDQESGEVRSQRIRGGSQEVLAHLAAIEGPWRAVYEAGPTGYGLARRAAGRGMQVAVCAPGLIPRRPSERIKTDPRDALRLARLLAAGELALVRVPEPAEEQLRDLVRAREDVRVDLMRARHRLSKFLLRREIAYPGPGRAWTRRHRDWLVGLRLGDPASEIAFADMLHAIDGLLARRDRLEVALAELVPASPWAAQVGRLRCLRGIDTLSAVGLCAEVGDFARFAHPRHLSSYLGLVPTEDSSGERRRLGSITKAGSRHARRLLVEAAWHYRRPPRTSAALAARQRGQDAAAVDLAWRAQRRLHGRWRRLETERGKRSTLTAVAVARELGTFCWELGRMG

SEQ ID NO: 415957 - protein, 338 aa, unidentified
MYYTGIDLHKFTSYLTTVDLSGTIIKQENMKNAAHNFIRYFNSLPGEHKTTVESTMTWYWLNDLLSSINIPLVLAHAKYVKAIAYAKVKTDKVDSHTLAQLLRMDYLPAAHKISAENRLLRDALRARLKIVQRHTSITNSMQLLLAKYNYDSPTQLTGIAKFQYEQLSEVEEILNEQMLELEKQLYPSLIANEDIQRLLWIPGIGKMNAFTILLEVDDINRFADVKNFYSYSRLTPSARNSGGKSKQRSSKDGNKYLKVVFCDAAIHAVQYYPVIRKYHSKLLRKKNKQIAKTIIAKELAEIVYHVLKNKTEFNNKFKGQELEHKKSLQWPRITSPYA

SEQ ID NO: 415958 - protein, 412 aa, unidentified
MKVVHETCCGIDVHAKMLVACLLMANGKKEIRSFSTMTDDLLRLRDWLLNGQCTHVAIESTGVYWKPVFNILEDALTVILINPEHARALRGRKTDIKDAEWLADLLRHGLLKPSFIPPPEIRELRELTRYRESLVREQTAVANRIQKVIESANIKLAQVASDALGVSGRAILWALARGETDPVKLASLARQKLKQKRSELERALQGRLTTNQRFVLRESLQHWEDLEAADRRVTKEIDRYLQDHPKLARARDNLDTIPGLGPRAAEIIVAEIGVEMEVNFASDAHLASWAGICPGNKASGGKRLSGRTRKGNSYLRAALVQAAWGATMKKNCYLSSQYFRLLKRLGRKKALVAVAHSLLVIIYHVLQSDQSYTELGGDYFDRHNVGQQRDYFIRRLQLLGLKVRVEELPAAA

SEQ ID NO: 415959 - protein, 350 aa, unidentified
MIIIGCDYHPSFQQIAFVDTETGEFQEQRLAHREEAEKFYRDLAARGVKARLGMEASGQARWFERLLAELNVELWLGDAAVIRAKRVRKKKTDREDAAHILKLLLKDDFPKIWVPSWDNRDVRQLLWHRHRMVQMRTRIMNQLQAVALNEGLRCKKKLWRAKGRRQLEAFALAPWASRRRRDLLELLDRLNPMIAELTQEIEQEVEKYPAAQRLMTHPGVGALTALAFVLIIGNAERFECGKQIAAYLGLVPEENSSGESRRLGHISKQGSGLMRFFLVEAAQVTARSDAEWRRKFSHLAIRRGRKIAKVAMARRLAVRMYWMWRRQWDYEQWKEFGPHAGKLGTGVGAQ

SEQ ID NO: 415960 - protein, 420 aa, unidentified
MTKQTNASFSAYIGIDWADTKHDVCIQAAGEEHRTFTCLPHKAEEIEAWALDLHKRFGGQMAVALELSKGPLVYALQKYDFLVIFPVHPSTLAKYREAFTPSRAKDDPTDAELALDLILRYPNRFKPLNPQSVEMRTLTSLVEQRRRLVNDRVRLTNRLRNALKQYYPQALQWFDRIDTPLFCDFIERWPTLAEAKRARRTTLESFFRTHNMRFTHVLETRLESIKTASPLTSDAAVITPHRLQSLALIDSLRVILISVKRFDQEIAELAPKHPDYTLFDALPGAGPSLAPRLLVAFGEQRERFNNAAELQRYVGIAPVTERSGKKNWVHWRWQCSTFLRQTFVEWAAQTINKSFWAGAYYRQQREKGCTYNAAVRALAFKWIRILYRCWDTRTPYNESVYLKALQRRGSPLLNQFSITK

SEQ ID NO: 415961 - protein, 428 aa, unidentified
MSQEDGTRLEEFRQFRKEVRGSSEYLLVGIDIAKDKHYAFFGTAQGKTLLRRLVFENNLEGFRKLLAQARGLRDQNGLRRMVFGMEPTGNYHKPLGEHLIECQHLVVLVSGVAACENRKTLDGRWDTNDARDAANVADLMSQGKCLFYEYPVGPLQELRNLLSLRRRFKRVEHGYQVRIRNHLLAKYFPELDRYYKGSSPTDLAIVRWCLDPSVIAGLEYKRFAEMVSSRRGRYSQEKRLQTIWKLAVESVGCEAGEAVEFEAKVMVEGLKQLRESMGQIEEKIQEICSQFSEYECLLSIPGFGPDVTSKVLGAVGNPFRFQNGRQVLKLAGFDLCAKRSGKSSENVVPVISRRGKADLRYGLYQAALIASIKNPGFIRYYTEKLRGREREPGIKFKMRVKLAAKLLLIAWTLMKKKESYNPDYLVTE

SEQ ID NO: 415962 - protein, 341 aa, unidentified
MRIVGGLDIHRRQITFDYLDERSGQSRRGRIAPADRMLLRRWLEANASGVSAAFAVEACTGWRFVVEELHRAGVEAHLAEPADTAAARGPKRRAKTDRTDARHLRELLAAGRLPESWIPPEQVLEMRARLQLFKDLREEHTAWVQRVHAILLHQGAPAIAGDLLGADNRRRLAAGEQLSPVGREAVATALRILDALDAELGPLRRQIAAFARRQPGCKALQAQYGVGEITAVALWAELGDTRRFSSSRKAVRHTGLDITVYSSDGKRPPGKLSRQGSPLLRWALFEAAKCAARPGAPDHAYYRSVADRLGGNRAALSVARKIARRAHHTLRTLGDEAFAPV

SEQ ID NO: 415963 - protein, 367 aa, unidentified
MKKVSTTAGRQAKNFSEQKLTIGLDLGDRSSWYCVLDEAGVILLEQRLGTTPKAMREVFGGMPRSRIALETGMHSPWVSRVLNELGHEVIVAHARNVGLIGESRKKDDRRDARTLARLARIDPQLLCPVKHRSARAQADLTVIRGRAGLVRARTALVNTARGLAKSYGERLRGCNVRNMNREKAAGLSPELQRALEPLLAGIESLSEQIRECNERIESLVQESYPQVALLKQVKGVGTLIALTYLLTLEDPHRFRKSRDVGCYLGLQPGRRNSGQREPQMHISKEGDPYLRTLLVQGAHHILGPFGADCDLRRWGLKLAERGGKNGKKRAIIATARKLAVLLHRLWVSGEVYEPLRNSHPAAMPAAA

SEQ ID NO: 415964 - protein, 356 aa, unidentified
MQQQDNKLDFTNQKIFIGLDVHKNKWVVTIRMNHIELKTFSMEASAGQLIKYLHKHYPQAKCSVAYEAGFSGYWIQRHLSSNGIAAIIVNPADIPTTGKEKDRKDDHKDSRKLARELENNTLKGIYIPDEAIEELRSLNRIRTQYVGEKARMKNRIKSFLFNYGKEFPGRNSRYWSEALLEKIKDIKFYTPIAEESIKNYVEHLSTLQEKVKKLEARLKVISKEFGFDQIIGKLETIPGIGFISAITIFTEIMDIKRFRRLDELCSYVGIVPSTHSSGEKEKIGRLTFRQKRYLKNIIIEAAWIAARKDPALTMSYSRLIKRMEPQKAIIKIAKKLLNRIRYVWKNNIEYQLAVVE

SEQ ID NO: 415965 - protein, 371 aa, unidentified
MGAYYVGLDVHSRETVFVIQDPTGAVIGRGALPTTPEAFARMCHQYQLPAGTRVALETGTSAFYVARALSALDLKPIVIDAHEVRLKAHRPGQKSDRRDAFELCDGLRRDLYRSIVHIPSPAISTLRTALSRRRHFIRIQTAEVNATKRLLRGAGWLGGKRGSLRTASGWERLIDALASEPTLQTHTRFHYAVWQQAGEQARAIDHLLGDLGRGFRDDVRRLETVPGVGPIVALTAVAVFADVERFGSAKHVASYAGLVPSTYQSADRDCHGHITKRGSAELRTMLCEAAHHARRPSHPLHPYFLKLCARRGYKSAVVAVAHRLCRVLYALLRDGTDFQPSRLGIEEGPFTQTVTRRFRLTPKSAGRLALV

SEQ ID NO: 415966 - protein, 412 aa, unidentified
MNQDKLYVGIDVSSKNNVCYLMYSDGSKHSSFSVPNNRNGAKIIVDRVTSVLLLQDIPQVVIGMEATSVYGDNLMRFLRESGSLGQFERSLHMLNPKQVKKFRDAYSDLPKNDHVDSYVIADHLRFGRINKEVYMDDYKYQALKMYTRARHQLVQELTREKQRFLNTVFISFSGLTQEKIFSNKFGATSMALIEEFSSLDELAYMSTDELVDYIRKKGKNHFENPEEIAEAVQRAAKNSYRPPQVIADAAKQMLAISMNTIRLLQKQIKEYDKAIEKMLEAFPQTLTSVKGIGNIYAAGIIAEIGDINRFPSQASLAKYAGLVWTQHQSSDFEAEDKRMIQGGNHHLKYYLCEAANALRRCDPEFKRFYALKYKEANKHNHKRALALTARKLVRLVYTLLKTNRLYIPPEEY

SEQ ID NO: 415967 - protein, 391 aa, unidentified
MRISVGIDIAKEVHWVTAVDHDGVVLIDRKLANTPAAIASLIDELKGLEGRVRIGLDVVGGVAGLAAAMLAEAGFALAHVPGLAVNRARQGTVGGEHKSDPRDARVIAEQVRTRQDLRPIEPASELDLELRLLVGRRRDLVAAQTQRLSRLHDLLVGIFPGLERALDLTTKGPLVLLTRFVTPAELRAAGKKRLIRHLKAAGGLPKVEALVERALAAAEQTIAVPAERMSARLIKELATEALATRTRLAGLDRELQDLLDRHPDAALIRSLPGMGAVLAAELIAEAGSLARFRSADALAAAAGIAPVLRQSGKVRFLRRPTGGNKGLKRVFYQSAFCSLGHPDSRAFYMRKRREGKRHHQAVLALARRRINVLWAMLNTRQPFQQTFKLAA

SEQ ID NO: 415968 - protein, 433 aa, unidentified
MKVMYERVAGIDVHKDMIKVAIRSPGDKPWTRKTEILEYRTFYGVLQEMARELRRRGVTHVVMEASGVYTEPVYYALCEQDFTEVAVINPVHAKALKGHKTDAKDCARLAELFECGLLRGSYIPSAEQKEVRDLTRYRIKTMQARTSEIQRLGKALESAGIKLASVASEITGKASTAMIEALIDGERRGGVLADLAIGRMRSAGKLADLSMALTGRFTGHHATLCRLHLDRIAVFDDAVDGLDDRIAAGAARWQREAGLLTSVPGFGDVVTCAWLAEIGPAPHKWFSRHEKLASWVTLCPGNNISARKRKHDRTGDAGTYIKPMLIQAAWSAIRVRGRLQARYNRLVRRFGGEKNPGAKKKAITAIAHTLLKIAYQVLKSGTPYQDLGADFYTRRNSPEEQQKYLERQLQRLHPGCTITITISPPEAALPPGE

SEQ ID NO: 415969 - protein, 388 aa, unidentified
MVEAIQQGIIPRQFEIFAGLDVDKSRIAVTFTDHESLLKSLQMPYSSDHLLNYLGKHFGGRKIALAYEVGPTGFGLYDDLTAAGHRCLVVAPSMVPTAPGKRVKTNRLDSRKLSEGLRGAQLKSIHVPSGVYRQLRHLVQLRDSHVRQMTAAKLRIKALLLYEGIPFPEAPKSRSGQWSARVLREVGTLPCNSSVRFKLDSLIASLQFHQLQAAAAQKQMRRFCQQDPELKQSIGWLLTVPGLGWITASHLVARLGDWRLLRNVRQIAAFLGLVCSEHSTGDDIQRGAITRSGDSRLRNKLVQAAWTAIRQDPELREFYRRIYQRHPRQVAARKAIVAVARKLTTRIYSVLKQQRPFQLRPPMPSAPVTPEETVGPRGRLDSAQNEQE

SEQ ID NO: 415970 - protein, 449 aa, unidentified
MRKPVEIDSDDDGPVIARAAAIDVAKATGMICTRVPHASKPDRKVTKVWEVDATTAAIIELAGHLTALGIERVVLEATGDYWRCWHYLLSSAGLECWLVNARDVKNVPGRPKSDKLDAVWLCKLNEKNMVRRSFVPAEPMRQVRDWTRDRFDLVADRTRVRQRVEKLLEDALLKMSVVITDIFGVSGRAIMAALIDGQRDPAELAALAVPRIIKNKRGALEQALTGRFTGHHAARLEMLLAQHDQLTTLIDQVTTRIDQAITALPPAPPADPASGPGTPAAGDAYLSAVERLCEIPGIGPEIARSIIGEIGLDVTGVFGTATRLCSWAKVAPRTVQSGASKRSGKTGKGNFYLKSGLGQAATGAAKTDTFLGERYRRLVKRMPKAKAKTAIARSILVIVFELLADPAKRYKDLGSGHYAKRMDTGRRTARLTGELRALGWEVTLAPLTA

SEQ ID NO: 415971 - protein, 445 aa, unidentified
MVDLVVRRCAGLDVHKDQVTTCVLVLDEHGELRQEVRTHETNTRGLSALRDWLQTEGVTHAAMESTGVYWKPVFNILEGHVPTLLLVNAQHIKNVPGRKTDVKDCEWIGQLLQHGLLRGSFIPPENVREWRDLTRTRTRLEQEKARHANRLQKTLEDANIKLGSVASDVLGVSGREMIRALIAGETNAAVLADLAKGRLRERLPELRSALQGRVTHHHRFMLEFLLDEVEQTERSIAKLDERLGSLMAPFAPDLDRLQTIPGVGLRTAQVLLAEIGPDMKQFPTAQHLASWAGLCPGNNMSAGKRKGRATKKGSRWLRGALNEAAHGASRCKRSYLRAQYQRIKGRRGPLRATMAVAHSIIVSVHHLLLNQVDYVDLGVDYFDRRRKDRLVQHHVRRLFQLGVRPEELAALSSGIPLQRSRTQDDPAAPPAAAPRTARARQTSLF

SEQ ID NO: 415972 - protein, 370 aa, unidentified
MKKTDKYVGLDVHQDTTVIAVADGGRIGEVRIYGTIPSDLQALAKVLGKLGGEGVRLHVVYEAGPTGFVVYRRLKQMEIDCIVVAPSKTPQPKGVKQKTDRRDALQLARLHRAGELTGINVPDEVDESIRDLTRARADAVHDLTRAKQRLKALLLRQGYRYPGKANWSEAHQRYLRKLTLPLPALRSVLEEQILAVDQATERVKRLDDLIEAQVPQWRHYPAVQAVMCLRGFRLNAATVIVSELGDVRRFAHPKNVMAFLGLVPKEATTANTRRLGSITKAGNAQARWCLIEAIQKALTPPKVSSHLSLRQEGQPAAYKELAWKIQVRLHKRGWHLLQRGVMKAKVNVALARELAGFIWDLLRQVPAPEA

SEQ ID NO: 415973 - protein, 350 aa, unidentified
MGMVCGLDLHRGQITFDALEVETGEVWRGRIWQPDRSRFRRWLTDELGPRAHGEQVDIAVEGCTGWRDVVEEVQAAGFIAHLAEPAETQAKRGPKKRAKSDRSDARLERELLQKGELPESWIPPQDVLEWRERVQLYKSLVDQHTQWIQRIHAELFHHGMAMPEGAIGAEHTRAWLADQGGQLSPAARQRIAVGYQMLDATDAASLPLKRQLQCFARRQPACRALVEAHYGIGPLTAVAVWSELGDCRRFSRSMQAVRHTGLDVTVDSSDRHRPGGKLSRQGPGTLRWALFEAGKCAARATSPDHQYYQAVRRAHDGKLAALSVARKLARRCYHTLRAMDPELIYTVPTV

SEQ ID NO: 415974 - protein, 339 aa, unidentified
MASEYVGIDLHRRRSVIVRLTPDGEVLEQVRIDNDPVALALEIAKAGPNPDAVLEATYGWYWAVDVLEASGAHVRLAHPLAIKAYAHRRVKNDSIDARTLADLARMNRVPEAWIAPPEIRELRELVRYRAKLVALRSGLKAQVHSVLAKHGVRVPMTDLFGLAGNRLLDELSFPAPYAMRISSLRELIGIYDSQVARFDAEIRTLLAEHPGYRAIQAVPGVGPILGAVFVAEIGDVTRFSSAPQVCSWAGLTPRHRESDTVVHRGAITKQGPRLVRWAAVEAVQKLRTSTKQHRDFRRIARRRGKNIARVAVARKLLTLVYYGLRDEEVRCLPRPKEAA

SEQ ID NO: 415975 - protein, 334 aa, unidentified
MTFELLAIDLGKSSFHLHSIASDGAILSRKVSRSKLAETVNALAPKTIAMEACASAHHWGRQFKDNGREVLLINPRFVKPFVRGSKNDAVDAAAIYEAATRPTMRFVPVKSTTQQDLQSLHRVRERMIIQRTSLINHARGLLAEYGIVLPQGPWRFVSQAPAAVESADLSDLGRELFLELLDQLTDVNDRIAKIDRKISEICREREDCRRLSELPGVGPIIATALVASVEDGRHFKSGRELAAWIGLVPRQYSTGGKPRLGGIGRRANHYLRRQMIHGARAVISRLASHDDRRSQWLKELVSRRGYNKAIVALANKTARIAWALLTRQERYAAQ

SEQ ID NO: 415976 - protein, 375 aa, unidentified
MSKIRFIGLDVHAGTIAIAVAEPSGEVRSLGVIPNRLESIRKAVAKLGPVKQLKACYEAGPTGYVLYWQLTQLGVSCEVIAPSLVPAKAGDRVKTDRRDAEKLARCYRNGDLTAVWVPDAAHEALRDLVRAREDAKQDQQRARQRLGKFLLRHGAQAPDEVKKKWTAKYMTWLNTHVQFEQPALQATRLDYVHEVHHAGERIARLEKAIDEAVAIAPEQMRSVIAALQALRGVAQMTAVTIVAETGSLSRFQNPRQLMSYSGLVSSEYSSGNRIQRGGITKTGNAHLRRVMVEAAWAYQHKPWVGGFLLKRQQGLEQEIKDIAWKAQWRLCTRYKKLAAAGKNKPQIVTAIARELLGFAWAIAVKTEPQPQRQAA

SEQ ID NO: 415977 - protein, 345 aa, unidentified
MNSIRAGVDIAKSVFHVHGVDRHGQTQWQGKYSRSKWLDALSRKVPAGAEIGMEACASSHHWARELQKRGYHVRLIAAQFVKPYVKSNKNDRVDAEAICEAMSRPNMRFVAPKTVAQQDIQAAHRIREELVGQRTAKANQIRGLVGEYGIVAPVGIQQLRRALPGWLEDAENELTDSFRILLNGLAEDLRHLDDRITALDDRITESVRQDPVAKRLMTLRGVGPLTASALAGALGDGKAFRKGRDFAASLGLTPRQHSTGGRDRLLGISKRGDSYLRKLLVHGARAVLRHVESKDDGLSHWLKALAARKHVNVATVALANKTARIAWALVHNEEAYNEGLSAAGV

SEQ ID NO: 415978 - protein, 312 aa, unidentified
MADIVRLAGIDVSKEKLDVHVTPSGESRTVSYDRRGLAGLRRWLVGLGVALVALEASGGYEREVSEVLEEAGLVVHRLNPLRVRRFAQLKGRLAKTDSLDARTIAEFARAHPQEHQLRRDPRRERLAEHLLVRRHTQDAILDCINQLEHLRDSRLRRLVIARKASMERTLAKLDRCLVELITEHDDLAELSERLRSVPAVGPVLAATLIALLPELGSLTRRQVAALVGVAPFDRSSGRKIGAKSIQAGRVFVRNTLYMAALAACQHNPIIAAFAQRLAAKPGKVRLVACMRKLIVMLNAVVRDRSQWQPRTT

SEQ ID NO: 415979 - protein, 352 aa, unidentified
MIIIGVDFHPGFQQIASVDADTGEFQEKRLGHREEAETFYRALASQKVRVGMEASGHARWFERLLAELQIELWIGDAAEIRTRRVRKQKTDRQDAQLILKLMLKDDFPQIWVPSWENRDLRQLLWHRHRMVQARTRIMNQLQAVALNEGLRCKKRLWREHGRQQLEAFRLAPWASRRRRDLLELMDRLNPTIAELSQAIEQEVEKCPEARRLMTHPGVGALTALAFVLILGKAERFGSGKRVASYLGLVPLEDSSGNRRRLGHITKQGSSMMRFLLVEAAQVTVRSVPEWRSKYLHLMMRRGRKTAKVAMARKLAVRLYWMMRKGWDYAQWKKFGSHAGQPGNRDGVQSNTE

SEQ ID NO: 415980 - protein, 396 aa, unidentified
MYYVGIDISKNTFDYFIRTDDVDRIDSGKLKQNKEGYSFLLSSLKDIDPKDILIGFESTSTYHINLFNFLVSNGLFPSIINSYAVHNFAKHFNLRGAKTDKIDAKIIARFLLTFSPTPSKGNLDEIKLISREMVKVTKHITKLKNELKRLINLVFPELDSTNSDVRFDSRYKGWWIILKHYPSAKKISKASVEDLYNILPNRSKRSFTVEKLEKLILMAKDSVGSNKPSLEKLLVMYVNRLITSMGEKEELEQVVLDLMDEDNLTNIELLKTIPGIDSLSISIVSEIIDISRFHSAKSLVAFAGIDPVPKQSGDKDGYRRISKRGSKYLRRAIGMAANSARMNNDYFKYFYNKLVNSGKPHWVALMALANKLLRIIYSLLKNKTEYDPLYHYKLMS

SEQ ID NO: 415981 - protein, 391 aa, unidentified
MICVGIDVAKDKHDCCILDSEGTTLADCFTIPNNLDGFKRLLQTIKDCTQKSDKIKVGLEATGHYSCNILGFLLDNDLPVYVMNPLHTNLYRKSLSLRKTKTDRVDAKTIATMLLSDVDLKSYTDTAYHNEELKSLTRYRFDKVQERAKLKQSVSRLVTILFPELEQLVSSIHGTSIYALLSEYPGAKQISEAHLTRLANILVTTSRGHYRKDRATHIRDAARTSIGSVMPAKSLELKHTIKLIQELTSEINEIEDAIRKIMDELKPPILSIPGMGFYSAAMILAEVGDFSNFNSPDKVLAYAGCSPSTYQSGKLTNCYAHMEKRGSRYLRYALYTATKYVCYWNPVFTEYLTKKQAEGKHYNVALSHATKKLVRLIYALQKSGKAYLAIT

SEQ ID NO: 415982 - protein, 449 aa, unidentified
MNKKMELDIINLHCAGIDVGSRSHFVAIGQDLSDVKEFGVYAEDLQDICNWLLENGINSVAMESTGSYWQNLYAELAKNGFEIILANGKFTKNAKGKKTDVKDARWIQKLHALGLLSSSFLPDETTEILRTYCRQRTNWLQLAAETSNKMQKYLKLLNMRLDVVVKDVCGLTGLKIIEDICKGNLDPNSLAKHRHYNCRKSEEEIAKALKGNNRQDFLFGLKQEFESYQFYQNKIADCDKQIDRFLKKQISLDPIKKKLKTKAKPYKRINKNAPKIELNQMAFQYFGGIDLMEIEGLSHATILTIISEIGPEGFTKFPTAKHFTSWMRLAPNNKISGGKVLSHRTPKGSNRIKTALRQAANAIGNLKDTHLSNFFKKIAFKKGRQVAVSATARKLAVIIWNMVTKKQAYKQPTEYLFLDQKRKMGLVKRIKKQIDKFDIKPEDLDFSTS

SEQ ID NO: 415983 - protein, 416 aa, unidentified
MSNPLLVGVDVHRKRNAVCVMDDQGQELIPRFTMDNNRPGTEAFVHQMAQLMLDGDFDVIQVAAEATGWYWFHFFQTLSQDPFLNQWPLELYPLNPRLTANFKKTYMDLDHTDPIDAFVVADRLRLGRDLPAPFRYEETYLPLRFLTRYRYHVVHNLAREKAYCLAVLYLKASEYTHPDKKKRPFSNVFGAASRAVLQEFGSIEEIATIPFDELVEFIDLKGKRRFPNPTENARKLQQVARTSYTLPEALQQPINLVLDLSLKHIAFLERQEKRLNTAIAECMEAIPHTLDTIPGFGPVFSGGIISEIAGIERFDYNQSKVAKFAGLKWRKHRSADFEADETRLTRTGNRYLRYYLCEAAQSVRLRDAEYAAYYERKYHEARKHQHKRAIVLTARKLVRLVTRLLTTNQPYQPRRR

SEQ ID NO: 415984 - protein, 374 aa, unidentified
MKYYSTLYVGMDVHRDSFTLAHYALDMKQPTGIVKTDNDYRRIVAYVHRLREKYGQETRIVCGYEAGCLGYTLYHQLTKMNLKCVILAPTTLPSPRGGKRVKTDGRDAANIAQCLAYGTYSPVHVPSAEDEQVKEFIRMRNDHCQMLKKLKQQILSFCLRHGYLYSGTRSNWTQAHMKWLDALQPEGLLGDTLEEYLTSFRYHQNKLERLDRRIEEISREERYREPVGRLCCLLGVKPLTALSVVSEVSDMHRFSTAEKFASYLGLVPCEHSSGNSVRRGGITKAGNVHVRALLTEAAQSYTRGKVGYKSSALKKRQSGQSETVIAYADRANERLRRRYYQMTLQNGKRGNVAKTAIARELACFIWGLLTDHVA

SEQ ID NO: 415985 - protein, 350 aa, unidentified
MNPVVGLDVAKGESQIQAFLDRKTPFKRSFKIFHTVEGFKQLHQFLQSIEEKANTKPVLIMESTGHYHSPVMQFLDSLNYIYIVINPLISYRAKSSSLRKVKTDIIDANHLCELYYKEELEPYKKRGAQLLNLRNLTSQHDHLTGISSQAKLHFLAILDQVFPEYRGVFGDLYSNVSLLTLLEFPSSEAVLQAGEDQLAKRIASLCTSRSKQWAKERSKLLITAAEKNPFQVNLYKSLIITLEMHIKMVLQYKEHLSNLKAEIDVLVKEIEEYTIIQSIPGIGKKIAATIISEIGEIDRFDNPKKLVAFTGVDPSVFESGKFTASRNRITKRGSSRLRHALFMAVRCAIG

SEQ ID NO: 415986 - protein, 343 aa, unidentified
MQVVRIGLDLAKYVFEVHGVDERGNVVIRKTLRRGSVATFFANLPRCLVGMEASNGAHYWARVLAELGHKVRLISPQFVAPYVKSNKNDRNDAEAICEAVGRPTMRFVPPKSPEQLAIQALHRIRQRLVQSRTRLVNQIRGILSEHGIVIARDIWRLRRALAEIAGNATDDLNALVRALTMEAQAELIELDRRIASYDRRIRELYRTSELCQKLGEIEGIGPVTATALVAAVGDRSCFKNGRQFAAWLGLVPKQRSSGGRNRLFGISKRGDRYLRTLMIHGARAALGKAGGKQDPRSRWLVGLRQRRHPNVAAVALANKNARIAWAMLAGNVSYEPARSVQAA

SEQ ID NO: 415987 - protein, 422 aa, unidentified
MTDDRRCIGLDVHREFAQVAIWQGGTVAQAGTFATTPEGVREFAAGLGPADEVALEATGNTWAIAGVLASRAGRVVVSNPAKTRAIAEAKVKTDKVDAAILAQLLAADFLPPVWMPDAATSALRRQVLRRAHIVRQRTRLKNQVHAILHRNLVPRCPAADLFGIKGRKWLSAQDLPADELAAAAALLRQLDFHAQELALIDRDLGQAALARPEVLRLMTIPGVDATVALSIVAAVGDFTRFRTPERLVSYFGLNPRVRQSGGQPASHGRITKAGRAHARGMLVEAAWSASKAPGPLRAFYQRVRARRGMQVAAVATARKLAVLCWHLTIRQEDYAFALPSLIAHKQRKLELRAGAPPARGRKGRAARYSLTAVRAAERDLAAQSEAAYRTMVAAWQPTRPASAKKATGAAASKGTRLIKPTG

SEQ ID NO: 415988 - protein, 445 aa, unidentified
MTNTMPAAKSEPEWAAFVAIDWADQKHYWKLVPAGSQQQEQGELQNTPEAVETWAAGLQQRFRGRPIAVCLEQARGALVYMLTKYSHLVLFPVHPTTAARYRETFCTSGAKDDPNDTGFLLDLLLRHRERLRPLQPDTVETRLLQFLVEERRRTVNERTRQSNRLTDCLKQYFPQILLWFDGVDSPLVGDLLERWPSLDTLRRAHPGTLRQFLQKHNCRSAERNQERIDAIYAAVPATNDAAVLEAGTLTARGLVALLRTLRDNIAGLDRRIEQLVLAHPDGELFASLPGAGAVLVPRLIVAMGTRRERYDSAFEVQCYSGIAPVKESSGKTSWVHFRRTCPTFLRQTFHEFALHSIGQSEWAKAYYQHLREDQNKTHHAAVRSVAYKWIRIIFRCWKDGKPYDEEIYLQSLRRRGSLIVGALGLPTGAGWQTVAGFQKLSENNA

SEQ ID NO: 415989 - protein, 341 aa, unidentified
MSEVTTIGLDIAKQVFHAHGADAQGATVFSRRVTRAKLIQFFASQPRCVVAMEACGGAHHWGRELQRLGHQVRLIPPAYVKPFVKRQKNDAADAQAICEAAQRPNMRFVAVKSEQQQASAAVFRARDLFVRQRTQFINALRGLLAEHGWVAPKGLFQARAMMAQIEDPSCALPQGARDAFLAMIASIKALDEQIVILDREITQRAKEDPAARRLMTIPGIGPITATAILALAPPAESFRKGRDFAAWLGLTPRQRSTGGKQKLGAISKMGDRTLRRLIIIGSSAVVLHAARRGAPKGSWLEQMMARKPRMLVTVALANKTARIVWAVLARGEDYRAPAAAA

SEQ ID NO: 415990 - protein, 431 aa, unidentified
MKKSLKGKPVLPRGRAVVGIDIGKRKHAATALSPQGEIIAQLASFSNTRQGVDQLEKEVLRKAGGPGKVLVGMEATGHYWMCLYHELIRRGYACVVLNPLQTNARSSTRIRKTRNDKIDSLTIAQLILSGEAKATRVTDPKITELRLLVRHRHRLLQATGNMERYAHTLVDRIFPEYADVFCKPFLPSAQKLIRQIGLAPDKLVKNAEQVREILHSAGRGRIAAETIDQLLEVAKESIGTRQAEAVIEAQLCSIFDYLKTVRQQIADIKKQLDDRAKKLNSPLYSLGLTSTLVATIHAESDPIDDFDSAEQYVAYVGLDPSLHDSGDTIKRRGKISKRGSPLLRHTLYLAAFVVCRRHDYFRRIYLKHVGRGKKHTNAMVIVARRLARVIWRLLTDGREFTKRAPKPVPPPDKPRKSGKSTTTRKAANASA

SEQ ID NO: 415991 - protein, 339 aa, unidentified
MNRTVVGVDIAKRVFQLHWVELGSGEIVSVQLKRAKFLEHFANRLPCLIGMEACGGSQHWARELHKLGHEVKLLSARMVKAFVSGNKNDAADARAIWTAVQQPGIKAVAVKSEGQQAVLALHRMRAQLVKFRTAQVNGLRGLLAEYGEVLPQGRAGIRRDVPGALERVAERLPAIVIETLREQYARVGELDEQVQRIERRLQQWHRQDEASLRLAEIPGVGVLGATAALATIGDAKVFRSGREFAAWLGLVPRQSGTGGRVRLLGISKRGDPYLRTVLIHGARAVMTHSKAPPEWARQVAERRPKNVAIVALANKMARTIWALLAHQREYEPLYASRPA

SEQ ID NO: 415992 - protein, 443 aa, unidentified
MTRRCFGLDVHREFAQVAIWQDGHVRQAGQIAATPEGLRAFADSLASTDEVAIEATCNTHAIAKLLEGRVARVVISNPQKTRAIAEAKVKTDKVDAAVLAQLLAADYLPAVWLADDATHALRRQVARRAHIVRQRTRLKNQVQAILHRNLIPRCPAADLFGHKGRRWLAEQMLPADECQAVAALLRQLDFHAQELAIIDADLGRVALASAEVRRLMTIPGVDATVALSIVAAVGDFGRFGSPQKLVSYLGLNPRVRQSGGQPASHGRITKQGRAHARGMLVEAAWAASKTPGPLRAFYQRVRARRGMQVAVVATARKLAVLCWHLIAKGEDYAFARPSLTAQKLRRLELRAGMPSKRGQKGKAAGYSLKAVRARENALNEQAEQAYRQLVADWQAKAPKRESGVAAANGARLSRPSDGATAARQDSAPDPALRSGVDHAHGAA

SEQ ID NO: 415993 - protein, 329 aa, unidentified
MEPQLPLPVVGIDVSKASLAVCYQVKQQVKHLEVSNSKAGFQQLVKICGTQCLFVMEATGTYNLAVAYYLHEQGGQVAVLNPLVIRRFIQMHLGKGKTDRKDAQWLLRYGQQQAVKVWQPDEQVLVECRQLEQVNEQLIKQKTMVINSLEALQQQPVISQLARQRLQHTLQVLTDQVQAVEAELLALLEQRFQTEMTLLRSIPGIGRKTAGMLLLFAGGFQRFDNYRQLIALAGLSPREYSSGTSIREKARITKMGGGLIRGKLYMCSFAAKKKNAACQALYERLVAKGKNGKVALIAVCNKLLKQAFAIVKSGQPYQANFTSKLALNP

SEQ ID NO: 415994 - protein, 351 aa, unidentified
MKTQQTANSKLFIGIDIHKRSWKIHCATDLFCGKSFSMNPEPEQLKAYVSKHFRDYEVSTAYEAGCCGYSAHRAFESYGWFSLVVNPADIHRKGKEKHTKTDKIDAQLIARELKDGRLDGIHIPDVHREELRSLFRRRNDLVKDFRRIKSYIKMQLLYFGIKEPEEFDNDHWSHKYRNWLDAMVFTYPTAKATLESRMRFFRFVDQELRDVSTELRRYCKTHHKKDYMLLRSIPGIGGIVACSILCELGDLRRFNSVKHLAGYVGLAPGVYQSGGNYKTLGITPRAHRLIRSYFVEAAWQAIRADPIMQTYYRKHQGRNVKSIIIKVARKLLSRTLAVIKTETPYAIGVIE

SEQ ID NO: 415995 - protein, 342 aa, unidentified
MERVVTVGLDIAKNVFHAHGVSQDGKVVFSRKLRRSKLEAFFSQMEPCLIGIEACSTSHHWARVFTRMGHSVKLMPPVYVKPYVKSQKNDAADAEAICEAVTRPTMRFAEVKSIAQQSVLSLHRVRAQLVSHRTRIGNTIRGHLAEFGIVAPVGREGLCRLIGIIDDDADPSITDLTRLSLRHLADQYRLLQVQILDLDRQIMKAHRANALSKRLATIPGIGPLAASALAASIGDASAFKSGRSLAAFLGLVPRQSSSGGKERLGRISKRGDGYLRWLLVAGAMAVVRYAKRYGTRRPWLVQLLARRPAKTAIVALANKMARMAWALMISGETYREPSLQAA

SEQ ID NO: 415996 - protein, 353 aa, unidentified
MLAEMVDHVVGVDPDRDWITAAVVDSSTTGVVATARFAAKGLGYREAMAWADEYSTDTERAWAVEGTSSYGRGITAALANSGEWVIEFDRAKEKATKDGAKTDTLDAVRAARETLGRDKWASPRTHDGIREALRVHTVARDSAVHARTAAINELKAFVVTAPDHLRDRLRGLKRRSLVKRCAGFRHSDNQPIDEQCTRAAMRAVARRILQLTDEIKAHEKTLRALVAEAAPQLLGEFGIGPITAAALYVAWSHPGRCRNEAAYARLAGVAPIPATSGQTQERHRLNRGGDRQLNTALHTVAVTRIRAHPPTQDYKERRLAEGKTDREIRRCIKRYIARRVFRLLENPPLEEAA

SEQ ID NO: 415997 - protein, 345 aa, unidentified
MDLHKNTSNFSIKDRNGNEIDSRQIPTEPSAIKGYLKHFRKARLVLEPVSQWYFYANLISKLGIDVRLANPLKVKAIASARIKTDKIDASVLCDLLRTNLLPEAYFSSPKVRFWKEMTRFRASLIHLNTQIKNKIHNLLFKNGIRHPFTDLFGKAGIAWLRSLKLEEQFQFNLDRYLGLTEILEDLIKEADQKIERTVKSHSQARLLTSIPGISYCSGLTIMAEIGDIHRFPSAKKLQGYAGLVPSTYASGERMAHGRITKQGSRWLRWTMVMIAHRQLLCRKRPGFAWYYERIRQRKGSGAAAVATARKLLAVVWRILKDNRPFEIIPPKTVGSPGAHPKTIVL

SEQ ID NO: 415998 - protein, 341 aa, unidentified
MDKELYFGVDVSKKTLDLAYYDGEIIDWKNAHIRVSNDDAGFKKIGSWVAKVGKDFDTFLFCLEYTGLYNQNFRLWLESKEYIYSMVEPRKMHRFEPDLDDDQRSLDRIKTDELDAFRIAIYCEQNHKKILRNPSKLPSPVYFKLKRLLAERKQNTKQSVLYKQQLHDICAYDTDLSVERKKLLLKNMKENQKAIDKEIDSYMNEDASISKNFNLLTSIPGIGLIIALETIVLTENFTAINNPRKYACYIGIAPFKKESGTSVRKKTGVSKKGFSEAKADLSIAVLSAIRNNPSIRDYWIRKRKEKCGGIVLNAIKFKLVLRMFAVIKRGTPYVETDAYKN

SEQ ID NO: 415999 - protein, 348 aa, unidentified
MRFYTNQHKFYCGIDLHARTMYLCVLNQEGKIVLHRDIKTNPDIFLKTIAPYREDIVVAVECIFTWYWIADLCSEEGIPFVLGHALYMKAIHGGKAKNDKVDAYKIATLLKGGMMPMAYVYPSDMRSTRDLLRRRTHLARKRAELIAHIQNTNHQYNLTDMGRISRKCDRNKAGVAERFTDPSVQKSIELDVALIDHYDKLLNRLEHELSIIAKVHDADSYFRLRSIPGIGRILGLTILYEIHDISRFPRVQDFVSYCRLVKCAKESAGKIIGSSGKKIGNVHLKWAFSEAAVLFLRRNPEAMKYRAKLERKHGKAKSLTILAHKLARAVYNILKKKEVFQPEVFFAK

SEQ ID NO: 416000 - protein, 316 aa, unidentified
MENPQTFVGIDVSSQRLDVDTVPVSQPFSEPNNEDGIASLTAHLKALNPQIVLLEATGGYEIAVAYALYEASLPVVITNPKNVRHFAKALGRLAKTDKLDAQLLALYAQRVHPPVLPLRDQEQLELANLMTRRRQLQGMIVMEENRRRTCTPKVRANIDLSLAHLRRLLKDLDREIHESIRRTPLWHENSEILQSFTGVGPKVSASLIADMPELGLIPANKASALSGLAPMNQDSGKHRGKRMIKGGRPAVRRALYMAALVASRHNPVIKEFYQRLRLAGKPAKVALTACMRKLLVILNAMLKNRTYWNPQLHLAA

SEQ ID NO: 416001 - protein, 472 aa, unidentified
MVANRSSSPESRLRQQAEEAAKLASLPVRNPHAAGIDVGDRTHWVCVEHTPDGSPTTREFPAHTPGLRELMAWLKSCGVTTVALEASGAYGHVLFLALLEAGWNVLITSPKFTRQIQGRPKTDRLDCQWIQRLHKHGLLPSIFQPDEATQTLRDFVRQRANLVRLSGHHIQRMQKALELMNLKLTNVVEDVTGQTGLRIIRAILAGERDPLTLANLRDRRCKHSAAEIAVALDGRYRDEHLMELRCCFHMWEQYLAMIVQVDEAIAAQLRRMKKTTELPPLPKRKHVRGRRPHDPAFDVRTALYLMLGLDLTAMEGLDELNALTLISELGTDMAKWPTVKHFTSWLGLCPNFKKTGGKVQSSRTRRGKGRAAYTFRLAAWSLIRSKSYLGAHLRRLRSRLGAPKAITATAHKLARIFYTVLRYGVAYQKRSEEEFVVDHQKRMEKSLHRRAKELGYELRKVERPAEAEPQLA

SEQ ID NO: 416002 - protein, 364 aa, unidentified
MKRKVYVGMDVHKETIQIAYLTSNSKEILKEQQIKHNEVQIKKFIKKLKTEWNEIHCCYEAGVTGYPLYRYLKSLGVNCILVAPGKIPRQNTDKIKTDKRDAIKLARLMRSGELESIHVPSEEDEAVRDYLRSRDSLRLDLGRNRQRLMKFLLRKDIKYSTTKYWTVSHYKWLNNLHFNNEILQETFNDYYSRVRVQEENLKAMDKKIQEIAESEPYREKVGILRCFRGVDYLTAMFLLCEVNDFKRFKTADSFMSFLGLVPGEYSSGSKRKKKGITKTGSPRLRRILTEAAWQHRFPGTGSKIITARRSGQPALVVALAEKASLRLHKKFRNLQLRGKTPQVMITAVSRELSGFLWAAMNLVA

SEQ ID NO: 416003 - protein, 415 aa, unidentified
MEIIVERCAALDVHKDSLMAAVRLPGEKKGRRTEVRQFRTWTSSLRELRAWLVAHGVTQVAMEATGVYWKPPWHVLAPEPSFELLLVNAQHVKNLPGRKTDVSDAQWLASLLECGLLRGSFVPDPVMSRLRDLTRHRKKLAEARGRETQRIQKVLEDAGIKLDSVVSDVLGKGPRAMIEALIAGERDPNVLAEMALARTRARIPELRLALEGGFDEHHAFMLSTHLATVDHLSAQIARLDERLEVEIAPFARQVERLCTVVGIGKVTAQAIVAEIGVDMGRFPTAAHLASWAGMCPGNHESAGKRRSGRARKGNAALRSALIEAAWSASHSKNSYYAAQYRRFCRRFGKKSESKAIFVVAHSMLVTIWHMLANDTDDADLGGDFFDRRGDNERHARRLAHQIERLGYKVTVEPAA

SEQ ID NO: 416004 - protein, 456 aa, unidentified
MKKKQISLEVVNPNAAGIDIGSRSHWVAVGQNAQDVKEFGVYSQDHQELCEWLKKHKVTTIAMESTGTYWQNLFSSLVVFGFDVILVNGRQTKNIKGKKTDILDCQWIQKLHTLGLLSSSFLPDSTTAVIRTYSRHRQNILKQSASAILKMQKYLRLMNMRLDVVVKDIVGLTGTKIITAFIGGEKSGKVLAQNRHYNCRKSEDEISRALQYNGREDYYFALKQEWETYLHLQKQIDQVDIQIKKHLEEVINNDDDKKQHIASKKPYKRKNKNTIRNADMNQLSYQYFEGVDLMAIEGVNDATLMAFISEIGLEGINKFESAKQFTSWLRLAPNNKISGGRVLSHHLPKGSNRLKVALRQAANTIGNLKDGHLSDFFRRINYKKGRATAISATARKLAVIIWNMLTRGIPYHPPTEYLFLDQKRKLKLVNRIKRNIAKFDIKPEDIGLTKILNIST

SEQ ID NO: 416005 - protein, 448 aa, unidentified
MIEQELKASTWRELETKGKFEKNDKLSFISEEMLIVGCDIGSETHYIRAIDTRGRELSKGAFEFSNSSEGFASAKAWVLKLAAKNDKKQIVLGLEPTGHYWFAIAAWMVSNGISVVQVNPYAVKQSKEIEDNSQLKDDRKDPKIIANLVKDGNYGMPYLPEDIYADMRRLSMFRDQLTEDRIRNINRLHREMKIYFPEYMDAFGKIDGAFTLEILKVAPIPSDIVELDEEGLKSLWHEAKLRGRGYSRARVIVDYAKKSVGLTGGTDAGRESIKWFVEQIIQLDERLAEIENVLHQKCMEIPHAENILEINGVGENILAGILAEMGDISRFDNVKEIQKLSGMGLVACSSGKHKGQTKISHRGRKRLRYWLFQAAKSAVAHAVEFKQLHAYYTTRSMNPLKKMQSLVVIACKILRVIYTILNTGMKYDPERMLRDIRYPQGNTVQAAA

SEQ ID NO: 416006 - protein, 350 aa, unidentified
MVVVGADVHKRTHTFVAVDDVGRQIGQVTVAATTRGHLKALRWAGERFGSELLWAVEDCRHLSARLERDLLTAGQSVVRVPPKMMAEQRRVGRTRGKSDPIDALAVARAAQREPDLPVASHDEASRELKLLVDRRDDLVKHRTATINRLLWRVHELDPSMAPPARSLDQAKQQRLLAGKLADLPGLVAELARDELADVVELTGRINQLERRIADRVTQVAPTLLALPGVGALTAAKLVGEAAGVTRFKSEAAFARHAGIAPIPVWSGNTNGRVRLTRSGNRQLNAAIHRIAVTQIRLDGLGRTYYEKKKAEGMSTPEALRCLKRRLARVVFNNLHTDHQARAATGLAAVA

SEQ ID NO: 416007 - protein, 451 aa, unidentified
MTKSKRRHPERDFTPTHPNAAAIDIGSRMHVAAVPPDRDTEPVRAFGTCTGDLQQLADWFERCGVRTVAMESTGVYWIPAYELLEQRGFEVVLVNARDAKHVPGRKTDVSDAQWLRRLHEYGLLRASFRPKGELAALRAYLRQRERLLDYSASHIQHMQKALMQMNVQLHHVVTDVTGETGMRIIRAVVAGERDPAVLATHRDRRCHASEEEIAAALAGNWREEHIFALGQALELYDAYHAKVVECDLRIEIVLRRLRDAAAKPAGRLPPARHRDKTANAPAFDARAALHAVLGVDLTQIHGLGPSLALKLIGECGTDLSAWPNAKHFTSWLCLAPANKISGGKVLSTRTRRSGSRAAALLRLAAVTVGRTQTALGAFYRRLSARVGKAKAVTATARKIATLFYNTLRHGIDYADPGASYYEDRYRARVLANLRRRAKSLGYMLHEMSAPG

SEQ ID NO: 416008 - protein, 355 aa, unidentified
MRILALDLGKYKTVACEYEAETGRHRFATALTTPKALHDLIVDREPQRVVIEICSIAGWVCDLVRSLGIEIQVASTNDERWQWRKVKTKNDRRDGLKLAQLSARNELDLVHVPQSEMRQWRALIAYRQHLVQRRTKIKNHIRELLLREGQLLPRHRSAWTQVGIEALEAMVKPLREVSMDELWRGELEVELAQFKAVQAQLTEVVAKLDALGAANHNVRLLQTVGGVGPRLAEAVVTMFDDPRRFRTAGQVSSYIGMVPKQWDSGEMERLGKITRHGNRLVRSLLVEVAWCALRHNPWARETYQRISGGKKSRKKIAIVAVGRKLLVRCWAMLRDQSAWHWEGQSAVVTPRARAA

SEQ ID NO: 416009 - protein, 363 aa, unidentified
MTSITTTTGPVTGGVDTHGETHHAAVLDQVGRELGDREFPTTPSGYRALLGWLAGHGQLDRVGVEGTGAYGAALARHLRAGGVTVVEVDRPDRKARRASGKSDPLDAYAAARAALSRRATGAGKSRDGRVEAIRALRIARCSAVKARAAATNQLKSLLTSGPAELREQLRHLSTTVLITTCANLRPTSDLADPVQATKAALRRLARRHQNLSKEITEADVDLKNLVTAAAPCLLALRGVGIEVAGQLLTTAGDNPDRLRSEAAFAHLCGVAPVPASSGRTHRHRLNRGGDRAANNALYIVVLSRLCYDARTREYVDRRTKEGLSKPEIIRCLKRYVAREIFTLLTARTASEQSHQVLPMSTVA

SEQ ID NO: 416010 - protein, 407 aa, unidentified
MRVMYGVCCGLDVHKKEITAALMSGGKDAVVRVFGTTTNALRVMVDWLKEAGCEHVAMESSGVYWKPVYNILELEGIPAMVVNASHMKNIPGRKTDVDDAEWIADLLRHGLLRGSFIPEKDQREYRELVRYRSSRTEERARELNRLQKMLEGMNIKLGDFVSDINGKSAGKLLNLALENETLTDEQISDAMDKRLKASLEELKEALTGIITPLQRELVTMVINVIKDQTEQIAKVEALIKKYTSEAYEEAAKKLEVMHGIGTKSAQAVIAEIGIDMSRFPTENHLCAWAGLAPGNNESAGKRKSAKTRKGNKHIKKTLAQSAKSAVMNKDNFFYAQYQRLVVRLGANKATIAVAHSMLIAIYHILSGKEYKNLGADYYTQFNKDKKIKSHLKQLEKLGWTPPEDKAA

SEQ ID NO: 416011 - protein, 346 aa, unidentified
MKSIRVGVDLAKSVVQVHGVDRREQVVWRRQLKRTVWVQALCEQLEPGGEVGMEACCGAHHWARELRARGYRVKLMAPQFVKPYVKSNKSDRNDAEAICEAMSRPGMRFVAVKNVEQQDIQAVHRVRAELVQQRTAKSNQVRGLVAEYGLVAPKGPAQLRRALPQWLEDGENGLSLRFRRVLAGLCEDLQTLQRRITQLDEELAGIARENAHARRLMQLRGVGPVTATALVATLGRGEEYRRGRDFAVALGLTPRHHGTGGKERLLGISKRGDAYLRRLLVHGARSVIRTAASHDDRLSRWLNGLRARRHVNVVTVALASKTARIAWAMVRNDTNYRPELAAGAAG

SEQ ID NO: 416012 - protein, 423 aa, unidentified
MMKLKYPICCGLDVHKNVIVATIVITNRDGVSEYRQKSFSTINSDIQKFHNWLIENNCYHVCMESTGKYWIPIFNYLEKDIEVCLTHPKYVKAIKGKKTDKKDSKWIADLYKFDLVRCSFIPPKDFRQLRELSRYRFKLVCMKSSEKNRIQNCMTVSNVGIASVLSDPFGKTATEIMSYLLEHTADSIDEKAVRKLIKKGAKAKSDEIIEAIKGYHIETDQAKKLELACGHLEYLDDMITQTEVELYVRIKPYYEFVEFVSTMPGMTELSSTIVLAETGVDMNIFDDAKHLCSWCGLSPANNESAGKKKSVRIAKAGDYLKPMMVQCALAAIKSKKQPYFAIKYGRIKKRRGHKKAIIAIARMMMVCIYHMVSERNPFTPTDYEELMDPQNHVERVILNENNVFAYLESLGYDSSKLVKRNDN

SEQ ID NO: 416013 - protein, 361 aa, unidentified
MEQIARIGMDTSKHVFQLHGVNASEEPILRKKLRRKEMVGFFEKLPPSVIAIEACGGSHHWARQLRSFGHEVKLIPPQYVKPYVKRGKNDAADAEALCEAMSRPTMRFVPVKTPESQAALMLIGLRDRLVRNRVQLTNAIRGYAAEFGLTAAKGICKIEPLLERIAADESLPALARELFEFHAREYTQLQGQLKEIDGKLLAWHRADECSRRLAQIPGVGPIGASMIVTKTPAPEGFRSGRHFAAWLGLTPKDHSTAGKVRLGVITRAGDEALRSVLVAGATAVIHHLGRGRRFVSPWLTDLLKRKPPKLVAVALANKIARIAWKMMMTGESYRADAPPAVLTCGGLTISQPRGAREMRPR

SEQ ID NO: 416014 - protein, 456 aa, unidentified
MQSFYLGIDASKGYADFIILDSEKRVVAESFQLDDTFAGHCLLYELLMDFSTDHPGCIICAAVESTGGYENNWYNALLALQGPLNLQTARLNPLGVYHNSKADMKRNVTDKISAQSVAEYMIAHPEKVSYQSQDHLASLRKQWGFVKMLTKQSTQLLNQLESLLYGANPEILAYCKDGVPAWVLNLLVKYPTAANLAKAKGSSIARIPYVSSGKAETLRLNAKKSVASATDEITQQLIVATVKQIMHLKKTIKIQTEIMAKACSVSEVDLLKTFVGISDYSAIGLMLNIQSVRRFKTVKKLASFFGLHPAVKISGDGLSVVRMSKKGRTEPRQILFMVAMTAITQNPLISEIYQEHVRKGMEKMAAMGLCMHKILRIIYGMLKHNSPFDPEIDRRNREKSAQRPTSTRENKIRRYQDYDPNAPISRRHKIKRMEQRQSQSDNGAEHGILAPVPFPT

SEQ ID NO: 416015 - protein, 392 aa, unidentified
MVQTQTVSPLHYCPRDYDVFVGADVDKKKFVVTMMDHANIRKTVTLPYSAEQLLRTVRSHFPNRRPIFAYEAGPTGFGLYDRLTQEGHRCLVVSPSMIPHPANERVKTNRLDSLKIAENLRGGQLKSIHVPSLPYRYLRHLVQLRDVAVKQVKAAKCRIKALLLMEGIPFPALAADVQWSRAVLAHLKDIPCDPPIRFKLDRLLTAMDFARTQVLEAQRELHRFCQQDEELNRCTGFLKSVPGIGGITASHFLSRVGDWRLLGNVRQVASFVGLVTCENSTGDRVRRGPITTSGDPRLRSKLVQAAWVSIRQDAEMREFYRRVYRINPREYAACKAIVAVARKMTMRLHAVLKQQRPYEVREAVPTPLTEEETIRPRERLDVTVESGGLCLA

SEQ ID NO: 416016 - protein, 351 aa, unidentified
MIIIGVDYHPSFQEIASLDKETGEYDERRLNHGEAEADKFYRDLKQRGVGVRVGMEATGQSRWFERLMTELDFELWIGDPAAIKAARVRKKKTDREDARLLLRLLREDRFPRVWVPNPENRDLRQLLWHRHRLVQMRTRVMNQLQAIAMNEGVRLRKALWSKGGRAKLESLELAPWAARRRQDLLELLDRLTPKIEPLSVAIEQEALKRPEVKRLMTHPGVGPITALAFMLIIGTPERFRCGKQLGSYLGLVPSEDSSGGKQRLGHISKQGNSLLRFLLVEAAHAAVRHDPDWKRRYLHLAMRREQGIAKVAMARRLGVRLYWMWRKGWDYQQVLQFGSHAGDLVLARGVQ

SEQ ID NO: 416017 - protein, 387 aa, unidentified
MSQTAAALIPAPVAYGSTLVLAIEVSNKSWVLAAQVPGLPHTKAKRTIHPEAGALLAAIAGYRARAAATGHSIERVIAVYEAGWSGFWLARWLIRHGVEVYVVQPSSVPVDRRMRRAKSDGIDAELLLRTLLAWLRGEPRVCSMVPVPDEADEDARRCVRERTELISERVGLTNRIGAVLATLGVTDYNPLLRSRCRRLAELRTGLGEPLPANAHAKIKRLLARLELVLTQIAELERERDAVVETEASDKAGKMIQQLISLRGIGVQSATVLVREAFVRRFANGKALGSYAGLASSPYNSGGINREQGIGKGGNRRVRTVMVELAWLWTRYQPSAAQVCWFRERIRSTGRRVRKIMVVALARKLLIALWRFVIDGVVPEGAVLKPAA

SEQ ID NO: 416018 - protein, 341 aa, unidentified
MKPEMSVLGIDIAKRVFHAVGMDERGKIVLRKRLSRHDLMPFLAKLPPVRIGREACGGAHDWARRFREHGHEVKLMAPQCVKPYVKSHKNDSRDAEAIAEAVTRPTMRFVPTKNVDQQDIQALHRVRERLMGERTALVNEVHGLLNEYGIVLPKGVSQFRHAVVGKLESEKDKLSALSQEMFWKLVEEFAALEAQLAYYQEKLDTLAATHPECQRLMTIPGIGPLTATALVAAVSDASAFKNGRQFAAWLGLVPRQHTTGGKERLLGISKRGDTYLRKLLVHGARATIRWVGGKTDRRSQWMRQLLERRGTNRTAVAVANKNARIVWALLTSHQDYQPATS

SEQ ID NO: 416019 - protein, 357 aa, unidentified
MRDQKRGLDFSNQDFYLGIDVHKRSWAVTIRSNDMVLKTFSMDPIPKELFDFMKKRYPKGTYNSVYEAGFSGYSTHRELENLGFNNIIVSPTEIPTTGKEKLTKTDEVDSRKLARELEKGTISGIYIPSLLQQEMRSLSRLRHQQVKKQTRIKNQIKSYLDFYGHKLPKNCEMQHWSRKFIEHLRTLEFSYDIGKEQLEIYVEELLIIRNRMLQILILLKKYFRQYELYHFIDLLRTVPGVGFVVATTLYSEIMDIERFSNNEKFASYIGLVPSTMSSGEKKKVLGLSFQFNRYLRSLLIESAWVAIRKDPALTLAYSNFLIRLSAQEAIVRIAKKLLNRIYYVLKNEKEYIYSVVK

SEQ ID NO: 416020 - protein, 255 aa, unidentified
MVLGEAGKVLVRKKFNQRQLLTYTANMPTSLIGLEACSGAHFLGRALRNQGHDVRLIAAQFVKPFVKSNKNDFVDAEAIAEAVERKNMRFVPIKTDDQLDLQAIHRVRDRLISRRTAVINQLRAFLLERGLTFARTPAKLRNALPDILENPEVDLTTQMRHLIGLLWTEWKTVEDQIEGLSHELERISAGDAGCTRLRQIPGIGPIVATAIVAAIGNGAAFRKGRDFAAWLGVVPRQYSTGGKTRLLGISKRGNV

SEQ ID NO: 416021 - protein, 356 aa, unidentified
MFYLGIDQHARQITISLRDESGDVLQARQVSTRPEKIQAFFAKLTRERIRGGESFIAVVEVCGFNDWLIRMLQDYRCHKVILIQPEERKKRKTDRRDAAALSELFWVNRDHFLAGKPVRGLRQVDIARQTDQENRRLTTLRKEASQARTRIINKIKHMLRRHNLQWDIPTKTFPTQRAIAWLKQLVLPEMDRLEMNYLLVDLEQAEQRVQELEKVITERWGHSEDAQLLRSMPGVSYFTATSLACRVGRVERFPRACCLANYWGLTPGCRNSGGNNQRLGRITRAGSNIARWLLAQVAHQALRKDARLREWYKRIRRRRGSTIARVAVMRKLATVIWQMLSKRQTYAECRAIAVGC

SEQ ID NO: 416022 - protein, 495 aa, unidentified
MAKRKQSTFERLTNGKLNRKQRKEFVRRLRSDDPGLEVVHRHAAGIDIGNESHYVAVAPGRDPEPVREFGSWTADLIRMANWLKSCGVTDVVMQSTGVYWIAVYEVLEKAGFKVCLANARETKNLPGRKTDVQESQWLLKLHTYGLLRNSFRPSEEIRRVRTIWRLRGRHVQEAAREIQHMQKALTTMNVQIANTISDLSGVTGQTIVRAILKGERDPYKLAQMKDYRIRASQEEIARSLEGNWQPDVLFELQQAVEAYDFIKRQIAACDQQLQEYLAALPDRRVGKAEERESARVEPASGPQGAANGKDDPGAKNKKSRKKPRDNEPKFDLQAELTRICGVNLSSIDGVNVMTIQTFVSELGTDMTPWPTEDNLVSWLKLAPNPRITGGKIIKHERKKVRNRVNDALRMAASSLEHSDSYLGARFRHMKGRLGPCKAIKAVAAHLARLIYRMLTHGQAWVDRGAQEHETKRTDREKRSLERKAAALGFRLEPAA

SEQ ID NO: 416023 - protein, 364 aa, unidentified
MTTSAAAVIGGVDTHKHTHYAAAIDAHGRLLGHQEFPANDRGYAALLGWLRGHGTVQTIGVESTGSFGATLTRSLSKAGVPVVEVNRPNRSARRIDGKSDRLDAEQIARSVLGNTATATPKTKNGVVEVIRTLRVTRASAVKSRTQAFNTLFGVMIGAPSPLRDELVVLSKRTLVNRCLHLRPETDDLLELTNDPDRLLPAGVKTALRGLARRWKTLNAEITALNRQIEALVTLAAPDLLDLHGVGAELAGQFLMTAGDNAERIRNEAAFAKLCGVAPQPASSGRTTGRHRLSRGGDRAANSALYIVTIVRMRHHAPTRAYVERRTAEGLSKREIIRCLKRYIAREIYSALPRHPPAAEHRLTT

SEQ ID NO: 416024 - protein, 358 aa, unidentified
MATHSLSVLHSFVAAFGSEPFWIGIDVHKRSYHLALLRADGKTLTFVAPASPEKLVEQFHHLKILIAGVVYEAGPTGFNLARVLQNEGISVLVAAPSKIPRSISAGAKTDRLDCLKLAHFAEKGLIRPIAIPTEQEEAHRALSRRRHQLVDSIRRCKHRIKGFLLYHGFKETEALKYWSSDCSAQIAALPLEAKGRLTMDSHLRELNFLQDELSNVTSQLNQINLEPDHRAVIRSLTSVPGVGKVVATTFHTEIFRPERFNRSEEVASYLGLAPTVRHSGERTPRGYLVPVGQTRLRSLLIEAAWMWRAKDSYAHDLYNKLLSKTGIPQKAIAALARRLAIILWRLSIEQRAYRPIED

SEQ ID NO: 416025 - protein, 310 aa, unidentified
MERLFVGIDVSKDRLEVYVRPTGERLTVASDEAGITQLLGRLQVLQPSVIVLEATGGYEARVAAALAHAGLPVAVVHPRQVRDFARATGQLAKSDGLDAAVLAHFGEAVSPPVRPLPNAQAQALAELVTRRRQLVEMLTAELNRQQQARQRLVQTRLQRHVTWLRAAIAELEEDITRLIRSSPVWREKENVLTSAPGIGDVTAHALIAELPELGRLSRRRIASLAGLAPFIRESGRWKGRRMIRGGRAHVRRALYMATVVAIRYNPPIGDFYRRLIGAGRPKKLALIAAMRKLLTVLNAMLRDSRKWQTA

SEQ ID NO: 416026 - protein, 330 aa, unidentified
MKQYDHVFGVDVSKKTVDITHVINQQFTHRQFSNDEAGMEQLMDWLKELTPAFDKTLFCMEATGLYCFPLTRFLAAHSIDIWIEHAALIKKSTALVRGKNDKVDSQRIALYATKNIERLRLWKPMNTTLEKIRHLASLRDRLVETKKKLATPIHEFEDIGNHSMAKLLTKTIKSSLTAIDKDLKNIESKIIDIVNEDDNLKLLFKLITSVVGIGFVTAINLLIHTNGFTMMKDARKLACYCGVAPFEYSSGSSVRGKTKVHYMANKKLKCNLHMASLTAVKLDADLKAYYERKVAEGKNKMSVLNAVKNKLLARVVAVVNKQQEYVKKSA

SEQ ID NO: 416027 - protein, 363 aa, unidentified
MSVQYVGMDVDKQKIVLARLGAGQDARAVEQVIANTPSAVKKYFASLLSAAEVHATYEAGCFGFGLYRQLSAMGVTVVLAAPGLIPRKPADRVKTDRRDAHNLALALRAGQLTAIYVPTQQDESVRDYLRMYEAFRGDLRICKQRILQFLLRRSLSYGGGGPWTVKHRHWLNTLEFQQPRDRQTLDMYLAQMQELEAKCAEAAAEVESIAAQDCYRQQTKKLTAFKGIKTLIALSFITDIGDFRRFTNARQFMAYLGLVPSERSSGNKRRQGSITKAGNSHLRRLLVEAAWHYRSYHPTSRDLTERRRGVEPAVVSYANRAGRRLNRKYMHMLLRGKRSQVAVTAVSRELAGFLWGAMTNQVA

SEQ ID NO: 416028 - protein, 471 aa, unidentified
MSRAKTTAHSLAQGEIRSTEGLPVVHPHAAGADIGAQQIYVCIPGPDRTQIVRSFGTYTADLHAIAAWLVENGIQTIAMESTGVYWIPLFEVLEEHGIHCCLISGNLARRIPARHKTDVLDCQWIQTLHSLGLLNASFRPDADLIALRALLRHRARLIEHRSPHVLHMQKVLIHMNIRLDQAVSDPTGDTGLRILRAIVAGERDPHKLAALRHPQCKKSEAEITKALTGTWREEHLFVLKQSLELYDFYTAQIAACDDEIERTYAAIRPDWPDPHPDDQQPLPPNKRGSNSKNLPKDSLVHVRQHLRRITGIDLTAVDGLSLDLAQKIISEIGSDMSRFPTEKNFCSWLKLAPDNQITGGKIIRSSTGKSHNRARQAFLQAAASVARSNCAFGAFYRRLKARVGPAQAQVATAHKIAHVVYHMLKYKVEYQQMSAQEYEQQFRERQIRHLHRKAARLGFSLTPIAAATPVS

SEQ ID NO: 416029 - protein, 467 aa, unidentified
MALTLGIDVACRAAHQATLAADGKTVWRGRKFWTRPADLERLWNDLDLEDPGELTVVVEPTRNAWIVVAEWFRRRGTKVVMVPTTQSSDLRKYYSKHTKNDRIDSELLARLPLLHPEGLREYSGQGPADPLRRLTKQRSTMVKRRTAVFARLDALTELLGPAWYEAMNARYGIAALEFLARYADPHVVIRLGQARLSRFLIGRSRGAWREDRAAALILAAKETLALWDTGDGDGMDFAELAADIAHEAEQALFLTGQIKEIDERLANLYADADPDGIVASAPGVGPTISAVIAGRIGDPHRFTSLAAVRAYSGLVPRVSQSGVSKVESSITKAGDPLLREMLFAAADHARKVDPQIAAKYQRLMAGDRHHSSAICHLATIMLTRIAACMRNGEHYVLRDVDGTVITEAEGRIIVQQRYQLEPRRRDNVRHKRMRERRKEAAGQESQESPSAPTSGPADTQPTSQHVA

SEQ ID NO: 416030 - protein, 523 aa, unidentified
MATRLRSRTRRSGRFLTVAKPSGSLHPRVQKVGPEHFGIVAVDCAKARSKWMLADFYGRILIEPTVVEHNKRGFDSAIAQIRRARESHALGDIIVAIERTGIYHLPVKRVFSSNSFETRIVHPLTTRQYRLPADPGNKTDDTDLLAIHRATTNGFGLIEPQLDEVHGPLRLLARYRRTLVRKNASSRNQLITLLDVVLPGYTGLFHDIFNNPAALAIARTVTSAAEVQALGVDGLAQVLKTLGVRAQRRTLEKILAWTKGIENTADYAAMSNTIIVSLDDDRCARLQQIGMMEQKMAGLLARTPYVVLLSIPGIGVVTAGEFAGEMGPIANYASDQAITGRAGIYPSRYQSDKVDRCDGPLVRRANRSLRGVILLIADNLLLINRFFQGLKMRWQAEGMDYRDMCVHAAKRFCRIAFQMVAGRQVFRHPSCQKRDAILRKLTCFHVDHGTSMAQVLTDLQAAIDHIPKSEHTPEAKSLFDAMQPRNRRQQTGLRRLGEILPGVLAKVGVTAVELSSKGENDLT

SEQ ID NO: 416031 - protein, 343 aa, unidentified
MPHYVGLDVSQKTTAICVVDAQGKRLWRGVCATDPGPISARISQHAGVDAKVGIETGSMTPWLVHGLRAAGLDVACLDARRVKAALQMQLNKTDENDAEGLAQIMRTGWYRAVHVKSLDAHRARALLGARAQLVGMTTRLSNMIRGVLKTFGLLPGAGRGLRFDRKVEALLEGAPEIALVVRPLLATWRQLRQQIAVFDKAVLQQVRADPICRLLMTVPGIGALSSLMYVSTVENPSRFSRSRAVGAHLGLTPRRYQSGETDRSGHISRCGDGLARTLMYEAAIVILHRVKRPLHLKDWAEAIERRSGSGKARVALARKLSVILHSVWRSGEPFRWAAPAMAA

SEQ ID NO: 416032 - protein, 368 aa, unidentified
MDKFSKYVGLDVHQETIAVAVAQAGGEVRYVGEIMNTPEAIKKLVTQLKRDGARLSFCYEAGPGGYVLYRQLHDLKQDCQVVAPSLIPKKPGERVKTDRRDSLSLARLHRAGELTAVWIPGEAQEALRDLTRAREDMKHLQRQAKQRLLSFLSRHGHRYSGKCRWTQAHWRWLEGVKFAQPVQQIVLQEYMDTVKACSQHVASLEQEIERAVQDCPVWTVIEALMALRGVSLIAAVTLVAELGDLRRFSDAPQLMAYLGLVPTEHSSGKRERRGGITKTGNSHVRRVLVEAAWTYRHPARKTAILQRRAERTTKPVQEIAWSAQKRLCQRFRHLTARGKLPVQVCTAIARELTGFIWAIGQQAEIGGA

SEQ ID NO: 416033 - protein, 430 aa, unidentified
MKSNTQNAKIEAITEKTLVLGIDVGSETHYARAFDYRGIEYSKKPFKFSNTEAGFVTFKEWILDLKERHEKDKVVPGMEPTGHYWFNLGKFLQDNEMKPVLVNPHHVKKSKELDDNNPTKNDRKDPKVIAGLVREGRYMIPYLPDGVYADLRTASNIRFQLQVELTRIQNRISRWFNIYFPEYRTVYGKPDAKSGMLILKAAPLPEDILTLGIDGVNQIWRDAKLRAVGKARAKTLIEAAEHSVGSKEGAVSARMEIRMLLEDYESRNIRFQEVMTLIEGLVKQIPMAEKLLEIKGVGIKTVSGFFAEVGDISRFNTPKELQKLAGLALVESSSGKHKGETTISRRGRKRLRYLLFEVAMSLVAKNPEFRELHNYYTTRRLNPLKKMQSLMAIAAKLIRVFYAMLTKGVDYDPKKMVSDIKRPAVYLQAA

SEQ ID NO: 416034 - protein, 368 aa, unidentified
MMGWMAPLRHLRAKLLSDRESAANEELSMGEVTTIGLDLAKHVFQVHGVDAEGATVLRKQLRRAQVLTFFSRLPPCLVGLEACATAHYWARELRGLGHEVRLMPAQYVKAYVKRNKNDAADAAAICEAVVRPTMRFVPVKTADQQAAVLLHRGRERLVRQRTGLVNALRGHLAEFGVIAPQGLRNVGKLIAIVRDEGDGRLPDLARQVLQVLAVQIEQLEAAVAAIEKQLMAWHKSNPVSQRLASVPGIGPIIATAIAATVVEPSGFRSGREFAAWLGLVPRQNSTGGKHRLGGISKRGNQYLRRLLINGASANLLRSKATNADPWVIGLRRRRPSLVVAVALANKTARIAWAVMHRQENYQRVAAAA

SEQ ID NO: 416035 - protein, 316 aa, unidentified
MIPPPLFVGIDVAKATLDVAVRPTAETWSAPNEAPGLDALVARLVPLAPTLIVLEATGGYQGPLVAALVAAALPVVVVKPRHIRAFAQAVGLLAKTARIDARVMAHFAEAVKPAPRPLPDAQTQELRALLVRRRQLVAMVSAERARLDTAPLGIQETIHAHIAWLTTQIAGLDDALTQASQMHPAWQAKDDVLQSIPGVGPVLARTMLGHVPELGTLSPKPLAALIGVAPFNRDSGTLRGRRTVYGGRAEVRAVLYMGALVATRYHPVIKAFYERLLAAGTVKKVALTACMHKLLTIMNAMVRDLKPWQPQEAPIA

SEQ ID NO: 416036 - protein, 316 aa, unidentified
MDKESVFAGVDISKGRLDVAVLPQGESFGVENTPEGLEELVSRLKGYEPESVVMEATGGLEWPVAGALSEGGLAVAVVNPRQVRDFARATGRLAKTDKLDAFVLARFAEAVRPEARPLRDEAAQELAAVMLRRRQLVGMLTSERNRLRIMPKKVRRSIKAHITWLERRIEEVDKDLGDLIKASPMWREKEKLLKSAPGVGSTVARSLLAFLPELGLLNRRQIAALVGVAPFNRDSGQFKGLRRCWGGRASVRTPLYMAALTAIRCNSFFKAFYGRLVAAGKTRKLAITACMRKLITILNAMIRDNSPWSTPQIINP

SEQ ID NO: 416037 - protein, 354 aa, unidentified
MTRILAIDLGKFKSVTCLLDTTTNETEFWTMSTDRHYLLTVLKNYTPQLIVIESCGLAGWVHDICTAEGYEVLVCNPNQEAWKWKHVKRKTDRDDALKLAKLAALGQLVPVYIPSQQQREYRRLVKYRKVLVGRVNRVQNNIRAIFAQRGIDMVRGQKAWALERHDQIAQHRKPLAECSLDELWRGELDLELQQFASLRECQHEVHKKLKVLAAADERVRLLQTIPGVGRKTAEVVVAYIDDPHRFQNARQVSSYAGLVPRRYQSGEMDRQGRINKRGPRQLRSALVEAAWLMLRYNPWAKSVYDRLTSGQKTRKKKAIVAVARKLLVRCWVMLLRKEPWKETLTTNTVAANAA

SEQ ID NO: 416038 - protein, 366 aa, unidentified
MKKDSIRSRNGKRDWEGKKLTIGMDLGDRTSRYCVLGEEGEVLMEASVATTQKGLSEAFSALPPCRIAIETGQHSPWVSRHLSGLGHEVIVAHAQSVRLIGESTRKDDRLDAKTLARLARIDPALLSPVRHRSAEAQAHLTRIRARAVLVGARTALVNAIRGLTKAYGERLRKCHPEQIRSELAAELSPELRTALEPLFQEVQSLTERIQHYDHEIEKIAKQHYPEVAQLQQVNGVGTLIALTYVLTVDDPHRFGRSRDLGCYIGLRPGRRNSGNSQPQLHISKQGNRYLRTMMVQGAHYILGPFGKDSDLRRWGLKLAQRGGRNAKKRAVVAVARKLAVLLHKLWVSGEVYEPLRNHREEKRAAA

SEQ ID NO: 416039 - protein, 345 aa, unidentified
MPIVGGLDIHRKQITFDYLDTVTGEVWRGQIAPADRARLRAWLARFTGRGDVAFAVEGCTGWRYVAGELAAAGIAAHVAEPADTAALRGRKRHAKTDKTDSAHLRRLLAEGRLPECWIPPAQILECRALLETYHDLRREHTAWVQRIHAVFFHQGAPPLGEGVLRTEQGLARLRAAAAAHLSPAGQLQVATALDMLAATEAQLGPLRHQLRDAARHLTGARVLAERLYGVGPVTGLALTCWLAGAGRFSSSRKAVRFTGLDITVHSSDRKGPPGRLSRQGPPVLRWAVYEAGKTHARAAAPDHGYYAAVKDRNNGKRAALSEARKIVRQACHILAELGDDALTAA

SEQ ID NO: 416040 - protein, 359 aa, unidentified
MNVTSQRALKATRQKKKNAVKKDAVTIGIDTAKSVFQIHGVDEDGNVVLRRRVKRNRFIEFMAQLPTAIVGIEATGASHHWARELIKFGHDVRLMNPKRVKAYRDSDKSDRNDADAICEAVSRKRMKFIAVKTLDQQGMQGLHRGRSRLMKNRTALVNQARGLLSECGIVMHKGIRVFRSELPEILDEQAGSIPEILRVMLLEMYDELIVLDKQIEKFDKQFERLTDADPMCRKLKKVKGIGPLTALALVSKIGDANIFNGSREMSSYFGLAPQECSSGEKKHMFGISKRGDRYIRTLLIHGARSVVWKASGKDDSLSRWINKIKDKSGPNVAAVALANKNARIVWALMTKDEEYREAT

SEQ ID NO: 416041 - protein, 332 aa, unidentified
MVAGTHGSLNKAGSTKMTQISTTAGIDTSKAKLDIAVHGRIEHWQVENALVGWRRLVAALTGAEVTRVGIEASGGYECGVVDYLRHEGFIVLVLQPTQVKAYARMCLRRAKNDKIDAVLIAACAAMIDQARIDPDHRLAKLAQRLTFVEQIEEDIARFKVRLEHVGDRRHRRMVVTDIARLKARREAELARIVTALRAHDDLAHRLDLVLSVPGIGERTAIALIVRMPELGRVSREQAAALAGLAPFDDDSGKHRGERHIAGGRSRLRRSLFAAALPAAFRWNKALIELYSRLTKRGKAHNEALIACARKLLIYANTVVQRGTPWTERPAAA

SEQ ID NO: 416042 - protein, 338 aa, unidentified
MKLYGAIDLHSTNNVMVVINEHDQVVYQKRLPNDLSLIAQQLSSYRRSLEGIVVESTYNWYWLVDGLMEKGYRLHLANTAAIQQYNGLKYTDDHSDARWLAHLLRLGVLPEGYIYPKQERAVRDLLRKRGQLVHQRTANLLSIQSLISRTTGNSISAQYIKALNIERVDGVLPNSDLVLALKANLAVMNSADGQIEILEKAVQDRVKLRPQFRFLKTVPGIGPILALTIMLETGQIERFASVGNYASYCRCVGSKKISNGKRKGSGNTKNGNKYLAWAFVEAANFAIRFNSKIKGFYQKKKSKRNAIVAIKAVAHKLCRACYYIIKDQVAFDITKAFA

SEQ ID NO: 416043 - protein, 372 aa, unidentified
MEEISALYIGLDVSKLKISVALADDGRNGEVRFFGDIDARPATIAAVAAKLAKRGSRLHFCYEAGPTGYDLYRQIVALGHDCVVVAPSLIPQRPGDRVKTNRRDALSLAKLHRAGELTPVWVPDAGHEAVRDLVRARECAMESLRRARQQLLSFLLRHGRVYTGRTSWSKAHSSWLCRQTFEHPAHQIVLAEYRHAIEEAEVRLKRLTEQVTETAASWSMAPVVKAYQAMRGVAFMIAVTFVAEIGDVRRFDNPRQLMAYLGLVPSESSTGERVRRSEITKAGNGRVRRVLIEGAWTYRFPARISRRIEERQDDLPKAVREIAWKGQVRLCGRYRKLIAAGKLKAVTVTAIAREMAAFLWAIGQEVVPVLQA

SEQ ID NO: 416044 - protein, 341 aa, unidentified
MQAPRHIGIDLHRNNFTCCVRVENGRNYLSEWKLEDLSRFVKKLRPNDEIAVEVTGNTRLFYEAVAPHVARVVAVDPNQFRVISHSVKKTDRNDARNLALYLDKDLLPEVRMKDKTRAQLASLTQTRDTLVKLRTSLKNKINNILSAHGINLEKEALSSEKKLQQIRAMQFDPMVQIELEVIVEEIRSLNQRIAKLEKTIAEEGSKLEGHKNLTSIKGIGPLSGSILLSVIGDIRDFADEGKLAAYFGIVPRICNSNETERSGRITKHGSKLGRTALVQCALIAQRYSPYLKRYYEKIKARRGTGKAIIALARKLLGIIYRTLKYNWVFEDFPNFVLAEAA

SEQ ID NO: 416045 - protein, 435 aa, unidentified
MEKIRTNVAGIDIGAKRVFTAIEGQPVVSHFTFTEDFILLRDYLLKHEIETVAMEATGVYWVILYEILEEAGIDVWLVDGRQTKQVPGRKTDVKDCQWIQELHCFGLLNRCLVVDADIKELRSYLRLREDHINSSAMHINHMQKALTLMNIRLKEVLSQIHGASGMAIIEAILNGERDKNVLVNLCHQSVIKKKKELVLKALEGRYTRAGLFALKQAYDGYKFYLSQIDECDKRISVVINRIGQSGKGQDDKKKRKAIRHHKPSVEKLAPNLINVFGGKDATVISGITDYTWMQLLAETGSDLTKWQTEKHFTSWLGLSPGQHNSGKMRRNAKKKGHPKAGQIFRVIAQGLINSKNIALGSFGRRLRGRKGPRIAVKAMARKLAVLYWRIMVKGLDYAEKGIQNYEEQIMINKMKTLNRLVKELNIKMPDNVQVT

SEQ ID NO: 416046 - protein, 348 aa, unidentified
MKIVSLDVHAESSQMAVMSEQGELLLEMVVATQAQELRRVVGGIAGPKRVVFEEGPLSGMIRDALEGVAEQIVSADPSHNALIARSEDSNDEKDARRLGTLAAVKAIREVYVPGEPYRTLRSLLVHDERLARGIPSAKNRIKALCRRRGIRCRGTGVYRAAGRPGVLEPLPAEWKWQMESLYRQLDLARRERVGAHRVLGRLTRKMPLIARLDGIPGVGPMTARTIVGYIVDPDRFKSRSAVNAYGGLGLCQAVTNWKVVSRAKASKRGQKRLKRVLMIAAEAALRGDNALSRRYQARREAGWEERKAKRDLGRTILFLACGMWKNAQEYKEELVRVPAPEAKAARPD

SEQ ID NO: 416047 - protein, 347 aa, unidentified
MRFYTRQHRHYCGVDLHARSMYVCVLDQEGSVLVSKDIATAPEPFLELIAPYREDLAVAAECMFTWYWLADLCAREGLVFVLGHALYMRAIHGGKAKNDRIDAHKIAALLRGGMLPQAYVYPQAMRATRDLMRRRNYLMRQRAELLSHITNTNHQYNLPALGVRPARPAERSGLAEHFAEVPVRKSIEVDLSVIEHYDRELPRLERYLESNAQAHDPMALAIVRTIHGMGKVLGLSILYEIHDIGRFARVQQFLSYCRLVKPTKESGGKILGHSGRKIGNAHLKWAFSEAAVCFLRANKPAQALRARLMAKHGKGKSLAIIAAKLARSVYFMLKRGKAFDPERFFAH

SEQ ID NO: 416048 - protein, 343 aa, unidentified
MAIIGGLDLHRGQLTYDYLDVVTGQVDRGRVVPADRGHLRSFLARFDGQGEVAFAVEGCTGWRYVVEELERVGIGAHLAEPAETAAKRGRKRRAKTDRSDARHLRELLVKGDLPCSWIPPAQVLEVRARVRLYKDLEEERTAWLQRVQATLYHQGVPVIAALTSVAGQARLAAAELSPAGRQAVEVGLRQLDRLTGELDPLRAELARFSRRQPGCRALRTTHFGIGPITSVAIWAEMGDTRRFSSSDDAVRHSGLDITVYASDTKRARGHLARQGPATLRWALYEAAVCATRPNSPDHAYFLAVKRRADGHLGVISVARKLARRVHHTLRALGDQAWEPVAAV

SEQ ID NO: 416049 - protein, 407 aa, unidentified
MQVLYPRCAGLDVHKDTIVACVRCVSAPEHHEVQSFSSTTTGLLALSDWLASHLCTHVAMEATGVYWKPVWHVLEDSFELVLGNAAHIRNVPGRKTDVNDAMWIADLLAHGLIRSSFVPPAAIQELRDLTRTRKQLAREIAQHCLRIQKVLEDANLKLGSVLSDVLGDSGRAMLKAIVAGEDDPVRLASLAQGHARRKTSELREALSGRVTAHHRAMLGLHLQVIDALERALADLDAAVGLALTPIRQHVQLLRTIPGVGDLTARVLVAEIGVDMTRFPNPAHLISWAGLCPRNDESAGKRRSTRVRKSGTWLKTALVTAAWAAVRTKNTYLHAQFLRIKARRGAKKAIVAVAASMLTAAWHMLRNGVEYKDLGSDYFNRHDMQGTVKRLLKRLTDLGYPVQPASPS

SEQ ID NO: 416050 - protein, 349 aa, unidentified
MSQSLNSAIAVIGIDIGKNSFHVVGLDDRGAIVLRQKWSRGQIEVRLANMPPCLIGMEACVGAHHLSRKLQAFGHDARLMPAKYVRPYSKGQKNDFRDAEAIAEAVQRPTMKFVATKTAEQLDLQAMHRVRERLVSQRTGIINQIRAFLLERGMPVRQGLRFLRAELPRILATPPDVLSAGMVQVISDLAEDWRRLDERIDRLSREITVLAQQDAGCERLMSVPGIGPIISSAMVAAIGTGDAFSKGRDFAAWMGLVPKQISTGDRTILGKISKRGNRYLRVLFVQAAWVVLIKPRSWERHGLKHWIEAARKRLHRNVLAIALANKLARIAWGVLAGSRTFEASKLQAA

SEQ ID NO: 416051 - protein, 370 aa, unidentified
MEQPTTFFVGLDVHKDSISVSYAASGRPDPPQYVGPIGTRRCDIDKAIRRLRSKAAGLVFAYEAGPCGYDLYRYLTSKGFDCRVVAPSLIPKRPGDKIKNDRRDSMEIARMLRSGDLTSVYVPTVEDEAIRDLCRARDATQVTLRAAKLRLKSFLLRLSLRYTGRANWGDAHRRYLAKVACPTPSQQIVFQESVLAVEEQIDRLHRIEQELIDLASSWRLYPVVEALQALRGVRWIVALTVVAELGDLTRFDNPRQLAAFVGLIPSEHTSGPKRRLGGITKTGNSRARRVLVEGAWSYRFPAKVSAEIQARIETLPKVIQSIGWKAQVRLCKRFRRLKSRGKHGNVAVTAIAREMLAFMWAIAREVPIAL

SEQ ID NO: 416052 - protein, 347 aa, unidentified
MVSFYLGIDLHLRRTFMVLMDATGEVIDKQRISNQEIKKYLEEKVPRDTYAVLEATRNWPFMYDLLHTHVQQVDLVHAKGVKAIAAATVKTDQIDASTLAQLARLNYVPKAYAAPQEVRDLRQLLRHREWMVNQRSKAKNRIHAVLAGYNLVSPVTDLFGVAGRKYLEEVMEKELRPAARMVVVDHLANIDHFGERIRTLEKGISLSEAQTQTMTLLMSMPGVGKLNALTIMAEIGDMGRFHSPKALCSWAGLTPKVHSSDAVVHHGHITKEGSRYLRTAMVRTATVACRVSPKWYREHERLARRCGSRSARVAMARRLLTVIYYMWKRDQPYQEHFGQKLSDALGA

SEQ ID NO: 416053 - protein, 398 aa, unidentified
MTESSDYESVQVFIGVDVGKDTHHAVAVNRSGKRLFDKALPNDENKLRSLISDLKQHGQILLVVDQPATIGALPVAVARSEGVLVGYLPGLAMRRIADLHAGEAKADARDAAIIAEAARTLPHALRTLKLADEQIAELSMLCGFDDDLAAQTTQVSNRIRGLLTQIHPALERALGPRLDHPAVLDLLQRYPSPDKLASRGEKKLATQLCKLAPRLGKRLAADITRALTEQTVVVPGTNAAVVVLPRLALQLITLRKQRDEVALEVEQRVLAHPLYPVLTSMPGVSVRTAARLLTEVACRAFASAAHLAAYAGLAPVTRRSGSSIRGEHPSRRGNKTLKRALFLSAFAALRDPISRAYYTRKMSQGKRHNQALIALARRRCDVLFAMMRDGTFYTPAAS

SEQ ID NO: 416054 - protein, 320 aa, unidentified
MTSQAFSIGVDISLAELVIAYFGDTTAPIKLANNAAEIKRWLKRLPPDCTIGMEATGIHHRLLADLAFAAGHTVFVLNPRDVALYLKSLRSRGKTDVLDARGIARYTHNETDKCHAYAPLTMQQQTITTLIQRRHQVVKSRTSLRMSFADTSQCAQALGKLMRAFDALIAEIDSQLKALLAADEGLNTRCKNLRSIQGIGPLISAALAMRMSRVRYANSDALVAAVGLDPRPRESGQYTGTRHLSKRGNPEERRLLYLAAVSACRHPIWKAIQTSLLKKGLPSTAVYCIIARKILRIAFAVWNSGVPYDPRLVGRACAPT

SEQ ID NO: 416055 - protein, 397 aa, unidentified
MIAVGIDVSKSKSTVAILNGDGSIRVKPFDVHHVSDELQTVVNYIKGISESPTILMEPTSHYHYPLLKAFQEAELPVCLINPYQMKKYGDTELRKAKTDKRDALRIAQYALEKSYSLVPYTPQDQKYEDLRFLSRQYSQRISTLTVAKIQLLSILDETMPGITTILPLKSRDPDNCVLLRFIKRFKSFDVIRKMGKTRFLDSYQVLVKKTKDHFAGAKGLAIYELVLNSVTTRGENPLSAMTQDQCVDLVSTSQKAADEINLQMRIIAETIPEYKVLRSMAGVGDRLGPIILGEIGDIRRFHSGKALNAYAGNDAPPYQSGQFESRNRHISKRGNPALRKACFEVMQALKLTKPQDDPVYLFLLKKEQEGKPYNVAKMAAVNKFLRIYYARAIELYK

SEQ ID NO: 416056 - protein, 333 aa, unidentified
MVEGTEGSHHKEGSTKMSKYTTVCAGIDTGKHKLDVAIDGGARRVQVDNNSEGHRSLSAWLRQREVERIGIEASGGYEQAVVLSLRADGFVVIVFQPVQVRAYAKFVLQHAKNDNIDAVLIARCTAAAIDIHEPPDARLAPLAQHLTMIEQLTEDVGQLKTRREACREERIREFWKQEINRLKVLLNRELKQLVTVIREYRDLANRLDLIASVDGVGLRTAVAILVRMPEIGRVTREQAAAIAGLAPYDDDSGLRRGSRHIKGGRQRLRQSLYAAALPAVFYWNPQLKAFYRRLLVAGKPHTLALVACARKLLIFVNTVVARGTSWRSSAVTT

SEQ ID NO: 416057 - protein, 570 aa, unidentified
MKGQRAKRNQKSQKTSKTTSDKATPGKWDEMNRKQRREMMRQMQSGDLSLEVIHPDASGIDIGNESHYVAVPPSRDSQPVRCFGCTTAELKKMAEWLTQCGIRTVAMQSTGVYWIAVYDILEAAGMEVYLVNARETKNLPGRKTDVQESQWLMKLHTYGLLRNSFRPSQEIRILRTYWRQRHDLVRSAGRHIQRMQKALTQMNIRLANVISEISGMTGQAILKAILDGQRDPRELAAYRDHRVEASEEEIAQALEGNWQEDQLFVLRQEQAGYEFCQQHITECDQPLEKYLARLEDRTQGATLPKETRKGRLNKKKKRNPQFNLREELFRMTGTDLTQIDGIDVTVAMTVVSEVGWDMSKWKTENHFVSWLKLAPDNKISGGKVIGKGRTPTNNRATTVLRMAATTLRASDTYLGAQFRRLRTRLGPPVATKAMAAKLARLLYRMLRYGMKYVDKGAELYEAQHRKQQVIHLKRKAAQLGFKLRRRVSDGEFLERNGKTEFRKRSLPITARSKGILTMWMAKSKSDLVFTREDGSQSGFSFHVDPTARAHAGAAEPALGCMRPQRPVTQH

SEQ ID NO: 416058 - protein, 346 aa, unidentified
MMIIGCDFHPSWQQIAWLDSATGDTGERKLVHADGEAQQFYRQLARPALIGMEATGNSQWFVELVEDLGHQIWIGDAAEIRASYVRKQKTDKRDAAHILKLMLEGRFPRLWAPDREQRDLRQLVLHRHKLVIVRARVKNELQHLALNKGMQKKRRLWSETGQKLLRELPLKPWAARRREDLLGLLAMLNQQIGKLDAAVQSAAEQNPQARLLMTQPGVGPNTALAFVLTIGDASRFRRGKQVASYLGLIPRETTSGGRQKLGAITKQGNRMLRSLLVEAAQVAVRCDPQLRRQYLHRCHRKPKAVAKVAVARKLAVRLYWILRTQTAYPEIVRIESSSRLALVGAS

SEQ ID NO: 416059 - protein, 361 aa, unidentified
MSHIALKTIGVDLHKTSLTTTVLDASGVVIERKDIPTKCRNLIGAYFASHGPNVQVAVESVGFYHWFWDTVKPVVGKLHLADPAGVRAAAGRRTKTDRNDSLLLAQLLRENRLPMAYVPEEPIRALRELCRHRHRLARQLALARRHLRWLALKNNLPGPDTFTSDRAQKWVLAQEAKLSAVHRLSARQFIDQILSLERQLADVELVLKDTVAAHAELAPTLALIQSVPGIGFITAITIVCECGDITRFDCIDELSAYAGLCPRVTQSGESAHHGHISKQGPPQLRWVLQQAAWVAIRTDPNARRIFARIAKRSGSKKAATALGRKLLSYAWSVCRQGRPFLWPNSQKQTAPKSVPVWSFEI

SEQ ID NO: 416060 - protein, 399 aa, unidentified
MTTARTAQSSTEAQVLYMALELGWDDWTVGFTIGLGQAPRQVSVRARDLAGLLAQIAQAKRRFGLPAEALVHSVYEAGRDGFWLHRFLQAHGVHNIVVDAASIEVNRRYRRSKTDKLDVQKLLTMLVRFVLGETRRWKVVRVPSTEDEGLRQPQRELLALKKERTQHINRMKGLLAGLGLGAVIAPTFPERLPALRQWDGHPVPALLQERLLREFARWSLVQRQIQDLENAEARMVRNDQQRHVEQVRTLISIRGIGAQSAWLLVHEVFGWREIGNRRELAALAGLTPTPYHSGQSQREQGISKAGSKRLRWLMVELAWGWLHWQPESALSRWYQARFGHGSARLRKLGIVALARKLLIACWRLVAHGEVPPGAVVADWDRKVTGRCAKRRPVGTAVAV

SEQ ID NO: 416061 - protein, 424 aa, unidentified
MQNNAARKRKQVPEGYLVVGVDPHKKRHAAVAITQDFTTQAKFKFDNTREGLETMLDRAKAEMVKSGCRGIMFAIETGGHYWRNVAYFLDEQGIPFRFINQFTLKRRREGKDLNRRKNDYRDSEVAAQLLCTGEFTESKLPQGVYAELRTAHNAYRRLVKERTRITNLVKGLLDALFPEFTQVFKDPCALTALSVLSICPIPRVITGMTEDEFVATIEAQHKGRRLMRRKLRGLHYSARTSIGIDAGACSLSSEIAFLVDKLELIRQHICIMEGTLITLVDETEEGKYLLSIRGLNYIAVAGLLAELGCFKAYRSARQMIKMAGTNPTESESAGKKRARTPMSKQGRPVLRYCAWTSVIPMLRFKPDFRAWAKQRRERPVHANPLGGREVVGAALNRLLRLAFAMVKNQTYYQVSKSELTLVAV

SEQ ID NO: 416062 - protein, 457 aa, unidentified
MKVVNAHCAGIDVGSRSHYVAIGQLDSDVREFGVYAENLQELSTWLKGKGITSAALESTGIYWQHLFVELINPGIQVVLTSGRFTKSMNRKKTDVRDCQWIQKLHSLGLLPSSLLPDSSTEKLRTLCRHRDNMIDLKADASHKMQKFLKLLNFRLDVVVRDVTGLTGIKIIEDICNGVLDPGELSKNRHYNCRKSQDEIAKALVSNGREDYIFGLKQEFERHQFYQIQIEKCDHKISEFLNRFLEGATQEVPDEKPFKRNNKNSISGLDLNKTAFQYFRGVDIYQIPGISHSTVLSIMSEIGPEGFSMFPSAKHFASWLRLAPNNKISGGKTLSNRIPKGSNRLKIALRNAANAVGNLKESDLGRFFIKIAFKKGRQAAITATARKIAVILWNMVTKVEQYAPKSLYIFVDQKRKQLAIIRKKIAKFGIDPNELGIFSQESHRLAYENKKSLNQLLT

SEQ ID NO: 416063 - protein, 402 aa, unidentified
MNCVGIDVSKGKSMIAVMRPFGEVVVSPFEVRHTASELSELARLLKNLDGETRVVMESTGNYHAPVAWLLHGAGLYVSVVNAMLVHDYGNNSLRRGKTDKKDAVKLANYGLDHWLTLPRYVPEEDTRLMLKTCYRQYQQYSKVQTMLKNNLISLLDTAFPDANRLFTSPPRADGSEKWVDFVATFWHCECVCGLSKKAFTAKYQKWCRKHGYNFSQDKALDIYASACGRFGVMPKTNTAKLLVEQAISQLQTTSAALAALKQEMQSLAASLPEYPVVMGMFGVGPTLGPQLIAEIGDVRRFHSKKALVAFAGIDAPPYQSGQIDVRSRSISKRGSASLRRTLFLVMGVLLQCAPMDEPVYQFMNKKRSEGKPYRVYMMASANKFLRIYYASVKAYLDSLEHN

SEQ ID NO: 416064 - protein, 372 aa, unidentified
MEERIKFHVGLDVHKDSISVAVAEPGRAPGRLVGKVAHDVSKLLKMLAKIGTAEQLHIVYEAGPTGFGLQRALAAKGYFCEIIAPSQIPRRPGERVKTDGRDSIQLAESSRAGQLSAVWIPDPEDEAIRDLSRAREDAVNSRVQARHQLKGFLLRHDVRYTGKTSWSLAYYRWLTTLNFGAGAAQTAFTEYSLAVKAADDRVERLTKALVASITGWRFEPVVDALQALRGVAAITAIGLVAEIGDLARFSHPRKLMGYLGLVPSEHSSGERTSRGSITKTGNAHARRLLTEAAWNYRFKARIGRDALARQEALSEPIRTTAWKAQLRLTQRFAALRERGVQINKACVAVARELAGFIWAIGLQAQQEKAQKT

SEQ ID NO: 416065 - protein, 315 aa, unidentified
MKRFSVRNCVRTNRKRLNVSVKLPEGTERQYANDASGLRELIRSLAPLAPARIVYEATGAYHRLLERMLGVKGLPLAKMNPQHTRAFAKAAGRLSKTDRIDAAMLARFGALMTPQIRPIRSDTLDTLCELVAARRALIKDCTATLNRQKSLTMPLLKRQAEQRLKQIAAQIAAIDTECQARIASELGLRRRFDILNSIPGLGEASAFAIVADMPELGALENKQAASLAGLAHVDRQSGLWKGKSFIQGGRQTLRQALYMPALVATRFNQPLKAKYENLRASGKPAKVAITAIMRKLIVLANALIRDDRKWSPSLP

SEQ ID NO: 416066 - protein, 358 aa, unidentified
MAVIEGVCRIVGGVDTHKDLHVAAIVDEQDRIIGTRSFATTRQGYRQMLAWMRSFGELQRIGIESTGSYGAGLLRFMQQAKVTVLEVTTPDKQDRRRRGKNDDLDAQNAAHAAFAGQRTVTPRSRDGMIESLRVLKACRKTAVSARRIALQMIHNTIVCAPDGLRDQLRSLTRMQLVRTLASWRPDLTAYRDVDSAYRIGLKSLARRYLELHDEIADLDAMIAAIVDELAPNLVARNSIGHTGAAQLLLTAGDNPERLRSEASFASLCGVSPVPASSGRTVRHRLNRGGDRAANSALHIIAIGRLRTDQRTKDYVARRLAEGHSKLDAIRALKRYLAREVFTLITQRRKEINATRIAA

SEQ ID NO: 416067 - protein, 346 aa, unidentified
MKKIFIGIDFSKEKFDVVIIMAENLEEKAPRVHEQFANDKAGYRKFLKWVKENSHGVDMSLWLFCGENTGDYSKGLANFLYGKGCDMWLENAKCIKDSCGIRRLKSDRADAAMIAEYAMRNHDRMTLYEPLSGALAQLRELFLFRQMNVRKRSGYIVRKGEKGRTLDSSPAKSFMARKCKHMIAELDKTIKECDKMIEALIASDRDLQETYEIVTSVPGIGTQNAVCMMVYTDNFKRFDCNPRKIACYYGIAPFGHDSGTSVHCDPHVHYMANKTIKGILTQAALCAINHCPPVAHYYARLIERGKKTMVALNNVKNKLVRIVTALVRTKQKFIPEYEFAKRYAMD

SEQ ID NO: 416068 - protein, 402 aa, unidentified
MNSVGIDISKGRSTVAVMRPFGEVVISPFEVRHTDSELSELARQLKSLNGETRVVMEATGNYHAPVAKLLHDAGLYVSVVNAKLVHVYGNNDLRRVKTDRKDAVKLANYGLDRWLTLPRYVPEEDTRLLLKNCYRQYRQYSKVQTVLKNNLISLLDTVFPNVNRLFSSPIRGDGSEKWVDFVAEFWHCRCVSEKSEKAFTNKYQRWCKTHGYNFSEAKAHTIHAEASGHIGIMPKSETTKLLVEQAVVQLRATSAALIALKREMLTLAAQLPEYPVVMGMFGVGPTLGPQLIAEIGDVRRFYSKKALVAYAGLDAPPNDSGDVTGRHKSMSKIGASSLRRTLFLVMGIYLQNAPLDEPVYQFMDRKRAEGKPFRVYMMASANKFLRIYYATVKAYLESLEQV

SEQ ID NO: 416069 - protein, 416 aa, unidentified
MTFKVVRFICGGMDVHKNLIVATIGTTDRQTLITEYIQQSFSTFYSDLIRLKEWFISHDCYDVCMESTGKYWIPIYNVLETELNICLTHPKYVKAIKGKKTDKRDSKWICDLYKCDLVKHSFIPKKEIREMREIARYRCKLVYMRSSERNRYQNCLTVSNISLASAVSDPFGKTATNIMKELMQSEVIEDDKILKLIHKNCKDKDKILDSLQGYHIESDQRFKMDTVMNHIEYLDKQIQACEAELIKRAYPLRDYFQHITHIKGISALSAILIVSEIGTDMNQFESDKQLVNWAGLSPANNESANKKKSVRISKAGQYLKPLLVQCALSSIKDKNSYFGIKYCRIKKRRGHKKAIIAIARMMLVCIYHMILTGEEFNPCDYESLTNPKPKKEPTMTVESALQFLKDSNFDFSSIQL

SEQ ID NO: 416070 - protein, 342 aa, unidentified
MEQYVALDVSLKEISVCIVDSNGDVVFEGKTAAEPATLVALIRSKAPQVKRVGLETGATSPWLFHALSAAGLPVVCMDARHAHAALSMRPTKSDRSDARGLADMLRMGWYREVHAKSITSHERRTILGARHQLVTMRSELDAQIRGILKTFGLILGTGNKDTLIQRAEKLTAEHPVLSGLVAKLAEVRRHVTSQIAAIDRDIRHLVHTQPTLKRLISVPGVGPITALAFLCAVDDPSRFKHARDVGPYLGLTPTRYQSGETDRQGRISKCGDTFTRTCLYEAAHVLLTRVQRFSPLKAWGMRLAKRIGGRKARIAVARKIAVILHCIWTDGTEFWWTREKAA

SEQ ID NO: 416071 - protein, 440 aa, unidentified
MKRKTLYSLVEVKDISLERITEAHPGQSCVVGVDVAKAELVCCLYWPDRSFDRPWRVESPGQIGVLVALLQALSARGPVAVAMESSGTYGDVLRQALCDAGVEVRRVSAKAVKDHAETFDGVPSQHDGKDAAVIAELCWLGKGVAWPWQDRPEADQAVRFFVRKLDTHQRIKQMYAGKFEALLARHWPEIGRLMNPSGATLPRALAQWGDPRQVAADPQAAATLQGFGGFYLKPAKITQVLQAAQSTQGVRLNAWQRRELQEVAAAILHERRVIARCKRELRRLTQAHPVIQAQRPALGLITACVLWVCLGDARNYASGGAYRKAMGLNLKEHSSGKYQGRLSLSKRGQRLARKWLYFSALRWLRDPSVRRWAQAKKARDGGKGRKAVIGVMRRLALAAWHVGKHGVVFEAGRLFPGVRTAAAVPPEAPPANGRGRGAKE

SEQ ID NO: 416072 - protein, 400 aa, unidentified
MFSFFVGIDVGKWNHHAAFMNSSGNHSASELAFTNTSEGFQLLLSSLNSFDKTQTIIGLEATGHYWLALFSFLVDNSWPVKVINPMQSDALRNINIRKTKTDRKDSVLIADVLRFGRYTETVLPEEPILQLRELSRCRTGFVESSGNLKRKILGILDRIFPEFASCFSTIFGTTPTELLQEFADPEELANCDIEKLIKLLEKESRGRHSAPKAQELKNKAAQSIGIRMGLDALKFELRLLLQQLDFIKKQIKEMDKFLKRLMKQHEILLSIPGISFVLGAAILGEIGDVNRFATPQQLQAFAGMDPSVTQSGNFTGTQGKMSKRGSPYLRRALYLAANAAQRVDSVFKEHYVKLIARGKHPKQAMGAVATKLLRVIHAVLKSQKPYNPQKLAFSSTKTSV

SEQ ID NO: 416073 - protein, 387 aa, unidentified
MTQVDDLSRSLAAFDQSTNLVVVVEMSEASWLVAGLVPGVDRQPLKKLEPDPDALLRLLERWRAEAVKTGRTIGQVTLAYEAGRDGFWLARWLQARGIEVYVIHSTSVAVSREHRRAKTDRLDTAMLMRVFLGWLRGERGHCGMVAIPTLEAEDAKRPSRERESLVGERTRIGNRMKSALARLGIRGFKPELRKAPQRLAALRTPEDLPVPPNTLDEIRRDMARLAVVRGQIEEIERVRLERLEQAPDEGPNALVRLLARIVGVGVETADMLVREVLSRNLRDRRAVARYAGLTGSPDESGSKRREKGLAKAGNARVRRGLIQLAWRFLMFQKGSALAQWYRARTEGAQGKRKTTMIVALARKLLIELWRMVTVGAMPEGIVLRPTA

SEQ ID NO: 416074 - protein, 356 aa, unidentified
MGRSTTAKLKISHTDFQNTCEKAFFAGVDFHKRLSVITLGGQEGNILSQHKLMNDEGEIKKFFLQYGPLVCAIENCRGIEWFVEIVKECGCEVRVANTFAVKQIAQTAKKTDKIDSKILMELVARNYLPTVYQPTRNERILREKLRWRTRLMRSRTQFKNVAHATLDKEHKGAKVSSVRGRKCLQEQSGLSTERHEQLQDCLQVVEFFAETMDENDRTLIQIAHENLDVQRLQTIPGIGYLSGLMLVAELGDITRFKSARHVASYVGLVPRLYASADTTRLGRITKQGPGHLRRILVQDAWVAVRVSKAFRQKYNSILKRKGKKTAIVAIARMMAEIVYHVLKDKTEFDEKKMTLG

SEQ ID NO: 416075 - protein, 361 aa, unidentified
MPTQSNKLDFNGQNIYVGLDVHQRSWKVTIMTDHITHKTFSQSPKTEILYNYLERNFPGGTYHSAYEAGFCGYWIHNKLVSLGIKSIVVNPADVPTTNKERVQKEDKRDSKKIARSLRNGELTSIYTPSIKTLEDRTLLRTRATVVKDLTRYKNRIKSFLYFHGVEIPELFAKPQSHWSKRFMVWLESIELSEESGKISLNALLVESTHLRVSVLDLTRQVRKLSETDNYKINVKLLRSIPGIGLITAMTILTELETISRFNNIDKLCSFIGLVPSTSSSGEKDRTGKITPRGHSILRSAIVESSWMAVRNDSALMMSYLEYCKRMEPNKAIIRIAKKLLSRVKFVLKNNQSYVFGIVNNN

SEQ ID NO: 416076 - protein, 345 aa, unidentified
MNILAMDLGKNNTVICLYDAISGKHKFSKIKTTPQQIHDLLAEHSPDRVVFEICSSAGWIHDICAALKLNIEVANPNTQAWRWKNVKNKNDKNDALKLAQLSAMNQLPTVHMPKPAVRQKRAMIQYRQAIVARVVAIKNNIRSILDKQGLSMVAGKSGWTKKSLESLNDEALPFEKCDVYNFWRGQLYIELQMLQSTQKALVDVTAELDKQAESNTQIKLLQSAVGVGPRLAETVVAFIDEPGRFTTGKQVGSYAGLTPRQYQSGSMNRQGKISGQGNKLLRALLVKVSWLGLRHNSWMRQTYERILRGSPSRKKIAITAVARKLLVRCWAMLRDGMPWQVKAAA

SEQ ID NO: 416077 - protein, 411 aa, unidentified
MSNEQFAARIGLDWADEKHDFCLQEGNNKTLEYGTFKHTPAAIDKWALSLKLKFKNQPVAICLELKTGPIVSCLLKYKFITLYFVPPQALANYRKVFTQSGAKDDPTDAFLQLDYLNKHENNLHKVTLDTHDTRVLETLTIHRKAFVKEKVKYTCRITTALKAYYPLTLELFKDLDTPLFCDFIERWPNLSKLKKTKRDTLEKFFKVHHCGREHLIEQRLKLIKEAISLTEDDAIINPYQRYVLALVRSLKPILTIIKQYNVEISALFEQHEDKDIFSSFPGAGCTLAPRLLVAFGTDRNAFSSADEVNRYAGIAPVVVRSGKSTWTHWRYKCSKFLRQTFIEWANQTIRYSFWARKFYDKKRESGMTHQATIRALAFKWIRIMFRCWMNHSTYDEPKYLFALEKRNKKMV

SEQ ID NO: 416078 - protein, 320 aa, unidentified
MSAYEFVGIDIAKDKFDSALSIDNRYKHAVFSNSKKGYEDFLKWLNQYASSPWVCMEATGHYSEGLADFLVEKGVRVSVVNPFQVKSFAKACLARNKNDTIDAKITAQFCQRMEPRIYQSSSAEQKEIKELTKVLDMLKVQVIQLTNQLHSIRGRAAQKSLKKMIEKRKQEIKAIQQQIDELISNNQQLQEKLDLLLSIKGIGKLTAYYVLARMPDIQCFQTAKQFAAYIGITPKQHQSGSLIGKTTLSRLGDSRLRKALYMAALVAKRYNKALDGFVKRLQCNGKTPKTIICAVMRKLAHIIFGVLKNKQPFNENLGCF

SEQ ID NO: 416079 - protein, 323 aa, unidentified
MGVPTVSIDSTTVIVGIDVSKEYVDFFVLNRKGDPSGRRPRRAEDLTMLAAELAALKPRLVVLEATGGFETALWAALEAAGLRVAVVNPKRVRDFARSLGLLAKTDRLDARVLARFGELLGPAPTPLPSRAAREGRELLRHLNALVDMRAQQRTRKRQLEGEGVLASVERVIASLSEEIALLEQQVEQTLRERPAECQRAARLRTAPGVGPKTSWALVAELPELGQLSGRQVAALAGLAPVARESGRFRGRRRIAGGRARVRTALYMAARAAVRCDPQLAAFRARLLAAGKPKQVALIAVARKLLVALNAMIRDQRPWIPLPA

SEQ ID NO: 416080 - protein, 357 aa, unidentified
MDSSKVQPKLTAGLDLGDKYSHLCLIDSQSGEVIEEGRLRTTPETFRRRFASEQPMRIAIEAGTHSPWVSRLLEECGHEVLVANARKLRLIYANKQKTDEIDAENLARLARLDPKLLYPLKHRGEDSQAYMAIIRSREALVSARTQLVNHVRGAVKSFGGRLPKCPARSFHNKAPEHIPEALLPALGSILATIGSLTERIRDYEQQLEEISKERYPETELLRQVEGVGPLTALTFVLTLENPYRFAKSRSVGAYLGLVPARDQSGERDPQKRISKEGDEMLRKLLVGSAHYILGPFGSDSDLRRHGEKIASRGGKNSKKRAVVAVARKLAVLLHRLWVSGELYDPLYNAHRCGDVAA

SEQ ID NO: 416081 - protein, 429 aa, unidentified
METVSDRETIFARCAFLDVHKKTVEATVRLLQGQQVQAETRRWGTMTGQIQALAEWLETQGVTHVGMESTGVFWKPIYNILETRFTVVLTNPGHMKQVPGRKSDVRDSQWGAYLLQYGLLRGSFIPARWQRELRDFTRYRAQLEAERTRVANRLHKHLEDANIKLGSVATDILGMSGRAMIKALMEGEQDAAQLADMAQGKLRTKLPELQLALEGKVTPHHRLMLRLLWKELEAVEELMAEVDRQVQEVTRPYTPQIEQMDPVPGVDRRVAEVVLAEVGPNVDPFPSDQHLSSWAGMCPGNEESAGKRRTGRTTKGNRWLRAALVQAAWAASHTKRSYLGAQYRRLAGRRGKKRALVAVGHSILVILYHLLKDGRPYSDLGRDFFDRMNHDRLIRYYSRRLAELSQKVTVEPLPEVTPGEGMVNVPSPC

SEQ ID NO: 416082 - protein, 335 aa, unidentified
MQVYGIDLSKEKFDVNFIDANGKEKSLEVKNALASISRFLSSVPEGSILCSEHTGAYGDLLLFLCNQMKVPIALVPGYNIKHSLGMVKGKSDPLDSKRIRDYGERFTDKLVYAEYPNERITELKQLYTLRNQLVKQRKALRTIDKGRGVLPMQSIDVHSHINVVLATLDEEITSIEDEIETLILADQEMNESYELVTSIIGIGPVIATNLIIKTGNFKIIDTYRRAASYAGVCPFPNTSGKMVGKSRTSHFADKELKTLLYMGAKAAVKHNKEFKLYYQKKELEGKPYFLIMNNLSNKLLRIAYSVVKNKTPYDKDHVCLDPRERNMNSSTKKVA

SEQ ID NO: 416083 - protein, 404 aa, unidentified
MKQGGKVFAGLDWASKTHMVCVVDDAGEIKIRFEIANTGKTFTGLVKRLTKLGVEGVAIERCDGPLVEALLEAGLRVVVITPRQVKGLRSRYSGSGAKSDAGDAYLLADVLRTDGHRLAALSRDSETTAVLRALSRTRKDLVEARVGLVNQLHAQLERVFPGAIGLFARLDSDVAIAFLRRYPTQHAATKLTQARLNAFLRRIAYCGRRPVTELFARVHEAPAAGLGAAEADGRAACVLALLRAIDTVRHEERELEAEIIERLDAHADAHIFTSLPRAGHGVRAATLLAEIGDVRSRFPDEQSLAALAGVAPVTRASGKMHTVAYRYACDKKLRNAIIDFADHSRHASPWAAKIYNDAVARGKRHPHAVRILARAWIRVIWRCWQDGAAYNPEQHRSAVMLQAA

SEQ ID NO: 416084 - protein, 344 aa, unidentified
MKITTLGIDLAKNVFQIHGVDALGKVIVKKQLKRDQLAAYLVNLPPCLIGMEACGGAHHWARKLMGFGHTVRLMAPQFVKPYVKTNKNDAADAEAICEAVARPNMRFVPIKDVGQQSVLSLHRVRQGFVGARTAQANQIRGLLAEFGVIVPQGIAHLYTRVPELIEDASNEMTGSFRLLVQRLLEHLKALDKQVDEMEAQIVQWHKHSQVSLKLAAVPGIGPITASALVASLGDAKNFENGRQVSAWLGLVPKQHSSGGKEKLLKISKRGDTYLRTLLIHGARSVLYREQSKADSCSWVKGVATRRHHNIAAVALANKNARIVWALLTREKGFDAKHVSLRVAA

SEQ ID NO: 416085 - protein, 337 aa, unidentified
MKYSGIDLHSNNSVVSVVDDEDWVVAEKRLPNDLAKIVGWLMPWREEMAGVVVESTFNWYWLVDGLQAAGFKVHLANTTAIKKYEGLKHSGDETDARYLAHLLRLGILPTGTILAPEQRALRDLARKRMQLVRSRTTHILAIENIIARQQGARISSNQVKQLSAEDVDRMALPEEVALAVKTNVAVIDTLCAQIELLENRLQQKVGVRPAYRLLTSVPGIGQVLATTILLETGPIERFASVGNFASYARCVGSVRTSNGKKKGEGNTKNGNKYLAWAFVEAANFALRYCAEAKRFYERKKAKTNNVVAIKALAHKLARACFHILKERQAFDVTRCFA

SEQ ID NO: 416086 - protein, 349 aa, unidentified
MSHNLNDAVAVVGIDIGKNSFHVVGLDSRGAIVLRQKWSRGQIEARLANMPPCLIGMEACVGAHHLSRKLGTLGHDARLMPAKYVRPYSKGQKNDFRDAEAIAEAVQRPTMKFVATKTAEQLDLQALHRVRERLVSQRTGIINQIRAFLLERGIAVRQGLRFLRVELPRLLATPPDVLSPRTVGVIERLAEDWRRLDQRIEHLSSEITALAHQDAGCKRLVSVPGIGPIISSAMVAAIGTGDAFSKGRDFAAWLGLVPKQISTGDRTILGKISKRGNRYLRVLFVQAAWVVLIKPQSWERHGLKRWLDAAKQRLHRNVLAIALANKLARIAWGVLARGRAFEASKLQAA

SEQ ID NO: 416087 - protein, 441 aa, unidentified
MPRRIGLDVHREFAQIAVWEDGVVRQAGQIATTPEAIRVFADSLLPTDEVAIEATCNTHAIVKLIASRVARVVISNPMKTRAIAEAKVKTDKVDAAILAQLLAADYLPAVWMPDEHTQALRRQVARRAHLVRQRTRLKNQVQAILQRNLIPKPPVSDLFGIKGRCWLSNQPLPPDEELAVEALLRQLDFHGQELRIIDASLGRIALDRMEVKRLMTIPGVDATVALSIVAAVGDFHRFPAPGRLVSYLGLNPRVRQSGGQPASHGRITKHGRAHARGMLVEAAWVAVRTPGPLRAFYERIRSRRGMQIAVVATARKLAVLCWHLVIKDEDYAFGRPSLTEKKLRALELRAGMPARRGKKGNAAAHNLTDVRRRELELSEQAEHAYRQLVADWQAKRPSQKVGVAAANGTRLKRPSMGQAARQASVPEPALRSGVDHALSKA

SEQ ID NO: 416088 - protein, 343 aa, unidentified
MQAVTTIGLDIAKSVFQIHGVDAAGHVVVRRKLKRRYVVPFFQKLPPCLIGIEACASSHHWSRELKALGHTVRLMPPAYVKPYVKRQKNDAADAEAICEAVTRTNMRFVATKTPEQQSCLMLHRTRHLFIRQQTAVINAIRAHLAEFGIVAPVGRNGVEQLLDVVADASDKRLPEIARACLVALGTQLRTLKAQILNFDRQIMAWHRSSEASKRLDEIPGVGPALATALVASVADAKAFRSGRNFSAWIGLVPKQHSSGGKDKLGSISKQGDRYLRSLFTAGALAVIRYAKIHGTKHRPWLTALLARRPTKVAAIALANKIARMAWAMMARGDRYKQPVALAA

SEQ ID NO: 416089 - protein, 326 aa, unidentified
MEHELHYIGIDTAKEKLDVDVLRPDGRHRTKKFANTTKGHDELVSWLKGHKIDHAHICIEATGTYMEPVAECLYDAGYIVSVINPALGKAFAQSEGLRNKTDTVDARMLAEFCRQKRPAAWEAPHPLERALRALVVRHQALTDMHTQELNRTETAREVQRPSIDAHLLWLEAELKRLEKQIKDLTDDDPDMKHRRKLLESIPGIGEKTSAVLLAYIGLKDRFAHARQFAAFAGLTPRRYESGSSVRGESRMSKAGHVSLRRALYMPAMVATSKTEWGRAFRDRLAANGKKGKVILGAMMRKLAQVAYGVLKSGVPFDASRHNPVAA

SEQ ID NO: 416090 - protein, 370 aa, unidentified
MKKYSRLYVGMDTEKEKISVAYAPEGRDSGVEFVGPIGTRKKDIVGLIRRLKGEAEELVFVYEAGPCGYGLYRTIEDLGHECHVVAPSLTPRKPGERVKTNRRDAMKLARGMRSGDLTSIYVPSVEDEAIRDLCRGRDDARRDLRASKQRVKALLLRLDIRYTGNESWSKSYMRWLSEVRCPTAAQQIVFQEHLHSIRERAARVERLNVELREMVPDWRLNPLVRGYQALRGIQFTGAVTLASELGDLRRFAKARQVMGFVGLTPSEHSTGTKRRLGAITKMGNTRARRILIEASQAYRWMPKMSREIEERQEGLPQAVRDIGWKAQIRLWKRYRGLMSRRKQHNVAITAVARELSGFIWAISKEMMEAA

SEQ ID NO: 416091 - protein, 327 aa, unidentified
MGSGSLYVGIDGHKNFSFLCAMTKEGEIIEEKKVRNEEIEKIIEELGLDNLIVIIEPTTTTYPLIRGLRKKTEIKLAHPQKTKLIAESKKKTDKVDARVLADLARTNFLPTAYLPPDEIIELRDIVRERVRLKKLSTSIKNRIHSILMIEGIKCNNPFTSEGIKFLKSLNDGRINRYLRILNTINEEIKEIDREIREKCIENEEIMILTTIPGIGYFSALLIYAEIGDINRFPNSKKLCSYAGLVPAVRQSGNRVIRGRITKEGNKLLRWVLVQCAHVAVRKDERFKEFYNRIKQRKGPQKAIVATARKLLTVVYACWKNRTPYGRG

SEQ ID NO: 416092 - protein, 441 aa, unidentified
MMGFRGLEALITIKEVLTMKCTRKNVTNQRIERMTMQHAVVGIDVAKDTHAAKAVDFRGRELTTRHLAFSNTSEGFERLLQWMGEVQAKHRLSSLIIGLEPTGHYWFNLAHWLLEQEITVVLVNPVTTHRNKENRDNSPAKNDPKDALVIAELVSRGYYTDYSPHAFPYERLKTTMSHREYWAKLAVSLGNRIVRWIDLYFPEFRSVFREWSGLRALATLRALPLPSDLRGLQAAEIVEQWRKQGMKRAGGASGLAKAAQLVAAATRSMGDSRVPEEARRDIQRLLSVYDELTDQLDAMQREVEEILKELPIAKQLQSIQGLGTITLAALLGCAGDLSHYTHGRQLLRRAGLNLTQCTSGKYTGQIKLAKRGDSLLRKYLFLGMLGLVRQHPDFKRWHAQNQKKGMQKMASLFKLIGKLGRVIIGMIQRGEPYRAETARAA

SEQ ID NO: 416093 - protein, 453 aa, unidentified
MRKQRSPRSRKQNKRVLEQINHSAAGADMGSDEVWICVGEHMAAEPVRRFGTTTAQLLASAEWMRSMGVETVALEATGVYWVAAYEIYEEQGLRPILINSQAIRTFNGMKKSDFIDCQWIQLLHTFGILQASARPEAVMIELRGYMRQRRTVTEQCSEQIQRMQKALTLMNVRLDQAVTDITGVTGMRILRAILDEGERDPKKLAARRDPACARSEAEIAEALTGHWRDEQLFVLRQTVELWDFCQKLMLECDEQIEALIRKLPVRASADGKPTKAKRRKNQVSFDGRTLLHERLGVDLTAIKGVDVLTILTVISESGHDLSRFPTDKHYASWLGLAPGTRKSGHRVLSSRSRRTTNRAATALRLAAQSLLKSKSELGAFGRSLRARIGAEKAITAIAAKLARRIYMSLQTGRVYADRGVDYHDEQHRDRSVASLRKRARRFGLQLIPLENCA

SEQ ID NO: 416094 - protein, 370 aa, unidentified
MGNDTPLFVGLDVHKDSIAVAYAQGQSADPPVYVGAIGTREADLTKLIRRLQSKTPTLRFAYEAGPCGDGLYRDLTGQGFDCQVVAPSLIPKKPGDKVKTDRRDAIELARLLRSGDLTRVYVPTIDDEAIRDLCRARDAARLTMKNAKLRLKSFLLRLGLHYVGRADWNAAHLRYLAKVVCPTPAQQIVFQEAVKAVDEQVDRLARLEAELCDCASAWRLAPVVHALQALRGVQWLVAITVVAELGDLTRFTSPRQLAAFVGLIPSEYSSGPSRRQGGITKAGNGRARRALIEGAWAYRHPAKVSQHIQTRIDGLPKPIQDLGWKAQVRLCKRFRRLVGRGKHANVVVTAIARELIAFMWAIAKEVPVTP

SEQ ID NO: 416095 - protein, 361 aa, unidentified
MFRQRTFVGLDVHARSAVGHAMDEHTGEVWQQLLPADPPGIWGWLESLPQPVKVTYEAGPTGYSLARFLRGRGVVCPVAAPSKLVRPAGNRVKTDFKDAEHLCRLLRLDEIVEVILPDAEQEAARDLVRAREDVRGDLMRARHRASKLLLRQGIVYPGRKTWTATHQRWLQQQRFDAPPRQLAFEDAVEAVLLTTDRRDRLDAAIEVMAADSSYTPLVRRLCCLRGISTLTGFGLAVEIGDWHRFGGSSIGAFLGLVPTEDSSGESRSQGSITKAGNGHARRLLVEAAWHHRKSYRSPSRDLRNRWQLAPGPARVRGHEGNRRLHSRWQTFQARRKKDTIAAVAIARELAGWAWSLAVMDD

SEQ ID NO: 416096 - protein, 412 aa, unidentified
MEVLYECCGGLDVHAKTVVACLIKKGHKQIRTFSTMTDELRQLRDWLTSEGCTQVAIESTGVYWKPVFNILEGVLTVVLVNARHVKGVPGRKTDVRDCEWLADLLRHGLVRASFIPPPEIRALRELTRYRQTVVTEHTAVANRLQKLLESANIKLGQVASDVLGVSGRLMLRALAEGEQEAEKLAALAQGKLKSKQGELQRALEGRVTEVQRWVLTELLTRLDELEAALQRVETRMGKEVESCADPFVQEAVELLDSIPGIGERGAQTIISEIGVDMSRFPSAGHLASWAGLCPGNNESAGKRKSGKTTKGSKYLRTALVEAAWAATRAKGTYLQAQYQRLVKRMPKKKALVAVAHTLLVIGYHLLSRRVAYADLGSDYVDRQHIERQRRRLVERLAALGVKVTIEEVAEAA

SEQ ID NO: 416097 - protein, 370 aa, unidentified
MTVIIGVDPHKASHTAVAISDGEEELDRKKVRSGGAQLSQLVSWAAPFPARTWAIESATGLGYLLAQQLVAAGETVVDVPATLASRARLLSTGRSNKNDPNDALAVAVAALRSPGLRRVAAVGHSEVLRLLAKRNMDIGNQRSRVVCRMHSLLAELAGGGIAKEINASDVDGFLETFRPATAVARVRYDLAVELLDDIRSLDSQLKVSHKRIRDAVRASGTSLTDLFGVGPIIAGELIGYTGDIARFANRDRYAAYNGTAPVEFSSAGRVVHRLSKRGNRKLNHAIHMAAICQLRQPHSEGRAYFDRRVAEGKTKKEALRALKRHVSNAVYRRLLADAQRSRGADGPGRTTGTTLQPAWSAQHPSGPALW

SEQ ID NO: 416098 - protein, 412 aa, unidentified
MQVIIERCAGLDVHQETVVACVLVGTPGLRPRKEIRTFRTMTRDLEALRDWLTAAGVTHVGMESTGVYWRPVYGVLEGHFELIVGNARHIRNVPGRKTDVKDSEWIADLVRHGLIAKSFVPPKPLRELRELLRYRRKLVESQAAERNRLLKLLETANIKLASVASDVFGVSGKAMLKALILGTASAEEMAALAKGQLRRKHADLVLALDGKIEDYHRFLLTMQLHRLDTAELDITALDKRIDEKLEPYRTQHTLLMQIPGVEWLVAAVLIAEIGIDMSQFLSVFHLAAWAGVCPGSYESAGKQKSGRARKGNVHLRTILVGAAISASRTKGSYLKDKFYRLKARRGALRAALAIAHKILVAAYHMLAKGVPYKDLGDAYLDHIGHTRTLANLKRRIERLGYHVILEPQAAAA

SEQ ID NO: 416099 - protein, 338 aa, unidentified
MNIVFLGIDLAKNVFQLCGLNQAGKPVYTKRTGRKELLQTLANIPACLIGIEASTGAFYWQREFEKLGHKVKVISPQYVKPFVRGQKNDGNNAQAIAVALMQPTMQFVPPKSPEQQDIQALHRARQRIINHRTATVCQIRGLLLDRGIPIGSAVSRARRAIPLILEDAENGLRSRMRRTIAELYELFNDLERRIHFFDKEIETVFRQSEACQRIARVKGIDPKTATAVVAAIGKGTEFKNGRHFAAWLGLVPRQHSSGDRQVLMNMTKKGDKHLRTLFIHGARAVVRVATNNNDGHMNQWVNQLKERRGFNKTTVAVANKNARIIWSMLRNETEYQVV

SEQ ID NO: 416100 - protein, 425 aa, unidentified
MSSELEIAAFIGLDWADQQHVIRLRVAGSTAVEDQRLDQKPETLRAWIGHLRQRFDGRPVAIALEQSRGSLLYALMNVDFLLLYPVNPQNLAQYRKAFYPSGAKDDPQDALLLLEMLEKHRDRLRVWVPDDASTRCLRLLAENRRKLVNRRTALTNHLTSLLKESFPQALDWAGPLDSLRACDFLENWSSLQILQKTSPSRLRKFYREHTRQEAETIQQRLEQIRQAQPLVSDSAVLAAAELMIPALVRQLRCLIESIQQFDQQLKDRFQQHDDYTLFHSLPGAGPALGPRLLSAFGSNRDRFQCAAEVQLLSGIAPVTERSGQSCWVHWRLACPKFLRQSFHEFAAQSILFSGWARAFYDQLRARGASHHAAVRTLAFKWIRILFRCWKTRTPYDEQIYLASLRRRGSPLCAALSPTPQEVPCE

SEQ ID NO: 416101 - protein, 411 aa, unidentified
MEKIYDNCCGIDVHKKLIVACFRQGRKQEIREFGATTRELLELCDWLKQGGCQKVAMESTASFWKPLYNIFEVSEISAMVVNARHMKNVPGRKTDVKDAEWIADLLQHGLLTASYIPDKDQRELRELVRYRKSLTDERARELNRLQKMLEGANIKLSGTVRNINGKSARSLLEHILSDKVFDAAAYDVMYDKKIIAHNLKATKQQIIDDLNGFLSPLQKRMMKELLNHLDELNQHIENLEKEIDDSMKPQEHQAVEAIKEIPGIADASAKAVISVIGTDMERFPTDKHLASWAGICPGNNESAHKRKSGKTTKGNAILKETLVICAHSAARVRDSYFYAQFQRLRSHRGAKKAYVAVAHSMLIAIYHVLKYGTVFKDLGADYYNQFNKESKINAYIKKLKVLGCSVKVAVA

SEQ ID NO: 416102 - protein, 391 aa, unidentified
MFYIGIDIAKHNHEVSIIDDNGKALGKSFSISNSQKGVDKFNTYLDSFNITSENCVIGMESTGHYWINLFSFLVNLKFNVFVINPIQSDAFRKMYIRKTKNDSKDSYIIAQIMRFGEYSSSNISDENIFALRQLSRYRTSFVDECSSWKRKIISILDQVFPEYSNLFSDTFGVTSKELLSKYPLPENMLELSTEELTNLLNKASKGRLGNEKAQEIKESAKNSFGVSFAKQTFSFQIKQIINQISFIESQLKELDNEISNMLKELNSEITTITGIGDVLGACILSEIGDISRFEKASQLVAFAGLDVAVKQSGEFTGTEMKITKRGSPYLRRAIWLAATVASFKDPALSIYYKSLIARGKKHLTAIGAVSRKMCNIIFSVLKNKKAYTPNI

SEQ ID NO: 416103 - protein, 352 aa, unidentified
MNVTTVGLDLAKNIFQVHGVDERGRTALRKQLRRDQVAVFFARLPPCVIGVEACGGAHFWATKLAAFGHTVKMMSPQFVKPYVKTNKNDALDAEAICEAVARPNMRFVHIKSVEQQAVLALHTARQGFVKARTAQANQIRGLLAEFGVVVPQGIRCIYERVPELLEDAVHGLPGRFCLLIDRLVQHLKELDGHAHELEHEIELWHRSSEVSKRLEAIPGIGPITASALVASAGDARNFQNARQFAAWIGLVPRQNSSGGKTKLLGISKRGDVYLRTLLIHGGRAVVQHAKSRADQAASWLGRLIGRRHANVAAVAVANKNARLAWALMSSGRPYDPKHARGAASAAMEPATT

SEQ ID NO: 416104 - protein, 403 aa, unidentified
MNSVGIDISKGRSTIAVMRPFGEVVISPFEVRHTDSELSELARQLKSLDGETRVVMEATGNYHTPVAKLLHDAGLYVSVVNAKLVHGYGNNDLRRVKTDKKDSVKLANYGLDRWLALTRYVPEEDTRLLLKNCYRQYRQYSKVQTVLKNNLISLLDTVFPNVNRLFSSPAREDGSEKWVDFVAEFWHCRCVSEKSEKAFANKYQRWCRKYGYNFNEAKAHTIHAEASGHIGVMPMSETTKLLVEQAVAQLRATSTALAALKHEMQALTSMLPEYPVVMDMFGVGPTLGPQLIAEIGDVRRFYSKKALVAYAGLDAPPNDSGDVTGRHKSMSKIGASSLRRTLFLVMSVYLQTAPLDEPVYQFMDRKRAEGKPYRVYMMASANKFLRIYYATVKAYLESLEHTA

SEQ ID NO: 416105 - protein, 370 aa, unidentified
MSAVTTHTIVVGVDVHKYSHTAVALDCFGQHVGSHEFSNDYLPDYVSWLDTLGERKNLIVALEDVNGYGVHIVKKLATEGVPMRYVPGILTDRQRKQSIHREKSDPVDAMRVAKVILTHYEETLPAKESIANPEERTNAVTLDFFLTERRSLVHEKTILKNQLHAMLHQYMGDHYTDLFPKAFTPKAITYYLDQMHPKTISDPEQLALVMSIRRRLTRLQLLVRQITEIDKAMQQAAQASLPVQALQKNISGCGAVSACTILAEVTAIKRFRTKSQFARYAGIAPIHKSSGNHQRLYTSPYGNRKVNRALHTIALYQISQVDNNNPGRIYYEKKLQEGKTKLWALRCLKRQVANRVFQTLKREYDTRHQL

SEQ ID NO: 416106 - protein, 312 aa, unidentified
MEEYKRNGQEGKTVFVGVDLHRFKWHVTVRTEDQELFSGALPGHWEALRRLLDRYRGNSIQVVYEAGYFGFWLHDRVLASGAQCIVTPPSLLPQEYGNRVKTDRRDSRKLAYLLAKGMLRRVWVPSLEERYHRQVIRRRRQLIGDRVRTQNRIKAELRFYGIELVEPRGPWPRRYVERLWCIRFGNRWMQESFGRLLEQYEFLTEQISKQTQLLRELSETPLYRERVQILRSVPGIGLIAAMELLVELQDVSRFQRAEQLAAYVGLTPSQYSSAQKIRMGRITGAGKNGLRAILVEASWQVDHQGWGHAGQV

SEQ ID NO: 416107 - protein, 355 aa, unidentified
MDSTKYVGMDVHTEAISVAVRNSAGKVIMESILETKANTILEFIQGLRGNVHVTFEEGTWAAWLYDLLKPHVTKVVVCNPRKNALLKDGNKGDKIDARKLSELLRLNNLKPVYHGEHGIRTLKELSRSYLTISKDLGRVMNRLKALYRSWAIPCKGQQVYAPRHRSEWLNKITEAGVRRRAEYLYQQLDALQPLRQQMRRDLLAESRKQPATKLLRKIPCIGPIRAALLIALIQTPHRFRTKRQLWNYSGLGIETHDSAQYRFVRGELQRSKRPQQLRGLNKNHNHDLKNIFKSAATMATISAGPFHDFYEALLVKGRKPTMARLTLARKIAAITLIVWKKEVRFDAKHVKPQAA

SEQ ID NO: 416108 - protein, 343 aa, unidentified
MEHYAGIDVSLEESSVCVVDARGTIVREVKVASEPEALVRYFDELELSVGRIGLEAGPLSQWLHAGLVAAGRDAVLLETRHVKAALSAMTVKTDRKDARGIAQLLRMGWYRPVHAKSVTCKDSRALLVGRKLLQGKLLDVELSIRGILRGYGLKVGEVSRGKFEARIRELTAGHVTLETVIGAMLAARTALWCEFTKLHREMLKIARADKVCRRLMSTPGVGALVALTYRSAVDDPMRFGKSSTVGAYFGLTPKKYQSGETDRDGGVSKVGDAMVRTALFEAAHIMLTRATHFSGLKHWALDVAKRRGMKRAKVALARKLGVVLHRMWVDATDFRWSRAAAMA

SEQ ID NO: 416109 - protein, 466 aa, unidentified
MTPHKDYCLDPPPPATPTFPQSPVLSEALQVCHPHAAGIDIGEAEHWVAVPPGGDPQPVRRFGTFTADLDALADWLIDCGVTTVAMESTGVYWIPLFELLETRGIQVLLIDPRQAKRAPGRPKTDRLDCQWLQRLHAYGLLAGAFRPEDQVCVLRSYLRHRQMLLTYAAHHIQHMHKALQQMNLKLPQVVSDLTGVTGMGIIKAIVAGERDPVTLAQLRNPHCQHDEDEIAKALQGTWRAEHLFALRQAVELYQFYHQQVALCDQQIKAHLETFADKSAGQPLPPKAHRHKKTNEPRFDARTPLYRMAGVDLTTIEGIEENTALIILSEIGTDMHRWPSVKHFCSWLGLCPQHQISGGKVLSRRVRPGAHRVTVALRLAARSLHHSQSALGAFFRRMKARLGTPKAITATAHRLARLVYTLLQHGSAYVQQGLEAYEAQYRERKVTTMAKQAKALGYTLVPLPAQG

SEQ ID NO: 416110 - protein, 366 aa, unidentified
MKKNITPVEHTNEVFKAQQLTIGLDLGDRSSRYCILDEAGNVILEQSVPTTPKGIQQVFSKISRCRIALETGTHSPWLSRLLTQLGHEVIVAHARNVQLITESTRKDDRLDARTLARLARIDPKLLSPVRHRSAKAQMHLTAIRARATLVSARTALVNAARGLTKSFGERLAKCGTEQMNREIAKGLSPELRDVLEPLLREIESLKERIAEYDRRIEQIAKEVYPEVALLKQVKGVGTLIGLTYILTLDDPHRFRRSRDAGCFLGLRPGRRNSGMSEPQMHISKEGDTYLRTLMVQGAHYILGPFGQDSDLRRWGLKLAARGGKNAKKRAVIAVARKLAVLLHKLWVSGEVYEPLRNNHEVVSAVA

SEQ ID NO: 416111 - protein, 345 aa, unidentified
MPIVGGLDIHRKQITFDYLDTATGQVRRGQVSPADREHLRGWLARFAGRDDAAFAVEGCTGWRYVAEELAAAGVTVHLAEPADTAFARGRKRHAKTDKTDCRHLRQLLAEGRLPECWIPPGHILECRALLELYNDLRREHTAWAQRIHAVLFHQGGPAMGEGALRTEQGLAALREAAAAHLSPAGQLQIVTALEVTEALEARMHVLRHQLVDAARHLAGAKVLAARLYGVGPVTALALTCWLGGAGRFSSSRKAVRFAGLDVTVWSSDRKGPPGRLSRQGPPVLRWAVYEAGKTHARSSAPDHAYYAQVKENNGGKRAALSEARKIIRQACHILTELGDDALTAA

SEQ ID NO: 416112 - protein, 431 aa, unidentified
MLKINPLSTLYVGIDVSSKSNYVCALDFYKNKYINSSFANNQPGAEELALKILECLKEHPDITTIVAALESTSVYSIHIANYLSSCEELMRFKPYVFVLNPKCTANYKKSYIGLGKSDPIDAFVIADYARAGNIESEPWRGSQFLALKRLTRHRLHLVECMTREKTYLISNLYLKFSELQMLEGDDQPFCDIYGATFSSVLMEYLSPEEILASSEEDLIAFLAEKSRNRIKDISKTADLLKKAARDSYRLDKALYEPLNVSIASSFNCIETFKREIKAIDNVIEKEIKGLNPNAFIILQSIDGIGPVFAGGIIAEIGDITAFHSSDALAKYAGLTWKSNQSGDFDGEDTPMIKAGNRYLRYYLGEAANSMRKHNVEYGTYYRKKYNEVPKHQHKRALALTSRKFVRLVYGLLARNQLYSGVSLDTSIKDSN

SEQ ID NO: 416113 - protein, 396 aa, unidentified
MAVYSKFVGMDVHKETIAVSVAEAFGGEVRYVGEIRNTPEAVGKLIRQLQKGGAELLCCYEAGPCGYVLHRQLLSMGVANQVVAPSLIPKKPGDRIKTDRRDSQTLARLLRAGELTAVWVPDEAQEALRDLTRGREDLKHLERQAKQRLQAFLLRHGKVYDHEKKWTQMHFHWLEQVKFDQPIQQIVFQDYLDTLQMLTRRVEALEKQLESAGAASGFGPVIEGLMALRGISRIAATTTMAEIDDIHRFPTAPQLMAYLGMVPSEHSSGATRSRGGITKTGNGHVRRVLVEAAWTYHHPARKTQHLQQKAKRAPEGVQEIAWKAQVRLCARYRLLESKGKLKVKVCTAVARELVGFIWAIGRAFPTPGAGALGDAANPQCIGSRTGNGGRILEVPM

SEQ ID NO: 416114 - protein, 309 aa, unidentified
MKVSTLGIDLAKNVFQLHGVGCNGQTVLKKKLTRDKFLPFLMQLEPCLIGMEACASSHHFARVLRQYGHEVKLIPPQYVKPYVKTNKTDAADAEAICEAVARPNMRFVQIKTAEQQAILVLHTERNILIRERTACANSMRAILAEFGIIMPRTLSQLYKKIPEILEEYDNELSPFVRCSVARQLEHLQGVEDQITLIEQELSRWAKTQPACQRVIKVPGVGLMTATYLVASVGNGQQFHSAKQFAAWLGLVPREFSSGGKQRLGRISKRGDRYFRYLLVHGARAVAAVIERHKDNMPWLYRLLNKRPIT

SEQ ID NO: 416115 - protein, 344 aa, unidentified
MSKIVADLSAVTTVSVDLAKHVFQVHAVDASGKVIAAKALRRRDLLAFFASLPPCLVGMEACGSAHHWGRELMALGHQVRLIPPAYVKPFVKRQKNDANDAAAIYEALSRPGLRFVKVRSIANQAVLMQHKAREMLVAQRTQLLNGLRGHLAEVGVIAAQGSCNMRSLGALIHEGDPAIPEAVRTSLMPLVAQIAHLDEAIKAIDADMAVQAKADPVSNRLMTIPGIGPVTASALVATIGDPASFSGPREFAAFLGLVPRQHSSGGKARLGRITKMGNSYLRKLLVVGAHAVLHHQARHDDPLRNWARKLLATKPFKLVAVATANKLARMAFALMNQNTRYAGA

SEQ ID NO: 416116 - protein, 532 aa, unidentified
MTSVAAMECLVASGPEKGQARPRRRDCEVIANRAEPGKSKNYTEYAMAKRKKSTFERLQRGSLNRKQRKELERRFHTESPELEIVHPNAAGIDIGNESHFVSVPPGQDQEPVREFGSWTADLQRMAEWLKSCGVRTVAMQSTGVYWIAVYDVLEQAGFEVYLVNARGTKNLPGRKSDVQECQWLRKLHTYGLLRKSFRPPEEIRAVRTIWRLRDRLVKDAGRAVQHIQKALTTMNIQLANAISDVSGVTGMNIVRAILQGQRDPRELAKMRDSRIQASEEEIAHSLEGNWQDDVLFELQQVVDAYDFHRKQVVACDTQLQKYMAALPSREPVGKTEPPVEAANSKQSAKQRKKLKANRKTKDNRPSFDLGTELARLMGVDLRIIDGIDLMTAQVLYSELGADLSAWPTEGHFTSWLELVPRRDVSGGKVIKQQKRPSKNRVATAFRNAAQSLVRSDSYLGARYRHLTARLGGLKGVKAMARYLACLVYRLLTKGPGWVDRGAAYYENRRRERDLVHLHRKAAAMGMQLVPNA

SEQ ID NO: 416117 - protein, 341 aa, unidentified
MNTTTYALDIAKSVFQLYWVELSGKAFNRRFSRSKLIEFLAKREPGRVTLEACGSAHWWARQLRTLGHEPVLLHARYVRPFVQTNKTDAADAKAIWTAAQQPGMPVVAAKDESQQSILVLHGLRQLRMKMRTMLINQLRGFLFEFGLTFRKGACAGLQEIVERMAEIEQHVPPMLLEFVQMQLQSIERAEEEVARLTQRIEAWGRQNRSCRTILAIPGIGMLTATAMVATIGDARTFKSGRQLAAYLGLVPKQTGTGGKVRLGGISKRGDSYVRTLLVHGARTVLNHLCRKNQPGWSLTLAQRRPKNVAAVALANKTARTVWALLAHDRAYDRDYVSVRPA

SEQ ID NO: 416118 - protein, 354 aa, unidentified
MTSLTDLRDVVDVVIGVDTHVHTHSAAAVDTATGGVLGEITVEATPEGYAELVEFANNHATLRAWAIEGTGGHGAGLSRQLLGKASEIVIELDRPKRAARRNGAKSDPLDAIRAAREAMARPRLGSPRSGGERQALSVLLAARRSAINASTEAQQQVFSLVIAAPEPVRARFRGQKLAAMLNTAASLRVHASWDTETTSTVVALRTLARRAHAMLKEARELQKSIVAIIRSWRPDLLEEFGVGPIVAATVLCAWSHPGRIHSEAAFAMLAGVAPIPANSGQVTTRYRLNRYGDRNLNNALHTVVQIRIQYQQATRDYVARRTAEGKTSREIKRCLARYVARDLYRPLENGAAAA

SEQ ID NO: 416119 - protein, 396 aa, unidentified
MGVVTKPTTKNGDKHMKTKNKYVGLDVHKDTTVVAVADGGRDGEVRLYGEISSDLGALEKVLRKLGGEGITLHVVYEAGPTGFVLCRRLQQLGIDCIVVAPTKTPQEKGQRQKTDRRDALLLARLHRAGELTAIHVPDAVDESVRDLTRARADAVHDLTRAKQRLKSFLLRQGYRYAGKANWSEAHQRYLRELVLPLPALKAVLEESLLAIDQATQRVVRLEALLAVQVPQWRMYPAVAALMTLRGFQLTAAAVLVAELGDVRRFAHPRHLMAFLGLIPREKSTGNRRRQGSITKAGNTHARWILIEAVQHAFLPPKVSAPLALRQQGQPAARRELSWKVQVRLHQRAWHLLQRGVMKAKVTVALARELAGFVWDLLRQVPPPEAPARSHPMRTAG

SEQ ID NO: 416120 - protein, 344 aa, unidentified
MTHYVALDVSLRSVAICIIDAEGTIKRETSVVSDVEDIVHVLGRFDGEITSVGLEAGVLTQHLTYGLQAAGYDVVCMESRQVHAALSAMRNKTDKNDARGIAQILRSGWYSRVHVKSLESHYVRALLSSRRAVLQKCVDLENEVRGLLKIFGFKLPPRVGHVQFDGVIRERIIQEAELQHALIPLLDARGVLYTTYLELDRRVKRRALNDEICQRLMTVPGVGPITALTYKAAVDDPRRFKRSRTVAAHFGLTPRRFQSGEVDNLGHISKAGDVEVRCALYIAANVLMTRSAGFSTLKAWGMHLMKTKGRRVAVIAVARKLAVILHRMWIDGEQFHWGTEGANT

SEQ ID NO: 416121 - protein, 363 aa, unidentified
MDNGITWVGMDVHEESIVVTAVRHDSERGTARFEIPNTDTGVHRLVKRLREMGEVRCAYEAGPCGYELRRFLASQEIPCDVVAPSLIPKKVGDRVKTDRRDAEKLARLHRMGELTPIRVPTPAQEALRDLVRTREDAKEDALRRRHRLLKFLLRQGRRYEGKSWTQVHWNWIRSQKFADDNAQAVLTEYLVALEQELERIQRLNVKIEEESHRPEIAPAVARLRTLRGVDTVTAMTLVSELVDFSRFTTAHELMSFAGLVPSEYSSGGKERRGRITKTGNAHVRRVLVEAAWHYRRTPTGTGISLRKRREGQPPGVLEIARRAELRLCRKYLKMTSKGKNSRLTVVSVARELAGFVWAIGRSR

SEQ ID NO: 416122 - protein, 378 aa, unidentified
MDVLYHRCAGLDVHAETIVVCALLGEEDHIQKEIETFPTFTKDLFRLLKWLEDRGVTHIAIESTGVYWKPVFNILEDYFDITLANAQRIKNVPGRKTDVSDAEWIAKLLRYGLIEKSFVPPADIRELRDLTRLRKKWIGQLTAEKNRIQKVLECSNIKLSSVISDIFGVSGRKLLERLMKQGYIEEPEIDACIHGRMKGKRQQIQDSLFGTLTEHQLFMIRQSWKHIESLESLLREIEERIDQLLQAYKQEMELLVTIPGVKKETAAVIIAEIGVDMGQFPTSQHLASWAGVAPGNHESAGKRKSTRTMKGNPHIKSALCETAWALSRCRNQRLAAKYWSLAARRGKKKALVAMAHRMLTIIYCMLSRKEPFREQPTY

SEQ ID NO: 416123 - protein, 333 aa, unidentified
MVEGTKGSHHKEGSKKMSKNSTVCAGIDTGKYKLDVAIDESADQLQVDNSPAGYRCLSAWLRQREVERIGIEASGGYEQAVVSFLRADGFVVIVFQPVQVRAYAKFVLQHAKNDNIDAVLIARCTAAATDIHEPPDARLAPLAQRLTMIEQLTQDVAQVKTRREACWDQRIREFWKQEIDRFKRLLQAELKQLVAAIREHRDLSTRLDLIASVDGIGLRTAVAILVRMPEIGRVSREQAAAIAGLAPYDDDSGQRRGLRHIKGGRQRLRQSLYAATLPAAFYWNTQLKALYKRLIAAGKTHKLVLVACARKLLIFVNTVVARGTPWKSAPATT

SEQ ID NO: 416124 - protein, 405 aa, unidentified
MTSPRRVVIGADTHLDTIHVAAITDTGQPLGDAEFRTNPTGYWAAICWARSFGDIVTAGVEGTSSYGAGLTQALQANAIHVVEVNRPDRAARRRQGKSDPLDAYSAARAALASNSPAVPKDPHTNALKALLTARRGAVKARTAAIQQIKDLLVTAPAEIRERYRGYTTTLTLVAALSRCRPATHNDPVTVSVLTACKTLARRVTFLQDQADEITAELDTLTAAFNPALRAAYGVGPDTAAQLIITAGTNPQRLRSEASFAMLTGVAPIPASSGKTSRHRLSRGGDRAANNALYRIALVRMAHDQRTRDYVTRQTAAGRSKKEILRMLKRAIAREMFKHLTAPSPIDDYSDLRPARRATNITLTAVADHFGVWPNDISRLERGLKRDDTLAATYRQWLNTQLNHAA

SEQ ID NO: 416125 - protein, 349 aa, unidentified
MAMTIVEAAPGITGGVDTHLDKHVAAALDPLGRLVGTESFEADAAGYKALLAWLEEFGQVTKVGVEGTGSYGVGLSRFLRRKGVEVVEVNRPNRQSRRNQGKSDPLDAVEAARAAISGRASGAGKTMDGPVEAIRVLVVAKRSARQARVKAITQMRHLGITAPDQLHSRLKGLSVKVLVAEGAKLRSTRSPDPVTAATKASLASLAHRIQGLDQELAELDEKIESLLLATAPDLMSLFGVGPDTAATLLVAAGDNPERLHSEAAWAHLCGVSPVPADSGKNAGHLRRHNGGDRQANSALWRIAMVRIAHDPETTHYFDRRVKEGRTKRDVIRILQRYIAREVYRYLPRG

SEQ ID NO: 416126 - protein, 410 aa, unidentified
MEVFYPNCAGLDVHKETVVACSRQVVGRKASREVRTFKTTTSDLLALSEWLSSLGCTHIAMEATGVYWKPVWHILGDCDFALTLANAAHVKNVPGRKTDVNDATWLADLLAHGLIRGSFVPDEQTLEQRGLLRTRKQLIRERTSHVQRLQKTLEEANIKLDCVISDIVGTSGRAMIEALVAGETDPAQLARLANRRIRASATTLQEALRGRVRNHHRFLLRLHLEQIDALDRAIAEIDREVEANLDPFRALIPVLTSIPGIGDLAARVMLAEIGTDMSRFPTAGHLVSWAGLCPKNDESAGKRHSTRMRKGAPWLKTTLFQCAWAGARTKGSYLQAQFHRQRARNGAKKAIGAVAASMLTAAYHMIKNGTFYEDLGADHFERRAKPVQIKRLLAKLQALGYEAQIAPVPA

SEQ ID NO: 416127 - protein, 398 aa, unidentified
MTATHKPDCTFASASAPVLYMALELSSGTWKLAFTVGLGQKPRLKTVTARSTVGLVCEIKAAKKRFGRSEDAPVLSCYEAGRDGFWLHRFLLAHGVQNQVVDSASIEVNRRQRRAKSDGLDAVKLVEMLIRWHNGEHKVWKLVRVPAVAEEDQRQLHRELIELKAERTAVSNSIKGLLATLGLVVIVDETLPKQLENLRQWDGAKLPPSLHQRLLREFTRWQLINGQIDDLERARTAKIRDDKTPQIEKVRRLMNLKGVGLNGAWLLVYEFFGWRQFKNRRELGSLAGLTPTPYDSGESRREQGISKAGNRRVRWMMMELAWGWLRYQPASELSQWYQRRFAQGNTRLRKVGIVALARKLLVALWKYVEGGEEPPGAVLVGWENKRGYKGVKARQKAS

SEQ ID NO: 416128 - protein, 324 aa, unidentified
MRFYTKQHPFYCGIDLHARTMYVCILSQDGEIVLHRNMPASPDALLKAIAPYRDNIVIAVECIFTWYWLADLCVQEGLPFVLGHALYMKAIHGGKAKNDKIDSQKIAVLLRGGMLPQAYVYPAEMRATRDLLRRRLHLTRQRAELLAHIQNTNSQYNLPEIGKKLAYKGNRDGVAERFPDPAVQKSVEVDLALIDYDDRLLSDVELTLVQTAKQHNAQTLYRLQSVPGIGKILRLVLLYEIHDIARFPRVQDFVSYCRLVKCAKESAGKRYGTSGAKIGNAYRKWAFSEAAVLFLRNNPAGQKYLARLEHKHGTGKAFTILAHK

SEQ ID NO: 416129 - protein, 421 aa, unidentified
MKSTIPTILAGVDTHSTTHTLALLDEHGRVTDTETFNADPKGYERLIAMIGDPALCLGVGVEGTNSYGAALSRRLAAAGYTVHEVLRPKRSVRRSDGKSDPIDAIAAARSVLAGDGISTPKASDGWCEALRHLIAAREQLVTSMTAISNCLAELLTTAPEGIRERYRSLPSKRRIGKLAACRPSGGIVERNVLSSLKTLASSWRELHDRADVLECRMRQILEENARPLLDVYCMGTMSAAQLAVIGGDNPERIRSEAAFAKLCGACPLPASSGKTNRHRLNRSGNRQGNRALYNVALVRMSHHQPTKDYVVRKTKEGKGKLEIMRCLKRYIAREAYRALIAIRNGEAGREPAVERGARLREVRVSLGKTQQQVGDALGVPSSRVSEIERGGRDLPELERQIIEWMDSILGQSQHSNTFDNV

SEQ ID NO: 416130 - protein, 332 aa, unidentified
MSYKIAGIDVHKKMLAVVVSDVEVNGEYQFERIRYSTTPEHLRLLAEWLAAQQVEEIVMESTAQYWKPVWGALERYWKPICQERKGAGPMSGTLHLAQAQSNRGRRGRKKDFPDAERLVKRLVANELTLSFVPDAEQRLWRTVTRRKYQLRCNHVRLQNQLEGLLEECHIKLSSLVSDLLGASARRMLKALAEGETNPAALAAMADKNLRATQEQLCDALGACTELKPIYRQLLKMFLEELHLIDQQIVKLDQELASLLSRHHDAVVHLAEIPGLGVDSAQQIIAEVGAGAATFPSAKHLSSWVGACPGDEESAEVSKNHRSRKATATCGGF

SEQ ID NO: 416131 - protein, 430 aa, unidentified
MSKSNFLSVGIDVGSAFSFMSIVHPDGTLIGKPFKIIHKDVDSLERALLAIRKAEESYSLKSQTFLESTGIYHFPLFCFLIESGFDAFVINPLITHSIRNMGIRKVKNDKLDSIGIAKLGLSPDLSVSVMPEKLILELRALTRNYYSLTDIRASYVNQLKTQLHTGFPQFLSVFCDVTGKTSMMILESYPTPDKLLRAHRESLIAKIAKVSRKGVKAATEKYEKLICAAKSAKVFGCKLESVFFNIQTTLTLIKGMDAATASVMDRIGALVKENRSEKFIYQIEWLDSIPGIGFLSAVTIMCEIGDFSVFKSPKQLFAYFGMDPEVKQSGKFNATQVHMSKRGSRIARRAIFAAALASIRKKRNGEAINPYLYDFYQKKASSKPKMVALGAVMHKINNYIFAVLRDETVFSLRSPEEHCNAYWAPVALTA

SEQ ID NO: 416132 - protein, 318 aa, unidentified
METNLTVGIDISKSSFDVAIPNQTKGYLHLKFSNDLNGFTKFKEYLTKESKCIMEASGVYYLQLAIYLHKQGMRVSVVNPLTIKRFSQMRLMRAKTDRKDAAIIAEYGLVEKPEQWKPRATYMLQMQQIQAMQDNLVKQLTSLTNQQEVFKNSGIKNPFLQKVLAKEILRIENQIELMEKELIRITKENHSDLYDRLQTINGIGKRTAMTLILITDGFERFENSKQLCAYVGLSPRIYESGTSVKGKVKICKMGMARMRRLLYMCAMSAKTCNKSCREMYERLTARGKNGKLALIAIANKLLKQAFAIGKSQMVYKEI

SEQ ID NO: 416133 - protein, 437 aa, unidentified
MSQRKKTKGKSKGGARMLPVLHPDAAGIDVGAEEVFVAVPPDCATEPVRSFETFTRDLYELADWLQSCGIRSVAMESTGVYWIPLFQILETRGIEVFLVNAQHVKNVPGRKSDVSDCQWLQYLHSVGLLKASFRPPDQICVVRSLWRHRESLVQMAAEHTMHMQKALSQMNLQLHHVLSDITGLSGMRILDAILAGERDPVKLAALCHGRVRSPRETVAKSLEGDYRAEHLFALRQSLAGFRFYRKLIGEVDQELEIVMRQLPRAEGAPDQMPPRTKKCFYQKAGNEPAFDLKAELFRISGVDLTDVPGISTITAHTILIEVGPDLSRFRNASAFASWLGLCPDQKVSGGKVLYTGSRKVKSRVAIALRLGAQCLYHAKNYLGEYYRKMKWRLGAPQALTATAHKLARIVFHMLLTKEPYNESVLVKWDQQANMRVT

SEQ ID NO: 416134 - protein, 322 aa, unidentified
MRLPNPLCVGIDVSKATLDIAATAEIEQFTTSNDSDGFDEIINKLKECRISLVLMEATGGFEAAIACSLQAAGFDVTVINPRQARDFARAMGYLAKTDRIDARVLAQMAEVINKHPNRERFIRPIQDAERQVLTAMVVRRRQLIAMHVAERNRLHPAHPQSRKSINIIIKALDDELARVDAEMSKHVQNHFKELADRLNTFKGVGIRTTASLLAEVPELGNLTRREISALVGVAPVNRDSGTMRGRRTIFGGRIGARTALYMAALVATRFNPVIKAFYSRLLAVGKPKKVALVACMRKLLTILNAMLRKNEEWDMSYHSVSL

SEQ ID NO: 416135 - protein, 311 aa, unidentified
MEHSRFVGIAISKDHLDVHVRPTGDSFRVRDDDAGLVTLVAHLRPLAPVVLVLEATAGYEVTVAATLASAALPVAVVNPRQVRDFARATGQLAKTDTLDARVLALFAEAVRPAARPVPDAQAAALGELIARRRQLVDMLGAEHNRRRLLRDRRLQRHLEAHIAWLEEALRRLDHDLTTLIRSTPVWRETDDLLRSVPGIGPVTAGTLIADLPERGRLDRRRIAALAGLAPIARDSGAFRGRRMIMGGRAHIRRVLYMATLTAITHNPVIRAFHQRRVAAGRPGKVALTAAMRKLLTILNAMLRDRRPWHPA

SEQ ID NO: 416136 - protein, 351 aa, unidentified
MNISHYIGLDVHKKHINFCIKTADGTVVEEGRLAAQRVTLRAWAAGQTLAWHGAMDATLFSGWIYDTLKPYAACLEMAHPLMLKAIAASKKKNDTLDARKIADLVRCHLLPACYVATPQIRELRRLLRYRNLVVRESVRMQNKIAGLLMESGAPFHKQKLHGKKYFAQLLDTLEEVPDSVKDLLNLSRSAMEMFQATQKRLLGELLAHPQLRQRVERLASIRGVGPVTALTWALEVGDPFRFSCSAQAMSYCGLTSALQSSADKQQRGPISKQRNPWLQTALIEAAKLAPRWNPQLAALHARELERGQRNRATLAVARKLVAYLLAVDKSGRPFQLRPLAAVIVPAAQQAS

SEQ ID NO: 416137 - protein, 437 aa, unidentified
MLFVGHRFGTDPDELDALWARLPGDIEQVEVVMEPTRNAWVALAAWFRRHGATVVLVPPEQSADLRDYYNKHTKTDRLDSKVLARLPLLHPEGLHREDALGPGDHLKRAVKIRSGLVHRRTAAMARLDALLEILGPAWIAALGSDMTLTALRFLARYASPVRVKRLGKARLAAFFRRSSRRAWGDERAAAVIEAAQSTLRLWGPDGGGLDFDALAADIAVEARLALNLTEEINQLDKRIAGLYDKADPAGIVRSAPGVGRVGAPQILGRLGDPTRFANLAAIRSFAGLVPAADSSGQANGRGGLTKAGDACLREAAFIAADHARKVDPTLAARYHRLMLDGKHHNSAVCTLAAVLLTRIATCLRNGAPYALRDTDGRVITEAQGRAIVAERYTVPAEVRAARRTITRHCHPRRNERNERAKTGVAERSEAPPVPQPA

SEQ ID NO: 416138 - protein, 366 aa, unidentified
MKKISTVGAFGNEIFKEQKLTIGVDLGDRWSFYCVLEEAGKIILEQKVPTTPEGMKQTFSRMPQSRIALETGTHSPWVSRLFTELGHEVIVAHAQKVELITKSNRKDDRHDARTLARLARIDPELLGPVRHRSVQAQIHLTVIRARAELVSARTALVNAARGLVKSYGERLPKCGTQQVSRELAAALSAELRDVLEPLLKEIESLNERIKEYDERMEKIAKEVYPQVSLLKQVKGVGTQIALTYVLTIEDPHRFLKSREVGCFLGLKPGRRNSGESEPQKKISKAGDRYLRTMMVQGAHYILGPFGEDSDLRRWGRKLAERGGKNAKKRAVVAVARKLAVLLHRLWVSGEVYEPLRNSKKAMRAVA

SEQ ID NO: 416139 - protein, 342 aa, unidentified
MQITTIGLDIAKNVFQVHGIDATEKVVVRKQLRRSKVIAFFEALPPCLVGMEACASAHYWARELRKLGHEVRLMPAKDVKAYVKRNKNDAVDAEASCEAVRRPTMRFVGVKSAEQQGRLMQHRTRDLLLRQRTQVINALRAHLAELGVVAAQGREGLKELLAIIADEKEDRLPVDARASLIVLAAQLQALQTLIGSIEKRLVVQHRANEASKRLETIPGIGVLGASAIAATVSDPNVFRSGRDFAAWIGLVPRQDSTGGKQKLGPISKQGDRYLRRILVVGAIAVLRYAKQNPEKYPWLTQLLARRPFKVVAVALANKMARMAWALLAKGGTYRAPALAAAA

SEQ ID NO: 416140 - protein, 314 aa, unidentified
MINNNEISVGIDTGKTQLDVFIRPLGQSFSVGNSAPGVKEGIQRLKRLQPTRIVIEATGRLELLFVVAAQKARLPVTVANPKHVRRFAQALGQLAKTDRLDAEVIAHYGEAVKPEPTELKPENVRLISDLLARRSQLLAFSTQEKNRLSILPKALHASLKRHLKQLQTEIERVETQLDKLIALAPEWQQKRDLLMSVNGVGKVLTYTLLSDLPELGQLNRKEIAALVGVAPMNRESGSYNGKRHIRGGRAKIRTVLFMAIMSAVQSNPMLKAKYQQLKAAGKPPKVALVACMRKLLTILNVMMKNGEHWNPQMT

SEQ ID NO: 416141 - protein, 337 aa, unidentified
MTLYCGIDLHANNSVVSVLDDQDQVHYEKRLPNDLALITERLLPFQKDLLACVVESTYNWYWLVDGLMDAGFDVRLAHTGAIPQYAGIKHSNDQTDARHLAHLLRLGILPEGHILTREQRAVRDLMRRRLLLVQQKALHHLSLQSLLARYTGERLSANQVKALDNEAIASKLDDPIRLGGQITGLARNWLENAIDLLEQEVLKHLQQRHDYQLLTSIPGVGKILASTIATETGDISRFPSPGHYASYARCVNSEKFSNGKLKGRGNKKNGNKYLAWAFMEAAHYAAIWSPEIKRFYQKRQAKRHILVAKKTVANKLARACYHMLTKQEPFEVKRAFG

SEQ ID NO: 416142 - protein, 347 aa, unidentified
MEQITRIGMDTSKSVFQLHGVNAAEEPILRKKLTRSRMIEFFKSQPPTVVGVEACGGSHHLAQLLGSFGHTVKLLSPHLVKPYVKRGKNDAADAEALCEAMSRPTMRFVPAKSAEHRAALMMIGMRNRLVNNRTQLTNAIRGYAMEFGITIAAGPSRTEALLEKIQADDALPDLAHEIFDLHAREYRRLQLEIEKLDDRLMAWHRLNECSRRLAQIPGVGPIGAALLMLKTPDPTLFRSGRDFAAWIGLTPRDHSTAGKVKLGGITRAGDQHLRSVLVVGATSIIRHVRKLRGPNVNPWLLGLIERKKPKVVAVALANKMARIAWKLMVTGEAYRKHSLVPPLANTA

SEQ ID NO: 416143 - protein, 358 aa, unidentified
MFIESVDRIIPHEFDVFVGLDVDARNYHVTVLNWAGTVHQFTMSAQPKGLVSWRQQHLPQARVAWVYEAGPTGYGVYDALSQSGDVCLVTPPALLPRVPGRRVKTNRLDSLELAIRLRGGELTGLRVPTPRIRSLRHLTHQWLSLAQRVRGVKCQIKSLLLMEGRSLPEVGRGWSRAVGVALAALACDAEVQFVLQQRWRQLTVLHEEQLRLGRRIRAYCRADPDLAESLSYLMSLPGIGWVTGAHILARVGEWRRLKRPQELAKFAGLNPWEHSTGLRIVRGGISRSGDRHLRNLLIEAAWRATRVDPELRAFYERLRRRNPNPGGGHLPRQQRHCHPLSYLSSRAGARPLPHQRRR

SEQ ID NO: 416144 - protein, 377 aa, unidentified
MDKSSRILYVGLDVHKESIAVAYAPDDRGAEVVSLGPIGTRQSDIDTLIRKLHSKGAATLVFVYEAGPCGYGLYRYLTRKSFACHVVAPSLIPRKAGDRVKTDRRDAMMLARLMRSGDLNSIYVPGVEDEALRDLSRGRNDAMQDLKRSKRRLKSFLLRQDIRYEGRATWNAAHLRWLASVVCATPPQQIVFQEYRRAVTEQQERRERVERELHAAVKSWRLYPVVEAIQALRGVELTGAVILLTELGDLTRFDNPRQLMGYLGLIPSEYTSGDRRRQGGITKAGNSHARRALVEGAWAYRYPAKVSRHLQLRLEKLPAEIQTISWKAQVRLCKRYRQLTARGKHVNQVVVAIAREMAASAWAIARLVPVAPPPVAP

SEQ ID NO: 416145 - protein, 344 aa, unidentified
MKITTLGIDLAKNVFQLHGVDTHGKVVLKKQIKRDQMATFFVNLPPCLIGMEACASAHYWARKLQAQGHTVRLMAPQFVKPYVKTNKHDAADAQAICEAVQRPSMRFVAIKQVEQQAILAVHRVRQGLVKARTAQANQIRGLLGEFGLIVPVGIRYIYERVPTVLDQACEELPVSFRELILRLLEQLKALDRQVHEMERQIQTWHRANACSRKLEKVPGIGPITASALVASIGQARHFANGRQLAAWLGLVPKQHSSGGKVNLQGISKRGDTYLRTLLIHGARAVIRAMQNKPAAQSWLAQLLTRRHKNVAAVALANKNARIVWALLAHEREFRLDHASVIESA

SEQ ID NO: 416146 - protein, 361 aa, unidentified
MAGTMTWVGLDVHARSTHAAAVDVMTGELSRMRFGPGVDAPVAWLGSLPGPVWACYEAGPTGYGLYRAAVAAGIRLDVIAPGKTPRGPSDRVKTDRRDAELLARCLLAGSLKPVTVPPAGVEAARELTRAHDACRRDLMNARHRMSKMLLRHGRVYPKDNTWGQEHRRWLSRQQFEQEISAFVFADLVARVDGLTARKAALAERVSQLAVDPEFWPTVARLRAFKGVDTLTALSIHLELGADWRRFEKPTRLGAWLGLTPSLIQSGESSRQGAITKTGSGLARRLLVESAWHYCREPRIGATLQNRQHGQPEHVLQISNTAQQRIHRVYRRMKARGKPHHVTVVACARELACFLWAAATAP

SEQ ID NO: 416147 - protein, 340 aa, unidentified
MIKIIGLDIAKNVFQVHGIDETGQPALRRKLRRAEVLRLFSHLEPAVVGIEACHTAHYWGREIAALGHEVRLMPPQFVRPYVKSQKNDAADAEAICEAVQRPTMRFVPVKGADQQAVLLLHRTRDLLIRQRSSLISAIRAHFAEFGVVVGQRMRNIDRLLGLLVDEGAALPELARRMLAVLADQLRDVAARVAAVEGELMAWHRANDVSRRLATIPGVGPITASAIVATVGDATQFKSGRQFAAWLGLVPQQRSSGGKERLGRISKRGDGYIRRLMIHGARAVVGWRKRRPVARDPWLSGLLARRHVNVATVAFANKSARIAWALMARGRIYTAVRARAA

SEQ ID NO: 416148 - protein, 528 aa, unidentified
MPQIIAIGGDVSKGRIDVVILNHSGTALSGSGAYDDTHADHVRLRGHIRALEVAYPDAEIRVGVESTGGYELNWLKLFRDERRRGKRIDCWRLNPLAVKKWLDSDLHRAVTDERAARGIAAFLLARCPRVSDPEPTPHQTLYRLVRSARTDRGVLEQQLQMLLGQVHPELVSACRSGFPQWLLTALTMYPTAAKVARAKPERLAAIPHVGAERAKTLIANATTSVASFTGPAAELSVVLLTERIRTTNVTIDRYSPQIIAALADDPRVALLDSITGIGVWTATCLLLEIGDIARFDSCRQLIAWAGLDPHDDFSGDGIIRRGISKRGNAYLRALLYMPTLAALTSNPVIKAFYQRLLGRGKPRMQAVTAAMAKILRITYAVLVTGTAFDPDYESHRTERNRLARQNQPAAAKQSAATAPPTDFTAPISRREATRRRARSRQEKSGGPSHPCTGSKSQETTRANRTDSLHTDHRNATDQTLSCPVGGRHADAILTTKAASVGPSKGPKRCRPPAGRDRVDRKRGSKLVT

SEQ ID NO: 416149 - protein, 450 aa, unidentified
MLLPRDGAVIGIDLAEDKQAIAVIDHDVRVLARKTVRVKAFRLGEALDWAAGRARAAGFAKVTVACEPTGPRWLQVQRMCAERGLPLVCIQPLMSHIAREQQDFTTHKTDEADCVLIARLAVELHCYIPEELDETWAHLRHLGRRRQQLITAATASAQRIQDFLSVAWPVVTETCARPLESLTWLAAVQAVTSRCGADPGKLAGMGQEAFTALVRSAVPGWGGQKAWGPIAARIFAALTSTEGVVVASRRGLLRRVADELGDLQRTRAQLRAVEADMVAVLDELGLSRLADIPALSAVGAAAILAETGDPRRYDSSSSLVKHAGMSPSDNASGAFYGQAHISRRGRPGLRLAVWRAVWPMLRSNPVMAAKYAAMTSAADDAAQAAGVHDGTLAGSRPASAAAAAARAQRAKARVACAAALLRWIYFIVVHDASWDPAAASGTATCPAEVA

SEQ ID NO: 416150 - protein, 418 aa, unidentified
MEDNRKRYIGLDVHKHYLVALGVDANLNIVLPMRRVELSHLESWMKKNLTKQDEVVLEMTTNTWQLYDELIEYAGSVIVVHPPHVALITRSQVMNDKIAASILARLLAKGLLVGIWVPPQEVRELRGLVAQHQKMTRLATQATPALAGGARENRLHSVIQRHHLKPPAGNPFAKANNSWWQALRLGKLEKMNLQSDLETLQFAGDQETRLEEEMTMIAAEDEKIVRLMHITGFGVITAVTVYAAIGDLARFSEPKKLVGYAGLGARVHDSGMSTRSGKITKAGRRDLRVALVEVAHIAANTHPHWKAELARLQPRLGYNKAIVAIARKLLITVWHVLQGKADKYVEPKTVAQKMLKFAYAVGKENRPKGQTAAQFARIRMDALGLGSELTSVPWGTKKPIPLPPSSLKTERSDVPNTK

SEQ ID NO: 416151 - protein, 352 aa, unidentified
MDATTVAVDLAKDIFEVACANRAGRVVERKRLTRRQFEGFLATLMTGTDVIMEACGTAHYWGRRCQARGLGVRLLPPQYVRPYVRRNKTDRTDAEGLLEANRCGGIQAVPVKTLEQQTLQVLHRVRTQWQAARTARINMMRGILREHGLPIGLGARTALTRTPALLEDAETPLPDLVRHTVWLLLEEVRAIEARLATIDQQLAQIARTHPIARRLQQIPGIGVLTSTALVGAVNHIHAFRRGRHFASWLGLTPREISTGSRRYLGRISKRGDVYLRCLLTHGARAVLLTAQRTARAAPHRTTRFQQWAVTVAARCGHNKAAIAVANKLARIVWAVWHREVDFHAPLCGEGVN

SEQ ID NO: 416152 - protein, 432 aa, unidentified
MRVIGLDVHRSFAVIAILEDGQLRSGGRIDLTRDAVLAFGQTLRPDDEVVIEATANTATIVRLLRPFVRRVVIANPLQVRAIAHAKVKTDKIDAAVLARLHASGFLPEVWMPDEATETLRRLVAQRAQVVQQMTRVKNRVHGVLHANLIPLYAGELFSAAGRAWLEALPLADDERLAIRRSLADLDHRAADLAHLDQALAGRALQDERVRRLMTLSGVHVTVAMGLLAAVGDITRFASPEKLVSYLGLNPSVRQSGSGPARHGRISKQGRSHARAMLVEAAWAAARAPGPLRAFFLRIQARRGKAVAAVATARKLAVLAWHLLIEKEDYAWARPALLEAKLRKVELTAGQPAAKGRRPGRAHAYNSKEVRARERAWLEQTEQAYTRFVANWQNSPPAGRAGAATGRRKSEAARQACIPKPALGHAVTRAGGK

SEQ ID NO: 416153 - protein, 314 aa, unidentified
MNPSTIGVDVSKDWLDAHRLADGAARRFANAKTGRKALIKWLTATPPKRVVFEPTGPYHRRLERALDTAGLPIAKVNPRQARRFAEAAGKLVKTDRADAAMLARMGELLELPPRPCVSQTLAELKELHLARAALIKDRTAAKNRAKAITLPLLERQNKKRLAEIDAKIEEIDAAIEKLILDDAPLARRFEILLSIPGVSKITAFALLIEMPELGVLEGKQAASLAGLAPVERQSGSWKGHAYIRGGRAFLRQALYMPALVACRFNKDSRALYRRLVEAGKPAKVAITAVMRKLLVLANALLRDDRIWAENAPCA

SEQ ID NO: 416154 - protein, 424 aa, unidentified
MNNTQNKKIAQVSDGTLVIGVDVGSNTHYARAIMARGYEVSKKPFDFENTRDGFDRFVSWANHLAVVYQLKKIFVAIEPTGHYWFNLADYLKAYDVTLVMVAPQHVKHSKEMDDNTQMKNDQKDPLVIARLVAEGRYMIPYIPEDVYAELRSAFNRRCDLVEALTRNTNRMIRWFDMYFPEYRTVYGKADAISGLLILKRAPLPSDILKLGVDGICRIWREAKLRGVGINRARKLVAAAESSIGLKGGEAIRQELWQHMEAHELFKKQLGDIMQMIDGLIAKIPGADRLLKVPGAGIVTVAGFLSEVGDISRFTDPKQIQKLAGLAVVENSSGKRKGKPGISRRGRSRLRWVLFQLAMTTVKSNKEMKAYHLYYTTRKNNPLKKMQSLMAIAGKMTRIFYGILKNGTEYDPAIVMKDFKKEVAV

SEQ ID NO: 416155 - protein, 463 aa, unidentified
MRSVPLRAPPMYRPPPLVAAPPPDPKGPTVTSLLTDTAARRPDVDRRVIIGGVDTHLDTHVAAALDARGVELGTRSFPADPSGYRSLLAWLRSLGPVERIGVEGTGAYGVGLARYLARQGVAVVEVDRPNRQQRRKVGKSDPLDALAAARAALSGAASGQAKGRDGAVEAIRVLRVARRSAAHDRVRAISQLRAVVATSPDQLRESLRHLPRARLVSTCGALRPGAEIDVLSATKHALRELARRVQRLEEELVRLDDVLEPLVVAAAPALVALHALGPETVGALLVAAGDNPGRIRTEAAFAQLCGVAPLPASSGRVVRHRLNRGGDRSANSALWRIVLIRMRTDERTRAYVARRTTEGLSKLEIMRCLKRFVAREVFAHLPSTLERRATTELLGEPLVAQELGTPGVLGAGAKEAGQVVLGRERTVPAQREELSALAGRVLGQAEGAHNGDVAGTDQVAIEA

SEQ ID NO: 416156 - protein, 368 aa, unidentified
MNSVKFIGMDVHKNSINIAIADQGCRGPARTYGAINNDFGALDKFCRKMVSTASELYFVYEAGPCGYGIYRHLTDKGFDCMVAAPSLIPVKSGERIKNDRRDAKKLARLHRAGELTPVYVPDCQDEAMRDLTRAREAAVSATRRAKQQLKAYLLRHRIVYSGKAKWSKAYFNWLSDIALAHPAQQVVLQEYIDDVHERINRVDRLTDQIRQLVPSWRLAPVVAALQAVRGVSLIVATTLLAEIGDLSRFEHPDQLMGYLGLVPSEHSSGEKIKRGGITKTGNGHARKVLVEAAWAYRMNPRVSRVLLKRQQGLSDKVLQIAWKAQLRLCTRYRKMAGRGKPKQVVVTAIARELSAFLWAIAKQVQLAV

SEQ ID NO: 416157 - protein, 313 aa, unidentified
MYYIGIDVSKKDLSVFNGKKDLKFINQEGLKPFKKYLKKNYKNFSDLVIIFEPTGIYSFNLKEFCAENSIKAYIVNPKRSHSFARSLGIRSKDDKIDARILYQFHKLINSKDIKVPKIDQQAKVLSSYLTSYEFAVKQRVAISNHLESLRDKKLTSLLKKELKRAQKLEDEIFNDIKEYIRQNQNLREDYQRLLTISGVGGKMAIALLTLFKTYQGTNRAQITALVGLDSTKRESGSSVRGRAKISKNGKAIYRKVSYLPAICATVHNQKIKIFYQRLLANHKPKKLAIIASMRKILLIAHAMYRDKTEYVTV

SEQ ID NO: 416158 - protein, 344 aa, unidentified
MQPQEYVGIDLHRRRSVIVRRSAEGETLAVSHVDNDDLLAFERAVTAAGEHPEVVLEACYGWYWATDLLEELGCKVHLAHPLGNNWGNRRVKNDTRDAEDLADLLRLGRLAEAWIAPPEVRELRELVRYRAKLVSLRTNCKLQVYAVLAKEGVNVPMTDLFGVSGTELLETCHLATAYRTRVESLRDLIEVFDREIAKLEGGVRHELRGQVGYQVIQQIPGVGPLFASVFVAEIGDVTRFRSPAQLASWAGLTPKHHESDLTVRRGPITKQGSRLVRWAAVEAAQRQANGTKLRADFVRITAHHGDSAGARKIARVAVARKIVTLVYYGLRDGTIRSKAILEAA

SEQ ID NO: 416159 - protein, 444 aa, unidentified
MEAIVEHCCGLDVHQATVVAWRLVGPADRRPKKEVRTFGTFTRDLLALRDWLREAGCTHVAMESTGVYWKPVYAVLEGEFELVVGNAYHVRNVPGRKTDMADCQWLATLHAHGLLRSGFVPPEHVRRLQDYVRLRDDHVAMAASHVQHMQKALERMNVKFHDVISDLTGVSGMKVMRAILAGEREPAKLVELCDAQIKRRKSERVVESLRGTWKREHLFALGQAVSAWDFYQTKIGECDQAIEQVLHEMAGPPDDGEAPPVQRGKAANANTPDVRGLHRVLVQVCGGQDPTKMPGMADHSLLRVISEVGTDLTKWPTEKHFTAWTGLAPGTAQSGKRRKNQARQRNRVGLFFSAMARSAGNSIDTAFGGTYRRLKARRGGLVANKALARKLAAMFWRVMVHGVEYVEQGLQKYQERAALSEQRVLNKLARKHGMQLVTSTQPTA

SEQ ID NO: 416160 - protein, 353 aa, unidentified
MNTTQNSTKSKIVKVIGVDLAKDHCDVIGYDENGIICLRLDGCSYAKLREILANLPQAVVLMEACKGSMFHARSIADLGHEVRLVKGTDVKALRNVKHKNDLRDAAYIANLYFVPGIKYVYIKSQQQQSLQFLQNEYKSLQELRIQVGNQIHAGLEEFGCPVRKSSKFIKTRMVAHLEKHAELIPEDVMASFKRRREIWLNLLQQEEEAKRRLEQVAATDANAKRLMTVPCVGPQTAVGLLVHVGVDFGRFKNSRQFAALGLVPKQNSTGGNNTLNHITKCGPKSLRSNLVQCAQLVLMYAEKWKGNFGDWVRKMRDSGKKHGVIVCAIAAKLARIIYRLMKDKVDYTPILSC

SEQ ID NO: 416161 - protein, 400 aa, unidentified
MSLDRPFAKTAAIHSQLGAIFVSLELSRSTWLVTSLSPGAGEKMSKRVIEAGDVSRLLGLLAELKHKALARTGASYPIITIQEAGLDGFWLHRVLEEEGCESHVVDPASIATPRRRRRAKTDRLDGEALLRGLLAFKRGEPRVCSMVRAPTPEAEDERRICRERAALIGERVRHVNRIKGLLFSQGVGDYEPLRCDRRKRLVGLRTGDGRPLGPHLKAQIERELDRLELLLEQIKAVEEARDRLIAGLAESRSQDATASAEAQPSPVAQLMSLKGIGQEFAAVLWTEGLSRSFANRRQAGAYPGLAPTPWRSGKLEHEQGLSKAGNPRLRAKMLQLAWLWLQHQPKSALTQWFHRRLPGMTGKAARKRLIVALARKLFVALWKFTSAGVVIEGAVMKASA

SEQ ID NO: 416162 - protein, 411 aa, unidentified
MEVVYKRCCGLDVHKAIVVACVIIREAGKVLKEIRTFRTMTSDLLVLQDWLLAHGVTHVAMESTGIYWKPIFNLLEGNLKVLLVNASHIKGVPGKKTDVKDCEWIADLLVHGLLKGSFIPPEPIRDLRDLTRYRKSLSDERTREINRLQKLLETANLKLSSVATDVMGASGKAMLEAILSGSTDPAVLADLAKGRLRNKLSLLKEALEGRFRPHHRFLLGQILSHLGFLDEAIGEVSKEVENRLAPFSEEIELLKTIPGVKQRMAEVILSEIGTDMSRFPTHGHLASWAGLCPGNNESAGKRKSGKTRKGDRWLKRGLMESSWTVSRAKETYLSALHHRMVRRRGKKKATVAVAHAIIVIAYHILKHRLPYQELGADHFDQLNVTYIKRHSIKRLEDLGYKVILEPLQIAA

SEQ ID NO: 416163 - protein, 438 aa, unidentified
MTNVYAHLLDPALADGADPLAGDDPSAEPLEDRLYLPVGVDPHGDICGVVFAHPYPQSKEVLSQRIIRNNNLQDILWLIETGDRLAAPFQAQPVYIFEATNVFWRAQRNFLHRAGYATATVCGRQTNHARGTVTRAAKNDLKDAYNITKVFKQGESHATRILPEPLASLREYCRLHQFLTSYSVAIQNRMHCLRYQMHPEFDALFSDPVGATTLALMEAELVQPQRLLQCQLADVTDLTHQASHGKLDAARAAELQLSARFTFATPYAVAGSSFSLKLLAQTYRHIHSQLLPTLEQRIQDTLTATDFPIQHHLTEIKYFGPVVIGTFLSELGLPEWFTTVDSVVAWFGLDPTVSESANHPTGATHLTKRGTKYGRRMMWLVGRSWSQYVAEGRRLFLQERQQHQRPYDAAVCVVAAKLVRIAFAMVRDGSHFDLAKAF

SEQ ID NO: 416164 - protein, 377 aa, unidentified
MSNVRFIGLDVHAETIAVAVAEPHGDVRSLGTIPNRPESIRKLMKKLGPAAHLRVCYEAGPTGYVVYWQLTTLGVKCEVVAPTLVPVKAGDRVKTDRRDALKLARSYRAGDLTPVWVPDAAHEALRDLVRAREAAKKDQLRARHRLGKFLLRHGRRPPTAMHAWTQAYLAWVKSAVHFDHATQEATLLDYLHEVEHVADRITRLEGAITAAVETAPIHMLAVIEALQALRGIALVSAVTIASEVGELSRFTKPRQLMGYSGAVASEHSSGERTRRGGITKAGNAHLRRVVVEAAWAYRHRPAVGPTLRKRQAPVSPEVKEIAWKAQHRLHARYRALTARGKCKQQAVTAIGRELLGFIWAIGVHVESTIDRTKRVAA

SEQ ID NO: 416165 - protein, 343 aa, unidentified
MQTVTTIGFDIAKSVFQVHGVDAAGQVVVRRQLKRRQVIALFQKLPPCLVGIEACASSHYWSRELQALGHSVRLMPPAYVRPYVKRQKNDMADAEAICEAVTRANMRFVPTKSPEQQSGLMLHRTRHLFMRQQTSVINAIRAHLAEFGIVAPVGRRGVEELLRVVADPSDKRVPEVVRACLAALGSQLLRLKQQILDFDRMIMAWHRSNQTSKRLNCIPGVGPLLATALVASVADPKTFRSGRNFSAWIGLVPKQHSSGGREKLGSISKQGDRYLRSLFVTGALAVIRYAKIHGAKHRPWLTALLARRPTKVAAIALANKLARMAWAMMATGARCNYPASLRV

SEQ ID NO: 416166 - protein, 438 aa, unidentified
MSNKVIFNLDELFISVGIDVGADFSWMSIALPNQQFVGKPYKILHNKMSSLTTAVSKIKEAEELYSLESRIFLESTGIYHYPLFCYLRDKGFNCSVINPIITKNSTNINIRKVHNDRFDSKKAALVGLKPDLKVSLMPSDLALNCRNLCREYYDLMDNRSAYVNKLQGELRMAFPQYLGIFSKVTTNTSLTLLETYTSPSAFIAADRQEIIDTIKSTARFGLAYAQNKYNAIIQAANEANDFGYIIDSNIRRIRLYIRFIRKYDEEIASILDALHELVDTNEGTDFVRQIHLIETFKGSGFLSAVSLMGEIGDFSAFSKPKQLFAYFGLDPAVKQSGKFEGTKIQMSKRGSAIARRVIHTLALQSISTSRTGEAKNPVLRDYYLKKCESKPKLVAMGAVSHKVCNIIFAILRDNKPFEIITPQEHIKQYNADKCNIAA

SEQ ID NO: 416167 - protein, 354 aa, unidentified
MEKRKKLDKDETVFIGIDLHKRTWHVTIRTFDIELFSGSIKGVWDKLESLLKRYPDNEMIAVYEAGYFGFWLYDKLTDYGINCKITPPSLIPIEYGNKVKTDRRDSRKLAHFLAKGLLKNIYIPTLQERHHRQVTRRRRQLINDRVRVQNRIKAELQFNGIALPEPTGKWTKTYFTNLCKIKFSDRWMHESFKRSLEQYDFLCEQITGQTQLLKELSEKRLYKKRVKILQSIPGVGIIAAMEILLELQDMKRFRRADQLAAYVGLTPSQYSSADKIRMGRITCIGKNSVRAILVQAAWCLIRKDGVMRERYDKIKARAGGKRAIVAIARQLLIRMRRILLDGTLYVPGVIASTG

SEQ ID NO: 416168 - protein, 430 aa, unidentified
MTEQDLPVPLPSFAALVGIDWADRKHDVCLLDLDAGQREHLVLAHTPEAIDEWACQLRSRFGGRPVAVCLEQSKGALVYVLLKYDFLVLFPLNPARLKSYRQAVTSSGAKDDPTDAQFLLEYLECHRTHLVAWRPDDARTRQLGLVGEERRKAVDLRTQLSNRLRTCLKNYFPQALDLVGEGLHTRMACDFLLKWPTLLAAQKAKQKTLRNFYHSHNSRQEELIDRRLEAVRAAQPLTTDVALVQSYQLTVTLLARQLLELARAIEAYDKELARLMAEHPDAALFESLPGAGGALAPRLLVAFGSDRQRFSGPGDVQTFSGIAPVTRRSGRSASVHRRTACPRFLRQTFHEFAGHSVPRSAWAGAYYRLQRARGRGHHAAVRSLAFKWIRVIYRCWKERTPYDEATYLASLRQKGAPLLAYLPAASQAEG

SEQ ID NO: 416169 - protein, 406 aa, unidentified
MIKENYIYVGIDLHKETHTAVMIDCYNQKLGEITFPNRPADFPKLVAKVKKCNTDGKTIVFGLENAYGYGRALAVWLIDKGYLVKDVNTAISHRQAKYRKSDSDDAEAIALATLNMLDKLPDAYPNDAYWSLGQLVHRRDNIMKQRTRLVNQLHEQLCIAYPSYKQFFNDISRPTALYFWEHYPSRKYLKGKSVEDLRAELVPVSHNKCSTKTCEKILDAVASDKVKNNAYQDARDMVTLSIVSDLQHYDKQLAEVDKMLEQMYKMLGCTLTTIPGVNVITAVKILAEIGDIKRFSNANKLAQFAGIAPLHLSSSGKGKDVATKQGNRRLQATIYFLAIQMVQVSSKGTPRNSVVRAYYEKRKAEGKTSQQALICISRRLISIIYGMLKNGTEYRMPVVENAGETV

SEQ ID NO: 416170 - protein, 370 aa, unidentified
MEERINFFVGLDTHKDSISIAACEAGRDPARFVGTIGADVQGLFKTLAKAGDPTRVSVVYEAGPMGFGLYRELRRRGYRCEIIAPSMIPKRAGSRVKNDRRDCLRLAELSRAGELKAIWVPDEAHEAMRNLCRAREDAVTLRQKSRQQLQAFLLRQGRRYPGKTTWTKSHTRWIAEQRFDHAGDRVALAEYQLAVQSAEQRVQRLTVALTEATVGWRFEPVVAALRALRGIDTVAAVGLVAEIGDISRFATARQLMGYLGLVPSEHSSGNCIHRGSITKTGNSHARRLLTEAAWNYRFPARMSRALTERNEALAEPIQRHAWKAQLRLSSRFARLRSRGVQHNKACVAVARELAGFVWAIARQAATAPAN

SEQ ID NO: 416171 - protein, 455 aa, unidentified
MPKRTTGGGPDLKPVNLDAAAIDIGSKMHMAAVNPAGTDTPVRAFGTFTQDLHQLADWFKACGVTSVAMESTGVYWIPVYEILEQRGFEVILVNARYAKNVPGRKTDVSDAAWLRQLHSYGLLRGSFRPDAEIATLRAYLRQRERLVEYAAAHIQHMQKALMEMNLQLHHVVSDITGVTGMRIIRAIVAGERNPDVLATYRDVRCHSSIETIRAALVGNDRHEHVFALTQSLELYDAYQAKMLDCDRKLEVLISALNTKGAGPVGKLAKPRVKTKQVNTPTFDVRTALYGVLGVDLTEIHGLGPSLALKLIGECGTDLRAWPSAKHFTSWLCLAPGNKISGGKVLSSRTRRSSSRAAALLRLAATTVGRSETALGAFYRRLSSRAGKSKAVTATARKIAVLFYNTLRHGISYRDPGADQYEQQYRSRVLANLQRRAKSLGFVLQAIPGDANPAVS

SEQ ID NO: 416172 - protein, 429 aa, unidentified
MNSTRNKKIEQVKETTMIVGIDIGSEKHYFRAFNWRGIELTRKPVAFSNSMEGFNSFYNTIVELIQKSELEEALVGIEPTGHYWFDLGQFMGEKNIKFVMVNPHHVHKSKELDDNSPSKNDRKDPRVIAGLVRDGRYFYSYMPTGVYAELRNASNRRFVLVEEQTRAKNRLQKWIAVYFPEYKGIYTRIDAKGGLLVLKQAPTPEEIVRLGVEGIIKIWKDAKLRGNGHKRAMLILNAAMKSIGLKAGLTEARMEIQDLIEDYELQTKRLERVNDLIKELCQQIRYADKLLEIKGIGITTIAGFIAEVGDITRFDSAKELQKLAGLELVADSSGKHNGKTKISKRGRKRLRYLLFEAAISVVGKNEEFKEIHRYYTTREKNPLKKMQSLIAVACKLIRVFHVILTKGISYDASKMLKDIQHPGEPLKAA

SEQ ID NO: 416173 - protein, 410 aa, unidentified
MPVYCGIDWATDHHDVAVVDDDGRVVARGRVGNNAAGFAQLLTLLADAGDTATHPIPVAIETDRGLWVAALRETGRTIYPINPLAASRYRPRYAVSGAKSDATDAVLLANIVRTDADAHRPLPADTELAQVIRVLARAQQDAVWARQQIGNQIRDLLKDFYPAALVAFDQLSNGGLARADARAILAAAPTPEAAARLTPARLRQLLAKAGRQRRLDRDIDRLRAIFTDTYLHQPQQVENAMGIQLSALLRQFDAACAAADELAEAAIAHFERHPDAEIITSFPGLGNLAGARVLAEIGDDRTRFADARGLKAFAGSAPITRASGKKTVVLHRHIKNRRLAVVGAIWALGSLRASPGARRHFDARRATGDWNRQAQRHLFNKFLGQLHHCLQTGQLYDEHRAFPPPLPLAS

SEQ ID NO: 416174 - protein, 326 aa, unidentified
MKAVTWIGVDIAKDSCVVAQRCPEGFQTEEFPITPQGLKALGNWLPQQPRLQIVLEATGPYWRAFTSGFNSVAPEIPIAVVNPRRVRDFAKASPHASKTDLLDAQVLVHFAETFQPGLMEASANRADRQLRALTRHALQLTQQRDQVRDQMEKATADPDTPKFVLRSLKRHLQHLEKALKLCWSQARVNLDQDPQLTQTSRLLLSIPGIGEKTALTLISEYGAGLLQVGPKQLTRYAGLDVVFFQSGSSVYRLPRISKQGNWRIRRALYMAALSAIRHNPIVRSYYLKLVANGRPKKSALVAAMRKLLHQCYGVLKNQSPFDPAYA

SEQ ID NO: 416175 - protein, 318 aa, unidentified
MQTTPRFVGIDVSKAHLDVASRPDGPEFRLPNTAEGIATLVVRLEALSPALILLEATGGLERAAAVALAEAGLPIRIVEPGRVRHFARSIGPHSKTDALDARVLAHDAEAVRPEARDLPDERTRDLQASLDRRRQLVAIRVAAQDRLKQGPTAAVRADLEAHIAYLGAQVDRINTSIGEAIEADPDWTLRDEVLRSVPGIGPQTSRTLLGLLPESGKLTGKRVSALAGLAPRARDSGTVRGARTIFGGRAEVRTALYMASVSAMRFDPDLRVFYRRLRQAGKAAEVALTAVSRKLLTIANAMLRDMKPWTPRMTDVAA

SEQ ID NO: 416176 - protein, 370 aa, unidentified
MKPNFEPGKWFMQCVGIDIAKGTFTACLCMYEFDQGCSTAPVVFNNDKTGFNQFIKWSRKEALRGYPLRYVMEPTGVYYEQLAAHLSKLGLDVCVVLPNKAREFAKYEGILTKTDDMDAYTLGMLGCLDKRLKPWTPPSPIYRELRQMTRFVADINKVKTELRNHLEAFAHSETAEKSIVKHYNKLIDEIDKQLVSNQKAIREKIKQEPGLSERIDRITTINGVGFMTVVAVVAETNGFALITNRKQLTRYAGLDVPAHQSGPVDPKRHISKQGNVHIRTALYFPAIVSTQCNPQMKDFYGRLCARNTQSKMIGVTATMRKLLLLIYSLWKSGEKYDPTRDKPACDKQKKEAETTEGQPHGIDVGTLAEE

SEQ ID NO: 416177 - protein, 357 aa, unidentified
MRFYTHQHPFYCGIDLHARSMYVCIVNHAGEILLHRNMKAAPEPFLKAIAPYREGLVVAVECMFTWYWLADLCAQEGMAFVLGHALYMKAIHGGKAKNDRIDSQKIAGLLRGGLLPQAYVYPAPMRATRDLLRRRTHLMRKRAELLAHVQNTNSQYNLPEIGKKIAYKANRDGVADRFADPAVQKTIEVDLALITYYDELLKALELSILHTAKQHDAQTLYLLQTVPGIGKILSLVLLYEIHDIDRFASVQDFVSYCRLVKCAKESAGKRLGTSGKKIGNGHLKWAFSEAATLFLRNNPAGQLSLARLEKKHGKGKALTILAHKLARAVYYMLKRQTAFDMDTFLHGEGSRAGEPDV

SEQ ID NO: 416178 - protein, 335 aa, unidentified
MTKVMDAVSVGIDVSACTLVVALERDHQPGRQRREFPNTAAGHQVLVQWLSKSATAVQVCLEATGLYSLDLALALDRAEGIEVMVANPRAIADFAKALLQRSKTDQLDAEVMLEFVRRMPFVPWQPPKPHRLDLRALLRRITGLKLASQQEKNRLHSVSQAAEITPLVRKDIQSHLVQLERHIEKLEQQAETIVQVDPELAQQFRHLVSVRGIARVSALHILAELVILAPDMTARQWVAHAGLDPRHHDSGPSIHKPARISRAGNRYLTAALFMPALVATQHDPNIRAFYQKLVDRGKTKMQAIVAVMRKLLHALHGMLRTDSDFVGEKFYVIPS

SEQ ID NO: 416179 - protein, 356 aa, unidentified
MNKRSKLDFSGQPIYIGLDVHKKSWSVSIFTQHGEYKTFSQPPEAETLSQYLQHHFPGAQYRSVYEAGCCGFWIHDQLKDKGIQNIVANPADIPTRDKERRSKRDRIDCRKLARALRGDEIEGIYTPPRWKLEDRSLIRTRLSMGRKQTRCKNQIKSMLLFYGVGIPERREMGHWSRRFIRWIEKIRMERASGDMALQIHVEELCHMRQIIAKLNRAILALARTDPYRSWISLLKTIPGISTLTAMILLTELYEITRFRSVDQLCSYVGLIPDTQSSGEKEQVGGMTRRHHSQLRWLLIEASWIGVRKDPVLMDAFQQYSKRMRKTKAIIKIARKLLNRIRYVLKHQAEYVTGVIE

SEQ ID NO: 416180 - protein, 394 aa, unidentified
MSATHATDPTTTTAPVLYLALELSWTSWKLAFTVGAGQKPRLRSIAARDTGTLMTEIHKAKLRFGLPEGTPVISCYEAGRDGFWLHRYLRHQGVENLVVDAASIEVNRRKRRAKSDGLDAAKLVGMLIRWHLGERKLWGVVRVPDVADEDRRQLHRELIELKAQRTEHTNRIKGLLAGFGLAARIDGEFPRRLDGLRQWDGTELPDELRGRILREYQRWELVGRQIHELEAERTRQIRDPETVQGERVRQLLQLKGIGENAAWLLVREFFGWRGIRNRRELASLAGLAPTPYDSGESRREQGISKAGNRRVRWMMIELAWGWLRYQPSSELSRWYQRRFAAGNTRLRKVGIVAVARKLLVALWKYLETGEVPAGAEVVEKKKFRGAGAGRRIAS

SEQ ID NO: 416181 - protein, 316 aa, unidentified
MIIVGIDVSKASFDAAWEREGHHHTQCFDYTDEGIEALLAQLGGEAHFVMEATGVYHSRLALALYQAGAQVSVVNPLVIKRYGQAQLSRVKSDKADAQLVLSYAQHTPLTPWAPSSEEIEALRQAHSYLDDLSGERTRLINRQEAHRHQPTPSAFVRQGQARRLKALERDIRACEAHLEVLVKKSFPELYARLLSIPALGPKTAIEMIIITEAFDRFTDIKALCAYVGVSPTTWRSGTSLKGQGHIAKLGQGRMRQLLYLCSWSAKRCNPPCRALHQRLAAAGKPRKLINIAIAHKLLRQAYAVATQKTVFNPNFA

SEQ ID NO: 416182 - protein, 303 aa, unidentified
MSSSTLDARVGRDGVEESFKNNVEGAENLILFCQEHEVELVVMEATGGYEKAVFCQLWQAGVPAAIVNPRSVRWFAEAMGCFEKTDRIDAGLIAWYAQVKRIVAQEPAKETQEQLAALVTRLRQVTEMRASQLNQKRLVRDAEVLASFQELISLLTRQIRVLEDKVAKLIEQDPLWAKMDEAFRTIKGVADRTVARLMAEMPEIGTISHKAISKLSGVAPMARDSGNLKGKRAIRGGRANVRSILYVVADIVRRYDADFAEFHKRMLAAGKPRKVVRIALAHKLLVRLNAKARDVRQNFLPAA

SEQ ID NO: 416183 - protein, 351 aa, unidentified
MSHKTAATVAHTIGIDTGKNTLHLIGLDDQGAIVLREKIARGRIAARLANVPRCLIGIEAGMATHYVARELGALGHDVKQVPPAYSKPFRQGHKNDFRDAHAIAEAVQRPSTRCVPVKTDDQLDLQALHRVRSRLVGQRTAVINQIRGFLLEHGIAVRQGLRFLRQQLPDILAKRSDVLSPRMIRIMEDLSGDWRRLDERIEHITKEIEVLAGTDVNCGQLMTVPGIGPIVASATVAAIGNGAAFARGRDFAAWLGLVPKQMSTGDRTILGRITKRGNRYLRMLFVQDARAILLRSKSWVKHSFGPWLTTAVRRLHRNILTIALANKLARIALSVLIQGRSYETRIVPAAA

SEQ ID NO: 416184 - protein, 353 aa, unidentified
MTFYIGVDLHPHQQTVAWCNTETGETQTRDLKHDPETVREFYSSLPEPAIVGIEASTRATWFENMLFETCHKLFVGNPVLIRKRATSRHKNDRRDAELILQLLLHDEFPKIWRRPIESNRILEMVRLRQSLVRQRTQVCNRLQAIAHDLGLPKGRVRGVAFQAILKAAPADETTSIRRSHLFSLVGTLNEHIQKLDKWLEAKAAEDNNVQLLLTQIGVGYLTALVTVHTLGDVSRFSRISKQVASFAGLDSMERSSAGRIRFGRVSKAGSPLLRYQLGVAAKMASRSDARLKSFYTRLAKKKPKAVARMAVSRKLLIKLSIMLRDKITAEEFDQRGRTVGNARVLQGSERTVV

SEQ ID NO: 416185 - protein, 337 aa, unidentified
MSYLGVDLHTNSFTVCRRTKQDKETVQTFPMARLGHFRKTLRKRDLLAVEATGNTAWFVSQIRDRLRKVTVVNPFQFEVIRRSVSKNDENDAKALAFFLSKGMLPEARMKTKENAQLHSLATTRDKLVKQRTALINKIHNVLNSYGIKFKKESLGTEKGLKSIWAYEWDIIVKIELEVLVEQIRSLTKSIKTLDKEMSDHGQNLDGHESLTSIKGIAARSATVLLSVIGDVNDFADENKLAAYFGIVPRVSNSNETVRHGRITKRGSKLGRTTLVQCTLVAKRYSPYLRQYYERIKSHRGSGKAIIATARKFLGIIYNTLKNGWVFEDFPNFVIANT

SEQ ID NO: 416186 - protein, 433 aa, unidentified
MALKIIRMICCGMDVHKDIIVATIGITDPSTLVTEYLQETFNSFNSDLYRLGQWLTSHFCSDVCMESTGKYWVPVYNILEELGFTVCLAHPKYTKAIKGKKTDKRDSKWICNLYKYDLVRGSFIPPKAIRELREISRYYHKLIGMASSESNRYQNCLTVSNIGIGSIFTDVNGKSAKRVMEAVLNAEDPNKLTEQDILKLVHKSCKKKDQLLDAIHGCRIESDQRFKMMEVQKHKEELDKHITACFAEMFKRASHFFDQFLHIAEIPGISVLSSILIISEIGVDMSVWDNARQVCSWAGLTPGNNESANKKKSTRITKAGQYLKPLLVQCALAAIKDPNGYFGIKYHRIKKRRGHKKAIVAIARMMLISIFHMILTGESFKPTDYEELMNPKPHKPRLTVKDAVDFLKQSGEDLDEIIASLKAGPPALNASPS

SEQ ID NO: 416187 - protein, 380 aa, unidentified
MSDASQPAVAFATFVGVDLHKQTVTLRAVNAAAEPIAALTCDTKCVQRIEQWLLALPRPSHLAVEAVGFVEWFIDRFRCCVDRMDLADATALANRRGKRRKNDNNDALDIAVRLARGDCPLGWIADEPVMQLRKLARHWRNLSRTLSRAKHCMRSMLLAANLRGPKLDGAGAQKWLLANGHLLKDVQRQAFGDFVDLVQLVERQREALRRKIIFANRQDRFAALLAILRSVPGIDEVWGCVIAAEVGDFARFPNADALEFWAGLTPDNQSSAGRTQSGHITKAGSATLRWALCKAAVTRRRAAARSGSFCRSDAKQEAIRQRLIRRVGKARANVAMGRRLLRILFAMARDGTVYQRGPSTGHEKAANQARLKKRQRSKAA

SEQ ID NO: 416188 - protein, 339 aa, unidentified
MELYSGMDLHSTNTYSAIMDENRKRVIDRRLPNQRKLILDFLEPYRADLKGIVIESTYNWYWLVDMLQENGYRVHLANPSAIQQYSGLKYVDDRHDAYWLADLLRLGLLREGYIYPKQIRPIRDLLRKRAHLGRLRTSLLLSAQNIVLRNQAIKVNSEDIKKLTTDLLTPHLQESEGLFLTGKISKDLIDAFTRQIKTIEAWVMKRLQPDKLFSNLLTIPGVGEILAMTILLETGYIARFPKVGNYVSYCRLVASQRTSNDKIKGKGNAHNGNKYLAWAFSEAAEHARRHYPMCRSFYNRKLSQKNATVAHCALARKLSRSAYYIQKDQVAFDETRLFC

SEQ ID NO: 416189 - protein, 369 aa, unidentified
MRKRIKYIGLDVHKNSISIAIAEDGREREVNFYGVINNDLDQLHKFLRKQISQGAEPRCVYEAGPCGYNIYRSLSDKGIACVVTAPSQIPKKSGDRIKTDRRDSKNLARLHRAGELTAVYVPSSKDEALRDLVRAREDSVNALKRAKQQLGAFLLRHHICYSGKSKWSKAYFNWLSDISMPHPAQQITIQEYIDTVHDCKKRMERFSEQIRQLSGETQLNNLNKALQSLRGVSEIVSAVVVSELGDLTRFDSPANLMAYLGLVPSQHNSGDKKRPGNITKTGNGHVRRALIEAAQAYRLPARKSRAIAKRNEGLPQAVCQIAWKAQVRLCDRYKRLVFRGKNANLVKTAIARELAGFMWSIAHAIPKTA

SEQ ID NO: 416190 - protein, 424 aa, unidentified
MKVTYQTCCGVDVHKSFLVATIVKTTGGIEPSYQKKRFSTFNNSILEFKQWLLDNDCHDVCMESTGKYWIPVFNLLEDEIHVVIANPKWVKAVKGNKDDTKDSKWIGDLFRLGLVKGSYIPCKKVRILREYTRYRYKLVSCRSSEKNRYQNALTVCNVALDSVVSDIFGKSSTSIIDYLLEQSGTSINHEEIASKLLRSLKSKEDAVIESIEGYQMTDAQKYRMRLIRAHMDYITAEINDVDKMIENMISSNPDFENAVQFLCTIPGVKRDSAVTIISEIGTDMSQFGGAKRLCCWAGLTPGSNESAGKKKSVRITRAGVYLKPALVQCAHAAVKSDKSPYYKKKYESLVKRRGKKRAIIAIARMILTAIYQMLSTGEQWNPSDLYKIDMPAPLFEKQKAKAIKQAKKLLQREGLLPPDEPLAS

SEQ ID NO: 416191 - protein, 412 aa, unidentified
MDAILECCCGIDLHKDSIVACILSGATDEVPSVIMREFGTQYDAITELAQWLSGHGCKDIAMESTGSYWMPLYNRLSELGANCTVVNAQRVKNVPGRKTDWNDARWIGYLFRHGLLAASYVPEREQQILRSHTRALESLTQDRTREKNRIEKLLQAEGFKLSSVLEDIFGLTGRKLLQVLYTKGRVSLSDVQKHRSNRCKCTAQQIASAMKGTLPAPLRKLLQFNMRQIEEYDRQIKELECLIHEIIAPFLQAVNLIGSIPGIAQQSAIQIIAEIGSDMDTFQSAEKIAAWAGLSPRNAQSAGKKSPHASCQAISTSSASSTSVPGAVPVPKTPLTYAVGSGLSSGAPASKRLSSLSPESSSFPSGPCSSPVSFITLTTAVRNSLNPATFSLFLSLLCATAFFSSLVPRLFS

SEQ ID NO: 416192 - protein, 347 aa, unidentified
MNIFAHEPIIGLDLAKRVFHAVELNPAHPGKPVARKKLGRSQVLSFFANHPPAIVAMEACASAHYWAREIEKLGHEVKLLPPRDVRPFVSGNKNDYNDALAIAEASLRPTIHVVRVKTAPEQDRQAWHRMRDLLVGQRTAQINQIRGLLGEYGVVIPQGVRQFYKAIPEILEDGENGLSDRFRKLLNDAYAHLCGVDGRIEAYEQELIEANRQDEEIQRLQTIPGYGPMVSSAFKTAIGDGRAFDSGRDVAAYLGLVPKQHSSGDKTVLLGISKRGNKRLRTLLVHGARAVVAHAEKKQDAFSRWVVELIARRGSHKAIVAVANKLARIGWAVLVSGKPYQPKLVAA

SEQ ID NO: 416193 - protein, 407 aa, unidentified
MEVVYRCCCGIDVHKKMIAACLNKGGKQELREFGTMTNEIKVLANWLLEAECEMIAMESTGVFWKPLYNLFELMGLDAIIVNASHMKALPGRKTDIKDAEWIADLLRHGLLRASYIPSREQRELREIARYRKSLIEERSREVNRLQKILEGANIKLDSVVTDINGKSARKLLDKIIANETPDAQEVAQLIHGSMLPKLDQIMPSIEGITTPLQRKLIAQIVDHIDDMTKRIADMDDLIKGYMEQYEEAIAAIDELPGIARRSAEVIIAEIGLDMSRFPSAAHLCSWAGVCPGNNKSAGKRSHGKTTKGNKTLKSILTQCAKAARNSKGSYFSAQYQRIAARRGKNRATVAVAHSMLIAIYHVLKNEVAFNDLGSDYYDNFNREHKIRGYLKRLQALGWSPELATVPA

SEQ ID NO: 416194 - protein, 338 aa, unidentified
MELKRISVDTSKAVFTLHGIDQQDRPMLRCNLSRPAFEAFFLKLPATEVVLEACGGSHHWARRLTDMGHHVRLIPPQYVKPFVKRGKNDRNDAEAISEAAGRPGMAAVPVKPAERQARAMIVSVRELLVRQRTQAINALRGHAAEFGVIAAKGTANVAALCQRVAQDAQMPEAAGRMLALLARQVSHLDAEIAALDAQLREAAQADATACRLMAAPGIGALGAITLALTVDASQFRSGRHFAAWLGLVPKQRSTGGRQRLGGISRQGNERLRQLLVVGAMAVIRHAKPGSKSASAWLLKLLERRPRKLAAVALANKMARMVWAMMARGEAYRRQPVAA

SEQ ID NO: 416195 - protein, 337 aa, unidentified
MRKITLIGIDTAKNVFHLVGIDKRGNYTYRKKLSRRQLLPALVRLDPCEVVLEACAVSHHWARQIAQIGHRVRLISPQHVKPFRRGQKNDYRDAEAIISAALSPGMHFVGVKRVEQQAEQALHRVRSRLLSHRNAAASELRGLLGEYGLAFSKGIKPLRAGAVRFADSEQAQALGLVDLVWDVLEELDQLQQRLDGYTHRIEQRVRNDVTSQRLRDELLGVGPLSASALRVKVADVRDFTNGRNFAAYLGMAPGHRGTGGKVKIGKIRRGHDRYLRQLLIHGARAVVQHLGDKQDPQSRWLRGVLERRGFNIAVVAQAHKNARQAWAILAKEQALQS

SEQ ID NO: 416196 - protein, 354 aa, unidentified
MKRRTKYVGLDVHQAMTVASVREEGGRVVARTVVATEEAALVEYFSGMRGAVHVAFEEGTQAQWLHDLLMPVVDRVVVCDRRGESRRGNKGDQVDADQLSELLRRGGLRAVYHGSADRATLKEFTRTYQNVVEDTTRAMLRLKALFRARGIKTPGKGVYHPKQRAQWLAKLPERGARFRAEALYAQLDVLRELRPKAKAAMVAEARRDPAWSVLRSIPFLGPVRVALLMATMRTPWRFRSKRNLWGYCGLAVVTSSTSDFTLVEGRPVRRRRKPLTRGLNRNHNPVLKDVFKGAATAATGRPGPLQDFYQAMIARGMEPELARVTLTRKLVAVTLRLWKTGESYDPTMLTVQAR

SEQ ID NO: 416197 - protein, 394 aa, unidentified
MKLIGIDIGKNKHFFCVMDQQTGEIISQPVSFSNDKEGFDFLVQKIKSYPKDSILIGMEDTGHYHFALLKYLLDLQYTVALINPKTTDFNRKMQGGITKNDKLDTINICDVLDTPERKKQYRITKVNSFDLYEQKQLTRHHHNLKEEENVYKNRLQKCIDIVFSEFNKLFNSKYGIVYMNILKMFGSAENIANTDIRTIRKCFEIEGRGNRISLTPERLKECARSSIGISSSAEVIQIKHLTAQIELIEEQLTEIDKKIEEFSIQNNSPILSIPGISHFSGTSILAELGDISNYSKPSQIIKFAGVAPLHYESSQFNAQHTAITKKGSKYLRKTLYQIILPVIRHNPVFNKYYQLKISQGKGHRCAQGHCVRKLLRIIYHLLKTNQQFDPQLLR

SEQ ID NO: 416198 - protein, 341 aa, unidentified
MRIAVLGIDLGKNSCSVVGLDAAGEVVVRRRMRRETVIAFAHKLPGCVVAMEACCGAHHLGRILTGQGHQVRLMSPEYVRPYVKAQKNDDRDAEAIAEAATRPTMRFVTLKGEEQLDMQTLHRVRDRLVAERTSLMNQIRSVLLERGHIVPQGRARLAARLTEVLYGPAPALSARMTMLVSDMRALWQALDERIAAFDREFAEAAAQDKHARRLLTIPGVGSLNATALVAAVGDARTFARGRDLAAWLGLVPRQATTGGKPRLLGITKRGSRYLRKLLIQGARSAMPTLRKTDTRLGAWLRGLLARAHPNTAVVALAAKLARIVWALLRHERTYEMPALPA

SEQ ID NO: 416199 - protein, 429 aa, unidentified
MKIIYPRVCGIDVHKKFIVAVICISESVEPVYLKKRFSTFHNDLIRFRDWLIQNDCQNVCMESTGKYYIPVYNILESHISNIVVANPKWVRAVKGEKDDDKDAKWIADLFKLGIVKSSFIPQKDFRILRELTRYKYKLVNMRSSEKNRYQNALTSGNCKLDMVFTDIFGKSASNIINLILSNNPYTDEDILSKVHKNCKASPDMILNSINGTDLTPVQKSRIELVNNHIKQLSSNIQRLDKLIDLMIEPYEDYISFLCQIPGVSRNSAITILSEIGVDMNQFTSTRRLTSWAGLTPSSNQSAGKKKSVRISRAGVYLKPCLVEVAHATVKDTNHPYYANKFNKISKRRGKKRAYIAIARKILVAAYHMLLTGEIWNPADLAEVETPVEQRIKYVKNNLKSDIKQLLDIGLTVEELTLMIQQNANNIATQ

SEQ ID NO: 416200 - protein, 474 aa, unidentified
MQTKTTIEPSVGQPQNAGPTPKKNRGRKRARLQPIIHPHAAGIDIGARAICVAVPEDRAEDSVRTFRTFTADLLALADWLVACRITSVAMESTGNYWIPLFQILDARGLEVVLVNARHVRHVPGRKSDVLDSQWLQYLHSVGLLRASFRPAQEICAVRSLTRFRETLVAQAADQIRHLHNAFDQMNVQLHHVLSDLSGTTGLAIVRAILAGERDPKVLARHRDARVKASVQTIEESLRGDWRPEHLLVLKLAFASWAQVQAQLVELEAEITRAIRALAPKVDLAAQPLPADRKRRSIASARLELRAEFYRVLGTDLTAIPAVSALTAQAFVTEVGTDVDRFATAEHFASWLGLCPGTKISGGQVLCARSRPGKPRLALALRQSALSLLKQHSALGARYRRLRARLGAPKALTAMAHQLARIMYALVKERCPYDETRFARLEEAYTRHQRTSLEKAARRLGYQLVLDPNFTESPA

SEQ ID NO: 416201 - protein, 386 aa, unidentified
MQHATTLPAPQRTCSRGDCPTLFVSLELSRSTWVVTALAPGSSKMSKHTLVGGDGRKLLDLLARLKSKAEQRIAAPVKVVAIQEVGLDGFWIHRLLEANGIESHVVDPASIAVPRRHRRAKTDAIDGETLLRTLMAWQRGEPRVCAMTVPPSPSEEDRRRISRERAKLLQERVRHTNRIRGLLFGQGITNYNPLHKNRREGLEQLRTGDGRSVPAHLKSAILREIDRLELVLRQIGEVETERDEMLQLTQPSSPAALLMRLKGIGAEFASVLYLEGLFRRFDNRRQLAAYAGLTPSPWKSGSIDQEQGISKTGNPRLRTTMVELAWMWVRYQPTSALSCWFRQRVGSKRGRIRRISIVALARKLLIALARYVSHGEIPAGAVMKAG

SEQ ID NO: 416202 - protein, 448 aa, unidentified
MGKPQVIDDQEHERVLEKVAAIDVAKKDGMVCVRGPHRSRPGERQSTVWTVRATMNEVRSLAGQLAAAGVEKVTLESTSDYWRIWFYVLEAAGLDVHLVSATQVKQISGRPKTDKLDAQWLARLTEKGLLRPSFVPPAEIRVLRSYTRARTRLTQDRTRCFARLEKLLEDALIKVSSVASSLTTASAQDMIAALIAGERDPQVLAGLARGRMRAKHAALVEALTGMFDDHHGQIAQILLDQIAFCDKQIARLTMLISEQLATIPATWGIDADGTTGPGAGTSPGAPVLNTVARLDEVPGLSAELTSSILSETGLDMTKFRTAGHIVSWTAICPRAHQSGPRSRDGKSHGNSYLRGYLGQAAIAAATTDTFLGERYRRIARRRGNAKAQVAVARSLLVIIWHLLSNPEARFADLGPGWYQNKINNNRAARNHISQLEALGYQVTITKAA

SEQ ID NO: 416203 - protein, 365 aa, unidentified
MFFFGIDWANEKHDICVLDSRGKLVTQFSITQSLSGFQRLERMVLRYGLANVQLNIERSDGLLVDWIMARGWALHITPAIVVARRRPRRSKSDLSDAYLLAYLLRLQDPDCRLLSRSTPTVLHLRELVRALDSTLAEQRRLGNRLRYVLLQYFPSALQLFSRVEHLITLAFLEHFPTLEAARGLTPHALKRFLKKNHYYRYDRIPQLLATLRAPMPCATIADGYVAQVQVLVPMLRQIHRTIHQLEKDIAVVFETHPEAAWWRHLPGAHGGLTSARMLAWVGDDRSRFPTAQTLQAIAGTAPITRRSGKSLAVEFRRACSHPLRKAADDFARQSVRHSAWARAYLDAQVSRGHNRARAYRALANR

SEQ ID NO: 416204 - protein, 432 aa, unidentified
METPNPVSAQPYALFVAIDWADKKHDVCILDPQTGKKESLVIKHTPEDLIDFVNNTLRGRLPSPEDRVALAVELKRGPLINFLSAYEFIDIHPIKTTTLNYFRKAFHPSGSKSDPLDTELILDVLTKHPDRLERPWKPDCAEVRLLGELTSSRRDFVDHATRVSQALRAALKEYFPQAIDILGPDLTSRTACDFLQHWLTLEAAQKAKPQTIRGFFYQHNCRSEKVIARRLELIEKAVPLTRDKAIIEGKSLKVIYLTKELHTLRAAIAEYDRRIKELFATLDDAFIFASLPGAGAVLAPRLLAVTGTQRERFADSAALSQYNGSAPVTSRSGKLIQVHWRWAAPVFVRQSYVEFAQWSIVHCDWARAYSALMRERQVPYQTQLRKIAYKWSRIVYRCWVNRTAYDNAAYEASLEKSNSPIWKKLQELRNAA

SEQ ID NO: 416205 - protein, 350 aa, unidentified
MSEISIIGLDLAKQVFQVHGADKAGRCLLRKQLKRREVLAFLAKLSPCMVAMEACGTAHHWAREIAKLGHEVRLIPPAYVKAYVKRGKNDAIDAEAIGEAASRPSMRFVPVRTVEQQSLAMLHRARDLLIKNRTRLVNALRSHLAEFGFIAAKGIGKLPDLIKIVSEAPKEALPDMVRAALSGFLDTIAALNLQRAAIEKRLMAWRKSDAQSKRLDTVPGIGLIAATALSALVPDASLFKNGRHLAAWLGLTPRQDSTGGKTRLKRISKAGNGYLRRLLVLGATSLLRSLKNKATPLALWVQGLLARRSKRATTVALANKLARIAWALMAKGAAYKPSAAAHLLAQAGCA

SEQ ID NO: 416206 - protein, 320 aa, unidentified
MMTQNNPVVVGIDVAKDKVDACIRTVTERKTCRTTAAGQRGLIGWLRKHQVGKAVMEASGGYERVWVRALRQADIEVRIVDPKRVRSFAESAGRLAKNDKIDAEMIAWFAETFSEAPSQVDDPAHEEMKALVKGRKSLIDVRARLEMQKEHELPALVRKAHARLLKKLAGEIATIETAIVAKIKTTPAFAKRAEIIQSVPGFAEATAITLLAGLPELGQVSNEVAAALVGVAPYDDDSGKRHGQRCIKGGRRWVRNALYMPCVGAATLNNPVFKAFYQRLIAKGKAPKVALVACMRKLLVILNTMIARGEKWDTKRYQML

SEQ ID NO: 416207 - protein, 338 aa, unidentified
MTEAQSTAPTIEPERFVGIDISKAWLDGAERPGGATWRVANDDAGWAEVVARCTAGGADGAAVPTLVVVEATGRYELGVVTSLDLAGLTPVVANPVSTRRFAQSLGRRAKTDRIDAAMLASYGERLRPTPRPIPAATAQALAEVLTRRRQLTKMLVEEKNRRAQATPLLTPGVDAHIAWLAEQRVAVDQLLASLVASDPAWQARVETLASVPGIGVLTATVLAMGVPELGRCSAKEVAALVGVAPFAVESGQHRGSRHIAGGRGAVRHALFEAVLSTIRWQPTFRAHYRHLKAKGKAHKVAMVACMRRLLGVLTAMVRDGLTWGDTDLAQGRFLPDAA

SEQ ID NO: 416208 - protein, 416 aa, unidentified
MIAAVVERCAGIDVGKKFVMVCVMTGAAHEEPRAETRKFSTVRGELVKMREWLQAEGCTHVVMESTGCYWKPVLNVLEDDADYRVAVVLANPQHVKGLTGHKTDPHDARWLAHLLRHGMVRPSFIPERAVRDLRELTRLRRRFIGAGAQERNRVQKVLEDANVKIGDVLSDVFGLSGQLMLEAMVKGCTDPAAIADLALGVARKKIGQLEAALEGHQMRSTHRLLIGHSMRHMAFLAQEVDQLDEEIAGLIGEAGLSPQYELLQTIPGIQKTAAAAMLAECGGNMEQFRQPRSFCCWSGVAPGNHQSAGIRRRAPATPGNPNMKAALVESGWSAARTKDTEFEDRYHRLKVRLGHKRAIVATAHSLALTVFEVLRSGPPYTPRQPHFKARDIARLRRHHSRRLRTLGRWLEQQPSS

SEQ ID NO: 416209 - protein, 305 aa, unidentified
MTVTTLARSITGGVDTHLDVHVAAALDERGALLGVESFPTTESGYKLLLGWLSDFGSIVLVGVEGTGSYGAGLTRHLQAERVRVVEVDRPNRQRRRRKGKSDPQDAITAARAALSGDAAGEAKTRDGNVESMRVLRVARASARKGRTQALNQMRGLISTAPEPIRAELRGLNVFHLLERASTYRPGAKRDIVSLTKLSLRMLARRAITLEEEVSEIDAILKPLVKETAPRLVGALGVGTDAASALLVTAGDNPERLRDEAAFAHLCGASPIEASSGKQERHRLNRGGDRQANSALLAHRDHADGL

SEQ ID NO: 416210 - protein, 411 aa, unidentified
MDTLYPRCAGIDVHKANVVVCVRCCDRPGKPSEEVRTFSTMTRDLLALSDWLAEHGVTHVAMESTGVYWKPVFNILEGRFQVLLVNAEHIKQVPGRKTDVKDCQWIAQLLQHGLLKASFVPPAPIRELRDLTRQRTQLVAEKASAANRIQKVLEDANIKLAGVATDVLGTSGRAMLEALIAGVSDPEQLADLARMRLRAKIPELRLALQGRVTEHHRFLLRMHLDHIVHLEELIGRLSGRIEEVMAPFAEAATRLATIPGVSQRVAETVVAEIGPRMEQFPTAGHLASWAGMSPGNNESAGKRRSGHTTHGNRWLRQMLVQAAWAASRTKGTYLAAQYRRLVKRRGAKRALVAVGHTLLVMIYQVLKKGTVYAELGADFLERLEPERLTRQLVKRLEALGHKVTLEPRPAA

SEQ ID NO: 416211 - protein, 361 aa, unidentified
MAQSTTVVAFDQHAASTVAAVLLPEQSTPALHTLPSDSPTILRFVRRLGVERVTCCYEAGPCGFELQRVLARHGVACEVIAPALIPRRPGDRVKTDRRDACHLAILYRAGALTAIHIPTEQEEAARDLLRCREDIRVDLLRARHRLSKFLLRHGRRFTGTKKAWTKQHAAWLQVQQWPLPALEQTHRAYVRAVDETLARLHAVEGELRDLLTVEPLRTRATRVRCFRGMDDLTALTIAVELGDARRFPSAPKAMAFTGLVPAEHSSGMKKARGAITKTGNAHLRRVLVEAAWHYRHHPFVGRSLRLRQRGAPAVVIDHAWHAQQRLHRRYRRLEARGKPQQHIVTAIARELTGFVWAALAL

SEQ ID NO: 416212 - protein, 415 aa, unidentified
MNKLYAGIDVSSKTNYGYLMKPDGSKHSSFSVKNSPDGSKIIADNIVSALTSLNISTVVIGVEATGVYADNLMIYLRKDNGLAQFDCNFHVLNPKQVEKFKQAYSDLPKNDPVDAFVIADNLRFGRITKPLYIDDDYKYKALQTLTRARFFAVQNLTREKQRFANYLFMKYSGLAQEKVFSSQSGATCMALVDEFETIDEIAYMDIDELATFIAEKGRGHFPDPQVVAKAVQSAAKISYNLPMPLNNSINQVISVTIANIRAMKEPVRAFDKAIQKQLELIPNSKSLISVKGIGQVYAAGIISEIGDINRFANHAALAKYAGIAWSENKSGNFVGEHSNLIKSGNRYLRYYLVEAADSLRKCDSEFRRFYDLKYKEVNRFRHKRALALTARKFVRLVFRLLKDNRLYTPPELFKR

SEQ ID NO: 416213 - protein, 339 aa, unidentified
MNRIVIGVDIAKRVFQLHWVELQTGEIVALQLKREKFLEHFANRSSCVVGMEACGGSQHWARSLQKLGHEVKLLSGRMVKPFVGGNKNDAADARAIWTAMQQPGIKVVAVKTEEQQAVLALHRMREQLVKFRTAQSNGLRGLLTEYGEVMPQGRAGIKRDIPGALGRLSDRLPAMVIETLREQYARLSELDEQIGQIERRLRHWQREDTATQRIAAIPGVGLLSATAAVATMGDARAFKSGREFAAWLGLVPGQTGTGGRVRLLGISKRGDKYLRTLLIHGARSVLTSSKSPPQWLAELMKRRPKNVAVVAMANKMARTIWALLAHERAYQSGYVRRLA

SEQ ID NO: 416214 - protein, 346 aa, unidentified
MMIIGCDFHPSWQQVSWLDTETGETGEQKLVHATGDAERFYRQMPVPSLIGMEATGNSQWFMELVEDLGHALWIGDAAQIRASYVRQQKTDKRDAGHIRKLLAEGRFPKLWTPDREQRDHRQLVMHRHKLVQIRSRVKNELQHLSLNKGMQKQNKLWSAAGQKALRELPLKPWAACRREDLLQLLAMLDQQIGKLDAAVQQAAEHNPHAKLLMTQPGVGPVTSLAFVLTLGDVSRFPRGKQVASYLGLIPREHSSGGRQMLGSISKQGNRLMRALLVEAAQTAVRYDPGFRKEYLHRCHQKPKGVAKVAAARKLAVRLYWMLRTQKPYPEIVRIESSPRVALVGAS

SEQ ID NO: 416215 - protein, 339 aa, unidentified
MTVKTIGLDLAKDVFQVHGISENGRVIFNKAIKRAKLLPFFEALPPCRVGMEACGSSHHWGRTLRKLGHDVRLMPANYVKPYVKRGKTDAADAEAICEAVRRPTMRFVEIKTEDQQAVLSIHRSRDLAVRQRTQLANMIRSLLREFGHILPIGIEAVTAFAKRHHDGDHPDMPEIANGMLGIQCYQFIGLNKRITGYTKMIEQHAMLSTDARRLMRMPGIGPITASAIVATIGDAKQFRTGRDLAAWLGLTPLNKSSGGKERLGKITKAGDRYIRKLLVVGMTSRAVMAKRSPEKVDLWTAKIIAEKPFRLATVAMANKAARSIWAMLTKKQEYRQPAF

SEQ ID NO: 416216 - protein, 393 aa, unidentified
MERPMSQAFDASRSLTALEQHNTIIAVVEMSQSKWLVAAVVPGIKRQPLKKLDADQESLLKLLHRWRKEAELAGHPIKRVVVAYEAGRDGFWLARWLRMHDVEAYVIHPTSIAVSREHRRAKTDRLDTELLLRALLGWLRGEKRHCSMVAIPTAEEEDAKRPNRERDSLVTEQTRIVNQIKAILIRFGIRSFRPKLRKAEQLLKDLRTAEGSPLPDNTRAEMYRHLVRLRMVREQIRAVETERLQKLKAEHGRKKGPHAMVRLIARVVGIGVETADMLVNEVFSRRFRDRRAVARYAGLTGSPDESGKRRREKGLARAGNARVRTGMIQLAWRFLRFQEDSALAQWFQTRAADGRGSTRKTMIVALARKLLIALWRLVTTGELSDGIVLRPAS

SEQ ID NO: 416217 - protein, 299 aa, unidentified
MKRKVYVGMDVHKETISFAYLTSKSKDVVKEQQIKHEETRIKKFFRKLEDEGYTVECCYEAGVTGYPLYRYLKSLGVNCILVAPGKIPRQSSDKIKTDKRDAIKLARLLRSGDLESIHVPNEEDEAVRDYLRSRDSLRLDLGRNRQRLMKFLLRKGNVYSATKYWTTSHYKWLNNLHFENEILQETFNDYYSRVKVQEENLKAMDQKIQEIAKSEAFKERVGILRCFRGVDYLTAMFLLCEVCDFKRFKTAGSFMGFLGLVPGEYSSGSKRKQTGITKTGSPRHFDGSCLAASLSWNGK

SEQ ID NO: 416218 - protein, 400 aa, unidentified
MRVVFGIDVSKASSEVAILVNGEKVHGYIIPNDAIGFNRLLGDLKAVYQPEIVFEATGVYSRRLQAFFEDNSYAYTRLNPLESKKQLDSLRVRKTDKIDAEKLATSQFILNRKPSYVQEVLYQELRDLRRFYQNLTEDIVCAKNRLHKVLQITFPELENILSAPTGEQYWHLVMTFPCNSFVLELDDDTLTAIIRQSTAKRISEKRVTYLVDKLTKLANQSYCAVKKTSPMMEEVKYYAGELLRLSEYRQSVLEKMITLAQPLPEYEILLSIPGIAETTATSIIGELGDIRRFHSANQINAFIGIDLRHYESGDFLAKEHITKRGNPYARKILFKCIHNIASASHTNPCHIADFYEKRKRQSQVTSTKPHTIASIHRLIRTMYYLITHNKLYDYTSTQNR

SEQ ID NO: 416219 - protein, 365 aa, unidentified
MQKISTMQTSGKNIFQGRLTIGVDLGDRSSAYCVLNEAGEIVFEHKLATTPVAMKQVFGGMPRCRIAMETGTHSPWVSRLLTALGHEVIVGHAQKVRLITKSRRKDDRLDARTLARLARIDPELLSPVQHRSAQAQLHLTEIRARAGLVSARTALVNAARGLVKSYGERLRKCGTQQVSRETTSGLSTGLREALEPLLREVESLNERIQEYDRRIEKMAKEKYPETALLKQVKGVGDLIATAYVLTIEDPHRFRKSRDAGCFVGLQPGRRNSGESEPQMHISKEGDEYLRTLLVQGAHYILGPFGKDSDLRRWGLKLAARGGKNAKKRAVVGVARKLAVLLHRLWVSGEVYEPLRNSQKAMSAAA

SEQ ID NO: 416220 - protein, 347 aa, unidentified
MRFYTNQHKFYCGVDLHAKTMYLCILDQEGEIKLQRDIRTDPEVFLRTIARYREDIVVAVECIFTWYWLADLCARENIAFVLGHALYMKAIHGGKAKNDKIDAHKIALLLRGSMIPMAYVYPPEMRSTRDLLRRRMHLVRKRGELIAHVQNTNYQYNLPEIGKNIGKKGNRQGVAERFSDASVQKSIELDLSLIDYYDQLLHRVEHEISLIAKKHDADSYFRLRSIPGIGRILGLVILYEIHDISRFESVQDFVSYCRLVKAARESGGKRLGSSGKKIGNVHLKWAFSEAAVLFLRRNPEAMKYREKLQRKHGKAKSMTILAHKLARAAYYILKRKEVFQLETFFQR

SEQ ID NO: 416221 - protein, 316 aa, unidentified
MTSLCVAGIDVSKARLDVFVLPQRIGLAVANGAEAIAVLSRRLKRLQVERVVLEASGGLEYPVARALVDAGFEVARVQPGRVRGFRAFLGRRAKTDALDAELIARFALVMPDEDIRALPSERAEAIRSLSARRRQIVDLAVQEKTRLRMARNPFIIESLRGVIAQLVAERKRVEAALAEALEADSETKRKYALLCSVPGIGNAVATTLLTDLPELGALNRHQTASLAGLAPHPEQSGTSKATAHIRGGRACVRTALYMAAVSAIRCNPPFKAFYKRLVDSGKPRKLAIVAVARKLAILANAILRTNQPWNANHALD

SEQ ID NO: 416222 - protein, 282 aa, unidentified
MSRTSLFWTTIPRSSKRFASQTRISTKSPKNAGAKATIEATSNYYTVYDTLDEHLDVVVADPIQTKAIGYAEVKNDRLNAKLLAQLRRADMIAESYVPSEDLRERRALVRGRKRLVEKRTDFKDEVHAVLDKHGITYNWDPFSVNGREILAGEDFSLGVVGDQLMESFLSIIDDLTAQIEEFEEMIEETAASLEETQLLMTTPGVSFYSSLLITSEIGEIDRFDEANQVVSYVGLDPVVRESGDSRTEGSTSKRGSGDLRWILVQCVQTAVHRCNPQALDMR

SEQ ID NO: 416223 - protein, 317 aa, unidentified
MIVLGIDIAKRKFDCALLKAEKFRTKVFTNDATGIEACLGWLKRHAEEPVHACVEATGPYAQALAEALFDAGHTVSLINPARSHTFARSLGVRTKTDPVDARILARFCQVMRPEPWTPAPKSVRELQELVRRLDALIEMHTQETNRLAVAHEAVRGSIEESLTFLNRAIAEIKEAIAQHIDHHPDLKAQRDLLDSIPGIGQTTSAWLIAELGAKRFSCARRAAAYVGLTPAHRLSGSSVHGKPKLAKAGNSQLRKALYWPAITALRCNPIVQALGKRLRLRGKHTMVIIAAAMRKLIHIVFGVLKSGKPFNPNLAGA

SEQ ID NO: 416224 - protein, 409 aa, unidentified
MLKIVYPNCCGIDVHKTFVVAVIAITNNQGITEYHRKRFSTFTNGLTQLRDWLEYYSCFDVCMESTGKYWIPVFNILEEQTNVCLAHPKYVKAIRGKKTDKKDAQWIADLFKHDLVASSFIPPLKIRQLRDLFRYRMKLTQLQVGEKNRYQNCLTWSNLQIASVVSDVFGKSAQAIIKSILDNPQDKPNIEQLVHKRMKNKVQDLEIAMEGALTPEQAEKIRVIKAHYDALAICKEDLEQMIRELGQDYQHQVKLIQTVPGFKEDLSALRIISEIGCDMTVFDSAAKLCSWAGLVPANNESARKKFSTRISKGGKYLKPFLVQVANAVVKSDKHPELRNKYLKLKKRRGHRKAISAICRRLLVSVYQVLRKQEDYNPVLQGLTEIRNPDKTMSVQDAVRFAQQHGFNVA

SEQ ID NO: 416225 - protein, 391 aa, unidentified
MVCVGIDVAKDKHDCCILDSDGTVRADCFTIPNNMDGFKQLLQTIRDCTKKSDKIKVGLEATGHYSYNILGFLLDNGLPTYVINPLHTNLYRKSLSLRKTKTDRVDARTIATMLLSDVDLKSYTDIAYHNEDLKSLTRYRFDKVQERAKLKQSVSRLATILFPELEQLVSSIHGTSIYALLGEYPGAKQISEVHLTKLTNLLTTASKGRYGKEKAIRIREAARTSIGSVMPAKSLELKHTIKLIQELASEINEIEDSIQKIIDELNPPILSIPGMGVNSAAVILAEIGDFSNFSSPDKILAYAGCSPSTYQSGKLTNCYAHMEKRGSRYLRHALYNATKYVCYWNPVFAEYLAKKRAEGKHYNVALSHAMKKLVRLIYALQKSGKAYLATA

SEQ ID NO: 416226 - protein, 340 aa, unidentified
MTQYKRIAIDTSKAVFTLHGIDHQDRVILQRNLRRPRFLPFFRALPRTEIVLEACGGAHHWARELTALGHTVRLLPPQYVKPFVKRGKNDRNDAGAICETGARPGIHSVPIKTVAQQAQGMVLKVRETLIGQRTALSNTLRGLAAEFGIIAAKGLGRIAELLETIAADPTLPAEAKDSFIILGEHLARLDEQIKLLEKKVAAAHKANPISTRLATIPGLAAVGSLSVATRVNADDFASGRHFAAWMGIVPKEHSTGGRPRMGGISRAGDERLRQVFVLGATAVIKAVTRPGGSKLASPWLLKLLARKPRKLAAVALANKMARTAWAMMKSGEVYRRPAAA

SEQ ID NO: 416227 - protein, 345 aa, unidentified
MQIVGCDLHTRYQQIAMLDTETGELSERRLEHANGEARRFYSELKGKVRVGIEATGHTRWFERMLAELGHELWIGDAAQIRAAMVRKQKTDARDAAHLLQLLIDDRFPRIWRPTLAERDLRQLVWHRQKLVWMRNAVGNQLHALAMGEGVCRKKQLWTKKGRAELESLRLDAWASYRRQELLTMRDQLDASLHKLDQAVEEQSKQKAAAVLLQTHPGVGPVTSLAFVLTLGPVERFQCSRKVVSYLGLNPREHSSGGKQRLGAISKQGNPMMRSLLVEAGHSAARLDPELRKDYQRLKLRRGAGVAKVAIARKLAVRMYWMLRQQANYAQLVRMQGSPWATLVEK

SEQ ID NO: 416228 - protein, 355 aa, unidentified
MSSEKYIGLDVHQATISVAVMDSQGKVVMESILETKACTLLEFFAGLRGSLLVTFEEGTWAAWLYDLLKPHVTEVLVCNPRKIPLLKQGNKSDKIDARKLAERLRLHDLKPVYHGETGVRMLRELARSYLTVVKDLSRVMNRLKALYRSWAIPCAGRDVYYTRHRSQWLEKIPEAGTLRRAEQLYQQLDMLQHLRQQARRELLAESRKHAITAKLRQIPALGPIRSALAVALIQTPHRFGSKRQLWAYSGLGLETRDSGEYHYVHGQVRRRKKQPTIRGLNKDYNHDLKSLFKGAATRASVQPGPFQEFYQRSLGKGIKPTMVRLTLARKIAAITLTLWKKGEDFDIDKLNSQAA

SEQ ID NO: 416229 - protein, 343 aa, unidentified
MELKRVGVDLAKHVFQVHGVDRREKPVWQKRLSRGRWLQVISTTVEPGCEIGMEACAGAHHWARRLQAAGFRVKLIAPQFVKPYVKSNKNDARDAEAICEAMSRPSMRFVSIKTVAQQDIQATHRVRSELISQRTSKGNQIRGLVAEYGLVAPQQLASLRAAVPDWLEDAQNGLTVRFRRLLNGLWEDLKALDRRVAELDQEIKSIAESDPDAKRLQQLRGVGPMIATALVAAVGHADQFANGRQMAASFGLTPKQHSSGDKVRLLGITKRGDAHLRTLLIHGARSVIRAAKSKDDRLSQWVTGLAERRHPNVAAVALANKTVRIAWAMLRYGTDYQPNRMAA

SEQ ID NO: 416230 - protein, 346 aa, unidentified
MDYVALDVHKHYSWARVENDQGQKIFECKLAHSRGTIRNFTNKWSPGTPVAVETVGNWYWVVDEIEAGQGLPQLVNARLAKLMIGSVNKSDKLDAKGMNRLQRAGTLPTVWIAPSAIRDARELPRTRMVLSKQRTQFKNRIHATLEKYGLKVEGVSDAFGKKGRQIIEELSWKLPPHTQQALGLMLDELDHVGANLKIIEEQMQQAFAPCAQTTYLQSEPGVGEMLAVVIWTEIGTIDRFGRAEQLASYAGLVPRENSSGGKVRYGRVRKDVNLYLKWAFVEAANSAVLNRQRCQYRHVARLYENVKARRGHGKAIVAVARHLAEAAFWMLKKGENYREPMSSTQG

SEQ ID NO: 416231 - protein, 342 aa, unidentified
MKISTIGLDIAKNVFQVHGVDETGEVVIRKQLRRSQVMPFFEKQSPCLVGIEACATSHHWSRELQALGHEVRLMPASYVKAYVKRNKNDAADAEAICEAVTRPTMRFVATKTKEQQSVLMLHKTRQLFVRQRTMLSNAIRGHMAEFGITARRGRQGVEKLLAIVLSEDDEQISVVARQALIALAGQYQAVQAEITLLERSLNAWHRSNETSRRLAEVPGIGPLVATALTSSITDPLIFSSGRSMAAWIGLVPKEDSTGGKRRLGPISKQGNRYLRWMLVTGAMAVIRYAKKTGFKKRPWLARLVEHRPIKLAAVALANKIARIAWVIMARGERYKEPALRAA

SEQ ID NO: 416232 - protein, 317 aa, unidentified
MGGVNAAIEVGKHELKVCLGSEGELFSEPNQPRAINRIIKRLSSAGCARVLIEGGSYQSVLIAALRAAELPVVIVNPRRVREFAKSIGRLAKTDEIDARVLALYGERTEPPLRELADEQTQSLRTLSVRREQLIEMLVMEENRLEHVPAKAKAVRHNLSSHIDYLRKQMKQADDDLDREVRNSPLWDKYEMLSSVPGVGRVLSVALLSDLPELGRLNRGEIAALAGVAPFNCDSGTLRGQRKVAGGRTRLRRALYMAALSSVRCNPVLKPFYLRLRAAGKPTKVALVAVMRKLLLILNAMLKTRVAWRALPCPTANS

SEQ ID NO: 416233 - protein, 418 aa, unidentified
MHVSVGGNKPEVFGTVTSQLHALRDWLLEQGVHSVAMEATGVYWLALYGVLESAGLEVRMVNGRQTRNLPGRKTDMADSQWGATLHMHGLLHAGFVPPADIRRLQDYLRLRASHVAAAAACVQLMQKAFDRMNIKLHDVISKLGGVSGMAVVRAIVAGERSPEALAALCDVQIRRKKERAVIEALRGTWADEHIFALDQALQSWDHYQKLIADCDRRIAAVLPPHDETQPPLPSSTKQTGVNAPEISRLREILAQMCGGRDLTKLPALSQYGVLQLIGEVGTDLSVWPTEKHFTSWAGLAPGSNDSGKRKKRVSRGRNRTGQLFCMMAQSLVRSKDIALGGFYRRLAARRGGLVATKALARKLAAWFWRVMVKGDDYVEKGLARYEEQVRKTREHALKRLARELGRQLVPVPGVSQTA

SEQ ID NO: 416234 - protein, 425 aa, unidentified
MNYKQNEKINQVKESTLVVGIDIGSTTQYARAFDWRGIELGKVFPFSNSREGFESFKAWMQHLQDKYKKLDAIVGIEPTGHYWFDLGAYLEDEGILLVMVNPYAVKQTKELDDNSQSKNDRKDPKVIAKLVTEGRYSAPYTPDGVYADLRIMVANRKRLIREMTQIKNRFARWFAIYFPEYTDVFGDYEAQSSMLLLKKVCTPEAIVELGAEKINQIWRDAKLRAVGMKRATTLCETAKRSIGLKKGSSAAQYEMKLLLEDYEYKKVQLDAVMEEIEKLCRKIPESEQMLAIKGIGVITVAGFLAEVGDVRRFESPRQIQKLAGLSLRENSSGKHKGQTTISKRGRSKLRAVLFNAAIPLIAKNPEFKSLHEYYTTRANNPLKKKQSVIAISCKLIRVFYAILANGVTYDAQKMLSDIHRQPQAA

SEQ ID NO: 416235 - protein, 367 aa, unidentified
MKKHTTMNKPVSATDVSVCMTVAVDLAKKVFQVAGEDAQGQLAYEQRIKSREAFQVFLQKLPEGVTVLMETGPGAQAWARLLQAQGNLVRILPAQRVAEHRSGAKNDRNDAHAILRAGRDSSIASVPVKSVAALAMQAWHRVRRGYVRRRTAMGNQIRGLLLEQGIALAQGDVGLKQGVTRVLEDARQPLPALLRELIDEMLNEWQRLGERIAALTGRLEACAAADPTAKRLMTVRGIGPITATALLAKQVEPERFANARQFAAYFGIVPDQHSSGQKVRLGKMTKRGDAYVRSLMVVGSHAVLKQLRPDSEHPDDRRLQRWLQRLGRKGAAVRLANRNLRIAWVLLCSEQTYQRKPNACREMEMSH

SEQ ID NO: 416236 - protein, 437 aa, unidentified
MIPVTFSELVIRNQQRSIAVSKIKSQKIKNVNDQTMIVTLDIGKGSHYGYFRAPDGQDVEPFAFYNTYDSFHRFWKKLSRFKKAHGCRHVLVGFESTGPYAEPITHFLKQQPVTLVQINPMHSKRVRELTGNSPNKTDRKDPRVIADVIMLGHALRVVIPQGASAHLRRLTQARERAIRDRTAIVNQLQHLLFVIFPEFLKVIKKISCKTGLYLLRHYPSRQAIAALGEQQLSIIIKRVSRAKMGQRHAEQLCQAAQASVGINEGQESIVEEIGHLVDKIKRENDFIDRVECQMRVHLEQIPYSRYLLSLPGVGLITVAGLIGEVGDFRQYGTVAEITKLAGLDLFEVSSGKHKGRRRISKRGRPLMRKLLYFAAINAVKSTGTMHQPYTQMLARGMPKIKALVAISRKLLRVMYALARDQSIYVEKSNNHLCKLAA

SEQ ID NO: 416237 - protein, 424 aa, unidentified
MSSDLEIAAFIGLDWADQQHVIRLRMAGSASVEAQLLDQKPETLRAWIGQLRQRFGARPVAIALEQSRGSLLYALLNVDFLLLYPVNPQNLAQFRKAFYPSGAKDDPQDALLLLEMLEKHRDRLRVWVPDDADTRCLRLLAENRRKLVNRRTALTNQLTSLLKESFPQALDWAGPLDSLRACDFLQHWPSLQRLQQTATSRLRKFYRDHTHLDSDAIHQRLDQIRQAQPLTRDSAVLAAAELMIPALVRQLRCLIESIQQFDQQLKDRFQHHDDYTLFHSFPGAGPALGPRLLSAFGSNRNRFECAAEVQMLSGIAPVTERSGKSHWVHWRLACPKFLRQSFHEFAAQSILFSTWARAFYDHLRSRGTSHHAAVRTLAFKWIRILFRCWKNRTPYQEQIYLASLRRHGSPLCAALSPPTTGANL

SEQ ID NO: 416238 - protein, 331 aa, unidentified
MDIKEVIGIDVSKNFNEARIYTNQKLIEFENNIKGFKAFEKWVLNNVKCHKSQIMFAFEHTGLYSHPLSVYFTEKGYSYIIIPGLELKRSMGIARGKDDKIDAKRIATYAYEKRSDLKPYELPQEEIVQIKRLLSLREKLVKQRAGYKGTIGEFKIFLKRKDNKMLFDVHEKMIKELSKQIEKIEKNLDDIIKNDQQIKRMYKLITSIKGVGPQTALFLIVYTDKFTKFDNWRKFASYCGIAPFPNRSGISIRGRTKVSNLANKKIKSLLDLCAKTSIQHNPEMKLYYEKRVKIGKPKMSTINIIRNKILSRIFAVVQRGTPYVNTMGYIS

SEQ ID NO: 416239 - protein, 312 aa, unidentified
MTRFVGIDVAKSELAFVLGPEAPAQSVANDARGIRKLVGLLRRFGPPLIVVESTGGYERVLISALLDAKLSVALVNPWRVRRLGESLGVLAKTDPIDARLLARFGEIAKPRPLPQRSQADRLRSELIARRRQLVTMVVAEKNRLLHAPRAMEADFRSVIQFLERKIERVDQQIDALHAADPERVEVSRLLQSVPCVGPGIARTLLVDLPELGALSRREIASLVGVAPFARDSGQKRGVRRIRGGRASVRTALYLAAMNAARFHPELRPVYQRLRTAGKPAKVALVALARKLLVQLNAMVRDRSPWCPAHAVA

SEQ ID NO: 416240 - protein, 346 aa, unidentified
MSEIIRIGVDTSKYIFQLHGVDAAEQPILRKRLGRKQMLEFFAKLPPTQIGMEACGAAHYWARELGKLGHEVKLMAPQHVKPYVKRNKNDGRDAEGLCEAMSRPTMRFVQVKSAEQQAALMLVGLREQMVSRRTQLSNMIRGYAAEFGLIAAKGLDKIEPLLAQIAQDESLPAMARDLFALQGSEYVQLQAQLKVIEARLRAWHRTNADSRRLAEIPGIGPVGAPELIMKTPDPGAFTSARHFAAWIGLTPKDHSTAGKTRLGKITRAGDERLRSVLVAGATAVIKQARRGRGHPSPWLVALLKRKPPKLAAVALANKNARIAWKLMVTGESYDGARMHAASAAAT

SEQ ID NO: 416241 - protein, 375 aa, unidentified
MKEKVRFLGLDVHAETITVAVAEPGDEVRSLGTIANRADSIRKLVKKLGPVEQLKACYEAGPTGYVLYWQLAELGVKCDVIAPTLVPVKAGDRVKTDRRDAEKLARCHRAGDLTAVWVPDAGSEALRDLVRAREAAKQDQLRARHRLSKFLLRTGQRPAAGLKAWTQLYMAWVRQLRFEQVAQESTRLDYLHEVEHMAERVVRLEQAIAEAVKLASPEIQEVVKDLRALRGIAQISAVTIAAELGNISRFESARQLMGYSGAVPREDSSGKRTQRGSITKTGNAHLRRIAVEAAWSYRLRPGVGPALRKRQEGVPEELKEIAWKAQNRLHKRYSRLAAAGKDQRKIITAVGRELLGFIWAIGIKAETAARQRMAA

SEQ ID NO: 416242 - protein, 366 aa, unidentified
MKKISTVAMERIQIFKESQRTIGMDLGDRSSHYCILNEAGEVIWESKLPTTPKGMEEVFGRIPRSRMALETGTHSPWVSRQLTELGHEVIVAHARNVRLIGESSRKDDRLDARTLARLARIDPGLLSPVRHRSAKAQIHLTVIRARATLVGARTALVNAARGLTKSYGARLPKCGSEQMNREIAKGLNQELREALDPLLAEIESLNERIAEYDRRIDKVAKEVYPEAALLRQVKGVGPLIALTYILTLDDPHRFRRSRDAGCFVGLRPGRRNSGMSEPQRHISKEGDRYLRTLLVQGAHYILGPFGQDSDLRLWGLKLAERGGKNAKKRAVVAVARKLAVLLHKLWVSGEVYEPLRHSQKAMRAVA

SEQ ID NO: 416243 - protein, 265 aa, unidentified
MKFCGIDLHSNNSVVVVTDETDRVLVSRRCPNDLPIIIGLLEPYRAELLGVVVESTYNWYWLVDGLKAAGFDVRLANTVAMKRYDGLKHSDDKDDAAFLAHLLRLGILPTGYIHPPQERALRDLARKRIQLVRSRTQHILAVENIMARQFGHRLSCNEVKGLPATSVDRQGLSTDVALAMKANVAIIQAVQAQIDFLEDRLLHEASLRPEFSLLKTMPGIGEVLATVIMLETGDIERFADVGNFASYARCVKSAHYSNGSLYRSR

SEQ ID NO: 416244 - protein, 385 aa, unidentified
MSTFDQTDAPAASEYATVHMAFELSKANWKIGVLLPGSPKLSRFTVKGGDVTTLSGRLASLRAKAERCGKPVRILSCYEAGLDGHWLHRWLTDQGVTSYIVDPSSIEVSRRGRRAKTDRIDLEKLMRAFLAYLRGEPRVCSMLHVPSVQDEDRKRSSRERDRLLKEQTAHTNRIKALLFGQGIRDVMPLKPGFIASLEAMRTGDGRALPARLKEELVREHERLCLAHKQVAALEAQGKAELRVAAPGSVAAKIMQLIDLKSIGVISGQKLVNEVFYRSFDNRRQVGSYFGLTGTPYDSGESRREQGISKAGNSRARNLAIELGWLWVRHQPGSELTRWFRERVGDLKGRIRRIAIVALARKLMVALWRYLTTGLVPTGAVLHPSF

SEQ ID NO: 416245 - protein, 387 aa, unidentified
MTVQSQVPTFIPRQYEIFAGLDVDKHSIAVTFTDHTRLLKSLRLPYSSEQLLNYTRKHFPDRRLAFVYEAGPTGFGLYDDLRASGHPCLVVAPSMVPTAPGQRVKTNRLDSKKLSEGLRGGQLRSLHVPSPTYRQLRHLVQLRDTHVRQLTATKCRIKALLLYEGIAFPEAPAGGQWSARVLRQLEALPCAEAVRFKVNHLIGTLHFHFLSAAAVQKQIRRFCQNDPELRQVIGLLTSLPGVGWIVAAHLIARLGDWREITSVRQIAAFLGLVSSEHSTGDQENRGAITRSGDSRLRNKLIQSAWTTIGKDPELRAFYRRIYQRHPKKLAARKAIVAVARKLTTRIYAVLKQQRPFVLRPDSSSAPLAAEETAGPRGRLDAAQNEQK

SEQ ID NO: 416246 - protein, 403 aa, unidentified
MGEAVRHKKLWVGIDVGKGHHWAAAVDDAGTSVWSKKVENDETAILDAIAEAMALADELHWGIDIAGTSSALLLALLAAHGQKPVYVPGRTVNRMSGAYRGEAKTDARDAYVIAETVRHRRDFAAVDVPAQLVADLALLTAHRTDLVADRVRLLNRLRDTLTGIFPALERAFDYSNRRGALILLTGFQTPAGLRGKGLTRLTTWLAKRGVRQPEQIAARAIEAAKSQHTQLPGESVAAQIVADLAEQLLALDERIDRTDRQITTAFREHPHAQILESMPGIGPILGAEFVVAVGDLSAYRDSGHLASAAGLVPVPRDSGRRTGNMHRPKRYSRRLRRVFYLSAQTAVMRDGPNRDYYVKKRSEGAKHTQALISLARRRVDVLWALIRDGRTFTAVPPTAGQAA

SEQ ID NO: 416247 - protein, 343 aa, unidentified
MQSISTIGLDIAKSVFQVHGVDAAGQVVLRRQLRRRQVLAFFQKLSPCLVGIEACASSHYWSRELQELGHAVRLMPPAYVKPYVKRQKNDTTDAEAICEAVTRPNMRFVPTKTVEQQSCLMLHRARHLFIRQQTAVINSIRAYLAEFGIVAPVGRRGVEQLLEVVADRADDRLPEVARACLAALGSQLRALKAQILEFDRRIIAWHRSDATSKRLDAIPGVGPALATALVASIADPRTFRSGRDFSAWVGLVPKQNSSGGKDKLGSISKQGDRYLRSLFTAGALAVIRYAKIHGTGHRPWLTGLLARRPTKVAAIALANKIARMAWAMMARGERYREPIALAA

SEQ ID NO: 416248 - protein, 417 aa, unidentified
MDVHRDFCEIAVAEADGQVRSGGRINSRLTELELFAGSLAADDVVALEATSGAGLIAEIIEPHVAAVVVANTRKLPQISKAKAKTDRLDARTLARLAASGFLETVWAPDERTRALRRLCARREALVRARTRAKNEAHAVPARNLCGRPPVTDCFGKSGRVWLAELQLPVDERLTLDGCLRQVDFLDSEIRALEAALATEALGSPQILRLMTVPGVSLHTAAAFVASVGDIRRFASARQLVGYLGLDPRVRQSGNAEARHGRISKAGSSLARGMLGEAAWSVAQTPGPLRAFFERIRARKGPQVAATATARKLACLCWCLLTREEDYAYARPSMTRSKIRGLELAAGAPPRKGVRGIAGNKNAQTREAERELARRAETAYRRTVTDWRAAGPAKAGAGVTPGRASSRPSKGKAARQTP

SEQ ID NO: 416249 - protein, 312 aa, unidentified
MADMVRLAGLDVSKDKLDVYVTPSGESRTVGYDRRGLAGLRRWLVGLGVALVAVEASGGYEREVSEVLEEAGLIVHRLNPLRVRRFAQLKGRLAKTDRLDARTIAEFARTWPQEHQLRRDPRRERLAEHLLVRRHTQDAILDCINQLEHLRDGRLRRLVMARKASMERTLARLDRCLVELIAEHDDLAELSQRLRSVPAVGPVLATTLIALLPELGSLTRRQVASLVGVAPFDRSSGRQIGAKSIQAGRSLVRNALYMAALVASRHNPAIAAFAERLAGKPAKVRLVACMRKLIVTLNAMVRDGSQWQPRTA

SEQ ID NO: 416250 - protein, 329 aa, unidentified
MKLLQYLGADLSKDSIDLFCYELKSHIRIKNSSAGFKELFAWMARLQLNKDGVFLVMEHIGLYSYSLEKFLHQHHIKFAKVSALEIKRSLGLIRGKNDKIDAERIARYAFEKKDRLVAEKPTHPVIQRLQMLYSTRERFIKYRTSLTCAIKQYRGILSSADPIIRTQLTLIKQVSERIGLMDQQIRQCITEADPAVKQNFTLLTTIKGVGDVIATATIVKTKNFTAFKDARKFSCFCGSAPFDHSSGKTIRRKTRVSQLADKGMKKLLTMGARTAIQHDKELKAFYERRLSMGKAKNSTINIVRNKIILRMFAVINRQTPFIQQYSQVG

SEQ ID NO: 416251 - protein, 397 aa, unidentified
MIAVGVDVSKSKSMVAILSSDGEIVAEPFEVYHVNDSLDNLITNLLSLNDDIKIVMEATGHYHLPILKKFLEANLFVSVMNPYLMKKYGDNQIRKAKTDRKDAMRMATYALEKAYTLIPYTSLEQKYLDLKFLSRQYNQRISTKVKNRVYLGNLLDETMPGIENILMAKTTKPENNMLYNFINKYQSFDTIKKMGEKKFLNSYTKLAEKNGCRNYQMKALKIYELATNSITTRGTDTYTNIAIQQCLNVLIQAEIAANEILVQMQSLAQTLPEYPIVRGMCGVGDRLTPRLIAEIGDVRRFTSGKALNAFAGNDAPPFQSGQFESQNRHISKRGAPSLRKACYEVMQCLKMHKPQDDPVYLFMIKKEEEGKPLNVAKMAAINKFLRIYYARVMELYK

SEQ ID NO: 416252 - protein, 402 aa, unidentified
MNCVGIDVSKGKSMIAVMRPFGEVVVSPFEVRHTASELSELARLLKNLDGETRVVMESTGNYHAPVAWLLHGAGFYVSVVNAMLVHDYGNNSLRRGKTDKKDAVKLANYGLDHWLTLPRYVPEEDTRLMLKTCYRQYQQYSKVQTMLKNNLISLLDTAFPDANRLFTSPPRADGSEKWVDFVATFWHCECVCGLSKKAFTAKYQKWCRKHGYNFSQDKALDIYASACGRFGVMPKTNTAKLLVEQAISQLQTTSAALAALKQEMQSLAASLPEYPVVMEMFGVGPTLGPQLIAEIGDVRRFHSKKALVAFAGIDTPPYQSGQIDVRSRSISKRGSASLRRTLFLVMGVLLQCAPMDEPVYQFMNKKRSEGKPYRVYMMASANKFLRIYYASVKAYLDSLEHD

SEQ ID NO: 416253 - protein, 391 aa, unidentified
MDEVWAGIDAGKEFHWAHVLDASGRELLSRKVENDEADILRLIDEALSFAEKVVWAVDQPGGSAALLLALLWEHDQEVLYVPGLAVDRARDTYRGESKTDARDARVIADQARMRSDFGELRAGEEEISELRLLLGRRRDLVTDRSRTVTRLRGALLSLFPALERTLDLNRKGPLILLVRYQSPAQLRRAGHKRVATYLRNRCVKGFDSLAQKALSAAGSQSVTLPAEDVASGIVAELAGEILALKDRIGSIDEELGRRFFARPEARILTSLPGMGALLGTEFLVAVGDLRAFESADRLAAYAGLVPAAKDSGKRVGNNRRMRGGNKTLKRVFYQSAFASLRGSPESRAFYDRKRVEGKRHTQALIALARRRVNVLWAMLRDGTTFEARSAA

SEQ ID NO: 416254 - protein, 275 aa, unidentified
MMPQETAYVAVDVSKASLEIGCYGERRTWRAANAASGWAKLIGWLGRLGRPAVVGVEPSGGYERGVVEALLRAGIEVRWCDPARVRAMARALGAPAKTDAIDVGVIGAFLAHAGGRPARLDPERDALKAALAARRAAQDSAQRLEAQAAALPQGPAREALAAVAQTARQAARELTRQALELVRASARLRAVSQRLQTAPGVGPLVAAELLAQMPELGCVSAKAIAKLAGLAPFVRQSGAWTGRALLLRRATTSATGALSRRHRLAARQARSPPGL

SEQ ID NO: 416255 - protein, 412 aa, unidentified
METIHERVAGLDVHKDTLVACVRVPGGRGRRESHVHEFSTTTPGLMALRDWLVSHQVGLVGMEAIGNCWKPVYYALEDASECWLLNGRHLRNVPGRRTDLADAAWIAQLLEHGLVHPSFVPPPEIRELRDLTRYRKAQIEERVREAQRLDKVLQDAGIKLSLVASHLMGVSAQAMLRAMVAGERDPEILAELAKGKLRRKLPELAEALEGRFRGHHALLVGEILAKLDHLDEAIERLSDEIERVLGPFAPQAELLRTIPGVDRRMAEALIAEIGVDMSRFGSSARLASWAGVCPGQHESAGRQRHGTTRKGSKWLRMHLTQAAKAAARTKGTYLAAQYARLRGRRGGSRATIAVAHSILVAAFHILERGTPYEDLGADWFIRRHSPERHARKLVHQLETLGFDVRLEERAAA

SEQ ID NO: 416256 - protein, 387 aa, unidentified
MIYVGIDIAKQKHFAAAMTADGEVLVPPFGFTNDADGFNTFLSKIKSFDKTDILIGLESTAHYGENLICYLFSLGYRISVINPIQTSTLRKTNIRKTKTDKVDCLLIIKSMIVNKTRLYSKSDIDSLRLKSLCRFREKLKKSKTKLKIQLVTYVDVIFPELQYFFKSGIHINTCYMLLMKHPSPDEIAALHLTYLVNLLQKASHGRFGKEEAIALKSLAKSSVGTGNTAVSIQITQTITQIELLEQQLNIIDESIKSIMLDMDSIIMTIPGIGFLNGAMILGEIGDISRFSNPSKLLAYAGLDPTVNQSGKFIAKSTKMSKRGSKLLRYALINAAWNVSLNNKTFDDYYKLKRSQGNNHYAALGHVAHKLVRIIFKILKDNIAFNLD

SEQ ID NO: 416257 - protein, 451 aa, unidentified
MSKVKPQVIDDEEHERVYDRVAAVDVAKDTGMVCTRMPHPSRPGARRSTVWTVKARTGAVRALGRQLKDSGIEMVTLESTSDYWRVWFFVLEAAGLSVQLVNAVQARNLPGRPKTDKLDAQWLARLTELGLLRASFVPPRAIRELRDYTRARTRLIQERTRCWQRLEKLLEGALVKVSSVASKLTTISAQDMIKAMIAGERDPQALAGLARGSMRAKRDDLAEALDGMFDDHHGELAQLLLDQIAFLGTRIAQLGARAAELADAMPAAWGINADGTTGPGAGNGPDATVLSAVTRLAEIPGVSPDLARAIIAETGLDMTRFPDAAHLVSWAGLCSSARQSGARTRAGKKGQGDTWLRGSLSQAANGAARTATFLGERHHRIARRRGKAKAQVAVARSILVIIWHLLANPESRFTDLGPGYYQARLDTDRKLRNHIRQIKALGFEVTLTKAA

SEQ ID NO: 416258 - protein, 412 aa, unidentified
MKKHSNSAKPCESSPRVSVLQDSREVMSELVAKLAKQLDGERLPVAELQDEARNAARPNLNGLTVGVDLGDQWSSYCILDLSGETLAEGQFATRREEIREFFQGLAISRVVIEVGTHSAWVQEVIAGLGHEVLVANPRMMEGSKRRRRKNDRIDAGKLARLGRVDPKSLYPIRHRSSQVRADLLVLRARDALVASRTELINTVRALVKTMGARLCSCSSEAFSKKAEMEIPTEFRETLQPLMRLIARLNDEIKSYDQKIEQLASKKYKHTQLLRQVTGVGPITALAYVLTLETPLRFANSRDVGPYLGLVPKQEDSGDSQPQLGISKAGDQMLRKLLVGSAQYILGPFGPDTDLRRFGMKLCERGGKNAKKRAVVAVARKLAVLLHRLWVSGEVYVPLGHASFARTAQAVAA

SEQ ID NO: 416259 - protein, 354 aa, unidentified
MSQTLNAAIAVVGIDIGKNSFHIVGHNERGAIVLRQKWSRGQVEARFANLPPCLIGMEACVGAHHLSRKLRALGHDARLMPAKYVRPYSKGQKNDFRDAEAIAEAVQRPTMRFVATKTVEQLDLQALHRVRERLVSQRTGLINQIRAFLLERGIAVRQGLRFLRAELPGILATRTDVLSPRMVHVIEGLAGDWRRLDERIEGLSTEIGALACQDPACDRLMTVPGIGPIISSAMVAAIGNGAAFAKGRDFGAWLGLVPQQISTGDRTILGKISRRGNRYLRVLFVQAAWVVLIRPKSWERYGLKPWIEAAKKRLHHNVLAIALANKLARIAWAVLNKERKFECIRTNKMSPRAA

SEQ ID NO: 416260 - protein, 420 aa, unidentified
MFAATELFVGVDIHRRTNVVQVMNGQGQVLTPSLRLTNNRPGTDQLAAHLAELAVAGNFEAIHIAAEATGNYWLPFFCQLEQAPELADWPVSLYSFNPKIIHNFRKSLGDWNKTDDLDTTVITERLRFGRQLPYPFHMEERYLPLRTLTRYRYHLVGELVRVKSYTLSLLYLQASEYTVNPAFSNVFGQTSQAVLKEFPSLETIAAMPFEELVEWLDVKGKRRFAQPEENARRLQHIAQDSYRLPTDWLATVHTALTLSLRHVTTLQQLLARVDNAIADQMAHFPNSLTTIPGIGSVLAAGIIAEVGDLARFDFKEAKVASFAGLKWSRHQSADFTAEETRLKRTGSQYLRYYLCEAAQLVRMHDAEYQAFYQKKYNEVRAHRHKRAIVLTARKLVRLVVRLLTTNEPFRARQLPSDKNG

SEQ ID NO: 416261 - protein, 356 aa, unidentified
MNVRRVQYFVVDGKEIFVGLEDSKKTWKLAVRSEGMLIHQASMEAKYSVLIRYLRNNFPNCTIHLIYEAGFKGFNLHDRLVDDNIDCVVIPPHVVTEPKVNRVKTDKRDAKRLALILENHDFRDVCHVPDRERREDRQISRTLIAMQKDIIRTRNRIRKLLDFHGIEVSLPDRWGRDEFRSLKKLSLPDPLRISLDVLLTQLEELWAHQMTLRDALRKLCRKERYRKAFEIAVSLPGIGWFTAIRLVLELGEDLSHFTTGKKIASFVGLTCSEYSSGETEWKGRITGMGSGFIRATLIENSWIAIKKDPVLLAKFSRIWRASGSKKKAIVAVARMLIVRLRACIVLGTPYRIGVVR

SEQ ID NO: 416262 - protein, 484 aa, unidentified
MAHDSMHAARPVASVVRPMLAHEALYVGVDVGKQQHLAGFVSTTLLQRHERFEGCPALRFTNTREGFRELVDRLRAYVPLEQCFVLLEKTGHYQNALVDYLLELDLSVYLMHVHRRPRGLVKTDKRDALTLANHLYNQLEKGIQVADKTQLARPAVPPTSTALRLKSLMGHRHELVHESTRRKNQLTALCDQLFPEFTQVFQDPNSSAALAVREQFSTAAAIAQADLAQLCAAKGLRRPSRLEVAQLQQLAAQSIGLKDPGRLYGLVFEQQQLIRELRLLQDHLAQIDAEVARILAHAREGRILLSMPWLGTSSAAAILAAIGNIDNFASAAALKAYFGWAPKVVQSGASTDSATLSRAGERTMKEVLYLVALRGVRGTGMWAPLYHRLVERKCPYDERTRSYRGKKQVVGRIAGQITAMIYAFLKADAEVLAATPPGREPPPPMLYDASIHQAHRAGAYRAMRPAVARGERLIRLATCDAPLC

SEQ ID NO: 416263 - protein, 533 aa, unidentified
MIQIPAVIERCAGIDVGKKEVAVAIMTGPADQEGELQTRAYGTTVPELEKLREWLVENQCATVAMESTGSYWIPIKNILETSVKIVLICARKQKPQRGDKTDFRDAKNLAHLHRHGLLKGSFLPSRPVVELRDLTRRRKKLLGNLGAEKNRVQKVLEVANVKVGNIMSDVFGVSGQAMVSVLVAGQKISIEQIADLSKGRLRQRIPELREALDRHQMNDHHRWLIQQCVEHAVLLDRQLEELEAKIEKNLEPYREQYELLKTIPGIKEMTAASILAEVGPDMSPFETAKKLSAWAGISPGNNRSAGKQKSSRIQKGNKFLMAALIQASWGAVRKRESIFQRKFHRWVKRMGEAKANVAIAHSLLTVVYAVLKQNRPYQEPDPQQMHALEKAKLVRHHASRLQKLGADETLVTQLLAQLNSTPAASVPPTPSNAAPASEAAPARIRKRCPAKVRRGALGVRARQTRSQEYTVLAEKKDSPPLATPPPKRKRSPTSNPKRKQPSKADHNLAGLTPSGPPQMEIGGPRDTTGLDKT

SEQ ID NO: 416264 - protein, 481 aa, unidentified
MKPKTQEKNEKITKPRTNHWKKMNRKQRRELTRKIQSQDLSLEVVHPDAAGIDIGNESHYVAVPSTRDSQPVRRFGCTTGELKAMAEWLKQCRIRTVAMQSTGVYWVAVYDILEQAGFEVYLVNARDTKNLPGRKSDVQESQWLMKLHTYGLLRNSFRPSQEIRMMRTYWRQRNDLVRSAGRHIQRMQKALTQMNLQLANVLSDVSGVTGQAIIKAILRGERDPQKLAALRDLRVKASEEQIAQSLEGNWQPDLLFVLKQEQDGYEFCQKQIAECDHQLAQYLQQREDRSQGAPLPKEERKGRRRKKKGNAPQFDLREGLFRMSGTDLTRIDGIDVMTATTIISEAGWGMSKWQTEDHFVSWLRLCPDNRISGDRIIGKGRLPTNNRVTIALKMAASGLRVSNSYLGAQFRRLRTKLGDPIAIKAMAAKLARLVYRMLRYGMKYVDQGALFYQAQHRQLQIKQLKWKAIKLGFRVVEAHAV

SEQ ID NO: 416265 - protein, 411 aa, unidentified
MEVVYRRCSGIDIHKESISVCVLLMEEGGLKKQIRRFGTMTKDLLQLSTWLQQLGVTHVAMESTGVYWKPVWNLLEDQFELLLVNAQHIKQVPGRKTDIRDCEWIADLLQHGLLRGSYVPKQEQRDLRDLTRYRVRLSEDKVRLANRIQKMLEDANIKLASVATDVLGASGRTMLQAIAAGEDDPEKLAQMARKGLRKKLPQLRLALQGRIRDHHRFLLRQLLEELRFVEEKIDELELRIQRCMLPYQHVISLWSSMPGVRLTTAWSLVAELGTNPEQFPQGSNLASWAGMCPGNNESAGKRKSGKTRKGNRWLRRALNQAAWAAARTKNTYFAARFHRLAAKRGSKRAIVAVGHKILLLAHYLLQHNCRFRELGADYYQRLRPPSLSQSLVRRLKRLGFQVTLTPASQPS

SEQ ID NO: 416266 - protein, 355 aa, unidentified
MESTKYVGLDVHQEATTIAVMNSAGKLIMESIVETKAITIRQFIQGLHGDLHVTFEEGTWAAWLYDLLKPYVTKVIVCDPRKNTLLKVGNKSDRIDPKKLAELLRNGALSEVYHGENGVRTLKELARSYLTISKDLGRVMNRVKAVYRSWAIPCAGTQVYALCHRSEWLSKITEAGVRRRAEHYYQQLDALQTLRREVRKDLLLESRKHNATKLLRQIPCIGPIRAAQLVALMQTPHRFRTKRQLWTYSGLGLETRDSAQYCYVEGQLQRSKKPQQLRGLNSNHNHDLKNIFKGAATTASVSAGPFHDFYQALLTKGMRPTMARLTLARKIAAITLIVWKKGVRFDPQHLKQQAA

SEQ ID NO: 416267 - protein, 392 aa, unidentified
MIIVGIDVASQKHDYFMLQKETGVVFRSSSITIPNTLNGYKKLHKDIQSFCGATSDYTVRIGLESTGIYSTNIITFLVSSGYEVMMINPILTNMVRKASKVHCPKNDNLDSQTICKYLVDNMGSFSPYTSTLYHTLALKSLSRKRFYIVDELRKAKLNVYKLVHLMFPEFESFFSNIYVLSALSILKEYPSPQKLAKAHANKVSALIHGRCKCSALELIDAAKNTAGIKSDYDSFQLIDAIEELEHIQKRVEKYDVQIENYVKQHFPNLLTIPGVGYITAGLIAGEIGDINRFHSADFLVSFAGIDCTIYESGNYKAKHTIPSKKGSKYLRYALFQVARIAWQWDPVFKDYYLKKQSEGKHFYVILGHIQKKLLRVIYSLMKSGLNYKVISA

SEQ ID NO: 416268 - protein, 286 aa, unidentified
MDYFAGLDISMDETHVCVLDREGQVIYESKSASTAQAIADELAKAPSCRRIVFETGRMAPILFHGLSRLGLPVVCVESRQAYRALKSLATHKTDRNDARGLAHLARTGFFKPVHVKSLSAHAVRSLIIARKKLVGQRVTLENQIRGLAVVFGVRLPRALTIAFIDQALKASEGVAGLSAAMRGLIAARTAVMTAVAAIDVDMRRMARASGACRRLMTIPGVGQLTALAFVAAIDDPSRIRRSRDVGAYLGLVPGDISPGRSTTSAASRNAATDGCRPSCTKPPTSC

SEQ ID NO: 416269 - protein, 350 aa, unidentified
MLIIGCDYHPGFQQIAYVNTDTGELSEARLGHKEQAEQFYYDLKTHGVPVRVGMEASGHARWFERLLAELQFELWIGDAAEIRTKRVRKQKTDRQDAQLLLRLMIEDRFPRIWVADAENRDLRQLLWHRHRLVQMRTRVMNQLHVVALNEGLRRKKALWRPAGRRELEALSLAPWASRRRQDLLDLLDRLTPKIHELNEKLEQIVARRPVTRQLSTHPGVGPLTALAFELVIGTPERFACAKQIASYVGLVPAEESSGDRRRLGHISKQGNALLRFLLVEAAQVTVRSDAQWRSQFFHLAMRRGRKIAKVAMARKLAVELYWMWRRGWDYHEMQQLGSHAGAPGNRHGVQ

SEQ ID NO: 416270 - protein, 371 aa, unidentified
MNRYNLEAAPTACAIEIKVDKRPKAKRILLGVDAHLRGYQAGRKIDDGVIGAVETFRSEVELLLHIEKQRQRAEEVVVVYEAGPLGYTLYRKLKALGVLCYVCAPDGAQQRKKRRKNNKIDARTLTSKLFNYLNGDKEALQLARVPTEAQEQLRLASRQHDQLVEERKRLGAKGNAMLLSQGFGSWSNWWRPKVWAQLSVLVPAWLLERLQIWVDVLKTLDEKIAQAKAALARSCRGPRPKGVGALSQMQLQSEVLDWHSYTNRRKIACLAGMVPSEWSTGDKEWRGSITKVGVPAIRRIIVEMVWRMIFFQPQYKPVQKWQEVLRGSNPALKKKAVVAIGRQLIVDLWRLETGRVTAQELNLVMIEAEGV

SEQ ID NO: 416271 - protein, 485 aa, unidentified
MAKHKSSTFERLRLGAALNRKERREVQQRLNAPDPGLEIVNRDAAGIDVGNESHYVAVPPGRDAQPVREFGSWTGALEEMAQWLIRCEIRTVVMQSTGVYWIAAHDVLQKHGLEVQLVDARGTKNVPGRKSDVQECQWLMKLHTYGLLRACFLPAPEIHAVRTMWRLRDQHVKDAGRCIQHMQKALIEMNVQLHIALTDISGASGQAIIRALLAGQRDAKTLAALRDPRCQTSEEEIVQTLRGNWKPDVLFELQQAVDAYDFYRLQMAKCDEQLKQYMALLPASQAAMPAPPAASSTAPGKSNKSRSGKPRKPIGNQPAFDLQAELERILGVNTTTIDGINVMTIQTVLAEVGPNLSAWKTEAHWTSWLNLAPKRDISGGKVIRHVRQRHTNRAGNAFRMAAQSLLRSQSYLGARCRYLRARLGGPKAIKAMARVLACLYYRLITKGKIWVDRGVEEFNRRSEQRELAALQRKAHKLGMQLVAAA

SEQ ID NO: 416272 - protein, 351 aa, unidentified
MSHKTAATVAHTIGIDTGKNTLHLIGLDDKGAIVLREKVARGRIAARFANVPRCLIGIEAGMATHYVARELIALGHDVRQVPPAYAKPFRQGHKNDFRDAHAIAEAVQRPSTRCVPVKTDDQLDLQALHRVRSRLVGQRTAVINQIRGFLLEHGIAVRQGLRFLRQQLPDILAKRDDVLSPRMTRIIEDLSGDWRHLDERIKHITEEIEVLANSSESCRQLMTAPGIGPLIASAMVAAIGNGTAFAKGRDFAAWLGLVPKQMSTGDRTILGRITKRGNRYLRTMIMQGARVILLRPANWAKHSFGLWLTAAAQRLHHNVLATALANKLARIAWTVLVQGRSYEARVVPKVA

SEQ ID NO: 416273 - protein, 312 aa, unidentified
MMTENSIGIDISKDFLDAHRLSDGAATRFENSPAGFRTLSTWLGDDMPTRVVFEATGAYHRNFERAFSGKIPLVKVNPLQARRFAQACGTRVKTDEVDAHMLASFGNALALEPDQPIDGKQFELKELFSSRGGLIKDRIRLTNRLHTQSLALVKRQTKARIDQITRQLKTLQHDINRRLQDCPSRARANTILRSIPGIGEVAAATILIEMPEIGTLQKKKAASLTGLAPMTRQSGKWRGKATIQGGRKQLRDALYMPALVASRYNPDMCNKYQAMIKQGKPQKVALTAIMRKLIELANTLVKADREWAPNAT

SEQ ID NO: 416274 - protein, 382 aa, unidentified
MDLIHSCCAGLDVHKKTVVACIRRTGPDGRVDRQVRTFGTMTADLLALADWLAAADVRQVAMESTGVYWKPVFHLLEDRFEVVWVNADHTKQVPSRKTDVKDAEWIAQLLQYGLLRPSFIPPPPIRELRDLTRQRAQRVRDRAAVANRVQKVLEDANIKLASVASDPLGVSGRAMIRAMIAGEQDADKLAELARRRLRGKIPELKRALQGRVTAHHRFLLRMLLGQIEALEGLIAQFDDRIGVVMAPFVEVARRLEAIPGVGPQAAEVIVAEIGTDMTKFPTAGHLASWAGLCPGNDESAGKRRSGKTTKGSQWLRAVLVQVAWSASHTRETIFSAAYRKWAKRMGKKKALVALGHKILVVIYQLLKDQTQYQERAKPAQAA

SEQ ID NO: 416275 - protein, 325 aa, unidentified
MSSHQVTVGVDIAKRKFDAVRLESGKYKHKTFDNSVDGFATLITWLLTFGEIKPLVCMEATGAYSIPLAEFLVNSGYSVSVVNPAKIKAFAKSELSRLKTDKADAKLIARYALEKQPSLWTPPPPTMIELQALLRRIEHLLEIRQMEQNRLDTANPIIIESIKTLLTLLDEQLESTREQIRQLIVQDPVLKHRAKLLETIPGVGSASIAQLLLALSEHHGFTHAKQAAAYAGLEPRISESGDWTGKTRLSKTGDALLRKALYMPALVAWRHNPAIRVFCERLKANGKNGKAIACAAMRKLVHIAFAILKSNKPFDPLYKTKLTLV

SEQ ID NO: 416276 - protein, 411 aa, unidentified
MLKIVFKICCGIDVHKDFVVACIAKTDDKNVTTYQTKRFSTFTNGLRELSEWLCSNSCKDVCMESTGKYWYPVFNILEDSCKVIVAHPKYVKAIRGKKTDKKDAKWIADLFKHDLVVSSFIPDRCIRQLRDLCRYYCKLTNLTTSETQRTHNCLTVSNIQLANVVSDINGKSAQKILSKILENPNDTSFDIESLLHKSMLPKLDDIALAIDGVITTEQASKLQIIKKHFDNLNICKSDLENLIYELAKPYEHEIALLQTIPGINSKLTAIRIIAEVSNDVSSFPTSKHLCSWAGLTPTNNESAGKKKSVRISKAGCYIKPLLVQCGLAALKSKDNPEIGNRYKNLKMRRGHKKAIIAIARMLMTIIYHILQDKVCYDKELYSHYNQLPTSKEITVEQAIALAKRQGYKLVC

SEQ ID NO: 416277 - protein, 343 aa, unidentified
MQVTTIGLDLAKRVFQVHGVDADGRVVVQRRLQRGEVAAFFADLPPCRVGIEACATAHYWARLIGASGHQVRLIPPSYVKPYVRRSKTDAADAAAICEAVGRPSMRFVPVKSAAQQAALLHHRVRDLLVRQRTMLINALRGHFAEFGIIAPVERHRVVDLINLLQDVDDADMPALAREALRSLIAELQAIDVRIDAVEAVIVREHRTNPVSRRLASIPGIGPITASAIAATVADPSVFRSGRELAAWIGLVPRQHSSGGKRKLGRVSKQGDRYLRRLLTIGATSVMRRLPGKTDGHSAWVRMLLDRRPFRLVSLALANKMARIAWAVMVRQEDYRRPLAAAAV

SEQ ID NO: 416278 - protein, 403 aa, unidentified
MKTPPNTPAIITESATFIGIDYHKKYSVWHAIDAGGNDLGKGRIEHHSPHDFAALVKRWSNPRIVFEASMNWHWLYEVLERSMPSAHLMLANPFKTRIIAEAQVKTDKIDARILALLLRAGLISSVHIPCKATRDRKEVLRQRCFFVRQRTMLRNRIHRLLGAQHDLKLPQCSDLFGKKGLSFLEKLELPAPAGLLLKQQLEMLKNVQLRIKEDETALESMMSTTSAQQHVLSIRGMGPILASVVVNEIDDISRFHSAQKLCGYAGLCPSTSSSGGKTYNGKLMKHCNKWLRWAFVEAAWVAMGCDSYFGDIYKKKRALGKKANTAILCVARRMARITWQLLTQGRDYTTTPPPPPIQARPAPVAKAPAGSVKESDGKASSARAKGKRRKATKQNFPAAPIAH

SEQ ID NO: 416279 - protein, 421 aa, unidentified
MPNIEIGVDFMVKENFIYVGIDLHKETHTAVMIDCYNNKLGEITFPNRPADFPKLVTKVKKCNTDAKEVVYGLENAYGYGRALPLWLIDKGYFVKDVNTAISHRQAKHRGAMYRKSDSDDAKAIALATLNMLDKLPDACPNDAYWSLGQLVHRRDNIMKQRTRLVNQLHEQLCIAYPSYKQFFNDISRPTALYFWEHYPSRKYLKGKSVEDLRAELVPVSHNKCSTKTCEKILDAVASDKVKNNAYQDARDMVTLSIVSDLQYYDKQLAEVDKMLEQMYKMLGCTLTTIPGVNVITAVKILAETGDIKRFSNANKLAQFAGIAPLHLSSSGKGKDVATKQGNRRLQATIYFLAIQMVQVSSKGTPRNSVVRAYYEKRKAEGKTSQQALICISRRLISIIYGMLKNGTEYRMPVVENAGENR

SEQ ID NO: 416280 - protein, 356 aa, unidentified
MLNDKKYIGMDVHKESISIAVRNDAGKIVMECVIETKASVILQFIDGLRGDLQVTFEEGTWAAWLYDLLKPHVTELVVCDPRKNASMREGNQSDKIDARRLAELLRLNHLNPVYHGEHGLRSLKELVRSYLTITKDLGRVMSRVKAIYRSWAIPCTGKQVYAPRHRAEWLAKITEPGVRRRAEFYYQQLDALRALRQQVRRDLFAESKKHPAWKRLCQIPSIGPIRAAVLLGILQTPHRFRGKRQLWAFSGFGIETQSSADHRSVDGQLQRVKKPSSIRGLNRNCNHDLKNLFKGAAILASSKPGPFQEFYTALLTKGIRPEMARLTLARKIATIVLIVWKRGASFDAQHLKPQTA

SEQ ID NO: 416281 - protein, 417 aa, unidentified
MVRELIGMEVLYDRVAGLDIGKASLTVSVRTPGARRGRHQETRTFKTTTGSLRVMRDWLVEQGVTIAAMESTSTYWKPPLYCLEEVMEVWLLNAAHMKAVPGRKTDVRDAEWIAQLLEHGLLTPSFVPPPPIRRLRMMTRYRIQLHGDRTREIVRLELMLEDASIKLSTVASSLKTVSARAILAAMIDGETDPQVLAEMAKGRMRKKIPDLAQALEGHFDVHHARLARSILDRIDRVEQAMAELDLAIEAECAPWAHQLELLQTIPGVGPKVAQVVIAETGGDMSKFPTAAHLASWAGLAPAIYESAGKRAPAGRRRGNKWLSAMLVEAAGSVARMHDKNYLAVQHARLTRRRGMSRAQIAVAHSILTTAYYMLKRDEPYRDLGPEWLAKRNEEAHTRRLVAQLEKLGHTVVIDPAA

SEQ ID NO: 416282 - protein, 342 aa, unidentified
MLTIGLDVHQSKTSVCVMDGKGNILREQEVKGDYGAVAQSLSKVRKPFQVCYEASTGYGALHERLAPLASKIAVAHPGRLRLIYQSTKKSNRVDAKKLASLMHLNQVPEVHVPRQEVRSWRGLIEHRRSLVDGCVGVKNQIRALLRCQGIQGPPGKRMWSKAGLAWLKEVAWPTAMEALRLEILLEQLSDQTRKLDRVTQVLDERGEKHGGVKLLMTIPGVGPRTAEAFVAYVDDPHRFGSGTIGAYFGLVPREDSTGDKRRLGHITREGPPTVRKLLTEAGWRGSRESATIKDVFDRHLRGDKGRRKLAIVATGHWLCRVMLAMLRSGEAFREKEAAPAKQ

SEQ ID NO: 416283 - protein, 413 aa, unidentified
MRVYHNVCCGIDVHKKSVTACLMWGPAGEEPQMEIRRFGTMTSDLRKLGEWIKQAHCEIAAMESTGSYWKPVWNVLEDYTQLILANAHHVRALPGEKTDQKDGKRLAGLLRHGLIRPSFVPPREIRQLRDLTRYRSKLLGNGAAERNRIQKVLEDANIKLGSVLTDVFGVSGQKMLKALIAPDVVEIDKIAQLAHWRLEPKIEQIKKALDGKLTDHHRFLVELSLTHMELIENQLIRLDDEIDRRLAQHRRSLELLDSIPGIGPDSAKTILAEIGYDMSAYPDGEHLASWSGLCPGNNESAGKKFSGKTRKGNPQLRAALVDCAWAATRKRGSRFRAKYYVVKSRRGSKRAIIAVAHTLLLTIHAVLQTRKPYSEPDPPRLSDHKRLKKANDLCRKLQQLGFNVALKEKTKTA

SEQ ID NO: 416284 - protein, 386 aa, unidentified
MKKNNIPEESPSKRANKMSRKVNRTGQKSRRQTGPVTIGLDLGDKSSRYCVLNEAGQVVLERSVGSSKKAMTQVFGAIPRCRIALEVGAHSPWVSRLLERLGHEVIVANARQVKLISQSSRKNDRLDAQMLARLARVDPQLLRPIRHRSEQAQGHLTVIRVRAALVDARTGLVNAARGLAKAMGERLPKCDTDQMGEERLKMLPQGLREALRPLLQEVESLTGKIKECDVKIEQIARTEYPETCLLRQVSGVGTLIALTFVLTVEDKKRFAKSREVGCFVGLRPSQSDSGESKPQLPISKEGDQYLRKMLVQGAHCILSKRGPDTDLKRWGVALSDRGGKNAKKRAIVAVARKLGILLHRLWVTGEVYEPLRNSQAAAKQKKTAAA

SEQ ID NO: 416285 - protein, 350 aa, unidentified
MELAAMNTEYVCGIDLHSRSNYICVMNQKGDIQLHRNIRNDFQFFKSLIEDYKGNISVGCESMHSYYWLADGCIENDIPFYLGHAYYMKTIHGGKKKNDKLDSKKIADLMRANHLPVGYVYPKKFRATRDLLRRRIRFMTIRAEAYAHIQTTFRQNCLLISPSDVKNKKTRRELISKIDDKEIQKNIELDLDVIDNFDALLKPIEAKIRAQAKLHDRTSLNLLLTIPGIGDMMSLIILYEIGDINRFASHQNFSSYCRLVICDRESGGKKSRGGFQKIGNPYLKWAISEIIIHAPSTSPVIKNYYDKLIDKVGKKRAQRIITHKFGVAIYYILKNKQGFDELKFIQSDMK

SEQ ID NO: 416286 - protein, 346 aa, unidentified
MNYSTTVGVDLAKNVIQISVVSGRGKELSNRSLTRKKFAEFLGKQQPALVAFESCATAHYWARAAKRHGHEARIIPAKAVAPFRQGHKTDSNDALAVAEAARRPNIKEAPIKTVEQQGLQAMLRARDRLIQECIAQSNHMRGILLEFGIAIPQGFAALLRTLPEVLEDGDNEVPDFYRPTLHRMYQRMLELREDIGAMTREVRELVKNHAVCSRLTAIEGIGPIGAMSLYSTLGSGAAFSKGREASAYVGLTPRQYSSGGKANIVGLSKYVGNRKLRSVLIQGALAYVYRMKEPRTSKDRWLKELIERAGPRRAAVALANKNVRTAWALIAQGTDYQRRPQLEMAA

SEQ ID NO: 416287 - protein, 405 aa, unidentified
MNAVGIDVSKGKSTVTIRRPGDVVLMPPRDIPHTKSAINELIKQIQSLDGETKACMEHTGRYYEPLAAWLSDAGIFVSAVNPVLIRDFADDSLRSPKTDKADSKKIARYTLDRWAKLKQYGSMDKTRNQLKTMNRQFSFFMAQKTAMKNNLIALLDQSYPGANDLFDSPARSDGSQKWVDFVYTYWHVDCVRGKSLSAFTEHYRKWCKHKGYNFSAEKAEKVYEASCDLIAVFPKDDNTKMLIRQAVAMLNTASETVENLRIKMDETASALPEYPVVMAMNGVGSTLGPQLMAEIGDVTRFTHREALTAFAGVDPGKNDSGKHVQKSVRTSKKGSPHLRRTLFQIMDGLIKRSPIDDPVYVFMDKKRAQGKPYYVYMTDGANKFLRIYYGRVREYFASLPETGEN

SEQ ID NO: 416288 - protein, 318 aa, unidentified
MCTEVFIGIDISKPRLDVFNLATGEVLEFDNTPAGIQAFVKYAKKTQPTLLVCESTGGLEQPLLLGCSEAKLPLAVVNPRQVRDFSRAMGKHAKTDAIDAVMLSEFGSRMRPEITLPASEDIRTLEAIVTRRTQILEMLTMERNRLGSTRDESARASLEAVIEFLESQVEDINAQMLESVRSNPELKALDTLLQSVPGVGPIMSATLLSSLPELGGTSREAIAALVGVAPMNQDSGSHRGVRFVRGGRANVRNVLFMSTWAAVRWNPALKVVYDRLVGAGKAKKVALVACMRKLLVILNAIVRDRKPWVDVTKLEVGA

SEQ ID NO: 416289 - protein, 370 aa, unidentified
MREDSVVYVGVEAAKAKHAIAIAEGGRSGEVRYVGEIEATPAAVERFGRKLERKDPRLPFCSEAGPTGSGLSRHIVALGHRCEVVAPSLVPRRPGDHVKTNRRDAITLARLLRAGELSGIWGPDAVHEAVRDLVRVRSAAGEDLRKKRQQWLSFLLRHGRVFTGRRSWGPAHTRWLAAQKFDHPALQIVVQDQVDAITEAWRRLERLEAQLAELVPTGSMAPVVSADQALRGVSVLVAVPFASEVGDGRRFDRPRQLRALMGLVPSERSTGDTVRRGGLTLAGHRRARRVRVEGAWSYRHPARVTEPMRVRLEGLPKGVREIAWKGQTRLCTRSRPMVGTGQKAPIVGAAIAREMVAFLWAMGRQVAPAP

SEQ ID NO: 416290 - protein, 417 aa, unidentified
MIQEIEKENERVSIESCSDRQRCQIELENDSYCQTGTVLRKKEQEKKKMKTVKAAQISVGEDLHKQQFTVNVLNEENGEILLEEIYRTNTEGYEEFCRKMHQYEEETGCSIKLAVEATGNARYFKNRMESEGFEVLVVNTNKFKVITMSTKKTDANDAATLAYYLSKDMLPESHLCDQTSEDLRRMLKTRSVLVSTIVKIKNQIHGMLLGYGIETNVAQFQSKRKRQELMKDLADQGYSQYTASSLEATLNILDDICADVKRIEAQIKEMTKDNEEIELLETMPGIGFVGATTIVSYLNDIDRFGKDFKRFSSYLGIVPGVHNSADTLRYGKITKRGPQDLRTAFVQIALGIIRQPQNTNNWKLIQDYRIMKVSKGSGRAIIALTRKIARIVFAMLNNHTSFNVDLLKKAEKEVVVA

SEQ ID NO: 416291 - protein, 356 aa, unidentified
MRSNKKVGKRQKIFIGIDVHNKSWDVTCVTHKGYCRSFNQQPSADALIAFLRREFPDAEYHAVYESGFTGFSTYYALTAVGIHTIIANAADVPTTQKEQLLKTDRRDSKKLAESLRSGDLEGIHVRAVEDLDDRSLVRIRKTFKREESATKVRIRHLLHTNGVEIPEQYVRHWSLAFTAWLRNEAKLLGTSRNSLLMLLNHLEVLHKEVLAAGRAVRKMIRSEKYAEPLRRLMTAPGIGINFAVVLLTEIGDFNRFPNERGFACALGLIPMCHDSGDTVSHGEKIFRGNRMIGGMMIEAAWRAVAKDAAFNAYHHKCCQRMKSTTAIVKVARRLSNIILSMMKNKKDYAPAKTYPK

SEQ ID NO: 416292 - protein, 345 aa, unidentified
MTSMNFIGLDIHKKTISYCVKDVSGRIQQEGKVGSSRRELDGWMKTLPQPWSVGMEATIFSGWIYDHLLPHAAQIKVAHPLMLRAIAAAKKKNDQIDASKIADCLRCDFLPESHMMPQEIRDRRRTLRYRHLLVRQMVQMKNRVSGLLMETGVEYNKQRLHKVSYFRELLSTNTEVHPSIRPLLKLSRETIERCQKTEYALVSSLQRDPVLADRIKRLRTVPGVGPITALTWALEIGDVSRFRTIKNAISYCGLCGDERSSADKVMRMPLSKQRNKHIQRALVEAAKLAPRQSHELAVIYDKEKQKGNGNRATLAVARKMVSYLLAVDRQQRDFISGEERRTGAA

SEQ ID NO: 416293 - protein, 375 aa, unidentified
MSNHSEAFVAFDSSKLRNAVAIADSGRMGEIRFLGEIENSTTATGKLVRKLAGKYERLTFCYEAGPTGYELYRQIKSLGQECIVVAPSLIPKKPGDRVKTNRRDAVSLAKLLRAGELTAVWVPDRHHEAMRDLTRARDTAVNDLRSKRQQISAFLLRKGLHYCAGKKTWSQAHLNWLMSQRFEYPEHRLVFEEMMMAMRQAQERLERLEQAMRAAVPDWSLAHLVTALMAMRGIDLISAATFLAEIGDLSRFQSPCELMAYLGLVPSEDSTGDRIKRGPITKAGNRRARRTLVECSWSYQHPPRVGKDKQAKVAAAPQAVREIAWKAQSRLNRRYRALVRRGKLKTVAITAVAREFAGFIWAVAREATAARAAAK

SEQ ID NO: 416294 - protein, 436 aa, unidentified
MPAYVGLDISQETVVACVVLADGREPVRRWSVPNTQPGADALAGRLAEIAAEHGVDTLRIGMEATGLYWWPLACALADAPVLQPFQAPVYALNPKLVHDFRQHYGVLPKTDRADAFVIAERVRFGRQLPPPFRVDLRYAPLQRLTRFRVHLARTLAREKNDFLTFLFLKSSAFGQAQPFHDPFGATSCAVLEEFTTEELAQQELAALATYLAERGRGRFKDPAALAATLQRAARDSYRLDKVLDEPLTLVLGTTMATSRTLQQQLKAVDKTIAQELQAIPQTLGSVPGLGPVWTAGLIAEIGAIHRFDDDAALAHYAGLVWPAHESGAFQAEDTALSKAGNTYLRSYLIEAANSVRLHCPEYAAYYQAKHAQSPKHAHKRALVLTARKLVRLVDALLRSDQLYQAPDQRQPRKEGSAPGSGRPGRHRRAKPVAALA

SEQ ID NO: 416295 - protein, 404 aa, unidentified
MANNERAVIGGVDTHRDVHVAAVIDDRGKILDTSSFETTTAGYRQLLTWLRSYGELATVGVEGTGSYGAGLFRYLFDEGVAVVEVNRANRQLRRRRGKSDTVDAESAARSVLNGEATVIPKTHDGVVESIRALRVAFTSARNSRTRVALQIRDLIVTAPASLRAQIEGLTTVQRVARCARFRPGDPSDPREATKLALRILARRYEALTEEMEELGRVLDELTYKANPALRSARGVGADVAAILLVTAGDNPERLRNESAFAALCGVSPVQASSGMTTRHRLNRSGNRQGNNALWRIAVVRATHDEETRTYVARRLSEGKTKREIIRCLKRHIAREIFIHLTNPAVVPVGTELRAERNAAKISLTTASTELGTYPLRISRLERGIDHDREFAEQYRAWLEQQKAA

SEQ ID NO: 416296 - protein, 391 aa, unidentified
MIYVGIDVAKDKHDCSISSSEGEVLANVFTIPNNMEGFRCLLQRISSCSTPQDKIKVGLEATGHYSYNILGFLLDNGLATYVLNPLHTNLYRKSLSLRKTKTDRVDARTIAAMLMSDVGLKPYTDTAYHNEELKSLTRYRFDKVRERAKLKQSVARLVCILFPELEKMVPTLHMVSVYALLEEFPGSHQIAQAHLTRLKTLLLDASKGHYGRDIAVSIREAARNSIGSVMPAKSLELRHTIRLIRELNAEIEEIEAAIQIMMDELHSPITTIPGIGFRMGAMILAEVGDFSRFDSPDKVLAYAGLSPSTYQSGQLTNCYAHMEKRGSRYLRFAIFNAAKYVCHWDPVFAAYLAKKRAEGKHYNVAISHAAKKLVRLIYALEKSREPYRLVA

SEQ ID NO: 416297 - protein, 491 aa, unidentified
MSQVVIGMDPHKRSATIEVMAGDEAVLGGGRYGTDAAGYRSMLAEARRWPERMWAIEGCQGIGRHIASRLLADGEQVVDVPPKLSARTRMFATGQGRKTDATDAHSVALAAARMQGLRPVVDDAQLAVLPILADRRRSLGEDHTRMICQLHQLLLELIPGGAKKSLSAAQAKALLARARPREAAGKARRRVAAELISDLERIYQRKKDPSKELSALLKATATTLTDLNGIGPSGAARLLVEVADVTRFPDKAHFASWNGTAPIDASSGDQVRHRLSRAGNRQINRVLHIMAVVQLRHRDSGPGLLRPQSRRRQDTHGSDAVPEVPAVRHRLPPDDHRRTGGGNGPGRTPGGGYWLQRGRLQPQHRRFGEVTSRTRHHRPYARASQPGDPFSAPLPPPPASAGPQPRSSAFCLTAARTGAHSQGGNDALLTQRGARFGWTGATGCTLATGSPDSVSCTLCGVIFGRAKSPGAADGVFLRDEDKGAGSNSSCW

SEQ ID NO: 416298 - protein, 712 aa, unidentified
MLIVDVNIHIHDKYMLEGGNLIENSVGQKKEICQWLQGLINAFVESEENFVLEELKHIYVANDYPKELYEFQTKKGMKQGHTKNELGEGQAMVLSYKNDIGEDETSIFFRAEFIFGLYTSEALREKFKDEVTMLFNTFFHELCHINDDFHTRKLFDIDEINKCTVIPRNLYPISIGIWKEYYAYRKSAERFPYGDLMIPHLQETSEWANKEVVELQKKYNQDDNMDKFMLNFTSKMIYLSRVMVNVIGNVQGYTSDGNEQEKLFKLALQILPNDKLETVFKTLIQELDNLFNEYPTWKSISRLEILNNIVLDCFNAFGVFPSEVKNDQMYIGIDVDKNFLTIKEIDEEGNPIGKDKIRNSIQALERFSQKHEKHSKIALEASSYSMFGYRYLAKQGFEVHMAHPGALHKIIQSNNKTDEHDALDLAQLLRTGYLPESWVPDEELESLRSLINRRVELGKRSTQVKNRIHGLLALNGVKEPRATDLFGKAGIHFLEHLQLPAEFKQVLESLLRELAYLKEEIGLLESKLAKQGKEGRFKKEVKRLMEIRGVDFYSALADMAVIGTVERFPDDRKISSWVGIVPRVRQSGSKEYHGHITKAGSGLLRWILISNANVAVKYPGKLRRYYLRLKARVGHGRAIVATAHKLLKIIYHMLKEDKHYEERDDDLFYRKLSRMNQKANCKKTPRLDSLERKGREIFIKEGRIMNTDKSFS

SEQ ID NO: 416299 - protein, 347 aa, unidentified
MRYLTATAASYVGVDLHASSLHVCVLDRAGTVRLSRKLKAQPEPFLEALAPFRPDVLIGCECVHTWYWLADACRDQGLRFELGHAWGIKAIHKSKTKSDAHDAEILARLLRGGNFPLAYAYPRERRGLRDLLRTRLRLVRQRAELYGHIHTVRRQLNLDSIGRDVKYKSKRDGATTGITDPNTKRGVEARLNLLGPLDTEIRRLERAIEVAAEEHFPTELAALQTIPGVGPIISMTILLEIDTITRFESRQQFCSYARLISPRQESDGKIVGAGNARAGNAWLKWAFSEAAVLSSQKDERMKKCLAKLQSKHGSGKGLSIFAHKLGRVVYHLLRTNKVFDVERFVRG

SEQ ID NO: 416300 - protein, 347 aa, unidentified
MFAGIDSHKDTLAVAVIDDGGRAVVVRQLPNDPAGFTALSALAAEHRVERVGIEGSTNFGWAAAMHLLETGIAVVEVPPGLTSRERSGRPGQGKTDPVDAVAIARITAREPNLPTVRPMEGLPADLRVLMDYREQLIAERTATVNRVHADLGWLRPGYRHRLPHLTNSSHLRAALALLENDFSVRATVTHARLTRLLAIHAELAGLREQIAALVEQSGSSLSGIYGIGVFVAARILAEVVDVRRYPSRHAFAAANGSAPIPASSGRTVRHRLNRGGNRQLNRALYTIAITEIRADTEGRAYYARKRAEGKTGREALRCLKRRLSDVVYRTLRADQLTSPLQPLTATA

SEQ ID NO: 416301 - protein, 466 aa, unidentified
MGKGSGMTRGDVRRNARRERLRELLPRDGAVVGIDLAEEKQALAVADHDGRVLARKTVRVKAFRLGAALDWAVGQARARGFARVTVACEPTGARWLQVQRLCGERGLPLVCIQPLVSHIAREQQDLTTHKADEPDSVLIARLAAELHCYVPEELDETWAELRHLGRRRAQLITAGTASVQRVREFLSVAWPVVTEACVHPFDSVTWLAAMGVVTGRCGADPGRLAAGGLEQFTGLVRAAVAGWGGQRPDGRVLRAVFAALTDTEGVVAWSRRGLFRRIAEELGDLARTRGQLRAIEADMVVVLGELGLSRLGDIPGLTATGAAVILAETGDPRRYDSSSSLVKHAGMSPAGNASGAFEGPAHISRRGRPALRLAVWRAVWPMLRHNPVLAAKYAALTAGAAAAAAAAQARRGTGPQRSGAAAAARAKARVACAASLLRWIWCLTVHGTSWDPDVAAGLAPTPAQAA

SEQ ID NO: 416302 - protein, 350 aa, unidentified
MMIIGCDYHPGFQQIACVNTETGELSERRLSHREEAEQFYRNLKGRGLTVRVGMEASGHARWFERLLTELQFELWIGDAAVIRTKRVRKQKTDRQDAQLLLKLLMEDRFPRIWVPDAENRDLRQLLWHRHRLVQMRTRIMNQLHVVALNEGVRRKKALWRPAGRSELESLVLAPWARRRRKDLLDLLDQLTLKIHELTRALEEEVEKRPAARRLMTHPGVGVLTALAFELVIGTPERFHCGKQIASYVGLVPAEESSGDRRRLGHISKQGNALVRFLLVEAAQVTVRSQPQWRSKFFHLAMRRGRKIAKVAMARKLAVHLYWMWRGGWDYEQWEKLGSHAGEPGNRRGVQ

SEQ ID NO: 416303 - protein, 340 aa, unidentified
MRQLYAGCDLHGNSNLFGIIDGQGKKIFKKKLPNDLGVILSTVEPFQEELVGIAVESTYNWYWVVDGMMEAGYRIHLANPSAIQQYIGLKHSDDKHDAFWLAELLRLGILPEGYIYPKENRPVRDLLRKRGHLIRLRTSALISLENVISRNCGKKVSVNDVKGVREDRISPYLEGNDDLALAGRVSKNAVDFLSDQIHEIEKSVLKRVIQEDRYRLLQTIPGVGKILAMVILLETGPIRRFESVGNYVSYCRKVPSRWTSNDKWKGSGNRKNGNRYLAWAYSEASDFARRYHPEPRAYYQRKMQKTNAACAHSALAHKLARAAYYIMKDHVPFRPEKLFG

SEQ ID NO: 416304 - protein, 405 aa, unidentified
MQVYIGIDWSKDKHDVAYMNSAGSVIAYQTIAANPVGYAALDARRQQLGAQLEECWVGIETVHNLVLDDLVRRGYPHLYLVPPSLVKDSRGRFGESKANSDRKDAELLADLLRTDRARLHPWQPDSDLTQQLSVQVSLESFLTNSIIRVTNRLRNGLWRYYPNAANVFSSLDTQIALEFICAYPTPEQAQALTFEAFRVFAQQHHYPNPKKLPACYARLQQPQPEPAPAILLAYRPEAVYLAQLALQLVQQRVKVQKTIQDLFTQHPDAVIFASLPGAGEKLAPALLTKFGDDRQRFPTPASLQALAGTCPYTKASGKRRRVLFRHACDKEFRTIAQQWAKASLDLSPWATAYFQTVLPRCRSTSQAYRRLANRWLAIAWRLWQDQKPYNETYHLHQHALRANPN

SEQ ID NO: 416305 - protein, 404 aa, unidentified
MFYFGIDWSARFHVLCIRNEAGARISQLRFEPTPAGFAHIEAERRKLQAPAAECPVAIETAANLVVDYLLERDYPVYIIPPQATAAYRNRQRSSGAHDDDSDAALLAGILRTDRASHRQWQPNSALTQQILAQVRLSESLRRSIQRQANQLRAVLSRTYPTALTLFSDLTTQITLQFLCAYPTAAEAQALSQAAFEQFCREHDYRRTDQLPSSYAQLVAAQPAAAPAVAQAYRSQVRSLAEVLLVQVRCLAQASRELAPLLAAHPDAFIFTSLPGAGALLAPALLAKFGDERSRFPRAGDVQALAGTCPVTKRSGQRTIIQFRRGCDREFRRISQQFARASLDKSGWAAAYWAEIRPDCASDSHAYRIIANRWLAIIWKLWQSRQAYDEAYHLQQRALRRKPRA

SEQ ID NO: 416306 - protein, 343 aa, unidentified
MQIATIGLDLAKNVFQVHGVDEVGKLTITRQLRRGQLIGFFKKLPPCLVGMEACATAHHWARELIKLGHTVRLMPASYVKAYVKRSKTDAADAAGICEAVTRPSMRFVPVKTVESQAAIMLHRSRDLLVRQRTQLINALRAHLAEVGLVAAAGVDGLKSLLAIIREAGETGQLPGPMRQALQPLVDQLAALQAQIGQLERSIHAQHRASDVSRRLETIPGIGVIGATAIAATVSEPGAFKSGREFAAWIGLVPRQHSTGGKQMLGSISKQGDRYLRRLLIVGATAVIRHARAHPDKHPWIIKLLAKMPAKKVAVALANKTARIAWAILAKGGTYRAPALAEHA

SEQ ID NO: 416307 - protein, 308 aa, unidentified
MTLHPNFIGCDVSKDTLDLFDPESSRYRRVANQLEALRDFAASLEPGRDIVVLEATGHHDRLLRHALAARGIGYVRLNPVTARRFAEARGRLAKTDRIDTRSLADFGATFRPQPDIPPCAQRERLAALARRRDQLVEIRARELSRAEEFVPEIAADIDASIATLDARIAELEATIRRQVAASDELARQADQLMSAPGVGPVTALTLLAHMPELGRLSPKTAAALAGLAPFNADSGQKRGRRAIAGGRPRVRKALYMAALGAIRANQRFKDFYSGIARRSGSKKVAIIAVARKLVTVLNAMLRDGKTFA

SEQ ID NO: 416308 - protein, 342 aa, unidentified
MENTAARKRKQVPEGYLIIGVDPHKKRHAAVTITQDFTTRDKFKFDNTREGLETLLARARMEMVKSGCRGVMFAIETGGHYWRNVAYFLDEQGIPFRFINQFTLKRRREGKDLNRRKNDYRDSEVAAQLLCTGEFTETKVPQGVYAELRTAHNAYRRLVKERTRIINLVKGLLDALFPEFTHVFKDPCGLTSMSVLSICPMPRVITGMTEAEFVATIEAQHQGRLMRRKLRALHYMARTSIGIEAGARSVSSEISFLVEKFELIRRHIRIIERTLVRLVDETEEGKYLLSIRGLNYIAVAGLLAELGCFKAYRSAKQMIKMAGSNPTESESSREKGYTYSNE

SEQ ID NO: 416309 - protein, 375 aa, unidentified
MLVMGWTAPDGIIGAKLVVSIRNQQRGPSVAKISMIGLDLAKNVFQVHGIDAAGKVVLRRQLRRGQMEKFFARLSPTIVGMEACGGAHHWARVFQKFGHEVRIMPPRYVKPYVKRNKNDGRDAEGVCEAMGRPTMRFVPVKSLDNQAVQVMHRTRRLLVRQRTMSGNALRSALAEFGIVAAQGLKGLRQLTQVLDDPASAIPEKARMPLQVLARQWERQTADIDKLEQQIVRDAKTDEVARRLMAIPGLGPLGATAILATVPDARMFKTGRDFAAWLGLTPRDLGTGGKQRSGHISKQGDRTLRSLLTIGATSHLRCQRARGCKDPWLRDLLARRPFKVAAVAYAAKMARIIWAMLVTGECYRVRDRSAPKSVAA

SEQ ID NO: 416310 - protein, 421 aa, unidentified
MTTIPFTTDQSTWVGIDIAKKHNDVLIERPRRRRQHFKVANQLEDYRRFAKFLGDLEERPVIGFEATGNYHRTLAFFLAEKGFALRLVSSVAAARTREALYNSWDKNDPKDAQVIIHMLKTGVTQHYHDPLTHGINELQELSKTYFQISLHKVRIQHSILTHYLPLYLPEAEKYMKSRRAQWFTHLLERYPCHAAVAKFSREEFIEDAWVYVGRKVNKTAFLEDFYATASQTIGLPVSEESEAIRMFRIVLREHQRLCEIRADIEKEAESFLGENADYVRLKTLPGVGPILALTILAEAGDLRRFPHHRQFLKFCGLDLSSHQSGQFSGKKKLSKRGNRHLRYAFWLAATVAIRMRENSFRDKYARYVASDPTNPDLKRKAFTAVAAKMARVAHGMIKHETNYRPFHERAVPGGVIPAKGR

SEQ ID NO: 416311 - protein, 414 aa, unidentified
MTGSGLLQQALPGSALVVAIDPGKVLHRVWFSTGDAGLLEEPRSVPSLRPGLEDVTATIRRWAGADVPVVAIEATGALHGSWVRALEQRFPLSVRVFAPSETAAARAQLGSRRFKSDDRDCAALTYLARQGQGRPVVEDPVEAMRSAVRYRRGLVAERKVAQQRLHDQLNALCPGLSAPAGHGRVLELEDSSGQAVLACVAAFAGRAPTLRSLRARAPGRLSAANAEYWVQRWKTCLPPPADAQVRAERLARSIVRWQAIRADIAAVEIGIESSLADTAGQVLTTLPGVAVIRAASFAAFSLPIDRFPTAEHLYSATGLAPARYQSATINRTGRISRTGLAEHRDALMGIAWGLSQRCGPFIDRDRELRARGMAPIQARVALARHACRLTYRMLKTQQPFDDQRYRQGRHPSER

SEQ ID NO: 416312 - protein, 402 aa, unidentified
MNCVGIDVSKGKSMIAVMRPFGEVVVSPFEVRHTASELSELARLLKNLDGETRVVMESTGNYHAPVAWLLHGAGFYVSVVNAMLVHDYGNNSLRRGKTDKKDAVKLANYGLDHWLTLPRYVPEEDTRLMLKTCYRQYQQYSKVQTMLKNNLISLLDTAFPDANRLFTSPPRADGSEKWVDFVATFWHCECVCGLSKKAFTAKYQKWCRKHGYNFSQDKALDIYASACGRFGVMPKTNTAKLLVEQAISQLQTTSAALAALKQEMQSLAASLPEYPVVMEMFGVGPTLGPQLIAEIGDVRRFHSKKALVAFAGIDAPPYQSGQIDVRSRSISKRESASLRRTLFLVMGVLLQCAPMDEPVYQFMNKKRSEGKPYRVYMMASANKFLRIYYASVKAYLDSLEHD

SEQ ID NO: 416313 - protein, 429 aa, unidentified
MNSTRNKKIEQVKETTMIVGIDIGSEKHYFRAFNWRGIELTRKPVAFSNSMEGFNSFYNTIVELIQKSELEEALVGIEPTGHYWFDLGQFMGEKKIKFVMVNPHHVHKSKELDDNSPSKNDRKDPRVIAGLVRDGRYFYSYMPTGVYAELRNASNRRFVLVEEQTRAKNRLQKWIAVYFPEYKGIYTRIDAKGGLLVLKQAPTPEEIVRLGVEGIIKIWKDAKLRGNGHKKAMVILNAAMKSIGLKAGLTEARMEIQDLIEDYELQTKRLERVNDLIKELCQQIRYADKLLEIKGIGITTIAGFIAEVGDITRFDSAKELQKLAGLELVADSSGKHNGKTKISKRGRKRLRYLLFEAAISVVGKNEEFKEIHRYYTTREKNPLKKMQSLIAVACKLIRVFHVILTKGISYDASKMLKDIQHPGEPLKAA

SEQ ID NO: 416314 - protein, 347 aa, unidentified
MTIVEDARVITGGVDTHADMHVAAALDPIGGLLGVREFPATAAGYGSLLSWLRSFGTLTVAGVEGTGSYGAGLARHLAAAGVRVVEVDRPDRQDRARQGKSDPLDAVSAARAALSGRASGAPRGRDGAVEAVRALMVAKRSARQERTQAINQARALIMTGPEELRARFVRRSPAQLVEVIAALRPRPGDVPGYATRVALRELGRRARFLDAQLDRLDELIGPLVTARAPGLLALHGVGPDTAAMLLVAAGDHPERLRSESSWAHLCGVAPIPASSGKTAGRYRLNRGGDRRANSALWRIVIVRMSSHPATRAYADRRSKEGLSKKEIIRCLKRYVAREVYRQLRNGA

SEQ ID NO: 416315 - protein, 379 aa, unidentified
MKYVGLDWASQATVLDEAGQVLDRWAFPHSEAGWLMTMDLLRRQGMPEELPVIVERTSGPVVDRLLSAGHPVVPVHPTAFFAARPRWGASGAKSDPGDSYKLADYLRTDGHRLRRLAPVDPGLQELQALVRLRDNHVRARTAASNQLTAMLDAYWPGPRQLFVSLTSLIALSFLADYPTPAVAAHLTEARMAAFLRRHHYRGGKTPAELVARLRAAPALAYPRTRVLADLPGVGMINLAQLLAEVGPILDRVDSAEQAATECGAAPVTRASGKTSGVYFRWAANTRARKAITSFAHNARLQDSWAAKLYADARARGKRHPHATRIVARAWLRIIWACWTTQQSYDPSRHRTSTSSYPPVPPPPANPPARRRGQDGAPHG

SEQ ID NO: 416316 - protein, 429 aa, unidentified
MIMGFTKPIEHFNLQQKKVITTNTLYVGIDVSSKSNVIYLMLPNGDKHSNFSVANSREGSTQLVKRILSALTSHSLDTVLIGLEATSVYGDNLVYFLREDATLAPFNRKIHILNPKQVKKFHDAYNDLPKNDYVNSFVIADCLRFGRINKEVYMGDYRYKALQNLTRARFFAVQNLIKEKQRFMNVLFKKHSTMTQEKVFSDTFSTTALAVYDEFESAEVLANMDLHELTDFIIDKGKNRFPDPDAVAKAIQKAARSSYRLPKTVNDSVNQVLSISITSMKALESQIKEFDKAIKAQMELLPNVLISIPGIGPVYSAGIMAEIGDINRFNSQAALAKYAGLAWKQHQSGGFEAEVTRLIPSGNRFLKYYLCEAAFSLVRCDKEYSDFYHLKYKEVNRCQHKRALALTARKFVCLVFRLLKDNRLYCPAK

SEQ ID NO: 416317 - protein, 397 aa, unidentified
MYIVGIDIAKRKHEAAVIDGEGTVIIKPFSFTNNCSGYNRLLAMLTKAKLPLDEVSFAMEATGHYWLALFTRLQKEGFRVQVINPVQTNSIRSFYIRQAKTDPRDALLIAEVIRFGHFSESTLHPENIYELRELCRGRHAIVSMQADVKRKVIALLDQVFPEYETAFTNMFSDTSMAILQTCPTPKELSEMPLEDLCHLIEVSSHKRFRMAKARELQELARNSFGFAMAGDVFSTMIRLYAKHLDFLKQQVREIDRKIAEIMDTLDTPITTITGIGPTLGAYILSEIGDISRFSSAAKLAAYAGIDPTMRQSGEYNGVRNRMSKRGSPYLRHAIWLAASSAVLHDPALKLYFQKKRDEGKPYMASVGHACRKMVSIIYAVMRDNKAYTPCIPNEISA

SEQ ID NO: 416318 - protein, 375 aa, unidentified
MNQSRTLYIGMDVHKDAIAVAYVAKDHDAEVVYLGTIGTRQADIDQLVRKLQSKAKHLLFVYEAGPCGYWLYRYLTKKGYDCWVVAPSLIPKKPGDRVKTDRRDAVQLARLMRSGDLTRVYVPTVDDEAIRDLTRAREDTLRDLKSAKFRLKAFLLRQDIRYVGQANWNPAHLRWLSEVVCPTPAQQIVFQEYVRAVNEHTERLHRLEQELHEQVKSWRLHPVVDALQALRGVQFTAAVTTVAEIGDLTRFDTPRELMKFLGLIPSEYSSGDQRRQGSITKAGNTHARRVLVEGAWAYRYPAKVSRHLQLRLETQPKMIQDISWKAQVRLCKRYRRLVSRGKHPNVVTVAIARELAGFMWAVAKQVPVTPSSQDA

SEQ ID NO: 416319 - protein, 392 aa, unidentified
MVISVGIDVSKEKHDCFIVSSEGKVLADVFTIPNTMEGFHCLLQRIRDCTAPQDKIKVGLEATGHYSYNLLGFLLDNGLATYVLNPLRTNLYRKSLTLRKTKTDRVDARTIASMLLSDAGLKPYTNTAYHNEELKSLTRYRFDKVKERAKLKSSVARLVCILFPELEKLVPSLHIASVYALLEEFPGAKQVAAAHLTRLKALLEIASKGRYNRDMALEIRDAARNSIGSRMPAKSLELQHTIRLIRELDDEIEEIEEQIHSIMDELHSPITTIPGLGFRMAAMILAEIGDFTRFDSPDKLLAYAGMSPSTYQSGQLKNCYPHMEKRGSRYLRYALYNATKYVCHWDPTFADYLAKKRAEGKHYNIAISHAAKKLVRLIFAMEKSRQPYCSAA

SEQ ID NO: 416320 - protein, 385 aa, unidentified
MTIQGNAFKFMARDYDVFAGLDVDKKSMSVVFTDHQGTMRSLRMAGKATPLVNYVRKHFAGQRVAFVYEAGPTGFGLHDELVQQAYTCVVVAPSKIPRVPGDRVKTNRRDSRKLAENLRGGQLQSIHVPKRAYRDLRHLVQLRDTHVRQLSASKLRIKALLLFEGIPFPDPTERWTARAMRDLQTLPCSETVRFKLDDLLHTLHFHFQAAARVTKQIRQYCLGDPELQQSINLLLSLPGIGWIVASHLVARLGDPQQIKNGKQIAGFLGIVSSEHSTGEKVNRGEITRSGDSRLRNKLIQSAWTAIKKDPELRAFYRRIYQRHPKKVAARKAVVAVARKLTTRIYVVLKEQRPYVLRPDSSIAPLTAEETVGPRDRLDTAQNDQS

SEQ ID NO: 416321 - protein, 420 aa, unidentified
MKYARVPRLDAPLGVLSAGIDWASADHAVCIVDAGGAVVSRFTVAHTAEGLKTLVSRLARAGVTEVAIERGDGPVVDALLEAGMTVVVITPRQIKNLRSRYGSAGNKDDRFDAYVLADVLRTDRARLRPLVPDSPATVTLRQACRARKDLVRHRVAVGNQLRAHLLVVFPGAAGLFCKLHSAISLAFLARFDCQDRADWLSQKRLAAWLKGAGYSGRTDPADLHQRLTSAPRGATGEEGAASAQVTRALAAVLASLNTQIKALEAQIAARLARHADGHIFTSLPRSGTVRAARLLTEIGDCRARFPEPQALICLAGAAPSTRQSGKHKAVTFRWAVSKQLRDAVCDFADGSRHESPWAAQIYNAAIARGKDHPLAVRILARAWLYVIWECWHNGVAYDPARHRGLQRLLADQATGTDQAA

SEQ ID NO: 416322 - protein, 367 aa, unidentified
MKKISTAGAKQTRNFVGQKLTIGLDLGDRSSWYCVLDEAGEVLLEQKLGTTPKAMKEVFGKMPRSRIALETGMHSPWVSRVLSELGHEVIVAHARNVRLIGESRRKDDRFDARTLARLARIDPQLLAPVQHRSAQAQAHLMVIRARAGLVRTRTSLINTARGLTKSYGERLRGCSPRNLNAEKARQLSPELQAALEPLLGAIESLSERIYEYNQQIAKIAKENYPQVARLEQVKGVGTLIALTYLLTLEDPQRFRKSRDVGCYVGLQPGRRNSGQSEPQLHISKEGDPYLRTLLVQGAHHILGPFGADSDLRRWGLKLAERGGKNGKKRAVIATARKLAVLLHRLWVSGEAYEPLRNRRREVLPAAA

SEQ ID NO: 416323 - protein, 410 aa, unidentified
MRRTFVDLTQQCLMKGGIILTYFVGIDLAKFHHECLIINHYGEVIIKSFTFDNTHHGFRSMLSALSSLDASESIKIGFEATGHYGTNLKNFLTHHGYDFMEIHPVLINQFSKSSSLRKTKTDRTDVALICSYLITVEFKPYPTQSYHTASLKSLTRSRDTLVKERSLQLQRMTNVLDLVFPEFKPFFKHSLASATCLYILNNYTLPSKIARMNLISYEKMSSILRHTISYARFLSLKDLAKNTVGVENDLLEFQLRNYLTLYTTLNQLILETEALIVREFSKIPTHLQSIPGIGIISAAGIFSEIDPIARFNHSDQLVAFCGLDPALYQSGESEFKGRMVKRGSSYLRQYVMNSTQMVILHNPIFYDYYLKKRQEGKPHRVALSHVAKKLIRIIYKLETSQINFDASKMI

SEQ ID NO: 416324 - protein, 349 aa, unidentified
MNMPSRITAGVDTHLDVHVAAALDERGALLGVEQFATTPAGYGELLGWLERFGTVELAGVEGTGSYGAGLCRFLHAHDVAVVEVDRPNRQRRRRRGKSDPQDAISAARAAQCGDSCGAAKTRNGPVEAMRVLRVARWSARKARTQALNQMRALISTAPDEIRSELRDLNVHRMLERASSYRPAGRRDPIAATKFALRTLARRAIALEAEITDIDTILKTLAAEHAPQLVAVNGVGTDVATALLVAAGDNPQRLRSEATFAHLCGVAPIDASSDKHQHHRLNRGGDRHANSALWHIVITRMVCDQDTRDYIARRMAEGRTKKVAIRCLKRYIAREIYQQLPRPQLALDSP

SEQ ID NO: 416325 - protein, 355 aa, unidentified
MMEFDETIKKVRGSKMNITTLGIDIAKQVFQLHGTDGHGKVTLKKRLRRGQLLTFMQQLPPCLVGMEACAGAHYWAKKFQTYGHTVKLIAPQYVKPYVKTNKNDYNDAEAINEAVTRPNMRFVGIKADWQQDIQALHRVRSRLMQSRTTLVNQIRGLLQEYGVVFPRQISQLRRGLPLILADTENELSDQARALFAALYEELHEVDLRIAQRDKQLLAIHKASELCQRLGEVEGIGPLTATAFVSALGDAGMFRRGRDCSAWLGLVPRQFSSGGKTVLGGISKRGDRYLRTNLIHGARSVIARADKKTDARSLWLMQLKARVGMNKACVALANKNARILWALMASGERYRASEPA

SEQ ID NO: 416326 - protein, 449 aa, unidentified
MKEPQEIEDEEYEQILERVCAIDVAKATGTVCTRVPHPSRPGARRTRVWDVDATTNAVLELGGHLAGEGIEKVTLESTSDYWRIWFYLLEAAGLDVQLVNAGDIKNVPGRPKTDKIDSVWQAKLTERGMLRPSFVPPAEIRQLRDYTRLRTDLTRERARHWQRLEKLLEDALLKVSAVASTLDTLSVRDMLEALIAGERDPKVLAGLARGKMKAKRAGLIEALTGRFDDHHAELVRMLLDQIDHLTAQIGTLTTRIGELIAAIHAAQGIDADGATGPGAGTGPGAPVLPAIARLDEIPGISPAGAQIILAEIGLDMTRFPTAGHLVSWARLCPRTIQSGAKNRSGKAGKGNPYLKGVLGEIAAAAAKTDTFLGERYRRLVKRRGKLKALVAVARTILVIIWHLLADPAARYHDLGAGYYASRTDTDRKTRNHVRQLEALGFTVTLAPAA

SEQ ID NO: 416327 - protein, 408 aa, unidentified
MNAVGIDVSKGKSMVAALRPMGEVALLPQEFLHTEVGLEQMAYAILALGENTRVIMEATGRYHEPVAAALHAYGIYVCVLNPLFIKQSGGGSIRKVKTDKADAMKIAKYGLDNWVDLREYTPMDTVRQQLKLCSRQYNLYMKTVVSLQNNLISLTDKTFPGVNELFSSPERADGHQKWVDFVMTFYHCDCICRVSENAFAERYQKWCKRKGYHFSAEKAQDVYLGSCGHFTTLPKNDNTKLLITTAAQQLLAGKMTLAALRTEMTRLAKQLPEYDIVRAMYGVGETTAVQLMAEIGDVRRFPRRSSIVGFAGVDPAVDQSGKHSAKSVPTTKRGSPHLRKTLYQIVCTYLKKSPVDEPVYQFLDKKRSEGKPYFVYMTAAQNKFLRIYYARVKECLEAFDAQQDTSQR

SEQ ID NO: 416328 - protein, 341 aa, unidentified
MQITTIGLDIAKNVFQVHGIDGAEKVIVRKQLRRGQVMAFFEALAPCVVGMEACATSHYWARELTKLGHEVRLMPAKDVKAYVKRNKNDAADAEAICEAVRRPTMRFVRIKSAEQQGQLMLHRARDLLMRQRTQVINALRAHLAEFGITAAQGREGIKELLAIVAQEEGSRLPSDAHASLTVLATQLQAVQTMIGSLEKRIVAQHRSNEASKRLETIPGIGVIGATTIAAVVPDPRVFRSGRDFAAWIGIVPRQDSTGGKQKLGPISKQGDQYLRRILIVGAHAVLRRARQQPEKYPWLTQLLARRPFKVVAVALANKMARVAWALLAKGGTYRAPQLVAA

SEQ ID NO: 416329 - protein, 418 aa, unidentified
MTKKLDTTFIQIVHPVCCGLDVHKKKISACLITIDEHGEEQYDIKEFGTFTNDLLEMKKWLTDNSCPVLAMESTGVYWRPVHNVIEGFMEVILVNARHIKNVPGRKTDISDCKWLAGLLRHGLLKGSFIPPKEIRQWRELTRLRRTYTESLADYKRRVHKLFETANIKIDSVVSDLFGVTGRNLIFMLCNESELSLAAIKENAKRGLKAKAKELHRSVHGFFEDHHRFQLIGMMEMIATFEKRVTEITQRMDTLTAKHQDLLNRLDEIPGIDKKSAQSIVSEIGVTLDEFTCMAALASWAGLCPGNNESAGKRKSGRTSVRSHPFKTILVEVAWAAVKKKGSYYRAKYYKLKARRGAKKAIVAIAHRISKAIYNIIKQGDTFMDLGEDYLTVQTRQRTINNMKKRARQLGYNLVPCEN

SEQ ID NO: 416330 - protein, 408 aa, unidentified
MNTLYVGIDVSSKSNVVYLMLPNGDKHSNFSVANSHDGSIQLVKRIHSALTSHSLDKVLIGLEATSVYGDNLVYFLREDATLAPFNRKIHVLNPKQVKKFHDAYNDLPKNDYVDSFVIADCLRFGRINKEVYMGDYRYKALQNLTRARFFAVQNLVKEKQRFMNVLFKKYSTMTQEKVFSDTFSTTALAVYDEFESAEALANMDLHELTDFIIEKGKNRFPDPDAVAKAIQKAARSSYRLPKTVNDSVNQVLSISITSMKALESQIKEFDKAIKAQMELLPNVLISIPGIGPVYSAGIMAEIGDINRFNSQAALAKYAGLAWKQHQSGGFESEVTRLIPSGNRFLKYYLCEAAFSLVRCDKEYSDFYHLKYKEVNRCQHKRALALTARKFVRLVFRLLKDNRLYSPAK

SEQ ID NO: 416331 - protein, 466 aa, unidentified
MSKPDHSKGPKVAGRKGSRTEPAERECQLDAAGCDIGAREIFVAVPADRDEHPVRKCGTFTSELESMAAWLLGCGIRTVAMESTGVYWIPVYEVFERHGLQVQLVNPRNMKNVPGKRTDYHECQWIQYLHSMGLLQGAFRPEADVRAVRVLMRHRSDLVEMASQHVQHMQKALTQMNVQFQHVISDITGLTGLAILDAIIGGERDPAVLAQLRDPHIKASEETLRKSLEGNWDPAQIVVLKQRLSLYRTHREQINECDKEIERLLAAFAPKVDPEQKPLPEDRKEKQRKRKKKTGSPSFNLRQEAYKLFGVDLTQIPGLMTLVFLLFSEVGRDMSRWPTAAHFVSWLGLCPDNDISGGKVLWRGNRRVKNRAGTLFRLAAHSLHRDPTPMGDYLRRMKAKLGPAAATTATAHKIAIIFYTMVKKQVENDPTLWAQRDLHREQRLEAKLRLQAAQRGYKLVPMEAIA

SEQ ID NO: 416332 - protein, 395 aa, unidentified
MDIHKDNITACILTSNGKEIQTFPTKTVFLLQLIDWIKQHECTHVAMESTGVFWKPIVNLLEAESIEFLVVNAQHMKALPGRKTDVKDSEWIAKLLRHGLLKASFIPDRNQRELRELVRYRRSIIEERARQHNRIQKVLEGANIKLSSVVSDIMGVSSRDMLHAIADGEDDPEKLANFARRTMKRKKDELELALHGYVNPHQRLMIKTILTHIDFLSEQITVLDQEVTTRVVPFSDDVERLDSIPGIATRMAEQILAEIGTNIKKQFPSAAHLCSWAGLVPGHNESAGKRKSAKSKNGNKYLKSALVEAAHSVAASKNYLGAMYRRTAARKGRKRAAISVAHAMLRIAYYLLTREEMYVDLGEDYFDKQKQQSIVKYAVRRLENLGYSVTIAEVS

SEQ ID NO: 416333 - protein, 360 aa, unidentified
MCRVGKPVSSLLSFLTLQVNIMTIQSKKIVQEPKSLFAGIDVGAEELILVIRKNGTPYKPQKFTNTPADRARLVKKLVNLPGILVCLEATGVYHFDLSIALHDAGVALMVVNPKSSHNFAKVLMKNSKTDAVDADTLAQYAERMDFVAWTRPSDEKIALRSFARRIDALTRQKAAAKNNCHALSVSRETPKAVLRDVKLAISQLEKRIASLSKEALVLIGKHPELERAFLLLTGIKGIAQTSAIALMGELLLLPQGLSHREWVKFAGLDPRAFDSGKSVHKQARLSKAGNRHIRSALYMPALSAKQHDPYVKAYFQHLVDNGKKPLQALCAVMRKLLHAIHGMLKHDKQFDNTRFYAIPA

SEQ ID NO: 416334 - protein, 387 aa, unidentified
MQASTVDTPTVEHCGTIFVAIELSQRSWLVTLHSPDKDKMSRHKLESGDHAGLLALIGRARERAARTLRAVPAMVSCYEAGYDGFWLHRLLMAAGITNYVFDPASIAVDQRARRVKTDRIDGEKMLRTLMAYLRGEPRVVRIVRVPAPEQEDARRASRERGRLIKEQTAHTTRIKALLRLVGMSVGNPRRRDWLSWLAAQRDWQGQAVPRRMLAEIKYEHARLMLVREQLEGLAQASAQADPAPAAAQMAERSELLLRLKCLGPAFATTLASEVFYKDFRNRREVASYFGLTPSPWQSGGIDRDQGISKAGNPRARCAAIELSWLWLRHQPESALTRWFRSRTHNNASKRNKRIAVVALARKLMVALWRYLTTGLVPEGAMLKAVKA

SEQ ID NO: 416335 - protein, 427 aa, unidentified
MITAMCLPALHDPECEGRETLGPRYIGLDLHARYIHGCEWKPEVADGGKKQHFRSPDTPDGWAQLLPQLDRTCWVALEVTGSAFEVHDMLSSHVDRVLLANPVDLKRLGSGRHTDRVDAARLAKMLAVGTLPTVWVPPQPMREVRRLLYYRARLASNRRRAINQAKVVLRRAGHLLSRNTDVRGWLTPERLATLPASDRVILLSTCRQITALEAEIEGIEGEIARRMADVPAVQVLLTITGVGLISAAATWAILGEPHRFPRAKQVARYAGFDPSIVQSGEQHRQGRISKAGSPLLRTLLVEAAHSLARWDSGPLGQFYARKAQEVGSRKSHHCAGPKTSHRGVAHVANRRGLSSGKNDDGNPQAPRVANEEPDSDGVNAVSSGSDLHYSTAKSTRQKAGGADESTANVRFGLTSITGGNLRLRLIP

SEQ ID NO: 416336 - protein, 356 aa, unidentified
MNRADPNKIQGCDYHPGVQQIAFVDTETGELQERRLEHREAAEKFYRDLAAQGMKVRVGMEASGQARWFERLLAELNFELWIGDAAEIRRKRGRKQKTDRQDAQHILRLLLKDDFPQIWVPSGENRDLRQLLWHRHRMVQARTRIMNQLQAVALNEGLRCKKRLWREHGRKQLEAIRLAPWANRRRQDLLELLDRLNPTIAELSQAIEQEAEKFPEARGLMTHPGVGPLTALAFVLIIGRADRFQCGKQIASYLGLVPLEDSSGSRRRLGHITKQGSSMLRFLLVEAAQVTARSIPEWRSKYFHLMMRRGRKIAKVAMARRLAIRLYWMWRKEWDYQQVVKFGSHAGQLGSGDGVQ

SEQ ID NO: 416337 - protein, 371 aa, unidentified
MAAKKEGASSRREGPSVGKLGPSKATPSRRKKVPVEREYVGIDLHRRRSVIVRMSPDGEQLSTVKIDNDPIALAEAIAPAGPAPHVVVEATYGWYWAADVLETCGAQLHLAHPLGMKGITSNRRVKNDVRDAVLLADLLRLGSLPEAWIAPPATRELRELVRYRTKLVNMRSSLKCQAHAVMAKEGILPTHSDMFGPAGQAALDEMPLGRAYTIRMESLRDLMESYDAQVSMLEKEIHGQLKDHAGYRAIQAIDGVGPVFGAIFVAEIGDVSRFSGPEKLCSWAGLTPKHRESDTTIHRGSITKQGSKLVRWAAIEAVAKRRGGPKLRADFHRIAERRGKPKARVAVARRLLSLVYYGLRDGEIRCLAETS

SEQ ID NO: 416338 - protein, 417 aa, unidentified
METYAALIAIDWADRQHAVCLYDQTTGRREESVVKQTPESLQAWVLGLRERFAGQPLAVCTEQSRGPLIYALLQYDFLVLYPVNPATLAKYRQAFSPALGKDDPSDADYLLDLLQHHRERLRPWRPDDQQTRTLRLLVEQRRRLINDRTRISNRLTAQLKCYFPQVLDWFPDLRTALVCDLLTRWPTLTALQKARPVTLLKFFQAHHSVRAETNERRLMELKTALALTTDAAVLTSSTLLVKVLVAQLRPVMAAIAEYDRHIEALCQTHAEYELFASLPGAGPVYAARLTAAFGCDRSRWQSADELLCFTGIAPALERSGKQQWIRWRYFCPKFLRQSFHEYAAESVHHSFWAKAYYNLQRLKGKKHHAAVRALAFKWIRIIWKCWQTRTPYNELLYLESLRKSASPLLQFIATHQD

SEQ ID NO: 416339 - protein, 361 aa, unidentified
MEQKNKPARHVVGGVDTHKDLHVAAVVDDYDRVLETRSFPTTRNGYRLMLAWMRTFGELQRVGVECTGSYGAGLLRYMQAAGVEVLEVTTPDRHDRRRRGKNDDLDAQAAAHAAFAERRTVTPRSRDGMVESLRVLKACRKTAVNARRIALQLIQNTIIAAPDVDVLRDQLRRMTRMQLVRLLAAWRPDLTAYRDVEAAYRITLKSLGRRYLELHDEIADLDMMIAAIVEDLAPDLVERNSIGHNSAAQLLLTAGDNPERLKSEASFAALCGVSPVPASSGKTTRHRLNRGGDRLANSALHIIAIGRLRTDDKTKQYVARRMAAGHSKLDAIRALKRYIAREVFGIIMRRQKQINQTRIVA

SEQ ID NO: 416340 - protein, 357 aa, unidentified
MQLRNSDLDFSNQEFYLGIDIHKKSWNVTIRSNNIALKTFSMNPDPQEITNYMKKNYPKGKYYSVYEAGFSGFHIHRDLNKYGFNSIVVSPTDIPTSGKERVTKTDKVDSRKLSRELENGNLKGIFIPSLLQQEIRSISRLRYQQVKKQTRIKNQIKSYLDFYGHKLPANPEMNRWSRKFIEYLQNLEFQYEMGKEQLEIYIEELLVIKNRIVQIMLSLKKHCAQYGIDKDIKLLRSVPGVGPITAITIVAEIIDINRFSNTDKFASYIGLVPSTNSSGEKEKVLGLTILFNRHIRSLMIEAAWISIRKDPVLTLAFNNYSKRMSNQEAIVRIAKKLLNRIYYVLKNKTEYVCAVVK

SEQ ID NO: 416341 - protein, 315 aa, unidentified
MNTQKLVGVDTHKDTIACYCDGKFKEFKTNTNGFNQAIKWAGKAHWAIEGAYCFGRAFTAHLIKNGCEVYEINPLLTKNWRGALKVASPKNDYGDAKVISIFANTANLEKVSFETVKLKEKLSARKALVKQKTKTTNFIKMLYFTRGEQLPFKNLDTQKAVHYLSSSEDIIIRTNGKILKEILAGIKVIEKEIEKETPQKAKKLMQLKGISYITASTIYTETKGKITTPAKLASYCGVAPIDCSSGKTTRKKNNRGGNRILNSVFYSLSIAQKRYNPIATAYYEKKLQEGKTPRHARKCLSRQLVNIVFKILKED

SEQ ID NO: 416342 - protein, 343 aa, unidentified
MEQYIGLDVSMKETAVSIRQGGKRIWRGKCASDPQLLSAMIRKRAPEAKRVVFETGPLSVWFYHALTAEGMPAICIDARHAKAALDMAANKTDANDADGLAHLAEIGFYREVRVKGFDSMLIRTLVTARRQLLKMRLQMSNQIRGLMKTFGLIVPKGAGSVFDRNVRTLLQGEVGLGRIVLPMLQAWGDIRLRVAELSKHLVAMAGADQRCRLLTSVPGVGTVTATAFAAAVEDPANFKNSRAVGAWVGLTTRRFQSGEVDHDGHISRRGDNKLRSLLYEAAAVILNRSTETSTLRTWALALKERLGFKRAAVALARKLAVIMHAMLKTGELFDPHAGAPAAA

SEQ ID NO: 416343 - protein, 376 aa, unidentified
MQASNARTPIRNHSATIHVAIELSMKSWVIVIHSLDQDRLSRHRLEPGDGEGLLALIGKVRTRAASVLGRAPVVASCYEAGYDGFWLHRRLVAAGIENVVIDPASLAVDRRARSPKTDRIDGEKMIRSLMAYRRGEPRVLSVVRVPSPDQEDARRRNRERERLIQEQTGHTNRIKALLRTLGLAAGQPSRRDWAAWLAQQRDWAGKPVPANLKAELEREHARLMVVGEQIKALSKLPAPEETAHKAVQLMRLQGIGSAFAGTLTGELFWKEFKNRREAGAYPGLAPSPWRSGRVEHDQGISKAGNRRARHTAIQLAWLWLQHQPGSEPSRWFHARVGDQRGRVRRIAIVALARKLIIALWRFLTTGLVPTGAVLKA

SEQ ID NO: 416344 - protein, 391 aa, unidentified
MKEGLSSKSGIIRKTLARSPKGASKGGQPMEKFYIGMDIHNKKTMYVIQNEQGSIIGRGSVDTTKDGYTALFIGKEIPPDTEVAIESGEKMYWANLVLMELRMRPVVISAQEVRARARRPNQKSDYRDALEICDGLRRGIYTSIVYVPPPEVQHLREILSRRQHFVKECTRQRNAAKFLIRTKGITLRKSPNLRTITGWEQLINMKEVEDIRGYLGMHYQIWKTANEFIGDLEKKMDKAGEPFKKLLDLLQTMPGVGVVTSTAFVSSLGDAGRFRTSSEVASYIGLVPSTYDSGEKQRHGHITKSGSSYMRSLLCEAAHHAGRSGHPLNALWKRHIIKGGYKKTVTIMAHRMARILFAMWRHNEAFDPNKMESNKPQPKKATRTYRIKSAA

SEQ ID NO: 416345 - protein, 407 aa, unidentified
MAKLLQSATRPEQLFVGVDIGKTHHWVCAVDQHGTALLSAKVANDETEIQQVIGAIADLAAPTQWAVDIIGAPSALLLALLVQSSQPVVYASGRVVAAMSAAYSGEGKTDAKDAFVIAETARVRNDLNIIDNQTDLVRSLAVLIGHRADLVADRVRMINRLRDLMTSVFPGLEREFDYASHKGALVLLTGYATPQQLRRIGETRLTNWLRKRNVYNSGTVAARAITAARGQHVELVGQQTAARIITELAQSILDIDARIKTLDREIAGAFDQHDDAEIIQSMPGFGPILGASLLVGSRDLRAFPTAGHLAAAAGLVPVPNDSGRRVGNLHRPTQYSRGLRHVFYLSAQTSMMRPGPNRDFYLKKRDEGRTHTQAVIALARRRVDVLWALLRDRRCWTAEPPGLAFAA

SEQ ID NO: 416346 - protein, 392 aa, unidentified
MEARTMSLPPAASHDDAVRCLLAIELSKKSWIVAVNTPLSDKISRYTLKPCDWKELLKLSERIRTRVAGELKKRVDVVCCYEAGYDGFWLHRLLEAQGIRNYVIDPASVQVDRRARRAKTDRVDVERLLRSLMAYLRGEPKVWSVVRVPSVAEEDDRRLHRERGRLIRERIQHVNRIKGLLAIHGIYDYQPLHRDRMQRLKGLHTADGRQLSPRLKAEIVRELQRLELVLGMIETIEAERDAIASAKTKAKTKVEHSNAKKIQDLVKIKCIGPEFATALVSEVFYRSFDNRKQLAGYVGLTPSHFQSGPMCRDQGISKAGNTMARTTMVELAWMWLQHQPGSLLSVWFHNRVGKLKGRIRRITIVAVARKLLIALWRYLETGLVPDGAILKV

SEQ ID NO: 416347 - protein, 354 aa, unidentified
MAVAEAGRSGEIRFLGEIDNTPKATAKLVKKLAGKYPRLAFCYEAGPTGYGLYRQITSLGHECVVVAPSLIPKKAGDRVKTNRRDALDLAAQLRADQLTAVWVPDPRHEAMRDLTRGRGAAVEDLRSKRQQVSAFLLRLGRPYEGKTNWTKTHMNWLASQKLEQAEQRIALEEMLLAVRQAQERVVRLEEAIRGAVPDWSLAEVVEALMAMRGIDMVSATAFLAEIGDLSRFRTPRELMAYLGLVPSEHSTGDTVKRGPITKTGNRRARRILVECAWSYRHPPRVGKEKQDKVAAAPRAAREIAWKAQNRLYARYRALTRRGKLKTLVITAMARELSGFIWAIARELANTHAAA

SEQ ID NO: 416348 - protein, 344 aa, unidentified
MDHFAGLDVSVKETSICIVDDAGKIVREVKVASEPEALLAVLKNLAYHFKRIGLEAGPLSQWLFSTLAEAGLPVICVETRHMQAVLKAQINKTDRNDARGIAQMMRAGLYRPVHVKTLRSQKLRMLLTHRKLLQSKAIAIENDLRGTLRNFGLKVGMVGKAKFEARIRELVENLPDLVVLVEPMLIVRRTLREQIVILHRRLLAIVRDDEVCRRLMTTPGVGPVVALTYRATVDVPARFRKSKAVGAVFGLTCSKYQSGEIDRSGRISRCGDEMMRVMLYEAAQSMLRSKKWSWLKAWAMQIARRRGMKKAIVALARRLAVIMHRIWVDGTEFRWTRKQAAAAA

SEQ ID NO: 416349 - protein, 413 aa, unidentified
MTTSPQPQSITSNVSLHMSMELAAASWKLGFADRLGRKPRVRSIKAGDFDQLHKEIAAAKKLFGLDPDALVISCYEAGRDGFWIHRCLVSMGIESHIVEPASIQVNRKKRRAKTDRIDAQQIVNALMRFKAGDRFACRMIRIPDVEAEDARNINREMRVIKTERTAFTNRIKGLLCTQGVTDVVIDGSFPRQLKSMRTTKGKQLEEHLRARLLREFDRLALATSQIRTLQMQQATMMRTAAKEIQMSDAERTSPKCAVVAEFLARLGGIGPVTSWTLSAEVFSWRDIENRRQLAALAGLTPTPNSSGDDEKEQGISKSGRGELRVLLIEIAWGWLMHQPQSDLTKWYQKRFNDGTKRNRKIGIVALARKLLVAIGKFVRFGEIPAGAKLKSKHQFKYLPSLKIPGTELDCLAG

SEQ ID NO: 416350 - protein, 321 aa, unidentified
MSTANPHRRPRYLGIDVSKACLDACLLPEGEAFSVPNDQAGIDKLLVRLQRARPELVVLEATGKYERPAATAIAAHGIAVAVVNPRQARDFAKATGRLAKTDKIDAHVLACFAQAVDPRPSVLPDEEARALQAILVRRRQLLEMIVAEKNRSQMAPEAVAKRIAAHVRWLEKELERADGELDDAVRASETWRANEELLRSVPGVGPVLARTLLAKLPELGTIAPKRLCALVGVAPFNRDSGTLRGKREVWGGRAPVRAALYMGALVATRHNPVLREFYGRLLAAGKPKKVALVACMRKLLSILNAVMRDRVPWHPVHPLTP

SEQ ID NO: 416351 - protein, 342 aa, unidentified
MEIATIGIDLAKNVFQVHGVNRNGKVLLRKQLRREQIATFFANLQPCLIGMEACGSAHHWARKLQALGHTVKLMAPQFVKPYVKSNKNDAADAEAICEAVVRPSMRFVPIKNIEQQSVLSLHRVRQGFVKARTAQANQIRGLLSEFGIVVPQGIAYITQRVPELIDDASNALPGSFRLLIDRLLEHLRMLHRQIDEIEAVIKAWHRDNEASQRLEKVPGIGPLTATALVATVGDARNFANGRELAAWLGLVPRQHSSGGKQNLLGMSKRGDAYLRTMLIHGARSVIYRAMQKADPDSWIYNVTTRRNKNVAAVALANKVARTVWALLAHDRCFQQGYVPRAV

SEQ ID NO: 416352 - protein, 286 aa, unidentified
MELDTIGIDLGKTTFHVVGLSAAGEVVVRRKFSRTQLLRFTANLRVRLIGMEACGGSHFLGRSLREQGHEVRLMPAQYVKPYVKTNKNDYIDAEAIAEAVGRPRMRFVPIKSDDQLDMQSLHRVRDRWVAHRTSIINQIRGLLLERGITFRKGRRHAEASLPGILEDPENGLSGALRVLLAQLQSELRQLQSQIDEADALVARSASEHEPCQRLMAIPGIGPVTATAVVASIGNGAAFRKGRAFATWLGLVPEQNSTGGKQRLLGISKRGNRYLRRLFVHGARAVL

SEQ ID NO: 416353 - protein, 407 aa, unidentified
MEVLYPRCAGLDVHARTVTACIRIAAGPDVTYQHRTVPTTTRGLLELADWLAAAQCTHVAMEATGVYWKPVWHILEGQLTLVLANAMHIRHVPGRKSDMTDAAWIADLLAHGLIRSSFVPPAAIHELRDLTRTRKQLVGEIARHTLRIQKTLEDANLKLTHVVSDILGTSGRAILKALIHGEIDPVRLADLTTGRLKATRAQLVDALQGRVTAHHRFMLDLHLTQIEALEAAVDKLERHVGAAMAPFRAAVSLLTTMPGLSDTAARVLIAEIGDDMTRFPSPGHLVSWAGLCPRLDISAGKRHSTRIRHATPWLKTTLIQAAWAAARKKDSYLHAQFVRLKSRRGPKKAIVAVAASMLTAAYFMLRDGVEYRDLGGRYFTERDKEQMKNRLLRRLRDLGVTVEVKAA

SEQ ID NO: 416354 - protein, 416 aa, unidentified
MKIVRPICCGMDVHKNIIVATIGITNKKTRITEYIQETFSTLNSDLLNLKQWLINHKCFDACMESTGKYWIPIFNILEDEINIYLTHPKYVKAIKGKKTDKKDSKWICDLFKHDLIKFSFIPPKEIRALREISRYRYKLVGMRSSERNRYQNCMTVSNIGIGSVFSDPFGKSAQAIMKEVLESDIIEDEKILKCIHGSCKNKDKILDSIKHCNIETDQRFKMNESMTHMEELQVHINNCEIEMMKRAAPMFDQFMHITQLPGISTLSAILIISEIGVDMKQFESDKQLTCWAGLAPANNESANKKKSVRISKAGQYLKPLLVQCALGAIKDKEGYFGIKYSRIKKRRGHKKAIIAIARMMLVSIYHMILTGETFNPSDYESFRNPKPPIKQQDLTEESAIEFLKKSGFDVSKLTKQ

SEQ ID NO: 416355 - protein, 346 aa, unidentified
MEQYVGLDVSLKLTAICIVDRTGKIEREGVVASDPEAIAAFVKSHAPHVARIGLETGATSTWLWTELNKMGLPVICIDARHAKAALKMQINKSDRNDAVGIARIMQCGWYKEVRVKDLDSHAIKALLVSRALLVKIKRDIENQIRGLLKNLGLVIGQAKMNVFVVRAAELAEARPELGAAVEPLLKAREAVGRQIADLDRKVMRLARNDAQVRRFMTAPGVGPITALCFLATVDDPTRFKRSRSVGAYVGLTTRRYASGEIDWTGRISKCGDAMLRSYLYEAANVLLTRVARWSTLKAWGIRIAKRSGLRKAKVAVARKLAVILHRMWIEGTEFKWSSKEAANQPA

SEQ ID NO: 416356 - protein, 401 aa, unidentified
MKRVCGLDVHKETIFCATIKGEKRGLVTEHSTLTPSIRAMGEQLRNDGIEEIAMESTGIYWVPVWNILEEMGFSLMLVNPYLIKQMPGRKSDVKDAQWIATLLHKGLLRSSLVPCQHIRELRTYSRKYIKIQQRQTSVLQEMERALEMCSIRITSFVSNLSGKSVYHVVQQIVQGETSAEVMVKAVHGRIVNAHKKERIIESLTGFITEHQRFMLELLLQEYEMLIDQSNRCLLKMEELCREYYPEQLKLLLTIPGISHISAMIVVAETGADMKAFENSGKFSGWTGLRPRNDESAGKFKSTATMKGNRFLRSTLVQVAWASTHIKGSYFKEKFSRLAMRKSRKKALIAIARTLGVLIWNVLYYEQVYNPTRLIVYDPGKLQAKVNYHQKEVERLQNLGRK

SEQ ID NO: 416357 - protein, 356 aa, unidentified
MTRDVKYIGTDVHKEAIVIAVRNTSGKPVMESIVETKASSLLQFIHGLRGELHVTWEEGTWAAWLYDLLKPQVHKILVCNPRRNALLKEGSKSDKVDARKLSELLHAGMLRPVYHVENGLRTLRELARTYQTLSKDLNRVMNRIKALYRGWGIACAGTQVYAPRYREEWLQKIEHAGVRRRAELFYEQLDGLKALRRKVRPELLAESRKHKATKLLRQIPCIGPIRAARLIALIQTPHRFRSKRQLWTYSGLGIETHDSAQYCYVRGQLQRSKKPPQLRGLNENHNHEMKEIFKGAATRASCGMGPFREFYVSLLDKGMKPEMARLTLARKIAAITLTLWKKEERFDAQQLKTQAA

SEQ ID NO: 416358 - protein, 413 aa, unidentified
MVRSGGGWLEIFCGIDWSETAHDVAVVDETGRLLARRRIADDAAGFTALTELLAGYAGRPERVDVAIETGRGLLVAALRAAGHRVFAINPKAVDRYRDRHGVAGAKSDPGDARVLADILRTDRDRHRPLPADSDLAAAVGVLARAHQDAVWARVQDANRLRSLLREFFPAALTAFADLTTNTALAVLAAAPTPTAAARLSRANLTDLLRVAGRGTRPTEAVRLAEIFTVDQLRQPPVVEAAMGQAVRAIVRTLTAANQSISDLEAALAAAFDQHPDGEILRSLPGLGPILAARVLSEFGDDPTRFPDPASRRAYAGTAPITRASGRSRVVLARHVRNKRLADACYLWAFAALNRSPGARAYYDTRRAAGDRHNAALRRLASKLLGQLHHCLTTSRPYDEALAWPQPDTTPAAA

SEQ ID NO: 416359 - protein, 368 aa, unidentified
MGSSWTWGSVGVGICFGKIVAELRTHAQFLDRPEQSPESVFTLGSLRQEWESPMTQTVYIGIDISKRTLDIATTDRYLGQVPNTPIGHRQLLDQIAELGKVHLAMEASGGYERPLLQHLLTAGCDVSLVQPACVRHFAKSIKLHAKTDRIDAQLIARFAATTQPKAAEKPDKNAEKLKALRDRRQQIVEDRVREQNRLECCDDSQIAKVIAQSITRLRKIESQLDARITRCVSQCQTLKTKAQRLTEVVGIADQTAVTLLSHLPELGTVNRQQIAALAGLAPYAHDSGGMRGKRRLYGGRAVVRQALYMASLSAVRHDAVMRTFYQRLLAAGKAKKVALCACARKLLVHVNSLCAQAQALPGEKAVGA

SEQ ID NO: 416360 - protein, 357 aa, unidentified
MPSKLNIAIASVIGIDIGKNSFHVVGQDQRGAIVLRQKWSRGQVEARLANLPPCLIGMEACVGAHHLSRKLQMLGHDARLMPAKYVRPYSKGQKNDFRDAEAIAEAVQRPTMKFVATKTAEQLDLQALHRVRERLVGQRTGVINQIRAFLLERGIAVRQGLRFLRTELPAILATRSDVLSPRMLRLVEDLAGDWRRLDARIESLSDEIEALARQDQACERLMSVPGIGPIISSAMVAAIGTGDAFSKGRDFGAWLGLVPKQISTGDRTILGSISKRGNRYIRALFVQAAWVVLVKLGPKQWERYGLRSWIEAAKKRLHHNVLAVALANKLARIAWAVLHNGRAFECVKTDEMAPRSA

SEQ ID NO: 416361 - protein, 326 aa, unidentified
MHTHFLGIDIAKSKFDCALLRPDGKVRNKVLTNNAQGFAQLLDWLDTHGVHASELSQLHVCMEATGIYWEALAEFLCDQRIVVSVINPAQIKSYGASRLMRSKTDKIDANLIAHFAKERTPAPWTAAAPHERVLRSLVLRMEALQNMLTQECNRLHVANPAIEPQIQNHIEWLNAEIKALAKRIRDHIDNHPDLREKRDLLDSIPGIGERTQAVMLAYFGSAQQFDNARKAVAFVGLDPRQHESGSSVKGKPRMSKVGHAFVRKALYMPAMAALNRTEWGKRFKERLANAGKPPKLIIGAMMRKLVHVAIGVLKSNKPFNSALHCA

SEQ ID NO: 416362 - protein, 345 aa, unidentified
MLIIGCDFHPGFQQVAIFDKQTGEITGKRLQHPEEARGFYAGLAEPAWVGMEACGYTQWFERLLAELGHELWLGDAAQIRASVVRRQKTDRRDAEHVLELLLEERFPRLWVPTAEQRDVRQLLLHRHHLVRSRTQVKNQLQALALNQGVQKKRQLWTKAGRAELQKMVLPAYTAQRRDECLQRLDYLDEQIRQLSQRVVAEAEKRDAARLLMTHPGVGPQTALAFVLTIGEVERFPNAKRVASYVGLIPTEYSSGGKQRLGRISKQGSPLLRFLLVEAAQSAARHDATLQRVYVRLCMRRSRGQAKVAVARRLATRLYWMLRSGKSYAQLTASGAGEPVSSRGAV

SEQ ID NO: 416363 - protein, 314 aa, unidentified
MTDIAVKSRLVGIDVASTHLDIHLLPDGRAWRIAYSPAALSRLIDILSAKQTELVVMEASGGYERPCADMLAAAGLEVAVVNPRQIRRFAGALGRLAKTDAIDAALIAEYGLRMRPSTRHRPDADRSHLAALVVRRRQIVAMMATERQRADPDHLDPGIADDIAEHLLFLQQRLAIIEQQICARIAAHPLWSRLSQALQSIKGVGPQTANILITHMPELGTINRRQIAALAGLAPVNRDSGTSRGRRFVQGGRSPVKTALYLAALSAARFNPTLKSFYQRLRDNGKTPKAALIAVARKLLTILNAVAKSDRPST

SEQ ID NO: 416364 - protein, 314 aa, unidentified
MSTEYFVGIDVSKDTLDVCAYPTQDTFRVPNSPDGLGELIKRLKPIEPRLIVFEATGGYETLAVSSLAAAGLPVVVINPRQIRDFAKSIGRLAKTDVIDAGVIARFASAVRPELRPLKDSPSQELTGLVTRRRQIVDMIVAETNRLNAATRRNRRDIQAHIRWLQKRQDQIDDEIKRNIKNSPLWRTTDQILQSASGVGPATSAMLISCVPELGQLNRKKIACLIGVAPLNRDSGRFKGRRMIWGGRAQVRAVLYMSTLSAIRFNPIIRQFYQRLRGAGKCFKVAMVACMRKLLIILNAMVRNQTKWRHCENKP

SEQ ID NO: 416365 - protein, 329 aa, unidentified
MSVHQQGRETIAASRPSAGIDVSKAHLDAAWAERFEHVSNDADGWDALVAKFQADRVDVVVLEATGGYEKAAACALQAAGFAVVVLNPRQGREFAKAMGQLEKTDRVDAYSLRDFAAVIARHPKRERYIRELPDAQRAHLAGLVMRRRQLLNMRNEESNRLHTSHRAALKSVQAILKAIDKQLGAVDDDIDHHMQQHFKDIRTWLESVKGVADVTSSTLVGLLGELGRLPRRSIAKLVGVAPLARDSGPRKGTRAIWGGRAEVRAVLYMATVSAITHNPVIRQFHQQLIAKGKPNKVAMVACMRKLLTILNAMARDHATWDDSKHVKPA

SEQ ID NO: 416366 - protein, 463 aa, unidentified
MAKKTTTSRKGKSKAGKNVLERINLNAAGIDIGANFHLVAIPEDRAEENVRKFGPFTSDLHQLADWLTEHHIETVVMESTGVYWIPVFQILEQRGFEVKLVNAAHVKNLPGRKSDVSDCQWLQQLHTYGLLNGSFRPKDEVCILRSFLRLRDTLVKDCSSHVLRMQKALTEMNIQIHRVLSDITGYTGMAMIRAILAGERDALKLAQMKHPLVKASTQQIVKALEGDYRAEHLFALQTALELYDAYQLKITECENKIEQQLEQFDSKLDFEQVLEQSGALKTRSAQVRLQLQRQAHLSSVCGVDLTRLPGLSTLAVEVIISETGLDMSCWKSEKHFCSWLKLCPDNRISGGKLLSSRPRKTKNRAAAMFRLAAQGAMQSKTAIGAFIRRLKARLGAPTAINAGAHKLARLFYRMLKFGATYVEQGQAYYEQKYKDRLLRNLSKRAKEFGFQLTPLEPATDLVS

SEQ ID NO: 416367 - protein, 469 aa, unidentified
MTINSPKTTKTGGNRHDRNRPSKTQHKINTEANPNAGGIDIGAAEIVVAVPPDRCAEHVRTFTSFTSGLIELRDWLLACGVTTVAMESTGNYWVNCYDLLEEAGIEVCLVNARHVKGVPGKKTDVSDAQWLQQLHAAGLLKKSFRPAQDVLRLRYLVRHRDSLVRENAGHVHRIQKVLTEMNLKLHHVFSDIDGVSGRGIITAILAGERDPKVLAALRDNRCRSCEADILAALEGNYRPEYLFVLGQLQTQWDEIRRHLANLDEEIAGLVGSIGPTAAPTAQPTRKTGSKRKQTGKNAIDLDFRKEGLRYYGVDLLEIDGIGSGVLTALMSEIGPRDNLLESFPSADRFCAWLGVCPCNQISGGKVLRTSTRKTRNRLAESLRLSAFGLDKAKCRMGEYCRRMKGKLGKAEGITATAHKLARVIHAMIGSGQSYDEAQAFRTNPGVEKKRLKTLKKLAEKHGFQLVPIQ

SEQ ID NO: 416368 - protein, 329 aa, unidentified
MCIVDATGKVVKEAKVETHPDALVKFFKNLGLPLTRIGLEAGPLSQWLHGGLIAAGFETVLMETRHVKKALSASRVKTDRRDARGIAQLLRLGWFRPVHAKSVGSQEVRALLVARKQLQHKLTDIELSIRGILRGFGLKVGKVTDRTFEGRIGQLVTGHKTLEEIAAAMLSARATLLTEFTKLHKALLDIVRGDEVCRRFMTTPSVGAIVAITYKSALDDPHRIKKSRNAGPLFGLTPSRYQSGETDVTGGITRVGDEMARTALYEAANVLLSRVTRFSALKHWGLQVAKRRGLKRAKVAVARKLAVILHRMWIDGTTFRWTKTATAQA

SEQ ID NO: 416369 - protein, 414 aa, unidentified
MDVVHPRCAGVDISKRDAKVCVRIASSGRAKAKSTVTTWGAVTNQVLALRDHLVDEQVTLVVMEATSDYWKPFYYLLEDGPFEVMLVNARHVKNLPGRKTDVSDAAWLAQLGAHGLVRGSFVPPEPIRQLRDLSRTRTTLVRARAKEIQRLEKLLEDAGIKLSSVATDITGVSGRAMLEALIDGQRDPEVLADLAKRRLRSKIPELTEALTGRFSEHHGFLAQLHLDLIDNHTRAIDEVTGRIEVVVEPFRHVRDLLVTIPGISTLVADVIIAETGGDMSRFPTAGHLASWAGTCPGSNESAGRIKSTQTRPGNPYLKGALGVAAMSAARSRDTYLAAKFRRIASRRGPIKAIVALEHAMLVAIWHMLTTGTAYSDPGGDYFTRLNPDKAKHRALDQLHKMGYSVTLEPLAVAG

SEQ ID NO: 416370 - protein, 321 aa, unidentified
MNRSISQCFGVDVSKAELVIGDNTSERIVKIANRSEAIRGWLRRLPENCHIGMEATGTYHVALADLAHERGHRVYVLNPRSVAVYLKGLRSRGKTDILDARGITRFVERETDELEPYEPPTVLQRSIRTLLHRRHQVVKQRAAMRLSCQHLDVSVRATFTPLLNAFDQCLRNIDIKLRQMVRSDPTLHQLERNLRTIPGVGPLVGTALALRLSRHPYRNSDALVAALGMDPRPCQSGTSEGVRHLSKQGNGEERRLIYMAAVSACKTAHWRAKFENLLTRGNPTTAALCIIARKLLRIAFAINRSSEPYREELGVQTCSAS

SEQ ID NO: 416371 - protein, 420 aa, unidentified
MKDWKDITHYAGFDWARDHHVVVIVDGRGEIVADFEFEHSLEGWKNFGEKTAPWPNLAVAIETNQGAAVDQLLQRDYTVYPVNPVAAESYRKRKAPSGTKTDHLDGWGLADALRVDGRGWKALMPLDPLTQKLRLLCHDEVSLIQQRTLLVNQLQQALVEYYPSALEAFDDWTASFSWDFVIEFPTPQALVKSGKRRWEKFLHAHKLWRPETAERRQGIFAKADQFKASDPIVEAKSQLAVSLCKLLRTLDQQLEQYRQQIERLFKDHPAHGLFGSLPGAKQVLAPRLLAGIGNDPERYGSHEGLQCLAGTAPVNYQSGQVNKTHMRRACDKFLRHTVHLWANSFRKASAWGQTYYEKKRAQGMSHASALRCLGQRLLKIVFRMLRDKKPYDAELHALNQKKHGSWVLALVEKSTAKTSE

SEQ ID NO: 416372 - protein, 347 aa, unidentified
MNFYTRQHKHYCGIDLHAKALYVCILDQAGTILVHKNLPTTPEAFLRIIAPYREDVVVGVECMFTWYWLADLCNKEGIAFVLGHALYMKAIHGGKAKNDKIDAHKIAVLLRGGMLPQAYVYPAEMRATRDLLRRRCHLVHKRAELLAHIHNTNSQYNLPEIGKKLAYKANREGVEEHFPDPSVRKTIEVDVSLIDHYDKLLGEVELYITRSAKAHAVQTFARLQSVPGIGQILALVILYEIQDIARFPRVQDFVSYCRLVKCAKESGGKRLGTSGKKIGTVHLRWAFAEAAVLFLRHNQPGKEYFTRLEHKHGKAKALTVLAHKLGRAVYYMLTRKQAFDLNRFVTA

SEQ ID NO: 416373 - protein, 415 aa, unidentified
MPEPYRLFVGVDWATEFHQVCVLDAERKVVKEMKVEHSGAGIAELVELLLKLSDNHPEQVAVAIEMPRGAVVETLVERQFAVFSLNPKQMDRFRDRHTVPGAKDDSRDAFVMADSLWTDLHLFHRVQLDDRLVIRIRELSRTEEDLQQDAVRSGHRLRELLIRYYPQMLKLCPGVDEPWFWELIEMAPLPARAAKLKPAKIEQLLKTHRIRRITAQEVLTELRVPALQLAEGTAEAASEHALLLLPLLRLLRQQRAELATRIQGLLEEMSQEGQAGEHRDVTILLSLPGVGRKVAATMLAEASQPLAERDYHALRSYAGAAPITRQSGKRRIVVMRQSCNPRLRDALYHWARVSTQNDERSKQHYAQLRGKGHSHGRALRGLADRLLTVLIAMLQTKTLYTPNFSSKTTVPPNAA

SEQ ID NO: 416374 - protein, 437 aa, unidentified
MNYKQNEKINQVKESTLVVGIDIGSTTQYARAFDWRGIELGKVFTFSNSREGFEAFKAWMQHLQDKYRKSDVIVGIEPTGHYWFDLGAYLEDEGILLVMVNPYAVKQTKELDDNSQSKNDRKDPKVIAKLVTEGRYSAPYTPDGVYADLRIMVANRKRLIREMTQIKNRFARWFAIYFPEYTDVFGDYEAQSSMLLLKKVCTPEAIVELGAEKINQIWRDAKLRAVGMKRATTLCETAKRSIGLKKGSSAARYEMKLLLEDYEYKKAQLDAVMEEIEKLCRKIPESEQMLAIKGIGVITVAGFLAEVGDVRRFESPRQIQKLAGLSLRENSSGKHKGQTTISKRGRSKLRAVLFNAAIPLIAKKPEFKSLHEYYTTRANNPLKKKQSVIAISCKLIRVFYAILANGVTYDPQKIFSDIHRQHKKNNCEIQETPAEKC

SEQ ID NO: 416375 - protein, 345 aa, unidentified
MEKIIRIGMDTSKHVFQLHGVNAEEKPALREKMRRKEMIDFFTTCPPTLVAIEACGGSHHWARLLSSFGHEVKMIAPQLAKPYVKRNKNHAADAEGLCEAMSRPTMRFVPVKTADEQAALMLISVRTRLIANRTQLTNAIRGYANEFGVSAAKGLAHIPLLLERIRADATVPELAQELFMSQAEEYAQLEKKIANVEAKVKAWQRNDERSIRLNTIPGIGPIGSALLIMKTPAPELFKSGRQFAAWIGLTPKDHSTGGKLRLGGITRAGDEALRAVLVNGATAVTHHARRSGKASQWLAELLRRKPPKLAAVALANKMARMAWKLMVSGETYSAQSGPALTGCAA

SEQ ID NO: 416376 - protein, 358 aa, unidentified
MRIIGVDLHTRQQTIAMLDTETGELVEKTLQHDGDEVRKFYSALPGQVLVGMEATGSMHWFLELMDELGIDHQVGHPSEIRKAEARKQKHDRRDAALLLKLQVENRFPSIWMPSTALRDLRTLLLHRHQWVRMRTRVQNALQAIVLSRGLRRGKTLWGQGGQHSIESLSLPPNAAHRRTELQRLYRTLNEQIDELDKRVNDQALQRPGAKLLMTHPGVGPVTALATDVFLGDPARFEDGKAVVSYVGMIPSEYSSGGQQRLGGLSKQGNPFLRFLWCEAAVHAVRRDPELQRFYRRKLAQKGLGKARVAAARKLGIRLWIMLRDQIDYQEFCRRGQMRQKNGGACAGMPEVGHSPAMQ

SEQ ID NO: 416377 - protein, 457 aa, unidentified
MSHKRKVKRSGQPGRLETIPILNPNAAGMDIGADEIYVAVPADRDRQPIQSFGTFTSELGRLSEWLQQCRIETVAIEATGVYWIPVYQILESCGFEVCLVNARYFQNVPGRKTDVSDCQWLQRLHSAGLLRGSFRPAQEICVLRSITRHRDKLIRLASTHILHMQKALDQMNIQLHHVLSDITGLSGLAILDAILAGERAPKVLVQLRDGRVKASEETLILALTGDYRAEHLFTLKQSLAAYRHYQKLIAACDLEIEQQLKLFDDKLDGKREPLTPLKVRRKKPFSNEPNFDLRNHLYRIFGVDLTAVPGISVLTAHTILSEIGPDLSKFRNSSAFASWLGLCPHNDISGGKVLNVKTRRVNNRVSHALRMAANALFRSQSSLGDFFRRMRAKLGAPAAITAAAHKLARIVFHMLTTREGYDESSFTKNERRFRARAEARLRAQAKALGYSIVAATA

SEQ ID NO: 416378 - protein, 468 aa, unidentified
MTPRKQKNLRQPPSPDVLRVTHPHAAGIDVHSDVHWVAVPPEDAPPPSPNHPPNLPAHVRRFGACTADLIALADWLQQCGVKTIAMESTGIYWIPLFELLEARGFEVFLVDPRQSRHAPGRPKSDVLDCQWLQRLHSYGLLTASFRPADQVVVLRSYLRQRQMLIGYAGQHIQHMQKALEQMNVKLTEVVSNITGVTGMAIIRAILRGQRDPLELAKLRNDKCKRTEAEIARALYGNWRAEHLFALKQAVTLYEFYRQQLQECDDQLQAHLATFADQSQGRPRPPRQRRHTKKANEPVFDVASALYHMAGVDLTVLEAIDPTTALVLLSEVGPDVSRFPTVKQFTSWLGLCPQHQSSAGKIHRRRVRRGGHRAGRALRLAVQSCWRAKNALGAFYRRIQARAGAPKAIVATARKLAERVYRLLKYGAAYVCQEIAAYEAAYQARLVKGLAKRAAELGYRLEPTTVTAT

SEQ ID NO: 416379 - protein, 347 aa, unidentified
MRFYTKQHKMYCGIDLHARTMYVCILSQAGEIMVHQNFTANPETFLKVIAPYRDDVVVAVECILTWYWLADLCVREGIPFVLGHALYMKAIHGGKAKNDRIDAQKVAVLLRGGMLPQAYVYPAEMRATRDLLRRRIHLMRKRAELLTHVQQTNSQYNLPDIGKKIAYKTNRAGVAERFADPAVQKSVEVDLALIDYYDQLLRDLELAIVKTAKQHDANTLYLLQTVPGIGKILSLVLLYEMHDIARFPRVQDFVSYCRLVKCAKESAGKRYGTSGTKIGNAYLKWAFSEAAVLFLRNNPVGQKYLTRLEKKHGKGKALTVLAHKLARAVYYMLKRGMAFDMDQFLHH

SEQ ID NO: 416380 - protein, 387 aa, unidentified
MIYCGIDVAKLKHAITLMDEKGQILKAAFTITNNRSGFDQLHKELQTVGGIITVGLEATGHYWLSLYDDLTRNHYPVIVLNPLQVAAYRKSGIRKVKRDASDAFWIADYIRVANLPPTEQNLPIFLQLRELSRFRFRLTEQVGDLKRKLLTILDRVFPEYEHLFSSVFLQASRAILQEAVSAQEFADFDLQELANVLAEASRGRFGLEKAEALRSQARQSVGIGFLTDAVHLEMRCILAQLELLDAQRGEIDQTIADLMQQIPQHITSIPGIGPVTGAAILSEIGDIQRFESADKLVAYAGIDATVYQTGQFEASEAHMSKRGSPYLRHALWCAATAAILHDPSLKSYYQKKRDEGKHHGTALGAVCRKLLGRIFVVLKEQRAYVIR

SEQ ID NO: 416381 - protein, 355 aa, unidentified
MASITLLGIDLAKDVFQLHGLDELGRPQLKRTLRRRALVQFVAKLPACTIAMEACSSSHHFSRKFQQNGHEVKIISPQFVKPFVQGNKNDAADAEAICEAASRRNMRFVATKSVVQQDIQCLHRVRKRLVHNRTALTNEIRSIVGEFGIVFAKKRSALVEGIKGLLNGSCPREELSSEGLTLLQDLYSELLELEQRIENCELKLKKISSQPQCQRLFKVGGLGLLSVTALAVALADPGQFKNGRNFAAWLGLAPRHQGTGGKNRILGISKRGDMDLRTLLIHGARAKLRGINAKCRAERKLDPLEDWAYRLCQRQGYNKATVALANKNARIAWSISAHKTEFESHQAVASLKKGA

SEQ ID NO: 416382 - protein, 342 aa, unidentified
MKLYCGIDLHANNSVISIQDEQDNVHYEKRLPNDLGVIVSALQPFQEELQGCVVESTYNWYWLVDGLIETGFPVHLANTAAIPQYAGIKYTNDDTDARHLAHLLRLGILPEGYIYPKQDRGLRDQLRRRLLLVRQRTMQNLSLQGMITRYTGRRLSGNQITQLTDDKLIELLPDKSAALAGRVSLALIQTLDQAVDLLERDVQKKAGKRSGYQILITIPGIGEVLGLTILLETGTIERFPDAGHYASYARCVKSEKLSNGKYKGQGNRKNGNRYLAWAFMEAAHFASIWNQDIKRYYQRKLAKSHLMVAKKAVANKLARACYHMLKEHTNIWISCCHAGRTL

SEQ ID NO: 416383 - protein, 404 aa, unidentified
MSAVCGIDWAAEWHDVRVVDIDSGELLIERRFAHDETEIGVLVELLVAHRVARVAIERPEGLLVGRLLAAGICVLALHPNQVAAARDRFRAAAGKSDRFDAFVICELCRTDHHRFAALAPSGDETIALQALVRTREDLVAVRVHLANQLRAQLDCFWPGAKLIFADVDSPIALAFLARYPSPEAARGLGPKRLQAFLARNAYCGRRPADQLIARLRNAPVAAVGELEAEARHNAITGLVAALTPIVGQISLLTSQIAGAIRAHPDGPTFLSFFRDPKSVLTAAGLLAEIGDNRARYPTPDSLAADAGQAPVAKESGKRRHATFRWACDKRLRNHFGVLADSTRHWHPWAHDVYARATNRGAQHPHATRILGRAWSRIIWRCWQDRKPYDPARHGNLTQLLANQG

SEQ ID NO: 416384 - protein, 365 aa, unidentified
MGVPTVVQAKTFVALDVHVSGTVAAMIDRDSGELRRRRLSGRAVEVAEFVAGLEGPVCATYEAGPTGFALARRLEAAGVDCLVCAPGLIPRGPSDRVKTDQRDAERLVRLLVAGELRRVGVPSVEAESLRDLVRAREDLRGDLMSALHRVSKLLLRHDVRFEGRQRNWTQDHLRWLSTVRFDQPGTQAAFDDYRGAVEALVIRRSELERQIAEQLPLSPWAQTARRLMCLRGIDTLTAAGLCAEVGDFHRFRHPEQLMSYLGVVPSEHSSGTRRRQGSITKSGSQHARRLLVEAAWHYRQPPRVSQPLRRRQTGADAAIIALSWKTQRRLHRVWTRMERRGKRRTIIAVAAARELAGFCWAISTA

SEQ ID NO: 416385 - protein, 362 aa, unidentified
MFRPHTLYIRIRIVRKVHEPVFAMRDQDVSDVIKTKNRTAMQYIGIDVSKATFVVAYSSDKGGEIRTFNNTTAGIKQFIGTLPKDGSIHCVMEATGNYSALLLYMLNVAGITVSMENPLKVKNFARAMLSTVKTDKIDARLIALYGEKMNPQPFKVQGEAILRLRQKRTVIRQLTKQITAMSNLRGSLACLPVPDKGATHTVDETIKFLEKKRDRLQSELTDLVEVEFSRQLALLTTIKGIGITLATALIITTGGFTYFQNAKQVSRYLGICPTYEQSGTSVNIKGHINRNGDAYTRGLLYIAAWPASRFNAQCKETYTRLRQNGKSGKLAMIAVANKLVRQAFAVVAHDKEYVDGFVSNRP

SEQ ID NO: 416386 - protein, 309 aa, unidentified
MSEKNFIGIDVSKDSLDVAIAHSEEFMNFANTEEGQRDLKDFISSRKPALIVLEATGGFESGVLRELASARLPVVSVNPRQVRDFAKAIGILAKTDKIDARVIARFAEAVKPETRPLRTEEEGRLDSLNARRFQIVEMLTAERNRLAHATKWTKKGIEGHIRMLDRLLVEINEEMDDLIKNSPIWQQKDKILQSIPGIGKVMARTVLADVPEIGTMNRKQISALVGVAPLNRDSGKYKGRRSIWGGRSKVRTVLYMCAVTAIRCNSKIKVFYERLREAGKCFKVAITACMRKLLVIINSMIKTETCWNS

SEQ ID NO: 416387 - protein, 400 aa, unidentified
MKGPIVSIDVSNGNSHFQCFTQRGTKMGKVHRISHTVEGFNCLKSKIEELEKKTNEEVVAVYEATGVYTKPLERFLEKNEIKQYSISPLQSAKQRKTEIHNKKTDKKDPESIAEVYYIKELREDEKEADLYHELRTANRVYEDCLVHLRKYKVTFQSHLSIVFPGYMKLFQDGYSQISLQLLEMYPHPDRLKNKQPEKVAKKLNKQTDHSFEVCLKTAEKVIEFANKTYPGCDKEDAWVAVLVDDIHHLQDTMEEAEAKLDKIIELAKATPYYSIILSIDGIGPNLASRIIAEFGDISKFKTRGAMVAYVGNDPNRAESGDIEGYHLSISKKGNKRLRCILYLAVTCSIRSRKENPINAFYQKKRQQSTPLKSKAAKVACITKLIRTIHGMCKTGTVFTS

SEQ ID NO: 416388 - protein, 429 aa, unidentified
MQNESTPGARGPVFCGVDTHADSHWLCVLDWRGRKVLSRQFPADAAGYEALAGAIAAAGEPACVAMEGTSSYGAGLTRHLASLGMPVREALSPARMQRRRPGQGKCDESDAERAARAAMSGSKLGTPKSQDGWVDGVRCMLAARSGAVKARTSAINTARSLLTTAPEGLRSRFRGMAGPRLMEELPSVRAEGALGAALGALADLWAAARDAALDMELAIEASLEENCPALLAMYGCGPVSAAKLAVAAGDNPGRLRSEASFAAICGACPIPASSGKTVRHRLNRGGDRQANSALHEIARQRVMRDPETAEYAERARGRGKSDREVMRCLKRYVAREAYRALMRPHEIRRPEDASELVAARRAAKVSQVRAASILGTSEKYISMLERGQRELKPIRRAYEAWVEAGLPLDWDRQAFEAERKMDSKKHLAK

SEQ ID NO: 416389 - protein, 342 aa, unidentified
MEITTIGLDLAKSVYQVHGVDAAGNVVVRKALRRAQVLPFFGKAVPCLVGIEACGTSHHWARELAKLGHEVRLMPPAYVKPYVKRGKNDANDAEAICEAVTRPTMRFVAVKSPEQQAALALHRTRDLLVKQRTQLVNMIRGLLAEFGIEIVRGLHHALELAARIASGTAPEVPELAVRVITGLAGQIGDLQVRLTALEKELLAWHRSNELSQRLGTIPGVGVISATALAASVTDPGRFRSGRQFAASLGLTPLQNSSGGKERMGRISRMGDRYLRRLLVVGMTSLVRRARAKPDSVDPRIAAMLARKPARVVTVAAANRTARVAWSIMARGGTYRAPTSVAV

SEQ ID NO: 416390 - protein, 366 aa, unidentified
MKRVMAGMDLHGNNVMIGIVDADGTRLRHRRLACDLEEVIAFLNPYKPLLDRVAVESTFNWYWLVDGLRTAGFPVVLANPAKIDQYEGIKHADDKNDAYFLAELLRLGILPIGYIYDPESRPVRDLFRRRMGLMRLRTTLLLSSKSLHHRTTGHSLAVGQLKALSPADLAALYSHPANRLTAEIQKELIEALNQCIRRIEKTVASEALKKPYYKRLQTLPGIGVILGLVISMEVGEIERFAEPGQFASYCRTVDSNRVSNGKKKGANNEKCGNKSLAWAFVEAAHAARRYDAHCRRWFDRKSAKKGTTIATKALACKLAKAAWHVMAEAVDYDPVRMFPELAAGSIARISGRQTSASKGVGPEPED

SEQ ID NO: 416391 - protein, 395 aa, unidentified
MFIVGIDIAKRSHEAIIIAEDGQVVRKAFSFRNNCTGYNLLLEQVRRLTLVKSQIVFAMESTAHYWLALYARLLKDGYAVMVLNPIQSHSLRELYIRKAKTDARDSLIIADLVRFGRCKASNVPQDKILALRELCRSRAYLVDMAADLKRKLIALLDRIFPEYESLFESVFSKASIAVLSKYSTPQKAKNAHLGKLTDILMESSNGHFGEWKAHQLKEAACSSFGIDDSGGVYSTLLGMFLEQILSLTAQADSLEKQISVFFQEFNNPLTSIPGVGTVLAATILSEIGDITRFSSADKLLAYAGLDPSVKQSGEFKSNQNRMSKRGSPYLRRAIWLASTVAVHRDPMFQTYYEKKISEGLHYMNVIGHVSRKMTAVIFAVLRDGQPYQPILQSAG

SEQ ID NO: 416392 - protein, 371 aa, unidentified
MYYVGVDYHLEVAVACITDAHGKEWKTLELPSTPEGMDILIDVMKGKKYRVLGEAFTYSIDLNNYLIGRGVTSDLVRPTDFRIVTSSNKKTDRHDARSIAWYLRLMDKGEIGLRPSLILKDEQRALRDLCRLREDISKNIGITNQRIRSHMRINAEYLPVEIFGDSPDLRIQKVQHFIITEFGDDFTLQELLRQQAFYIERSKAIDMELDRFPYDAESIDLLMRIPGIGKLSAVELMSMIVDISRFPSSDAMRSYFGMAPRVRNSGETISHGHLTKQGDPMMRKVLERIVASHMRWCKESKVTMKYHSVRARAAGGVAMMAAANKMLDVIYSVLTNRRPFRVRAIDEGAIGRANPIRCLRTFLQHPSALSK

SEQ ID NO: 416393 - protein, 345 aa, unidentified
MESMYYIGLDVHKKTISYCVKDASGRIHTEGKIPATRFDLDRWMKTLPRPWAVAMEATMFTGWIYDHLLPHAAAVKVAHPLMLRAIAAAKKKNDRVDACKIADGLRCDFLPVCYMASTEIRERRRTLRYRNLLVRQTVQLKNRISGLLMEAGVSYNKQKLHKVGYFRELLKSNPDIDESLRPLLQLCRETLVPLQKMESALVRSRARDPLLVKRVERLMTIPAVGPITALTWALEVGEVSRFSSIKKAISYCGLCSAEKISADNIKRTPISKQRNKHLQCVLVEAAKMAPRLSPELALLYDREKQKGNANRATLAVARKLVAYLVAIDRRQKDFLVVEKQNLAVA

SEQ ID NO: 416394 - protein, 423 aa, unidentified
MDVLHERVAGLDVHQKTIVACVRRMAEGKVERECRTFETTTAGLLVLLAWLQECRCTHVGMEATGVYWKPVWNILSDGDFELIVANAAHIKNVPGRKTDLNDAMWIADLVACGLIRASFVPDEPLQQLRSLMRTRKQFSREQTRHVQRIQKTLEEANIKLSAVISDIMGASGRRIVQAMIAGVRDPGQLVQLADRRLKASRTELYEALRGRLTEHHGFLLRVHLEQHDALAATIRQIDRQVEVALTRLDQERATGRITYRDLIALLCTIPGVSTLAAITILAEIGRDMSRFHTAGHLLAWAGLCPGQNESAGKRKATRLRKGAPWLKTMLVQCAWAAKRKKDSYYRAQFYQISARRGPQKAICAVAASLLTTIYHMLKDGTEHQDLGANRFDRRPVEAKVQSLVARLAKLGYQVQLQPLAEAA

SEQ ID NO: 416395 - protein, 579 aa, unidentified
MLTQPAAAPQSPRRCGVGIDTSRYGHYAAFLTDDLQPAADELAFPESAAGYALLRGRLEAVARRRAPVHFVVRLDAAGQYADNLLHFLRQLGRPDGAVPFPLSVSCGDPQRNKNYRAALYGPHKSDPFEARAAARFALSERPASDTPLSSELRVLRQVAGRLQAVVRQRTRLLNQFHHLLALAFPELALRTKDLAAGWVLELVHRFPTARRLAQAAPQDLADVPYLPDAQVGPLLEHARASVASLDGPAVEELVRDQVRQLRDAAGRQKRLESLLISTYRALPQPNRLDSIPGVGPVTAAVLTAFILDIDRFAAPGKLVAYFGVLPIEASSGVDRDGQARSPRRYVMSRRGNDLVRRYLWMAALSAIRFNPAVRALYARVVARRPNHKASAVGHAMRKLLHLVFAVWKTGRSFDPRRYPWQAPAHVEGGDNGMSQNSQAAGPRPDEPARTGVSAACADSVGGSAPVGEGAFIDFVHLKRQLLLGRVLDHLGLSSRLKGSGPQRRCACPLHRGDARGRTFSVNLDDGVFHCFDARCGQKGDVIDLWAAAHGLSLRAAALDLVRMFGLEPAPCRGTEKRNS

SEQ ID NO: 416396 - protein, 358 aa, unidentified
MPEERASVIGGVDCHSRTHHAVALDSLGQLLGDAQFPATIAGYQNLCAWLEGFGSIEALGIESTSSYGAGLTRWLTARRIRVLEVNQPHKHTRSRKGKSDPVDAEAAARKVLAGECVVVPKDTGGAIESIRQLRVAREGAVKARSAALCQLGDLIVTAPAELRESLRCKTLLGQARQCARLRPDPRRLAEPLHAAKFALRSLALRIVALEKEVSQLDQALETLVRRAAPRTISLLGVGTQHAGQLLVTAGQNIERLTSEAAFAHLCAAAPIPASSGLTRRYRLNRGGDRSANRTLHMIAVVRLRYCPRTRAYAARRTAEGLSKREIIRCLKRYIAREVFRALRADLREIPSREVLDTV

SEQ ID NO: 416397 - protein, 354 aa, unidentified
MPRKSKDTVAVLGIDIGKNVFHLIGLDKRGAIVLRQKLSRGQLEARLANMPPCLIGMEACVGAHHLSRKLKALGHDPKLMPAKYVKAFLKGHKNDFRDAEAIAEAVQRPTMRFVATKTAEQLDLQALHRVRSRLVSERTAIANEIRAFLLDRGIAVARGLHRLRTALPGILATRTDVLAPRLLHLIEDLIGDWRRLDDRIDNVSLEIGVLAQDDTGCERLMTVPGIGPIISSATVAAIGTGDVFCKGRDFGAWLGLVPKQISTGDRTILGKISKRGNKYLRTLFVQAARVVLLRPGNWERYGLKPWIEAAARRLHHNVLAIALANKLARIAWSVLHHGRNFEVRKMSDATSQPA

SEQ ID NO: 416398 - protein, 420 aa, unidentified
MKEESIEFAAYIGLDWADRTHVIRLRCAGSQAVEQREVTHTPEALAAWVSELQQRFGGRPVAVALEQSRGAVVHALMSYDFVVLYPVNPKSLAKYREAFRVGGAKDDPDDAQLLLELLTLHRDKLRAWVPDDELTRTLGLLVQYRRQLIDERTSLTNRLTSLLKLYYPQALRWAGGLATQQAGEFLRHWPTLADIQRAPATTLRKFYLAHGCRKAKLIEQRLQEIKLAQPLTRDLAVITASVSMVQAIVNQLRALITAVAQMEKQITELFGQHPDHDLFDSFPGAGPVLAPRLLTAMGADRQRFSAAREVQQFSGIAPVTERSGQSCWVHWRRACPKFVRQSFHEYAARSIRWSPWAKAFYEQQRQKGNGHHAAVRSLAYRWIRIVYRCWQQRGLYSEVTYQQALIRRHSPLAKLLPAPH

SEQ ID NO: 416399 - protein, 401 aa, unidentified
MKYGVGIDVSKGKSTVAIVSIEGEVIEMPFDVNHDIEDLEKFVKKLQKFPKEDLKIVLEQTGTYHLPILTYLLDKGYCVVAENALKIKKYLDRSLRKAKTDKKDSLKLAEYTCDNWYKLKANFVEEEKYKELRFLSRQYFSLNSMKVQQKVDFSDLSDMLFPGYYQLLEECNFVVGLKIFEKFSDPKIIRKKKLETFLNEVDKIAKKLGQKRAGRNLAIKVYELAKKSVPSCPSNSSTQLILNSRVVALINLIETTNEIITKMNEIAKSMDEYKEVRNMKGVGNRLAPLLIAEIGDIRRFKNAGSLIAYAGIDSPPYQSGKYEATNRHISKRGNKYLRKTGFEVMQSIKSFCRVDCEVYDYIVKKETEGKCKKSAKIAGLNKFLRQYYGILKKMYIELGTW

SEQ ID NO: 416400 - protein, 349 aa, unidentified
MDHIGIDVHKRESHISIFAEGGAICEQRIRTEPGRFAAVLGARPRARVLIEASTDSEWVARHLEALGHEVIVADPNFAPMYATRSRKVKTDRRDARALAEACVLGAYRPAHRLSDPQRHVRGRLLVRDAAVRTRTRYISLIRALLRQHGFRVPSGSAESFVHRVQGLPLPGRVRSVVAPLLALMRPLNRQLAYSDATIEHLAVQDPRVPRLRSVPCVGPVTAAAFLAAVDDAQRFRHAHQLEASLGLVPREHSSGETQHRGPITKAGHSRTRWLLIQAAVSLLRRDPPQAEALRTWALRIAARRGKHVAVVALARRLAGILYALLRDGSVFEPQHVRPPRPTAAALVNM

SEQ ID NO: 416401 - protein, 367 aa, unidentified
MEKSSTVFVGMDVHKESIDITVAEQGGEVRRLGQIGGDRGSLLKMVRRQQSKGHKLVFVYEAGPCGFWIYREITALGHACMVVSPSLIPRRAGDHVKTDRRDSERLASLARAGELEAIHVPDIRDEAIRDLVRGRDDAVVAQRRVRQQLKALLLRNDIRYVGKTSWTGAHRRWLSELKLPEPAQRIVFEEYVDAIVVATARIERLTRAIETEVLTWRFAPVVGALQAMRGIQFVHAVTLVAELGDLTRFASARQLMGYLGLVPREDSSGEHRHQGSITKAGNSYARRALIEAAWAYRHPARVTRIIATRQTGIPKAVCDIAWRAQLRLCAKYRRMNARHLNHNKIVVALARELSGFVWAIGQSVKPQ

SEQ ID NO: 416402 - protein, 340 aa, unidentified
MKHYAGIDVSLEASSVCVMDGTGKIVREGKVASEPVALIGWFSALGLSLTRIGLEAGPLSQWLYAAMRDAGLAVELLETRHVHNAFKTMPVKTDRKDARGIAELMRLGWFRPVHCKSMEAQETRAMLTARKLVQKGLQEVESSLRGILRGFGLKVGKTTPVRFEARIKELVAGHPSLEAVATSMLAVRAALRRELNGFERRLRAMARSDARAQLLMSTPGVGTIVSLTYACAIDDPARFKSSKIVGAHFGMTPTRYQSGETDRSGRISKIGDASVRAALYEAAHVILTRPVKGCTALKSWAMRIAKRAGMKKAKVALARKLAVITHRMLANGTPFTTQKA

SEQ ID NO: 416403 - protein, 409 aa, unidentified
MEVVHEVCCGLDVHKKSVTACVLWASGRRRQTLEFGTFTKDLLGMSDWLQSCGVTHVAMESTGVYWKPVWNLLEGQFVVLLVNAQHIKAVPGRKTDQKDSEWIADLLQHGLLRASFVPPTPTRELRDLTRYRASLAQEINRIANRIQKVLEDANIKLASVATDTLGASGRAMLEAIVNGEQDSQRLAEMSRGLLRNKIPQLQQALEGRVTPHHRFLLRELLDHHYFVESKMRRIEQEVAERLAPFQSEVARLCTIPGVDRVTAWGLLAEIGLDMSQFRDAQHLASWAGLCPGSHESAGKRKSGKIRKGSLWLRRCLCQGAWAVSTKKNNYLSAVYRRLAARRGSKRATIAVAHNLLVIAYYILRDQTCYRDLGPDYFDRLNPEGLRRRLTKRLEGLGFKVTVEPLAQIA

SEQ ID NO: 416404 - protein, 422 aa, unidentified
MVESDYRIYVGIDWASEAHQACVLDYERRIVAERSFAHAGNAIVEFALWLSGLADDPGQVAIAIEIPRGAVVETLVERGFHVYAINPKQLDRFRDRYSMSGAKDDRRDAFVLGDSLRTDQPCFRRVRLDDPQVIRLRELSRVDEDLQREGNQLANRLREQLHRYYVQALELCPGADEPWLWTLLELAPSPSVAQRLRPQRVERLLRAHRIRRLNANEVVSALRVPALQVAPGVVEAATEHIALLLPRLRLVHSQRQGCGARIEALLDELQSADEEDDKRGEHSDVAILRSLPGVGRIVAATIIAEACAALTERNYHALRAHGGIAPITKQSGKHRTVLMRYACNGRLRHALYHCARVAVIRDLPSKTYYTAQRQRGHSHGRALRAVADRLLRILVSMLTTGTLFDCSKARPPQVSNRSEKVA

SEQ ID NO: 416405 - protein, 349 aa, unidentified
MDRTTYGLDIAKSVMQLHWVDAETGEIGRKKLARAKLSAHFAQLQPVRIVMEACGSAHHWARVFTGLGHEVELLPAAQVRPFVRSNKDDAADARAIWLAAQQSDIRRVPQKSAEQQGVLALHRTRSHWISVRTATVNSLRGLLDEFGVVLRGGRQAGLKALVDQRAAIDEQIPAPMRSLVDGQLRTLAQIGERIDALECEIAALQKQLEGARQLDQVPGIGVLGSTALAATLGDARAWRSGREFSASLGLVPAHAGTGGKVRIGHLSKRGDPYLRTLLIHGARAVIEHAKHKPKWLEDLLARRPKNVAVVALANKMARTAWAIVAHGRTYQRDWKSSRPGSGAAQAAAA

SEQ ID NO: 416406 - protein, 417 aa, unidentified
MEVFFKVSAGLDVHRDTVVASVRKSLQARETVETRTFGTFYDDLRAMCAWLTEHAVEVVAMESTGVYFKPVLRAAQQYVGKPVWLVNAAAVKQVPGRKSDVNDSAWLSKLVMHGLVRPSFIPNEAQDDLRKLTRHRSKRVGEQRSCKNRVVKQLEASGIKLASVCSDVLGKSGRLMIEALLDGTKSAVQIADLARGRLRVKMAELVRAVEGYLSSGTRWILRRLLDQLSHVERDIAELDAEIALRLIPCADDVALLKLIPGLDNVSIAAVVAEAGTDMSIFGSAKKLASWAGLAPGSDESAGKKRDAPTRKGNRWLRTMLVQVAQSVVNRKRSKSPWRSDFVRIARNTGVAHKAIFAVARKICVTIFHVLQSRTYKPYEPQPPTPAALDRAKKRALEQLDALGYDVALSQKAPSSFS

SEQ ID NO: 416407 - protein, 347 aa, unidentified
MIIIGCDFHPRFQQIALLDTETGKVEARRLAHENGEARDFYAGLQEPALVGIESMGYTQWFEELLAEFGHELVVGDAAKIRKMEVRKQKHDRRDAEHLLNLLLRGDFPKIWLPSAAERDARVWLEHRHQLVQMRTRTLNGLQAVALNHGLCLRQKLWTKHGQEELKKLPLREGRARRRADLLALRAQLDRWIAELDERLEQEVAQRPDAQRLLTHPGVGPLTALGTVLILGPVERFPDAKHVTSYVGLIPQEESSGGRQHFGRLTKQGNHLLRFLLVEAAQTASRLDPGLRRAYRRLTFRRGRASAKVAVARKLAIRLYIMLRDKIDYEEFCRRGSPAGMLGEVALA

SEQ ID NO: 416408 - protein, 414 aa, unidentified
MSMQVFCGIDWAEDHHDVALVDRDGQLLARRRISDDAAGLAALLDLLAEHGDSAGQPVPVAIETPRGLLVACLRATGRKVYPINPMAVARYRDRHSVSGGKSDQGDSVVLANVLRTDLTFHRPLPADTELAQAIAVLARAQQDAVWDRITAHNRLRSCLREYYPGFLAAFEAARGGIMRPEARVILAAAPTPADAARLTLAQLRGLLKKAGRRRGIDAEAARLREAFRAEQMRQLPLVEQAMGRQTLALLRQLDAACASAEDLEQAAIESFNQHPDAGIITSFPGLGPIAGARVLAEIGDDRSRFCDAKGLKAYAGAAPITRASGKTKSVTHRHVKNNRLNATGYTWAFSALTASPGARAHYDRRRETGDRHAAAQRNLFGRLLGCLHRCLATGQHYDENIAFPGTAGKLRQAA

SEQ ID NO: 416409 - protein, 371 aa, unidentified
MKEFSKFVGLDVHKVTISVSVAEANGGEVRYLGEVANTPEAIEKLVKQLRKGGAELSFCYEAGPCGYGIHRQLTDLGWDCQVVAPSLIPKKAGDRVKTDRRDSLMLARLHRASELTAVWVPDGAQEALRDLTRAREDMKHWQRQAKQRLLAFLLRHGKRYDGKSNWTQAHYRWMEAVKFEHPVQQIVFQEYIDTVKAMDKRVEAFDKQIGSAATESVFWPVIEGLMALRGVNLLTATTIVAEIGDLRRFASAPQLMAYLGVVPSEHSSGGSKSRGGITKTGNGHVRRVLVEAAWTYRHPARKTAVLQKRAEQTSEAVQEIAWKAQKRMCGRYRLLEGRGKLKVQTCTAIARELAGFIWAIGQALPQPAARV

SEQ ID NO: 416410 - protein, 322 aa, unidentified
MSVSVLGIDIAKQKFDAALLIDGKTKHKSCKNSAEGFETLTLWFEKQGIRKVHACLETTGNYGEDLAIYLYDAGHIVSIVNPARIKGFAQSELLRTKTDKLDAALIARFCLAMKPGAWIPPTPAIRSLRALVRRVDSLIDMRSQEKNRISTAHESVIFLIKEHIAYLDQEIEKIRRQIADLIGQDPHLKRKKELLDSIPAIGKATIPHILAELDDLEKFNHVRQMVAFIGLAPKETLSGSSIKGKPRLCKIGHARLRKALYMPALVSIQCNPVMIAFYNRLKDKGKNGKVIVCAIMRKLVHVIFGVLKSGKKYDPNFLTTSA

SEQ ID NO: 416411 - protein, 332 aa, unidentified
MVAGTHGSLNKAGSTKMTQISTTAGIDTSKAKLDVAVHGRAERWQVDNTSVGWRRLAAELSRTGITRVGIEASGGYERGVVSYLRDKGLIVLMLQPIQVKAYARVHLRRAKNDKLDAALIAACAAMVDRPRIEPDQRLAKLAQHLTFVEQIEEDIARLKVRIEHVDDPRLRRMVVTDIARLKVRRSTELLRLVTALRCHNDLAHRLDLVLSIPGLGERTAIAILIRMPELGRVSREEAAALAGLAPYDDDSGKHKGHRHIAGGRGRLRRSLFAAALPAAFRWNKALIDLYTRLIARGKAHTAALIACARKLLIYANTVVYRGTPWLERPAAA

SEQ ID NO: 416412 - protein, 319 aa, unidentified
MAQNDLVVAGIDVAKDKVDVCIRSLSLRRAFASTAEGRRELASWLRRKKVGKAVMEASGGYEREWAKALRDARIEVRIVDPKRVRSFARSAGRLAKNDAIDAEMIAWFAETFDEAKGQAYDAAREKLVQIVHARQGLLDLQTSLQNRGEHTAPEVVQKMQGRLLKKIALELAGLEAAIAAMIKATAHFAELAEIIESVPGLGGITAAGLIAAMPELGQVSNKIAAALLGTAPYDDDSGRRRGERHIKGGRRRVRNLFYMACLGAATRHNPMLKAFYQRLLAKGKEKKVALVACMRKLIVILNTMIARGEKWDASRYALS

SEQ ID NO: 416413 - protein, 318 aa, unidentified
MLGDNLMTDKPIVGVDVSKDWLDLAIVGVGRVERITNSEAAIGRWLRRIKPGLVAFEPTGGYERALQRCLRSGEILFVRVHSNAVIAYRKSRGIKAKTDKIDAQLIAAFAAEILSRQGLKPSIEGDEALRELVARRRQINSTIEAEKCRLAIADIKAVRKSIRLVIASLSRSLKAIEAEIRLHLKANDDASQLDRLLQTVMGVGPIVSMTFLADLPELGHLSGKQIAALVGLAPLTWQSGKSAGRDRTGHGRPAVRSVLFNAARSVIQRPSPFKTFYDRLVIEHHKPGKVALVAVMRKILVTANAVARDRQPWRLADA

SEQ ID NO: 416414 - protein, 344 aa, unidentified
MRRYIGVDLHKKSFTVCYRSKTGKVKVAEHEVREKDLEKFRKTLTKQDIVAVESTGNTGHFVRAIEDCVESVKIVNPTQFKVIANSVKKTDKLDAGTIAEYLSKNLIPEVRMRSKEQSQTSSLIGTRDKLVKLRTALKNKIHNILNANGIITKKEMFSSDKSLDKILELNLDQADLFELGLIVEHIHHLNKTIETINKELEGRGKKMDGFKNLKSITGISDTSATILLSVIGNIDDFETPDKLAAYFGLVPRVFATGDSVHYGRITKMGNKIGRTTVVQSTLIAIRYNDYLRNFYLRLKAKKGSGKAIIATARKYLAIVHKTLKYDWIFENFNEFQLAKGCLKT

SEQ ID NO: 416415 - protein, 347 aa, unidentified
MDHYAGIDVSLECSSVCVVDATGKIVREGKVASEPEALIGWLGSLGFDLERVGLEAGPLSQWLHTGLQKAGLAVELLETRHVKAALSAMPVKTDRNDARGIAQLMRLGWFRPVHCKSLAAREMRALLTARKLIQAKLYDVEMSLRGILRGFGLKVGRTTPKRFSARIRELIAGHATLETIAEALSCVHEVLLRELNGFDKRLRAMARGDARVGLLMSAPGVGPVVALTYVSAIDDPTRFKSSKGVGAHLGLTPRKYQSGETDRDGRISKIGDAAARSALYEAAHIILTMPVKGGWLKSWAARLAKRAGLRKAKVALARRLAVILHRMWVDGTPFAFAAPNKATAAAA

SEQ ID NO: 416416 - protein, 438 aa, unidentified
MRRVILMDIHHIFAEVVLSKMLRHYRRVGMTRSGLEGFGRSLRRTDEIVVEATGNAMAVVRVLSPYVDRVIVANPMQVKAIAHARIKTDKIDAGVLAQLHASGFLPEVWVPDERTERLRRLVARRNQVVRHRTRVRDEVHGILQAHLVPKCPHADLFNRRGRVWLERQVLPDDERAAIAHHIREIDRLAEDLAHLDREIAPVDDVQVRRLQTITGVNAIVASGIIAAVGDIRRFREPQKLVSYFGLNPRVRQSGLGLAQYGRISKHGRSHARAMAAWAAAKAPGPLRAFLLRIRNKRGHQVAAVALARKLAVLIWHLLTKEQDYFWARPALVAALSSKSGKRRWYLAISFGSKVPARSRGIDSVIFDVPVRTDFLEWPLRRLALPSVRSPSRCSSSSAFRIRSESAFFRSSSNPSLANTSFGSRPASSWSRSSFSIAM

SEQ ID NO: 416417 - protein, 482 aa, unidentified
MKPKQQEKTKEATCRATQGNWQQMNRKQRREMTRKIQSEDIRLEVVHCDAAGIDIGNESHYVAVPPARDSQPVRRFGCTTAELKEMAVWLKQCAIRTVAMQSTGVYWIAVYDILEEAGLEVYLVNARDTKNLPGRKSDVQESQWLMKLHTYGLLRNSFRPSQEIRTMRTYWRQRNDLVQSGGRHIQRMQKALTQMNIQLANVLSDVSGMTGQAIIKAILAGERDPHKLAAFRDPRVKASEEEIARSLEGNWEEDLLFVLQQEQDGYEFCHKQMAECDQRLAQYLERREDRSAGAHLPEEKRKGRLKKKSGNKPRFDLRTGLFRMSGADLTRIDGLDVMTAMTILSEAGWDMSKWETEDHFVSWLRLCPDNRISGDKIIGKGRLPTNNRVTTALKMAANSLRTSKTYLGAQFRRLRSRLDTPVAIKAMAAKLARLVYRMLRYGMKYVDRGAAFYEAQHRQLQIKHLKSKATKLGFQIIQVPTA

SEQ ID NO: 416418 - protein, 401 aa, unidentified
MKRLSGGIDVGSESHHITILDDEDHILFNQKVSHQLSEFAESIKLFKQIEKQEGGKLSFALEGKNGYSAPLDRILLDQGFTLYNVDNFKLKRFREAFAGEWRDDERDALMLSKMLKLKEHINSPREKVFIKIEKPSLVTESLKLLSRHQQTLIDEKVRLTNRLGKKLLEVCPQILKLGKLKNKKIIAILAKYPDFSKYKRITLCSLLKIRGIGKKGAFFLLKRLNNIEYMPGLTDIYQTIIFSYAQRISELQKETEGLDKKLDEIGEESKEVKHLKTIPGVATKLASRLIGEIGDIERFPSEKQLAVYCGVACVDNNSGKVTKAHAVYKANKICKHTLITMAGGSIRFSFQCRDYYLKKRAEGKSHNHTLRCLARQLIKVIYKMLTEDRDYIVRKELRKVA

SEQ ID NO: 416419 - protein, 340 aa, unidentified
MSLVLQSILPYPDSCLGTSPHQQGWDTKMEKLSYGGIDVSKDCLDVVVLPEGWFFSVSNDTAGWAELVARLRPLAVSAIGLEPSGGYERGIIRALLAAGLSVRRINPNKLRQFARARGVLAKNDRLDARLIAEYVAIMPTRVVRRDDTVEHLAEIITMRRQLCDEHAAAMNQAAHLEDPMLQRLSKRRLVRLEADILLLDKRLAELVAADPRLAHRYRLLVSMPGVGPILAYTLLAMLPELGQIDRKQIAALVGLAPYDFDSGKLKGHRCIYGGRMPVRNVLYMAALSASRYNPALKAFSKRLAAASKKSKVIIVAVMRKMVVTLNAMLRDNTEWRPSSV

SEQ ID NO: 416420 - protein, 369 aa, unidentified
MEKDITYVALDDSKNSIVVGVLRPKAPEPELRQIPNEPRHLRRLFARLKREGPVVTCYEAGPAGYDLYRQLTALGVPCQVMAPALTPRKPGDRIKTDRRDAAKLVRLFRAGELTSIHVPDEAAEAARDLLRCREDVQQDLLRWRHRLVKFLARHGRVYREGRHWTQRHWAWLRSQRFALPVLARTYEEYRFTVEQLLARAAELGREIAALAETAPYREHVGWLRCFRGIDTLGAMGLLTEIGTFHRFPHPRDLMAYLGLVPGEASSGDRERRGGITKAGNTHARRILIEASWHYRHPPRLGAALTRRSQGQPKAVLAQAWQAQLRLHRRYRHLVGHGKRPPVAVVAIARELAGFLWAALTQAAPAARVA

SEQ ID NO: 416421 - protein, 351 aa, unidentified
MNSMHYVGLDVHKKTISYCLRQADGTIVQEGTIGSTRQALTGLLERFPQPWVAGLEATLFSAWIYDHIRAQDGSVKVAHSMMLKAIAAGKRKNDSVDARKIADLLRCDYFPECHMATPEIRDRRRVLRFRNLLVRQAVRMKNKVSGLLMETGIEYNKGKLHQKKYFSQMLEEQKAQMPESLPELLQLSRTTIETLTRMDRQLLRVLEHDPLLAARVERLMTIPAVGTIVALTWALEIGDIRRFPSLKHVVSYCGLCGSERSSAGKQQRTPISKQRNKHLQTMLVEAAKLAPRWYPELALVYEREKQKGNRNQATLAVARKLTAYLLAVDRGERSFQAAAPQRERTDSSRAA

SEQ ID NO: 416422 - protein, 345 aa, unidentified
MEVMIGVDPHKGSHTATMLDRRQRELRRITVRAGRRQVEQLLEWAVDYTARTWAVEAVGGMGYLLSQQLVAVGETVLDVPATLASRVRVLGTGQSTKTDANDARSVAVAALHAPSLAVVRPADHVTVCRLLAKRHTDLARWRTKQCCRLHALVAELVPGGIDKEVVVTQARSVLEGIEPGDVAAVERHRQAVELVDDIEHLDVVVKDSRARITVAVTASGTTLTEIFGVGPIVAAMLIGFSGDPLRFTTASRYAAYTGTAPIEFSSGGRVTHRLSRRGNRRLNHALHCAAITQIRHRHSPGRHYYDRKLAEGHTPREAIRALKRRLSDVVFFRHLAADARRVANR

SEQ ID NO: 416423 - protein, 370 aa, unidentified
MGKSVLYVGLDVHKMSMDVAIAEAGPGAEVRFYGQIGGDLDSLDRVIRKLRATGAQLQFAYEAGPCGYVVYRHLTAQGWPCLVAAPSLIPRRPGDRIKCDRRDALSLARLFRAGELTSVKVPEADDEAMRDLTRAREDAVSVERRAKQRTAALLLRHGRRYPGKTTWGRGHWRWLLQQAMEHPAQQIVLQEYLDAVREASARVARLTGQIQELLPQWRRAPFVAAYQALRGVSLIVAATMAAELGDLSRFNNPKELMAYLGLVPSEHSSGASVRRGRITKTGNGHARRVLVEAAWAYRLRARVTRPLLQRQEGLPEKIQQISWQAQLRLCARYRRFLARGKHKNTIVTAIARELAAYIWAIGQAVEPRTA

SEQ ID NO: 416424 - protein, 400 aa, unidentified
MQKQAERVVIGMDPHKRSATIELMTADETVLGGGRFGTDDAGFAAMTDYVNRLRPDRDQRVWAVEGCNGIGHHIAMRLLAAGEHVIDVPPKLSARARVFATGQGRKTDATDAHSVALVGTRMTGLRPVVNDEQLAVLRVLVDRRRSLGEDHTRMTSQLHRLLLELIPGGAKKDLSAAQAKALLAKVRPRDAAGKTRRRVAAELIGDLERIYARKKAADKELRDLVVATGSSLLQLTGIGPTGAARLLVDVGDITRFPDRGHFASWNGTAPIDASSGDVVRHRLSRAGNRQINRTLHTMAIVQLRNPGPGRDYYDRRKADGKSSMEAMRALKRRLSDLVFRLMLDDAVGHPFSEPRTGPEGHRGNDSDSSATGSQPRTSSSDQPLPDPSTTKPRTTLPAAS

SEQ ID NO: 416425 - protein, 346 aa, unidentified
MRPNLFMEIDHVVSQCVGIDVSKGKLVATMCMFSKAEQAVYSKATEFDNDKTGFNQLVKWSRKEAMKELPLRYVMEATGVYHEHLANHLVRIGCTAVVMMPTKAREFAFWEGMISKNDTIDSRVLALVGCVKRTMRPWKPVSPLYRELRTMTRFSQDAKKLRTELKNHLEALEHSHEAERSVIKHYESLVASLDKRIERNLENMKRKAASDEELSKKVANIMTAPSLGFLSAVTVIAETDGFALIQNRKQLTSYAGLDVRDSQSGPVKGVSRISKRGNSRIRAILYMPAVQCRLHNRHLKEAYDRIVAKHPDKKMIAVTAMERRLLLLIYALWKSDRPYSEDYDKE

SEQ ID NO: 416426 - protein, 318 aa, unidentified
MDQSLSPFVGIDVSKDRLDVAVLPSEESWSTANQDEDIQSLVKRIRSLKPELIVLEATARLEMPLVGALAARGLPVAVVNPRQVREFARASGILAKTDRIDAQVLARFGEKMRPEVRPLKDKETQELTALMTRRRQLVAMLVAEKSRLAAAPQAVRKDIKTHIAWLERKLSKMNDNLADKIKNSPVWHEKDALLQSVPGVGPVLSTSLMADLPELGTLNRRQIAALVGVAPFNRDSGAFRGKRCVWGGRGRLRSTLYMATLAATRSNPAIRTFYHRLCEAGKPRKVALTACMRKLLTILNAILKSQTPWQAHYASSIT

SEQ ID NO: 416427 - protein, 363 aa, unidentified
MTTQEKQRTLFVGIDVHKDTHTAVGVSPFGEKLFELTVGNYQKDFDSLSTRIREVESESLLSPYIGLEDCHGYGERIASALYNHGYPMVHVPPILVDHARKRQTHPEKNDSLDALGVAKVMMNSLDSLPAFSIAESDTSAKYLKELSHDRAFLVEECTRLKNQLHLALHRIYNTEYRTYFKNPFSPQALQHWLRIRPVCDPYVLRALKRKVKRMQQLLIEIRELEKDMQTLMDEAGYTLTTASGCGTVLAASIIGEVGDIHRFNSPAALAKYAGCAPRECSSGKSTRYRKTRSGNRTLNCAFHRMALSQISRTGNPVGLRYWKKKVSEGKSKSQALVCLRRHMVNVVYMMLKHSSVYRLPAEA

SEQ ID NO: 416428 - protein, 355 aa, unidentified
MSQEKYIGMDVHQATISVAVMDAQGKLIMECLLETKAATIVEFIQGVQGTLSLTFEEGTSAAWLHDLLKPHVSRLVVCDPRKAALLKDGNKSDRIDARKLAELLRTNQLKPVYHGEHGVRTLKELGRSYLTLTQDVTRVMNRIKALYRSWAIPCSGTTVYAPRHRAEWLAKIGEPGVRVRAERLYQQLDGLQPVRQAARHDLLSESHKHPAVKLLRQIPSIGPIRAALLVALLQTPHRFRTKRQLWAYSGFAVETHDSGEYRCVRGKLQRNRERITVRGLSDNYNKDLKNLFKGAAISASTRPGPLHDFYAARIAQGMRPTMARLTLARKMAAITLTMWKKGVGFDPQQLHRQAA

SEQ ID NO: 416429 - protein, 345 aa, unidentified
MLKYKLFIGIDISKKWFDVCLAWEGQTGSCPHVQLEQDESGFQQMIKWIKKQLSESGVFDASCSKKDWFVYAEHTGIYGLKLARFFEQQQIPYLFDSPLRINRSLGLKRQKDDSADAQDIARCALRRDFKQKVRPIPAQTLLKIQSLLGCRARLVRYKAGLTVACKELVFATQSDIHQPIGTSTTVVIKSMNKQISLIEKQIKQLIEADEELKRLYKLVTSVIGIGRIMGAYLLVYTNAFTAFDNPKQFNCFIGTAPFKYQSGTSIKRKEKVNAMANHRLKALFSMAAVTAVNHDPQIRAFFQRSLERGKEQPWIYNAIKTKLIKRVFAVVKRGTPYVKLDKHLN

SEQ ID NO: 416430 - protein, 397 aa, unidentified
MRVSGLDVHKDTIFCAVHNGKKPGEVKEYATLTTSIREMGVYLQGMGVKKIAMESTGIYWVPVWNILEEMGFTLILVNANLIKQMPGRKSDVKDAQWIAMLLQKNLLRGSLVPCDRIRELRTYSRKYVKLQQRMTTVLQTIERTLEMSNIRITSFVSRIESKSVLSVVRHIIHGETSPDRLTECIFGSIINKHGVKIRQSLEGVVCEHHRFMLEMNYEEYELLLSQSQRCEEQMDKLCAEYYSREMTLLETIPGIKRLAAMLIIAETGGDMNAFENSGKFTGWTGLRPRNDESAGKYKSTAITKGNRYLSAILVQVAWGAVRTKGSCFKEKFSRLAIRKNRKKALIAISRKIAVIIWNLLYYNQPYNPTLIATYEPEKVMAKVNYHQREITRLQRLI

SEQ ID NO: 416431 - protein, 400 aa, unidentified
MLLFFEVITMIFVGIDVAKDTHYAAVSDDSGAVLVKPFAFQNNAEGFCLLLKKLSEFDRSKLLIGLESTGIYSENLICFLYESGFRLAVINPIQTATLRKTAIRKTKTDKVDTMLIIKSLMVNSYRLYSQRDADSLKLRTLCRFRQNLKKSKARLKIQLAGYVNLVFPEFGKFFKSGIHIAASYALLKKYSSPKEIAALRTSTLCTLLSKASHGRFGKDTAEALKSLALSSVGVKNPYISIQIAQTIAQIELLEQQIKDLNSAIEEAMESINSVLMTVPGIGAVNAACILGEIGDIKRFSKPCKLLAYAGLDPTVRQSGQFTAKSTRMSKRGSALLRFALINSAWQLTLNDTTFKAYYDLKRSQGLNHYGALGHVAHKLTRVIFKLLTSDTPFIPAKLVA

SEQ ID NO: 416432 - protein, 447 aa, unidentified
MKTEPEEIPDADHELIIERVAAIDVAKASGKVCLRLPRPGRPGHRVSRVWDVEATTAAVCELADHLVAGQIERVTVESTSDYWRIWYYLLEAAGLSVQLVNARDVKNVPGRPKSDKLDSVWLAKLTEKGLLRPSFVPPAPIRQLRDYTRLRVDLTRERSRYWQRLEKLLEDALIKVSAVASTLDTLSVRDMLEALIAGERDPRRLADLARGRMKTKRAALIEALTGRFDDHHGELARMLLDQIDALSGQINTLTIRIDQLLATIANEVPGHDDGDSGAGGQPSADLTVVQRLTEIPGIGPTGAQVILAEIGLDMSPFPTAAHLVSWAKLCPRTIQSGAIQRSGKTGKGNPYLKGALGEAAAAAAKTNTFLGERYRRIVKRRGKLKALVAVARSILVIIWNLLSDNHARFRDLGPDYHATRINTERKLRNHIAQLAALGYHVAVEPAA

SEQ ID NO: 416433 - protein, 315 aa, unidentified
MSDVPCFVGIDVAKAQLDIALRPSGERWAVPNEASGVMTLVDRVQALHPTLIVLEATGGLERAVTSALATAGLPVVVVNPRQVRDFARATGQLAKTDALDARALAHFADVIRPTPRPLPDAQTQELRALLGRRQPLIGMRTAEQNRLAGTNARLTQDIAAHMTWLNAAIATLDDDLETILRASPLWRENDDLLQSAKGIGPVCARTLLLELPELGTLTRQQIAALVGVAPLHCDSGTLRGRRMIWGGRAHVRTVLYMGTLVATRFNPQIKVFYERLLAAGKVKKVALTACMHKLLTILNAMLKHRTPWQPQEVQS

SEQ ID NO: 416434 - protein, 359 aa, unidentified
MRRQCTKVQFPGQHVYVGVDVAKRSWKVCIYLGQAYHKNFSQPPDPRALVEYLRRHFPGAVYHTVYEAGYFGFWIHRSLKGLGVDSMVIHAADVPTTDKQRRTKTDRIDAGKLAWALATGGLTAIYVPDRLAEEDRSLVRMRTMFVRKQTRTKNQIKSMLQYYGFQVPEDVDDRYWSRAYIRWIESLAFEHESGKRAFHMLVKELLLLREAILDLTRQIRTLSHTERYRRPVELLRTVPGISLVSSMTFLTEIVTLERFKKLDHLLCYIGLVPGEHSTGDNEQNTGIIPRKNAMLRYMLIECAWIAQREGPALLQSFVTYSQRMPKTKAIIHIAHNLVARMRYVLKHEEPYVTGVLSAA

SEQ ID NO: 416435 - protein, 338 aa, unidentified
MQYLGIDWGTRRANWCVLDEGGELREGAIPADQNGLSRLALTLGSDMPVYGCIEMMSGAVWVRDQLAIVGWDIRLADARKVKAIAPLACKTDRVDARVLADLARRDLVPEVWVPTVEERANRERLRRRGHLVRLRTSAINRTFGLLTQWGLRRNLTALRKPDAIDELAANGVPAVWLQSIVTLLGVIDDLDAQLAPLEQELRPHARKDPRVALLMTIPGVAELLGLTLASEIGDVARFATASKLVGYSGLTPTIKQSGTSSRTGRISKAGPATLRWAAVEAAQQAWRPNNPWNRLYTDTKRRHGKANPAKAAVARKVLIATWHVLARNEPFKPSCAAA

SEQ ID NO: 416436 - protein, 417 aa, unidentified
MENHKRKLYVGIDIHSREHMVALLPIDLLESPDAPWKKVRPLNIKNNISDFERLDTTIRLHISSAGEVAIAVDHTGGHYSEPMVHFLQARGYTVYYLETKAVKAARERFLDQESKSDIIDATSTAYLLYLRDAHGISFRISAMTPELGTKAAALNSLVLQRWQFNRLASQATNRLHQFLLAVFPEGEAWFFNKLLKITPYYPTPKDILASNGLEGIEGLSQKDQEDILELARNTVGIPSQIYQWLIRDLTIQRAESLAKRDALTGMIREQVAEHTYGNILLSFPYLGVIAAATIIGIIKDIERWPDKKKFKKALGVYSNLTQSGGATGRTKQGKEGSRHGRRVLFQVCFGCILTKARDNDFRDYYLRQVVRGKPRMKALISTMGKLAEIIYHCLKAGEPYQYQGKYKTNRISSEKKS

SEQ ID NO: 416437 - protein, 355 aa, unidentified
MRRYLGLDVHAASSTLAVVSESGRRLQTHVLETNGRALVEAVRLIPGRKHLIFEEGAQSAWLYEILSPHVDEVVVAGVTKSRGQKDDRRDAYGLAEKLRTGSLDKRVFKAPRQFAMLRELARTHQMIGRDLVRVQARLKSVYRSRGVRTPGRTVYAKAHREQWQQQLPATARSTTTRLYEQIDFLVALKGQAEQDLIRESRKHSIARVLETTPGLGPIRVARLLPIVVTPHRFRTRQQFWSYCGLAIVMRSSSDWIRTPDGRWMRAPVQQTRGLTRHHNHGLKDLFKGAATTIVTQAPDDPLYHDYQRLTEAGTKPNLAKVTLARKIASTVLALWKKEEPYRPKHRIAREADRGA

SEQ ID NO: 416438 - protein, 342 aa, unidentified
MKKIVKQVVGIDVAQKELVVCLGRMDDDWSPELYAGKSFINNPKGCEALVSWVKKMTDPQVGVRYVMEATGVYHESLCYYLADKGYTLSVVLPNKISNYFRTLEVKTITDKTACEAITRFGLERKLDDWKRPDPIYKRLKQLTREREQLVQIRTMAKNQLHAEQSEAEPNKSSIARVQKQIAFLNKQEQEIKAELQEWVKQDEQVKSTVKTICTLPGVGLLTAVTVLAETNGFELIRNKRQLASYAGLDVKEKQSGTSVKGKPRISKKGNRYLRKAMHLPALAAIRHDERFKAIFARLVGKHGIKMKAAVAVQRKLLEMIYTLYKTNKIYDPHYLNIKVESN

SEQ ID NO: 416439 - protein, 413 aa, unidentified
MNHPKMQYTYVGIDSHKDSHTAVFMDCFFEKLGEMTFENLPSKFPTMLEDALKYNADGTTLMFGMEDISLYGRSLTVFLKNNGQAVRHVNALLVARERKNRNITQKTDSVDAECAARVLLSKLSELPDAQPHDDYWMIRTLVIRRNFIVKNNGSLKNHLHELLMHHYPNYRSFFDNIDCKTSLAFFARYPSPGTLRNITYDDLYPFLYKLSNGRVGTEKTHLILNTLQDTSVESQYVRDAAVQSTIRQLEFNQAEIKHIEVIIKDFLPRFDTTLTTMNGIDIVLASQLLSCIGDIRKFATPAKLARYSGIAPVTYASGKKDLQFANQRGSRELNSLFYKLAVLVSMSVGSTNKVINPFFYDYYRRKQSEGKTKRQALKCVQRRLVNIIWGMLTYNKPYENPEMYCVPKKDDVK

SEQ ID NO: 416440 - protein, 350 aa, unidentified
MIIGVDYHPSFQTIAFLMEETGECGEQELNHSDGQAERFYRDLKQRGICARVGMEATGYSRWFERLLAELGFEVWMGDPAEIKAKRVKKQKFDREDARLLRRLMLENNFPQIWVPGPENRDLRQLLWHRHRMVQMRTRIMNQLQALAMNEGYRWKKKLFSEQGRAQLEKLALAPWASRRRQELLELLDRMNPTIKELTAAVEREARKRPEAMRLMTHPGVGPLTALAYVLIIGTPTRFQRGKQIGTYVGMIPCEDSSAGKQRLGHISKQGSSLLRFLLVEAAQAAARIQPDWRRRYLHLAMRRHKSIAKVAMGRRLAVRLYWMWRNGCEYSPSLECGSYVGQLGTGHGVQ

SEQ ID NO: 416441 - protein, 337 aa, unidentified
MIQSKLFVGIDVSKKKLDVCLVDCDHPQGIDKGNFDNTPQGIAKLTNWAKKVSGFQPSRMFFCLEHTGHYAYQLCCFLGEQQLAYTLVPGAQLKKSMGIQRGKNDQVDALIIARYAWLHRQEIRPVNLPEKLILKIKNLLAYRRRLVKSRKSFKLGAKELQECCDKEVYGDIVVESNRIIRSLTLKMEKVEQQIQQLIEGDQKMKRIYDLLISIIGIGPQIAIHTIVATRCFSIFDDPRKFACYSGIAPFEHSSGTSIRGKTRINHQADKLMKSLLSMGAGSALRHDPEIKAYYQRKVAEGKNKRSVRNAIRNKLVSRMFAIVKRQTPYVPLMKHVA

SEQ ID NO: 416442 - protein, 332 aa, unidentified
MENFYFIGVDVSKKKLDFCVMFEGKVVHEEETSNHQGAIMSLLHHLEEDYGIASGQMLVCAEHTGQYTFPLACACKAVECKLWLENAAEIKYSSGVQRGKNDRVDAKRIAIYASRFQDKVQYYERPTEDIERLKQLESERTLYVTDLAKYKGQMKDQKEYMPKSLYERKMKRLQALMDDLEEAIQSITDEMDEVIASCPVLFRQRELLMSIDGVGRVVATNMIIATEAFTRFGDPRKFNCYAGVAPFSYSSGSSLHSKARVSHRADKVMKRLLHLAAVAVTHRIGGELKKYYERKVAEGKNKMSVINALRAKIVARMFAVIKRNERYKPILS

SEQ ID NO: 416443 - protein, 344 aa, unidentified
MDHFAGLDVSVKETSICIVDDTGKIVREVKAASEPQALLKVLGNPTYRFKRIGLEAGPLSQWLFSGLAEAGLPVVCVETRHMQAVLKAQINKTDRNDARGIAQMMRAGLYRPVHVKTLRSQKLRMLLTHRKLLQSKAIAIENDLRGTLRNFGLKVGMVGKVRFEARIKELAESLPDLAELVEPLLIVRRTLREQIVILHRRLLAIVRDDEVCQRLMTTPGVGPVVALTYRATVDVPARFRKSKAVGAVFGLTCARYQSGEIDWSGRISRCGDEMMRVMLYEAAQSMMRSKKWSWLKAWAMQIARRRGMKKAIVALARRLAVIMHRIWVDGTEFRWTREQAVAAA

SEQ ID NO: 416444 - protein, 369 aa, unidentified
MNTTTFVGLDVHARSIKAVALDAMTGEVRSATFGYDAAEVAGWVSSVDPSAKCVYESGVTGFDLQKRLSSMGIDCVVGAVPKMIKPSADRRRKNDRNDAEFLARMLSVGNVVEVWVPDDECEAARDLTRALDDAREDLKRCKQRLSKFLLRHGLVFSETNAKGRRKKNWTAAHWAWIRSISFPDKADDEVLAYYIDAARQAMEDKARLERLVEAEASKPRWKKRVDSLRCLKGIDVASAADLVFEAGEFSRFKNARSFAAWIGLTPSEHSSGESVRQGGITKAGNKHLRRVLVESAWHYLGCSPHSKDLAKGQAPDPGARRHAAKGVRRLVGRRAAMLERGVHKNKANVATARELACWCWAVGRMVENG

SEQ ID NO: 416445 - protein, 314 aa, unidentified
MEKKSVVGIDVSKARLDVAFRPSGQRLAVSNDARGISRLVNLLAKNQPECVLLEATGGYELKLLERLLEKSLPAVVVNPRQMREFARASGRLAKTDTIDAAVLAHYAEVMDPQLRKLPDAQTRKLRALLTRRRQLLVMMVAESNRSTHALEVVRRGITLTLRCLKKEVARIDRELAEFIRESPAWRKKAELLRSVPGVGRVASATLLGHLPELGTLGRKQIAALVGVAPFNRDSGTMRGRRAIWGGRSPVRAVLYMCTLVAIGRNPVIAAYYRRLLAAGKPGKVALVACARKLIVILNALVQTESPWAPDRATT

SEQ ID NO: 416446 - protein, 390 aa, unidentified
MIYVGIDVAKDKHDCLIVDSDGVIIFQKFTIPNNKQGFDQLLTNLKTCGSDSSKMKVGLEATGHYSDNLLEFLISNDLPTTVINPLHTNLYRKSLSLRKTKTDTVDALSIATMLRTESLEPYSQSSYQVRELKSLTRYRFSLVQDCSRLKTSYARLCVILFPELEKLVSSLHMASVYALLWELPNAAVISKCHLTKLTNLISTSSKGRYGKEKAVEIRNAAKDSVGSYSDVKSLELQQTIQMIRLMEDQIKQIEGKINPIIDVLQSPIMTIPGISYRMAAIIIAETENFNNFNSAEKVLAFAGLEPSVYQSGQLTSTHSKMVKRGSKYLRYAIFNATKYVCHWDKGFGQYLSKKRAEGKAYNVAVSHAAKKLTRVIFHLVKTNQPFVSQA

SEQ ID NO: 416447 - protein, 428 aa, unidentified
MSYRIAGIDVHKKMLAVVVSDVEIESEFQFERRMFSSNPEQLRSLAAWLVEQKTEEIVMESTAQYWKPVWETLERHWKPLCEKREGARRRSGTLHLAQALSNRGRRGRKRDFIDAERLVKRLVARELTLSFVPDPEQRLWRTVTRKKYQLRRDVVRLHNQLEALLEEAHIKLSSLVSDLLGVSARRMLKALADGETNPAALAALAHERLRATPEQLCDALGACRELKPVYRRLLKMTLEQLQILEQQIGQLDHELATLLHPHQDAVERLAEVPGFAVDSAQQIIAEVGPTAATFPSEKCLSSWVGACPGEEESAGVNYSHRSPKGNRHMRRLLNQAANAAVKVKGSIFEITYRRCVPRLGHNQAIGVIAHRQCRLIWLILHQGTRYEERGPAVTKRSRYQRTWRMIRQLRNLGYRIELPNPQASQAQA

SEQ ID NO: 416448 - protein, 375 aa, unidentified
MNNNNTLYVGLDVHKESITVAYAINSEPVELMGKIGTSPTDIQNLCKRLRSKSSQVSIVYEAGPCGYGLYRRLVKSGFDCMVCAPSLIPKKPGERVKTDRRDAIRLVRSLRAGDLSAVYVPGIEDEAFRDLARAWASARDDLRHARQRLKSFLLVHGVHYVGRTDWGPAHRRWLSKYSFESPWRQLAFDEHRRTIEDRQAQCERLESALKEAVTEWRLYPVVEALQAMRGIQFITAVGLISELGDLTRFEHPRQLMSWFGITPSEYSSGGSRHQGSITKAGNSYARKLLVEAAWSYRHPARISPAIQKRQENLPRPVIDRAWDAQLRLCKRYRKLQAKGKNVNITIVAVARELAGFIWDMGRIAMSVAQQPQCHK

SEQ ID NO: 416449 - protein, 355 aa, unidentified
MSQEKYIGLEVHQASISAAVMDPSGKVLMECLLETKAATILEFIQGLRGTLSLTFEEGTAAAWLHDLLKPHVSRRVVCDPRKAALLKAGNKNDRVDARKLAELLRTNQLKAVYHGEHGIRTLKELGRSYLTVSKEITRTMNRIKSLYRSWAIPCSGTTVYAPRHRREWLAKIMEPGVGVRAQHLYQQLDNLQPLRLEARRELLLESHKHAAVTLLRQIPSMGPIRAALLVALLQTPHRFRSKRQLWAYSGFAVETHDRGEYRWVRGKLQRNREPITVRGLNDNHNHDLKNLFKGAAISARARPGPLQDFYLARVTQGMRPTMARLTRARKIATITLTMWKKGANFDPQQLHRQAV

SEQ ID NO: 416450 - protein, 415 aa, unidentified
MYERVAAIDVGKKIIAVAVRTPGERAGKRRQQVRKYNTFHQTLAKMVAWLVSEGVTHVTMEATGIYWKPIFHALCEAEGPVEVLLVNARHVKNVPGRKSDALDAVWLAELTECGLLRGSFIPPPQIAAIRELTRYRKKLIEQRTSELQRLAKVLEDSGIKIDSVASKLTTLSARDMIEALIAGQRDPAVLADLARGVMRKKIPELTMACAGRFSAQHALMCTLHLEHIDHLADMIARLDTRIDEATLPFVRQTELLATIPGIGERAAQVVISEIGVEMSRFPTAAHLASWAGLCPGNNESAGRHRSGKTRKGNTELCEILTECAWAAGRTSTYVGAQFRRFHRRFGKKGGQKAATATAHTLIVIIWHVLAETTAYRDLGPDYFTRRIDSPEARKRRLIHELEALGHKVTIEPNAA

SEQ ID NO: 416451 - protein, 415 aa, unidentified
MEPMHQRVAGIDVHRMKHVVTILIGQEDGAVSSQTREFGGFKRDMRALVAWLQTHHIQQVVMESTGIYWKSVFAHLEAAGIPALVVNAFHVKNVPGRKTDVGDSEWLAQLARFGLLRGSFIPPKDLRELRIVSRYRRKLTGMLAGEKNRLHKLLDDAGIKLGGVVADIDGVCASKMVEGLIAGGKPDELAALGRGKVRATTDILEAAMDGELSARHRLVLDMAYDHLRYLEGKLAALDRYLLAAMQPYAWAWRLLQTIPGIDAISAAMILIEIGDDPHRFGSSARLASWSALCPGNNESAGKRKSGKTRHGNPIVRYLLCEAANAARRTKTVFRAKYESLVIRRGHKKTIIALAHKLVRTIFCVLVRRKPYRDSTVDYEAASVAKNAPRWIRALKKYGYWPQVAAPNPPTAVTAT

SEQ ID NO: 416452 - protein, 409 aa, unidentified
MEVVHARCAGLDVHKKSVYACVLCRGTDGKRRQEIRSFGTMTADLLKLADWLREHEVSHVAMEATGVYWRPVWAVLQGHFELLLVNPHHIKAIPGRKTDAKDCEWIADLLQHGLVRGSFVPPTDIQDLRDLTRYRAELKQAQSKVANRIQKLLELANIKLSSVASNTLGVSGRKMIEAIIAGEDNPEQLAALARRRLKEKIPELRLALQGHVRDHHRFLLKEFLDEWTALAERIARVEREIDRRIAPFEHAVTLWRGIPGMDRVTACNLVAELGVDMAQFPSAQHLTAWAGLCPGNRESAGKRLSGTTRPGNKWLRRTLCQSAWAVTRKKDCYLSAQFRRLASRRGVKRAVMAVAHSMLIIAYTMLKTGNTYHDLGGNYLEQTNKEHLQRYFLKRLRRLGLNVTVAPTT

SEQ ID NO: 416453 - protein, 426 aa, unidentified
MNTPNSDTSPTPEFAAYVGLDWGDKNHALAWTAGASQTAPQTGTLVNSPEVLHAWLQELGQRFEGRPVALAVETSRGPLIHLFGAYPWLAVYPIHPMTSARYRTAFKPSGAKDDLPDALLLLELVRDLRHKLRPLQMPDAATRQLAALVELRRDLVDRRTQVLLQLMALLKSYFPQALELVGQDLTSGLALAFLRRWPDPLALKAARPATLKSFYYQHSVRSETLVTERLARVQELRPLTTDEVVLMPARLHLAALLEQLHTLAKHIDLVEQQSHTLFKEHREAYLFRELPGAGKALQPRLLVAFGEDRSLYPDPGSLQKYGGLAPVVERSGRQAWVHWRWHAPRFLRQTFIEWAGQTVVYSAWAKEYYQHMKAKGKSHHVILRALAFKWVRILWKCWQTRTPYDEARYLKQLLARKSPHAVKLNP

SEQ ID NO: 416454 - protein, 342 aa, unidentified
MEQYVALDVSLKEISVCIVDSKGAVVFEGKTATEPATLIALIRRKAPRAVRVGLETGSTSPWLFHVLTSAGLPVVCMDARHAHAALSMRPTKSDRSDARGLADMLRMGWYREVHAKSVASHEHRTMLGARHQLVTMRSELDAQIRGMLKTFGLILGTGNKDTLIRRAEELAAGHPVMRSLVAKLAEVRRHVASQIAAIDRDIRCFVRSEPTLKRLMTVPGVGPITALAFLSSVDDPSRFKHARDVGPYLGLTPTRYQSGETDRQGRISKCGDTFTRTCLYEAAHVLLTRVQRFSPLKAWGTRLAKRIGGRKARVAVARKIAIILHCIWTDGTEFWWTREKTA

SEQ ID NO: 416455 - protein, 388 aa, unidentified
MCIIDIAGGVLDRFEIAHDRDGLAELMRRLARFGERVRIAIERPSGLIVDALVEAGHHVFPIHPNAVKASRPRYRSHGAKSDASDAYLLADLLRTDGHRWRELSPQSDSIRALRALVRCRDDLVSTRVALGNQLHSTLEAYWPGAACIFADITSPIGLAFLKRYPSPTSAARLSQAALGRFCRSQHYSGRRTPAELLERLHSAAVGLAGPLTNEAAGQLVRAMVAVLQPLVTQISDLTRRIERFVESLPDGQIIMSFPRAGRVCAAQILAELGDVRERFPNLDQLAAEAGAVPVTYQSGKTRSVAFRWACNHRLRQAVTCLADNSRHANAWARGIYVAARARGCDHPHAIRILARAWLRVIWRAWTDRKPYDPELHLGALKLASAQGG

SEQ ID NO: 416456 - protein, 389 aa, unidentified
MLLSSKLPTASKSVDLLHACPEPVRIAMEPTGDCHRTLAYRLLREGFEVCMASSVAGARYREAVFNSWDKNDPKDAGVILALLKQGITQRFVDPLIAGHHGLQELSKTHYQISLARTRLQHSLLTHYLPLYFPEVERYFHTTQATWFARFLIRFPTAASIRALSFEAFQGDAWNLVGRKVNKRTWVRELYDAACTSIGLPIADDDVAIETFRLQLRRYQQLIEQRDTLAQTAHRLLQGQPDYESLRSLPGVGPVLALTILAEGGDLRRFAHHRQFLKYCGLDLAKSQSGQFRGQEKLSKRGNARLRFAFWFAATIAVRMRENSFREKYERYIKPDPLNVDRKRKGLTAVAAKMARVAYGVVKHQTTYRCYFETSLPRGSIPLCRAVGTT

SEQ ID NO: 416457 - protein, 416 aa, unidentified
MKKGQDTRGYERYLALDIHREYILVGGWNEKKEWVLTPRRVSIEKFLEWAKKNIREGDIVVLETTTNVWTIYDIVAPLASRVLVANAAEVWELAGARVKTDKEDIKRLLKLLVGGIVPEVWVPPMEVRELRAFISYRHRLVTTSTMIRNRLQSLLHKHNLQLSEAGLLDQTWWEAQKNISPLEKLQIRQELLLLQEVEKLKGAVDEELQRQSTGSTWGKQALQLMQLPGVGFIVAMTVLSAIGDITRFESAKQLVGYAGIGAGVHDSGKTHKEKKITKKGRRELRWAMVEAAWRAVRMSPFWKAEYEKHLKRMRKPNQAIVVIARKLLIAIWHVLSKEETDIRASEEDLAYKMLLLSWSLSEDVRQGLTYKQFAKYALMKLGVETDITRFVRRNVPRRLAAKDEVLARMTELGLSV

SEQ ID NO: 416458 - protein, 338 aa, unidentified
MGIESATATVFVGIDVSKGTLDACLIPSEGKTKEAQFPNTAKGHAALLAWADRHAKGASLHVCMEATGPYSEAPATFLADAGRLVGVVNPTRVKYAGLARGRGNKTDRADAKLIAQYAAREAPPAWHPPSPEVRELQALVRRIDDLVEMAAREKGRLASPALATSARASITRTVELLEKEADRLRAAADAVVAGAESLHADRALLESIPGVGRRTATTILAELPAVERLPSAESAAAYCGLAPREYQSGSSVRKRTRLSKAGNPRLRKALFLPTQTAVRFNPLLKGFFDRLTDPERDGGPKPKMQAIGACMRKLVMICYGVLKSRQPFDPKWTSKITT

SEQ ID NO: 416459 - protein, 382 aa, unidentified
MKKTIRFLGLDVHAETIAAAVAEANGDVRFVGTVPNRPEAIRRLVRKLGPVEELHACYEAGPCGYVLYWQLTELGVKCDVIAPTLIPTKAGDRVKTDRRDAEKLARGLRSGDLTAVWVPDAAHEACRDLGRARLAAKRDQHRHRQRLGKFLLRQGRHRPEKMKAWTQKHREWIRKEVCFDRPAQAAVLLDYLNEVDRAGERIKRLEQAIDEATAAAPEALRDVMAALQALRGIAKVSAVTIIAELGQLSRFEHPSQLMGYSGLVSREHSSGEKVRRGAITKTGNAHLRRIVIEAAWAYRHGPSRGATLRKRQEGLSEEVKAIAWKAQHRLHDRYRALLGKGKEKQKVVTAVGRELLGFLWSIGVTAERESRGAAAAHRRRAA

SEQ ID NO: 416460 - protein, 350 aa, unidentified
MPRKFDTAVVTIGIDPGKNTMHLVGLDARGEIVLREKVTRTKIVSRLANMRPCLIGIEAGMGTHYVTRDLLALDHDVRQVPPVYAKPFRQIHKNDFRDAHAVAEAVQRPTTRCVPPKTDEQLDLQALHRVRYRLVGQRTAIINQIRCFLLEHGITVRQRLHWLRHALPDILAQRTDVLSPRMVRILEDLAQDWRRLDDRIEAVSGEIDALSKNTEPCRHLMTIPGIGPIISSAVVAAIGDGAAFTRGRDFAAWLGLVPKQISTGDRTILGRITKRGNRYLRMLFLQAARLVLLRPRNWMQHSFGPWLAAAAQRLHHNVLATALANKLARIAWSVLVQHREYEARLSVAAT

SEQ ID NO: 416461 - protein, 338 aa, unidentified
MGVYAGIDLHSSNNYIGIMDQDYKRLFGRRQPNELNNVLKVLEPFKADLEGVIVESTYNWYWLVDGLQEHGYTVHLANPSAIKQYEGIKHTDDRWDSFWLAHMKHLNILPEGYIYPKEQRPVRDLLRRRLFFVRHRTANILSLQSTITRNLGIKMSSNEIKKLDMDDACDLFDSSNLVFMAQNNISTIKHLGKIIKGIEKQVKSQVQLRKEFVMLVTIPGIGTILGLTIMLEVGDIGRFSKVGNYSSYCRCVSSKRLSNGKKKGENNKKNGNKYLAWAFVEAAHFAKRYIPGAQRFYQQKVAKANGAVATKAFANKLTRASYFIIRDQVPFDEDILFK

SEQ ID NO: 416462 - protein, 360 aa, unidentified
MRRSAIANGPHPFTLGVSMNTIKQVAGADISKDTIDVHFGSITTEQEIQYHQAATFPNTSKGFIRFTRWIQKQRVSKTAPLWIVMEATGVYYENFAYYLHAQHYTVCVLLPNKVKHYAKTLDNKSKTDALDARTITQLGLERSLASWQPPSEQMRTIKALTREYQAITALATQVKNQLHAKEFAYQSPKETVKRLRSQLHLFEQQLHSIEQELRRLVDQDPDLREKVARVKAIKGVGFLTVVSVVAETNGFVLFTSRKQLASYAGMDVVLRQSGKYSGKTTLSKKGNKHLRRAVFMPALSAIRCNKHLKEFYLRLVQRKSNKKIALLAVARKLLCLIYTIWKNGVPYDPNYHPTMKANIR

SEQ ID NO: 416463 - protein, 352 aa, unidentified
MHASTVAIDLAKEVFELAFADDRGRVVERKRLSRRAFARALEQRPPLRVLMEACGSAHYWARRFQRLGHAVRLLPARDVRPYVRGNKTDRNDVAGILEADRCGNIAGVPVKTPEQQGIQALHRLREHLKAERTATTNLLRGVLREFGVTIPAGALKVPAAVRDALEDGDNELPMPLRYSLDDQRQRLAQLQADMAAIEQRLEEFADRDVAVQRYRRVPGVGLLTATALRASAGDLSRFRNGRQFAAWLGLTPREHSSGQQRRLGGLTKRGDVYLRTLLVHGARAVLTAARLKQRRGQPLDPLQAWALKVQDARGHNKAACALANKLARRLWAMEHHGQAFDPRHVSQRPGAH

SEQ ID NO: 416464 - protein, 342 aa, unidentified
MHITSIGIDLGKTTFHLVTLGEQSKVLARKKFSRKQLLAYTANLPSSLIGMEACSGAHFIAAAIRSQGHDVRLIPAQFVKPYLKSNKNDFLDAEAIAEAVARQNMRFVPIKSDEQLDLQALHRVRDRLVQRRTAVINQIRGFLIERGITFPKRPANLRNNMVALLEDAEANLSPRMRRLLEGVWQEWKQLEADIDGADAEIERIASADANCQRLRKIPGVGPLASTAMVAAIGNGAAFRKGRDFSAWLGLVPKQRSTGGKARLYGISKRGNEYLRRMFIHGARAVLYRVKYDTGGLGRWMHQLEARAPRNKVIVAIANKLARIAWAVLSSGEVYQHQPIGTA

SEQ ID NO: 416465 - protein, 350 aa, unidentified
MARSIVAEPDAVVVGVDTHADIHVGVVLSSLGARLGSMVVATTPAGFGELLAWATGFGPVRCFGVEGTGSYGAALARHLRAGGHTVVEVDRPDRRTRRLQGKSDPVDAEAAARAVLAGTASGCPKAGDGRVEMIRALRVARRSAMKARTQAANQILALVLTSPEGLRASLRGLSVPSVVRVAARFRPGPLVDPAAATKLGLRHLARRHAALSAEIAELDRDLALLVAEAAPALLTLPGVGTDVAGALLVAAGDNPERLSSEAAFARLCGVAPLPASSGKTNRHRLNRGGDRIANNALWRIVMVRMSTDHRTRTYVERRIKEGLTKKEIVRCLKRYVVREVYHRLQGVDEP

SEQ ID NO: 416466 - protein, 371 aa, unidentified
MEEHEVLQKAELSCEADSENYLGGSSETMYYIGLDVHKKTISYCVKDASGKVYQEGKIGSTRRELDGWIKTLPQPRTIAMEATIFTGWIYDHLLPHAEKVKVAHPLMLRAIAAAKRKNDKIDASKIADCLRCNFLPECHMASTEIRDRRRTLRYRGLLVKQMVQMKNRISGLLLEKGVTHTKRRLHKVGYFAELMAGNKEIDQSIRPLLKLSREHIVRAQKLDYALVSSLERDPLLVERLKRLRTVPGVGPITALTWALEIGDVARFRSIKQAISYCGLCGAEKSSADKMLRTPISKQRNKHIQHVLVEAAKLAPRQCHELALIYEKEMQKGNRNRATLAVARKIVAYLLAVERRQQDFVPTEEFGGTAAA

SEQ ID NO: 416467 - protein, 362 aa, unidentified
MRIIGCDLHARQQTVAMLDTATGEVVNRTLTHEGNNVREFYSTLPRPVRVGIEATGSMHWFVNLMEELGIECRVGHPAEIRAAEPRKQKHDRRDADLILKLLTEDRFPAIWLPSKELQDLRSLLRHRHQWVRMRTRIQNALQSIALANGLRRGPTLWSHDGQNMIASLPLAPHTAYRRSELQAMYEKFEAEIEKLNQRVEEQACGRPGARLLMTHPGVGPVTALATEVFLGDPARFADSKALASYVGMIPREYSSGGRQRLGGLSKQGNPLLRFLWGEAGAHAVRRDPDLQRFYRRKLVQKGLGKASVAVARKLGIRLWIMLRDQIEYNEFCRRGQKQQKSSGACAGMPETPYGAKSHRPVD

SEQ ID NO: 416468 - protein, 350 aa, unidentified
MSNDMFVGADVHAVSTTYAVLNDSGKLVMEGVVETTAQSLISIVKSIPGAVHLTFEEGTHASWLYNLLRPHVAELVVCNPRKNVSKKENKSDRIDARKLARMLRSGDLSPVYHGHDETRALKELVRGYEHVVADSVRAKNRLKAIYRSQGERTSGTNLYKLEGREEWLSKLPSRGLRVRAGWLYSQIDGLDYVREEAERAVLCEARKHQACKLVRSVPGIGPIRSATIVAHVATPFRFRTKRQFWAYCGLAVVTSDTSEWIEVDGQLVRKRRSASTRGLNKNFNRSLKNVFKSAVHDARKFRPHLGYLVESGMRESLARLTVARKIAATTLAIWKKGEKFDLSKAVIRSE

SEQ ID NO: 416469 - protein, 430 aa, unidentified
MKSNTQNAKIEAITEKTLVLGIDVGSETHYARAFDYRGIEYSKKPFKFSNTEVGFATFKEWILDLKERHEKDKVVLGMEPTGHYWFNLGKFLQDNEMKPVLVNPHHVKKSKELDDNNPTKNDRKDPKVIAGLVREGRYMIPYLPDGVYADLRTASNIRFQLQAELTRIQNRISRWFNIYFPEYKTVYGKPDAKSGMLILKAAPLPEDILTLGIDGVNQIWRDAKLRAVGKARAKTLIEAAEHSVGSKEGAVSARMEIRMLLEDYESRNIRLQEVMGLIEGLVNQIPMAEKLLEIKGVGIKTVSGFLAEVGDIRRFNDPKELQKLAGLALVENSSGKHKGKTTISRRGRKRLRYLLFEVAMSLVAKNPEFRELHNYYTTRRLNPLKKMQSLMAIAAKLIRVFYAMLTKGVDYDPKKMVSDIKRPAVYLQAA

SEQ ID NO: 416470 - protein, 340 aa, unidentified
MVKYFVGMDIASNTFMAAVGTQPWKLVVKPQEFENSEDGFAKLLSWLKEHHLEPHQTVACMESTGVYGESLAYFLCAKGYRVAVEPPLKVKRAFRPGGPKTDAVDSCQIAEYACRFEDQLNFWQPRTELLEQIKVLLATREQFSGQKTAHQNALQAIKRKVVRTPLAEQVHEQSITQLQKHIHDIDQELRRLINSDPTLKQMLLLLMSVPGVGLLLAAHMILLTQTSLDPKELAAYLGIAPNEFSSGTSVFKKTSSRHYGPSAVRKLLYLASCSVRTHREQFRSYFLRKTAKGKSKRLVLNNIANKLLKIICAVLRSNTPFIQNYCPIQPLALTRSSYSQ

SEQ ID NO: 416471 - protein, 432 aa, unidentified
MVVCRRGRCPVLEETPQDAAPVERVAALDIGKAEVVCCVRVPSLSGSGRRVQEVRTFTTMTRSLQGMGDWLAGLGVTRIVMEATSDYWKPPFYLLEAAGFDVWLVNAREVKHLPGRPKTDLLDAVWLCKIAERGMVRASFVPPAPIRLLRDVTRYRVDLVGERNREKNRVEKLLEDAQIKLSVVASDIFGVSGRAMMAALIAGQRDPKILAQLARTAMRAKIRDLEEAFVGRFSEHHAFLLARMLAHIDALDADIAAVEDRIEELIAPFATAVATLDDIPGVGPTAAQAIIAEIGVDMSRFPTAGHLASWARFAPAVKESAGKNKGNGATGHGNRYLARALGEAAVGASRTNTFLGERYRRIARRRGKKKAIVAVGRSILVIIWQLLNTERATFTDLGPDYYDNRGGTQRAVRNHIRGLQALGYQVTLQTAA

SEQ ID NO: 416472 - protein, 307 aa, unidentified
MSTFVGIDVSKATLDLALLDGISQSFSNVESGWEDILELLQPLKPSCIILEATGGYEKGIFRVLTAANLPVVRVNPRQVREFARSLGILAKTDKLDAQVLARYARVTEPEIRPVLEDETLRSLVTRRNQLVAMRTQETNRLKQNPTSTIEADIQAHLKELETRIATFTRCIKEELTRFPSSSLLQAIKGVSAITTAVLLAELPELGKLNRKQIAALAGLAPFNRDSGSFRGKRKVWGGRASVRSALYMATLSAIRFHDKLSAFYQRLRKAGKVFKVAVTACMRKLLTILNATVRELEAEQQKAASPV

SEQ ID NO: 416473 - protein, 399 aa, unidentified
MNERIFIMYIIGIDIGKNHHEASIVSPEGKQIGHSLRFATTHKGADSLMNFIFKNIGNSPCVFGMEATGHYWYPIYSFLKARGYTIYVINPIQSDSLRKMYIRQTKNDSIDSFLIAEVIRFGQFTTTSMADENILAMRQLCRYRDSVISSRTEIKLRISTIIEQIFPEYEKQFSSLWLSTSMGILEKYLTPENIENAPIDELFEIIKDKSHNRLTRAKAISIKEAAADTFGIKIAQDAFSFQLKQLIDRMNFLDKQIEALDCQILEYYEKFDCYLHTIPGIGMIAAATILAEIGDINRFKSSSALVAFAGIDPTVRQSGEFSSTHNHMSKRGSPYLRHAIFLAATTCSFHNSPLNAYYKKKRDQGKHHLTATGAVARKLTSVIYAVLRDSKPYEPKSFC

SEQ ID NO: 416474 - protein, 400 aa, unidentified
MARGKVSGYGGEPGPDGVRGSETNTPGLLALSDWLTEQGRTHVAMEATGVCWKPVRHILSDGDFTLILANAAHVKNVPGRETDVADATWLADLLALGLIRPGFVPEEATREMRALPRTRKQLVREQGSHIQRPQKTLEDANIKLSSVLTNIAGVSGRDILEALIGGETDPDQLLTLVRRGVKASPEKLRASLQGHVTDRHRFLLRLHLRQVDALDDAIAEIDAEVDRDLDPFRDAVRLSRIIPGVSDLTAQVIVSEIGTDMGRFPTAGHLISWAGLCPRNDESAGKRRSTRLREGAPWLKTTLVQCAWAATRKKASYLHAQFQRLRQKRGPRKAICAVAASILTAAHHMPRDGTSYSDLGPDQLRSDTREAQARRLAQKITRLGFSRQIAPAQQAEGVSV

SEQ ID NO: 416475 - protein, 400 aa, unidentified
MLSIGIDVSKGKSTVCGMKPGGEIVYAPFEVQHTREGMLELVSLLRSSCEEVRAVLESTGSYHCPVVAALLENGIFVSVVNSLRMKRFCSQSIRKVKTDRIDAMQIALYGLAYWQELQPTKLPEDTYRELQLLARQYYQMTSLLIKAKVDFNAICDQVLPGMQELMSDHAGRHKLSDFVLRYCHTTHILEMGETRFRKDYCKWAEKKGYRNCERMAALIFATAQNGIPVLPNAPSTQIVITEAIRVLHTVEASRDAILTQMQALAKTLPEYSLVREMPCIGDTLAPRLIAEIGDVRRFHSKRALIAYAGIGAPPYQSGKFSANNRHISKRGNRYLRKTGYEVMQSYVMHKPANDPIFTFIEKKRSEGKSGKLAMVAGLNKFLRVYYGKVTELYRSLPAIE

SEQ ID NO: 416476 - protein, 341 aa, unidentified
MATIATIGLDIAKSVFQIHGIDAAGAVVVRRKLSRGRVLAYFEALPRCVIGLEACNTSHHWARELTALGHDVRLMPAQYVKPYVKRGKNDAADAEAICEAVTRPTMRFVAVKTPEQQSVMMLHRVRLMLNRQRTQLSNALRAHMAEFGVVAPVGRMGLERLLSIVADCADKRIPTDARVCLEMLARQLAVVRTQVLENDRRIRESARATEVGRRLMAIPGVGPLLASAFVASVADPRVFKTGRDLAAWIGLVPKQNSSGGKERLGGISRAGNGYLRQMLVVGAMAVIRQAQRHGTRRAWLLQLLARRATKVAAVALANKTARMVWALMTSGEVYREPAVAA

SEQ ID NO: 416477 - protein, 344 aa, unidentified
MSKHAVAAGDIAGLIERLTQLKQKARARTGKDFPGVVIQEAGLDGFWIHRVLHSEGIESHVVDPASILVSRRRRRAKTDKIDGETLVRTLLAYKRGEPRVCALVKALTPEEEDRRRLCRERKVLTAERVQHVNRIKGLLFAQGIFDDEPLKRNRRTRLDELRTGDGRCLSPHLKAQVVRELDRLELVLTQLRAVEAERDALLEQASQAAAAPAAMLMQLKGIGPEFAAILWSEGLFRSFDNRRQVAAYAGLAPTPWQSGSVAHEQGVSKAGNPRLRTTMIELAWLWLRHQSTSALSLWFHQRLKRNGGRWRKTTIVALARKLLIALWKYTSAGIVIEGAVMKAA

SEQ ID NO: 416478 - protein, 400 aa, unidentified
MNAVGIDVSKGKSMVSIARPFGEIVAKPFNVPHTSTGMQDLLSRLATLQGDTRIIMEHTGRYYEPVAEKLSSAGFFVCAVNPKLIRDYGNNTLRKVKTDKADSLKIARYGLDNWQDLRQHTGMDKKREQLKLMNRQFDFYMKQKTAAKNNLIALVDQTYPGANTLFKSPARPDGSQKWVDFVASFWHVDCVRKIGAKAFSERYQKWCLRNSYYFQSDKPEKILAASKELLPTLPKDAMTKLLVQQAVKQLNTISALVEQLRVEMNRLASELPEYPIVMAMCGVGPSLGPQIMAEIGDVARFAHRGSLTAFAGVDPGVSQSGTFEAKSRHASKRGSAQLRKALFQVMSVLLKTAPQDDPVFRFLDKKRAEGKQYYVYMTAGMNKFLRIYYGRVKEYLASQA

SEQ ID NO: 416479 - protein, 423 aa, unidentified
MNPRVEIACGLDVHRSKIVGSIVHSDGGKETRTFTTGIDDAIALKNWILGNRCERVAMEATGIYWYPIYDLLEDHVTLQVVNPYFIKVMPGRKTDQMDAEWIAELCLNGMVKSSYVPSPQLRTRRDMIRTLDRLIRTRTRHKNRIHKIMIRSGIRIASHLSSLFGPSGLRILYGLLEGQSIDTILDEINNAKISRKRDELKGSICGNLDGNAVYLIRLELKAIRSLNNLIDDLKKRISVLMEPYTDDIEILMSIPGIGYDSAVNILSEIGDIHQFPSGKHLVSWAGLAPGMNESAGKRIPGHITKKGSKFLRTFLIEPSHSIAGMKRDNQLKRFFQKMRSKIGYKPAIIALARKLLMLVHHLLIHREMYHEEDFPMKKIRLPETIAPETLNPHDILNLVSDAVSSLNEPDRDHFIRNLNRITG

SEQ ID NO: 416480 - protein, 376 aa, unidentified
MDVVYPVCCGIDVHQAHLTACLRRVQEDGHVTKDVQEFATTYPALLILLDWLIAQHCPVVALESTGVYWKPVYHVLAGSLEVLVGNAQDMQQRPGRKTDKADARWIAELLAHGLIRPSFVPPPAISALRDLTRTRVALVQTRSQAKNRGHKVLEDTNVKVASVVTDLFGVSGRRMLAGQFTHHHATIIQASLELVDLLNRQIADLDSQIGELVTPLEPQITQLDSIPGVDKIAARDILAEIGTEMSRFGSAARLASWAGVCPGNNESAGKRRRGKSRKGNRYIRRVLVQCAWAARKTPTYLGRTFRRLEVRLGGKKAAVAVAHKILVIVYHLLAEGTLYDEERYDRLQPRQEAQQRQRAIKVLERLGYHVNLERVA

SEQ ID NO: 416481 - protein, 345 aa, unidentified
MEKHTVVAVDIAKVVFDVAVSHEPGRVAERKRLSRAAFSLFLAQLPASTVVMEACGMAHYWARRLEEQGHTVVLLPPHQVRPYVTRNKTDRTDAKGILEAYRNADIRPVPVKSVAQQVLCSLHRFRSGWLAARTAQINTLRGLLRELGLVIPLGAEKVLPQVRILIADADSGIPDALRPVLATACDEIEALSDNIKMTERQLEALAEQTPAVQRLRSVPGIGLLIATALVAFLGDIQRFPSGRHLASYLGLTPREFSSGMKRRLGRISKRGDAYLRMLLIHGARSVLCHAKKAQQHDRLRSWALALEKRTRHNTAAVALANKLARIAWAVWKHDKDYVSKIEQAA

SEQ ID NO: 416482 - protein, 419 aa, unidentified
MRRLLERCAALDVHKASVTVCARILGSGGEIEEFMAEFSTMAADLLALRDWLKELAVTHVAMEATGVYWKPVYYALEDDFELLLVNAQHVKNVPGRKTDTMDAQWLSQLLECGLLRASFVPPKPIRELRDLTRYRKALVKERQQEANRLHKVLEDAGIKLACVATDVLGVSGRQMLEALIGGTRDPEVLAELARGRLRAKLPALKQALVGNFKPHHALIVSHILAHLDYLDETIAVLSEEVERRLAPVAYKAENLCTIHGVAERTSHVILAELGPDMSRFATDRHAASWACICPGNDESAGKRRSGKTRKGNPYLRAALIEAANGAIRTKNTYLRAQYEQVKRRQGHKKAIVAVAHSILIAAYHILKDDIPYQDLGGDHFARRADPERITKRLVAQLERLGHTVTLQTSTAKEAAAAPA

SEQ ID NO: 416483 - protein, 430 aa, unidentified
MKSNTQNAKIEAITEKTLVLGIDVGSEMHYARAFDYRGIEYSKKPFKFSNTEAGFVTFKEWILDLKDRHEKEKVVPGMEPTGHYWFNLGKFLQDNEMKPVLVNPHHVKKSKELDDNNPTKNDRKDPKVIAGLVREGRYMIPYLPDGVYADLRTASNIRFQLQAELTRIQNRISRWFNIYFPEYKTVYGKPDAKSGMLILKAAPLPEDILTLGIDGVNQIWRDAKLRAVGKARAKTLIEAAGHSVGSKEGAVSARMEIRMLLEDYESRNMRLQEVMVLIEELVKGIPMAEKLLEIKGVGIRTVSGFLAEVGDISRFNNPKELQKLAGLALVENSSGKHKGGTTISRRGRKRLRYLLFEAAMSLVAKNPEFRELHNYYTTRRRNPLKKMQSLMAVATKLIRVFYAMLTKGVDYDPKKMVSDIRRPEAYLQAA

SEQ ID NO: 416484 - protein, 455 aa, unidentified
MRKPQVIPDEDHEVVYERVAAVDVAKASGVVCLRTPDPQRPGRFVNRIWEDVPATRARIAELGGELLRCRVQMVTLESTSDYWRIWYYVLEGLGLAVQLVSASQAKNLKGRPKTDRLDAMWLARLTQWGMLRPSFVPPAAIRRVRDFTRARTDLVRERTRVLQRLEKLLEDAMVKITSVVTDGLKAKSSVAMVAALVAGERDPRTIADLAKGSLRGKRDQLAEALDGMFDSHHGVIARMLLDQVAFLDQRITAMEDQAIAALAQVEESWGVDATGETGPGRGTTPDSPVLAAAHRLAEIPGISVWLAIVIIAEIGLNMAVFPTPAHLVSWLGLCRSAAQSGTRHGKGRQKKGNSYARGAAGQAALAARGTATFLGERYRRIARRRGGAVAQVAVARSIMIIVWHLLNDPAARYRDLGPDWHARRTNRDKKIRTHIQGLKALGVTVAITDDEPQAA

SEQ ID NO: 416485 - protein, 308 aa, unidentified
MTTIYTGLDIAKLNLQLHLLGRRHDLPNTAAGHRRLVKLLAALPGAHVICEATGGYERDLVAALHDARIPVSVLNPARVRHFARATGQRAKTDPLDAALLTAYGQALQPPPTAPRTPQEHHLSELIRRRVQVLALLVAQRQQAQRLTVPALRRQAQSLVRRLERDLKQIETQLGQLQAQAKALDERVQKLIAITGVGTITALGVLAELPELGTLNRRQAAALAGLAPHPRASGQWHGRRRIGGGRAPVRRALYMAALVAARSNRQLKAFYQRLRAAGKPAKVALTAVMRKLIILMNHTLKNPNFVPQN

SEQ ID NO: 416486 - protein, 352 aa, unidentified
MFYVGLDIHDKRIAICVLNEAGQVARRAQVRTIDEMMRILESLPDRFEVCYEASCGYGHYHDLLRPIAARVTVAHPGRLRLIFRSKDKNDRKDAERLAKLLYLGEAPAVHVPSADVRTWRELITCRGRVIAKRTRAKNSLRTLLRCAGVVPPGRPALWTKNGLEWLRRLELPTPSQQLRRDLLLEEIEALTRQVRRIEQQLNHEAGRSPAVACLRSIPGVGVRTAEAVAAFVDDPQRFGDAKEVGRYFGLVPSQDQSGDRNRLGHITREGPAVVRQLVAEASWQAVRRSPTIRAYFERIRRDDPQRKKIALVATAHYLVRVMWALLKDGATWEEDRTPVEEPNGATPVFANM

SEQ ID NO: 416487 - protein, 388 aa, unidentified
MQDVADQSAAPTTIGADLCAIFVSLELSRSTWLVTSLSPGGGEKMSKHSVSAGDIAALLARFSELRRKACARTGKSFPIVVIQEAGLDGFWIHRVLLSEGIESHVVDAASIATSRRRRRAKTDRIDGETLLRALLAHRRGEPRVCSMVRAPTPEDEDRRRICRERKVLIMERVQHVNRIKGLLFSQGASGYEPLRRDRRVRLDALQTGDGRRLPQHLKAQVCRELDRLELLLEQIKAVEAERDALLNAEQTKASAPPPMLLGVRGVGPEFASVLWSEGLSRHFDNRRQVAAYAGLAPTPWQSGSVHREQGISQSGNRRLRTTMIQLAWLWLRHQPGSALTLWFKDRMERNGGRRRKTTIVALARKLLVALWKYVSAGVVIEGALIRPA

SEQ ID NO: 416488 - protein, 349 aa, unidentified
MRIIGGLDVHRSQITYDWIDTDTGQHQRGQLAPAHREHLRVWLEQFRDRPAAFALEGCTGWRYVVEELQRAGIAAHLAEPADTSTLRGPKRHAKTDRTDARHLRGLLAAGRLPESWIPPAHVLEARTLVRCYKALTDEHTAWLQRVPATLFHHGVPAQRNLLAADRRARLERGSGLSPAARQLVAVALGTLDHLDAELDRLRAELTWFARRQPGCQALDGLYGIGPVTAVAIWAELGDPARFTSSRQVVRHTGLDITVYSSDGKRTPGHLARQGPPVLRWALFEAAKCAARPSSPDHAYYLQVKGRLGGNRATLAVARKLARRCYHTLGTLGDLAYAPPSDTPDLGRVA

SEQ ID NO: 416489 - protein, 320 aa, unidentified
MIEEHQNIYVGIDVAKEQLEIAVRPGTDSWTLANDETAVDELIQNMIALNPQLIILEATGGLEELAVSMLGAAGLPVVVVNPRQVRDFARSTGRLAKTDRIDAKILAHFGEAIRPEVRPLANEQAHLLSALVTRRRQIAEMLVAERNRLRTAHRESCLRIQDHISWLKQELGDLNKSIHKAIQESPIWCEKEDLLRSVPGIGPVSAATLLADLPELGQLDRKKIAALVGVAPFNRDSGTLRGQRSIWGGRAHVRSVLYMATLSAIRHNSVIKTFYDRLILAGKKQKVALVACMRKLLTILNAIIRHSSQWRTPSAVHARA

SEQ ID NO: 416490 - protein, 348 aa, unidentified
MKIIGCDFHPSYQQIVVWDQVSGEVVEKALSHERKEEVRAFYAGLQGPVRVGIEASGQSQWFEQMLGELGHEVRIGDAAKIRAATDRKQKTDRRDAELLVKLLEEGRFPQIWVPTPAERDVRQLLLHRHKLVRMRTQVKNQLQALALNQGQRKGKLWSVAGRKQLEALPLLPWASRRRAELLGLLDQLEKSLEELDRATTEQANTRREVRRLMTHPGVGPVTALAFVLTLGPPQRFRRGKQVASYFGLIPSEYSSGEGKQRLGHISKQGSSFVRGLLVEAAQSAVRHEPQLRREYQRLAQRRCRALAKVAMARKLAVRLYWMLREEVDYAQLIQGSRAGQPESFRGRG

SEQ ID NO: 416491 - protein, 343 aa, unidentified
MQAVTTIGLDIAKSVFQVHGVDAEGKVLIRRKLKRRYVLAFFQKLPPCLVGIEACATSHHWSRELKALGHTVRLMPPAYVKPYVKRQKNDAADAEAICEAVTRANMRFVETKTPEQQSCLMLHRTRHLFIRQQTSVINAIRAHMAEFGIVAPVGRQGVEALLEVAADGGDNRVPEVARSCLAALGAQLRALKAQILEFDRRITAWHRSNETSRRLDAIPGVGPALATALVASVADPKAFRSGRNFSAWIGLVPKQHSSGGKDRLGSISKQGDRYLRSLFTAGALAVIRYAKIHGTKHRPWLTALLARRPTKVAAIALANKIARMAWAMMARGERYREPVALAA

SEQ ID NO: 416492 - protein, 340 aa, unidentified
MGEVTTIGLDLAKHVFQVHGVDAEGGTVLRKQLRRAQVLAFFSRLPPCLVGLEACATAHYWARELRALGHEVRLMPAQYVKAYIKRNKNDAADAEAICEAVQRPTMRFVPVKTADQQAAVLLHRGRERLVRQRTGLVNALRGHLAEFGVIAPQGLRNVGKLIAIVRDEGDARLPDLARQVLQVLAVQIEQLEAAVAAIEKQLMAWHKSNPVSQRLASVPGIGPIIATALAATVVEPSGFRSGREFAAWLGLVPRQNSTGGKHRLGGISKRGNQYLRRLLINGASANLLRSKATNADPWVIGLRQRRPSLVVAVALANKTARIAWAVMQRHENYQRVAAAA

SEQ ID NO: 416493 - protein, 344 aa, unidentified
MDNHTQYSGFAGVDLAKKVMQIHFVSGDGEITDKQVKRAEFLDFFRNRTKCLIGMEACGASQDWARKLEAMGHEVHLMSPKAVKPFVSGQKNDYNDAIGIYKAIFNGVRRVPVKSTEIRDLQTLRRIRSQVTKDKVKEINHVRGLLAEYGIVMGKSITAFNKGISSALESLKERGDVSPLVAEELQTTVESIKTKIERQKRLDREIEQLARGCKNYENFLKTPGVGPFTAAMLCVLLCDPAIFANGRQFAAYIGLAPRSRGSGGKNFIIGIPSKFNCDSESRAVFVECAQALARYKNKSPWVDGILRRKPKKVAVIAIANKLARQVWAMANKGESFKQMTILTA

SEQ ID NO: 416494 - protein, 426 aa, unidentified
MKLEEKELEKPIRAWIGIDWADEKHDVSVYEVASGKQETVVIRQTPEALQEWLGQLRTRYEGGYVAVVLEQGRGGLLNALMGCEFLVLYIINPKSLSSFREAFYGSGATSDPVDAQLMRDMVRQNPSRFRAWRPDDVLTRSLRLLTEGRRNLVDQSTALTNQLTALLKGYYPQALQWVGALDTAWACDFLEQWPTLQSLQSRSRRQILRFYEKHPRASVDLNEQLRQIEQARPLTHDEAVIEANALMVRALVNQLRPLLVSIAEFDRKIAAIFRKHPDRPIFESFPGAGAALAPRLTAAFGTDRDRFQAATEMQQLAGIAPVTEKSGKKTFVHWRYACPKFMRQTFQEFADHSRRWCQWAKAHYELLRLRGKSHNAAVRALAYKWIRILFRCWKDRQPYQDAVYTKSLFKHGSPLTSLLVKSVENP

SEQ ID NO: 416495 - protein, 387 aa, unidentified
MSQVSDLSRSLVPFDQNITLTVVVELSEASWLVAGLIPGVDRQPVKKQEPEPVALLRLLERWRVEAVRAGRTIGRIALAFEAGRDGFWLARWLQARDIEVHVVHSTSVAVSREHRRAKTDRLDTAMLMRVFLGWLRGERGHCRMVAIPTLEQEDAKRPSRERESLVGERTRIVNRMKAALARLGIRGFKPTLRKAPQRLDALRTPEEVSIPPNTLDEIRRDMVRLAVVREQIDVIERARLARLEQAPAAGPHAMVRLLARVIGVGLETADMLVQEVLSRNLRDRRAVARYVGLTGSPDESGRRRREKGLAKAGNARVRRGLIQLAWRFLRFQRDSTLAQWYRPRTGGPKGARKTTMIVALARKLLIALWRMVTIGEIPAGVALRQVI

SEQ ID NO: 416496 - protein, 424 aa, unidentified
MIEKKRWYAGVDWGSQIHCVFLSDAEGRKLGRREFEHSGEGLADMAVWLMKISSAEEPAQVFVAIEVPHGPVAETLIERGFAVHSINPKQMDRFRDRFSMAGAKDDSRDAEVMASSLRTDPKCFRRLEPVDPIVVELREWSRIAEELGVERNRLTNRLREQLWRYFPALLELETDLRAEWLLKFLDLAPTPAKASKLRQTTIAKLLKERRIRRLDAEAIVRTVRAPAPQLAPGTVEAASAHVASLIPRLRLLNRQIRDAERRLDALTVRLAAPVALKDQETTTETGPGQKKQHDVVILASLPGLGRTILATLLAEAPEPLQRRDYAALRSLTGVAPVTKKSGKSKIVLRRQACNDRLANAVYHWARVAVQHDPRSRAKYAELRRRGCTHGRALRQIADRLLNVACAMLKSGRLYDPHFATQKTA

SEQ ID NO: 416497 - protein, 444 aa, unidentified
MRIIFERVAGLDVHKRTVAATRMRVSEGSRLDWETQTFGTTTPELLVLHDWLQEWGCTHVAIESTGDYWKPVFNLLEGDFEVWLVNARHVAQVPGRKTDVSDSEWLAELMLHGMLKPSFIPPKPQRALRDLTRYRTTLVQERTRTVNRVQKVLEGANIKLASVVTDITGVSARAMLEALGAGQSDPLLMAELARGRLRNKLPELEKALTGLVEAHHRFLLSKQLAHIDFLDEQVEDISAEIARRIEAMGQPSAPPASGVVQNGSPQASDFDQADSFLTWSQAVALLDSIPGINRRVAEVILAEIGLDMSQFPTDKHLAAWAGLAPGNHQSGGKRYSGRTRQGNHALKSILVQAAWSAVRTKDTFLKARYHRLAARRGKKRAIVAVAHAMVVSIWHMLTYRQPYRELGGDYFDQRKKEVKVSYLIRRLEKLTGATVSLAMQSAAA

SEQ ID NO: 416498 - protein, 274 aa, unidentified
MSESSTIFVGLDQHKESITVAYVGADRSLEPICLGPVGPRTSDVDAMVRKLQSKGKKLVFAYEAGPCGYGLYRHLTRKGHTCLVVAPAKIPRKPGDRVKNDKRDATNLCRLLRSNDLKSVYVPQIADEAIRDLCRAREDAVSDLKAAKHRIKSFLLRHDIRFNGKTDWKTPHLRWLGEVKCETSAQQVVFQEYVRAMVQGFERVERLEIELTQHVKSWRLSPVVEALQALRGVRFTVAVTAIAELGDLTRFEKPRQLMAFLGLYPSEHTSGERR

SEQ ID NO: 416499 - protein, 350 aa, unidentified
MQEGIKFFVGLDVHKDSIAVAVAEDGREAPRFTGTAAADLNQVRRALSRIGTAKEVLVVYGAGPGGHVLSRHLLRHGYRCEVVAPSKIARAAGDRIKTDRRDAILLARLSRAGELVRVTVPDTRDEAMRDLSRAREDAASARLKARLPLKAMLLRHGKSYPGKVKWRTAHERYLGTIGFEHAAQDIAFAEYRRAVTDADERMERLTRALRDQVAEWRMRPVVEALMTLRGIDALAAITLVAELGDLSRFARAQELMAFLGLVPCEHTSGNKRRQGAITKAGNGHARRMLVEAAWNDRFPARMSRALQVRQEGRPKGGTRYRLARAAAIVYPLPAAQAAGSSKQDLRGHRP

SEQ ID NO: 416500 - protein, 353 aa, unidentified
MRRPKDKLIAGLDLHSNNVMIGVMNQEGKRVAHRKVECNLRHVTEFLAPFKTQMQSMAVESTFNWYWLVDGLRTEGYPIDLANPAKIEQYSGLKHVDDKDDAFHLADLQRLNILPKAHVYDPQLRPVRDLLRRRMSLVHQRTALLLSFKSLHARTTGQPLDLSDAKKMEPQRAPKLYEHPANQLIAQVQAEHIGALKKSIERLEKAVHACAREIPFYDRLLSLPGVGRILGMTITMEVGDIKRFKSDGNFASYCRMVDANRMSNGKCKADNNSKCGNKYLSWAFIEAANFARRYDANCRRWYDRKAAKTSKVIATKALACKLAKAAWFVMAQQCTYDEKRIFPELANKAMKKD

SEQ ID NO: 416501 - protein, 423 aa, unidentified
MNRKRSKSRVDRTMPMMHPNAAAIDVGATLHMAAVRADRATEPVRSFGTFTTDLHRLVDWFTECGVETVVMESTSVYWIPIFELLDARGFTVFLVNARDAKHVPGRKTDVSDAQWLQRLHSYGLLRASFRPKGQIAELRAYMRQRERLLEYAASHIQHMQKALTEMNLQLHHVVADITGSTGLRIIRAILAGERDPEVLACLRHYSCQSSAETIAKALAGSYRTEHLFALEQALALYDAYHEKASACDVRIEAVLKELCIHRGRGIGSVAPAPRRRHRTDQANALAFDVRAALFALLGKDITTIDGLGPYLSLKLVAECGDDLSSWPSAKHFTSWLGLAPSNKVSGGKMLSSRTRRSGGRAAALLRLAAVTVGRTDTALGAFYRRLSSRIGKAKAVTATARKVAVLFYNAVRHGMEYVDPGEG

SEQ ID NO: 416502 - protein, 377 aa, unidentified
MTTTDAAAEARETVYVAIELSKKTWVLGIAHPDRARPSIHRVCGGNIAELVSRLRVAARNNRRILVCYEAGYDGFWLARVLAKMGIECRVLDPASIQVNRRARRVKTDRIDVLALLRALIATDRGERHVCAIVRVPSVEEEDARRSHRERQRLVRERTGHINRIKGLLFAQGIRDIKPKLRRTRIDFAALETAEGHPLPDRLRRELEREYARLSLIAAQLREVEKERDTADAQDPVVEQKRQLLVALHGVGATSAAILAREVFARSFASRRQLGSYLGLTPSAYDSGSTTRCQGISKAGNSWARRILIEVAWLWQKYQPASPLSYWYIQRTAGQSSRIRRIMLIALARKLAISLWRYVETGLVPEGVAIAKAKLRPA

SEQ ID NO: 416503 - protein, 313 aa, unidentified
MYYIGIDVSKKDLSVFNGKLDLKFINQEGLRPFKKYLKGKYKNFSDIVIIFEPTGIYSFNLKEFCAENSIKAYIVNPKRSHSFARSLGIRPKDDKIDARILYQFHRLIDLKDIKVPKIDQQARVLSSYLTSYEFAVKQRVAISNHLESLRDVKLVSLLKKELKRAQKLEDKIFHDILEYIRQNQNLREDYERLLTISGVGEKMAIALLTLFKTYQGTNRAQITALVGLDSTKRESGSSVRGKAKISKNGKAIYRKVSYLPAICATVHNQKIKIFYQRLLAHHKPKKLAIIASMRKILLIAHAMYRDKTEYMAV

SEQ ID NO: 416504 - protein, 352 aa, unidentified
MDRYIGLDAHALSCTLAVIGPSGKRLKSVVVETNGQALVEAIRGISGRRHVCIEEGTQSAWLHELLSPHVEEVVVTVPPESRGSKDDERDAWKRADELRTGAIQTRVYKGPVHLAALRNAVRAHIFAVRDVVRVKNRLKSVFLSRGISTDSDVYDCERRPKLVTQLPTAHRQLAEWLGRELDTLEPLREEAEEWLSKESKSHPIIRKLNTAPGMGPLRTPVVVAVVADPHRFRTSRQFWSYCGLGIVMRSSSDWVRDKKGQWLRAEVRQTRGLTRKRNALLKAVFKGAATTVIGRLPENPLHVNYQRMLAAGTKPNLAKLTLARQIAAIVLSMWKHGEAYDPKRQAVVTDKT

SEQ ID NO: 416505 - protein, 319 aa, unidentified
MGIDVSKDSLSVDAGALFKGDVPNTPAGIRSLVRKIRKRAGDGCVPHFCFESTGPYSESLFIECCGAGAAASVLNPVKVRRYAEAMSESAKTDPIDARVIRLFAEAKKPEPTPPPSASEISLRKLVLARDALTKCVVQLSGTMEGASGGDAGSVLKSTVVQLRGKIKKLDRLIAEALKGDARLAGLADALTGIAGVGVLSAAKIVALVPELGTLGRRRSAAIAGLAPFTRDSGRYKGKTFISGGRAEVRRALFMPATVAIKHNPVLKAAYQNLRKSGKAYKVAITAIMRRLFAHMDAVAAKWLRETAAAASSAALMALP

SEQ ID NO: 416506 - protein, 344 aa, unidentified
MEVSTVGLDLAKNVFQVHAINSVGEVVVRKTLRRAQMHRFFEQLEPCLVGIEACGTSHYWARQISKCGHDVRLMPPAYVKPYVNRGKSDASDAEAICEAVTRPTMRYVAIKSPEQQAMLALHRTRDLFVKQRTQLVNMIRSLLAEFGIEIRRGIEQALIVARRIAADNIPDVPPLAAKVIAGLAGQVLDLQARLREIERELLVWHRSSDVAKRLATIPGIGTVCATALAASVTDPHQFRSGRQFAAWLGLTPLQHSSGGKERLGRISKMGDKYLRRLLVVGMTSLVRRAKYKPEAVDLWLADLLSRKPARLVTVALANKAARIVWAIMVRGGVYRRPISAAASA

SEQ ID NO: 416507 - protein, 341 aa, unidentified
MEEYIGLDVSMKETAISIRRSGERIWRGKCASDPSIIAELIRKRAPAVKRVVFETGPLSVWFYHSLRTEGLPAICIDARHAKAALDMAANKTDANDADGLAQLAEVGFFREVRVKGFDSMLTRTLVAARTRLVRITTELSNQIRGVMKTFGLLVPAGKGSTFEKHVRSLLADQDALASIVLPMLEAWHGIRVRAAELGRQLVRDARQSQACRILMSIPGIGAITATSFTTAIEEPDNFRKSRSVGAWIGLTTRRYQSGEVDYDGHISRRGDCHLRGLLYEAAAVILTRSSIHSTLRTWGLQLRKRIGFKRAAVAVARKLAVIMHTMLKTGELFNPNAGAAA

SEQ ID NO: 416508 - protein, 411 aa, unidentified
MGAGQSRSMAPQKVRHPGAITAKAKPARPHACVADPLMRWNGPLRQHQSANVVVVANATRRDRSVKDVTTIGLDLAKQVFQVHGADADGAPLFNRKLRRAEVLRFFEKLPPCLVGMEACASAHYWAREIAVFGHNVKLLPPQYVKPFVKRGKTDAADAEAISEAVTRKTMRFVPVKTAEQQAAVMVLKTRALLVRQRTQAINALRAHMGELGIIAPIGIANVKALAVIIRDEADSRLPPAARFALTEMVDQIELLAARIDKLEREIVVQARQDSDMRRLATIPGVGAIIAMAVKALVPDPGGFKSARHFAAWIGLTPKAHSSGGKERLGRISKMGNPELRSLLVTGAASVLRHVRTNDKARPWLKDLLGRRPFKVVAVALANKTARMIWALLTRGGVYRNPMETRANEIPA

SEQ ID NO: 416509 - protein, 422 aa, unidentified
MAESGYCFYVGIDWATATHQVTALDPERHLLAERAVAHTGEALAELADWLTQLASGAPERVAIAIEVPRGAVVETMLERGFHVYAINPKQLDRFRDRHTVAGAKDDRRDAFVLADALRTDRPAFRRIVPEDPLIVQLRELTRLDDDLLQALVRLTNRLREQLIRFYPQPLALCPAADELWLWALLQVAPTPTTAQRLTRPRIARLLRSHRIRRFTADDLLAQLRTPPLHVAPGTAEAASAHIALLVPRLRLLRDQRTACARQIEGVLTHLEQSAVVEGQAGEHCDVAILRSLPGVGRTIAATMLAESGWALTARNYHALRALAGIAPVTQKSGKRRLVRMRLGCNRRLRYAFYHWGRGAIQSDPRARAHYQELRQRGHSHGRALRGVVDRLLAMLIAMLTARTVYDSNRRLVVVPGAEEKTT

SEQ ID NO: 416510 - protein, 416 aa, unidentified
MNAVGIDVSSRKSTVAVLRPLGEVVCLPFDVTHDIAGLASLVEKLKALDGETRVVMEHTGRYYEAVEKALHEAGLFVCAVNPLLIKEYGANSLRRVKTDKADAVKIARYELDNWADLRDFPPMDAIRYDLKTLNRQFQLASKQRTASANNLIALLEQSFPGIRKCFDSPVRSDGTQKWVDFAHSFWHVDCVRKQPFAAFCERYRKWCKRHAYLFKLSNAEEVYALAKRAVVLTPKSKVVKVLVQEAANQLISISRSVEVYRAEMDRLAAMLPEYPVVMAMYGVGKSYGPQLMAEIGDVRRFERKQALVAFAGIDPMPNQSGDKNVRSNKSSKRGSPYLRKTLFNVIRTYLQCAPQDEPVFQFLNRKRAEGKPFYVYMLAAANKFLRRYYAKLRDYFASLDTLQPVAPIPTILKAAL

SEQ ID NO: 416511 - protein, 344 aa, unidentified
MDNHTQYSGFAGVDLAKKVMQIHFVTGDGEITDKQVKRAEFLDFFRNRTKCLIGMEACGASQDWARKLEAMGHEVHLMSPKAVKPFVSGQKNDYNDAIGIYKAMFNGVRRVPVKSTEIRDLQTLRRIRSQVTKDRVKEINHVRGLLAEYGIVMGKSITAFNKGIFSALESLKERGDVSPLVAEELQTTVESIKTKIERQKRLDREIEQLARGCKNYENFLKTPGVGPFTAAMLCVLLCDPAIFANGRQFAAYIGLAPRSRGSGGKNFIIGIPSKFNCDSESRAVFVECAQALARYKNKSPWVDGILRRKPKKVAVIAIANKLARQVWAMANKGESFKQMTILTA

SEQ ID NO: 416512 - protein, 424 aa, unidentified
MLGVGIDWAESFHDVAIGRPGEGVTEQFRFDHGPAGVQRLVARCLELEPDPAEVRVVLETRHGLLVEALTDAGFTVLPVNPDLVARRRGPAKKKDDSADARICCLMALDAHLDLRQLIPHGEAGTELRTIARDDERAARDERRIGNRLRADLLAVFPAAIDAAAGDLGAPVFLKLLERWPSDGSLAAAPREEIEALARSARHGWPGRFADRVQQAVAAPRLAPRPALARAKEGPIRLAASQLPAIRAQRRAWERRMGELLLGAPRHGRSKTPKDPDPGKAFPGGEIYLSMPGLGDRLAARVAGEIGEHFEQFSTPNALQCYAGRAPVTRRSGRSEFTIARRLACNRHLGEAVQQRAFCSLTQSAWAREFYDEKTAAGDSHHAALRKLGNRWLEVLWHCLSKGARYDEAVHAANRNRSRPPAAAA

SEQ ID NO: 416513 - protein, 435 aa, unidentified
MHTHQKSSDPVATIGLDIGKNTFNLVGLDKRGALAMRTKLSRNQLIPHLANLSPCLIGLEAGSGSHHIAHQIKPLGHDVRLIPAQYVKPFLKAHKNDYRDGEAIAEAVQRPTMNFVAIKTPEQSDLLSLHRVRSRLVRQRTAIINQIRAFLSNAASPCAKVQDPYARCCPEVLSSPPHALSPRILRLIAELDQDWRRLDERLEALSNEIESLCKNDPACQRLMTVPGIGPIISSAVVASIATGSGFRQGRDFAAWLGLVPKQESTGGRTKLGRISKRGNKYLRTLFVQAAHVVLERRPATAMRALWPWIERASKRLAHRNLLATALANKLARIAWAVLARGRDYEPGITCHEQPSQQLQHRSACAQNWRSRRRSGCLQPWRPVVFCAHEFRVIGPVCSGSLLLWPTRLLTQSAGTSNRHWTPPGANERSAVPPSS

SEQ ID NO: 416514 - protein, 369 aa, unidentified
MDKDTTYVALDDSKRKIVAGILRPSDTQPELREIANDARQIRRLFERLKREGPVAACYEAGVSGYDLHRQITGLGVACAVIAPALTPRRPGQRIKTDRRDAAKLVRLFRAGELTAIHVLDESEEAVRDLVRCRDDIRRDVLRWRHRVLKLLARHGRAYLTGKNWSHAHWRWIREQRFELPPLQRAFEATVFALEQALARQAELDKELEALAATAPYREPVGWLRCFRGIDTLSAIILLAEVVDFQRFRRPRELMAYLGRVPSEDSSGETQRRGALTKAGNSHARRVLVEAAWPYRHRPTIGRALANRSQGQPDEIVSHAWRAQQRLHRRYRHLLGHGKRTPVAVAAVARELVGFIWAAMTRHESRRQAA

SEQ ID NO: 416515 - protein, 412 aa, unidentified
METLIRRCAGLDVHKASVVACVRVIDENGELLTFTQSFGTTTSDLLKLNDWLASYEVTLVGMESTGVYWKPVYTLLEADFECWLLNAQHLRNVPGRKTDVADAAWIAQLVAHGLVRPSFIPPKEIRELRELTRYRKTVIQERSREAQRLHKTLEGAGIKLSSVASDILGVSGRAMLHGLIGGTHDPDVLAELARGQLRKKLPALRKALAGWFSPTHRILVGELLAHLEYLDESIERLSVDITTMLAPFAAAIDLLDTIPGVNRRTAEVMLSEIGPDMSRFSSSGHLGSWAGMCPGNNESAGKRFSGKTRKGSKWLRTALVEAANAAVRTKGTYLAAQYARIKGRHGHNKATVAVAHSILIIAYHILQRKEPYRELGGDYFIERQQKDAYQRRLVKQLERMGYDVTLETKPAA

SEQ ID NO: 416516 - protein, 291 aa, unidentified
MNPVIGLDVAKGESQVQAFLEKKKPYKKSFKVAHTLEGLHKLHAFIREVEEFTDSKPPIVLESTGHYHMPVVQYFEKRGYLLIIVNPLISYKAKSSSLRKVKTDVIDAYHLCELYYKEDLEPCKKRGILLEYKKHLSKLEEEIDALAKNIEEYKIIQSIPGIGEKIAATIISEIGEIDRFNHPKKLVAFAGIDPSVFESGTFKGTKNHITKRGSSRLRHALFTAVRCAIRDARKTRTTKELIPRNKRLREFYDKKREEGKPYRVSIIACANKLLHWIYALLKNKTTFQDVA

SEQ ID NO: 416517 - protein, 383 aa, unidentified
MIYVGIDIAKLNHFASAISSDGEELIKPFKFTNDNDGFQLLISKLAPLDKGSPIIGLESTAHYGDNLVRYLVAKNYKVCVLNPIKTSTIRKNNIRKTKTDKVDTYIICKTLMMQESLRFVTFYDLDLMDLKALGRFRQKTIKQIQLTSYMDEIFPELQYFFKSGLHQKSVYALLKEAPTPEAIASMHMTHLAHLLKVNSHGRFDKEMAQQLRVLAQKSVGANDSSLSIQVTHTIQQIELLDSQLERVEAEMTEIMKFNDSVIMTILGIGYINGGMILGEIGDIHRFSSPNKLLAYAGLDPSVYQSGNFQAKKTRMSKRGSKVLRYALVNAAHNVVKNNATFKAYYDAKMVEGRTHYNALGHCAGKLVRIIWKMMTDNLKFNFD

SEQ ID NO: 416518 - protein, 332 aa, unidentified
MNTRTNERTHGDRDSLWVGIDVAKDKLDLARSDNDGVTTFSNDDEGIKQLVRDMKSAAPKLIVVEATGGYERPTLNALLDARLSVALVNPGRVRHLAKALGILAKTDAVDARVLVAFARHAQPRMARKTPQIQAELDALVTCRRQLCKTRTEQSNRHAVTDSKHARKAIDAVLKTINKQIDSLDEQIRKRIDADDHFNRMDKIIRSVPGVGAILSATLLASLNELGTTDRRQVGALVGVAPFNRDSGRLKGTRSIRGGRADIRATLYMATLAATRCNPVIRTFYQRLKAAGKRSKVALTACMRKLLTLINAMIRDGLHWHQLKVVQNLTNNP

SEQ ID NO: 416519 - protein, 346 aa, unidentified
MKIVGVDLHAKQQSIAMLDNQTGELTERVIRHEGNAVREFYAALEGPVVVGLEATGSMQWFLELLDELGIQYRVGHPAKIRAAEPRKQKHDRRDARLILELLTANRFPDIWMPCIEQRDLRTRLRDRHQWVKMGARLQHRLQSIALNHALRKGTSLWRAAGLETLQRLPLPPYARQRRNQLLSLYAELQKRIQELDRQVEEQAQQRPQARRLLTDPGVGPLPALATEVFLGDPSRFTTAKQVASYIGMIPREYSSGQRQGLGTLTKQGNSLLRYLWTEAALHAVRKDPELKRFYRRQLIQKGMGKARIAAARKLGIRLWIMLRDQIEYEEFCRRGKAEWRSPCGNA

SEQ ID NO: 416520 - protein, 316 aa, unidentified
MTQHTPTSLSVGIDVSQATLDVGVYPTAEQWQVANDGRGISQLVDRLQQLAPDRIVLEATGGYELAALATLASAGLPVVAVNPRQVRDFARATGRLAKTDALDAQVLAQFGAAVQPPLRALPDAATRELSALLARRRQLVEMRTAESNRLLTAHERVQPSIRELVHFLDKRISELDRELRDRLRASPVWRAKEHLLRSIPGVGPVLSATLLADVPELGSVGHKQLAALIGVAPLNRDSGQWRGRRSAWGGRGHVRAVLYMATTVAVRRNPVLKVLYERLLGLGKQRKVALVACMRKLLRICNAVIAHQLAWRTQPA

SEQ ID NO: 416521 - protein, 348 aa, unidentified
MTDPVYILGIDLSTIRLDCATLPDERSFQVPYSPAGFQTIIEHLVDRRAQGWRVLAVVEATGGYERALVEAFHAADLPVAVVNPKRVRCYAKALGILAKTDRLDARVIARYGQDVRPRPAAPVTPERRDLTELLAYRSQLASEIAARSQQKRLYTSAAMIARADTAIARLRQEKRELDREIARMLEAGEALKDRASLLLSVCGIGAVVAAVLLAYLPELGRLTAKEIASLAGLAPMARDSGQRRGRRHIGDGRAKVRHALYMAVVAALKNNARLRGVYDRLIKAGKPVKVAIVAVMRKLLVMLNAMLRDGETWEPDARKRRERRADRSSALPEESSAAPEPASETATA

SEQ ID NO: 416522 - protein, 351 aa, unidentified
MVIIGCDFHPGFEQIAMVDSETGEVQELRLGHKAEAEQFYASLRGREVMVGVEACGYTQWFEQMLEAMGHRFQIGDAAAIRASYVRKQKTDRRDAGHILRLLLEGRFPALWVPTAADRDARQLIVHRHKRVEMRTRVKNQLHALALNQGLRLRWRLWSAKGLEQLRALPLLPYAAARRADLLGQLAEMDAEIEQLDRAVGREAQARASAVRLMSHPGVGPVTALAFVLTIGEVGRFSRSRQVASYLGLIPSERSSGGKQRLGHISKQGNPLMRFLLVEAGHIAVRGDAELRRVYTRVRHRHSTGVAKVAVARKLAVRLYWMLRQQIDYAQLRGPYAGKPVSFCGRTARPSA

SEQ ID NO: 416523 - protein, 352 aa, unidentified
MEIIGLDLHKRETQLCRQQPDGHIVDERIPTSRVRFTQTFGGVAPARILLEASTESEWVATHLERLGHTVIVADPNFAPMYATRSRRIKTDKRDARALMQACALGAYRPAYRLSAPRVHARAALAVRDTLVRTRARMITLIKTLVRRDGLRVPTGTSRTVVQRVATLELATTAPALGAELAPLLAMLPGLNAQIATLDATLAAVAADDPVVARLATAPGVGVVTAVAVVATLDDITRFRSAHAVEAYLGLVPSEDSSADRRHLGHITKAGNARARWLLVEAGWRILRSKQPEMAALRAWGRAIAARRGARIAAVAVARRLAGVLYAMWRDAVPYDATKLQRRARRAGAPPVP

SEQ ID NO: 416524 - protein, 403 aa, unidentified
MSGYFAGLDWASTTHAVCIIDEHGGVQREFEIAHTAAGLSELVRHLKRFGTPPIAIERPSGLLVDTLVEAGFTVVPIHPNVVKATRPRYRSHGAKSDASDAYLLADLLRTDGHRFKPLAPQSDELRALRALVRGRDDLLATRVQLANQLHALLESFWPGAAEIFADIASPIAVAFIERYPTPEAAARLGPKRLAAFCAQHAYCGRRPIEELLARLQRAPASACAELEMEAKGELARALARTLRGLLEQQRALSSRIEHHVAELEDGRLLMSFPRAGRICAAQLLAEIGTVRERFTSEAHLAAEAGVAPLTFASGKSKAVAFRFSCNHRLRAALTCLADNSRHASPWAAAVYARARARGCDHPHATRILARAWTRVIWRAWQDRKPYDPTRHRAAQHLVPTITG

SEQ ID NO: 416525 - protein, 420 aa, unidentified
MKAWNEIKHYAGFDWAKDHHDVIVLDAVGKTVAEFRFDHTAGGWDEFSKKLAAFPNVAVAVETNHGGVVERLLERGCCVFPVHTRSAKGYRQRKVPSGNKTDKIDAWSLADALRLDGAHWKQLSQQDPLTKELRLLCRDEVALIRDRSALITQLRQTLYDYYPAALEAFDDWTMPAAWSFVVSFPTPQVLVKAGKRKREKFLHVHKLARPATYQRRLEIFARAHQFAGSEATIRAKSKLAVARARQLQLIETQIAEYRQEIRRLFAQHPDAKLFGSLPGAGDKIAPRLLAEIGDDRALFSDAQGLQCLAGTAPVSYQSGQIHRVYLRRQCNKSLRNAVHLWANLSREFCPWAATYYTALRAKGKSHACALRALGQRWLKIVWKMWQTRTLYDPDLHARNQLKHGSWVLQMVNQPAVVKTD

SEQ ID NO: 416526 - protein, 356 aa, unidentified
MSAASERVLTRQGVVIAVDPHKASWTAVVVTPDLAAAGTIRVEVNRAGYRQLRRFAAAWPDARWAIEGAAGLGAPLAQRLREDQIAVTDVPAKLARRVRLLSTGHGRKSDPADALSVGIAAWSAPALRSVEIDQAIAALRAVTEHRDDLVRGRTQLINRLHVLLIKLIPSGAAPGLSAESAAEALRRVRPRETLGRTLRALAVDLVAELRRLDRRIAEATQTLSDTVAASGSTLTELLGIGDVVAAKILARTGPVARFRSPAAFASFCGVAPIEVSSGEVVRHRLSRAGDRQLNYALHVMALSQIRYDGPGRDYYQRKRAAGKSHKEAMRCLKRRLADVVYRTMVKDSVSSLSPAA

SEQ ID NO: 416527 - protein, 393 aa, unidentified
MDNSKVWVGIDAGKEVHWAHVLDASGTKILSRRVENDESDLSELIDEVLALSEEAVWAVDQPGGSAALLLALLWERDQEILYLPGLAVERARDAYPGQSKTDARDAYLIADQARMRSNLAQLLPGEVVLAELQLLLARRRDLIADRTRSINRLRDVLLSLFPALERALDLNSKGALILVRHYQSPRAIRRVGLSRLARFLKNRGVKGAEDIARKALTAAKAQSVTLPAEGVAAAIVAELAREVLALKENIETLDKELEQRFFARPEAQILASLPGMGPILGSEFLVSVGDLCTFQSADRLAAYAGLVPAAQDSGKRTGNHRRMRGGNKILKRVFYQSAFASLRSSPHSRAFYDRKRREGKKHTQALIALARRRVNVLWAMLRDETTFEVPPAA

SEQ ID NO: 416528 - protein, 343 aa, unidentified
MHITSIGIDLGKTTFHLVALGERNKVLVRKKFSRARLLAYTANLPASLIGLEACAGAHFLGAALREQGHQVRLIPAQFVKPYRKSNKNDFLDAEAIAEAVTKQNMRFAQIKTQEQLDLQAMHRVRDRLVQRRTSVINEIRGFLLERGITFAARPVHLRNNLPLVIEDLEQNLSPRMRWLLERLWQEWKQMEIDIKAVTDEIERISNEDAHCRRLRQIPGFGPLVSTATVAAIGNGAAFRRGRDFAAWVGVVPRQYSTGGKQKLLGISKRGNVYLRRMLIHGARAVLLRIKYDTGGFGQWVHRLEARAPRNKVIVAIANKLARIAWAVLSSGNEYRHQPLHTAA

SEQ ID NO: 416529 - protein, 350 aa, unidentified
MTMAMVETRPVTGVTGGVDTHLDSHVAAALDRLGGQLGVESFPANPGGYQALLDWLGSFGAVQLVGIEGTGSYGAGLARHLRSAGVAVVEVDRPNRQDRHRRGKSDAIDAVAAAHAALSGRAQGAGKHGDGPVEAIRALTVVKRSCREERIRTRNQIRQLAFCAPDELREATKDLSRSRLAAEAARWRPRPGGDVVLYATRLAMTTLGRRVQALEAEAARIDELLVPLVEQTAPSLLELLGVGPDTAAILLVAAGDNPGRIRSEAAWAHLCGVAPIPASTGKTSRRRLNRGGNRQANHALYRIVITRIRYDDRTRDYLERHLAAGRPKPEIIRSLKRYIAREVYRHLPRH

SEQ ID NO: 416530 - protein, 405 aa, unidentified
MMYNAVGIDVSKGKSTVAVLQPGGTVVRKPFDVKHSASDLKALVGYISSLDGNTKAVLECTGRYHEPIVRALSAAGIFVSAVNPHLIRNFGNNTIRKVKSDPADSRKIARYTLDNWASLRQYSGMDTTREQLKTLNAQMDFFIKQKIAAQTNLISLLDMTYPGVNDLFDCPTRSDGSQKWVDYAVSFWHVDCVRKISLSAFTDRYQAFCKRHGYNFQPAKPKELYDAAKELVAVFPKEKEYKDLILMGIKQLNATAASVEQIRHEMDRLASTLPEYSTVMSMHGVGPTLGPQLIAEIGDITRFTHREALTAFAGVDPGVNQSGQFSARSNRASKCGPPRLRKALFLVMDCLLKTKPADDPVYLFLDKKRSEGKPYHVYMTAGANKFLRIYYGKVKAHLASQPKSE

SEQ ID NO: 416531 - protein, 371 aa, unidentified
MKKDSKCRPNPKPSKQARRLEPTTIGMDLGDKTSRYCQLDKDGQVIQEGSVATTKKGMLQVFGAMKHCRIAIEVGTHSPWLSRLLDRLGHEVIVANARQVKLISQSSRKDDRLDAQTLARLARVDPQLLRPIRHRSEKAQQDLMLIRVRAGLVEARTSLVNTARGLVKALGERLPKCDSDQMKVARLEGMPASWRTSLEPLLKQVESLTETIQALDVKLEQIARTEYPETELLRQISGVGVLIALTFILTVEDRDRFQKSRDVGCYVGLRPKRSQSGESDPQLRITKEGDLYLRKMLVQGAHCILGQRGPDTDLKRWGLKLAARGGKNAKKRAIVAVARKLAILLHRLWVTGEVYEPLRHSQARQRSQKVA

SEQ ID NO: 416532 - protein, 421 aa, unidentified
MMDKERRWFVGIDWGSQEHVVSLCDGGKRVGQRKFPHDGTGLTDMIAWLLKASGSNPGEIHVAIETPHGPIVEALLERGFVVYSINPKQLDRFRDRFTVAGAKDDSRDADVLADSLRTDMRAFRELSIADPVIVELREWSRIDEELKVEHGRLSNRLRHQLWRYYPQMLEFADDVGANWFLDLFEAVPTPEKAARVREKTIARILKHHRIRRFDAAHVLNELRKPALAVAPGTIEAATARIRGLIERIRIINSQLVDAARQLDRLCKALSEPVAKEDGETAPGQKNEQRDAAILDSLPGVARTVLATLLAEAPDTLQRRDYHALRAMCGSAPVTRRSGKSCMVVRRYACNRRLRNATYHWAQNAVRWDPTCRAKYEALRAKGHGHSRALRSVIDRLLNVACAMLKSGTLFDPGFTSKRATG

SEQ ID NO: 416533 - protein, 428 aa, unidentified
MDEVDRNRLEEFRQLRKEVRHSEEYLIVGIDIAKDRHHAFFGTARGETFLKRLVFSNDYEGFRKLLDQAEALRVRHGLKRVVYGMEPTANYHKPLGEFLIHLGRTVVLVSGVTVKKNRESLDGRWDKHDVKDSANVADLVSQGKCLYYEYPSAGLRGLRGLLSLKRRLKKEEQGYKVRIRNHLIAQYYPEMDRDWERLGAEGLSMMRWCFPPSQMTVLDLEPFIEQVTSGRIRVEKRRRLEAIWEKAGETIGCDGVPGVEHEAKVMVEGLRQIRQMIKETEDKIQELCGQFVEYPSLLTIPGYGPDVSAKVLGALGAPDRFQNGKQVLKLAGLDLSANRSGKDSDKAIPQISKRGKADLRYALYQAAFIASTKNRDFMRYYTSKIRGREKEKGIHRKLLVKLSAKMLLIAWSLMKKKEVFDPGHLNAE

SEQ ID NO: 416534 - protein, 370 aa, unidentified
MAHSVTLFVGMDVHKDSISVAYCLGHESNPPHFVGKIGTRKADIEKMVRRLQSKASHLVFAYEAGPCGYVLYRHFTSKGLECRVIAPSLIPKRPGDKVKTDRRDALELARLLRAGDLTPVYVPSVEDEAIRDLCRARDATRLTLKSAKLRLKSFLLRLGLNYTGRANWTDAHRRYLATVACPTPTQQIVFQESIRAVDEQVDRLQRLEEELIERGSQWRLAPVVLAVQALRGVQWVVALTVIAELGDITRFDNPRQLAAFVGLIPSENSSGGKRRQGPITKTGNGRARRALIEGAWAYRYPAKMSPIIQKRNEALPKAIRDIGWKAQVRLCKRYRRLISRGKHSNVAVTAIARELLAFMWAIAKEVPIQI

SEQ ID NO: 416535 - protein, 429 aa, unidentified
MTRISAGVDVSKNRSTVCIIDQDGKVIMRPFLVWHSTEELDFLADTLKRLNGEVRVIMESTSIYQYPIALHLKEKGIFISIVNAYKVKKFANTDFIGGKTDKKDSRTIASYGISYWDKLMEWQIPKDTYFNLDLLNRTYMNAKKHRQIILQELQHYIDCAMPGMDKELHPLNLSTKKDFMLDFVEKFWHRDEIVNMTEAEFTEVFTAWAKKKGYRPVEGKAAKIYAIAKSCIPYYPANPTVKTILQCIVDKLSGVNRTLVTIVTQMIEEAKKLPEYQIVREMPGVGDPLAARFFGSAGDIRRFKNSKALVAYAGIDSPPDESGDFSSTHRHITKKGSKVFRDTGYEIMMALRAQKRTWEKVRKNPEVYDYMLRKEAEEKPRKVAKIAALNKFLRIVYARIKELYDNMALAERAKTKTRSKTRAKTKVTA

SEQ ID NO: 416536 - protein, 312 aa, unidentified
MADMVRLAGIDVSKEKLDVHVTPSGESRMVGYDRRGLAGLRRWLVGLGVAVVAVEASGGYEREVSEVLEEAGLVVHRLNPLRVRRFAQLKGRLAKTDRLDARTIAEFARAHPQEHQLRRDPRRERLAEHLLVRRHTQDAILDCINQLEHLRDGRLRRLVAARKASMERTRARLDRCLVELIAEHDDLAELSERLRSVPAVGPVLAATLIALLPELGSLTRRQVASLVGVAPFDRSSGRKIGAKSIQAGRVFVRNTLYMAALTASQHNPAIAAFAERLAGKPGKVRLVACMRKLIVMLNAVVRDRSQWQPRTA

SEQ ID NO: 416537 - protein, 316 aa, unidentified
MQTPSVCVGIDVSKVRLDVAVHPSGEQVSVRQDEQGLATVVQWVRQRQPTRIVVEATGGLERPLVRALVDAALPVIVVNPRQVRDFAKATGQWAKTDALDAQVLARFAAVIRPTLRVIPDAQTQELAARLARRRQVLTMQQAEQHRLDRAPARVRKRIEVHLRWLRAELARLDKDLDDMIQQSPVWREREDLLQSVPGVGPVMSRTVLAELPELGLLNRKQIAALVGVAPFNRDSGRLCGHRIIWGGRAPVRTALYMATLVATRWNPVIRPFYQRLRAAGKAPKVALVAAMRKLLTILNAMVHQGTPWRPVVAPDT

SEQ ID NO: 416538 - protein, 357 aa, unidentified
MGKSIRNLSTVTRVGLDLAKRVFQVHAVDAKGEIVVARKLTRSQLIPFFAELPPCVVAMEACSSAHHWGRALIELGHEVRLIPPAHVKPYVRRNKSDQVDAAAIYEAMSRPGQRFVPVRSIDNQAELIRDRARELLAGQRTAALNALRGHLAEIGLIAPQGAHHAYGLKRMAVDGFNENGEIVVPDCVRGALRSLVGQIDALDEAIGAIDRELAASVKADETAKRLMTIPGVGPVTASAIRATIQDASAFASGREFAAFLGLTPRQNSTGGKTRLGRITKMGDRYLRKLLVVGACATLRHRRGHSDASRLWANGMFERKTVKYKFNLTAVALANKVARIVFVLMTRGGQYDDRPVAA

SEQ ID NO: 416539 - protein, 345 aa, unidentified
MELHTIGIDLGKTVFHLVGLNLRGEVSVRKKCPRTQLLRFTANVHVRLIGMEACGGSHFLGRALREQGHQVRLIPAQYVKPYVKTNKSDYIDAEAIAEAVARPTMRFVPIKTDDQLDLQSLHRVRERWVMRRTAVINQIRGLLLERGITLRKGRRYVDAALPGILEDADAKLSGALRMLLAQLKLELDHLDLRIDEADALIKKTARENEACQRLVAIPGIGPVTATALIAAIGNGGAFRKGREFAAWMGVVPREHSTGGQQKLLGISKRGNSYLRRLFVQGARAVMQQRTKQSSGLSAWLAQLTSRTHRNVAAVALANKLARIAWAVLARNEQYRPPVLANVAAA

SEQ ID NO: 416540 - protein, 412 aa, unidentified
MRIIGFDIHRAFAEAVAWEDGKLRRLGRVDMRRNLLTAFAVTLSREDIVVVEATGNAAAVASVIGPHVKRVVIANPIQVRMIAHAKIKTDTIDAGVLAQLYASGFLPEVWIPDEATQALRRQVTRRNQIVRQRTRLKNIIQSILHAHLIPSCPAADLCGSKGRAWLGKQVLPEDERFAVERHLREFDRLGEDLAVIERDLARSALADENVARLIAIPGIDMVVALAVTAAIGDINRFGEPQKLVSYLGLNPSVRQSGPGPAHHGRITKQGRGHARGMLVEAAWAAARAPGPLRAFFLRVRVKRGQHVAAVATARKLAVLIWHLLHKKENYAWARPALQARKIRKLELKAGHPAKRGQKGSAHAYNIKGHREQERRFVEQAEAAYAHFVAGWTPRGSKPASKARTGAANEERR

SEQ ID NO: 416541 - protein, 343 aa, unidentified
MLHAGLDLSRKKIDVCLLSAAGEVVDEWASPPDSDGLRGLAARAVMWGGSVRGVIESMNGARFVHDRLEEHGWEVLIADATKVKGLAPLACKTDKIDARVLATLSARDLVPEIWLPDPSVRRERELARFRLHLVRHRTTLKNRIHAALIAFGHPCPVSDLFGHAGRELLDRLEIPDPWRSNIDVSLELIDDLDLQIATLTVQLKRQGADHRYIPLLVTAPGIGWVNAYTIASEIGDIGRFASPAKLCGYTGLCPRVKQSGATDARGPISKHGPKYLRWALFEAALNACKHPYYAERYQQTKRRLGRQRGPKVAQIDLSRRLTEAIWHMLTRNEPFAPAGAPVV

SEQ ID NO: 416542 - protein, 346 aa, unidentified
MAISVVGVDLSKSVFQLSVADAKHHVIDRKRLSRAQFHRFLAQSTPARLVMEGCGTSNYWGRTAQLHGHEVKLLHAKYVKAYVRRTKTDAADADALVLADRDTSLHPIPIKSEELQALQGLHRIREQWKRARVARICEARALLAEFGISVSVGVRGIGKKLTLATEQAPVLIQPTLMDLIQEIDDLDQRLRRVEHALAAYAKTNPEVQVLLSIQGIGVIVATAFVARVPSIHMFKRGRSFSSWLGLTCREYSSGQTRRLSRITKQGDRYLRTMLIHGARAALMAARRKAANGKSLTRLETWAVNTQVRVGHNKATVALANKMARIMWAVWTRHETFNGDDALRFAA

SEQ ID NO: 416543 - protein, 415 aa, unidentified
MQTVHQICCGLDVHKRTVTACLLTTGPRGRTEKTLRTFGTMTRDLEDLAAWLQAAGCRHAAMESTGVYWKPVYNVLERVCEQVLLINAQHIKHVPGRKTDMKDAEWIATLLAHGLLTGSFVPPPEIRELRELTRYRQTLIQERARLANRLQKLLEGGNIKLASVVSDVLGKSGRDMLAALARGEQDLDAMAALARGRLRSKIPQLVEALRGVLSETQRWLLGEQLREVAHLDESIERLNRQVEALCRPFREVLQRLCEIPGVNQRVAEVIVAEIGLDMSRFPTASHLASWTGICPGNHESAGKRQSGRCRQGNRHLKAILTEAGWAAGRTKDTYLASKYQSLVRRRGRKKACLAVGHAVLKIAHHLIAHPEDRYRDLGPGWLDQFRQQAVTAHLVKRLEALGYNVQLEQRPNNAA

SEQ ID NO: 416544 - protein, 351 aa, unidentified
MIIATLGIDLAKLSFALHGVESSGKVVLQKNVSRKKLPEVIVNLPPCLIGMEACASAHYWARLFKLYGHEVKLMPPQYVKPYVKSNKNDSADAEAICEAVTRPNMRFVPIKTIEQQSIFAVHKARERLVSMKTGQSNQLRGILAEFGIIIPRGNASFNNQLSLILEDAENNLTLAVRSLIFQLKELIDNLTKRIGDLNKEIEHWHKECAASLRIAEIPGIGPMTATALVASIGDPHSFNNGQQVSAWIGLMPKQFSTGGKSVLLGISKRGDGYLRKLLVHGARAVVGHLKQQPNTFTHRWLSELLKRKHTNVAIVALANRNARIAWSLLANNQDYQHKIAHEVTMKKQVRP

SEQ ID NO: 416545 - protein, 337 aa, unidentified
MIVIGVDVHKHSLTAVAVDEVGRTLAEVTAGDERAVLAWSASLPSERLWALEDCRQLTRALERELLGAGEELVRVPPKLMAPERRAGRLRGKSDPIDALAVARAALREPRLSRPRPDEQPFRELKLLVDHRDDLVDERRRAQQRLRWHLHQLDPTLVVPLRRLDRPAHLDRVSRWLARRPAEVQARVARELVVRCRSLTCAISELDRELEQRTAQTAPALLELPGCGVLTAAKLLAEIGPIGRFQTDAQLARHSGVAPLEASSGRVQRHRLDRGGNRQLNCALYRIAITQARYHPAARAYLERKQAEGKSRREAIRCLKRQLVRVVFNTLKASPALT

SEQ ID NO: 416546 - protein, 339 aa, unidentified
MDHFAGLDVSVKETSVCIVDDTGRIVREVKVASEPVLKNPSYHFKRIGLEAGPLSQWLYSALAEAGLPVICVETRHMQAVLKAQINKTDRNDARGIAQMIRVGLYRPVHVKTLRSQKLRMLLTHRKLLLSKAIDIENDLRGTLRNFGLKVGMVGTVKFEARIKELVENLPDLAVLVEPLLVVRRVLREQIEILHRRLLTIVRDDEVCRRLMTVPGVGPVVALIYRATVDVPARFRKSKSLGAVFGLTCSKYQSGEIDRSGRISRCGDEMMRVMLYEAAQVMLTRTNKWSWLKAWAMKIARHRGMKKAIVALARRLAVIMHRIWVDGTEFRWTREQAVAA

SEQ ID NO: 416547 - protein, 316 aa, unidentified
MKNNDIFVGIDVSKDKLDIAVIPQGLCFTEPNDARGLQALVSRLLELQPKVILIEATGGYENAAVAALGLAQLPVKVINPRQARDFAKALGKLAKTDKIDAIVLAQFAQMVQPQLTALPDATQQKLSNLVTRRQQLIEMLVMEKNRLHQASLEVQPHIQQHIDWLTDEINSIDRKLDDFIKKSPIWQEKVKLLQSVTGIGPVISRTVIAYLPELGTLDRKKIAALVGVAPFNHDSGKFKGKKMIRGGRSKVRSLIYIAAVVASRYNHVIRAFYEKLVQAGKPKKLALTACARKLLTIINAMVRDNSCWGQNVYQNP

SEQ ID NO: 416548 - protein, 347 aa, unidentified
MRFYTTQHPFYCGIDLHARMMYVCLLDQSGEILVHRNMKTDPDTFLKAIAPYRQGIVVAVECMFTWYWLADLCADEGIPFVLGHALYMKAIHGGKAKNDKIDSQKIAALLRGGMLPQAYVYPAKMRATRDLLRRRMHLAHKRAELLAHVQNTNSQYNLPAIGKKIAYKANREGVAERFADAAVQKSIEVDLALITYYDELLRDVELTIVNTAKHHDPNTLYLLQTVPGIGKILSLVLLYAIHDVNRFPRVQDFVSYCRLVKCARESAGKRYGTSGAKIGNAHLKWAFSEAAVLFLRDHPAAQKHLARLEKKHDKGKALTILAQKLARAVYDMLKRPGAFDKDKFFQR

SEQ ID NO: 416549 - protein, 403 aa, unidentified
MAKARAKGKTLNGFAEINHDAAGIDVGNAQHWVAVPSGRDTVSVRMFGCFTSDLHALANWLMKCGIKTVAMESTGVYWIALHEILESRGFQVCVVNARQAKNLPGRKTDVKDCQWLQQLHTYGLLTASFRPQAEIIVLRRYLRHRETLVQEAATCIQRIQKALTEMNLQLANVISDISGTTGLRILHAIVEGERDPQRLATLRDWRIKATPEEVANSLLGNWRDELIFIVEENLTLYGVYQVKIARCDQRIEHHLKSMPAQIEGDNNPLPKPRKGKRPHGNAPAFDLRSELYRVTGTDLTQIDGIDVVTAQAILADTGTDMSAWRTEKHFVSWLGLCPDHRISGGKVLQRGTRRVVSRAATAFRLAASSLRRSQSALGAKYRRLQSRLGPPKAITAMAHHLAR

SEQ ID NO: 416550 - protein, 360 aa, unidentified
MNSSKQSKASPSHEIIKLGIDAHAKYYWVSRQVDGATPQPVQKMTYDELLLFVVKQQRLANKVVTCYEAGAFGFHLHRRLEELGIRNYVVQPQDWDERGKGVKNDRLDAAALCQRLDRYERGNKKAFSVVRIPTVDEERERAITRQRQQLVRERQRLAAMGRSLLATHNIHVTGKWWKGKAWTAIKMKAPAWVIERLEVFIVILGPLEEQEMKLMRAIQEAAQEQKIPRGVGPLTFEILRREVGDWSRFNNRRQVSSYTGLCPREHSSGGRHRSGSVSKSGNRRVRAMLVEMVWRMIRWQPGYTALQKWAPVLNSPTPNPAAKKKAVVAIARQLAVDLWRVFTGQVEAEKFGLVYLPEAA

SEQ ID NO: 416551 - protein, 407 aa, unidentified
MSIYIGIDWSQSKHDVAFVNESGRVVAAMTIPHTPKGLRQFDDVRQQFAVAASECPVALETAHNLIIDFLWTRAYNQVYVVPPTVVKSCRGRYRQSGARTDQHDAYLLANLLRTDRERLHLWRPDSVLTCQMRAKVSLYRYVTRTCTQQANRLRAVLLRYYPAALDVFSGLNVQITLEFIRTYPTPQAATDLTWAEFQAFATDHRYPRPKQLPTCFANLQNAYPEAVPETIQVYQEEAVLLATLLLQSLQTKQATKRALKGLFRQHPDQAIFASLPGVGDYLAPALLVKFGEDRQRFPTSGSAQALAGTCPVTESSGKRKVIKFRRGCDREFRDVAQQWARCSVSESAWAAAYLEQLRMRGASENHAHRCLANRWLAIAWKLWQTHQCYDASYHLQQCALRRQPLDL

SEQ ID NO: 416552 - protein, 338 aa, unidentified
MKKFIGIDLHSNNSVVVVSDEEDRVIFQKRMANDLKLIEAALAPHRDETVGVVVESTYNWYWLVDALMDAGYRVHLANASAIKKYEGLKYSGDVADAAYLAHLLRLGLLAEGYIYPREQRGARDLARKRLQLVRYRTAQILSIEGILMRQTGARIKSESVKELTAEQVEEFGFAPDVALAVEANRAVSQTLGQQIEALEKRLRERVSLRGEFKLLKTAPGIGETLATIIMLETGTIARFARVGDFSSYCRCVDSLRESNGKKKGEGNAKNGNKYLAWAFVEAANFAVRYCPQAKSFYERKKRKTNRIVATKALAHKLARACYHMLREQKPFDVNRCFA

SEQ ID NO: 416553 - protein, 411 aa, unidentified
MDRIYDNCCGIDVHKKLIVACFRKGNKQEIREFGATTRQLLEMADWLKDGGCEMAAMESTASYWKPLYNILESSGLNAMVVNARHMKAVPGRKTDVRDAEWIADLLQHGLLQPSYIPDKEQRELRELVRYRKSLVGERTRELNRLQKMLEGANIKLSGTVSDINGKSARNILEYLLTGASVDGPKYDEMYEQKIIAHNLKATKEQIIDDLNGVMSPLQRRMMKELLAHLDELNIHIKNLNDEIDSFMKPEEKQASHAIQDVTGIGNTSAQAIISVIGTDMGRFPTDKHISSWAGLCPGDNESARKRKSGKTRKGNSLLRTTLITCAHAAVKNKKSYFHAQFMRISSHRGKKRAYVAIAHSMLIAIYHILKDGVVFKDLGADYYNQFNKERKINAYLKKLKALGWEAPVVAA

SEQ ID NO: 416554 - protein, 350 aa, unidentified
MNLHAIGIDLGKTVFHLVGLSQTGEVVVRKKFSRTQLLRFTANVQVDLIGMEACPGSHFLGKALREQGHEARLMPAQYVKPFVKTNKNDFIDAAAIAEAVCRPSMRFVPVKTDEQLDMQSIHRVRERWIMRRTAVVNQIRGLLLERGITVRMGRCHLDAALPNILEDGSTPLSGTLRFLLVELKQELEQLAGHIEQADMLIQKAAQQSEACRRLDAIPGIGPLTATALIAAIGNGAAFRKGREFAAWVGLVPREHSTGGKQKLLGISKRGNSYLRKLFVQGARAVLKYRDKQCSGLKHWLAELSSRSHYNVVGVALANKLARMAWAVLASGDAYRPPLLANTTGLQMPPV

SEQ ID NO: 416555 - protein, 347 aa, unidentified
MNITRIGLDLAKNVLQVHGVDERGKALLRKRLKRGEVVAFFARLSPCLIGMEACGSAHHWARELAALGHTVRLMAPQFVKPYVKANKSDARDAEAICEAVGRPSMRFVPVKTLEQQSVLSLHRARQGFVAARTAQANQIRGLLSEFGIVIAKGIRQIEGRVPDILEEAENGLCGMNRALFQRLFEHFRQLDRQVKQLEEQIHAWHREQLDSRRLAGIPGIGPLTASALTAAIGNAREFANARQLAAWLGLVPRQASSGGKDRLLGISKRGDVYLRTLLIHGARSVLRRTRACPDAAQGWLAQLVHRRNPNVAAVALANKNARIVWALLAHGREYQPGYVGAPLPTAA

SEQ ID NO: 416556 - protein, 352 aa, unidentified
MSAYAGLDVSLNETSICIVDSQGSLLLESRVASEPEAIAQSLNSHAENLRSVGIEASALGGWLQRELTALGFEAIVIEARHTHVSLSSMRNKTDRNDARGIAQLMRLGWYKVVHVKSPEAQRLRVLLGCRQLASRKLVDVENEIRGVLRAFGLKVGSVSRGRFAARVLSLAEQAGALIEEVVQRMLAIRGTLLIEYRRLHQLVVKATVLDPVCRRLRTVPGIGPVAALAFRCGVDDPHRFKRSRTVAAHFGMTPRRHQSGEVDYTGRISKCGDREVRQALYNAAGSLLRRSRKASPLRTWGLRIRKRSGMKKATVAVSRKMAVIMHRMWLDGTDFRCSNDPAAAALAPAASA

SEQ ID NO: 416557 - protein, 350 aa, unidentified
MIVGIDVHKHNHAVALIDDRGGEIATLVIANTPKGYRSLIDWLVDHGAAAAVIGVESPGSFGRCLVAALAGAGFEVLQVPAWRTHRERHRRGPGKTDPGDAISIAHVVRTKRVDLGPAEEPELVRALGTLELQRRRFVRDRTQAIQRLRADWTQHDPVAEAGVIRCDRQRELAKLRRLQLGSSLAARTAARCIRELARDITDLNKRIAGLDREISQLLSEHDNPLADLHGAGTNLAATIIAQAGDVRRFRNASAFARFCGAAPIPCGSGQTADRHRLHRGGNRQLNAALYRIAVVQQRHHPQAKVYLARKTAEGKTPREARRALKRHLANVLYRRLHAWANVAPSMNPMT

SEQ ID NO: 416558 - protein, 354 aa, unidentified
MESITQNEKVLYVGIDVHKDTYALCCFDFQRNELSDEMIVKGTTKAVISYLEAIKQKHREELLFVCGYEAGPTGYGLCRGLQQAGFGCVVMAPTTMANPEGKRRVKTDRIDARAIARILAYKSYRQVYLPSEAMEALKEYTRARDAKKRMYKKAKQELLSFLLRNGSTYPESGKYWTEKFFTWIKTVQFSEKWMQEAFSEYLAEVYSLKAKIALMDAKIREIAELEIIKDGVDKLVCFGGIDVTTAVETVVEINDFTRFATAAQFVSYIGLCPGQDSSGKSKIMLPLTKAGNRRVRALFCESAKAIKRTNPYGEKSKRIQMRQKNASAEIVAYADKAKKRIRTKTRKSIFEKRL

SEQ ID NO: 416559 - protein, 343 aa, unidentified
MTEITTIGLDLAKTIFQVHGTDQDGRPVMRKKLRRGQVRGFFAGLSPCLIGLEACASAHFWARELQALGHAVRLIPPQYVKPFVKTNKNDASDAEAICEALMRPTMRFAPLKSAEQQSVLMLHRARELLVRQRTMLINALRGHCGEFGIVVAQGASKVAALIAMIEDRQDERLPALARQALGSLVGQLRMVQAQVLDLEKKLMAWHRANEASRRLATIPGVGVITATALVATIGDASQFHSGRQLAAWLGLVPRQHSSGGKDRLGRISKRGDGYLRKLLVHGARTVLLWSRRKKEGRTAWQEALLARRPTNVVVVAMANKTARVVWAMLSRGETFRAETRATA

SEQ ID NO: 416560 - protein, 309 aa, unidentified
MKEELIYLGVDIAKSYLDAAIGNEKRRFANERTGHRELIKWIKPMEGSVQVICESSGGYERALIEALARAQVKVSLVQANRVRQFARAAGILAKTDRIDAKVLCIFGEVMQPGTISASQLEQQHLRELESQRRHLTHLLVMEQNRAARVSDACVRRLNRSLLNQIKKQIEQLDRLIKEHIEASPALLVKAQKLTAISGVGARTAALLLAQMPELGQLNRREVAALVGVAPFNRDSGKMRGKRAIYGGRRPVRHGLYMAALVAARHNPILRAFYLRLRAAGKPAKLALTATMRKLLIVLNSSLKPDPTYA

SEQ ID NO: 416561 - protein, 354 aa, unidentified
MVVLGIDAHKRTHTVVAVDQRGRKLGERTVGTTTADHLDLLVWASRFGTERRWAVEDCRHLSRRLERDLLGAGQQVVRVPPKLMANARTAARTYGKSDPIDALAVARAALREPALPTAQLDGPARELQLLVDHRDDLVAERTRVINRLRWHLHELDPAVAPPARSLSRAPATHLAAIEAFLHRFDGDGNQVVVDLAGQLVARVRELNAQIDQLEADLAPRVRRLAPSLLALVGCGVLTAAKLVGETADIRRFRSKDAYARHNGTAPLPVWSGNKQRYRLSRTGNRQLNLALHRIALTQARHHPDARRYLARRRANGDTPTEAIRALKRRLSDVVYRALLTDASTAQTNDQAAAA

SEQ ID NO: 416562 - protein, 345 aa, unidentified
MKKVMAGIDLHSNNLVIGIMDMDGKRVASQKLSCKLKEVVGFLSPFKKRLEQVAVESTYNWYWLVDGLQALRYPVVLANPAGMEQYSGIKHADDTNDAFFLAELLRLKILPTGHIYDEQLRPVRDLLRRRLTLVHHRSALMLSFKSLYTRTTGQEMTLSRLKELEIKEAQDLYDHPANQLIAGMQIKHVEQLSQSIEKLEKAVLDCARELPYYPKLTTLPGVGRILGMTITMEVGDIKRFAEAGHFASYCRTVEAKRTSNSKKKGENNSKCGNKYLAWAFVEAANFARRYDEPCRRWYERKAAKRSNVIAIKALACKLAKAAWHLMALGTDYDSKRMFGQAASTK

SEQ ID NO: 416563 - protein, 384 aa, unidentified
MIYVGIDISKYKHDCFICSNTGEIIVENLSFENNQKGFQQFLDLLKPYDNVHIGLEATGHYGLNLKLFLEKNNYSFMEFNPLLVKDFSKSLSLRRTKTDKVDAMIICQKLMSVPYKPNSKLFYHKFSIKSLSRLRETLVKQRSKYMVQMTNILDILFPEFKPFFANKFSTTSLFILKKYKVVSRIANMKDFDTLNKISRGKFSYSKFVKLKELAKNTIGEENELFEFQLQTILSLYEEIDSKINSIDKQLSTIIKDLNPPTLSIPGIGVISCASIISEFGDISKFSNAGQMLSFAGLEPGIIQSGTMSSNGKMVKRGSGYLRHSLMNVCMIVIANNHTFYDYFHKKINEGKAYRVALSHVCRKLIRVIFILEKKNIQFDPSLLK

SEQ ID NO: 416564 - protein, 549 aa, unidentified
MQSYPFQPAPKADISFAVIHKGAERLPAQARRSELVNNCAASHNGAGGRPALARSRSPRSYRKTVSERLPAEPAALAPTSYRKPPQEGHYISSMDSRAKRRKNHKPQQKTMNEFEQWQQHRAFGAVDWASKKHSVIVVNEVGQVIEQFEIEHSALGWKKFREKLQPYGSIPFAIETSQGTAVEQLLEAGMMVYPLNPKSAQAYRERKAPSGAKDDWLDAWSFADALRVDGQGWKALQPEGPLIKELRLLCRDEVTLIEQRTAFIQQLRHALAEYYPAALEAFEDWTSVSAWMFLQRFATPDALAQAGKRQWLKFLHSRRLWGSDEGLRRMEIFAHASEFAGTPPTVKAKSLLALSLVQMLFAIEKQLALYRQQIEALFARHPDHDLFGSLPGAGPKIAPRLLSEIGDDRQRFGADPQALQCLAGSAPVTKRSGKRRKFCTFISAELVINTSVTPSTSLPIRAYRVVSGPSFTISIIARKIRVTPMPCAGWLTAGSKSSTKCGSTEPLTTLSSITAINFNTALGSFSSTSPNPSFFPLKTDRKSFGASVP

SEQ ID NO: 416565 - protein, 449 aa, unidentified
MMEQGMAMSKARTGRSKLEVMHPDAAGIDVGGSMHFVAVPNEAAEQSVRQFGVYTRDLQAMADWLQECGVKIVAMESTGVYWIPLYELLERRGFEVMLVDARQVKNVSGRKSDVQDCRWIQQLLSYGLLKAAFRPQDQFCELREFNRLRTRLLADQGRSVQHMQKAMTLMNIQLSQAISDVAGVTGQKIVRAIVEGERDAQVLAAYRDSRIKASEEEIAASLQGTWRAEHLLALKQALGRFDFYAQQLQECETEIQRVMAKLEVHTKELGKGKKRSKAKNAPKFNVRERLLKMCGVDVTKVDGIDETTALNIVAEVGTDLSRFPSDKHFASWLGLCPGTRISGGKVLGAKTKHSVNRASQAFRQAAAALRSSKSALGAYYRRLCGRMDKGKAVTAAAHKLARLFYALMTKGQEYVDQGQQYYEERYRQRVIHHLQRRAQSLGMSLVPTA

SEQ ID NO: 416566 - protein, 478 aa, unidentified
MVGQAVVHLGREPVNDYMAAPATHLVGLRARIRICRLPAAPSVSLFDAVEGSGELRYFGVDVHLEFCEIAVAEGGKVSQVGRIASTPEAVREFAAGLGSEDQVVLDASGSVMAIARILRESAVGRVIVSNAAQTRAISHARVKSDRFDAAMLARLLSAGMLSEVWVPDEATLALRRRVARRAALVRARTRIKNEVHAVVMRCLLGRPPVSDLFGVKGRVWLAGQQLPEEEAETVAGCLRQIDFLGGEIGLLDQKIAEQALAWPGLRRLLTIPGVDIGTAAAVIAAVGDISRFQSAGQLVAYLGLDPKVRQSGSEPARYGHISKRGNAQARSMLVEAAWIAIRSPGPLRAFGERVRARRGAQVAAVAVARKLVVLCWQLLSKDEDYAFARPSLTRQKTRRLELAAGASRRPRRHDGLTVTPTAAQRAAEHELQQQAEQAYRRLVADWRSAAPKGGAGATPGRASNKPSKGKAARQATSP

SEQ ID NO: 416567 - protein, 387 aa, unidentified
MTKIASSPSPAAVDFDATLILAVETSNKNWVLAAHVPGLGQVKAKQTIEPNVDALSKAIEGYRRRAKASGAAVERVIVVYEAGYGGFWLARWLEAHSVEVHVVQPSSVPVERRKRRAKSDKIDADLLLRTLLAWLRGEPRVCSMVRVPDEADEDARRPTREREELVRERISLTNRIGATLATLGIDDYNPLRRDRRTKLETLRTPLGKSLPEHARAKILRILERLELILGQIAAIERRRDAALEDEAPGRERGMIQRLAGLRGIGAQSATVLVYEAFIRSFANGKALGSYAGLTGTPFNSGGSEREQGVSKSGNRRLRGTMGELAWLWLRYQPESALAKWFRERLAGANGRMKKILLVALARKLLIVLWRYVTLGVVPEGAVFLPAS

SEQ ID NO: 416568 - protein, 404 aa, unidentified
MISVGVDVSQGKSTICILKPYGEILKSPYDVAHTESSLKALADELCCLSKHDEVRVIMEATGIYHFPILNYLQQQGFFVAVVNPLSMKKYINISLRQGKTDKIDSIKIANYGIDNWYHLLNYQPQHERYTELHSLGRQYLNYTSMKIKAKVNLTNILEKTMPGIKQLFPSRSDFGIQNKVYLVVERYWHFDNIKCMRRNRFVNSFVKWSSKVGIYKSEAKANALYSLAAEAITTLPAGFPSTKMLVLEAVRILREIEFSIASILAQMQTLASSLPEFRILTDMPGIGNILAARLIAETGDIRRFRNANALIAYAGLDSPPYQSGAFSASKRHISKRGSPSLRKTGYEIINSIRKLKPDTDNAVYIYTLKKESEGKPLKVAKIAGLNKFLRIYYARVKESYGCSN

SEQ ID NO: 416569 - protein, 402 aa, unidentified
MNAVGIDVSKGKSMVAIMRPFGEIVSTPFEIKHTASDIHSLVELINSVEGESRIVMEHTGRYYEVLAHQLSEANLFVSAINPKLIKDFDNDSLRKVKSDKADAVKIARYALDKWQNLKQYNVMDELRNQLKTMNRQFGFYMKHKTAMKNNLIGILDQTYPGVNTYFDSPARSDGSQKWVDFASTYWHVDCVRKMSLNAFIDHYQNWCKRKKYNFSQSKAEEIYGKAKELVPVLPKDAITKLIIKQAVDQLNSASTTVESLRTLMNETASKLPEYPVVMAMKGVGTSLGPQLMAEIGDVSRFTHKSAITAFAGVDPGVNESGSYEQKSVPTSKRGSSDLRKTLFQVMDVLIKTHPQDDPVYQFLDKKRAQGKPYYVYMTAGANKFLRIYYGRVKEYLSSLPES

SEQ ID NO: 416570 - protein, 344 aa, unidentified
MEAVKIKKYLYFIGVDVSKNELDFAVRKGRHLAFHQEIKNETAEITSFIRELKTLPNFSIGKSVFCMEQTGIYCNHLITCLKRVKANVVCVGSEHIRQSIGKVRGKNDKVDAIRIAEYAYTQREELRLILPKRPIIGQLAMLNTLRNRLLNLQIAIQNPLKEQKGFVKKGMAKQGIKLCARSTEAIRLDIAEVEGQIAAITDSDARLKRLMEIITSVKSIGWVTALNILITTNEFKNINNPKKFACYSGVAPFKDESGKAISKARISHFANKKMKTLLHLCAATAKRTIPEIKAYFERKTVGEGKSKMSVLNAIRYKLILRIFACVNQDRRYEENYIRKGSILT

SEQ ID NO: 416571 - protein, 325 aa, unidentified
MTDQILYCGIDISADSFDICYLQSGGELVFGKLPNTIAGFKELLKLCPENYHFVMEATGAFHLPLCFYLHDKNCFYSVVNALQIKRYIQMHLERSKTDKKDARHICMYGIERKPGQYKMPDQQYFECRTLNNAIEAVTTDVVSYSNKIYAAKKLKIDSAVAVKTYQQIIKTLKNELQKLQVELDQKLMKWQPDLVTQVKSVKGIGKRTAATLIVFTQGFKHTASYQQLISYAGLSPREYTSGKSIKGRVHISKIGGKQLRHLLYMAALNAKKTNPACKALFNRLVEKGKNKKLAIIAVCNKLLKQVFAVVKSGVLYSDNYYKNIA

SEQ ID NO: 416572 - protein, 381 aa, unidentified
MSRQLAAPAAKLSALMNKQLTAKSIEQGSGEGKCNRVLKLGLDMHYRQVTVTMQEEDGPIKAIGKMGHDGFEHWVERKREAGWEIYSCYEAGASGYWLHRDLEQMGVNNLVVAPKAMGQDKAQKTDRRDSAELVDQLDRYLRGNRKALSAVTIPTTEQEQKRALIRYHRQIMADRTRYEARGKGLLCAQGIEVQGRWWQPQPWKELKTHGRFQAWMQTQLQGWRRKLLSAEQEQQKLRKQIEALAPALLPKGVGAYSAVALEYELKGLARFKTARALSSYTGLCPGIHSSDRRGKEGSINRCGNAAVRWNLVEMVWRLLKWQPHYQVVRQLGAGLIRSKRARKRLVVKAARQLAIDLWRLETGRVTAQELGLVMQPSLKAK

SEQ ID NO: 416573 - protein, 430 aa, unidentified
MGLIVPSTIHPAREDQPLPYEWFVGIDWGSQRHQVCVLDRDRRQVGERVVDHDGASLARLADWLWTLSGGQPQRVAVAIEVPRGAIVEGLVERGFHVFAINPKQLDRFRDRHSVAGAKDDRRDAFVLADSIRTDQPSFRRLQLDDPQLLRLRELSRAEETLLEDFRRSANRLQDQLHRYYPQMLKLCSAADASWLWELIDLAPTPAHAALLSEEQVQRVLKAHRIRRVKAQEVLTCLQAPALPVAPGAAEAAQAHCAFLLPCLRVLAEQLQACSQQVSALLRALAQEPGEGEGPSDVAIVLSLPGVGRKITAWLFAEAAQPLAERDYQVLRTHGGVAPVTKQSGKRRLVVMRHGCNPRVRHALYHMARVAMQHDAHFSSVYAALRAKGQRNGQALRNLGDRLLRILMAMLRERTCYDATRIRREPVVQMG

SEQ ID NO: 416574 - protein, 400 aa, unidentified
MNAVGIDVSKGKSMIAIVRPFGEVVVTPYEIRHTAGELRELVHSLKRLDGETRVVLEHTGRYYEPVAQTLCNAGIFVSAVNPLLIKEYGNNSIRKVKTDKADALKIARYGLDNWADLREHTVMEKLREQLKILNRQYSLYTKNKTALKNNLIALLDQSFPGANTFFDSPVREDGSQKWVDFAASFWHVDCVRSVGMKAFTERYRKWCKRHGYNFNESKIIAVYEIARELVPILPKNESTKILVTEAINQLNATSRTVEILRTEMNRLAKQLPEYPVVMSLYGVGPSLGPQLMAEIGDVRRFVHRGSLTAFAGVDPMPNQSGNYERQSNPSSKRGSPYLRKSLFIVMTVLLQNAPADDPVFLFINKKRAEGKPYYVYMTAGANKFLRIYYGRVREYLNSLE

SEQ ID NO: 416575 - protein, 428 aa, unidentified
MAEDTTLTSQTWLVAIDIGKAFHAVLVEGGDGKRQQFRMANHVEDYDRLVVFLRGLPGPARIALEPTGDFHRTLAHRLLREGFSVVSVSSVAGARYREALFNSWDKNDPKDAHVILQLLKHGLVQHYHDPLLAGDHDLQELAKTYHQIVLARKRLADSLLNHYLPLYFPEMGRYWESTRVEWFVAFLEQFPTPAAVQALPKEAFVRAAWSVVGRKVNKQAKLEELYELAQRSIGLPVALDSVAIETFRLQLAQLRRLAELRQTLEARAHALLKDRADFQRLCSLPGVAAILALVILAEGGDLRRFPHHRQFLKYCGLDLAKCQSGQFRGREMLSKRGNARLRMAFWMAAQRAVRMNENSFRDKYERYTRHDSGNPDVRRKALTAVAAKMARVAYAVVKHDQPYHGYHEQALPSGSIPLKRAVGARATP

SEQ ID NO: 416576 - protein, 420 aa, unidentified
MIAAVIERCAGIDVGRKFIDVCVMVGEAQTEPTQQTRRFSTLNEDLEQMHQWLRENHCTHAVMESTGSYWRPVHNILDDGQIEVLLANSQHVKNLRGHKTDRNDARWLAHLLRHGMIRPSFIPDRETRELRDLTRRRKQLVGCAADERNRVQRVLQEVNVQLGTVLSDVFGESGLNMLDALMYPDATPAEIADLAVRQARKKIPLLKKALQGHRMTDHHRRLIRHSMEHLAFLEEEITELDREISEHVKSHTALRVASQLAQSVTGIKEIAAAAVIAETGPDMTQFCNGGKLAAWIGTCPGNNISGGKRKGGQARKGNPWARRILVECAWSATRKKDSEAQRHYERLKPRLKHKPALLATAHLLTLQLYKALAAGSPYADNTRTEMTTTQAQRLARHHSRRLKKLDCWLSAHRQRCAPTT

SEQ ID NO: 416577 - protein, 412 aa, unidentified
MDVIVERCAGLDVHRDSVVATVRVPGKGKSRRRRAQQTRTFGTTIAQLEQLGNWLEGFAVTLVGMEATGVYWKPVFFVLERRFECWLINAEHLHNVPGRKSDVIDSRWLCELLEFGLVRPSFVPPPEIRRLRDLTRLRSTQAEERTRAIQRLEKVLQDAGIKLTSVAAGTYSVSARAMLEALLGGVSDPACLAELAKGRLRAKIPQLQEALANRFDIAHHGVLVAGLLAHIDALDQAVAALDARIAAATDAELIERLSTIPGVKRHIAEVLIAECGVDMSVFGSAQRLVSWAAICPGTNQSGHRRRSGKTRRGNPWPRTALTQAARAAARSKNTYLASHYWQIRGRRGEAKAIGATRHDILIAYYHIVHERVPFRELGPDWLARRHSPEHRTRRLVKQLEALGHNVTLEAAA

SEQ ID NO: 416578 - protein, 417 aa, unidentified
MAEEIEWFVGIDWASQSHQVCLIDAHGECLGERAVAHGGAGIEELCDWLIARTGGTPEVIGVAIEITHGPVVEALLERGFCVYGINPKQLDRFRDRFTVAGAKDDRRDAHVLADSLRTDRHAFRRLSNDEPVIVKLREWSRMVDDLQQERARLASRMREQLWRYYPQMLELADDLAADWFLDFWSHAPTPAKAVRLRETTIERFVKAHRLRRWQAPEVLRILKQKPLSVAPGVVEAASDHIRTLTVRIRLVNQQLKAAHHKLDELCAQLVPSEENEPGQQCEQRDVVILRSMPGLGRIILAVLLAEVWQPLRRRDYHALRSLSGVAPVTRRSGKTCVVVRRYACNKRLANALYHWARLATQHDAVSRRRYDALRQRGHSHGRSLRTVADRLLSVACTLLEQQTLFDPSYEVRDAAGA

SEQ ID NO: 416579 - protein, 411 aa, unidentified
MEAAVITAVGIDVSKSKSTVAVRRPGGEIALRPFEVHHTNSDLKKLASILKKLGGDIRIVMEHTSTYWRPIALTLKEAGFFVSVVNAMLIHDFSDNTIRKLKTDRADALKIANYALTFWDTLPPFNNEEETRLLLKMQSRANERTTATATALRNGLIALADQTFPGVNIAFDPNTKNANGHEKWVDFFLRYWHKDCVCQYSMEAFTESYRGWCKRKNYKFRTDTAHKIYLLAQEGVATLPKCESTKMLITQACKSLNAVCEAKQSTQLEMQRLAAMLPEYEVVMQMEGAGPITGPALMAEIGDVRRFKNKKALVAFAGIDAPPFQSGAFESKSRHVSKRGSPHLRRTIFIISNIILTRSNPENAVYCFMDKKRSEGKHYYVYTVAGSAKFLRVYYARVTEFLRSQPSPDAC

SEQ ID NO: 416580 - protein, 342 aa, unidentified
MHAMTIAIDIAKSVFQLHWVDADGVIQRRKLNRAKLMEFIARREPSRIVMEACGGAHHLGREFTRLGHQAQLLPAGQVRVFVRGNKDDAADARGIWVASHQTDIRRVPIKTVEQQGVQALHRMRSHWMCTRNASINCLRGLLYEFGLVLPKGPVAAIKQLSVQRERLERAVPATMLRAVQLQLDMFGQCEQAIAALDNELKAVLSQSSQAQRLDAVPGIGLLGATALAATLGDGKAWRSGRHFAASIGLPPGHSGSGGKIHMSGMTKRGDPYLRTLLIAGARALILLPKKSEWLEALLDRRPPNVVAVALAHKLARLAWALVAYERQYDPQWHSQPLRANAA

SEQ ID NO: 416581 - protein, 365 aa, unidentified
MVSPIPASGKLSGDFSFLEAIMTNTVTLIGIDLGKHCFHLHGQDAQGRMVFRKKLSRSQLLTQLANFPVCRVVMEACAGAHWIARRLLAMGHEAKLLSPQFVKPFVQGNKNDFADAQAICEAASRPSMRFVSPRNESQQTISATHRVREALVRDRTSSSNQIHAFLLEFGISLPKGPAIIKRLPAILAEHEGDLPPRLIALIERLREHVKYLDEQIKAVERELTQQLAEDERSQRLLEIPGVGPITASVLAVELGDAHQFANARQFAASIGLVPRQHSTGGKPTLLGISKRGDKNLRRLLVQGARTLMQRVQARTDELGEWVRDLLCRRHSNVVACALANKMARIAWAILAKGTHYQSRSAVAVV

SEQ ID NO: 416582 - protein, 322 aa, unidentified
MAMLSFGGIDVSKDRLDITVLPDEQCSSVSNDAAGWAELIEQLRGSSITAIGVEASGGYERGVVRALLAAGMSVRQINPFKLRQFAKASGILAKNDRLDARMIASFVAIMPTRPAQRQTPMIEQLAAMLTVRRQLSDHKVATENASRLLEGAMLQRLSRRRVAVLTADIDLLDQRLVEIVTADPALAHRFWLLTSMPGVGAVLACTLIALLPELGQMSRKQVAALVGLAPYDFDSGKLKGRRCIWGGRARVRHVLYMAALSASNWNPALKAFHDRLAATGKKPKVVIVAVMRKMITTLNAMLRDGTTWVDRYSGRRSAATAR

SEQ ID NO: 416583 - protein, 347 aa, unidentified
MIIIGCDYHPSWQQICWIDTLTGETGERKLEHAQGEAEKYYRSLPSAALIGMESTGNCQWFTELMASLGHQLWIGDAARIRSAEVRQQKTDRRDAALLLKLLLEGRFPRIWTPTVEERDQRQLLLHRHKLVEMRVRVKNELQHLAMNRGITKGRRLWSKAGERVLCELPLAPWASRRREDLFRLRKMLDEQITALDEAVKKVAERNDRARLLMTHPGVGPITSLAFVLTMGDVNRFPRGKQVGSYLGLIPREHSSGGKQRTRSISKQGNRFMRTLLVEAAQSVVRYEPEFRKEYLHRCHRSEKGVAKVAAARKLAIRLYWMLRSNTAYPEIVRVESSSRVPLDSSPA

SEQ ID NO: 416584 - protein, 357 aa, unidentified
MADATTTVIGGVDCHLQTHHAVALDAQGRRLGDHSFPASTSGYQQLLSWLYGFGSVQAVGVESTASYGAGLTRCLLAAGLTVVEINQPHRQLRYRRGKTDAIDAEGAARKVLSGEATALPKHTTGSIESIRQLRVVRASAVKARTAALAQLGELIATAPSALRERLTPYSSLHAQATRCARLRADLLRLHQPLQAAKLALSSLSRRILALDREIASFDTQLTKLIGMVAPRTAALLGVGTMTAAQLLITAGQNAERIRDEAAFAHLCGVAPIPASSGKTSRHRLNFGGDRQANAALYLIAVCRLRYCQRTRAYAARRTAEGRSKRDILRCLKRYIAREIFNALRADLAAPMPIHSGS

SEQ ID NO: 416585 - protein, 331 aa, unidentified
MSTFTQVCGIDVSKDSLDYRLTKRTDERLIQDDQIANDPKAIHSLFSKPAFNQTLFVIEYTGNYSAKLIHELSCLNRPLSMVNPLQSKQFMSVLGQTNKNDKQAAFALSALGCRMPLRLYKVPSQHMQKRKQILGTLQALEKQQRMLKNQLHALEHLPVLEEQSFEALKSVLASVEAQIAPLQERLYEAAQDEGFNEKKKYATSVKGIGAKTAEAILVVTNGLADFDSPDKLSKFLGLTPLSHHSGTSVRRRGGITKFGSNQVRSLLYMCTRSAIRYNQPCKELYQRLRSNGKPHKLAAVAVMHKLVKQVYACVTSKTMFDNEYHLKNKKD

SEQ ID NO: 416586 - protein, 343 aa, unidentified
MAKTPIAVLGIDLGKNSCSLAGLDAAGAVIMRRRMTREGTIKFVATLPACVVAMEACCGAHFLGRTFACQGHTVRLMSPEYVAPYVKAQKTDNRDAEAIAEAATRPTMRLVTLKSEAQLDLQVLHRARERLVAGRTRLTNQLRAMLLERGVILPKRRAPLIKRLDELMAGELPISQRARQLLLDLRDEWMDQDRRIKAYDDELMALTREDGAARRLATIPGIGVINATALLAAVGDASAFAKGRDLAAWLGLTPRQHSTGGKTKLLGISKRGNKYLRTQLIHGARAAMAHFAKKATPVGTWVRQLLTRAHPNVVVVALAAKLARIAWAVLRHGSNYDHRTATV

SEQ ID NO: 416587 - protein, 422 aa, unidentified
MPTETSEFQGFAFIDWASKKHQLCLLTADGRIRGERSFEHSGAGLAELCQWLRDKSGAAPAQIAVALEVSDGPLVETLLEQGFAAFHLNPKQLDRFRDRYSPAGAKDDRRDARVGARALLTDRAAFRRLATPDPLTIQLRAANRLWAELTAERTALSNRLREHLWRYYQQALQLCDDLATDWFLAFWLLAPTPADAAKLRLSTLARFFKRHGVRRCTPDQAQAILRRPALTVAPGTPEAAVDSCRSLVARLLLSNQELKRVSRQRDDLLARLAKTKAPAADQATDAPLDDVAIIDSAPAAGDGLLATLFAEVPDAVARHDYHALRALSGVAPVTRQSGKLAIVQRRLACNPHLCVAVFHWARVAAQIDDHWRQRYAALRARGKSHGCSLRIIADKLLRILCAMLKNRTRYDPTRHRPKPAAA

SEQ ID NO: 416588 - protein, 362 aa, unidentified
MIVAEHFGFVVGVDTHAQTHTFAIINAGNGGEIANETFPATTSGGKRALCWILRHTGASHGAVLIAMEGTGSYGAKLRQQATDAGFQVTEAPVPNQRLGRYAGKSDTIDAYRAARATLGILMERLHEPRSGQSHLALRILSNARRSMTRERTAAINALTALLRVIDLGVDARKPLTIAQINTIAAWRERDEQFGTRTCRHEAIRLAKQILTLQEQLAQNHAELEVLVKEIQPVLLEIYGIGPVLAAIILAAWSHPGRVRSEAAFAALAGTCPVPASSGGTTRFRLNRGGDRQLNKAIYTIALIRINRDPATREYVTKRTSQGRTKKEIIRSLKRYITRQIYRALNQTSPTRPANGLASSGSL

SEQ ID NO: 416589 - protein, 342 aa, unidentified
MSTVTTIGLDTAKSVFQVHGISASGEVLIRRQIRRGQVLKCFSSLPPCLISIEACASAHHWSRELQSLGHQVKLMPPAHVKTYVKRQKNDMADAEAICEAVTRPTMRFVETKTCEQQSILMLHRVRLMQVRQRTMLTNAIRAHLAEFGLVAKIGREGVDELPLLVRDGDERVPELARACILALAEQLVLVKRQILEMDRRITACHRASEVSRRLAEIPGIGPLLASALVAHVPNPKTFSSGRNLSAWIGLVPQQNSSGGKERLGGMTKQGNRYLRSLLTGGALAVIRFAQRHGTKRPWIVQLLAHRATKVVAVALVNKMARMVWAIMAKDARYREPVVAQAA

SEQ ID NO: 416590 - protein, 342 aa, unidentified
MGRWIGVDLHKNRFTVSYLGANGEHKLLEFTVSAKGIKSFKETLTKFDEVAVESTGNAGYFTRQIEDAVKVVKIINPLQFKIISSSVKKTDEHDAVIIARYLSKGLIPEVRMRTKEESQISSLISTRDRMVKLRTALKNKIHNILNANGIVTEREVFSSDKGLDNVLALDIDEAYLFELRIIVGEIHSLNKAIDEINKELTNRGKKINGHKNLTSITGIGDISAAILLNTIGNINDFDSDKKLAAYIGIVPRVYISNETSQYGKITKMGNKIARTALVQSTLVAIRYNPYLRSFYSRLKAKKGSGKAIIATSRKLLTIIYRTLKNDWVFEDFNKFKLAAVTA

SEQ ID NO: 416591 - protein, 370 aa, unidentified
MGKSVLYVGLDVHKMSIDVAIAEAGPGAEVRFYGQIGGDLDSLDRVIRKLRATGAQLQFAYEAGPCGYQVYRHLTAQGWPCLVAAPSLIPRRPGDRIKCDRRDALSLARLFRAGELTPVKVPDPDDEAMRDLTRAREDAVSVERRAKQRTGALLLRHGRRYPGKTTWGRGHWRWLVQQVMDHPAQQIVLQEYLDAVRQASARVQRLTGQIQELLPQWRRAPFVVAYQALRGVSLIVAATMTAELGDLSRFNNPKELMAYLGLVPSEHSSGASVRRGRITKTGNGHARRVLVEAAWAYRLRARVTRPLLQRQEGLPENIRQISWKAQLRLCARYRRFLARGKHKNTIVTAIARELAAYIWAIGQAVEPLTA

SEQ ID NO: 416592 - protein, 415 aa, unidentified
MEVLHERCAGLDVHKNTVVGCVRLAQGGRVEKEVRSFKTTTSELLALADWLDGHSVNHVVMEATGVYWKPVWHVLDDGERQLVLANAAHVKNVPGRKSDVSDCDWLSDLEAHGLIRASFVPDQPTQELRSLLRTRKQLVRERTSHTLRLQKTLEDANIKLDSVISNVVGVSGRRMIEALMEGQSDPAVLAALADRRIKAPPEVLCEALRGRVTRHHRFLLGLHLGHIDAIDQAIDKIDQEVEASLQPFCQAVGLVKTIPGVSQLAGQGIIAEIGSDMSRFPTCGHLISWAGLCPRSDESAGKRHSTRTRKGNPWLKTLLVQCAWAATRTKATYLHAQFLSIRSRRGARKAIVAVAASILTAVYHMLKNGTSYRDLGPKHLDNRNKEAQARRLLTRLRRLGFVADFDTLRAVPVSC

SEQ ID NO: 416593 - protein, 339 aa, unidentified
MKLYSGFDLHSNNNYLGIIDQNGKRIFKKKLDNDPKQILQTLQPFRPDLMGAVVESTYNWYWLVDLLMDEGYRVHLANPAAIQTYKGLKHVDDVHDSFWLAEMLRLNILPEGYIYPKEMRPVRDLLRKRGHLIRLRTSLIISLQNIVTRNCGVRLKANEIKRFRGDRIGPLLAENEDLALAGAVSKESIDFLTRQIRQIEAVVEGKIDLDGPYRYLLSLPGVGKILGLTIRLETGCIERFAKVGNYASYCRKVSSRWTSNGKAKGRGNEKNGNKYLAWAFSEAAELARRFDPKARAFYQRKLAKCPVMVAHGALAHKLTRAAFFVMRDQVPFMPEKLFP

SEQ ID NO: 416594 - protein, 352 aa, unidentified
MENMYYIGLDVHKNGLDVHKKTISYCVKDGSGRIYAEAEIPATRLDLDRWMKTLPQPWTAAMEATIFTAWIYDHLKPHAAAVKVAHPLMLRAIATAKKKNDRIDANKIADCLRCDFLPECYMASTEIRERRRTLRYRNLLVRQAVQMKNKIAVLLMEAGVSYNKQKLHKVGYSRELLATNQDIDDGLKPLLRLCRETVVRLGKTESALVRSLQRDSLLMERVERLMTIPAVGPITALTWALEVGDVQRFSSIKKAISYCGLCGAENSSATIIKRTPLSKQRNKHLQTVLIEAAKMAPRNSVDLAMIYDREKQKDNANRATLAVARKLVAYLVAVDRRQKDFLVVKSENRTAA

SEQ ID NO: 416595 - protein, 342 aa, unidentified
MEHYAGIDVSLEYSSVCVVDANGKILREAKVASEPEALIAWFGSSGFDLERIGLEAGPLSQWLFAALRAAGLAVELLETRHVRKAFEAMPVKSDRNDARGIAQLMRLGWFRPVHCKSTSAQETRSLLTARKLVQSKLRDVENSLRGILRGFGLKVGKTTGLGFAGRIEQLVAGHPHLETIAKALLAVRAVLRKEFAAFEKQTRKMVRSDMRARLLTSVPAVGPIVALTYASAIDDPGRFKSSKQTGAHFGLTPKKHQSGETDYTGRISKIGDGSVRTALYEAAHIMLTKPVKGCSQLKSWAMRIARRAGMSKAKVALARRLAVIMHRMLVDGTPFNAAAAAT

SEQ ID NO: 416596 - protein, 324 aa, unidentified
MTCWVGIDVAKDSLAVWLRPQGKNFSVSNDEQGHQQLLALFAEEKPERIVLEATGGYECGVMFSLSRAGHRVSRLNPTRVRAFATAMGKLAKTDPIDAAVLAHLAQTLEEAPSTVPSPERERLRELVQRREQLVSQRDDERRRLHQARDSFVRQCLEGAIKALKETIRGYDKEIAKAMNVVDAEQAQQLCQVKGVGPVTAAGLLAYLPELGQLNRRQIAALVGLAPYNSDSGQKSGQRRIRGGRGMIRRILYMTTLSIIRYQEDFARRYQGLRENGRCAKVALVACMRVLIVRLNAMVRDGTCWRTGTVQPQAARQAGKGERAV

SEQ ID NO: 416597 - protein, 313 aa, unidentified
MIHAEVIIGIDISKARLDIHVRPTGQCWSIENGRAGIAALVTRLTKLRPAAIGMEASGGYEQPLARALHAAGFDVHILAPARVRAFARAIGQSAKTDALDAAMIARCLEASRDRLEPYAPDPAREQLSALGAHRRRLIAERSGLTSQLDTIDEPIVRRMIQARVRSIALSLICLDKAATALLAAEPRLKRRVDRLRQAIGVGPVLAGALVADMAELGHISAKAAAALIGVAPHARQSGASKRPGRCAGGRKVLRDILYMATLSAIKARDPVLATFYKRLREKGKPFKLAMVATMRKMITILNAIARDDPAFQT

SEQ ID NO: 416598 - protein, 331 aa, unidentified
MDGEKRFVGIDIAKAALDVFIGSGEAAFSVTNDEVGIRELLRHLAPGDFVILEATGGLEMPAASALAAAGIAVAIVNPRQVRDFARAAGRLAKTDRLDAEVLARFGEAVRPEARPLADEQAQALEALVTRRRQLVEMLTAEKNRRARAPKILHRSIDEHIRWLEKRLAGFDDELAELIRDTPLWRERDELLRSVPGVGKVLSSTLLAQLPELGMLNRKQIAALAGLAPFNRDSGSMRGSRCIWGGRAQVRRVLYMATVAGVRSNPTIRTFYLRLRAGGKHAKPALTACMRKFLVILNAMLRNKTNWQASALDSSNILLSPLLGAISQHGCC

SEQ ID NO: 416599 - protein, 319 aa, unidentified
MMTHTTQTTAHYVGIDVSQNTLTIAIYPTDEVWIIDNTSEHHTALVQHLAHLPVQRVLLESSGGYEKAVVSALQQAGLPVVVAPAQRARYFAKSMRGDLKTDRADARMLAYFACCYPVQPVAPCAPVQAELKELWARREQLVQELEREKKRLQTVQSEAVRASLARMLAVLKEEIAQIEARVEELIASDADLSQKAALLQTAVGVGRVVAYGLVAELSELGQVSHRAIAALAGLAPVRCESGDWVGRARVRGGRPRVRRLLYQAAVVAATHDGRWRAVYEGLLGRGKAKKVALCAVARQLLVVLNAMVRDGRAYERVSE

SEQ ID NO: 416600 - protein, 340 aa, unidentified
MKLYAAIDLHSTNNVTVVIDEQDRVVYQKRLPNDLALIAKELSVYQSELQGIVVESTYNWYWLVDGLMEQGYKVHLANTAAIQQYEGLKYTDDHSDARWLAHLLRLDVLPEGHIYPKADRPVRDLLRKRSQMVRQRTTNLLSIQNLLTRNTGSSMSANRVKGLDAQQVDELLPDSDLALAVKANLSVMLSADEQTEILERTIMQRVKLRPQFSFLKTVPGIGEILALTIMLETGDIRRFCSVGNFASYCRCVGSQKISNGKKKGQGNTKNGNKYLAWAYVEAAHFAIQFNSKIKSFSQRKKAKTKVVVAIKAVAHKLCRASYYIMRDRVPFNITKAFGQN

SEQ ID NO: 416601 - protein, 332 aa, unidentified
MAHSNFIYFVGIDISKSTFDVAIIDQHQSPTSFKFQNTGKGVNAFLRLLKNKKYPLQDTLICMEHTGVYGRIIIAKLVEKQANFCVEMSLRIAKSIGIQRGKNDKVDAIRIAKYAEKNSNELELYTPIPLVLEKVKLLIKIREKLVQFKADLQKHPNEMKAFDPELGKLAEKNIKKTIKCFTNEIKRIEEELKELILSDNQLNSTIGLVTSVTGIGTITALYFTIFTNFFTRYTNPKQLACYCGVVPFEHTSGSSVHKQSKTHPIANQTLKKQLHMCALAAVRHDPDLKVYYHRKAEEGKNKMLVLNNVRNKLVLRICAVVKRQKPYKKQVA

SEQ ID NO: 416602 - protein, 426 aa, unidentified
MKDNLPQTKQSKPGLIIGIDWADQKHDIYTIDRQGGGTLEQIEHSPEAIDAWLSEKLLLAGGQPIAIILEQSRGGLIHALMFRKNVILYPINPKQFARYRESYSNAGCKDDPTDAQLLARMLRERIQLLQPWKPDDESTRLLARLCQTRRQLVDERTRLTQQLIDQLKAYFPLVLKLNSSPSVNSLVLELLRRWPDPRQLKRAERRILHRVLKEHGYRNEDQRQKVIEHIRSAKLLSHDRALIEPISIIVQCLARQIPLLQKSIDELDAQIEMEMKSHPDAALFTALPGAGKALAPRLLTAFGSQRDRYANADEVAAFSGIAPVTKQSGKSRFVHRRYACPKYLRQTFHEFADHARKWCPWSRAYYLLQRDRGMKHHAALRKLAFRWIRILFRVWKNRTAYDPAAYLATITCKNPAIIPFLPTPKN

SEQ ID NO: 416603 - protein, 479 aa, unidentified
MNVKTRRTKKQVNVENQAIKLLAKEELGRKIEVIKKELRSYTWRDLETNGKFAKNDKLSFITDDMLIAGCDIGSETHYIRAIDVRGRELSSGAFEFSNTSEGFANAKAWVLALAAKNDKKQIVLGLEPTGHYWFALAAWMISNGISVVQVNPYAVKQSKEIEDNSQLKDDRKDPKLIANLVKDGNYGMPYLPEKVYADMRRLSMFRDQLTEDRIRNINRLHRELKIYFPEYMDAFGKIDGAFTLEVLKVSAIPSDITALGAEGIKNIWYNVKLRGRGYSRANEIVSYAEKSVGLTDGTDAGREAVKWYAEQILKLDEQLAVVESTLHEKCREIPCAENILEIKGVGENILAGILAEMGDISRFDDVKEIQKLSGMGLVACSSGKHKGQTKISHRGRKRLRYWLFQAAKSAVSHADEFKQLHEYYTTRTNNPLKKMQSLVVIACKILRVIFTILTKGTTYDPKKLLGDIVRPNQAVPQAA

SEQ ID NO: 416604 - protein, 398 aa, unidentified
MKKSVYASVVGAGIDVHYKFSTVAFVDAAGKVVRRERLEHSDREALRGWISHWPSGMTVVMEASFGWGWLSDLMEEVGLKVRLANCFKVEKMRQARGVAKTNDKDAALLAPLPKEATTWWEVWRAPQEVRNRREWMRHRTDLVGMQTRVKCRIHAIFHRHGIFHEFSDLFGGGGRKFLAALCEGKDPQGERLSSGALEALRSEMVLLLHLRQELARIAAQLRKELDRTPEVRRIMSVPGFGLILAHVLLAEMGDIKRFRRSRSLANYSLLGPKSDDTGEDPPPGQAPLGRHLGQRGNRVLKWAFIEAAHGAVRHGGQCREKFNRATNNGRRDRGRGYIKVGRSLVDVVYAVLRDQRMYQERRPNQPPQSVMNQSDKAKSRVTRPGMGRLYHPMVAAGK

SEQ ID NO: 416605 - protein, 351 aa, unidentified
MPYKLNSGIAMIGIDIGKNSFHVVGHDKRGAIVLRQKWSRGQVEARLANLSSCLIGMEACVGAHHLSRKLQKLGHDARLMPAKYVRPYSKGQKNDFRDAEAIAEAVQRPTMKFVATKTAEQLDLQALHRVRERLVSQRTGIINQTRAFLLERGVAVRQGLRFLRAELPRILATPCDALSPRMVRVIEDLAVDWRRLDDRIEGLSSEIEALARQDEGCERLMTVPGVGPIISSAMVAAIGTGDAFSKGRDFGAWLGLVPKQISTGDRTILGSISKRGNRYLRALFVQAAWVVLVKVGPKHWERYGLKSWIEAAKKRLHHNVLAIALANKLARMAWSVLAHGRTFEVSKIQAA

SEQ ID NO: 416606 - protein, 307 aa, unidentified
MTLSVGIDVAKHTLEWCSGSEGQIQHARNESQPIAQLVRQLVALDPVRVVVESTGGYERTLVTKLAEAGLPVVVVNPRRVRSFGQALGILAKTDAIDARLLALFGEKAEPEIRPILQGRARLLADLVARRRQLVSMIVAEKSRRETAATAVRRSIEAMLRVLAQQVRELDRRIDQALSEDVETAELAALLQTVPSVGPGVARTLLVDLPELGHLGRREIASLVGVAPFARDSGKLRGVRYIRGGRASVRTALYLAAMNAARFNPVLRSLYQRLRQAGKPPKLAFVALARKLLTILNAIARERTAWQA

SEQ ID NO: 416607 - protein, 286 aa, unidentified
MSHDTTTFVGLDVHKDSIAVACIGPDPDALVVDVGTIGTQQYAIDRLLKKLSGRGRLRLVYEAGPCGFWLERYLREKGYAYGVAAPSLIPQRPGDRVKTDRRDARKLALALRAGTLTLVHIPTPGEEQFRDVVRAWQQAKRDVTGARQRLKSFLLRHDIRYTGRANWSAAHRRWLADLSLASPARRIVFEELIGAITERERRRDRLEHQLDALAPTWSGYALAQALLAFRGIQKTVAWTVVAEAGDLARFALPTQFMAWLGLVPSEHSSGATRRQGPITRCGNRRS

SEQ ID NO: 416608 - protein, 429 aa, unidentified
MQNESTPGARGPVFCGVDTHADSHWLCVLDWRGRRVLSRRFPADAAGYEALAGAIAAAGEPACVAMEGTSSYGAGLTRHLASLGMPVREALSPARTQRRRPGQGKCDESDAERAARAAMSGSRLGTPKSQDGWVDGVRCMLAARSGAVKARTSAINTARSLLTTAPEGLRSRFRGMAGPRLMEELPSVRAEGALGAALGALADLWAAARDAALDMERAIEASLEENCPALLAMYGCGPVSAAKLAVAAGDNPGRLRSEASFAAICGACPIPASSGKTVRHRLNRGGDRQANSALHEIARQRVMRDPETAEYAERARARGKSDREVMRCLKRYVAREAYRALMRPHEIRRPEDASGLVAARRAAKVSQVRAASILGTSEEYISMLERGQRELKPIRRAYEAWVEAGLPLDWDRQAFEAERKMDSKKHLAK

SEQ ID NO: 416609 - protein, 359 aa, unidentified
MTTTPTATAASTILAIDLGKYKSVACLYTGDPATATFVSFPTDRSRLEKLFAKHRPDAIVIEACLLAGWVHDLCHELGLPCHVANTASEAWKFKHSKRKTDKDDALRLAQLFALGQLPTVTVPPPATRQWRALIASRQALVGRRVAVQNRVRAILVGQGLAAPRGAKAWTELGLEGIGQFAKPLAQCGPDELWRGLLELALTELHQVRQLADQAEARLDQLARQSADVQLLETTPGVGPRTAEAIVAHLHEPGRFDSGKQVSAYVGLVPRQYQSGELDRRGRITRRGPALLRKLLVECAWVMLRYNSWARAVYQRLSRGKARKKQAIVALARKLLVRCWAMLRDQTPWRDSTPAEAAPA

SEQ ID NO: 416610 - protein, 411 aa, unidentified
MQVVVERCAFLDVHRDTVMACARMPDGAGGRQEEVAEFRTTTSQLLVLSDWLVERGVTLVGMEATGVYWKPVHWILEEAIEAVWVINARHMRNVPGRKTDVADACWGAQLLEHGLVRPSFIPPRPTREQRDLTRYRKSLIEERGRETQRLHRVLEDAGVKLSSVASSVLTKSGREMIDALIAGQRDPAVLAEMAKGRMRAKIPELKDALAGRFNAHHALLCRAMLARIDQADATVDELTKRIEELLHPHEAAVTLLVGIPGVSYRTAQVILAEIGTDMSRFPTPGHLASWAGMCPGNNESAGKHRSGRTRYGSKWLRIALVEAAQAAGRSKDTYLSAHYARIRGRRGPGRAAVAVGHSILVIAWHLLSTGETYTDLGGDYFDKRRTSTAHQKRLVAQLEAMGHKVTLEPAA

SEQ ID NO: 416611 - protein, 343 aa, unidentified
MTIARIGIDLAKTVFEIHGVDARDKAVIRKTLRRDEVSRFFANLPPCLIAMEACSGAHYWARSLMEFGHEVRLISPQFVKPYVKTNKSDLNDAEAICEAASRPSMRFVPIKSGEQLSIQASHRIRSRLVGNRTALSNQIRGLLAEFGIVVARSLATLRRRLPEILGSDKVALDPLIRSLILALRDELVVADDRVRAYDRQIKQLCKESEACRRLERIEGIGPLTATALVAAAGNAASFRNGRQFAAWLGLVPRHQSSGGRTRLLGISKRGDRYIRTLLIHGARSALGRIGHKNDPRSRWLQKLCGRRPYNTAAVALANKNARIAWALLRHGEAYDQRRTVAAA

SEQ ID NO: 416612 - protein, 354 aa, unidentified
MNNITFTDSHFFVGIDTHLKNWRVTIRNSGLELKTFSLNPSPEELYKYLTMHYPEGIYFIVYEAGFCGFWPQRKFNELGINCIVVNPADVPSSGKEKVVKTDPNDSRKLARELENGSLKAIYVPDINHEQLRSLMRLRFRLVQNQTRTKNRIKMLLYNYGIIIPKEHITNSRWSGYFIHWLKSVKLNSTAGQFTLDNLLLQLEQSRENLKQALKQLREEAKQENISSVISSLISVPGIAFITAMSLYTEIIDINRFNSFDHLASFVGLVPSVYSSGETDYTRGISFHHNKFLRPLIVEAAWTAVKTDPALTFKYKELIKTMAKQKAIIRIAKKLLRRIRHVWINQDKYVKALVA

SEQ ID NO: 416613 - protein, 370 aa, unidentified
MEEGIKFFVGLDVHKDTIAVAVAETGRAPARLVGSIAHDVNQLLKRLARYGEPAQVHVVYEAGPTGYGLQRALARRGYQAQVIAPSLIPKRAGSRVKTDRRDSLRLAELSRAGELRAVWIPDPADEAIRDLARAREDAVNARTQVRQQLKGFLLRHDVRYARRTSWSKTYYRWLATLHFGETGVQTAFTDYWQAVSAADERVGRLTTALVGSIAGWRFASIVAALQALRGIDQINAIGLVAEIGDIGRFAHPRQLMSYLGLVPTEASTGERVVRGSITKTGNAHARRLLTEAAWNYRFQPRIGMRAQRRAEDLPQAIRDVAWKAQLRLSGRFRRLHTRGVHLNKVCTAVARELAGFVWAVARARSELPQS

SEQ ID NO: 416614 - protein, 319 aa, unidentified
MAQNELVVAGIDVAKDKVDACIRSLSLRCMFASTEDGRREFKSWLRRHKVGKVVMEASGGYERAWAKASRAAKVEVRIVDPKRVRDFARSAARRAKNDPIDADTIAWFAEVFNEASGQPYDATREKLHQMVNGRQTLQDMQIQLQNQGEHKLPKAVRRQHSRILTTMRLAMDKLDVEISDLIEATPHFAELAKIIESVPGLARTSAAVIIATMPELGHVDGKIAAALLGVAPYDDDSGRRRGERHIKSGRRRTRNALYMPCVGAVTQHNPVLKAYYERLLAKGKLKMVALTACMRKLICILNVMIARRQEWDPNRYVVS

SEQ ID NO: 416615 - protein, 443 aa, unidentified
MQEKEKRSVKQILEELKAEIRSSQNTLIIAVDVGKIRHCACFVSSSGKVLRRRFFFTNTIDGFNNLMRQTKFYQNKEKLPHALFGMEPSGYYWIHLYEDLVIREKTVVTVSPLAVNRNRETINVSKDKSDPKDAYNIADLMKQGKFYLPIYRDKEIRELKRFSNIYYRLIGQRASLRCRLRGAVGYIFPELEHYFKDILAKSTMIILKDCPFPSQIKKMGRSRFASLLARGNPTLSRKRVAEIYELANQSVGITGEEKATLFEIKLLLDELEALQKNIAEVNARVHNIVRDRDDYHLLITIPGVGPITASSIIAEIGNITNFSSGKQLVKLAGLDLYGSESGISIHSLRHITKRGRKTLRTVLYQAAVSCIRCNAHLKACYLKLLANQPNKKKVKPKALVAIACKLLRMVYRMLTERRPFDSTYDQKLREKASLKMVKSSLLV

SEQ ID NO: 416616 - protein, 337 aa, unidentified
MSLYCAIDLHSTNNVPVVIDDDDRILFQKRLPNDLSTVISALKPFKQELHGVAVESTFNWYWLVDGLSDNDFNTLLVNPSAVKQYEGIKHTNDDTDAFHLAHLMRLGILPTGYIYPRAERAVRDLLRKRLQLVRHRVTHMLSAQNQVWRTTGLNISSKPFKQADFSLLDLVDDDYIKMAIKSNLILIHTLNQQIDELEDTVLQQLKVKPEFLSLLTIDGIGKILGMTIMLETGDIHRFAAVANFSSYARCVDSSRISNGKKKGANNRKNGNKYLAWAFVEAAHSIIRHNKTAHKFYQRKRAQKNGALATKALAHKLARAAYHVMRNQEPFQLERLFR

SEQ ID NO: 416617 - protein, 442 aa, unidentified
MRVFTHCVCLYRLKEPAGLKPGFLYLAISAGNAIFRNLNPSLKMNITHSIGLDVHKSSARFHIVDETAHRVARGPLKAATPAVQQLLKNLRTDPATVLVVAEATGMLHLDFCEAFEKSGCQVVAINPLYGRNRSARNAIRDNKTDRLDAESLAELGLSDHEELLKRFAYHCPVERFELQRYVSSSKILRKSLTNIIKHTATTVHTLFPELDELGLSINQVRVRRLLREHPSPVRIAALDLDELRAYVGNKAGELKQAATHSFAIRAMGVTCEDGLLGKLIDTIEHLTEQLKQMNQKIDQLLIPCAGKETIRLARSIPGFGAKTTPAILAFISAEHLKWGNKRTITRKLQALFGTDPRVKQSGRWKGTTKLSKRGIEIARTALFQAAFCGMKFDPQLRQYYDALKARGKHHKVAIVDLMRKQLARLVSVLVNQKSFTPIIPRL

SEQ ID NO: 416618 - protein, 370 aa, unidentified
MGNRSMFVGMDVHKETIDISVAEGGRQGEVRHYGVIASDLEPLDKVVRALRAPDRRLHFVYEAGPCGFGIYRHLTGHGEDCVVVSPSMIPKRSGDRIKTDRRDSLALARLHRAGELRAIYVPDDTDEAMRDLVRAREDAVVVATQAKYRLKAFLLRQGRRYPGRAGWTIPYRRWLADLSFASAAQHIALQEYRDAIDETERRIERLTEQLRQLAPTWRWAPLVAALQALRGVSFITAMGVVAELGDLTRFGHARELMAFLGLVPSEYSSGPSVRRGGITKAGNPHVRRLLAEAAWAYQGIPRIGRQQLYRQEGLPKVVCDIAWKAQLRLTGRFRRLVARGKAKPKVATAIARELSGFIWAIAREVRPASA

SEQ ID NO: 416619 - protein, 356 aa, unidentified
MKQVKTLSFAGQDIYCGIDVHKKDWSVCIRDDERELRSFSQPPQPAVLTDFLGRNYPHANFHAVYEAGFCGYWIQQALSHQGIDCIVTHAADVPTSDKDRRQKTDAVDCRKLAKELSEGSLKGIYIPSRQIIEDRSLVRGREQLVQDQTRYKNRILSWLHFFGIIIPEGYKKSTHFSTRFISWLEQLQLNESTKLALQVKLGGLQCIRQQLLLANRNLRKLALSDRYQKQVELLRSIPGIGITNAMIFLTELDNIARFETFDHLCSYAGLKPDIYSSSDTIIIKGITHRCNSLVRESLVESAWKAVAKDPALLMAYKQYKKRMNYNNAIIRITKKLLSRIRYVLLHQTCYVTGVVG

SEQ ID NO: 416620 - protein, 320 aa, unidentified
MGIEKAYVGIDVSKETLDVAVHATDRRWRFANSDKGITETVSCLEELCPTLVVLEATGGMECPLAAALAVSGVPLVVTNPRQVRDFARATGRLAKTDAIDARVLAHFAAAMHPESRRLPDSQEQELKAILARRRQLIEMLTAERNRLHSARSKAVKANIKAHIDWLEKEMTHIDHDLEQSIRQSPIWREKDDLLKSVPGVGPVLSTTILADLPELGLLNRRQIAALVGVAPFNRDSGHMRGQRTVWGGRAVVRSALYMATLVATRHNPIIQDFYQHLLSQGKPKKLALTACMRKFLTILNAMVKHQTPWHYPVSGTLQTP

SEQ ID NO: 416621 - protein, 394 aa, unidentified
MIYVGIDVASTKHDIVILNELGQSFKKAFSIRNDLEGYKKLLSEISSAKEFFNDLNVRIGLESTGHYSRNILHFLILARFEVMFINPLLTNMDRKAASVRKTKTDAIDAKAICMFLIRNQNDFKPYTLSSYHIDELKTLVRQRKSLKTQINKEMNLLHAYVIQAFPEYYKIFKKINSKASMEVLNRYASLSEFKRVRLETLKELIRKSSKGHHGVREAQMLKDLNSSSIGIDSSALSFSIKQTIKRIIMLEDQVHHIEKEIAHHIDESHTTLLSVPGVGYTTGAIILAEIGDIHRFKTDDQLLAYAGLDPSVYQSGNFEGNYKISKRGSSILRWALYQAAQAAVKFDPVFKAYYLKKKVEGKRHRVIIGHVTKKLMRVIRSILKNNSTYSINTH

SEQ ID NO: 416622 - protein, 338 aa, unidentified
MKAYAGIDLHSSNNFTAVIDDQDQRLYGRRLPNTMDAVVSALQPFREHLKGVVVESTYNWYWLVDGLQAHGYKLHLANPSAIKQYEGLKHTDDKWDSFWLAHMLRLNILPEGYIYPKDKRPVRDLLRRRLLFVRHRTAQILSLQSSITRNLGYKMSARDIKKLDKPDADTLFKDPFCILAAGNTIATIRFLTTRIAEIEKAVKAHIQLTPQFRYLLTTPGIGEILGLTIMLEVGDIRRFPQVGNYSSYCRCVKSERFSNSKKKGEGNRKNGNKYLAWAYVEAAHFAIRHYPEIQSFYQRKKVKTNGIVAIKALSNKLARASYYIMRDKVPYDEGKFFR

SEQ ID NO: 416623 - protein, 363 aa, unidentified
MGNQRTSVGLDVHARSVVAAAVDEVTGVWVRCKLTPSFDDVLAWLVLLPAPVAVVYEAGPTGFGLYRTLVAQGISCVVAAPSKLQRPAGDRVKTDGNDAEHLARLLRLGEITSVAVPTLEQETARDLVRAREDCRGDLMRARHRLSKLLLRHGQVYYGGAAWTGKHDMWLRGEARGALPDGGTKLAFDAGYETVRMVLARRDGLDKQIATMAVESQYAPVVARLGCLRGISTLTGFALAVEIGDWQRMTGRTIGSFVGLTPSEHSSGASRSQGPITKTGNGHVRRLLIEAAWHHRAHYTIGSTLRARWDAAPAAARARGDDGNRRLHKRWVSFIDRKKRSTVANTAIARELAGWCWSLAVMDQ

SEQ ID NO: 416624 - protein, 309 aa, unidentified
MEDTIYDHYIAIDWSIKNMAIARMTKKSNKITAIDVPSDIEDLHAYLKNLRENKIPAIEETTTSQWLYAELKEYVDRILICDPNRNKLLNEGPKTDKIDASKLVQLLKAGLMKEVYHSTDKFLYLRRVVSGYEDLVKSGVRLKNQRYALLRACGKSGKEKVGSPIDSQGEQFVLDCLDRQIEAYETEKEGYEREFERLARKHSEIKYQKSLPGIGAINAVKIVARVVTPYRFPDKGHYLSYAGLIKLDKISGGRSYGKRNPRYSRQLKSVYKSGVLAAIGGNNPIHDYYEYLIPRRWLSKVQCQTKSVP

SEQ ID NO: 416625 - protein, 326 aa, unidentified
MFAGQQDYVVGVDTHRDRHALAVIAAATGALVLETEIDADRCGYELALALAGEHARESRLWAIEGSGSYGAGLARFLAARGEQVVEVERPQRQERRQGKSDRIDALRAARAVLRETRPALPRAAGAREALRALIVIAPESLRGELRRLTRARLLAHCARLRAERQLDPQLRGTMLALRACARRVQAATIEERELKREILRLVEELAPQLLAEPGVGPISAAQLIVSWSHQGRFAGESAFARHAGAAPIPASSGQTLCRRLDRGGDRALNRALHTIIVSRRKHHPATIAYVQRRTSEGKSIREAIRCLKRYLARHLFRLLEAGPITA

SEQ ID NO: 416626 - protein, 354 aa, unidentified
MANYYIGADVDCKMVELAIEKNEKIIRRYRVPTTIPALREVLGSIAGTKFLTFEEGPMAGWMYRNLKDNVDQLVVCDPRRNKLIACDGDKDDSIDAGKLAGLLRGGYLRAVHQSEDMGRVVLKQWVSLYHDKVHEAVRQINKIRARCRMYGIRIPRRALRDHVSRHQWMAGLREKDLSEQLFVLWLGFDTAAKQVEMARKQLIRHSRDYEIVKYWSDVPGIALIRATTMLAYLDTPWRFGNEKKLWKYCGVGLQRTASGTDRFGKPNRGKLQLAWAVNRRLKGVVTGAAMSAINQKNNIFSYEYGRMIGNGLTASNARHAVARKMLSVLWAMWKTSSRFDESLVCYSPVTVKAN

SEQ ID NO: 416627 - protein, 454 aa, unidentified
MRKPQVVPDEDHEVMYERVAAVDVAKASGVVCLRTPDPARPGRFVNRIWDNVPATRAQIAGLGRELLRCQVQMVTLESTSDYWRIWYYVLETAGLAVQLVSPSQAKNLKGRPKTDKLDAMWLARLTQQGMLRPSFVPPAAIRRVRDFTRARQDLVAERTRCLQRLEKLLEDAMIKITSVAADGMKAKSVVAMVAALAAGERDPRTLADLAKGPLRAKRDALAEALDGMFDSHHGVIARMLLGQVAFLDQQITRMEDQAIAALAEVPGSWGVDASGQTGPGCGVTPGSPVLAAAHRLAEIPGISVWLAIVIIAEIGLNMAAFPTPAHLVSWMGLCRSAAQSGTRHGKGKPKKGNSYARAAAGQAAIGAARTATFLGERYARIARRRGKAIAQAAVARSIMIIVWHLLADPAARYRDLGPDFYASRINRDKKIRNHLRGLQALGVTVTITDDEQAA

SEQ ID NO: 416628 - protein, 397 aa, unidentified
MWAGIDVGKEHHWVCVVDSNGNMVFSRKVVNDERTIGDLVAEIDTLAGEVSWTVDLSNVYAALVLTVLADAGKTVRYLAGRQVWQASATYRGGESKTDAKDARVIADQSRMRGADLPVLRPGDDLITELRMLTAHRADLVADRTRTINRLRQQLLAVCPALERVAELTQDRGWAVLLAHYQRPKAIRRTGVSRLTKVLAAAGARNAATIAAAAVTAAKAQTVRLPGEDVGAGLVAELAQGVMNLDERIKHTDADIEERFRRHPLAEVITSLPGMGFRLGAEFLAVVGDPALLESPDQLAAWAGLAPVSKDSGKRTGRLHTPKRYSRRLRRVMYMSALTAIRCDPTSKAYYQRKRDQGKRAIPATICLARRRVNVLYALIRDNRTWHPDTPQIATAAA

SEQ ID NO: 416629 - protein, 400 aa, unidentified
MLSIGIDVSKGKSTVCGMKPGGEIVYTPFEIQHTREGMSELVSLLHNSGEEVRAVLESTGSYHCPVVAALLENGIFVSVVNSLRMKRFCSQSIRKVKTDRIDAMQIALYGLAYWQELQPTRLPEDTYRELQLLARQYYQMTSLLIKAKVDFNAICDQVLPGMQELMSDHAGRHKLSDFVLRYHHTTHILEMGETRFRKDYCKWAEKKGYRNCERMAALIFATAQNGIPVLPNAPSTQIVITEAIRVLHTVEASRDAILTQMQALAKTLPEYSLVREMPCIGDTLAPRLIAEIGDVRRFHSKRALIAYAGIDAPPYQSGKFCANNRHISKRGNRYLRKTGYEVMQSYVMHKPANDPIFTFIEKKRGEGKSGKLAMVAGLNKFLRVYYGKVTELYRSLPAIE

SEQ ID NO: 416630 - protein, 409 aa, unidentified
MHYYVGIDIAKSFHVACVVNQDDKVIKKSLKFNNDESGFEELLLLLNSIDEVSTFTIGMEATGIFFENLYLYLSEKGFNVLLLNPYQTNRFREMDSMKKVKNDNIDALMIAALIKSGRYSKAYVSEDMYQSIKSLYRHKNNLLEEMKKHKRQISTLLAVVFPEMEQVIKDPFNVTGLALLEKYPTAKHYHHASVDRILKTFRGIKGNNFNEEKASKLLELAKHSVYQGNGVDERAYVIKSHIRVIKLLQEELKELESEMLKLFNQQVSLDADEEQEIMDIIDNLRTIPGVSDKTIFALISECGDLGRFKNNSHLVGYLGLYPTLEQSGNKLSYGPIAKRGAKLAKKALYQAAIAAIRHNDELNKLFRDKVSQGRAKKEAVVIVARKLAHIILAIYKNNVAYNPQRVFQA

SEQ ID NO: 416631 - protein, 409 aa, unidentified
MERVIERGAALDVHKKSVTACVRGPRADGGRRQEVQTFGTTAAALLALRDWLSAHGVTHVAMESTGVYWKPVYYVLEEMFTCLLVNAAHVSKVPGRKTDVRDCEWLAQLLEHGLLRGSFVPPVPIRELRDFTRYRQVLVQDRTREANRLHKVLTDAGIQLASVATNVLGKSGRAMLAALVEGTTDPAVLADLAQGKLRRKLPALREALAGRFRTHHALLVSQLLAHLDYLDEALDILTTQIEEALAPFAREAARLDAIPGVGPRTAEILIAELGVDMRQFPTARHVASWAGLCPGTHESAGKHRAVRTRKGNRWLRAALIEAALAAINVRDSALAARYRRLVRHCGHKKAIVAVAHKMLTTAYVLLADGRTYQEPGAGYYDAQRKDRSVRRALQTLERCGYRVSLEPAA

SEQ ID NO: 416632 - protein, 411 aa, unidentified
MIKENYIYVGIDLHKETHTAVMIDCYNQKLGEITFPNRPADFPKLVAKVKKCNTDGKTIVFGLENAYGYGRALAVWLIDKGYLVKDVNTAISHRQAKHRGAMYRKSDSDDAEAIALATLNMLDKLPDAYPNDAYWSLGQLVHRRDNIMKQRTRLVNQLHEQLCIAYPSYKQFFNDISRPTALYFWEHYPSRKYLKGKSVEDLRKELVPVSHNRCSTKNCEKILDAVASDKVKNNAYQDARDMVTLSIVSDLQHYDSQLAEVDKMLEQMYKMLGCTLTTIPGVNVITAVKILAEIGDIKRFSNANKLAQFAGIAPLHLSSSGKGKDVATKQGNRRLQATIYFLAIQMVQVSSKGTPRNSVVRAYYEKRKAEGKTSQQALICISRRLISIIYGMLKHGTEYRMPVVESAGEKL

SEQ ID NO: 416633 - protein, 386 aa, unidentified
MKDETFVPREYDVFAGLDVDKKSIAATFSSPQGFIRSLHMPYSVDYLLNHVRKHFGDQKVAFVYEAGPTGYGLYDGLVAQGYRCLVAAPSMIPSAPGQRVKTNRLDSRGLSESLRGGQLKSIHVPSPIYRELRHLTQLRDTVVREAAAHKQRIKALLLLEGIGFPPATGGRQWTLRVKAQLRKLRCSRTVRFKLDQLLDSLEFCEKQVVSSTKEIRRFCKEDVELFQSIEYLMSIPGIGWIVASQLLARMGDWREIDNVRQLGSFLGLVPTENSTGDSVDRGSITRAGDGRLRSKMIQAAWSAIRQDGELREFYRSVCQRNPRGKGARIAIVAVARKLSTRIYAVLKKQRPYIVRKQVHSAPLTQEETSPQGTTRRCAEPGETDNS

SEQ ID NO: 416634 - protein, 345 aa, unidentified
MANDIQFSSVCGIDIAKSVMQVYKISSDGVVSNKAVKRADFLNEFRNIPPALIGMEACGGSQHWARELQSLGHTVRLMPPKLVKPYVTGLKNDKNDARGIYTALVMGVREVPVKSAAIRDLALLQTMRAKRQREKVAKINHIRGILTEYGLVMGKSLNAFLAKARPLIVELKERADVSPYIVSELLALFQEVKEAMEKIKELETNIDSIAKTLKQYDLFRSAPGVGPITAATMLVLLCNPAVFKNGREFAAYIGLAPKSTGSGGKNVVTHIPKKYECNNEVRALLVQCAHSICRCRHKSDWVSSILARKPKKVAVIAVANKLARQLWIMAKKGEKFERRLVLAAV

SEQ ID NO: 416635 - protein, 339 aa, unidentified
MSGVYGGIDLHSNNSVVAVKDAAGTLLYRQRLRNDLPAIDRALAPYREQLKAVVVESTFNWYWLVDGLMEAGYPVQLANTTAIQQYNGLKHTDDESDAEWLAEMLRLGILPTGYIYPKAERAVRDLLRMRAQLVRQRTANLLSLQNLVQRTTGSRIKSDVLRTLGPEQPAQLFANPDVARAAAATVHVRQCLDGEIAALEKIVRERVKLRPEFVKLKSIPGVGNILALTIMLEAGTIGRFPSVGDFASYCRCVNSARLSNGKKKGTGNVKNGNRYVAWAFVEAAHFAIRFSAPIQRFHHRKRARTHALVALKTVAHKLARAAYYILRDQVTFDVTKAFA

SEQ ID NO: 416636 - protein, 343 aa, unidentified
MAHYVGLDVSLKQTSICVVSDTGSVVREGVVDSDPEAIAAFVRSRAPDTVRVGLESGPTATWLWTELKRMGVPVICIDARHARAVLKMQINKSDRNDAVGIARIMQTGWFKEVRVKGLDCHAVKALLTSRALLVKIKRDLENQIRGLLKNLGRVIGRAKFNGFAARAAELIEDRPELVAVVTPLLKAREAIEKQIDDLDRKVLKLARHDAQIRRFMTVPGIGPITALCFKATIDDPARFKRSRSVGAYIGLTTRRHASGEIDWSGRISKCGDAMLRSYLFEAAGVLLTRVPKWSALKAWGMRLAKRNGLRKAKVAVARKLAVILHRMWIDRTEFTWSNKEAAA

SEQ ID NO: 416637 - protein, 388 aa, unidentified
MFHVGIDISKFKHDCFIATNAGDKIGSFTFTNDHDGFQTLKSELESLGKQNQIKIGFESTGHYGINLKSFLSKLGYTHLEFNPQLTNKFSKATSLRKAKTDKIDAKLIASMLGHFDYKSLHTSFYHENDLKELVRLRDKYLESRSKELVNLTNALDKVFPEFKPFFNNTFGKTPMYILKRYKTKEKIANLNNSHYETLRKMSMGKFNYPKFSKLRHLAKTSVGVSSEVYEIMIPMIIDNYYHFNNLIEQLDQQITTLYNKTRSLIHTIPGIGIITAASIYAEIGNINRFNNAGQLTAYAGLDVSVNQSGLKEHRGKIVRRGSPLLRKKLFNYSFISLRFIPQFHDYYHKKKSLGKHHKVVLIHLCRKILRMIFHIESNKIPFDINKVK

SEQ ID NO: 416638 - protein, 324 aa, unidentified
MMEHYIGVDLHKAFFQACAVDQSGARLWEDRFPRNDAGIAAFVARCASSSAVAVEASTPTWHFADAIVPYVGELRIVDSMKTRLKAGYAAKTDRLDARRLADALRRDSVVGIYHPPLEIRELRELCRGRHTLVQLRTRLLQRLRALLLRHGIVEARRLVRRDAVLDDLVLPPRAAATVASLRRMLAGVRGEITTIDRDVQQLAQRDPIAIRLQQIPGVGPVLALLIRAEIGEVRRFPTPGHLASYAGLVPRVEASAGRYRHGRITRRGSPWLRWALIEAAMHGPRRQDATGRWIRRLAIRKGALKARVAAARSLCADIRAAWMS

SEQ ID NO: 416639 - protein, 339 aa, unidentified
MGLHCAVDLHGDNGFYGIVDERGNRLLSKRLPNALDMVLRVLAPYRDRLEDGVVVESTFNWYWLVDGLNENGYRARLANPAAMEQYNGLKNTDDETDAFFLTEMSRLGILPEGYIYPKEERPVRDLLRRRLLLVGQRTAHILSFQNLVARERGEQISSNQIQKLWPQEVQRFFDDERLVLMGQTNIEMIRFLTKRIRQIESVVLCEAKLKPEYEKLLTVPGIGIILALTIMLETGDINRFKKVGNYSSYCRCVKSSRKSNEKKKGENNRKNGNRYLSWAYVEAANFIRRYCPEAKKWHQRKAARSKQVVATKALASKICKACYFIIKDQVDFDVKRIFG

SEQ ID NO: 416640 - protein, 313 aa, unidentified
MSANLYVGLDVSQDKIDAAVYGQGEPWTVPYDRAGLISLVEQLSALEPALIVAEATGGLERRLVAALDAVGLRVAVVNPARIRSFAKAEGRLAKTDRLDAHVIAHFAEAMKPTPRERPSVDAQEVKDLLARRRQVVDMLTAERNRVRRAIEPVQGFMQEHIAYLESELDKLDHLVDDRMQADSHWQAKATLLRSVPGVGVVTANTLVADLPELGQLNRKQIAALVGVAPLNRDSGRWRGRRSIWGGRPVVRTALYMAALVATRYNSVLRSFYERLLATGKPKMVALTACAHKLLLILNAMVRDGSHWQEPATP

SEQ ID NO: 416641 - protein, 445 aa, unidentified
MYSLFFMEPYRKEHIMHNKNYISVGIDVGSAFSFMTILAPDETVILKPFKITHNNKDSLERAVSEIKKAEELYSLESRIFLESTGIYHFPLFCYLVDCGFNASIINPIITHSTKNGNIRKVKNDKIDSKGIAKLGLSKDIPVSQFPAKLVLELRSLTRKYYDLTDERSAHINKLKGDLHTVFPQYLDVFCDVTGKTSTMILRQYGTPDKILRGHKKTMIEKISKASRKGLAKASERYEKLCAAANAAKTFGCQIDSIYFNIFLTLDLVEKLDSALDSILNRIRQLITFNKNEKFIQQIKLLNTIPGVGFLTAVTIMCEIGDFSAFRNPKQLFAYFGLDPEVNESGKFVGTQLHMSKRGSRIARRAIFAVALASIRTKRNGEGINPYLRKYYELKSGQKPKMVAIGAVMHKVCNIVFAVLRDEKAFELRSPEEHCKQYQRPALAAA

SEQ ID NO: 416642 - protein, 344 aa, unidentified
MNHYAGIDVSLESSTICVVDGAGKILREAKVASEPEALIAWFRLLGIPLDRIGLEAGPLSQWLYAALREAKFAVELLETRHVRDAFKSMPVKSDRNDARGIAQLMRLGWFRPVHCKSIEAQETRAVLTARKLLQSKLRDIENSLRGVLRGFGLKVGETTERTFAGRIKELVAGHPGLEIVAQALLEAHAVLQREFGGLDKRTQQLARLHPQAKLLMTTPAVGPIVALTYASAIDDPARFRSSKATGAHFGLTPKKYQSGQTDYTGRISKIGDASVREALYQAAHVMLTKPVKNCSALKGWAMRIARRAGMRKAKVALARKLAVILHRMLADATPFNPTAKAAAT

SEQ ID NO: 416643 - protein, 355 aa, unidentified
MSQTANTAIAVIGIDIGKNSFHVVGHDARGAIVLRQKWSRGQVEARLANITPCLIGMEACVGAHHLSRKLASLGHDARLMPAKYVRPYSKGQKNDFNDADAIAEAVQRPTMKFVATKTAEQLDLQALHRVRERLVSQRTGIINQIRAFMLERGIAVRQGIGFLRTELPTILATRTDALSPRMLRVIEELAGDWRRLDPRIDGLSGEIEALARQDQACSRLMTVPGIGPIISSAMVAAIGTGDVFSKGRDFGAWLGLVPKQISTGDRTILGKISRRGNRYLRVLFVQAAWVVLVRIKNWERYGLKSWIEAAKRRLHHNVLAIALANKLARIAWAVLAKGRAFELTRTDDAGIVRPA

SEQ ID NO: 416644 - protein, 335 aa, unidentified
MHYLYYVGLDVSKETFDASLVAFEDANEMAHRKFANSRKGICSCLHWVEKRHGIRLDDVIFCAEDMGSYISEMAVCASDRTLTFNFSLISPLVIKYSMGIARGKTDRVDARRIAEYAITHYRKIAPYLPAEKELCQLRTWLILRAHLAKQRVAKLVLLEKLDYKEKFADVSIQRSMLQEEIAYAEIHMKTIEREMKELIAADSNICRNYKLLTSIKGVGPITAIVMLCSTLNFTKITDHRKFACYCGLAPFEHSSGTSVRGGCHTSSMANRDIKVQLNRSALIAIRCDPQLKAYYERKVAEGKHKFSVLNAVRAKIAARCFAVVRRGTPYVALQI

SEQ ID NO: 416645 - protein, 318 aa, unidentified
MSIHKNQNDVNVGVDTGKSQLDIYIRPLDIYFTVANDDDGIKHALKEIKKYHPSRIIIEATGRLEFNFIAACSKAGLPFVVANPAHVRKFTGALGQLAKTDKMDARAIAHYGEAIKPPLSSLKPATMRSMSDLLARRGQLLTMQTMEKNRLQIMPKSLQSSIKPILTVIKNQIDKINLKLQKLIDSCEEYKAKNEILQSMPGVGNVVALSLLSNMPELGYVSNKEAAALVGVAPINRESGIYQGHRKVRGGRHQIRTVMYMAMLSAIQCNPVFKATFNRLVDAGKPKKIAIVACVRKMIVILNSMVRDGVYWNPGMAK

SEQ ID NO: 416646 - protein, 405 aa, unidentified
MTSPRRVVVGVDTHLDTIHVAAITDTGQLLGDAEFRTNPTGYYVALRWAQSFGEVFIAGVEGTSSYGAGFTQALQDNAIHVVEVNRPDRAARRRQGKSDPLDAYSAARAVLAGHGLAVPKDPHTSALKALLIARRGAVKARSAAIQQIKDLLVTAPADLRERYRRYTTTLRLVQALARCQPNADPDPTTIAVLIACKAMAQRIEFLERQTDELTAEIDALTTALNPALRAAYGVGPDTAAQLLITAGTNSHRLRSEAAFAMLSGAAPIPASSGKTTRHRLSRGGDRAANNALHRIALVRMSHDPGTRDYVARELVAGRTKKDILRLLKRAIAREVFKHLTTPCPIDDYTDLRPTRQAKNITLTSAAEHFGVWPNDISRLERGLKRDDTLAANYRHWLNTQLIDAA

SEQ ID NO: 416647 - protein, 453 aa, unidentified
MARKAEKERTKDGLKLKIVNPNAAGIDIAYGEMQVCVPEDRDGENNRCFGSFTCDYEGIASWLKACGITTVAMESTGSYWVGLYFFLEEKGFDVLLANAKDVKNVSGKKTDEADAEWIMLMHSYGLLKPSFHPDAAARNIRELARHRDNMLRSAGKEVQHMQKSLVLMNIKVDTVISDILGKSGKAIIEAILEGNHDPKSLAQLADRRCKASRETIEKSLEGTWDAVHLFELKQSYDLYKYIHTQIADCEAEMDRMLSDYTDGCGTDMTGYEATEKRVAKKNAISFDAEKHAFSMWGVNIMEMPGMSLGGLSVLMGELGSGFVEKFPSAKSFCRWCNLVPNNKISGGKLLSSKVPKQKNRVGQVFRLCANSVKGVKTGLGVYFRRQKSKGGHLQAIVATANKMARIFYTMVVSKKPFDETKVGLDEKTLLQRKISIAQRSLEKLNLRLSVAQG

SEQ ID NO: 416648 - protein, 495 aa, unidentified
MNNSAAIQNDGGKRPALARSRSPECYRKTVSERPPAEPEALAPTSNRKLPQEGQNISSMDGRAKRRQDRKQRKQTMNGSEQWQQHRAFGALDWASEKHFVVVVNKGGKIVEEFEIEHSALGWKKFREKLQPYGSIPFAIETSQGVAVEQLLEASMTVYPINPKSAQAYRQRKAPSGVKDDRLDAWSFADALRVDGHGWKALRPEEPLIKELRLLCRDEVALIEQRTAFIEQLRHALAAYYPAALEAFEDWTSVSAWMFVERFPTPAALAKAGKRKWQNFLHSRRLWGSTEGPRRMEVFAKAGQFAGTPPTTKAKSLLALSLVQMLFVIEKQLKVYRQRIEELFAHHPDHDLFGSLPGAGPKLAPRLLAEIGDDRQRFDGDPQNLQCLAGSAPVTKRSGKRRKYWHVHTRWACDKHLRHAMHLFAEQSLSRCVWAELYYQHHRQKNQSHANALRRLANRWLKIIYKMWVDRTPYNAEFHHRNQLQHGSWIFQLKSI

SEQ ID NO: 416649 - protein, 443 aa, unidentified
MTETTASPVILTTGLDLGDRTTHLCTLDSDRRVVERKKFATTRDALIREFGGKARQRVVIEAGSQSLWVGQLLADLGHEVMVVDPRRVKLIAESDRKTDRRDAETLARLALGVPELLGRAHHRTLATQADLSLLRSRDVLVGTRTKLVTHVRGILKAFGIKVPTCSASCFHRRAEEYVPLALRPALLPILATLEDLERRIRGFDDAALRLAEERYPDAKVLRQVGGVGPLVSIAYVLTVGDPHRFRRSRDVGPWVGLCPKTRRTGDDGPELPINKRGDAFLRRLLVIAAHYILGPFGNDSDLRRYGLRLCERGGANAKKRAVVAVARKLAVLLHRLWISGAAYEPLRNSERKDPASAPSASGSRAVGDSPATPPLPSAPVPLAALAADATDADGDGAAGEKTPTDAGSGADPAYRSPLRGRSPRSARSLSLHGRSDAAAPPQK

SEQ ID NO: 416650 - protein, 343 aa, unidentified
MQAVTTIGLDIAKSIFQVHGVDGEGNVVVRRKLKRRYIVAFFQKLPRCLVGIEACASSHHWARELQALGHTVRLMPPAYVKPYVKRHKNDAADAEAICEAVTRANMRFVATKTPEQQSCLMLHRTRHLFIRQQTAVINAIRAHLAEFGIVAPVGRNGVEALLNVVADTSDNRIPEIARACLVALGAQLRALKAQILEFDRRIMAWHRSNEASKRLDEIPGVGPALATALVASVGDPRAFRSGRDFSAWIGLVPKQSSSGGKEKLGNISKRGDRYLRSLFTTGALAVIRYAKLHGTKHRPWLTALLARRPTKVAAIALANKLARMAWAMMAKGERYKEPVALAA

SEQ ID NO: 416651 - protein, 381 aa, unidentified
MQGSNVGAPTAEHSGTIFIAIELSQKTWVLTIHSPDRDGLSQPKLKGGDHAAVLKLISDLRERVRAKLGTMPAVVTCYEAGYDGFWLHRLLTAAGIANHVFDPASIAVEQRYRRAKTDRIDGKLQLRTLMAYARGEPRVVRIVRVPSQEQEDTRRVNRERDRLISEQTAHTNRIKALLRQRGMAVGKPRRRDWLNWLSEQRDWNDQAVPPAMLAEVTREHARLMLIGEQLEAVTRELAAATATTTRKRDHLERLKSLGLVTASGLANEVFYKNFDNRRQVGAYIGLTPSPWQSGGTDREQGISKAGNPRARKMAIELAWLWVLHQPDSVLTRWFKARTLKASKRIRRIAIVALARKLMVALWRYLTTGLVPEGAVLKPVKA

SEQ ID NO: 416652 - protein, 351 aa, unidentified
MTNDAKTKTVATIGIDLGKTTFQICGMNACGVVVLRQKVSRRKLGQQLANLPPCLIGMEACAGAHHVGRHLATLGHDVRLIPAQYVKPFLKGHKNDYRDAEAIAEAVQRPTMRFVPLKSVDQLDLQAMHRVRSRLVGQRTAVINQIRGFLLEHGITVRQGPAGLRQALPAILAQRSDVLAPRIVHLVEDLVEDWHRLDARVDDVTGEIVQLARQDENCKRLQGVPGVGPLTASAVVAAIGNGAAFAKGRDFSSWLGLVPKQISTGGRTILGSISRRGNRYLRTLFVQGARSVLLATKNLSKHELGRWLEAATPRLHRNVLAIALANKLARIAWSVLHSGRGYEVNYKNHVA

SEQ ID NO: 416653 - protein, 421 aa, unidentified
MERVAQEAFAALVGLDWADAKHDVCLQATGTARREFLSFEHRPEAIDAWVQTLRTRCHGHPVAVCLELKKGPIVSAWRTYEFLVLFPVNPLTVARYRDACTPSRAKDDPTDAELQVELLLKHRDKLKPLQPQSPAMRVLAPLVEHRRRLVGDKVRCTHRVTSTLKNSFPQVLQWFPEKDTAIFCDFLSRWPTLKAAPLARRSPLEGFFRVPHVRAVDVIDTRVQALKRAMALTTDDGVITPNVLLVHALVAQLRVTLQAIADFDNAIAQRAQAHPDFPLFDALPGAGAVFAPRLLVAFGEQRERFTSADELQKYAGIAPVTERSGKKSWVHWRLQCPTFLRQTFVEWAAESTRHAFWAQVYSQQQRDKGKAHQAAVRALAFKWIRILFRCWQDHTPYDESVYLQALKRRSAPLLHNLAKGA

SEQ ID NO: 416654 - protein, 356 aa, unidentified
MLNDKKYIGMDVHKESISIAVRNDAGKIVMECVIETKASVILQFIDGLRGDLQVTFEEGTWAAWLYDLLKPHVTELVVCDPRKNASMREGNQSDKIDARRLAELLRLNHLNPVYPGEHGLRSLKELVRSYLTMTKDLGRVMSRVKAIYRSWAIPCSGKQVYAPRHRAEWLAKITEPGVRRRAEFYYQQLDALRALRQQVRRDLLAESKKHPAWKRLCQIPSIGPIRAAVLLGILQTPHRFRGKRQLWAFSGFGIETQSSADHRSVDGQLQRVKKPSSIRGLNRNCNHDLKNLFKGAAIVAASKPGPFQEFYTALLTKGIRPEMARLTLARKIATIVWIVWKRGASFDAQHLKPQTA

SEQ ID NO: 416655 - protein, 341 aa, unidentified
MDKITTIAIDLAKHVFQVAAENARGEEVWQKRLRSRAALHAFIEGLSPPLKVGLEAGLGAQAWARVLAARGLEVHVLPAQRVAEHRSGAKNDCNDARAILRALHDRSIHPVPVKSTVQLTMQALLRVRAGWQRRHTAVANQMRGLLLEHGVAIAQGDAALTRALERVLPDAQVPIPDRLRALLAELAGEWEGLSQRVQAMDPELAELARADPVARRLCTIPGIGPVTATALVCKGLDPVRFRNARQFAAYLGLIPDQHSSGTKLRLGRMSRRGDRYLRGLLVSGAHAVLRHTRRDALDAGHRRILHWQQRHGSKAIAVRLANHNLRVVYALLRDHADYHAA

SEQ ID NO: 416656 - protein, 344 aa, unidentified
MDNHTQYSGFAGVDLAKKVMQIHFVAGDGEITDKQVKRAEFLDFFRNRTKCLIGMEACGASQDWARKLEAMGHEVHLMSPKAVKPFVSGQKNDYNDAIGIYKAMFNGVRRVPVKSTEIRDLQTLRRIRSQVTKDKVKEINHVRGLLAEYGIVMGKSITAFNKGISSALESLKERGDVSPLVAEELQTTVESIKTKIERQKRLDREIEQLARGCKNYENFLKTPGVGPLTAAMLCVLLCDPAIFANGRQFAAYIGLAPRSRGSGGKNFIIGIPSKFNCDSESRAVFVECAQALARYKNKSPWVDGILRRKPKKVAVIAIANKLARQVWAMANKGESFKQMTILTA

SEQ ID NO: 416657 - protein, 355 aa, unidentified
MSQLIRIGLDTSKSVFQLHGVDEAEQPVLRRKLRRRDMLTFFSKLAPTRIGMEACGASHYWARELCALGHEVALIPPQYVKPYVDRGKNDAADAEAICEAMSRPKVARRFVAVKTVEQQARQMLIGVRENLLKRRTQVSNTIRGYAAEFGLVAAKGLAQLERLIEHIEQDRTLPELVRQMFAMLVGQYRHASAQIREIEARLTEIHRASPLSRMLAKAPTIGPVTAVTLTAKVADPKVFRSGRDFSAWLGLTPKDHSTGGKAKQGGITRAGDETLRSLFICGATSVIQQVKRGKAGAPPWLLSLVKRKPPKLAAVALANKAARIAWKMMVTGEPYDPRRHDAHDQASADPLAEAA

SEQ ID NO: 416658 - protein, 316 aa, unidentified
MDHKQTVYGVDVSKATLAIAQYEGETVVEIANTPEAIAAWLASVPADSAVAMEATGVYHRMLAQLAHAAGLVVYVLNPQVLKHYARAIGQRGKTDGCDARMIARYLVHERSKLRAWQPPVAAADTLSRLLVRRRALVGARQILAQSLTGMPMLKAPRQALLASFKRTIATLDLLIRRELARIPEMAALHRRLKSIVGIGEVVAAQLVAALSTLCFTRAAAFIAYTGLDPRPDESGQHRGRRRLSKRGPALLRCLLYNAAMSAAKSKVFKPVYMRLRERGLQSTEAIVILARKLARIAFALYKSGETFDVQKHLKTT

SEQ ID NO: 416659 - protein, 354 aa, unidentified
MADQIAVVGGVDTHTDFHQAAVIDSIGRHLATQSFPTTPDGYRRLLNWLRSHGEVIAVGVEGTGAYGSQLTRVLRTNQVTVIEVDRPDRRARRANGKSDPVDAYAAATAVLSGRASGTPKTRDGIVEAIRALRVVRRSAVKARTQTLNQIRTLIVTAPGPVRERLRTLHTAELIRHLARSRPGADPSDPACAFRTALRRLARRYLHLTEEIADADAELEPLVTQAAPTLVALPGVGTETAAQLLITAGDNPDRLKSESSFAHLCAAAPVPASSGRTHRHRLNRGGDRRANHALHMIALVRMRYDNRTKAYVARRTAEGMSKKDILRCLKRFIAREVYQHLARPMPMPNKLLQTA

SEQ ID NO: 416660 - protein, 362 aa, unidentified
MRIIGCDFHTRQQTLAMLDTETGELVKMTLLHEGNTVPEFYSALPRPVRVGIEATGSMQWFVNLLEELGIECQVGNPAVIRAAEPRKQKHDRRDADLILKLLMEDRFPAIWLPSKELQDLRALVRHRHQWVRMRTRIQNALQSIALANGLRRGPALWSQAGQHMIASLPLAPHAAYRRSELQAMYEKFEAEIEKLNQRVEEQACERADARLLMTHPGVGPVTALATEVFLGDPARFADSKALASYVGMIPREYSSGGRQRLGGLSKQGNPLLRFLWGEAGAHAVRRDPALQRFYRRKLVQKGLGKARVAVARKLGIRLWIMLRDQMEYNEFCRRGQKQQNSGAACAGMPGTRNGATSHRPVD

SEQ ID NO: 416661 - protein, 422 aa, unidentified
MQTLLSQRFTAYIGIDWADTKHDVCLQVAGETRRHFSVIDHTPQSIDRWAKSLFERYGAPIAIALELNKGPLVAALQKYEFFCLFPINPSTLARHRKTFVRSGAKDDPTDAQWALELLLTHPQRFPQLMPQSPAMRILASLTEHRRALVDERVKVSNRLISELKQYYPLALELFSNHDTVVFCDFLMRWPTLEHIKHSRQSVFLKFFNEHNMRRPQLNQTRWELITNAMPLTQDPGVIRPSQLYATALASQLKGLISTIKDFDREIEETANTLADYPLFKALPGAGQHLAPRLMVAFGEQRDRFNDANAMQRYAGIAPVTQRSGKKKVVYWRYQCSTFLRQTFVEWAAHSITQSTWAGAYYRQQRAKGCSYQATLRALAFKWIRIVYRCWKTSTVYDEKAYLQALTRRGSTLVEAPMEVVTG

SEQ ID NO: 416662 - protein, 407 aa, unidentified
MEVLHPRCAGLDVHATNVVACVRLTTGREVTYEHRTVSTTTPGLLDLVDWLTTHGVTHVAMDATGVYWKPVWHVLEDHVALVLANAMHIRNIPGRKNDKNDATWIADLLALGLIRSSFVPPAPIQALRDLTRTRKQLVRERARHMQRIQKTLEDANVKLTEIISDILGRSGRAVLHALVAGETDPERRVDLTSGRLKASRAQLVEALHGRVTDHHRFMLRLHLTHIGALDTAVAEVEARIHEALTPFRAAVSLLTTMPGVSETAAAVIIGEIGDDMSTFPSAGHLLSWAGLCPRLDESNGKRRSTRTRQGAPWLKTTLVQIAWPAARKKNSYFHAQFLRLKSRRGPKKAIVAVAASMLTDMYYMLRDGVEFHDLGDQYFVQHDKTRLANRLLQRLRDLGVEVEVKAA

SEQ ID NO: 416663 - protein, 354 aa, unidentified
MKYHTSTSQFNCGIDLHARQMYVCVMDRDGQKLVHTNIRNNDFDYFLKLVASYRHDLTVCCECMFGWYWLADACQAAGLHFVLAHALYLKAIHGGKNKNDRIDSEKIAHLLRANLIPPAYVYPAEKRPLRALLRQRLLYVWNRSELLSRIQSHQLAYNRPTFPQTRYNREPWAEQLLAHEDHPVRQLTLQNDLALIGHYDTQLALLEKDLLKLTQQTASRDFTLLQTVTGIGQYLGLTILHEIGDIARFPSVKDFLSYCRLVKGTVASAGQIKGLRGAKLGNPYLRWAFGEAAVIAKRDVILGPLAQRLEARMGGNKFKANTVLAIKLARAVYFMLKTKTVFDPDRLVAALSRN

SEQ ID NO: 416664 - protein, 416 aa, unidentified
MKKNSNSQTTSGQKTKPAKARGPVQRDSKEVMAELVAKLSERLDPRPAQENASVGKPRGVPAPNRDRLTVGVDLGDQWSNYCILGLEGETLAEGQLRTTREDVAELFRALPAARVILEVGTHSAWVREVVVGCGHEVLVANPRLMDGTKRRKRKNDRIDANQLARLGRIDPQSLFPMEHRSTEVRQDLVVLRARDALVSVRTQLINTTRGLVKSMGTRLPKCSSPSFAHQVEEALPAEVRESLLPLVRLAEALSDCIQVYDERIEKLGQEKYRHTELLRQVKGVGPLTSLAYVLTLENPDRFAKSRDVGPYLGLVPKQEDSGDSQPQLGISKTGDVMLRRLLVGSAHYILGPFGPDTDLRRYGLRLCERGGKNAKKRAAVAVARKLAVLLHRLWISGEVYEPLRHAPPIAEVGEAA

SEQ ID NO: 416665 - protein, 451 aa, unidentified
MAKRGEKRERRSVVLEPDAAGIDIGAEEIYVAVPPDRDEESTRRFSSFTGDLHALADWLGRCRIQSVAMESTGVYWIPLFQILEERGFKVYLVNAHYLKSVPGRKSDVSDCQWIQYLHSVGLLRASFRPPEAICALRTLWRHRGSLLEMAAEHILHMQKALSQMNLQLHHVLSDITGTSGQSILDAILSGKRDPVELAQLCHCRVKSPRDKVARALVGDYRPEHLFTLKQSLHGYRYYQKLILELDQETARLMQALPSATEQPMPPRTKATAYHRQGNDPQFDLRSELYRIAGVDLTDIPGVSAATAQVILTEIGTDVSRFRNASAFASWLGLCPEKRVSGGKILSCKTRKVKHRAATALRMGANSLCRAKGYFGEFFRRMRAKLGTAQAITATAHKIARILYHVLLTKEPYAETVFHRCDEQAQRRAEMRLRKQAAQLGFQLLPIQETGE

SEQ ID NO: 416666 - protein, 455 aa, unidentified
MIQRNRSVIPKPVKARAAALTITHPNAAGIDIGSAAHFVAVPPDRDDEPVREFPSFTVDLNAIADWLMACRVDTVAMESTGVYWIPLFELLESRGFTVLLVNARHVKNVSGRKSDVLDCQWLQQLMTYGLLSGAFRPTEQVCVLRSLWRQRAMLLRSQGRDVQHMQKALTQMNVQLANVIADVVGETGQKILRAIVAGERDGQVLGAMKNVRVKASVEEIAKSLQGSNWRAEHLFALKQALDAFDFIGTQLAECDTQIEQQMQTLQVHDGEPAKGKKRGRARNAPKFDLRTQLFKMCGVDLTRIDGIDVTTALAVISETGADMSRFPSDKHFASWMGLCPGTKITGGKVMSGKTKRCANRAAQALRLAAAALRTSQSALGAYFRRMCARMDKPKAVAAAAHKLARLIYTMLTKGEEYTDQGQAYYEERYRERVLRQLSQRASKLGMQLVAMPQTA

SEQ ID NO: 416667 - protein, 389 aa, unidentified
MKETIYIGIDIAKYKHDFCIISSTGEVIVQNNSFENNKKGFQLFFNYLKPYNKADVQILFESTAHYSMNLELELIDQGYSFMKMNGLIIKQFFKAQTLRKTKTDKADAFALTQYLMANTYKPNSNRLYHIYSLKSLCRTRDRLVRERSKFKIYITNELDKSFPEIKKFFDNKISITLLYILEKYKNKNKIALMKDYDSIRKVSAANFSFPRFLLLKQLAKESIGHPTETSDFLIQSYIKSIYCLNEQIDNIEKQIIGSVRKLDTHILSIPGIAEISAGSIIAEFGDIKNFESPEKMLAFAGLEPSIRQSGTLSTEGHMVKHGSGYLRNTIIRVVNSLVMHDQVFNDYYNKKRDEGKHHLVAQSHVAKKLIRIIYTLETKDIDYDINFVK

SEQ ID NO: 416668 - protein, 343 aa, unidentified
MSTTIAVDVAKAVFEVALSDRPGRIVKRSRLSRSQFARLLATHPPATLLMEACGTAHFWGRQAAASGHRVVLLPPHAVRPYVPRNKTDRADATALLEAVRNEAIQPVPVKSIAQQTLTALHRLRSAWLATRTARLNTLRGVLREFGVTIPVGARFVLPRLTALLAADDALPPALHPALLAAAAEIRDLDTRIRGVEQQLAALAATTPGVTPLQTIPGIGLLTATALVAFVGDAHRFPSGRHFASYLGLTPREHSSGLRRRLGAISKRGDPYLRMLLVHGARAVLWHAKNAPTHGRLRAWALALERHRGHNKAAVALANKLARCAWAVWTTNRAFHDAPAPAAA

SEQ ID NO: 416669 - protein, 465 aa, unidentified
MAARKQKRMSAQVVEDEDYQLRYEVAAGIDVAKDSAVVCVRMPPAKGRKHRTSHLQAVPATVPAITELAAELKALGVQMVSMEATSEYWRIWFAVLEEAGLAVQLVSSSQARNLPGRPKTDREDARWIARLTEMGMLRSSFVPSPEIRALRVYTRHIWDLTADRTRYWQRLEKLLEDALCKLTSVISRLAGHQTARAVIEAMIDGERDPRVLAALGQGKMRNEKLPALAEALSGMRFGPQHAHAAASLLRSIDLLDAELRDLQERVAEHLAAIPGSWGVDAGGVTGPGAGRAADAAALPAAERLDEIPGLGREAAMALIAEIGLDMSRFPTPQALVSWAGLTPTARQSGPRKGRGKKGHGNTYAKRIAVLAAYAAANTDTFLGERFRRLSSRPGGGGRKKAGCAVGRSILIIVWHLLNDPAARYRDLGSDWHARHTDRSRKARNAKRQLEALGYDVIITLREDAA

SEQ ID NO: 416670 - protein, 391 aa, unidentified
MIYIGIDVAKDKHDCFITNSDSEVLFKAFTIFNNLDGFNDLYQKIESVMDDVTKVKVGLEATGHYSYNLLGYLIDKGLPTYVINPLHTNLYRKSLSLRQTKTDKVDARTIASMLMSDVNLKSYSDTSYHNEELKSLTRYRFDKVKERAKLKTSVSRLVCILFPELEKLVPTLHMASVYALLSEFPSAKHVATAHLTRLTNLLSKSSKGRYGKDTAITFRDSARASIGSNMPAKSLELKHTIKLIQELDSEIDEIENEIKIIMDETNSPILSIPGINYRMGAMIIAEIGDFNRFDSPDKILAYAGFSPSTYQSGQLDGAYAHMEKRGSRYLRYALYNATKYVCHWDPTFAAYLAKKRAEGKHYNVAISHAVKKLVRVIYHLEKTKQQYIKAA

SEQ ID NO: 416671 - protein, 428 aa, unidentified
MNERDDSRIKEYRQIRKEVRGSNEYLIIGIDVAKEKHNAFFGTATGEALFKRLVFENNIEGFTKLHDRTEALKIQHHLSKVLYGLEPTANYHKPLAEYLIKRGDNVVLVSGVAVDRNRESLDGRWDKHDMKDSANVADLISQGKFQYYDYPSIELRELRNLLSLKRRLKKQEHGVKVRIRNHLLAQYFPEIDRFIGKGSSEGLSIVKWCLNPSVISGMEYGEFVQLVAPRVKTIGQSNRIKAIWRLSKDSIGCEAGQALGFEAKLMVEDLQQIRASIKKVDEHIEGICLGFPEYSHLLSIPGFGPDVSSKVIAAIGDPFRFDNGSQVLKLAGLDLSASRSGKTSDSAVPVISKKGKATLRYAIYQAAFIASTSNRYFIIYYTNKLRGREREKGIKTKMKVKLAAKMLIIAWTIMKNKEYFNPKYLNIG

SEQ ID NO: 416672 - protein, 352 aa, unidentified
MTLTTMPRRITAGVDTHLDVHVAAALDERGGLLGVDSFDTTPEGYRLLLGWLRGFGEVELAGVEGTGSYGAGLTRYLQSERVRVVEVDRPNRQRRRRRGKSDPQDAITAARAAQSGDACGEAKTRDGNVEAMRVLRVARSSARKSRTQTLNQMRSLISTAPDDIRAELRHLNVYRLLERAAAYRPGTRRDLNGLTKLTLRMLARRAQALEAEVAELDAILEPLVADTAPELLARLGIGVESASALLVAAGDNPERLRNEGTFAHLCGVAPVDASSGKHERHRLNRGGDRQANSALWRIVVTRMVYDPRTTAYLERRIKEGLTKKEAFRCLKRYIAREVYNHLPRQQLALDSP

SEQ ID NO: 416673 - protein, 315 aa, unidentified
MRDMPCFVGIDVATAQLDIALRPSGERWAVPNEASGVMTLVDRVQARHPTLMVLEATGGLERAVTSAWATAGRPVVVVHPRQVRDVARATGQLATTDALDARALAHCADVIRPTPRPRPDAQTQELRALLGRRQPLIGMRTAAQNRLAGTNARLTKDIAAHMTWLNAAIATLDDDLETILRASPLWRENDDLLQSAKGIGPVCARTLLLELPALGTLTRQQIAALVGVAPLHCDSGTLRGRRMIWGGRAHVRTVLYMGTLVATRFNPQIKVFYERLLAAGKVKKVALTACMHKLLTILNAMLKHRTPWQPQEVQS

SEQ ID NO: 416674 - protein, 344 aa, unidentified
MEYYAGIDVSLEASSVCVVDASGKIVREAKVASDPQALALFFGELGNELTRIGIEACPLSQWLHAGLSAAGFVVVLLEVRHVKAAISAMAVKTDRNDARGIAQLLRMGWYRPVHCKSQPSQDVRALLTARKQLLIKAIDVELCLRGLLRGYGLKMGQTTDVRFSARVRELAAGHPVLEQLSEAMLRARDVLRKEIAALHRQLLAIARTDGICRHLMTVPGVGALTALTFKTAVDDPTRFTSSKRLGAHFGLTPRKYQSGTVDITGSITKAGDAMVRSALYEAAHSMLTRVKSFSSLRRWAMAVAKRRGLRRATVALARKLAIVMHRMWMNGTDFRFGKEEAAAA

SEQ ID NO: 416675 - protein, 343 aa, unidentified
MNITTVGIDLAKNVFQVHGVDERGQVLLRKAVKRSELAQMFANLPSCLIGMEACGSAHYWARRLMEYGHTVKLMAPQFVKPYVKTNKNDASDAEAICEAVARPNMRFVPVKSVEQQAVLAVHRARQGFVVERTAQANQIRGLLYEMGIVIPKGIRHLDQHLPRILEDAENGLPEVSRSLFARLLGHFRELGLQVKELESQIKAWHRQSEASGRLARIPGIGELTASALVASVGDAKAFKNGRQLAAWLGLVPRQNSSGGKERLLGISKRGDTYLRTLLIHGARAVLFHRMRQPQHQDSWLMRLRARRNPNVAAVALANKNARMVWALLAHQCEYCAQRCAAAA

SEQ ID NO: 416676 - protein, 417 aa, unidentified
MFKIFRKNCCGLDVHKTWIYACIGITDERGITKYHQARFSSFSRGLHELAAWLASHSCHDVCMESSGKYWIPVFNVLEHSCFVTLAHPKYTKPQKGNKTDRKDAKWICDLFMCDMIKPSFIPPADIRHLRDLMRYRSKLTNMITGEKNRALNCLTASNLKLDDVFSDVFGKSARAITEHILAHPGESFDVSPFIHHRCKTPVEEIQAAVDGAICAEQAVKLRACLSHIDEIELLRSQIEDQISILAEPYSAALDLIRTVPGFDKNPFTAIVVLSEIGADMSVFPTAKHLVSWAGCCPRNDQSAKHVKSTRISRAGSYLKPLLVQVANALITSKDHPEFGIRYRRIKANRGHKKAIIAVAKMLLTAIWNVLAKCEPYSPHGYLSIDRPSVPSKTLTQSQALDLLRKRGYIISDIPDSA

SEQ ID NO: 416677 - protein, 323 aa, unidentified
MNLLALGIDIAKLKFNVCLIREDGRLRHKAFANTAAGFSQLSAWLTANNVPQVHACLEATGTYGEALATYLADSGHRVSVVNPAAIKSYAGCQLSRTKTDKLDGELIARFCLTQQPPLWTPLAPEIRTLQALVRRLDSLQEMHTMEVNRLSSGVSVPAVETSIQSLIKSLEGEIKRTEKLIKEHINSHPTLKSDRDLLLSIPGIGAATTARLLAEINFHHHDTARSVAAFTGLVPRLRQSGTSVRGRARLSKVGSPRIRHALYFPAVTAIRCNPQIKAWAKALRERGKCEMQIIGAVMRKLIHLAYGVLKSGRPYDPLYAQNA

SEQ ID NO: 416678 - protein, 373 aa, unidentified
MPKYSTAFGMDVHLRSTTVCALDADTGEAVTRRFPGNPWGEIAGWMDGFPGPSLAAYESGYLGFAPQRELAGLGVECVVAAVSKIPRSAADSASKNDRNDAARMAKAILAHDISPVWVPSPEVEGIRDLAGAYDGATARLATAKQRLLAFLARRGFVYGGTTPAGNPRKYWTYDFLRWLDKVRPEDDGGVRALAALRNEVEAAAEARADLLSEYRAAVDASPIAAEVAALQSIKGCAFALAAAFSAEVGDFTRFRSGRQVTAYFGLAPSQRSSGGSVRLGGISGAGNALVRKLAVEGSWCYAAARHQPKLMPRDTGVPLEIRVHGRKGSERLLRRREEMLARGMPAAKANAATAAELVRWLWALGMMCREGAE

SEQ ID NO: 416679 - protein, 457 aa, unidentified
MTRRKHSRPARDIAPVHPHAAAVDIGATLHVAAVRPGCDPEPVRTFGTFTTDLHRLADWFEQCGVETVAMESTGVYWIPLYEILDQRGFEVVIVNARDAKNVPGRKTDVSDAAWLQRLHEYGLLRASFRPKGEIATLRSYLRQRERLLDQAAAHIQHMQKALTEMNLQLHHVVADVTGVTGLRILRALVAGERDPDTLAAYSDPRCKAPAETLRAALVGNDREEHVFALAQALELYEIYQAKVAACDQQIEAVLERLKAANPPPAATLPPARPRRRQANEPGFAVREALHAILGADPTQIDGIGPSLALTLVGECGTDLSAWPSAKHFTSWLSLAPHNKISGGKVLSARTRRSGSRAAALLRLAAVAVGRTATALGAFYRRLAARVGKAKAVTATARKIGVLFYNMLRHGMDYADPGASAYEARYRQRVLSNLRRRAKSLGYVLQRADPASAAIAVS

SEQ ID NO: 416680 - protein, 352 aa, unidentified
MGDMSWIRSITVQTPNTMKVQCVGVDIAKNDFKVAFATKGEDNKLSCTTAKKFDNAKTGFNQLVRWATSEMDKNAPLVFLMEATGVYHEKLAHHLHRAGKQVHVVLPNKFKHFAASLNSKSKTDAIDAKLLARFGVEREHRPWNPAELVIKRMRDFSRYRVQLQEQKTAITNILHSKDYAHGVPADIKKSSKKVIAVLEKEIAILSKEMEKVVKSDPEIEAKVNKLRTIPGCGITTVAAIVAETNGFKEFKSAKQLTSYAGYDIVHNESGTSVLSKTRISKKGNRYMRHHMHMPALSASKHIPEFKALKERIKAKTGIPMKAQVAVQRKLLILMYTLWKNDLVYEKDYHQKR

SEQ ID NO: 416681 - protein, 407 aa, unidentified
MEVIIERACGMDIHKDSITACIMTPEGKVIQTFSTKTVFLLKLIDWIKEHGCTHVAMESTGVFWKPIVNILEAESIEFLVVNAQHIKAVPGRKTDVKDAEWIAKLLRHGLLKASFIPDRTQRELRELVRYRRSMIEERARQHNRIQKVLEGANIKLGSVVSDVMGVSSLDMLRAIAEGENDPEKLAGFARRSMKKKKAELELALRGYIQPHQRLMIKTILTHIDFLTAQIELLNQEVTCRLSTHQKDIERLDSIPGIATRMAEQILAEIGTNVEKQFPSAAHLCSWAGLVPGHNESAGKRKSSAMKKGNKYLKSALIEAAHSVRGSRTYLGALYRRTAARKGKKRAGISVAHAILRIAYYLLTRKEMYIDLGEDYFDKQKEQSIIRYSVRRLESLGYDVTITETGAS

SEQ ID NO: 416682 - protein, 358 aa, unidentified
MRIIGVDLHTRQQTVAMLDTETGELIEKTLKHDGDEVRKFYSALPGQVLVGIEATGSMHWFLELLEELGIQRQVGHPAKIRAAEPRKQKHDRRDATLLLKLQVENRFPAIWMPSTELRDLRTLLMHRHQWVRMRTRVQNALQAIALGHGLRRGKTLWSQLGQHTMESLPLAPYAAHRRTELLALYGKLQAQIDELDERVMDHAQQRPGAKLLMTHPGVGPVTALATDVFLGDPARFENGKALVSYVGMIPSEYSSAGRQRLGGLSKQGNPLLRFLWCEAAVHAVRRDPELQRFYRRKLQQKGLGKARVAAARKLGIRLWIMLRDQIDYQEFCRRGQIRQKSGGACAGMPEVGHSPAIQ

SEQ ID NO: 416683 - protein, 335 aa, unidentified
MQLYAGLDLHSTNTYIGILDQEFNRIFKKRVSNNLDLILQTLKPFGSQLKGIVVESTYNWYWLIDGLMDNGFQCLHLANPSAIKQYEGLKHADDQHDAFFLAHLLILGILPQGYIYPKKDRPVRDLARKRMFLVQHKTAHILSLQSLITRCCAKKISSNEMRHLTLDDLQHLLEEEHLVLSAQANLDNIRFLTRQIKQIEKTINKKIKLNEAFQNLLTVPGIGNILAMTIMLEVGDISRFAKVGNFASYCRCVSSQRLSDGKSKGHGNRKNGNRYLSWAFVEAAHLTRRHCQQFRRYYNRKVAQANTSLATKALSNKLARICYYMMRDNVPFMAK

SEQ ID NO: 416684 - protein, 349 aa, unidentified
MAQPPRERTIPAGDVARLQQEIARAKQRFGLLADAHIMSCYEAGRDGFWLHRYLVAQGITNHVIDSASIEVNRRQRRAKTDRLDVRKLLTMLLRHSAGEKKVWSVVRVPSVDEEDRRQLHRELTTAKQDRTRVINRIKGLLAGHGVQLTLQGDVDAQLDQVQQWDGASLPSALRTRLKRAWQQVGFLTAHIQTLEAERRVLLRRREEPVIAQVRQLFTLRGIGINSAWLYVMEFFAWRDFQTPKQVGALAGLTPTPYQSGQARRELGIAKAGNRHIRAMAIEIAWAWRRFQPDSALSQWYERRFGAGSARLRKLGIVALARKLLIALWRFVKTGVLPEGAVLKPAAPSR

SEQ ID NO: 416685 - protein, 367 aa, unidentified
MKKVSTAATKQSRNISRQKLTIGLDLGDGNSWYCVLDEAGRIQLEQRVRTTAKALQEVFGAMPRSRIALEIGTHSPWISRLLSELGHEVIVANARKVRLIGESRKKDDRLDAQTLARLARIDPQLLYPVKHRSVQAQADLMMIRARAGLVRARTALVNTARGLAKSYGERLRGCNVRDMDPEKAEGLSPELQRALEPLLATIEELSERIVEYNDRIEALAQTSYPQVELLKQIKGVGTLIALTFLLTLEDPHRFHKSRDVGGYLGLQPGRRKSGESEPQLHISKEGDPYLRTLLVQGAQHILGPFGIDCDLRRWGLKLAERGGRNGKKRAIIATARKLAVLLHHLWVSGEVYEPLHNSNRVTVAAAA

SEQ ID NO: 416686 - protein, 298 aa, unidentified
MESLSDANTEVGIRAIVKRLKKLAPTLIVLEATAGMEADVAAAIAAAGMAVAVVNPRQVRSFARAIGTLAKTDSIDAAVLSHFAEAVKPPVRALPTAEARELTDLVSRRRQVVDMIVAEKSRLAGVCGIAHADIQAHITWLEKRQKRLDADLQSAVEKSPIWQAKSDLFQSAPGVGPVTSLTFLAALPELGNVNSKQIANLVGVAPINRDSGTMRGKRRISGGRAQVRAVLYMATLVAVRHNPVLRTFYERLLAAGKTHKVALTACMRKLLVILNAMAKSQKPWSPETAPSLAAAATA

SEQ ID NO: 416687 - protein, 375 aa, unidentified
MLATTHPMLSVREAVLFVAFELGKKDWKLAMTSGFGVTPWLRSVASGDWRAVDRAIAQGRARFGLAGEAAVVSCYEAGRDGFWIHRALVARGIRNRVVDSASIEISRRARRAKTDRIDALKLVQMLVRAWHGERQVWSEVRVPTVVDEAARQVSRERTALTREQTRLINQMRGWLATWGSAVPRQRPQGWWTTIRDWAGAALPATVQARLARADARLALVREQIAALEAQQQTAVSQSTPATALHRLVQLKGVATTSASVLLDEGLIWRAFRNRRQLGGILGFAPTPYNSGESERDQGISRAGNNRLQSISIQLAWSWVHWQPQSALTRWYRDRFGTGKRARRIGIVAVARKLVIALWRYATSGVVPSGAIMKAV

SEQ ID NO: 416688 - protein, 308 aa, unidentified
MTQYKRIGIDTSKAVFTLHGIDQQDRPVLRINLRRAQMISFFKKLPPTVIALEACGGSHYWARELTALGHTVRLIPPQYVKPYVKRGKNDRNDAEAICEAAGRPGMHFVPVKSVTQQAQGMVLKVRETLIGQRTALINTVRGHAAEFGIIAGKGAGQIEPLLSAIEQEAAIPPGAREMFAVLGRQIDEIDVRIKDVDTKLNTAHKASEVSQRLVTIPGVGPVTALTLAVEIDPAMFESGRHLAAWAGLTPKERSTGGKQRMGGISRAGNERLRVLFVFWCHLGDQCRQEAGQPTDDGLVAGTAAPQAA

SEQ ID NO: 416689 - protein, 354 aa, unidentified
MAVASIVEAHDPLRVIVGVDTHKHSHVGHAKDELGRDLGHLEVPTTGRGYATLLAWARDLGEVAAFGVEGTSSYGIGLARYLQSEGHLVLEVIRPGRQDRRFRGKSDTIDAEAAAAAVLSGKARNLPRASADKVEMIRALRIARGSATKAKTQAINAIKALVVMAPEEVREQLRELPSAKLVGTCARFRASRIVDPTSAVKASLKSLAVRHRALDVEIRELEDQLDELTSATDPLLRTRFGVGPDTAAALLLAAGDNPARLRSEASFSMLCGSSPVPASSGQTKRHRLNRGGDRQANSALHRIVMVRLRWHETTQAYMRKRLAEGKSKREVVRCLKRYVAREIYGVLMVRSERP

SEQ ID NO: 416690 - protein, 343 aa, unidentified
MQVVRIGLDLAKYVFEVHGVDGQGNVVIRKTLRRGSMSTFFANLPPCLVGMEASNGAHYWARVLTELGHKVRLISPQFVAPYVKSNKNDRNDAEAICEAVGRPTMRFVPPKSPEQLAIQALHRIRQRLVQSRTRLVNQIRGILAEQGIVIARDIWRLRRALAEITGHATDDLNKLVRVLILETQAELMELDRRIASCDRRIRELYRTSELCQRLGEIEGIGPVTATALVAAVGDRSCFKNGRQFAAWLGLVPKQRSSGGRHRLFGISKRGDRYLRTLMIHGARAALGKAGGKQDPRSRWLASLRQRRHANVAAVALANKNARIVWAMLAGNVSYEPKRSVQAA

SEQ ID NO: 416691 - protein, 398 aa, unidentified
MLSIGIDVSKGKSTVCGMKPGGEIVYTPFEVQHTREGMSELVSLLRGSGEEVRVVLESTGSYHCPVVAALLENGIFVSVVNSLRMKRFCSQSIRRVKTDQIDAMQIALYGLAYWQELQPTRLPENTYRELQLLARQYYQMTSMLIKAKVDFNALCDQVLPGMQELMSDHAGRHKLSDFVLRYRHTTHILEMGETRFRKDYCKWAEKKGYRNHERMAALIFATAQNGIPVLPDAPSTQIVITEAIRVLHTVEASRDAILTQMQALAKTLPEYSLVREMPCIGDTLAPRLIAEIGDVRRFHSKRALIAYAGIDAPPYQSGKFSANNRHISKRGNRYLRKTGYEVMQSYVMHKPANDPIFTFIEKKRSEGKSGKLAMVAGLNKFLRVYYGKVTELYRSLPQ

SEQ ID NO: 416692 - protein, 363 aa, unidentified
MDDGSKGQPKMTAGLDLGDKYSHLCLIDTESGEIMEESRLRTSPEAFRRRFSSEQQPLRIAIEAGTHSPWVSRVLEEGCGHEVLVANPRKTRLIYTNKRKTDEIDAENLARLARLDPKLLYPLKHRGEDSQAHLAIIRSREALVRCRTQLVNHVRGAVKSFGARLPKCPARSFHNKAPSHIPEPLWPALGPILEQIGSLTERIHQYDRQLEMICQEHYYPETKLLRQVEGVGALTALTFVLTLEDPSRFVKSRTVGAYLGLVPARDQSGDRDPQKRISKEGDEMLRKLLVGSAHYILGPFGSDSDLRRHGQKIASRGAKNAKKRAAVAVARKLSVLLHRLWITGELYDPLYNTHRRIEQERAA

SEQ ID NO: 416693 - protein, 358 aa, unidentified
MLAKSNAGSRPKIKETGMEYCGIDLHAEYSQICILDEGGEVMETSRVRTSRKALERFFSRDRMRVVLEAGGSSPWVSRLLDSVGHEVIVCSPRRVRLIAESKLKNDKVDAEVLARLVRLDPEFLKPIQHRSEEAQLLRGNLKVRSAMVEARTKWINTVRGLLRSFGYKVSGKVPHTFAERVDQMELPDDLRTVIEPLLEQLDLLSGEITRRNEHLGEMVEELPEVDHLRGVPGVGPVVATYFVLTIDDPTRFSNSRDVAPFFGLRPSMRESASVRHFGRITKEGDPEMRRLLVQAAHACMRTKADSELKRWALALAERKGKGKAAVALARKLAVLMHHLWVTGEVYQAFPNKETSQAA

SEQ ID NO: 416694 - protein, 349 aa, unidentified
MTEQRLSYIGERVYVGVDVHKETYTVTCVCQRQIVKTATVQADPASFAVSLLRWFPGATLYSAYEAGFSAFVLHRALTKTGITNIVVNPASIAVAANDKVKTDRRDAKKLAIDLADGRLRGIYVPTEAEELARLLPRTRAQIVEHRATIARQIKAKLHQFGLITPASRRLISSRYLREIAAWSLPPELNVRLTLLAEQWRFATRQLIEMRRLLREQAKAQEEIEQVYRSVPGIGEVVARTLATELGDMTRFANERALFSYTGLTPSEYSSGASVRRGHISRQGSSRVRHLLVETAWRALPRDRVLKEIFDRIAATRGKKRAIVAIARRLTGRIRACFRQGTTYAIGTYA

SEQ ID NO: 416695 - protein, 342 aa, unidentified
MEHTTIAVDLAKSVFQVAVSHQPGRVDEERRLSRDRFLAFFAQRPPATVLLEACGSAHYWARQLQPFGHAVRLLAPHDVRPYVRRNKTDRTDAKGLLEANRNEEIHPIPVKSIAHQAIASLHCLRSTWLATRTARLNTIRGLLREFGIFIPVGAHHVVPAVRTLLAEPTTVPMLLHTTLAAACDEIDVLEANMRAVERQLAALAADMADVMRLQTVPGVGLITATALVALVTDIRRFPSGRHFASFLGLTPKEDSTGPRRRLGAISKQGDVYLRMLMTHGARSLLWHAKAAKQPTSLQRWAVETEQRRGHNVAAVAVANKLARIVWAVWAHERPFATDDRAA

SEQ ID NO: 416696 - protein, 407 aa, unidentified
MSKTCGIDWSERHHDVAIVDHQARVVGRGRVSDDAAGFTRLLELLAEHRDGEDGPVEIAIESDKGLFVAGLVAAGFTVFAINPRAVARYRERYGQAGGKSDPGDAGVLANILRTDRHVHRPLPADSDLVRAVKACARQHQEAVWARQQAMSRLRSLLRDYYPQALQAFPNLAHRAAANVLRAVPTPQAAQRLTPARVVALLKKAGRRNDPGLAEAISTTLRAPALRQPAPVEHALGVAAVGLIEVITAMSDAIAALEAELATVFDEHQQAAVITSQPGLGPVLGARVLGELGDDPRRFTDTAGLRSFAGTAPITRASGRSLIVTSRRICNRRLGDACHWWAFAAITKSPGARAHYDRRRAAGDTHNAALRNLANKLLAKLWHCLQTGTLYNEATAWPASPTPKQAAA

SEQ ID NO: 416697 - protein, 319 aa, unidentified
MQTVPVVRTFIGVDVSKSTLVSCVHEGGARRSVANQRSAISAWLRGLPAGSAIGVEATSTYHEMLADLAHAQGLLVYVLNPKDVHSYAKGLGMRAKTDRVDAALIARYIAHEHSQLHRYCPPSAEQRQLQRLLNRRAKLSGTRSTVQQSLCGLTGLSIPLRQLLKRFDAIIALIDARIKVLLNACPQRQAANARLRTIQGVGPVVAPALLNPLQRFGFASADSFVAYIGYDLRADDSGQRIGRRRLSKHGPSELRRLLYTAAMAAVKTSAWKPIYQRYLDRGLSRTAALVIIARKIARTAWSLYTHNTTFDPTRITHQA

SEQ ID NO: 416698 - protein, 421 aa, unidentified
MDKNDDSRLEEFRQLKRDIRGSTQHLVVGMDIAKERHHAFFGTPAGKVLLHRLVFDNTRDGFEKLCFQADILKTQHGLAHVVFGMEPSSDYHKPLGEYLIEHGHGVVLVAGTAVKKNRELLDNRWDKHDTKDAANVADLVTQGKCLFYEFPSLSLRELRSLLSLKRRLKKSEQGYKVRIRNHLIAQYFPEMDAYFNYAEGPDIVRWCLNPERLAGLHLQEFARMVSLGNAHQMSRLEEIHTKAAVSIGCAAHPSVAFEASLLLDGLKSLHLMILETDRRIAEVCKKFPEYPCLLSIPGFGPDISAKVLGALGNPHRFENHRQVLKMAGLDLSADRSGKRTDVTPVISKKGKADLRYGLYQAALIASTRNTQFMTYFTNKLKGREREKGIGTKMRVKLSAKMLVIAWTLMKKKEMFDPGCLG

SEQ ID NO: 416699 - protein, 310 aa, unidentified
MQNICGVDVSKDWLDAFVGPNSFERFANTPDGISQLANFARTGAAALVVMESSGGVERMAFQMLWAEDIPCALVNPRGVRDFAKAMGRLEKTDRIDAQVIAHFAATRKIKPTPLPSAQQQHLAALSARMRQVTSDLVVQKQRLHSVQSDVARQGIVEIIGVLKRQAKQLAGAIAALIANDPVWAALDAVFRSVKGVADRTVATLIADLPEIGTLSNKQIAKLVGLAPLADDSGKRQGKRHTRGGRSSVRSLLFLIGDIARKYDQSMTDFRDRLLAAGKPKMVVRIALAHKLLVRLNAKARETRAAIAQQA

SEQ ID NO: 416700 - protein, 382 aa, unidentified
MKKDSIAKLQVTKSQIRRMAAKQRLTVGLDLGDRSSRYCILNEAGEKASEDQLPTTKAGLDGVFGKMAPCRIALEVGTHSPWVSRQLAAMGHEVIVANPRKVLLITQSVKKNDRMDAEQLARLARVDPQLLAPIRHRGVEAQGDLAVIRARAELVDCRTALINTARGLAKPMGERLKSCDADSVKESLAEGLSEATQNAIRPLLKSVEEITKQIGAYDKKIQEIGKRYPETKVLKQVHGVGTLIALTFILTLEDAERFARSREVGPYLGLTRKLRDSGESQPELGISKAGDMLMRRLLVQAAHCILRDGAPESDLKQWGMTKVQAGSGKKGSKRRKKKAAVAVARKLAVLLHKLWVTGEVYDPQYNRKAVEAAKGKEKTAAA

SEQ ID NO: 416701 - protein, 320 aa, unidentified
MSETAIVVGIDVAKAHVDVAIVGAPVAAARFANDDQGHVALLEVLSPLMPALVVMEATGGYEAPLACALQAAGLAVAVVNPRQARDFARSFGQLAKTDRIDAAGLAEFARALLGRADLNRYLKPIETAEQQDLVALVNRRRQLLSMLGMEEQRLAVARPAVRRSIQRLVKAIRQQLEEVDGSMERHVATHFADLAALLRSAAGIGPVTSATLIADLPELGHLTRRQVSALVGVAPFACDSGLTRGRRRIRGGRFELRRTLYMATLAAITHNPLIRAHYQRLVTAGKLRKVALVACMRKMISILNAMARTRTPFNTDFKNA

SEQ ID NO: 416702 - protein, 311 aa, unidentified
MLYAAIDIHKHAFQAAVLDSESGEVVEERFAADRESLARWAEPWWGRVAAVAIEATTGWRWVWRELVECGFEVRLAEPVQTRALLGRRRSAKTDRLDARWLARLLAKEMLPESWVPPAQIQELRDRTRLRKALAEDRRRWGQRLHAYLLHEGWPCSRSNLLRPPGLRWAAALQLSAHARLQVDSLLSVMAALQEQLDTVDAELRRFARADERCRALQSIYGVGPILACHLLAEIGEASRFQRAEQITRLAGLDPVVDESGETRRRGHLAKAGSPHLRWALVEAAVHAHRATAPDLELYRATVSGATRPWRD

SEQ ID NO: 416703 - protein, 342 aa, unidentified
MEAATIIGLDLAKRSFQTHGALADGSVAFRKKLTREKVLGFLAEQPRCVVAMEACGSAHHWGRAIRDAGHEVRLIPPAYVKPFVKRQKNDAADAEAIAEAASRPTMRFVAVKTAEQQARAMLFRTRDLLVRQRTQLINALRGQLSEHGVVAPQGPANVAILAQAIDDMTPSLPLLVVELARVYLDQIDGLSQKVAGLEKAIACEARRDATTRRLQTMPGVGPITAMAIETFAPPMEVFRRGRDFAAWLGLVPVQHSTGGKQVLGKTSKMGQRDIRRLLIIGAMVIVRWACRKGAQEGTWLHRMLGRKPRMLVAIALANKMARSIWAMLTKGEDYRGPVAATL

SEQ ID NO: 416704 - protein, 343 aa, unidentified
MTLHVLGIDLGKTVFHLVGLDSSGRVVIRKRCSRTQLLAFTTNLQVQLIGMEACSGSHFLGRALREQGHEVRLMPAQYVKPYVQTNKSDYLDAEAIAEAVQRPRMRFVPIKTEEQLDLQALHRVRERWVMRRTAVVNQVRSLLLERGLTLPKGRSHVDQQLPRILEDAESKLSGSFRVLLAQLQVELDQLTGRIEQMDAVIQQRAREDEACQRLTKIPGIGPVTATALIAAVGNGAAFRKGRDLAAWIGMVPRECSTGGKQKLLGISKRGNAYLRRLFVQGARSVLRQRHKQVPGLSIWLAQLLGRTHQNVVTVALANKMVRMAWAVLYKNEHYRAPVLAAAA

SEQ ID NO: 416705 - protein, 350 aa, unidentified
MLIIGCDYHPGVQQIAFMDTETGEFGERRLEHGDGEAEKFYRDLRQAGISVRVGMEATGHARWFERLLEELHFELWIGDPLEIRATRVRKQKTDRHDAQLLLKLLLEDRFPRIWVASWENRDLRQLLWHRHRLVQMRTRIMNQLQAVALNEGVRRKKRLWGQAGRAQLESFVLAPWASRRRQELLELLDRLNPSIRELNAAVEQEAARRPEVQRLMTHPGVGSLTALAFVLIVGTPQRFACGKQIASYVGLVPTEESSGGRRRLGHISKQGNSLLRFLLVEAAQATVRSDPDWRRKFLHLAMRRERRIAKVAMARKLAVRLYWMWRKEWDYEQVKRFGSHAGQLGNPLGV

SEQ ID NO: 416706 - protein, 340 aa, unidentified
MSLVLQSLLPFPDSCQGMSPHQQGRGTKMTEHCYGGIDVSKDRLDVMVLPDRKSFSVDNNAAGYSELVKRLRGLSIAAIGIEPSGGYERAVIRALLAADLSVRRINPNKLRQFGRARGVLAKNDRLDARLIAEYVAIMPTRVVQRDPATEQLAEVVTMRRQLCDEHVAVENQTAHLEDAMLRRLNKRRLARLAADILLLDRRMAQIVVSNANLTRRYELLTSMQGVGPTLAFTLVALLPELGQMSRKQIAALVGLAPYDFDSGRLKGHRCIYGGRLPVRNVLYMAALSACRYNPALKVFHHRLAATNKKPKVIIVAVMRKMITTLNAMLRDNVAWQPKSA

SEQ ID NO: 416707 - protein, 412 aa, unidentified
MAMEALVERCAGLDVHQASVVCCVLVGPPGCRPRKLLRTFGTTTHELGKLRAWLAEHGVTHVGMESTGIYWKPVYAALEGSFDLTVGNAHHIKNVPGRKTDVKDAEWIARLVRHGLIGKSFVPPPPIRDLRELVRFRRALVEARTAERNRLLKLLEGAGVKLAGVASDVFGVSGTAMLKALAEGAAEPAAMADLARGRMRRKLEALAAALDGQVREHHRFLIAVQLRRLEAIARDLGELDARIEAQLEPFRAQHRLLMQIPGVDRVVAAGIIAEVGVDMDVFATAQRLAAWAGVAPGNHESAGRRKGAATRKGNVFLKATLFAAAGAAVRTKGSYYRDKYHRLRARRGPVRALVAVAHKLLIAAFHMLRTGSPFRELGEDFLDRVSRKRSTTKLVRRLAALGYDVLLVPKAA

SEQ ID NO: 416708 - protein, 355 aa, unidentified
MNSEKYIGLDVHQATISVAVLDSTGKLVMESILETKAATILEFFAGLRGTLSVTFEEGTWAAWLHDLLKPHVAKLVVCNPRKNALLKDGNKSDRIDAHKLAELLYLNKLSSVYHGETGVRMLRELARSYLTIVKDLTRVMCRLKAVYRSWAIPCAGRDVYYTRHRAEWLGKLKEAGVRRRAERLYQQLDMLQYLRQQARRELLAESRKHAITVKLRQIPSLGPIRSALAVALIQTPHRFRTKRQLWAYSGLALETRTSAEYCYVKGGLRRSKKQISVRGLNKDHNHDLKGLFKGAATRASVLPGPFQDFYQRSLAKGIKPTMARLTLARKIAAITLTLWKKGENFDADKLKSQAA

SEQ ID NO: 416709 - protein, 359 aa, unidentified
MMVLGIDPHKKSHTAVAVEAATGELVGELTVKADRRGRERLLAWARTLAPERRFAVEDCRHVSGRLQRFLIERGEACVRVPPKLMAQSRRSARTRGKSDAIDAAAVARAAIAEPDLPEARLDGPERELRLLADHRADLVGERTRVQQRLRWHLHDLELALEVPPKALRRACWLARLEDELAARDGVQARIARELTARCRTLTCEIDALEREIEQLTTELAPELLALPGCGALTAACLLGETAGAERFASGARFAMHAGVAPLPASSGQTQRYRLNRRGNRQLNAALHRIAITQMRTHEPARAFMARKRAEGRSKREALRCLKRHLARTVWQTLRAAEARREAMLAATITSTQPALMLTS

SEQ ID NO: 416710 - protein, 398 aa, unidentified
MTESSDYESVQVFIGVDVGKDTHHAVAINRSGKRLFDKALPNDENKLRSLISDLKQHGQILLVVDQPATIGALPVAVARSEGVLVGYLPGLTMRRIADLHAGEAKTDARDAAIIAEAARTLPHALRTLKLADEQIAELSMLCGFDDDLAAQTTQASNRIRGLLTQIHPALERVLGPRLEHPAVLDLLQRYPSPEKLASLGEKKLAAQLCKLAPRLGKRLAADIAQALAEQTVVVPGTNAAAVVLPRLALQLITLRKQRDEVALEVEQRVLAHPLYPVLTSMPGVGVRTAARLLTEVACRAFASAAHLAAYAGLAPVTRRSGSSIRGEHPSRRGNKALKRALFLSAFAALREPLSRAYYTRKMSQGKRHNQALIALARRRCDVLFAMMRDGTFYTPQGS

SEQ ID NO: 416711 - protein, 317 aa, unidentified
MEVSLIFVGIDVSKAQLDVVIRPTGEKESFANDKVGIKALVKRLAKIEPSLIVLEATGGYERQVTRALVSAELSVYVVNPRQVRDFAKATGQLAKTDSIDAGVLAHFAEAVRPQMRPLPDVVTLELRALTTRRRQILEMIGAENNRLAMTSKAVRKRIDAHIRWLEQELDRANQDLDRSIEQSPMWKENEDLLRSVPSIGPVTSRTLLAELPELGALDRKQISALAGVAPFSRDSGTLKGRRSIWGGRAPVRSALYMAALVATRHNSVIREFYKRLTAKGKLFKVALVACMRKLLTILNSMIKHKTRWSETFLHSTT

SEQ ID NO: 416712 - protein, 399 aa, unidentified
MSRVFIGVDPHKLSATIEVVDGRETVLATGRFATDKAGYAAMRRHVAAFPERVWAVEGSNGAGRPLAQRLLADGEAVVDVPAKLSARARMFDTGHNRKTDPHDAHAVAVVAVRTTGLRVLSYDEQLEALRLLVDRRAELSRARIQCVNRVHRLLSELVPGQSKRNISTAQAKRILATVKPRDLAGKTRRRLAAEQIAELVVIEQKIKAVTRELKEMVAATGSTLMELPGVGPVVAARTLADTGDVARFTDRNRYASWTGTAPIEASSGEIVRHRLSRAGNRRMNHMIHIAATTQLRHDTEGRAYYRRKLAAGKTKAEAMRCLKRRISDALYRRLRADAAAHLNAGPGGHSGAALQSSAAGSHPHTGTSDQPQPGPAKETLPPPTTTRKTTRSRTLQPAP

SEQ ID NO: 416713 - protein, 323 aa, unidentified
MQGKDMPEPSAATRVYVGIDVCKAWLDVYVHPLGHAFRVSNDLVGLRVLKKRLVPPDVALIVMEATGKYHRHAQRTLHAAGFEVAIVNPLRSRLFAEALGALAKTDKIDARLLAIMGQSLEPRVLPPSSLALEELQEIVRARHTATAELTALTNRLSEIKSAFLKTELKRQAKSLTARIERLKAEIVKRIKSETALLRRYQILLSIPGIGPVAGATLLVELGELGQVSKKAIALLAGLAPLADESGNKKGVRRIRGGRALARLALYMPAVAAIRYDAGFKAFYQRLLTASKKPKQALTAVMRKLLVLANALIREDRLWEPVHA

SEQ ID NO: 416714 - protein, 366 aa, unidentified
MAQRAKETAMTEGKDIILVADYHAENIEFRWFNQATGEERTGRYATTQAGILQQIDQAAKELEPGGNLVWVMESTTGWARVKDLIGQRARFVLANVLQMPMPPKARRRKTDKIDTGRIMREYLHGSLPQSFQPELWWRRVRRLVDLRQDLVGRQTAIKNWIGSLLHHETWQNRKNLWSDCGLRRLRAMRLPAEERVLVDLKLAQLDHLVEQIGQVEAQMRQIYDAWPEAQWVDEVRGIGMVTAVSLLAHIGPIARFPTAEDLISYAGLAPGMWQSDGTCHHGRIGGGGTDSHLRYLLIEATTWLCQIPRYRPTYERVVKKRGKKIARIVVARLLLRGIYKMLTDKVRFNPMSRQTAKETAKAGCSK

SEQ ID NO: 416715 - protein, 370 aa, unidentified
MKEPITSFVGLDVHKDSIAVAVAEAGRQAPRFIGTVNPEMASLCKALRRIASAPRTLIVYEAGPCGYGLARYLGRQGYACEVVAPARIARNPIEQRIKTDRRDALLLARESRAGNLVPIVLPDQRDEAIRDLSRTREDVLAARLRARQQLKALLLRHGYAYRGKTSWTTAHERHLSTIRLSHPAQQIAFVEYRNAVKDSHERLERLTQALRDQAAQWRMQTLVRALMCLRGLDVIGATCLLAELGDLRRFAHPPALMAYLGLVPSEFSSGKTRHQGGITKCGNKHARRILIEAAWTYRGSARIGRQLQVRQQDQPAVLRDISWRAQLRLTKRFRHLRLERKLPQNKACVAIARELCGFVWAIAREVNLPR

SEQ ID NO: 416716 - protein, 322 aa, unidentified
MAMLSFGGIDVSKDRLDITVLPDEQCSSVSNDAAGWAELIEQLRGSSITAIGVEASGGYERGVVRALLAAGMSVRQINPFKLRQFAKASGILAKNDRLDARMIASFVAIMPTRPAQRQTPMIEQLAAMLTVRRQLSDHKVATENASRLLEDAMLQRLSRRRVARLTADIDLLDQRLVEIVTADPALAHRFRLLTSMPGVGAVLACTLIALLPELGQMSRKQVAALVGLAPYDFDSGKLKGRRCIWGGRARVRHVLYMAALSASNWNPALKAFHDRLEATGKKPKVVIVAVMRKMITTLNAMLRDGTAWVDRYSGRRSASTAR

SEQ ID NO: 416717 - protein, 344 aa, unidentified
MDHFAGLDVSVKETSVCIVDDTGRIVREVKVASEPDALLAVLTNPAYHFKRIGLEAGPLSQWLFSALAEADLPVVCVETRHMQAVLKAQINKTDRNDARGIAQMMRVGLYRPVHVKTLRSQKLRMLLTHRKLLQSKAIAFENDLRATLRNFGLKVGMVGTARFEARIKELVENLPDLAALVEPLLIVRRVLREQIVILHRRLLAVVRDDEVCRRLMTVPGVGPVVSLTYRATVDVPARFRKSKAVGAVFGLTCSKYQSGEIDRSGRISRCGDAMMRVMLYEAAQSMLRSKKWSWLKAWAMQIARRRGMKKAIVALARRLAVIMHRIWVDGTEFRWTREQAPAAA

SEQ ID NO: 416718 - protein, 443 aa, unidentified
MCGGSVNVFPSPIFFTGGIVLRIVYPICCGVDVHKRFFVATLITSEGIEATYKKRRFSTFNNEILRFKAWLLENNCRNVCMESTGKYWIPVSNLLEDSINVTIANPKWIQIVKGNKDDDKDSKWIGDMFRIGLVPGSFIPCKDIRILREYTRYRFKLVSCKSSEKNRYQNVFTVCNVALDAVVSDMFGKSASSITDYIVNSDTFDPEYCVSLLQRSLKKKADEVLESIDGFQMTDSQKTRAKMVKAHYDYLLEHIQRIDSVIDELVKPYESAINLLCTNPGIRRHSAITIISEIGTDMSQFGSSKRLCCWASLTPRNNKSAGKKKSVRIMRAGAYLKPALVEVAHAAVKDKKNPYYAIKYERILKRRGKKRAIIAIARMILTSIFHMLSTGEVWNPSDLNQIDMPPELKEKEVQKSLRRAAKLLVAHGLIASDLIQFAELAAA

SEQ ID NO: 416719 - protein, 363 aa, unidentified
MTHSMRTCGLDLGDKHSVVCVLDAVSGEIIEESKVRSTETAFQQYFERAEVMHVALETGTHSPWASRVIAACGHKVTVANANRVRLIHASKRKNDRLDAEKLARLARYDARLLGPIEHRSGDHQADLSVIRGRDALVRSRTLLINSTRGVVKSYGQRLPTCNSSKFHTAVADSVPLELAPVILPTLTVIASLNEQIEVVTRRIKELCETTYPETEVLMQVHGVAHITALAFVLVLDNHERFKDSRAVGAFLGLTPGQKQSGQMNIRKRISKEGDELLRRLLVQCAHKVLARNAPDTDLKRYGEKIVRQGGKAAKRRAVIAVARKLAVLLHRLWATGEVYEPLKNSKTQKAVVATAEELTMATA

SEQ ID NO: 416720 - protein, 413 aa, unidentified
MTKVGQTLMKTKFPNHLIGCFDIGKSKQYAYAEAPNGKYLKVFNFNNDLAGFQDCYNRLESFRKEENLEGILMGAESTGSYGEPLSAWLQTKGIKMVGVNSKHVRRYKEVIDNSPLKSDKKDPIVGTRIVQQGAYYDPIPSKGLAGELREQSKHRKSLKIKINRVTNQLESQIVRVFPEFINVMKSITLQTSLNLLAESPLPADIIALGERKLTKRIEKLSRKQLGKERAKELLKAAKESIGITECSVSISLAIKDLIDEYKFLDTKLKRIELEIKTLLVESSEAQIIMSHPNIGAITAAEIIGETGGLNNYSNPEKLMKLSGLNLFELSSGIHKGQRRITKRGRSDLRQTLYLAGLRMCRKGSPYRAQYERYIKTMKKPQAVVAIAKKLLRVLHALVKKNEVYNASFAVTKK

SEQ ID NO: 416721 - protein, 330 aa, unidentified
MKVAGIDVSSQTVTLVISRDDRMGKPREIKNTPQGHATLSNRLRKAKVSRVCLEATGQYHFDLALALDNAGLPLMVVNPKAAKRFAEAMQTRTKTDAVDAAVLAQFALRMPFEPWQRPDDLALTIRACARRIAALNKLRTQTKNQLHAAQSTATTPDFLIAELQQSIDHFEAHIEQLRRQALDLIAADETLQQSFKLLVSTTGIAAASAIQLLGELLVLPEDLRAKQWVAMAGLDPREHSSGSSVKKKPGLSKAGNRYLRIALYMPALSAAHHDPNVRAYYHHLIETRGLKKLQALCAVMRKLLLAIHAMFKTNSPFDGRRFFTPSKTTA

SEQ ID NO: 416722 - protein, 439 aa, unidentified
MPTPCLSVLDPTAAAIDVGSEQLHVSIAGGPPKVFGTTTGELYALRDHLLVQGVHSVAMEATGIYWLCPYEVLEKAGLEVVVVNGKYVKNLPGRKTDMSDCQWQATLHAHGLLKPGFVPPEHIRRLQDYLRLRSDHIVMAGSHEQHMQKALERMNLKIHDVISDLTGVSGLKMVEAILAGQRNPVALVALCDPQIQKHKTKELRAALEGTWKEEHLFALRQAYELWQSYQQKIAECDQAIEAVLQVVAGPEDPKNPAPPATKRGGVNAPQISGLHAMLWRLCGGKDPTQLPGVADYVLLQLLSEVGTDLGKNWKTEKHFTAWLGLAPGSRQSGKRRGSQRRSRNRAGRLFCVIARSVGRSVDKALGGFYRRLKGRRGGLVANLALARKLAELFWRLMVHGVNYVEQGLKKYQERVAQTEQGLLQKLARKYNMVLQPKPA

SEQ ID NO: 416723 - protein, 316 aa, unidentified
MQERSVSVGVDVSKDRLDVHVRPSGERWSCEQSPEAHEALADRLGDLKPQRIVLEATGGLELAVVAVLGARGLPVVVVNPRQVRDFAKAMGRLAKTDSIDAEVLALFGERMQPPVRPLPDAASAELDALVGRRRQLVEMLTMEKNRLHSARGRQVRASIQTIIAALQAQLSDVDRDLQQAVLDSPLWRARADLLRSVPGVGKVLSTTLIAELPELGTLSPKALAALVGVAPLNRDSGKQRGQRSIWGGRAPVRSALYMGALVATRHNPYLRAFYARLRARGKPAKVALVACMRKLLCILNAMLRDNQPWRPMATAA

SEQ ID NO: 416724 - protein, 376 aa, unidentified
MSKVRFVGLDVHAETMAVAVAETGGEVSSLGVIPNRLESIRKLVHKLGGAQHLRACYEAGPTGYVLYWQLTQLGVACEVIAPSLIPTKPGDRVKTDRRDAEKLARCYRAGELTAVWVPDASHEALRDLVRAREAAKKDQLKARHRLGKFLLRHGRRPEGMKSWTKQYLEWIKAHVQFEQAALEATLADYLEEVDHVAARLVKLEKAIDEAVRQAPPEIRAVIEALQSLRGVAQTTAATIVSELGALSRFQKPRQLMGYSGLVASEHTSGNRVQRGGITKTGNGHLRRVLVEAAWAYQHRPNVTGFLLRRQKNLALGEDVKKIAWKAQQRLHKRYKALEAHGKNKNQVVTAVGRELLGFIWAIAVATEKQHQLGKAA

SEQ ID NO: 416725 - protein, 410 aa, unidentified
MQSAPTTLPRTPDGGLTSGIDWASSDHAVAVVNTDGLQVDRFITEHNQAGLLAMTRRLRKLGVGEVAIERPDGPVVEALLEAGFTVVVISPNQVKNLRGRYGSAGNKDDRFDAFVLADTLRTDRARLRPLVPDSPQTVALRQTCRARKDLVAHRVAVANQLRAHLQLVFPGAVGLFADIDSPISLRFLDRFDCQERADWLSPKRFEAWLASVGYCGRTDPAVLHARLVAAPRGAAGTTATVHITRAMTAVLRTLVEQIKALSEQIDEQLAGHVDAHIFTSLPRSGTVRAARLLAEIGDCRARFPTPESLACLAGVAPSTRQSGKVRAVGFRWACDKQLRDAVCDFAGDSRRGNPWAEHLYQQAITRKHDHPHAVRILARAWLFVIWHCWQDGVAYDPTKHRALQNLGLPA

SEQ ID NO: 416726 - protein, 384 aa, unidentified
MKKNISRSVEMKAPAVEIKASVKNAPGRTISRPVDYQAVVGLDVGDRQTHYCVLDLDGELTVEGAVATREASLRVQFEGKARMRIALEAGVHSPWISRLLVELGHDVIVGNPRNVRMISQNDSKNDPADARLLARLAHVGPELLSPIQQRSEKTQVDLALVRARDVAIQSRTKIVNAVRGIVKSTGHRLPKSSTLTFARKAKDSCPEALRPALLPLLRVIEELTREIELYEKLVAKKADTEYPETKAIRTIHGVGPLTALTLVLLLNNDRSRFRKSRDVGCYIGLRPKQRDSGLRAPQLGITKAGDSLLRRLATQCAQYILGPFGKDSALRRWGMSLALRGGKNAKKRAVIAVARKLVILMHRIWITQEIYEPLRGVTVQSKAA

SEQ ID NO: 416727 - protein, 345 aa, unidentified
MDHYAGIDVSLESSSVCVVEGSGKIVREAKVASEPEALIGWCASLGLGLARIGLEAGPLSQWLYAAMKQAGLAVELLETRHVSDAFKAMPVKSDRNDARKIAQLMRLGWFRPVHCKSIAIQEIRAMLTARKLVQSKLLDLENSLRGILRGFGLKVGKTTRTNFAGRIEELVERHPNLQTIGQALLRVRTVLLAEFNGFEKRVRAMSRLHEKARLLMSTPAVGPIISLTFACAIDDPSRFTSSKQVGPYLGLTPKKYQSGETDYTGRISKHGDASAREALYEAAHLMLTKPIKGCSELKSWAMRIARRAGTNKAKVALARKLAVIMLRMLKDNAPFNPAAAKAATV

SEQ ID NO: 416728 - protein, 368 aa, unidentified
MMGWMAPLRHLSAMLLAVRESAANGEPSMGEVTTIGLDLAKHVFQVHGVDADGATVLRKSLRRAQVLTFFSRLPPCLVGLEACATAHHWARELSALGHEVRLMPAQYVKAYVKRNKNDAADAEAICEAVQRPTMRFVAIKTAEQQAGVLLHRGRERLVRQRTGLVNALRAHLAEFGIIAPQGLRHVGKLIAIVRDDNDARLPALARQVLMVLAGQIEQLEAAVAALERQLVAWHRVNPVSQRLATIPGIGPIIATAIAATVTEPGQFRSGREFAAWLGLVPRQNSTGGKTRLGGISKRGNQYLRRLLINGASANLLRSRATKADPWVIGLRRRRPSLVVAVALANKTARIAWAVMQRQQPYQRMAAAA

SEQ ID NO: 416729 - protein, 342 aa, unidentified
MFYAALDVSLRAVAICIIDETGKVRLERSVPSDVPDIVRCFDEFGEPIHEVGLEAGTLTQHLTYGLTEAGFDVVCMEARQVNAALSAMRNKTDKNDARGIAQLLRSGWYSRVHVKSVESHYTRALLSSRKVMQRKCLDLENEIRGLLKVFGVKLPIRLRGGAFEEAVRDTIENDPPLSHALLPMLEVRQMLLETFLELDRRVRKAANQDTITTRFMSVPGVGYVTALSFKAAVDDPARFKSSRTVGAHFGLTPRRFQSGEKDNPGRISHAGDADVRATLYAAANAMLMRSIAWSSLKAWGVRLMKTKGRRRAIVAVARKIAVLLHRMWIDGTEFRFGLEAAA

SEQ ID NO: 416730 - protein, 408 aa, unidentified
MKRYYMGVDWGDRLHQVYVGDEDGKKVREMKLQESPEGLAEIGRWLDEKRAEGFELWAAIEKPQGRIVDFLLDHGVEVYPVNPKAVDRVRDRYRMSGSKSDAFDAYVLAEFLRTDQAHLRALRPSSEKAQELKMLSRDQRRVVRHKTRFLNQLTTTLKEYYARPLEVFEDLETEIALDFLQRYPTPAHLSALTRKQFNRFATKQHHLSKQRCEELWEKLNKPQLAVPEHVVRAKAQLVEVLIEQLRASIKAVKIYNHRVESFFASSPAAQFAKTLPGGKSGTLVAAIWAELGDAQGRWESSRHLQAEAGAVPVTKASGKSRVVHFRFACNKHLRYTMYWFSFVSLNHSEWAKLYYRGQRDNGHSHHQALRALGAKWLKIIFVMWRDHKPYDENYHLANIARQKMRQAA

SEQ ID NO: 416731 - protein, 356 aa, unidentified
MKYYTSTTEFNCGIDLHARQMYVCVMDRDGKKLVHTNVKNNDFEFFLKLVAPYRQDLTVCCECMFGWYWLADACHQAGLTFVLAHALYLRAIHGGKNKNDRIDSEKLTHLLRCNLIPPSYVYPADKRPLRALLRQRVYYVWRRTEILNRIQSHQLAYNRRPVKCTTRHNRDPWEQKILATESHPLRQLALQNDLAMVRHYDAQIWALETKLVNLAKEHSQRDFTLLLSVPGIGENLGLTILHEIGDIERFPTVKDFLSYCRLVKGTVASAGKIKGLRGARLGNPYLRWAFGEAAIIAKRDHAVIGPLAQRLEAKMGGHKFKANTVVAIKLARAVYFMLQNKTVFDSDRLVAVLSKN

SEQ ID NO: 416732 - protein, 341 aa, unidentified
MNQVSTVGLDLAKYIFQLHGADSAGAVVFRKKLRRGQVLAFLATLPPCTVAMEACGSAHYWGREIAKLGHTVKLIAPAYVKPFVKRQKNDMADAEAICEAAQRPTMRFVAVKSEQAQAAAVVFRTRDLLVRQRTQAINALRGHLAEFGVIAAKGPVQTCKLIAALEDPASDLPQAARGILAVLVEQLRSSDERVAVLDREIARHTKENSVARRLMTIPGIGAVTAAALTALAPPADTFRRGRDFAAWLGLTPVQRSSGGKERLGRTSKMGERTLRRLLIIGASAVARWAARKGVPAGTWLGRMLARKPPMLVRVALANKMARIVWALLARGGVYRAPVTAV

SEQ ID NO: 416733 - protein, 352 aa, unidentified
MNSIDYIGFDIHKKTISFCAKAQDGRILDEGTIAARRTDLSAWAKRRSRPWRGAMEATLFTGWVYDHLKPLAQELKVAHPAMLKAIAASKKKNDKVDARKIADLLRCDLLPECYMAPSAVRELRRVLRYRNLVVRQATRMKNRIAGLLMETGTVYNQERLHGKAYFSELLGSLQEIPASVIELLKLSRAQLEFFATIQKRLVKGLRADAGLRERVQRLQSIRGVGEILALTWALEIGDVQRFPSIAEAVSYCGLTSAQHNSAGQEHRGPISKQRNKHLQTILIEAAKLAPRYNPQLAAVHEGELKRGHRNQATLAVARKLVAYLMAVDKSGKPFQVRARAGEEVSKDEQPVG

SEQ ID NO: 416734 - protein, 293 aa, unidentified
MTKLNVIGVDLAKNVIQVSVLSPSNRELRNSALTRRKFAEFFGRQRRSLVAFEACATSHYWARVAQRHGHEVKILPAKAVFPFRQGHKTDENDALAVAEAARRPNVKLAPIKTIEQQGMQAIQRSRELLVHERVSLSNHLRGLLMEFGIVIPQGFASLYRLLPEILEDGENELPDLYRPTLNLLYGRLCDLREDLERLNREIEVLVQANPVCRRLTALEGVGPIGSVLLYATLGTGEAFANGRQFSAYLGLTPKQFSSGGKCKAAVALANKNVRTAWAMLTQNTEYQRYPIAA

SEQ ID NO: 416735 - protein, 422 aa, unidentified
MQIDILGIDLAKRVFQLHGAIRGGAVVHRSKVSRPGLMQAIVRLQPRLVVMEACAPAHHWARQLQASGIKVQLISPQFVTPFVKTNKNDRNDAEAIVEAASRPTMRFVAVKSIEQQDIQALHRLRQLIVQQRTAIINHRTSHLGRTRCRRRQVARGVPQRHARGARCRRETSSRQHAWACSSSRCNNLDVIEWRIAEADARVRRLMSSSELCRKIGAIEGIGPLTATAVVAAVGDASAFKNGRHLAAWLGLVPRQHSSGGRSKLHGMSKRGDTYLRTLLIHGARSVLRWLGEKQDAHSRWLRDLIERRGFNRAAVALGKQERYGSSSSSCSESVDRCPDRTPEIRFTVNCRDRGFESAISHQVSRKYVGLRRPVSFRLHHLDPSPMRDASRDSEPGNSAALSFSCRFCSIHCLTVSISLLRC

SEQ ID NO: 416736 - protein, 343 aa, unidentified
MQTVTTIGLDIAKSVFQVHGVDAAGQVVVRRQLKRRYVLAFFEKLPPCLIGIEACASSHHWSRELQALGHKVRLMPPAYVRPYVKRQKNDAADAEAICEAVTRANMRFVETKTPEQQSCLMLHRTRHLFIRQQTAVINAIRAHLAEFGIVAPVGRNGVEELLGVVADASDKRLPEIARACLAALGAQLRMLKAQILEFDRMINAWHRSNETSKRLDEIPGVGPALATALVASVADPRAFRSGRDFSAWIGLVPKQHSSGGKDKLGGISKQGDRYLRSLFTAGALAVIRYAKIHGAKHRPWLTALLARRPTKVAAVALANKIARMAWAMMARGERYKEPVALAA

SEQ ID NO: 416737 - protein, 327 aa, unidentified
MNLHTLGIDIAKLKFDVCLITTSGKLKHKVLPNTAAGFAQLSAWLTKHEVARAHACMEATGAYGEALALHLHQAGHTVSVVNPAAIKAFAASRLSRTKTDKVDAELIARFCVALQPLAWTPPAPEVRQLQALVRRLESLVEMRTAESNRLEAIISVDVVKTSVEEHVAYLDQQIEQTQALIRTHINHHPRLKQQSALLDSIPGIGETTAALLLAEIVDVTQFASARQVAAYAGLVPRERRSGSSVRGRTRLSKIGNARLRKALYFPAITALRCSPFFKAWAEGLRGRGKCKMSVIGAAMRKLIHLAYGVLKTGKPFDPEWMQNAKSA

SEQ ID NO: 416738 - protein, 330 aa, unidentified
MQKVQHIIGADLSKRTIDLFYHLKETHLKIDNNLQGFKTLLKWISQQQINPSELIIVMEHTGLYSFCFEEFLHRHQISFTKVSALTIKHSIGLVRGKSDKIDASRIASYGYEKKDKLSAEPPISKGLQRLQLLYATRERLVKQKVGLINAVKEYRNIGLLQNDPILRSQYRLIKNYEKEIAKLEVQLDNVLKSNPSLQKNHLLLQSIKGVGKVLATATIIKTRNFTRFTNARKFACFCGTAPFEHTSGTSIKGRTQVSHLADKQMKTLLDLSAKTAIQHDKELKKYYLNRTQNGKPKMSTINVVRNKILYRMFAVIKRQTPFIENYVHAA

SEQ ID NO: 416739 - protein, 389 aa, unidentified
MKIYVGIDIAKLNHFAAAISSDGEIILEPFKFTNNADGFQLLVSKLDSFDKNSIIIGLESTAHYGDNLVRYLVAEFYQVCVLNPIKTCQMRKNNIRKTKTDKVDTYVIAKTLMMQDDLRFVSFYDLDMMDLKALGRFRQKTIKQRTRLKIQLTTYVDQVFPEIQYFFKSGLHQNAVYALLKEAPSPKEIASMHMTHLANLLKVNSHGHFTKELAKELRVLAQKSVGANDSAISIQITQTIQQIELLDSQLEKIEAEMTDIMKFNDSVIMTIPGIGYINGGMILGEIGDIHRFSNPNKLLAFAGLDPSVYQSGNFQAKTTRMSKRGSRVLRYALVNAAWNVVRNNATFKAYYDAKRAEGRSHYNALGHCAGKLVRVIWKMLTDEVEFNLE

SEQ ID NO: 416740 - protein, 406 aa, unidentified
MKVLYERCCGVDVHKKSITACTITPEGKEIRTFGTVTDELLEFVNWLKEKGVTHVAMESTSVYWKPLYNLLELEQIETLVVNAQHIKAVPGRKTDMKDAEWIANLLRHGLLKGSYIPDRAQRELRELVRYRRSLIEERARELNRIQKVLEGANIKLSSVVSDINGASARKMIRALIEGKNDPTVIAQLAKGKLKQKVEELQRALRGVIGPHQRMMLAEQWRHVEYLDEAIARLDQEIEERTRPFEEALELLDTIPGVGRQSAEQILAEIGTDMSRFASASHLASWAGMAPGNYESAGKRLSSRTRKGNKKLRACLVECARAAARKKDTYLSAKYHRIAARRGANRASMAVGRTILEIIYYLLTRKEPYKELGADYWDRQREAKIVRQTVKKLEGLGYEVKVEKVGA

SEQ ID NO: 416741 - protein, 410 aa, unidentified
MEVLHPRCCGLDVHKDTVVACVRLVIDGKTAKEVRTFSTTTADLIALSQWLSENKCTHIAMESTGVYWKPVWHILADGEFELVLANAAHIKGVPGRKSDVKDADWVSDLLAHGLIRASFVPDSPTQEMRTLMRTRKQLSREQARHILRIQKTLEDANIKLDSVISDLMGVSGRKMIEALIAGQRDPAKLARLADPRVQASQETLRQALSGRVTRQHRFLLRLHLDQINGLDVAIAKIDREVEAAIAPFRTAVEQLSSVPGVKNLAALQILSEIGTDMSRFPSDANLVSWACICPRSDESAGKRRSTRISKGSPWLKTVLVQSAHSAVRMKGTYFQALFHRIRSRRGVKKAIVAVAASMLTAIYHMLKDGTMFQDLGTAHFDRRTKEQQKNRLVKRLAELGYAVELAPLPI

SEQ ID NO: 416742 - protein, 412 aa, unidentified
MEDRCIAGIDVHKKMLAVVVRKPSERGVEYVQRKFGTTKKEINHLAAWLQHCKVTEVVMESTANYWRPVWYGLERHFKLHLTHPLKTRAPRGRKRDYMDAARLANRWHSGDLEESYVPGAEQRAWRWLTRTRVQLKRKLAVVRGQMEGILEQGGIKLTAVVTDLFGVSAWAMLCKIAEGETDIDELMGEARGKLKKKHAQLKEALVGVLEPIYRFLLKQHMEQVQLIWRQVEELNQALIESMKDHVAVLVRLAKIPGVDLYAAQELLAEIGAGAIAFPSGDQFASWAGVCPGSQESAGINHSRRSAKGNRYLRRLLCQIAWAAVHTKNTFFGSLFARLKPRLEAKGAAWAVAHRMSYVIWLIMHNEVEYKERGIVPLKPKTLKRKLKRILQELTRQGVDAKSFLEQELTAIA

SEQ ID NO: 416743 - protein, 416 aa, unidentified
MEVVHRRCCGLDVHKKSVVACVLLSDPSGPPQREVRTFGTFTHEVLALADWLAEQQVTHIALESTGVYWKPIWNLLEDRFALLLVNPRHIKAVPGRKTDVHDAEWLAELLRHGLLTPSFVPDRAQRELRELTRYRTSLINERSAAVNRLQKTLEGANIKLASVASDVLGVSSRQMLAAVVDGTTLEASALAELAHGQLRDKVPQLEHALSGRVGPHQRFLLAEQLAHIDALDASLERLSTEIAERMRPFDELIERLDAIPGIGRTIAEVLLAEIGADMTRFPTANHLVSWAGMCPGHNESAGKKRSGKTRKGSPWLRAALVQAAHAAARAKQTYLAAQYRRLTARRGTKKAAVAVGHSILVIVYHLLTDPDCPYFDLGATYFDQRDPGAVQRRLIHRLEALGYHVQVTPLAESSAA

SEQ ID NO: 416744 - protein, 365 aa, unidentified
MNYIKIGIDAGKEKIVCAYRSNGVGEVRVVTLANRKEALKPWIEKLQEDGIVQVCYEASSVGYEMYRWLTGWGAECEVIAPSLIPKKAGNHVKTDTRDAKELLSLHEAGLLTPIHIPTPSEEALRDLVRSRGDMNKVLTMQKHRLNQFMQRHGRVYGGKSHWTIAHFKWLSEQRFTESASERTAAFYRRWVDEGRAELERVEAAIREIAPHHPKTYALAQRLMSFHGIDQMSGISLASELLDLRRFSKAAELMAFTGLTGREYSSASVVRRGSITKTGNARVRHVLIQAAWKYARKPSESKRLREHWKTQPASVNRVAQKARDRLHKRFCHLLAKGKVKQKAVTAVARELAGFLWAAGQLAETAA

SEQ ID NO: 416745 - protein, 353 aa, unidentified
MKQFIGCDAHKKFSVFASIDETGEYGRTIRVGHERDVFRQHLRELPPGSEIALETSGCYYWIVDEMEQAGHHPRLAHALTAKRRMEGRHKTNERDARGLAMLLRNGTLPEVWIPPAQLRDQREMLRWRMWLSRSRTRVKNRIHAVLQRYNVEIDFADVFGDGGRAELLRRITELPPYSAESVIEQLQTVDWLDTQVAECEQKLEQMLYPNVARDVLDSLPCVGKVLSAVLALEIGDVERFAGPGHLASYAGVVPVARQSADWKRQCGCPRDCNVYLKWAYVEAANLISIHRRRWAQRHVAQLYERVKQSTQMHGKATMAVARHLAEASFWMLAKQQVYQDPQFRRPALSSTHG

SEQ ID NO: 416746 - protein, 422 aa, unidentified
MVLKGVPMALKIVYQICCGIDVHKTFVVACIASTNKQGVTTYKRHRFSTFTQGLKELLQWLLDNHCKDVCMESTGKYWIPIYNVLEKDCNIVLAHPKYVKAIRGKKTDKKDAKWIADLFKHDLVAGSFMPPADIRQLRDLMRYRFKLTCFMSSEKNRLQNCLTVSNIQLASVVSDTFGKSSQRILDKILENPDDTSFDIEPLIHGSMKKKLPELELAIDGFITPEQAGKLKVIKKHFEDLESRKAELEKLILALASPYQQELDLILTAPSFKNKFTAIGIISEIGVNMEAFPSAKHLCSWAGLTPTNNESAGKKKSVRVSKAGCYIKPLLVQCANSVVKSEKHPEIRNRYLRLRKRRGHKKAIIAIARMLLTALYNMLKNKEPYNAELYRKSDALPVNREITIEQAILIAQFQGYKIKSATE

SEQ ID NO: 416747 - protein, 355 aa, unidentified
MSILAERMDYVIGVDTHLHSHTAAVLTATGAVVASLQIDAELAGYCRLVRMVGRAAPGKRVWAVEGTRSYGAGLTGHLLSLGETVGEVDRPKRPARKRGKSDEIDAVRAAREALSMGQLASPRSSGRREALRIAASTRQEVMDERTRAMNQLRGLVVSAPEHIAARFRDRTGHSHSLERLTKRCLALRVVGIADVEDRIRLDTMKRIARRIVELQREAAHYEREMAALIRELAPGLLELPGVGPSTAAMVLTTYSHRGRFHSEAAFASMAGVAPIPASSGKQQRHRLNRGGDRRLNQALDLIVKNRIRYDPETISYMDRNKGGRRTDRDLRRILKRYLARNLFRFLERTKPLDKG

SEQ ID NO: 416748 - protein, 416 aa, unidentified
MKDTNVAYVGVDWASATHYAYALDAAGQKLGHRSFPHSGEGLVELANWIRSVTNLEPGSVAIGIEVPHGPVVEHLMDAGFLVHAVNPKQLDRLRDRFTMAGAKDDRLDAFVLADSMRTDLRFYRFLEPVHPTIIELREWSRMVEDLSAERNRLANRFRHQLWRYFPQIVDLSEDWARDWILDLWELIPTPAKARGARTNAVARLLQRCRVRKWTAESLLVHLRAPPIAVAPGVTEACVAHCQVIIARLRLVMEQMKAGMKQLERLSSAVADLPSVEPTAPDTRCDPDILRSLPGVGPIVLAALLSEGHDAIRRRDAEALRALSGVVPVTRRSGKQYTVVMRQSCPHRLRTAVYHWARVAVMHDFHSRNRYSAMRRRGHSHARALRSVGSRLIGVACAMLQTGELFDKDRIPQVQLE

SEQ ID NO: 416749 - protein, 442 aa, unidentified
MGNYAGVDWASEKHDALVCDGGGEKLLAATFEHDEAGVRSLCSSLVRLKVALVGIERPDGLLVERLLDAGLRVLVMHPNQVAAARARFRTSGGKSDRFDAFVICELTRTDHHRFRVLEPDSDETKALRALTRARENLVRTRVALANELRAELAAFWVGPIRLFKDLDSAISLAFLECYPSPEDASTLGAQRLAAFLKKQCYSGNKTPAQLLGKLRRAPESCLGQAEMRARRGLVLGLVAALRTLLVQIKDLERQIAIAVRKHPDGPIFLSLFKDADSFICAAVLLSEIGDCRARYTSGDALAATGGQSAVAIESGKRKKACFRRACNARLRAALGVLADSTRHWHPWAQDRYAAATSRGQDHVRALRTLGRAWCRVLWRCWQDRVPYDQARHGGMQQHIKVVIPTASGPVIDHAATQRMAASALLTKNVESPHSKELALTNS

SEQ ID NO: 416750 - protein, 360 aa, unidentified
MDSRQEWSGRRIVGGVDTHKDLHVAAVVDELDRVLASQCFATTRHGYKQMLAWMRAFGSLQRVGIEATGTYGAGLMRYMQKAGVEVLEVTAPDKHDRRKRGKNDDLDAQNAAHAAFAGKRTVTPKSRDGMIESLRVLKACRKTAVAARRVALQMIQNTIVCAPDELRETLRKMTRMQLIRTLAAWRPDQADYRNVASAYRITLKSLGRRYLELNDEIADLDTMIIAIVDELAPALVARNAIGHESAAQLLLTVGDNPERLQSEASFAALCGVSPVPASSGKTTRHRLSRGGDRAANSALHIIAIGRLRTDPRTQAYVAKRIAEGHSKLEAIRCLKRYIAREVFALIKRSPMASRPTPMTA

SEQ ID NO: 416751 - protein, 342 aa, unidentified
MKDTMIGVDLAKRVFQVHGATMRGEVKFRRKLTREQFRAFMAAQAPAVVVFEACGGASYWARQMAGLGHEVRLIAPQYVRPFVKRQKNDAADAEAIVVAAQRPEMRFVTPKTADQQARAVLFRSRERLVRQRTELVNALRATLYEYGHTIPQGIAHIKQIEAILDAPHSELPALVRHECRDLLAQIAEQTARIDERARKIKTLAAETDAARRLQTMPGVGPMTALAVEAFAPEMAQFRRGRDFAAWLGLVPRQHSSGGKERLGRVSKAGQADIRRLLIIGAMARLTARARRSIPEGSWLAKMLGKKPRMLVAIALANKMARTIWAMLTKEEDYRDPARAAAA

SEQ ID NO: 416752 - protein, 375 aa, unidentified
MGKHRLAFVAFDSAKNKHAAAIADDGRDGEVRYLGEIDNSPDAVRKLVAKLSRQYERLHFCYEAGPTGYGLHRQLTELGHVCDVVAPTMIPKRSGDRVKTNRRDSVTLVKLLRAGELRAIWVPDSVHEAVRDLTRARETAMVDLKTKRQQLLSFLLRHGRSFPDGRNWTKMYERWLAKQTFGHPAQQIVFQDQLEAITTAQARLAALEQQLREIVPTWTMASVVAAYQALRGVSFLVAATFVAEVGDVRRFATPQQLMAFLGLVPSERTTGDTVRRGSITKTGNYRARRVLIEGAWTYRFSARVSETLRTRLKDLPLSVRAIAWKAQVRLCARYRRLIARGKKPPVVTSAIARELAAFLWAIGQQVAPQTGVLRN

SEQ ID NO: 416753 - protein, 330 aa, unidentified
MKKWNVILGVDVSKLTLDICCAERNLHIKIDNCTKGFAVLKKWCKEKEIDLHTTLIIMEFTGGYEYRFVQFCQSMSIDYRRVPGLEIKNSMGMVRGKSDQADAYRIGLYGEDKSRRLEPSNPLNDNVLILRQLLSFRKRLVREKAGLQSTLKEREHMYGVKKNDHITRIAKDKIKANDKHIRQIEEEIMGTIKNDEAMWWNYRIITSIKGIGKVNGWMTIVYTENFTSFTDPRKYAVFVGVIPFANDSGTSIKGKKRVSHLAHKEIKQELNQAAKTAMIHDAEIRAYAERKLQNKAYPLVLNNIKFKLILRMFSLVKRREMYVDDYKQAA

SEQ ID NO: 416754 - protein, 347 aa, unidentified
MTDKLIVGIDIGKRTHVATIIDHSGAVIGRAFSFANTTIGANLLLERIIAVNPEHLPIVFGLEATGHYWLALYSFLTGKGYPVSVINPYQSDAFRKVHLSTTKTDKEDSFLIADLMRFGSFQETKMAGEQMVSLRNLESFESITTRKLTNVITKLSKGRFKKEKAEEIKQKASVSFGVDFALDSFKLELSLLLKQLDFLTAQIAVVESEIGQSMETIPTTLKTLPGVDTILAAAIISEIGDITRFQTSAQLVSFAGINPTVHQSGQFTGNKNHMSKKGSPYLRLALWRASVTSVRFNPILKTYYEQKIKEGKNHMTVIGAVSRKLTGIIFAMMRDNKKFDETARPLV

SEQ ID NO: 416755 - protein, 392 aa, unidentified
MDEPVEPVVIGMDPHKRTVTVEVMTLDETIVGHARFTTDGVGFAAMVEYAQQWPAHTWAIEGCEGIGRHVAQRLIPLGEQVVDVPAKLSARMRMFATGQGRKTDDTDAHSIALVGVRIQGLQSVVHDEHLEMLRLLVDRRRRIGEDHTRMVCQLHQLLLEMIPGGAKKDLSAAQARKILASVRPRDGLGKTRKRVAMELVIDLERIYQRKKAANKELVELIKTTGTALLGLHGIGPTGAARLLVEVGDITRFPDRGHFASWTGTAPIDASSGDHVRHRLSRGGNRQINRVLHMMAVVQLRNPTEGRAYFDRKVAAGKTPNEAMRALKRRLSDIVYRTMLTDIVTAKATGPGGHRGATHQSSATGSQPHTSTSDQSLPRPVTPKPRTPLPKAS

SEQ ID NO: 416756 - protein, 378 aa, unidentified
MPSENIIHIAIELSVSSWLVAVRLPGAEKSRLHRITGGDTTALLALIAELRARASAKLGQAVEVACCFEAGRDGFWLHRLLTAQGIAAYVLEPTSILVNRRARRAKTDRLDAEGMLRVLAAWLAGDGQICSMLRVPTPEEEDAKRPHREREHLVQTKLRLENRIKALLFTQGIRSRPSLRSWERDMAELRTGDGRALPPLLRTELDRLRRQLVVILELIRELEAERAAAIEAAADDAMVQKIIGLQRIRGIGPNVAAVLVREVLYRSFANRRQLASYVGITPMPHQSGGMDRDRNISRAGNPRARTMLIQLAWLWLRYQPGSTLALWFRERVGALQGRARRIAIVGMARKLLIALWRYVETGVIPDGVEITIPEAATA

SEQ ID NO: 416757 - protein, 348 aa, unidentified
MSKSSQYVGLDVSLKETSICIIDDAGKIVWRGRVDSTPEAIATAVKQHAPNAVRIGLESGQLSSWLFHELKEAGFPVICVDARHAKAALSLKVNKTDANDAFGLAQIMRVGWYREVTVKGLDCQAVRALLVARAQIVSQITTLKNCVRGILKTFGRVLPKGLRSQFPGRVRAAIDGHPVLGAIIEPTLRVLEAMRAQLLVYDRAVIQRARSDETARQLMSAPGVGTVVALAYMTGVEDPARFKRSSSVAAYFGMTPRRYQSGEVDHAGRISKCGDGMVRGLLFEAAKVLLSRSARPSALKTWGEALGKRVGAKKATMAVARKLAVILHRMWTTGKTFQWNAEAASPAA

SEQ ID NO: 416758 - protein, 362 aa, unidentified
MKKTTPMKKRPKRVVGIDLSDESFLYEELDRDGEVIASGSVKLTRETLRAFLRERPKGTRVAFEAGGQSIWVRDEVEAAGHEAIVADPRRVPQITEKRHRSDAVDAAGLAHYALVSPKTLNPVKLRPSAQQTSMSVIRCRSVLVEARTRLINAVRGLVKLGGHRIAKCDAASFADRALDGLPSPERETVTPMVRAIRQLSEEIDHYDQVIEELADSKYPETRYLRQVPGVGTLTALTYLLTLSSPDRVKRSRDVGPMLGLVPARRQSGEQDPHLGITKTGNVYLRKLLVQCAQHVLGKRGVDSALRQWGLAHVGRSRATKKRAVVAVARKLAVLLHRLWARQEAYCPFPVNESPQPAPRCAA

SEQ ID NO: 416759 - protein, 455 aa, unidentified
MKGKARKIRTNDNMISMPVVNPHAAGIDIGSTSHFVCVSQDNVKEFSVFTVDLHEIAKHLLSYGVKTVALESTGFYWRPLFILLQDYGLEVFLVNARHVKNVKGHKTDVVDSKWLQLIHSIGLLSNSFQPDVFTHQLRTYTRHRKSLIEDASKYISKMNKVLVLMNIQLKAVLRDITGESGTRVIEAILKGERDAKKLEGLVSLQCESDRKDIEKALTGDWRTEYMFELQQCYDLYKYYWQKIKETDSEIEKLLNEHSNHSKHEISKSDYKPVKKKQHQKNDPNFKVEAYAFEMTGGVDLTQINGVGVATILTMMSETGFDLSKFKTAKHFASWLGFTPNRKISGGKELSSRTRKKTNPLAKVIRDAANAAGNSKSRLGDFFRRLAYRKGRMSAITATARKIAVIIFNMLKSKKPFCYEFSLEDQERIKVAKVKNILKTLKSYNISKNELELAWG

SEQ ID NO: 416760 - protein, 366 aa, unidentified
MKERKTLTRYVGIDLGKRTYEMAVVGKGGKVTKSNGKTYPSARQGLYNKLRPGDKVALEACSLAFIMAKEIEVAVRCKVYVLNPGRLSIIYKSMKKTDKEDALKLAHILEDFSEDRLPVVAVPSGKEMERRKILANYRRADQNRTRNINLLHALFVSQGITTIKKKDLETGESRKEAIQILTGMERDEAEYLVKCLVLIEERKEKLDRLIHEEAADDEEMQRLQEVPGVGPKVSFAFVSHVGAARFENASQLSNYLGLVPMVYMSGDTVRYGPITKRGNSYVRAMLVQAAWSMVRAKKGGKLKEMFEYMTVEKSKGKQKAIVAVARRIAELLYLLMRDEVRYESRPFTSPEKKKEAEKIAQLALSA

SEQ ID NO: 416761 - protein, 385 aa, unidentified
MMNLDRTKTPAGDNYATVYVAFELSNAKWRLGIILPGARKMSRYTIDGGDTAGLSARLSQARAKAATCGKPVRIQSCYEAGFDGHWLHRWLTEQGVIGYEVDPSSIEVNRRARRAKTDRIDLDKLMRTFLAYIRGEPRVCSMLHVPTVEDEDRKRLTRERERLLKERTAHTNRIKGLLHAHGIRDAMPMKRGFIESLATVRTADGRPLSRWLKEEITREHERLCLVEKHICALEKTSTAELRAAAPGSADAKVIQLAELKGIGLTSGQKLVNEVFYRSFDNRRQVGSCFGLTDTPYHSGTSRHDQGISKAGNRRARTLAVELAWLWTIHQPDSELTRWFRERVGKVKGRIRRIAIVALARKLMVALWRYLTTGVVPAGAALHRAC

SEQ ID NO: 416762 - protein, 339 aa, unidentified
MKLYVGDDLHANNNFLALVDRKGKRVDQKKLPNDLFVIRDFLKPYQKDIVGIAVESTFNWYWLVDGLMDSGYKVHLANPAAIQQYSGLKHVDDKHDAFWLAQMLRLGILPEGYIYPKEERPIRDLLRKRRHLVKLRTSLIVSLQNIISRNCGVQFRANEVKRLKEDRVSPLLEGNEDLSLAGKASKEMIDQLTRQIQKIEGAIVQRVDLKESYRYLLTLPGVGKILGLTIMLETGPIGRFADVGHYASYCRKVSSRWTSNEKTKGKGNRKNGNKYLAWAFSEAAEFARRYDAQARAYYTRKMRKTNSPVAHSALAHKLARAAYYLMKDQVPFMPEKLFS

SEQ ID NO: 416763 - protein, 416 aa, unidentified
MTNQLNIVCGTDIHQRFLVATILCRDGRTWADRFLMNLNGLLDFKSWLVSYGCQKVAVESTGRFWIPVHMILEGTIEVIVANAYKIKHIPKKKTDLKDSEWLAELCLNDMIEPSRIFPKEDRELRNLTRTREAYVRDLSKEKNRIHNVLESCSIKLASVISDIFGKSGMHILKGLLSGTSIDEVLKGIPDKRIREKKSEELRDALMGKLEATDIFLIRQSLQIISQFEMRIEELDREIRSRIASRPMDIKILRSIPGIGMVSAYTILAEIGNYLDFKKPEQLAMWAGLVPSVYQSADKLITGGITKQGSKHLRWILVQVAHAIAHAKGGKLKKFFLKIRAKKGYLVAVVALARKVLCLIHHLLVNQEMYEEEGRLSKRDAPIPKNKNQGTLTIEDMIQCIAQAGYVVKRLNSGMHG

SEQ ID NO: 416764 - protein, 316 aa, unidentified
MTEAGGFVGIDVAKAELEVVVRPSGARWTVTNNPVGLAQLQERLQASAPSLIVLEATGGYEVAVVAALATAALPVVVLNARQVRDFARATGRLAKTDAIDAGVLAHFAEVVRPPVRPLPDTMTQSLQAWLMRRRQLVEMLLAEEQRRSRAPRPIQRQIDQHVRWLRAQLGAVEKDLAQTLRESPVWREKDNLLRSVPGVGPVLTTTLLGDVPELGQLNRKQIAALIGVAPLNRDSGTYRGRRAVWGGRARVRATLYMATLTAARYNPVIRAFYERLVAAGKPKKVALTACMRKLLTILNAMIARRTAWKPPAAVSA

SEQ ID NO: 416765 - protein, 399 aa, unidentified
MFVGIDWAKESHDICVVDPAGKIRGRATIAHSQEGFDELAKHLGRWAEQGEVLVGIERPEGRLVDRILEAGYPIVLIPTFAMKDLRRRYAVGGAKSDPGDAYVIADVARTDGHRLRRLEPLSEETRALRSVVRARGDLVDQRVALGNQLRACLDAYWPGAAVIFADVCSEIALAFVERYPTPESAARLAETRLGSFLKKAGYSGRRSAAELLDRLRAAPEGVVGVEAEARADAMRSMVRVTRSLNRSIKDLDRAIAAHLGEHPDAEVFTSLPRSGRINAAQMLAEWGDCREAYPEPDAVSMLGGLCPVTHASGKHRDVAFRWACNKRLREAITTFADNSRHASPWAADIYRRAIARGCDHPHAVRILARAWVRVIWRCWQDRRPYDPALHGSAVLLEAA

SEQ ID NO: 416766 - protein, 314 aa, unidentified
MTSVSTPASRFIGCDVSKSTIVVFDDTTGRTRTVANQPESLARFAAGLDPSCLVVCEATGGYEAALLDALLAANVPAHRADARKIKAFIRSFGTLGKTDTLDAKAIARYARERGPQLARWQPPDPDRATLQALVLTRDDFVRQRTAFSNRRQAPGAEPVRPHLDDLLACIDRQIKAIELRIAAILKASQPLKRDADILTSIPGIGFKTAADLLALMPELGFLDRRQAAALASLAPHPRQSGNVNAYRRTKGGRPEIKRALFMAAMAARNHHPTLRPFFLKLVANGKKKLVALTAVMRKLIIIANAKLRQQHQLS

SEQ ID NO: 416767 - protein, 353 aa, unidentified
MRTYYVGMDVHRASIVIVVLNGAGKVVMQSVIETGAERVRSFLKQLRGKVYVTFEEGTQANWLHEIVRPLVTEVVVCDPRHNKLLTSGNKSDRVDAQKLAELLRNGALKAVYHGDNGMRALKELVRSYDCLVSDTTRVMNRLKAIYRGRAIGCAGHDIYRQDRREQWLEKLRERGAKQRASCLYQQLAALKPLRHEAKRIMVKEARRQPAYPWLMSVPQFGSVSVAQLLAIVSTPHRFRSKRQFWTYIGLAVVTRTTADHEVVNGVLRRSKRPVSTRGLNRNHNHLLKRVFKNAANGACHGGPFKAAYELRVRQGMAPSLARLTVARQLAAITLAVWKRGEQFNPERMKQQAA

SEQ ID NO: 416768 - protein, 410 aa, unidentified
MKLLVGIDVSSQNLEVAMMTSDSSETIFRDTFSNDLEGATEIKTIILALNDQYTFDKLVIGMESTSIYSFHPAFFFKNDEDLAQFATEAVVLNPRDTKRFKDVFEANKNDKLDAYYIADFLRVGHYTVGIVRQEEYISLQRLTRSRFEIVQSQTRSKQHYLENLYYKANKLVVGDVPTSIFSHTMMDLLIDDMTTDELMNTPIEDLIAYFNQKGHGRFADSEKLAQSIQKAVRSSYHLSPIVQDSIDTVLSIYAAEIRAYEKMIKQLNQAIKKLLAILPENDITQSFPGIGPVYAAGIIAEIGQITRFDNDRQLAKYAGLAWKQNQSGNFNSSVTPMTHTGDKYLRYYLIEATGSIVRYDSVFREYYNHKMSEVKKTPRKRALALTARKLIRVIDTLLRNHQLYQREESV

SEQ ID NO: 416769 - protein, 348 aa, unidentified
MTMVGGFDVHRQQITFDYVDSDGLVRWGQIRPATRKTLRGWLAEHCPDGDAEFALEGCTGWRYVTEEVASAGVGVHLGDPAEIAVARGPKKRAKTDRADARLLRTLLLEGRFPESWIPPVQVLEIRTLGRLYCTLMDERRAWQQRIHAQLFHQGCPPIRALLSAAGRDALARVELSAAGRQYVDTALRRIDELTAEIGPLRTQLVNFARRQVGCQALQAHYGIGWLCAAIIWAEIGDARRFTSSDQLVRFAGLDVTVYSSDGKRSPGHLSRQGSPELRWAAFEAAKCAARRGSPDYAYYHQLAAKRDGHNGKNPTLAVERKILRRCYHTLRELGDAALALPIPEEVAA

SEQ ID NO: 416770 - protein, 370 aa, unidentified
MKSIIYVGMDVHKASFTLSCFSVTTQETFATVKISPDAKAIKKYLDGVSLSRSEECEFVCGYEAGCLGYTLYHQLTAMNIRCVIMAPTTIMRNGKRVKTDRIDAENLARCLAYGGYKSVYIPTAQDEAVRDYLRMRDDHKLMLKKIKQQINAFCLKHNKIYPGNKSKWTQAHVKWLNALEFDGYLQDAFNEYMITYRELADKVERLESQIEQLAELEEYRDKVKKLICIKGIKTHTALSLIVETGDFSRFQSAERYASYIGLVPGEHSSSEDQNRLGITKAGNRHMRMLLIEAAQCYSRGVPAKKSKDLKSRQKGASPEVIAYADKASIRLRRKYIRMELVNKKKANVAKTAVARELACFIWGMMTDNIA

SEQ ID NO: 416771 - protein, 412 aa, unidentified
MTVTNQFAAHVGLDWADKKHDVCVQFKNGERVFHVIEHTAEALDAWLNALHKQVKGKIAIALELKKGPVVYALQKYPFITVFPVHALSLARYRQAFSPSGAKDDPQDAELALELMLRYPQKIKAIEPDNADIRLLQQLVEQRRQLVEDKCRFVNRIINTLKQYYPQPLEWFSHRGSLLLCELIIRWPSLQQLKRARRDTIRNFLNAKGGRAIALTEQRVASIDNAIPLTTDPSVIEANALMATALATQIKVVSEIIKTYDERIETLFDTLPDAGLFKSLPGMGPCMGPRMLAALGDNRDRFNSAEEIQNYAGIAPVTERSGQKSWVHWRWQCAKFVRQTFVEWAAKTVPSSYWARLYYQGLREKGKSHQSAIRALAFKWIRIIYRCWKTRTQYDEAKYLLALEARHSPLLKP

SEQ ID NO: 416772 - protein, 387 aa, unidentified
MYYIGIDISKFKHDCAVIDDSGEIVTPSWSFTNDSEGFSQLKTLVDSLDAETRIGLESTGHYGMNLKLFLESNNFSFMEFNPLLINRFVKSKSLRKTKSDSIDCMMIAHYLMTVEYKPYPSSFYHTEKLKSLTRFRDSLIRLRSRQLVELTNILDKVFPEFKPFFGGKFSVTSLYILSNYSSPEKISNMNSKSYETLRKLSRGRFSTVDFAKLKQLAKNTVGNTEDYLLQEMQIVLELYKQLDSKIDETEASIKECVSAMNPPMLTVPGIGVESTAIILAEFGDFSKFKNASQMLSFAGLEPGYFQSGTSETTGKMVKHGSSYLRYALMNCAQTVVTYEPTFAMFYAKKRAEGKPHRVALSHVVKKLLRVIYTLHTKNIVYDADFVR

SEQ ID NO: 416773 - protein, 411 aa, unidentified
MKRFAGIDIGSERHVVAVVDEHGAVLLKPTPFGEEAAGYRRLMELLGSPQGCLVAMEATGHYWRNLFAYLVAEGFTVALLNPVRTRRFAEEELERTKTDAVDALGIARFAAQKDPPASQLAEEGLDELREVVRLRERLLQDFGDRVRQLHRALDLSFPEFTRYVRSLDSELATTILTHYPTAAALRTVSVKKLAGLRYDGRHRVGEELAHELLAAARISVGRHQSEPYRLRIRYACEDIVMLRRRLHQLKADIEQRLERHQVGKLLTTIEGIGLQTAACIIAELGDPARFGSVKALASYVGVIPRLRQSGKRRLSGRRMLPLGNTRLRRALWMPTLSAIRVNPWLRAYYLRLRGAGKRPKVALIAAMHKLLAAIFSVARRRQPFVASLVSPPATIVAGGAVVDPAAGLTAR

SEQ ID NO: 416774 - protein, 485 aa, unidentified
MGERRKHKQKPAVVSGPVEIPDADHELVLERVAAIDVAKAAGKVCVRLPGKTGRRFSRVWDVSARTGAIGELSGQLIEWGIEKVTVESTSDYWRIWYYLLEAAGLEVQLVNARDVKNVPGRPKTDKIDAVWLAKLTEKGLLRPSFVPPAPIRRLRDYTRLRVDLTRDRARYWQRLEKLLEDALIKVSSVASTLDTLSTRDMIEALIAGERDPRRLAELARGKMKAKRSELIAALDGRFDEHHSELARMLLGQIDALTTQIDTLSARIEEQLAVLPDDASVIDDPDGDSRVGPGAGSDADPDPTTSTGGANPMRLNPATVAECVLSTVERLDEIPGIGAHTAQAILAEIGVDMSRFPTPEHLVSWAKLCPRTIQSGPVTRAGKTGKGNPYLKGALGEAAAAAAKTNTFLGERYRRIVKRRGKLKALVAVARSILVIVWHLLANPATRFRDLGPDYHTNRIAIERRLRNHIAQLTAMGYRVTLEPAA

SEQ ID NO: 416775 - protein, 358 aa, unidentified
MKKNSKAEASGQLTIGIDVSDRSSCFCNLNQAGEVCGEGKLLSTPEAFRQHFGGMARAVIALEAGTHSRWMSALLRECGHEVIVANPGRLRLLTTSNNKNDPQDARTLAEIAWAKPALLQPVRHRSAEAQRYLNLVRARDLLVEARTKLINGMRCLVKGFGTRVPKCASGQFCQQAHEHLPEEARPATGPLLEVIDELSVRIGEYDEMLEHVAQTRYPQTTLLKQVSGVGTLSALAFVLTIEDPHRFAHSREVGSYLGLRPKQKDSGDRSPQLRITKAGDSYLRRMLVSCAHYTIGPFGPDTDLRRWGLKLCERGGKNAKKRAVVAVARKLAVLLHRLWVTEEVYEPLRNHAKADVAA

SEQ ID NO: 416776 - protein, 309 aa, unidentified
MLSSVGIDTAKATLEICIKPQKIRFEVANNSAGFEVLLERLKDFNISRVLIEATGGYEKDVLIALASAGLETICINPARARKFADAMGKKAKTDKIDAEVLADFAAHLSAPQGQPVSPEREELRELVKQRAQFVQSRDDDKRRRLQCRSAMAMAHFDEHIEQLKVLIKRLDEEIDQAMVQLDDTRARQLLAVTGIGRVTAANLLASLPELGQLDRRQIAALVGVAPYNNDSGSHRGHRQIWGGRAHVRRVLYMSSWIIIRHNTEFKARYEALRARGKCAKVALVACMRVLIVRLNAMLRDNTPWREQTA

SEQ ID NO: 416777 - protein, 397 aa, unidentified
MYIVGIDIAKRKHEAAVIDGEGTVIIKPFSFTNNCSGYNRLLAMLTRAKLPLDEVSFAMEATGHYWLALFTRLQKESFRVQVINPVQTNSIRSFYIRQAKTDPRDALLIAEVIRFGHFSESTLHPENIYELRELCRGRHAIVSMQADVKRKVVALLDQVFPEYETAFTNLFGDTSMAILQACPTPKELSEMPFEELCHLIEVSSHKRFRMAKAQELQELARNSFGFAMAGDVFSTMIRLYAKHLDFLKQQVREMDRKIAEIMDTLDTPITTITGIGPTLGAYILSEIGDISRFPSAAKLAAYAGIDPTMRQSGEYNGVRNRMSKRGSPYLRHAIWLAASSAVLHDPALKLYFQKKRDEGKPYIASVGHACRKMVSIIYAVMRDNKAYTPCIPNEISA

SEQ ID NO: 416778 - protein, 378 aa, unidentified
MSQSTTLYVGLDVHKDSIDIALAEASRDAEVRHLSTVAGGSEAVTKALRRLVSAGHRLHIVYEAGPCGFALQRHLSALGWRCDVVAPSSIPRPSGERVKTDRRDAMKLARLARVGELVAVRVPDSADEAMRDLVRGREDAVREQRNARHRLKALLLRNGIAYSGRAAWSGAHLRWLAGMKLAHPAQQIAFQEYLHAVTEAGARIERHEQALRDALSGWTLAPVVLALQALRGVQLIAAITLVAEIQDFWRFASPRQLMAYLGLVPCEDSSGPRRRQGVITKAGNAPARRMLVEIAHQYRLAARVSPSIARRQSDLELPKAVTDIAWNAQIRLCSRFRRLSARRLPHNKIVVAVARELCGFVWAIARQVTPEPSLPQAT

SEQ ID NO: 416779 - protein, 376 aa, unidentified
MLSARPAGATTRPHRFERMAITTMAHPTPPRVTVGVDTHKDTHVAAARDQLGRRLGTTQVPASSAGYAQLLAWAHALGEVAAWGVEGTGSYGAGLARFLAGHGQRVVEVNRPDRQARRRRGKSDAVDADAAARAVQAGEATGVPKAQDGVVEMLRALRAARQTAVKARTQAINALKGLLVTAPAELREQLGGLPTGRLVGAAAELEVGTLTTPTAAVRLALRGLGQRYQHLDAEIALLTEQLDALTAGHAPKLRDLHGVGPDCAAALLIAAGDNPRRLHSEAAFAALCGTSPVEASSGKTRRHRLNRGGDRQANAALHRVVVVRLRWHQPTRDYATRRTTQGKTSKEILRCLKRYVAREVFAVLRQIDDPGLAAAA

SEQ ID NO: 416780 - protein, 464 aa, unidentified
MKQQHVPVHNNDPDTEEIGMPVLRPNVAGIDLGSQSHWVCGPTVDGLRREVEQFGATTPELGKMVRWLQERNVVSVAMESTGVYWIAPHEVLEEQRLEVLLVDTRQLANVPGRRKSDRIDCKWIQRLHSCGLLRGSFRPPEQICMLRTLVRDKGRLVAERGDWVRRMQKSLDEMNVRVHRAVSDIQGATGMAIIRAIVQGERDARKLAQLREPGCRRSEQEIAEQLSGHWRQDHLFSLSQSLKMYDAINERMAAYDQEILQRLAEMEQAECKGKEAPELKNKNKAKMIRQRGEEPLRRGFFRMSGVDLTSIDAVGVGALQVVLTEYGPDLSRFPTEKQFVSHVTLAPRTAVTGGKPIRKSKKRGSASSRVAEVLRNAASSLTHSQTALGAYYRRLAQRVGGDVAIFATARKLAQMIYRVLRWGQPYVDEGAEAYEKRYQQARINRLHTTVADLGFVMIPKAANA

SEQ ID NO: 416781 - protein, 441 aa, unidentified
MAMRKREEDEVFPNAAGIDVGGSSHWVAVPRQADDEPVREFGAMTDDLNAMADWLLSCGVDTVALESTGVYWIPVYEVLERRGLVVWLVDARQMKYVPGRKSDVQDCQWLQKLMSLGLLRAAWRPGDEVCVVRAVVRQREVLLTEQADWVQRMQKALVQMNLQLTEVLTDVMGMTGQAIVRAIVAGERDPKVLARHRNGRVKASERDIERALTGNWREEHLFVLGQALAMVDSLAQRVLECDAKIEALLAPLGCHEVELSGPGKRRGKNTPQFDARTALARWAGVDLTRINGLAVTTVMTILSEIGPDLSRFANVKHFCSWLGLCPGTKVSGGKVLSARTRRSTNRVRQALKLAAMSLSRNDSALGAFYRRLCSRMDKPRANTAVAHKLARMVYFMLTRGEAFVDQGQQHYEEQQRQRSIDALRRRATALGFQITPAAQTP

SEQ ID NO: 416782 - protein, 419 aa, unidentified
MADETVSWFAGVDWGSERHQVCLLDAAGQVVGERAFRHGGAGLAALCDWLVSVAGEPERVAVAIEVPHGPVVDALLDRGFAVHAINPKQLERLRDRVSLAGAKDDRRDARVAAGGLRTDPHLFRPVEAGDPAVIALREWSRLAEELQHERVRLGNRIRQQLWRYYPQLLAVSDDVTAEWVLDLWTLAPTPAKAARLRETTLARLLHEHRIRRVDAERALGILRQPAITVAEGVTEAAVLHLRSLVARLRLANREFHQAERKLDELCKTLRDNSSTPKSGGPRDAAVLSSLPGIGPVTLAILLTEAAGPIKRRDYAALRTLSGVAPGTKRSGKSCLVTMRYAAQIRLRNAVFHWARVAVLNDPTCGRRYAALRARGHSYGRALRGVADRLLGVACVLLQRQALFDPAHDKRAASQPRATS

SEQ ID NO: 416783 - protein, 343 aa, unidentified
MQTITTVGLDIAKSVFQVHCVDANGKVVLRRQLKRRYVLTFFQKLPPCLVGIEACASSHHWSRQLQALGHTVRLMPPAYVKPYVKRQKNDAADAEAICEAVTRPNMRFVPAKTPQQQSCLTLHRTRHLFIRQQTAIINSIRACLAEFGIVAQVGRRGVEQLLEVVANVEDTRLPEVARACVAALGTQLMALKAQILAFDRRIMAWHRSNETSKRLDEIPGVGPALATALVASVADPKAFRSGRDFSAWIGLVPKQNSSGGKDKLGSISKQGDRYLRSLFTAGALAVIRYAKIHGTKHRPWLTALLARRPTKVAAIALANKMARMAWAMMTRGERYKEPVALAA

SEQ ID NO: 416784 - protein, 349 aa, unidentified
MKKCSTVSFEGQVIFVGIDVHKESWVVNLRHCHRELDKFSMNPCPEMLAKYLRKNYPGAEYRSVYEAGFCGFWAHRRLCELGIQNIVINPADVPTSGKERDRKSDAVDSRKLARELENRTLEGIYVPPEDNLELRNLVRRETKLTGNITRVKNRIKGHVNFMGLKFEGWSGRSLKIMYADAEKRHDYALQSMLRELRFLREEKLHVVRDERQCLKRLKRDKIQEHLQSIPGVGFHTAVMLQAELWDLQRFEDKDALSSYVGLAPRLVGSGEHEVLKSAGNRKKKQLHAILIQAAWRSIVYNLETRARYGALLHKGANPQRAISIIAKKLLYALRAVWHQERDYVVSANE

SEQ ID NO: 416785 - protein, 404 aa, unidentified
MKGPIVSIDVSKGKSDYQAFKNLNVKYTGSRSIKHTKEGFDEIVNLVREMEKKLETEVCVVYEATGVYHRVLKKVLEDNNIKQFIINPLLSAKTRKNDSLRSPKTDKLDPKSIAKTYYSHSLHNSHKQETIYHELRELSRYYEDILVHIRKDKVAFRAQLDIVFPGYDTLFDDLYSPVSLTVIEKYPHPEMLQKKKINTVSKVIQSKTCHRQAASDTMADKAIEYSKTIYSGCDKDDIEVLILQRFIKKLKEDMAEAERTISEMINLSQELPDYSIIKSIPGIGDNLAARIIAELGDMTRFKKKNELVAFAGLDPRISESGQDDGDHMHITKKGNKRLRCLLYLAVTCSIRLKRDDNSIKDFYIKKKQQSNPMCSKAAKTACASKLVRIIYSMCKTGELYQYNK

SEQ ID NO: 416786 - protein, 335 aa, unidentified
MEFEFFIGIDVSKSELDFAVQQGKKLLFHKEIANEPEAIKVFVKELCKQPGFNLSKAVFCMEHTGIYNNHSLAYLHKKNTNICLEAATHIKKSLGNIRGKNDKIDAIRIAEYAYTNREKLRLWAPKREVVQQLANLATTRSRLIEAKKMLKTPLKETGAFVNKSIAKQNESVCAKTLKAIEADLKKADQLMDKIISLDKELTRLFTLITSVTGIGKVTTVQVVVTTNEFKDISEPKQFACHAGVAPFTDDSGKVKKKARVSHMANKKIKTLLHMAAMVAIQCDPEIKLYYQRMVNVGKKNKMSVINAVRNKLILRIFACVRQNRLYQNNYQRLVA

SEQ ID NO: 416787 - protein, 344 aa, unidentified
MNITTIGIDLAKSVFQVHGVNEHGKTVLKKALKRDQVAIFFARLSPCLIGMEACASAHYWARKLQGLGHTVRLMPPQFVKPYVKTNKNDVADAEAICEAVARPNMRFVPIKSVEQQAVLSLHRVRQGFVKARTAQANQIRGLLGEFGLVIPQGLHNIAKRAPELIEDAENELPGAFRLLIDRLLANLKELSRQVQELDLQIRTWHRDNALSRRLEKIPGVGPITASALVASIGNAKEFANGRQLAAWLGLVPRQHSSGGRSLLMGISKRGDTYLRMLLVHGARAVVAATRRRMEHTGWLTELLQRRNPNVAAVALANKNARIVWALLAHDREYRDDYTRELPAT

SEQ ID NO: 416788 - protein, 364 aa, unidentified
MTIQYYAGLDVHKDSIVISVFLNNEREPLFEKKVAGDGKKASEVLLRLQGKGRVIACYESGCTGFTLQRYLISKGIQCLIAATSRIPRRPGDRIKTDKRDARNLAKLLRAGEITAIQIPSIDDEAARDYIRSRDDIKGELKRSRQRLLSFILRHGYRYSTTNYWTLKHRKWLKELSLNHPLLQETFKLYYYHIEELEEKLILIDDKIKTLAQSDRYIKWVNALRCFKGIDYLTALSLICETSDYRRFSTAESFMSYLGLVPGEHSSGNKRIQGGITKTGNTHLRRLLIEASWHYRHKGPAGKRVTARRKGQPQEYIAYADKALRRLQNKFSKIVYREKPKQVAATAVARELAGFVWGMMTGNIE

SEQ ID NO: 416789 - protein, 415 aa, unidentified
MHTFAQHTHLAGLDWAKDHHNVVILDRNGSVVEDFVFQHEAAGWEQLRERIKRYESVGVAIETSQGAVVGQLQRSGVTVYPVQPKAAKKYRERRAPSGTKTDYLDAWSLGDALRVDGHGWRALSEEDPLVKELHLLCRDEVELITQRTALINQLQAALYEYYPAALEAFEDWTEPFSWAFVKEFATPQRLVELGRRRQVSFLHKHRLWRPETAEKRLEIFARAAQFCGNEAVSRAKSRLALSLVEVLLTLEKQLKAYRAEIEKRFAEHPDHDVFGSLPGAGEKLAPRLLSEIGSDRKQYPKPQSLQCIAGTAPVSFESGQVRRARIRWHCDRYFRHTVHLWADCSRKVCAWAQVYYQEQRKRGKTHACALRCLGQRWLKILWRMWQEGRPYDEAFHTLNQQRHGSWVLQLKTKKT

SEQ ID NO: 416790 - protein, 354 aa, unidentified
MSQTTNTAIAVIGIDIGKNSFHVVGHDARGAIVLRQKWSRGQVEARLANIPPYLIGMEACVGAHHLSRKLASLGHDARLMPAKYVRPYSKGQKNDFNDAEAIAEAVQRPTMKFVATKTAEQLDLQALHRVRERLVSQRTGIINQIRAFMLERGIAVRQGIGFLRTELPTILATRTDALSPRMLRVIEELAGDWRRLDQRIDGLSGEIEALARQDQACSRLMTVPGIGPIISSAMVAAIGTGDVFSKGRDFGAWLGLVPKQISTGDRTILGKISRRGNRYLRVLFVQAAWVVLVRIKNWERYGLKSWIEAAKRRLHHNVLAIALANKLARIAWAVLAKGRAFELTRTDDAGVRPA

SEQ ID NO: 416791 - protein, 354 aa, unidentified
MDKDVYVGIDVSKTELVVAVRPSSESFTLAYHRAGLKQLVGRLGELKPKLVVVEATGGLQRQVVGALWTGGIAVAAVNPSWVRSYARGGGLLAKTDRIDARLLALYAQREQPVPRPPLDAETQALQELATRRDQLLEMRVAEQQRLKRSSAQVRKELRQHIAYLEGRITQIDDDIDKTVRRSEAWRRKSEVLRSFPGVGKVFCTTVLAKLPELGTLSGKAAAALVGIAPFPDDSGGRRGRRVIRGGRYPVRSKLYMCALSAIRCNPVLKQFYERLRARGKLEKVALVAVMRRIIVILNPCSRPILSGGKHPRLRSKKTRQTARCSQVHRRDAPLDPRACGPCEQRALLHLQHSC

SEQ ID NO: 416792 - protein, 479 aa, unidentified
MKAAQVKKGGSQAGKNHPLRRNRKQRRELARKIQAGDMSLEVVHPDAAGIDVGNESHYVAVPPSRDDPSVRRFGCVTAELREMAAWLRKCGIRTVAMQSTGVYWIGVYDVMEEAGLEVYLVNARETKNLPGKKTDVQESQWLMKLHTYGLLRNSFRPAQEIRTLRTYWRQRKDLVSSAAQYIQRMQKALTQMNVQLANVISDLSGVTGQAIVQAILPGERDGRKLAALRDHRVKASEEEVARSLEGNWREDLLFVLRQEQEGYEFCRKQMAACDRCLEEYLRQVEDRSGGASLPVEKRPSRLQRKRGKAPRFDLREALFRMTGVDLTQIDGIDGVTAAVVVSEAGWDMSKWATENHFVSWLRLCPDNRISGEKVIGKGRLATTNRLTVALKIAAHSLRQSDTYLGAQFRRLRSRLGAPVAIKAMAARLARLVYRMLRYGMKYVDRGAEFYEQQHRQRQILFLKRKALSLGLQIVEPMVA

SEQ ID NO: 416793 - protein, 360 aa, unidentified
MIYSSMIYSSMIYSSMIYSSMIYSSMIYSSMIYSSMIYSSMIYIGIDCAKLTFEVAFPQEQNHRVTQFDNTQEGFESLFCQLPVGSHCVMQATGPYHCRLASFLHHKQVPVSVVNPLVIKRFSQMRLTRAKTDKADAVLIAQYAALEKPPLWQPAPELLSEAAQEMTLAEQLIKQRTALTNQRHAFEQLPQPSQKVQAALKTLLETLNRQIDLLEQSVHQKIKDHDDKLLDKLRSIPGIGPKTATVLILLAKGLLAFDNHRQLICYVGLAPRLYQSGTSVRGKGHICKMGTGRVRRLLYLCALKAKSCNQACKALFERLRAKGKPFIVALVAVANKLLKQVFAIAKSGRPFQPPVPVIVP

SEQ ID NO: 416794 - protein, 467 aa, unidentified
MNDVWLGIDVACRADHRASLADDRGEFLWSSWRFRTTTVDLERLWAKIPNGVRVTVMLEPTRNAWVPLAAWLRARGATVVLVPPEQSSDLRDYYNKYTKTDRLDSRVLARLPLLHPEGLRGIDDLGPAESLRRATRQRASMVRRRTAAGLRLDALVELLGPGWADTLGSGSYPKTSLVLLEKYADPRVLKRLGRTRLAALLVRTSRGLWREDKADELLAMAAETISLWSGGGIDFSQLAEDIATEVRILGKLDSEIDAIDVRIEALYAEADPCGVVCSAPGLGPVSAAAILGSIGDFGRFDNLAGVRSFTGFVPKVDESGLVAGHKGITKAGDAGLRQALFLAADKSRRIDPTLAARYHRLVIAEGKHHNSALCSVATVLITRIAACWRNGQRYELRDERGNSITQDEGRSICAERYKVDPAVRAARRRTTPAKTFKQRAGRGKKESTTKVAPAIDPPSEEATEKVA

SEQ ID NO: 416795 - protein, 409 aa, unidentified
MSNDVSAEVFVGLDWAVHTHAVCVIDAAGSVLDRFEVAHDRDGLAALMRRLARHGRRVRIAIERPSGLIVDALVEAGHEVFPIHPNAVKASRPRYRCHGAKSDASDAYLLADLLRTDGHRWRALAPQSDAIRALRALVRSRDDLVAARVAAANQLTSTLQAFWPGAGVIFADVASPIALAFLRRYPSPSSARRLTEAQLQRFCKAQHYSGRRSPAELLGRLHAAAIGHVGATTEKALADVVRAQVRVLVPILAQIAALTRRIEQFMHALPDGLLMMSFPRAGQVCAAQLLAELGDVRERFTSADQLAAEAGTVPVTYQSGKTRSVAFRWACNHRLRQAITCLADNSRHANDWAKGVYQAARARGCDHTHAIRILARAWLRVIWRAWTDRKPYDPSLHRNAVAVVSAQGG

SEQ ID NO: 416796 - protein, 401 aa, unidentified
MSKKNTRNALDTSLSYAVIGLDLAKADCAVAAVPCSDDELGLIDRMDYESLFEQAEKLEPTLFAMEPCCGYSQISLRLQNMGHEVKVISGHAVKNWIATHKSNQKTDLNDATALAKLALYDHDLQPIRVKNVEECRIASVQAIRIQLRTQATKSLVCFKSLCQCWGIVIRRGSLNTKKMAEAVAAVEKLLGAEVASSLMILRDAYKFTMKQINALDKLLDALVEANEQARTMKTVLGIGTQTAARLAVTTGDIKRFPMPRSYVAYFGLAPRNIITGHSGTPSPSKRGALKPVSSRGQGKVSRRGDRVARSFIIQGAATIYMLYCKDMLPECQLRRWLHEQIKRGKPYGKIIVSLAAKLLRIVWALLTYGEKFDSHKAGVPRSVLAAMEKPLKHDAAAESAA

SEQ ID NO: 416797 - protein, 427 aa, unidentified
MQAPTLNPPPPPPQTQTPAAWIGWDWADTHHDVFLETAAGQTETVRLPHEPGQLHQWLKTLGSRFVHQKVALCLEATRSALLPILLEYPFLELYLVNPKSLARFRQVVRPSGSKSDALDCRLACQLVKSHARLLNAHVAQDPLTLELEHSVSIRRGLVDARTTLANQLASGLKSYFPLALVLLQADTTTALAAALVLRFPTLQALQAASLHQVRQFFLKHQCRLTEGLEKRLALIAPAQPVSAQAQWNHPQSFLAGTLALQLAVLIKRIDQLEERIRILAEQHPNHALVASLPGAGPALEPRLAVALGTRPEACASAQALAVRSGVAPVRQQSGNTCVVTHRWAKPQFLHQTWIEYAKSSTLQCPWAQAFVTAKTQAGKSYYTAIRALAVKWMRILHACWEAGTLYDEAQYLAALKKHHSPHYPKPG

SEQ ID NO: 416798 - protein, 408 aa, unidentified
MGRVAEVVAPSSSTPTDGGCPVLQVNDLSRSLVAFDPISTLMVVVEMSKASWLVRSVVPGVERQPLKKLEPDATALLRLIERWRSEAVRAGRPISRVALAYEAGRDGFWLARWLIARGIEAHVIHSASVAVSRERKRAKTDRLDTAMLMRVFLGWLRGERGHCGMVAIPTMEEEDARRPSRERESLVNERSRIINRMKSALARLGIRGFKPHLRRAPERLACLRTAEGTGLPANIIEELRRDMARLALVREQISSIEKTRVERLERAPDTGPHAMVRLLSRVIGIGIETADMLVREILSRKLRDRRALARYAGLTGSPDESGLKSREKGLAKAGNARVRRGLIQLAWRFLMFQKDSALARWYRVRTEGPNGARKTTMIVALARKLLIALWRLATTGEVPDGVELRPAA

SEQ ID NO: 416799 - protein, 440 aa, unidentified
MSTLTITNPNAAGIDIGSEFHYVCVPEDRDEQKIKKFGCFTSDLYKLADWLKDCKITTVAMESTGVYWIPLFEILDSKGFEVVLVNARHVKNVPGRKTDVKDCQWLQQLHSYGLLHGSFRPSDEICVLRGYMRQRDNLVRSASTHVQRMQKALSEMNLQLPKVISDITGATGTRIIEAILNGERNVQRLASLRGNGIQNGEEAIAEALRGNYRKEHLFILKQEFETYKFHQQQIAECDTKIQDFISSNNDKNDTGNGATDTSSGTTKSEKFNLKDALKKMVGVDLTKIPGISVLSAQTLVSEVGVDINKWKTEKHFTSWLGLCPANKITGEKVLSSKTRNVNNRASTTFRICALAVGKTKNSSLGAYYRRMRTRLGAPKAITATARKLACIFYNMLRYGEEYVEKGLDYYDQKYQEKVVQNLNKKAQSLGFMLVENLVPQ

SEQ ID NO: 416800 - protein, 417 aa, unidentified
MNTEKEIVCGADIHRDFLVATMISRSGLKLQEQFGMDEDGLLAFRSWILDHRCQRVAVESTGNYWYPIFCILEGHVEFILANAFQIRNIEGKKTDRLDSERIAIYCLNNLIKPSRIYPKDYRELRSITRSREALVNARSKLKNQIHQLLAVCCIKLSSVISDSFGKSGRYIIEQLLEGKTIEQIISRIPSKRVRKKADELRKAIRNGLDSVQVLLIKTNLDAIDYLSEKIKLLDAEIVIKVKPFEEDLNIILSVPGIGLISAATILAEIGDYRDFQNADKLAMYFGIVPAVYQSAGKLRTGKITKRGSKHMRRILVQVAKAISKTKKSSKLKRFFQRVLTRSGKKNVAAIALARKVLCIIYHLLMKREDYQEPEVKKIKPKIPSCVSSLSMMDIEEMIKTISQAGYLVKKGLKEGCG

SEQ ID NO: 416801 - protein, 359 aa, unidentified
MVPIGVDVHKRRCKVVEFSDSKVKVRKPMENTREEWLELLAELPPDAEIALEVSTAGYFAMSVLEEAGWGERAHWVHTAGIDSPRKQKYDRLDAERLARKLAVHHLDPLPEAWFPPSEIRELRLRSRQRCWLARLRTQAKNRLQSLLEMHGLQPPGSDPFGRRGRDWLDQQKLPAALSESVPQMLRLVEVLGKELETSEGYLKGVESQFPELSLLRTIPGIGPLLAPVIWSEIGCLKRFTSASALVNHTGLVPSLYESAEVSVQGHITRQGPRWLRWALITAANVAIQHRNPLARRYYRLRRNKKKPNVAKTAIACSLARCIYGVLKHRSPFREERWGRKVGALEQEACGSAGSTKTVL

SEQ ID NO: 416802 - protein, 331 aa, unidentified
MKRQRPRPQYTIGVDIAQEQCVWVVLEGPTQTLVTSGKVRRTPQALARWAARMRQQWPQALVILEATGGLERSVRQAVHQAGMAVVVANPKRVHRLRESAGWAKTDLRDATALALWGWLFAHPQPQPSPAEERMRDLMRRREQLVDMLHRERIRLQRTTDAFLRAQMQQLIAHLEHQLRTLEEEIQRQLDIWTQEDPEAGEDLALLQSVPGVGLWTALTLRLFMPELGYLDAKQVAALSGTAPMARDSGKKRGRRRIREGRPRIRRALFMAALTWVRRQQGPLWAFYDRLRRRGKPTFVALVALMRRLLVILNAILRDRTPWMPEKAMAKT

SEQ ID NO: 416803 - protein, 408 aa, unidentified
MNPLYVGIDVSSKSNVVYLMLPNGDKHSNFSIANSHDGSTQLVKRIHSALTSHSLDTVLIGLEATSVYGDNLVYFLREDATLAPFSRKIHVLNPKQVKKFKDAYNDLPKNDYVDSFVIADCLRFGRINKEVYLGDYHYKALQNLTRARFFAVNNLIKEKQRFMNVLFKKYSTMTQEKVFSDTFSATALAVYDEFESAETLANMDLQELTDFIMEKGKNRFPDPNAVAKAIQKAARISYRLPKTVNDSVNQVLSISITSMKALESQIKEFDKAIAAQMELLPNVLTSIPGIGPVFSAGIMAEIGDINRFENHAQLAKYAGLAWKQHQSGDFEAQNTRLIKSGNRFLKYYLCEAAFSLVRCDKEYNDFYHLKYKEVNRYQHKRALALTARKLVRLVFRLLKDNRLYRPAE

SEQ ID NO: 416804 - protein, 360 aa, unidentified
MDGNKERPRVTAGLDLGDKYSYLCLLDTDGGEAIEEGRVRTAPEALRRRFASERPMRVAIEAGTHSPWVSRLLEECGHEVLVANARKLRLIYSNKQKTDEVDAENLARLARLDPKLLYPLKHRGEDAQAHLALIRSRQALVGCSTQLVNHVRGAVKSFGARLPKCPARSFHKRASEHIPEALWPALEPILEQIGSLTERIRDYERQLERISKERYPETDLLRQVEGIGPLTALTFVLTLEEPYRFEKSRSVGAYLGLVPATDQSGDRDPQRRISKEGDEMLRKLLVGSAHYILGPFGSDSDLRRHGEKIASRGGKNAKKRAAVAVARKLAVLLHRLWISGEVYDPLYNTHRRQKHQEEAA

SEQ ID NO: 416805 - protein, 351 aa, unidentified
MKYYTTTTEYNCGIDLHARQMYVCVMDRQGKVLLHTNIQGNDFDYFLKRVEPYRHDLTVVSECTFNWYWLADACDAAGIKFVLAHALYAAHIHGGKNKNDRIDSEKLAHLLRSNLIPPAYIYPAERRPIRALLRQRMSYVWHRAELMTHLSMNQTAQNCVPALKGGHNRDVWQERILAQTPNPYHQLAVRCDMDAIRTYDDLIAKLDGTITLYARQHQSREYTLLQTVPGIGDVLSMTILYEIDTISRFPTVKDFTSYCRLVKGSVASAGKLKGLTGGKMGNAYLRWAFGEAAVICKRSHRLLSPYADRLVAKHGTFKGNAILANQLARAVYFMLQSGQAFDPERVIKASI

SEQ ID NO: 416806 - protein, 319 aa, unidentified
MTPTKVYVGIDVAKSRLDVAVWPTGERRTLTNNTTDIDQLTTWLLGLQPRLIVLEATGGYERAALASLGAAGLPVAAVNPRQVRDFARAIGRLAKTDTLDAEVLAHFAKAVHPLPRPLPDAQTELLRSLVTRRRQVVEMLTAERQRLASAKPPVRELIQAHIAGLEQELAHLEKELDCTLRQSPLWRTRERLLRSVPGVGPTVAAVLLAEMPELGRLDRRQAAALVGVAPLNRDSGQYRGRRSVWGGRAQVRATLYMAALVATRWNPVVKNCYQRLLTSGKAKKVALVACMRKLLTILNAMLRDGTAWREIPMAHAIPA

SEQ ID NO: 416807 - protein, 340 aa, unidentified
MNSAAAISVNEATLSRTGYQRVIGVDVAKDKLDLCDSHEKITGSINNDLDHIHKRLLDHIDPASRTLIICESTASYHLLMMDAAHDRSVDVAVVNARQVRDFAKGQGRLEKTDQIDAGVLCQFGQDVKVHLTAPRTAQEKNHTALVNRREALLKMRGQERMRLEHTHDAEAIKFLEEMLENIQKQLQSVEKRLEAILKELAKEDPKVNILLSHTGVGKVTTSVLLTRLPELGTLNRKQVAKLVGVSPIANQSGRKDGKRPIRGGRQDVRNAMYMAANSARRHDPATKAFYERLRGQGKPFKVAMVACMRKMLSTLNQMVRNGETFDATKYASMAEVQSCR

SEQ ID NO: 416808 - protein, 415 aa, unidentified
MSEETAEIIYVGLDWAAATHAVCVLSAVGKILAQFMIDHTADGIATLIRKLSKFGDPADVHIGIERPNGRLVDLLLEAGHPVIPVSPNAIKTWRDGEVISGAKSDAGDALVIAEYLRLRHHRLRPAAPYSSSTKALRTVVRTRDDVVAMRVAATNQLSALLDDHWPGAKAIFADVESPISLAFLRRYPTAASAARLGEKRLAAFLVKHSYSGRRPVKELLTRLRSAPAGTTDPVLTIAVRDVVLALVSVIEALNSAGKALDRSVIARLGEHPDAEVFTSLPRSGQINAAQVLAEWGDSRAAYDGPDAVAALAGVTPVTKSSGKQHAVHFRWACNKRFRRALTTFADNSRHQSTWAADIYNRARARGHDHPHAVRILARAWIRVIYRCWHDQSPYDPARHGAVQKLHTAAGKLRRG

SEQ ID NO: 416809 - protein, 353 aa, unidentified
MKKIAIGIDFSKKTFDATIIRRDDDSYTELAYSKFNNDANGFKAFEKWVKASIKGTPESKKKSELLFCGEHTGMCSIPLCDFLARKQYFMWLESAMVIHRKCGIVREKNDKIDSKRIAEYALRNFSTDIMPYELDSKDLKRLKSLYAAHDMLTKDKVSKINQLKSGTLDASPSAKREIEKQLNHIRKSLDAIDEEIKYLLSQSQEFCYNFKLLNTFKGVGMLTIACLIIKTRNFKDMRDSRELGCYVGVVPCKQQSGTSIDKPSRTSRYRDKNANSLLTNCVISALSHNNPIIRPYYDRLIRRGVHPNKARNNCKFKIINILLAMVRNDTDFNMAIHGKSKEKWRAEQEAAAS

SEQ ID NO: 416810 - protein, 436 aa, unidentified
MTELKQINHHAAGIDVGSEKIFIALPDSSVHNFLTFTTDLSAAIQLLKQHGVVTVAMESTGVYGVVLYEMLEEAQLNVYLVNPSHVKHVPGRKTDVQDCQWLQQLHSYGLLNASFVPVASIKELRSYVRLREGYIEDQATCVLRMQKALILMNIRLHQVISQIQGTSGMKVLKAILQGERNAERLLMLCDARIVKNKKEDVLASLQGNYKPEHLFALEQSVNCYEFYQTKLRECDGKIEEQLIKLTLNKPIPSHINEPKPIRHHPPQIKEYHQKMVTLMNGNDVTSLPGITDYNLMQIVSEVGTDLTKWATEKHFTSWLGLAPGKHSSGKMVKRPKKKPAPRAGLIFREAAQSLLQSKTIALGHFARRLRAKKGAYIAIKATARKLAELFYRAMTKGLQYVERGIEHYQKHLDQLQLKSLIKKAAALKMSIVPLNN

SEQ ID NO: 416811 - protein, 368 aa, unidentified
MPSMQLRRDDVIVGVDTHKDEHVAVLLDGLGGRLGEKFIRATAAGFADLLTFCHDQVGVKGRLIGFGVEGTGSYGIGLARFLRRHGLSVHEVHRPPRKGERRMSGKSDTIDAEHAARQVLGGSIMAVPKTADGQIEALRLLKIARDTAVKAQTTAMITLKATLVTAGDQLRAELEPLTDHKLILACADLASATSLTDPDAAMRHVLGSLARRWLTLHEEVRFHSAHLKAQTKAAAPQLVEAVGVGFDIAAEMLITAGDNRTRIRSEAAFAKMCGACPIPAGSGKTNGRHRLNRGGNRQANAALYRAVIVRMRWHQPTIAYVTRRTKEGLSKREIIRCLKRFLAREIYHLLPPVATGAKTPDTPLQMAA

SEQ ID NO: 416812 - protein, 406 aa, unidentified
MIAPAAPPQNCTFVAIDVAKLVHEVLVEPPTGRRQRWRIRNCQPDYETLRDRLRALKTPVLIGFEATGNYHRPLAYYLGQCGFELRLIASLAVARTRDALYNSWDKNDPKDTQVLLHLLKTGVSQRYHDPLVHRMNDLQELAQTHYQISLRKVQVQHSIMTHYLPLYFPEAERYYTNSRAQWFTQLLHRFPCPAAITRYAPDVFEHEAWTVVGRKVNKRGFLADLYATASQSIGLAVAEDSEAIQMFRVMLAEHQHLCATRLAIEQQADQALQSHPDYQRLRTLPGVGPILALTILAEAGDLRRFPHHRQFLKFCGFDLSTQQSGQFRGMSRLSKHGNARLRYAFWMAANGAVRMRQNTFREKYARYIKADPENPDRKRKALRGRRQGGARRAWVNQDGNQLSAIF

SEQ ID NO: 416813 - protein, 344 aa, unidentified
MKITTVGIDLAKNVFQVHGVDERGKAVLKKQLRRDQMATFFVNLPPCLIGMEACSSAHHWARKLQGMGHTVRLMAPQFVKPYVKSNKNDAADAEAICEAVGRPNMRFVPVKNVEQQAVLALHRVRQGFVKARTAQANQIRGLLGEFGIIIPQGIGYIASRVPDLIEDASNELPGTFRLLVQRLLDHLKELDRQVDELEAQILAWHRSSELSCKLAQVPGIGPITASALVASIGDAKNFDNGRQVGAWLGLVPRQHSSGGKSNLLGMSKRGDTYLRTLLIHGARSVIYRAGQRTESCQWINGVVNRRNKNVAAVALANKNARIVWALLAHDRHYQAGYVRGVAAS

SEQ ID NO: 416814 - protein, 338 aa, unidentified
MKLYGAIDLHSNNNVTVLIDEQDQVVYQKRLPNDLPLITEQLSGYRDRLQGIVVESTYNWYWLVDGLMDQGHRVHLANTAAIQQYEGLKYTDDTSDARWLAHILRLGVLPEGYIYPKGERAVRDLLRKRGQMVHQRTANLLSIQNLITRNTGSSIRSNRIKTLNSETVDALLPNQDLALAVKANLAMIQCADGQIDILERTVTERIKLREEFSFLKTVPGIGQILALTIMLETGEIKRFPTVGDYASYCRCVGSQKLSNGKKKGSGNTKNGNKYLAWAFVEAANFAIRFSPRIKSFYQRKKAKSHGVVALKAVAHKLCRACYYIMKDQVAFDVTRAFA

SEQ ID NO: 416815 - protein, 351 aa, unidentified
MEYIAFDAHKRYTLASVSRADGRLVREERIPHERGALSQFLARCEGGSPVAVETTGNWYWIVDEIEAAGFLPKLVHARKAKLMLGAINKTDKLDARGLNRLQQSGTLPTVWIPPAELRDRRDLPRTRMVLVRQRVQLKNRIHATLAKYALTPEATDLFGSQGRRWLKAHVQSLPTHTAFAVGHMLEQVDGLREQVRQFEQRMRTVFQPTPEIGLLMTLPGVAFTLSVVIALEVGDVTRFAGPEKLAAYAGTTPRVHSSGGKTRYGPLRPDVNRYLKWAFVEAANAICRIRTRHPQRHASCLYERIARRKGHQKAIGAVARHLAEATYWMLARQQPYREPRGEHRTVSSTEA

SEQ ID NO: 416816 - protein, 365 aa, unidentified
MRIDVGVDLHKTQMTVYVRTGKDEGESSQYSVTTEGYREFLKALGKWRSKGADIRVAVESTGNTRYFMHQLEARGYPVVVINTMKFKVITQSVKKTDRHDAYTIAEFLSKDMLPESKLCSEKSEEVRRLLKVRSMLVRTRVSIKNQIHGLLVSRGMEDTRACLQSKRGRQEIQDTLAEAGNGLVVQPLFDTIEALGEEIKAIEAEIEKLMAADKAVKLLQTIPGCGPVTAWTIRAYTDDIRRLARYKQYSSYAGLVPWVECSNETVHYGKITKRGPEELRTAFVQLVMGIRRSRSTLSWRLMVQYESMKRQKGTGKSIIATARKMSKIVWYMLMREEEFKTSLMVDTKLDSVIQSMREKALCESA

SEQ ID NO: 416817 - protein, 443 aa, unidentified
MQQPVEVHVEEHESIVERVAAVDVAKASGMVCLRTPHEMIPGRRVTKIWPVAATTAALVELGDHLRCERVTRVVLESTSDYWRPFYYLLEAAGLTVWLVNAAQVKNVPGRPKTDKLDAVWLAKLAERSMVTPSLVPTEPMRQVRDLARARFDLVEDRTRVKQRIEKLLEDALIKISSVLTDVLGVSGRTMIEALIAGQRNPTVLAELARGRARRNRATLQRALHGRFTDHHARLTRLLLGQLDELSARIDEVTGLLDAAIRALPTPAADAQDNPAPAGYDSAVARLCAVPGGGPDSVRAVLGEIGLDMRVFGTSARLCSWARVAPRTVQSGRKTGRARTGKGNPYLKSALAQIATGAAKTDTFLGERYRRLIKRMPKAKALVALQRSILVIFFHLLADPTAEFTDLGSDFYAKRIDRARRTTHLLRQLHALGYQVQLTETAAA

SEQ ID NO: 416818 - protein, 345 aa, unidentified
MEYYVGLDVSLKSTHICVMDRDRQVVWRGSADTQPSMIAERLKRWKGQLSKVGLETGSLTPWLYHALKDLGFPIICMDARRAADAVKARPEKTDKADAQALAEMLASGWFSPVHVKTMESHRLKALLGAREQLVNVKRQLYGQVRGLLRPFGIKISARAGGKRFDEEVRSSCNQHDALYIGISALLDTLARVELELAGLDKKVRQITAASKPCWHLMSVPGVGPLTSLAFVATVEDPLRFRTAKSIGSYIGLTPKRYQSGERDVTGSITKQGDEMLRHYLYEAAGCLLTTVTAPSALRSWGLKLAKRLGPKRARTAVARKLAVLLLGLWKREDHFRAAPRRAAPS

SEQ ID NO: 416819 - protein, 373 aa, unidentified
MPLLRNPMGWTPPDGIDVPEWRCCNTTQKEASVGEITTIGLDLAKSVFQAHGADASGAVVFRKKLRRDQVLAFFASQPRCLVAMEACAGGHYWARELAALGHETRLIAPSYVKPYVKRQKNDMADAEAICEAAQRPTMRFVRPKTAEAQASATVFRTRDLLVRQRTQMINALRGHLAEFGMVVRKGAGHAPELVSLVRDPTFELPDEARAVLEVLAQMLQQAEEKIAVLDAEIARRARANPMIKRLMTIPGVGPIAATALAALAPAPETFRRGRDFAAWIGLTPLQKSSGGKERLGKVSKMGERTLRRLLIIGASSAAKAAARNGVGPEAWLGRMLMRKPRLVVAVALANKIARVAWALMAHGGVYRAPAMAA

SEQ ID NO: 416820 - protein, 409 aa, unidentified
MDIVPIYKRVIGLDVHQAQITGCAITEQPDGSVTYERREFGGFKRDRKALAEWARAIDPDVVVMESTGIYWKSPYAALEGVGIIAWVVNARHVKAVPGRKTDVADAQWLASLARAGLLRASFIAKADLRSLRHIARHRQKLGGMLASEKNRLHKLLTDAGIRLGVVVSDLHGQSARAMVKALIAGKTVPEVLNLASKRLRASREDIFEALQAEEITPAHRFVLVEIMAHIEELESRIARFDTELLRSLQDAGYGAPLQLLQTMPGIDLMGAAMLLVEIGSDMSVFGSAQRLASWVGMCPGNNESAGKRKSGRIRKGNAWVRRLLCEFAQAAGRSRCALKDKFQALNVRKGHKRSIVALGHKMLRTIYAMLSKNTCYVDKTVDYEALMVARNAPRWLQMLVKHGFVPTPA

SEQ ID NO: 416821 - protein, 358 aa, unidentified
MDQQHQPKQHYAGLDVSLDATSICILDAKGAVVWRGKCASTPEAIRDALRQHAPALVRAGLETGQLSNWLTHGLRRLGVPVVCLDARHAKAALKLQLNKTDANDALGLAQIVRTGWYREVAVKGMDAQTLRLLLVARAQLVSQRQALANTVRGLLKTFGLRIARGSGGLFAPRVREAAKGNDALLAIVEPMLLAWQALREQAAILDRQILARARDDATARRLMTVPGVGVVVALAYMAVIDDPARFRRSSSVGAYVGLTPKRHQSGEEDWSGHISRCGDDLLRTYLFEAATVLLHRHPRACALRDWGLALAKRVGMRRAKVAVARKIAVLLHTLWRRGEDFRWPELAVAPPASTATAA

SEQ ID NO: 416822 - protein, 319 aa, unidentified
MSKNHLTIIYLGVDVAKLTLQLDPTHLGGLSQVNNTPAGLKTLLKALGKLQRKTGSTVHVLCEATGCYHRLLVDTMHKEGVRVSALHAHRVRSFAHTLGKHAKTDAIDARVLTHFGQRMEPEPTAPLNPAHRQLQALTTRRTQLLDMQVMEKNRMESHTLPELIKQAQHTLRYLQGQIDKLNKMIQDFLAQTQELQQQTERLCQMQGVGLVTATGLLAALPELGTLGRRQIVSLAGLAPRVRESGNYKGQRTIGGGRASARRCLYMAALAASLSNPILKGLYQRLRAKGKPAKVALTAVMRQLLTVLNALLKNPDFRLA

SEQ ID NO: 416823 - protein, 342 aa, unidentified
MKHYIGLDAHCRTCSFVVMNEAGQVMLRRQVRTEEAEILGLVRGLEGTKALAFEESTLSQWLYVLLKGEVEELVVANPAVIVRTRSAKTDFIDATELADLLRVKRLKPVFHSADDRMELRALISGYEDLVQEIVRTKNRIKALFRLNALKAKGASFYADALVVEQLPSKVQQEVARALFEQLELLTRQQKEVYGERFKKNLRRFKELRLLCGIPSIGVVRANQIVGIVVTPRRFPDKYHFYSYSMLVRHKQLSDGVQYGNKKAFGKGQLKAIFKSAAVSALRGKNAFHRNYDQMRQAGVEDKAARNKISRSIAATVLGVWKSGKKYDDHYMEVRQSGVSSQR

SEQ ID NO: 416824 - protein, 351 aa, unidentified
MIVLGADTHKRSHTIAGVGATTGELLGERTVQVGHAGFGALLSWARKLGDERVWALEDCRHVSGSFERFLIARGERVLRVPTNLMAETRKSSRQRGKSDGIDAVNVARAALREGLAAFPAAQLDGPELDLRLLVDHRERLVNHRAELNNTLQWHLHDLWPELELPGGALFSTKWNTRIARRLARAEQTMRVRIARDELRRLRELTDTIKTLAREITQLAEQIAPQLLTEPGFGPLTAAKLIGEIAGVQRFATDAKLARAAGVAPIPASSGNTRRQRLDRGGNRQINAALHRVIVTRARCHQPTRDYIERRRRDGKTTRDAIRCLKRYLARQVWNLLRAPAPEMALTTTSIS

SEQ ID NO: 416825 - protein, 390 aa, unidentified
MKKDSIFEKDSRKKGTKKGELSNQELVAKIEALQRERGAALKLTIGLDLGDRSSCYCVLDEKSEVIGRGVVITEGKEMEQLFGRLPGSVVALEVGGHSPWVSRLLEKLGHQGIVANARRVKLISQNSGKNDRLDAEFLARLARADQKLLAPIRHRRESAQADLMGVRVRAQLVELRTETVNAARGLVKSFGQRLAKCDADSLKESHAQDLEPAIRGHIERLLRVVGELTKEIAACDAELEKLSAERYGEETRRLKQVPMVGPITSLAYVLTLDDASRFRHSRDVGCYLGMRPKRDDSGQSQPELRITKEGDVYLRKLLVQCAQQILSGRGPECDLKRWGEKIAAKGKKKAKRRAVVAVARKLAILLHRLWVSGERYQPRRHKQVEQPAAA

SEQ ID NO: 416826 - protein, 451 aa, unidentified
MSPRKSDATLSLAHPDAAGIDIGSGSHFVAVPHDRDEQPVREFKSFTADLHRLAQWLKDCGITAVAMESTGVYWIPLYELLDSQGFTVYLVNARHVKNVSGRKSDVLDCQWLQQLMSYGLLAGAFRPSDEICVLREFSRQREMLLASQVRHVQHMQKALAQMNIQLTQVLSDVVGVTGQAIIRAIVGGERDPHALARLKKRQVKASEDDIAAALQGNWRHEHLFALRQALALYDTYQQLLNDCDQHIQAELHKLHRHDGDPGKSQRRWPKKAMAFDLRTHLFAMCGVDLTRINGIDEMTAFTVLAEVGPDMNRFPSAKHFASWLGLCPGTRISGGKVLNGATKRSPNRAAQALRLAAMALRHSQSALGAYYRRLCARLDKRRAITAAAHKLARLIYTLLTKGSEYVDQGELYYEERHRQRVLHHLTKRAETMGYSLVPLTASGKTNDVSMA

SEQ ID NO: 416827 - protein, 339 aa, unidentified
MDTVRFLAIDLAKNVFQVHGVDAAGKLVLRRRVGRAQLTELVLRLAPCTIGMEACSGAHHWARQFQQQGHTVKLISPQFVKPFVKGNKTDGNDAEAICEALQRPLMRFVPIKSVEQQDVQSLHRARSRLVSNRTGLVSQMRGILTERGIVFAQSITRARREIPAVVADMSNVLTPLAREMLADLMDQLRELDKRIAGFDRRIDAVFKASETCQRIAQIEGVGPKTATAIVAAVSDPKDFRNGRHFAAWLGLVPRQSSSGNRTHLLGISKRGDRHLRTLLIHGARAVLRTAPTKHDKKHAWALALQARRGANRAIVAIANKMARVIWSMLATGQSYQKAV

SEQ ID NO: 416828 - protein, 402 aa, unidentified
MTEDQVWAGVDVGKEHHWVCVVDGNGNMVFSRKVVNDERTIRDLVAEVEKLAGEVSWAVDLSNAYAALVLTVLADEGKTVRYLAGRQVWQASATYRGGESKTDAKDARVIADQSRMRGADLPVLRPGDDLITELRMLTAHRADLVADRTRTINRLRQQLLAVCPGLERVAELSQDRGWAVLLAHYQRPKAIRRTGVSRLTKVLAAAGVRNAATIAAAAVTAAKAQTVRLAGEDVGAGLVAELAQGVINLDERIKHTDADIEERFRRHPLAEVITSLPGIGFRLGAEFLAVVGDPALLQSPDQLAAWAGLAPVSKDSGKRTGRLHTPKRYSRRLRRVMYMSALTAIRCDPTSKAYYQRKRDQGKRPIPATICLARRRVNVLYALIRDNRTWHPDTPQIATAAA

SEQ ID NO: 416829 - protein, 406 aa, unidentified
MRDYIGVDWGDAEHAVWIEDDAGTKVMSQALPQTAEALAEWGRWLDERRAAGIDLWAAIERPEGRIVDFLLDHGVVVFPLNPKALDRARDRFRMSGAKSDPFDARVAAGFLRTDHGHLQPLRPSSEAAQELKELTRDYTRQVRQQTRLLNQLTITLKEYYPRALEVCEELKSRWAQEFLRAYPTPAALRALTERQWQRWARAHRLSAERTAALWATIQRPQIAVPPHVVRGKARRLAVLLDQFVVTAGAVEMYRQAVEDFFASMPAAKWAGSLPGGHSGTTVPAVWAELGDAPGRWQTAQHLQGHAGTVPVTEKSGKAHLVKFRFACNTHLRAAIHQLAFLSLRHSEWARVYYDRCRRRGHPHHHALRALAAKWLKIIFAMWTRQVPYDEQYHLASIARHQLRQLV

SEQ ID NO: 416830 - protein, 413 aa, unidentified
MNKRKEDLIYVGIDLHKESHTAVILDCWNTKLGEITFANTPAEFPKLIRKVNKFCTENKEPVYGLENAYGYGRGLAVWLIAKGLMVKDVNTSLAHRQAKCRAMYKKSDSDDAEAIALATINMLYTLPDACPNDAYWSLSQMVNRRDNIMTQRIRLKNQLHEQLCIAYPSYKQFFEDISRKTALFFWEHYPSEKYLRGKTPESLAEEMKDVGHNSFSVRRCKIILDAVKRDHTKAKEYQNYRDVITKGLVKDLQHYDEQLKAVDKELEQLYHDLGCTLATMPGMNITTAVKIMSEIGDVNRFPNPAKLAQFAGIAPINLSSAGKGKDKASKQGNSRLQATLYFLAIQMIQISTKGKARNPIFRDYYDRILAEGKNVKLVLVSIARRLVNIIYGMLKNKTEYRFPRLETGEVAEY

SEQ ID NO: 416831 - protein, 321 aa, unidentified
MHLGIDVSKHKLDCCLLLDDGKTAEIIIDNHQVGYARLRKWLQAHDAENNLHICMEYTGIYYEQAADYFSRLYTVSVVNPYWIKSFGMAVFKRSKTDKQDAKLIAQYSQMVQPEPWKPLTEAQQQLRDLNRYLIRLKRQRAGEETKRQTAPDYLQGYLNQSISHLNEQIKMVNQQIKQLLKQDEEHADKIKRLQTIPGIGLTSAAVLFTLLQHGRFNKASELVAYLGLDPRHRQSGSSLNKPSRISKFGQNDLRAALFMPAMVAYRDKAFPAFIERLKEKKKPPKVIIVALMRKLAVIAFHLIKTGQDFEPERYQARNSTQ

SEQ ID NO: 416832 - protein, 338 aa, unidentified
MKISLVGLDIAKSIFHLSAVNQAGKQVKKKVLKRPQLLSFFSQLEPCIIAMEACGSAHHWARQFQALGHQVKLIAPQYVKPFVKGNKNDYNDALGIAEAAQRPNMRFVPIKSLEQHDIQMVHRLRERLVKNRTALVNQIRGLLAEYGLVINKGVAAVRTELPFILEDAENGLTVMARESFFTLHEELKELDENLQTCEKKIIAINRSHEACQRLDEIIGIGPVTATAIYAAIGHGHDFENGRHFSAWTGLVPKQHSSGGKANLMGISKRGNAYLRTLFIHGARAVLRYAEGKEDSFSRWATSLKERRGSNKACVAVANKLARMAWVILAKNERYRPAM

SEQ ID NO: 416833 - protein, 407 aa, unidentified
MDVLHPRCAGLDVHAANLVACVRIAAGATVTYEHRTVSTTTRGLLELADWLKARGCTHVAMEATGVYWKPVWHVLEGHFTLTLANAMHIRNIPGRKSDKNDATWIADLLALGLIRSSFVPPSPIQDLRDLTRTRKQLVREIARHTQRIQKTLEDANLKLTEVVSDILGVSGRAILTALVAGETDPERLTDLTHGRLKASRSALVDALHGRITAHHRFMIQLHLTQIAALETAVTHLEVRIGVALEPFRAAVSLLTTMPALKATSAAVVVAEIGDDMSKFPSAGHLLSWAGLCPRLDESAGKRRSTRTRQGAPWLKTTLVQIAWAAARKKDSYFHAQFLRLKSRRGPKKAIVAVAASMLTDAYYMLRDGVEFHDLGDQYFVQRDKERLTKRLLQRLHELGVEVEVKAA

SEQ ID NO: 416834 - protein, 450 aa, unidentified
MEILYANCAGLDVHKKTVKVCLLRRPSTGQPHKEFRTYLTTTEELVQLGDWLKEQGCTHVAFEATGVYWKPVFNLLEGSFELLVVNAHHIKQVPGRKTDVKDAEWIADLLQHGLLKASFIPSGPQREVRDLTRYRVRLTEEKAREVNRVQKTLEDTNLKLGDVVSDIMGKASRLILQAIADGESDPGRLAALAVGRVRAPQEQLEAALRGHVTDHHRFLLSEHLTQIRHLEQAIERVSAEITRRFTPPPPDEAPPSHKEEEARQELSLASPSPQESASASQATVSWAAAVVLLCSIPGIGERAAMGILAEIGINRQQFPTAAHLASWAGVCPGNHESAGKRLSGKTRKGNPWLRCLLVQAAHSASHQKQCYLAEHYRRIAKRRGAKRAAVAVAHTILVIIYHLLRNQTTYQEKGESFLEEQERQGAEKRLVRQLARLGYHVELQPIALAG

SEQ ID NO: 416835 - protein, 342 aa, unidentified
MAKQEVIKQVVGIDIGKEKFFACYQIKDLDEYVVIKGTKSFRNDNGGYKEFLLWCKKREKTTVAPTIYVMEATGIYYEDLAYFLYENGCKVSVQLAQKLTYFAKSNNLKTKTDKVDAKMIATFGIEKALETLKIWEPPSKEFRVIRDLAREHTSLKEDLTAAKNQLHAMKHAHQTYERVIKLKEEMISFYQEQLKSIEKELKVFIKANQQLSNKIKNIETIKGVGFITIVKVLAEVNGFLLFKNIRQLVSYAGLDVVEKESGNFKGKTKISKKGNARLRSVLYMPAMTAATHNNNIRTFYKRVNTDRKIKKHGIVAVMRKLLILIYTLWKKDEPYQIDYKMR

SEQ ID NO: 416836 - protein, 334 aa, unidentified
MKKFYVGIDISKSKLDVAVYDAEKKKIANKFVIKNEADGIQSLFSTLKKEKINLEDCWFCFEHTGHYGFSLCYELEQICCVYSIIPALQIKLSLGMTRGKNDQVDAERIAMFAYTFRDKLQPSKMSSDCFQKIKQLLTYRNQMVRISTQLQNSLKSHQAVCQLTHFDYVVDEIKKQIIEVKVKIESIDELLMSEIKRDKTLENNFNLLKTIKGIGPIISIYLLVLTQNFESFTDARKFNCYAGIAPFEHSSGSSIRGKTKTSSLRNKTIKSLLFNGANAAALHDKEINNYYKRKKEEGKHHQSIMNAIACKLVYRAFSVIKRQSPYVTLYAQNF

SEQ ID NO: 416837 - protein, 421 aa, unidentified
MTHGSHEEFAAFVGIDWADAKHDVCLQAAGSEKRESCMIEHTPETLDAWVSMLRTRFHGQPIALCLELNKGPLVSALRKYDFLVLFPINPITVARYREAFTPSRAKDDPTDAELQLELLLTHRNKLQPLQPQSPAMRALEQLVEHRRRVVGDKVRLTNRLTSTLKNYFPHVLQWFQEKDTLIFCDFLSRWPTLKAAQLARRSTLETFFRDHHVRSADVINTRIHALKTAMPLTTDEGVIAPHALFVQVLVSQLRVTLHAIEDFDTAIAQRAQNHPDFSLFQALPGAGPVFASRLLVAFGEQRERYASAAELQQYAGIAPVTERSGKKSWVHWRLQCPTFLRQTFVEWAAESIRHSFWARVYYQQQRDKGKAHQAAVRALAFKWIRILYRCWQERTPYDESTYLHALNRRGSSLIQNLAKVS

SEQ ID NO: 416838 - protein, 391 aa, unidentified
MFYIGVDIAKNNHEASIIDSNGKLVSESFSFSNSIRGLEKFQKFISSFSIDSNNCIIGMEATGHYWLSLYSFLIDLGFSCIVINPIQSDAFRKMYIRQTKNDSVDSFVIAQILRFGEFSVSHFSDEDTFALRNLSRFRFALVDEASDWKRKLVAILDQVFPEYSSLFSNIYGVTSKELLSKYPLPEDMISIPADELAKMLSKCSKGRFGIDKAKEIQEKASNSFGVKFALKSFSFQIKQIIAQISFLEDQIFEIEDEISSMINSLCPVITSITGIGDVLGAAIFSEIGDISRFERANQLVAYAGLDVAVKQSGNFNATDTKISKRGSPYLRRAIWLAACVAAFKDPALSVYYQKLRQRGKAHGTAIGAVARKLTNIIFAVLRDNKAYIPNI

SEQ ID NO: 416839 - protein, 355 aa, unidentified
MKYYTSTTEFNCGIDLHARQMYVCVMDRQGKKRVHTNVKDNDFSFFLKLIEPYKHDLTVCCECMFGWYWLADACQASGLTFVLAHALYVKAIHGGKNKNDRVDSEKLTHLLRSNLIPPAYVYPADKRPLRALLRQRIFYVWRRSELLARIHSHQLAHNRLPARQTRRTRDPWEEQLLGAEDNPLRQIALKNDLAMIRHFDQQIFALEEELQRQTKKVASREYALLQSVPGIGENLGLTILYEIGDIKRFPTVKDFLSYCRLVKGTVASAGKIKGLRGAKLGNPYLRWAFGEAAVIAKRDHFRIRPLAQRLEAQMKGNKFKANTVVAIKLARAVYFMLKNQTVFDPDRLVAVLARN

SEQ ID NO: 416840 - protein, 436 aa, unidentified
MAQKRRDASRSKVRHARHGHLHLHEDEGTRLVAVVMIGVDPHKGSHTAVAIGAAEEPLGDVRVRACPAQAERLVTWAAAWPERTWAVEGAAGLGHLLAQQLVAAGERVLDVPPKLAARVRLLEAGDTNKNDPNDALSVAVAALRSRARREVTAEGHAAVLKVWAKRHRDLARARNQVTCRLHAVLCELVPGGVSKEITAGQAARILDQVTPSSAVAQARCELAAAFLEDLRRLDAQLRDTKTKLAAAVRASGTTVTEVFGVGPVVTGTVIGDVRSISRFASRDRFAAYNGTAPVEVSSGDRKVHRLSLRGNRRVNHAIHMAALTQIRHRHSAGRAYYDRKVAEGKTHKEALRCLKRRISDAIYARLQADARQAAAASTRDPGGQPGNDTDASAAGSHPEHRLFGQATPGPGTILRPVTQSDPTVAKRNPKKARKTP

SEQ ID NO: 416841 - protein, 317 aa, unidentified
MDTEAMPLRYVGIDVGKDRIEVHIRPDAIAFGCDTDANSLNHLVARLKPLKPKVIALEATGGYEAIIAATLSNASLPVAIVNPRQTRQFAGALGRLAKTDRIDAGVIAEFAEMTRLEPKPPADAQLTELRALLARRAQLVEMAKAEKQRGAKAENPLTRRSCAKVLRQLQAEIARIERAIGKLIDASPVFQAKAALLKSIPGVGDVVARIFIAELPELGIVDRHEIAALVGVAPINQDSGRWRGKRKIKAGRPQVRAPLYVACLSMIQCNKPLRAFYRHLVADGKAKKLALIAVMRKLVVIANAMVKAGKPWTEAEA

SEQ ID NO: 416842 - protein, 426 aa, unidentified
MKGTQNEKISQIKFSTLVVGIDVAKETHYARAFDFRGIELSKLLKFSNTAEGYEKLEEWMQNICQQHNKTEIIVGLEPTGHYWFTLGDYLKSQGHKLAMVNPFHVKRTKELDDNSPSKNDRKDPKTIAMLVKDGRYREVYIPEDVYQELREAVTERDRLVQRMNTISNQVTRWLDIHFPEFNTIFKDWRGQAAIQVLRNYPTPDKIVAAGAEKIEETWKSTMKRTAGLKRAQELVKAAEKSIGRRTGLVAAEASLQNLLNEYDLYSQQYQQLEQLMLELLQQVPHGEKLLEIKGVGLVTAATFVGEVGDIRRFQDPRQIQKLAGLNLVENSSGKHKGKSKISRRGRKRLRHSLFMAMITILATNPEFRQLHQRNLKRETNPLNKMQSIVALCGKLIRVFYALLRTGNDYSAEKMLGDIKQSMKTAA

SEQ ID NO: 416843 - protein, 315 aa, unidentified
MDERTQTIVGIDVSKEQLDVHLLPSGEHFTMPRDDAGLKTLSKRLAKQALQVVAMEATGGLEGPVAAALHAAGLPVRVVNPRQVRDLARGLGMLAKTDAIDAAMIARFAEAAKLTGAPVPDAEAQHLAALVARRRQLLGMATAENNRLQQTADKRIRRSIQRLLRSIEAELEDVDRDIGNAIKASPLWCDLAKLLDEQPGIGSVTAHTCIAELPELGRVSNKKIASLVGLAPHARDSGTMRGKRTIWGGRAKVRSALYMAALSATRCDPILKEFYRRLLARGKLPMVALVACMRKLLVHLNAIAAKYYAQLEQIA

SEQ ID NO: 416844 - protein, 336 aa, unidentified
MKKKFDYYVGIDVSKLTLDVTILYEWDNTEKTEYYVIENKEKSIAQFVKKKLGNYALEQILFCFEDTGIYSLPLAYYLDDNKIAYWQVPAIEIKRSKGITRGKNDKIDSKDIAFYAYIHMHKFRPSSMSAKSIQQLRLLFTEREKVLRALALFKSTSENKDFVSKEVFNAVASINKTMLTQLKQTLKRIEEKMLAIIASEDKLNQQYKLITSIPGIGMQTAIYLIFATKGFDAFDNWRQLACYAGVAPFPYESGTSIKRRDKVHHLADKKLKCLLNMCAISAIRYDKELMTYYERKVKDGKPKMLVINNVKCKLLGRVFAVVNRNTPFINTFKFAS

SEQ ID NO: 416845 - protein, 343 aa, unidentified
MSEVTTIGLDIAKNVFHAHGADARGAALFSRKISRSKLLEFFAQQPRCTVALEACGGAHHWGRELTHLGFDVKLIPPAYVKPFVKRHKNDAVDAEAICEAAQRPNMRFVAIKSEEQQASGLVFRTRDLLVRQRTQLINAIRGHLTEYGWVAPKGPSHVLMLGDLLEDEMGSSIPDAARTMIRTMLGLLKELNDRIGDLDKEIARRAREDATARRLMTIPGVGPITATAIAALAPPAETFAKGRDFAAWLGLAPRQASTGGKQKLGSITKMGERTLRRLLIIGSSAVVLQASKRGAPSGSWLEQMLARKPRMLVSVALANKTARIIWALLMSKEDYRAPVAAAA

SEQ ID NO: 416846 - protein, 412 aa, unidentified
MRAAGTEGLPAMAMQVSRERSKTVHHIGIDLAKRKHSASVVGGDGERILRGFEFANDAEGFASLLEKLASVGAGCDDSGVCLEATGHYGRNLIAFLEGHGYEVFEVNPLLTSNWRKATSVRKVKNDAIDAEALALWLLAGNPTRRRRSKSESDDLRSLARSRTSLSHIVGDCKRRAHAILDVVFPEFHGFFADDFGKSASAVLRRWGSAEALAKARVDSVEKAIRSGGGRRFTRADAERLKELARSSVGQPSAPLSFQLRQLLDQIEFTRSQMKELDAELEKLVGDSPITTVPGVGIVCAAGILGEIGDVSRFEDASKMLAFAGCDPSVFESGEFVGAQARMSKRGSPFLRWYLWLAADRARMYDPALRAYYEKKRAEGKCHKVAVSAVVRKLCNIIFAVLRDDRPYACPVN

SEQ ID NO: 416847 - protein, 404 aa, unidentified
MYNAVGIDISKNKSTIAILQPGGTIIRKPFNVSHTSQNLNELADYLGSLEGPSKIVMECTGRYHEPMLKVLYEAGLFVSVVNPHLIKNFGNNSLRKVKSDPADARKIARYTLDNWAELRQYSDMDDTRTQLKTLNSQFSFFMKQKVAAKANLIALLDNTYPGVNKLFNSPPREDGSEKWVDYAYSFWHVDCVRKIGLKTFTERYKAFCKKHHYIFQQDKPEKLFNASKELVAVFPKEKTYKLLIQQSIQQLNLASGHVERLRQEMNALASTLPEYNTVMGIYGVGKTYGPLLIAEIGNVSRFTHREALTAFAGVDPGVDESGQHKSKSNRASKVGSARLRKTLFQIMTTQLQNAPEDDPVYRFLDKKRAQGKPYYVYMTAGANKFLRIYYGKVKECLRTLEQAE

SEQ ID NO: 416848 - protein, 356 aa, unidentified
MAMLADTIDGVIGVDTHRDTLTAAAVTAIGGLLADATASTDAAGYRQLLGFATSHLPGRRCWAIEGAGSFGAGLATFLLDHGEQVIEVPRRRRSTRRTAAKSDPLDAVHIARDALITQHPAIVRRRGDREALRVLLTTRRNAVTAWTQTVSQLKALIVSAPEELRAELRGRGTKAQITYCAALRERPTRSLEHQMTARALHATARRCQLLRAEINQHQHDLHTLVVAITPWLLELPGVGPITATQILISWSHAGRWRSEAAFAAQAGTSPIPASSGQTKRYRLNRRGDRQLNHALHTIAIVRMRDDPLTHAYVQRRTTQGKNPREIRRCLKRIIARQLYNLLKHYDRPAIQILHAT

SEQ ID NO: 416849 - protein, 329 aa, unidentified
MKQVSTIGLDLAKHVFQVHGADNEGSALFNRKLRRTEVLRFFERLPPCLVGMEACGGAHYWAREIAQFGHDVRLIPPAYVKPFVKRGKTDAADAEAISEAVIRKTMRFVPIKTAEQQADAMVLKTRALLVQQRTQSVNALRAHLAELGIIAAGGLANVAALMTIVREAEDTRLPTAARFALTAIVDQIDALAIQIGVLEHTIVTESKRDESMRRLTTIPGVGAITAATIKALVPDPGGFKSGRHFAAWVGLTPRPHSSGGKERLGRISKMGNPELRVLLVLGATAVLRIARNNEKDTTLVKSTACQTSIQGGRCRVGQQNGSHHLGPLE

SEQ ID NO: 416850 - protein, 379 aa, unidentified
MDRTITSADLGNTLYGSMELSKKTWLLAIQFPDRPQPSLYPIEGGNTEDLMAKLAAASDRWAKVSGKRPSITLCYEAGYDAFWLARFLKTRGIECLVVDAASLQVNRRGRRAKTDRIDVEMLLRALIAWCRGERHVWSVVRIPSIDEEDLRRSHRERSRLVQERTAHINRIKGLLFAQGIRDINVRSKYKRLEVSKLVTGEGRPLPPRLASEIARELERLALVQQQLVTIERERDEAPTPCTSTEKKRVQLSLLNGIGPTVSAIMAREVYFRQFKNRRQVAGFLGLATSPHDSGAVERSQGISRAGSGPVRVTMIQAAWLWVKHQPKSAITRWFLQRTDGHSGRIKRIAIVAVARKLAIALWRYVEQGLVPQGAILTSR

SEQ ID NO: 416851 - protein, 341 aa, unidentified
MKNLFIGVDFSKEKVDVAIIFADGLAETASRVFNEFKTTVSGYKQLIKWVEQNSSGIEPSLWLFCGENTGDYSKGLCNFLYGKGYDMWLENAKSIKDASGLRRLKSDRADASMIAEYAMRNYDRAIMYEPLSESLAQLRELFLYRQMVVHHRCSFQVRRGEKKLTMEKSPVKTMISQSGRHIVSELNKEVEKIDKRIAELIKSDEELTEVFTIVTSVPGIGTQNAVCLMVYTDNFRRFNYDSRKIACYYGIAPFGKDSGTSVHSDPRVHYMANRRIKSMLTQAALAAINFNPVIARYYMRLVERGKMKQVALNNVKNKLIRLVTAMVRNRQIFSPEYKISA

SEQ ID NO: 416852 - protein, 367 aa, unidentified
MEKSSKVFVGMDVHKESIDITLAEVGGEVRRLGQIGGDRGSLLKMVRKQQSKGGERVFVYEAGPCGFWIHRELAALGERCMVVSPALVPKRAGDHVKTDRRDSERLASLARAGELEAIHVPDIRDEAIRDLVRGRDDAVIAQRRVRQQLKALLLRNDIRYVGKSSWSGAHRRWLSELKLPEPAQQIVFEEYVDAIAVATARIERLIRAIESEVTTWRFAPVVAALQAMRGIQFVHAVTLIAELGDLTRFGSARQLMGYLGLVPREDSSGEHRRQGSITKAGNSYARRVLIEAAWAYRHPARVTRIIATGQAGIPKAVCDIAWRAQLRLSAKYRRLAARHVNHNKIVVALARELSGFVWAIGQSVKPQ

SEQ ID NO: 416853 - protein, 340 aa, unidentified
MSLYGGIDLHANNSVIVLINEQDEVIYRKRLSNDLSTVLEQLAPYHTEVKGLVVESTYNWYWLVDGLMEADYRVHLANPAAMQQYSGLKYTDDHSDARWLAHLLRLAVLPEGYIYPKAERAVRDLLRKRAHLVRQHTANVLSVQNIMARNTGARFSVKRIQELTKQELTTLLAEETQVLAVTSSLVVLDCLRQQIKMLEKTVHKRLNHTPSYEQLLTVDGIGTILAQTIALETGAISRFPTVGNYASYCRCVDSKKISNGKRKGTGNVKNGNPYLAWAYMEAAQFAMRFQPAAQRFYQRKLAKSRNNTVLARKAVAHKLSRACYDIMRDLVPFEATKAFG

SEQ ID NO: 416854 - protein, 402 aa, unidentified
MLPTRLREQNESDKVLIKGDSMSVRRILAKTIDTDLEYEAIGIDLAKNCVSAALLTTDGEVVCIDRLDYSELEKSAQALSPTTFAMEPCTEMNYLVQKLEAWGHRCLVIGGKNVQNYVENHYSGQKTDLNDAQALAFLAQDTQLRTIKAKDMEQRKYASLTTLREQYIKQYRQTIVSLKGICQAWGLNISKGISGKARLKDLIENHAAFPEELKESLVDMVTHAQTAQKALNKITKTLEELAKNDKLCQLIRTIPGLGLICSCRLRATIGDIKRFKNPKDFPAYYGLVPRSIATGHNEKKGKITHRGDRTMRSLMVQGAGSVINMATRGKLKSKQLTKWILKKQKEKMPWGKLVCAVAAKLLRIVRAVLISNKPYNSKIAGVAKCSLPKVLIPELMHQAIQS

SEQ ID NO: 416855 - protein, 397 aa, unidentified
MNKIVHYIGLDVHKDSIAVSIAPHNSTEVRRYGIIGGTLDAMDKLIKKLSSQNVELRLVYEAGPCGFVLCRHLRSKGIHCDVVCPSLIPKRASDRVKTDRRDADQLARLYRAGELTAIQVPDQEDEAIRDLIRARSAAVRDQRQARNRLKGFLLRLGFRYTGKSSWNDAHKRYLSGLLMPRPAQQIAFQEYIHATNDAADRLGRLTQAVEDALSGWKWEPVVRALMSLRGMQVLSGMTVVAEAGDLSRFENPRSLMHFLGLTPSEHTSGDKRVLGGITKCGNAHCRHVLTEAAWHYRLKPLVSEAMQKRQEHQSKEVRLIAWKAQQRLHKRFRQLVVRKKSVVAVTAIARELVGFVWAIACKVKPAPRPPAPEVIRTCRGKVYVLDPGKKMPNTKAK

SEQ ID NO: 416856 - protein, 408 aa, unidentified
MNAVGIDVSKGKSMVAALRPMGEVALLPQEFLHTAPGLDQMAHAILALGEGTRVVMEATGRYHEPVAAALSAYGIYVCILNPLYIKQSGAGSIRKVKTDKADSLKIAKYGLDNWVDLREHTAMDTIRQQLKLCSRQYNIYMKTEVSLQNNLISLTDKTFPGVNELFSSPARADGHQKWIDFVMTFWHCDCVFRISEKAFTARYEKWCKRKGYHFRAEKAAEIYAQSCELFVTLPKDDNTKLLITTAAQQLLAGKMTLAALRAEMTRLAQQLPEYDTVRAMYGVGETTAAQLMAEIGDVRRFPRRSSIVAFAGVDPAITQSGKHEVQSTATTKRGSPHLRKTLYQIVCTYLRKSPEDEPVYQFLDKKRGEGKPYFVYMTAAQNKFLRIYYARVKECLEAFDTQQNTVQD

SEQ ID NO: 416857 - protein, 388 aa, unidentified
MFRFKGSTQAVVDYNSTIIGALELSEKKWVLAVQLPGVDRHSRHVLDACGDRLVSFVERLKARCASAGRKVARVILTHEAGRDGFWLARFLARRGIEVHVMQPSSLPVDRRARRAKTDKIDVEMLLRTLMAWLRGEPRVCSMVPIPSEADEEARRAHREREDLTRERRSIVNKIDAILATLGIKGYKALRRDRREQLNCARQPGGDPIPQKAKARIERLLDRLDLVLKLIDQVESARDAVLKKDAPADEAERMIRSLTELRSIGPDFATLLVREAFVRQFRDRRALAGYVGLGGTPFSSGGSEREQGIGKDGNRRVRAAMVELAWMWLRWQPDSALSAWFRARVGTMGGGRIRKIMIVALARKLLVALWRYVKDGVIPDGAIMKVAVA

SEQ ID NO: 416858 - protein, 438 aa, unidentified
MSNKVIFNLDDLFISVGIDVGADFSWMSIALPNQQFVGKPYKILHNSMDSLATAVSKIKEAEELYSLESRIFLESTGIYHYPLFCYLRDKGFNCSVINPIITKNSTNINIRKVHNDRFDSKKAALVGLKPDLKVSLMPSDLALNCRNLCREYYDLMDNRSAYVNKLQGELRMAFPQYLGIFSKVTINTSLTLLETYSSPSAFIEADKQEIIGIIKSAARFGLTYAQNKYNAIIQAAHEANEFGYIIDSNIKRIRLYISFIRKYDEEIANILHSMHELVDTNEDTDFVKQIHLIETFKGAGFLSAVSLMGEIGDFCAFSKPKQLFAYFGLDPAVKQSGKFEGSKVQMSKRGSAIARRVIHTLALQSISTSRTGEAKNPVLRDYYLGKCGAKPKLVAMGAVSHKVCNIIFAMLRDNKPFEIITPQEHIKQYNAAKCDIAA

SEQ ID NO: 416859 - protein, 342 aa, unidentified
MVTTIGIDPHKATHTAVAIDETEQVVGELTVPADRYQTNRLVEWASHLDGDGRLWAVEAAGGLGYLLSQQLITRGEQVVDVPAMLASRVRVLGSGKSDKNDPNDARSVAIAALRQPTLTRVRREDYAQVLRMLSKRHHELTSLRTQAVCRLHAVLMQLRPGGIPKRLSTIKATRMLQGIRTLDPVGEQRRLMARTHLGDIRRLDREIKANKTLIRQAVAASGTTVTDVYGVGPIVAAFLIGYTGDPTRFATPDHYAAYNGTAPIEVSSGGKTRHRLSMRGNRKLNHAIHMAAVTQIRFQTPGRVYYDKKLAEGKTKKEALRALKRRISDAVYQRLQADQQTR

SEQ ID NO: 416860 - protein, 410 aa, unidentified
MIKENYIYVGIDLHKETHTAVMIDCYNQKLGEITFPNRPADFPKLVAKVKKCNTDGKTIVFGLENAYGYGRALAVWLIDKGYLVKDVNTAISHRQAKHRGAMYRKSDSDDAEAIALATLSMLDKLPDACPNDAYWSLGQLVHRRDNIMKQRTRLVNQLHEQLCIAYPSYKSFFNDISRPTALYFWEYYPSRKYLKGKTVEDLRAELVPVSHNRYSAKTCEKILDAVASDKVKNNAYQDARDMITLSIVSDLQHYDSQLAEVDKMLEQMYKMLGCTLTTIPGVNVITAVKILAEIGDIKRFSNANKLAQFAGIAPLHLSSSGKGKDVATKQGNRRLQATIYFLAIQMVQVSSKGTPRNSVVRAYYEKRKAEGKTSQQALICISRRLISIIYGMLKHGTEYRMPVVESAGEK

SEQ ID NO: 416861 - protein, 452 aa, unidentified
MIKKAKNKGSQHLSIPVVHPNAAGIDIGSRLMSVAVPPGRDQQCVREFGSFTCDLQQIARWLKQCDVDTVAMECTGVYWKNLFLVLTEHGFDVCLANARHTRNVSGKKTDESDAQWIQRLHACGLLSSSFLPDDLTARLRSLVRHRRSLTQDSSRYILRMKKALEMMNIKFHSLIRDLMGKTGTAIVEDIISGQTDPDKLLTHVNYRVKASREDLRKSLQGNWRQEQIFLLAQCYKMHRFVEEQIAVCDSQIEIALQAMEAIKHDGAIEEPKTIEIKPKQKKHPTFNTRSYLQKIHSVDVLAIYGISDIAAIEILSETGTDLSKWPTQQHFVSWLNLCPNNKISGGKLISSTLLKKKPNGATQAFKYAANGLQRSQHWLGDYFRRMKAKGGNKYAIVATARKLAIIYYKMVRYQQNFTPFDSQKYKSKFQRTKIDYLERLLAKLKQSTLTVI

SEQ ID NO: 416862 - protein, 441 aa, unidentified
MRRCIGLDVHREFAQVAIWERGQVGQAGQIATTPEALRLFADSLCEHDEVAIEATCNTYAIARLLEERVARVVVSNPQKTRAIAEAKVKTDKVDAAVLAELLAADYLPGVWLPDEETHALRRQVARRAHIVRQRTRLKNRVQSILHRNLVPRSPAADLFGRKGRAWLAEQPLPADERQAVEALLRQLDFHGEELKLIDADLAQTALARAEVKRLMTIPGVDATVALAIVGAVGDFGRFLSPGRLVSYLGLDPKVRQSGGQPASHGRISKQGRAHARGMLVEAAWVAAKTPGPLRAFYERVRARRGMQIAVVATARKLAVLCWHLIVKDEDYAYQRPSLTAQKLRALELRAGMPSRRGQRGSTHAYNLKEVRARERALSEQAERAYRQLVADWQAKAPTSGAGVAAVNGARLSGPAVGPAARQDSAPTPALRSGVGHAHTEA

SEQ ID NO: 416863 - protein, 314 aa, unidentified
MSFKIFCKNCCGLDVHKTWIYACIGITDTNGRTDYKQTRFSSFPKGLKELSDWLAKYHCTEVCMESTGKYWIPVFNVLEKAYVSVILSHPKYTKPQKGNKTDRKDAKWICDLFMCDMVKPSFIPPADIRHLRDLVRYRFKLICMITGEKNRAQNCLTVSNLKLDDVFSDVFGKSSRSITEYILEHPGDLFDVTPFVDRRCKTPIEEIQAAVDGAISPEQAVKLRQCLNHIDELEKHLEEIEQEILRLSDKYQVALDLIRTVPGFDKNPMTAIQVLSEIGGDMSVFPSAKHLVSWAGCCPRNDQSNKKICNFIFL

SEQ ID NO: 416864 - protein, 337 aa, unidentified
MNVSPVAYRLFAGVDIAATSFAASWTTTTSPRERAVSFSQTPDGFTAFQDRLRSVGVPEAETLVVIEATGSYWVALAVSLYDAGFAVAVVNPAHVHNYALSLPRRAKTDALDARVLAQFAAERQPPGWTPPPQVYHELRQRLVARDGLLSMRQQARNQRHALLQWPVLITSVRDHLDKVITELDTRLAALDSEIAQVLTDGAWAESATLLLGITGIGLVTTAWLLVGTLNFQACTSAESAAAYVGLVPLARESGTSVRGRAQIGHGGHSRLRTALYLATLTAARFNPRIKAHYERLRAAGKPAKVARCAAARKLLHLAYAVVTKEQPFDPHYGMLRT

SEQ ID NO: 416865 - protein, 386 aa, unidentified
MQRNDLSRSLVAFDQNSTLVAVVELSLNRWVVQGLVPGLSKQPLKALGPDASALLALVNRWQLEGTKGGGRIKRIVVAFEAGRDGFWLARWLRSRGIEVYVIHATSIPVSREHRRAKSDRLDTELLMRALLGWLRGERKHCQMVRIPTIEEEDARRPNREHQTLVGERTRNVCRIKSTLVLHGIRDFNPKRLKASERLETLRCPEGGSLPPNTLAELRREMAQLRLISGQLREIEKTREERFKRAPRQGTHPMVLLLAKILGIGIETADMLVHEILSRELRDERAVGRYAGLTGSPYDSGAKRREKGMSRAGNARVRRGMVQLAWRWIRFQKDSQLTQWYNSRTESARGDIRKTMIVALARKLLVSLWRYVTTGEVPVGAKLKAAA

SEQ ID NO: 416866 - protein, 440 aa, unidentified
MPTPCLTVLDPTAAAIDVGSETLHVSIAGGPPKVFGTVTGQLHALRDWLKENGVRTVAMEATGIYWLCPYEVLEQAGLEVVVVNGKYVKNLPGRKTDMKDCQWQATLHAHGLLKPGFVPPEHIRRLQDYLRLRADHITLAASHEQHLQKALERMNLKIHDVISDLTGVSGLKLIEAILQGERDPAVLLGLCDPQIQKRKAERLQAALEGTWKAEHLFALRQAHELWQFYQQKIAECDQQIEAVLKALAGPADPQAPAPPAATKRGGVNTPQIAGLHGLLWRLCGGKDPTTLPGVADYVLLQLLGEVGTDLGTPWKTEKHFTAWLGLAPGSKQSGKRRGSQRRSRNRAGRLFCVIARSVGRSVDKALGGFYRRIKGRRGGLVANLALARKIAELFWRLMVQGRAYVEEGLKQYEVRVAQTEQYLLQKLARKYNLVLQPKAV

SEQ ID NO: 416867 - protein, 375 aa, unidentified
MKEKLRFLGMDVHAETIAAAIAEPDGEVRSLGTIPNRMESVRKLIKKLGPVEKLRVCYEAGPTGYVLYWQLTELGVQCEVIAPSLVPVKAGDRVKTDRRDAEKLARSYRSGDLTAVWVPDEGSEALRDLVRAREAAKQDELRARHRLGKFLLRSGHRPPTGVRSWTHLHLIWVSQIRFTQVAQESTRLDYLHEVEHMRERVLRLEQAIAEAVKLASPALQEVIQDLQALRGIAHISAVTIAAELGQVSRFAGARQLMGYCGAVPSENSSGKRTRRGSITKTGNAHLRRIVVEAAWSYQRPPAIWAGLRKRQQSASEEAKEIAWKAQHRLHKPYARLAAKGKDKRKIVTAVGRELLGFIWAIGTKAEAIARQRIAA

SEQ ID NO: 416868 - protein, 368 aa, unidentified
MSADRPNRHLTVKEATTMVVVGADVHKRTHTFVAVDEVGRHLGEKVVKATTAGHQQAVRWARTQFGIELVWAIEDCRHLSARLERDLLTAGQKVVRVPPKLMAQTRASARTRGKSDPIDALAVARAFLREPDLPVASHDEMSRELKLLVDRREDLVGQRTSTINRLLWRVHELDPERAPKPRSLDLAKHRRLLADWLATQSGLVAELARDELADITRLTEQINMLAKRIGERVRAIAPPALLAMPGCAELTAAKVIGETAGVTRFKNEAAFARHSGVAPIPVWSGNTAGRVRMTRSGNRQLNAALHRIAVTQIRLDGLGQAYYRHRLAEGDSPTEALRCLKRRLARVVFHHLHTDHQTRQQPCQPAAA

SEQ ID NO: 416869 - protein, 456 aa, unidentified
MGHARARKISAQLVEDEEYQLRYERVAGIDVAKAKADVCTRLPPAREGGRRVSRVEEVPATAREVLALAGRLLADGAQLVVMEATSDYWRIWFYLLEAAGLRVQLVNSRHARQLAGRPKTDQKDAQWIARLAEMGLLRPSFVPPPEIRALRDLTRTRLMLVRDRTREWQRLEKLLEGALVKLSSAVHSMARTKTARHILEAIAGGERDPEKLAALAHGGVKGGHAAVRQALEGMRLGGHHPRLIRVHLDHITLLDRSVAAIEDEIETALDAIPGAWGISADGVPSPAPGPDAAALDAVARLAEIPGVSPDLARAIIAEVGLDMTRFPTPAHLAAWAGLAPVARQSGPRARKPAKGHGDAYLKGYCTQASLGASNTDTFLGERFRRLSRRIGGIRAQCAVGRSILVIIWHLLSDPGARFRDLGPGWHERKADRDRKIRTHLRQLQALGLDVTVTPAA

SEQ ID NO: 416870 - protein, 387 aa, unidentified
MDDREIIRLEQFRQLKKEIRGSEEHLIVGIDVAKQKHNAFLGTATGKTLLKRLVFENNREGFEKLLMHVESISASNGHKRVAFGIEPTANYHKPLAEFLINREHDLVLVSGVAVKRNRELLDGRWDKNDMKDSANVANLISQGKCLFYEYPAHVLRDLRGLLSLKKKFKKIEHGFRVRIRNHLLAQYFPDLDRYYGHSESENLAIVQWCLSPSKIAEMKYEDFFRLVTTRDRGLIQHRRLKAIWDHAHCSIGCSTGIAAEFEAEVLVEALKRVRKTIGSINEKVIKICVLFPEYKYLLSIPGFGPVVSAIVLAAIGDPFRFESGNQVLKTAGWDLSANRSGKRSDSVIPVISKRGKSDLRYALYQAALIASTRNLRAVKRKKASRPR

SEQ ID NO: 416871 - protein, 356 aa, unidentified
MSKNITADQGITIGLDLGDKYTQCCSLDDSGEVEEIFRVRSTGPGLSKRFGSLAPCRIILEVGTHSPWVSRLLSKRGHEVIVANPRRVRLISTNDSKNDAVDAELLARLGRADPKLLSPITHRGPQAQKDLVLLRNRDGFVRSRTQLINQARGFAKSLGDRLPSSSSVSFPKRVREAKKGEIFPGLETLLQLIDSLTAAIADMDREIERLCREQYPETKLLRQIKGVGPLTALCFLLTIEDPHRFKKSRSVGAYLGLRPKQHDSGEQQPQLRITKSGDEMLRRYLVSGSQYILGPFGPDSHLRRVGLRLAERGGRAAKKRAIVAVARRLAVLLHRLWVTGEEYQPLGYGSTDLKAA

SEQ ID NO: 416872 - protein, 423 aa, unidentified
MKVVYPICCGVDVHKTFLVATIITTDGITPHYQKRRFSTFNNQILAFKQWLIANNCFDVCMESTGKYWIPVFNLLEDSVRVIVANPKWVKAVKGNKDDVKDSEWIGDLFRLGLVPGSFIPHKDIRILREFTRYRAKVVSCKSSEKNRYQNVFTVCNVALDAVVSDMFGKSAVAVTDYIVNSDNFNLNHCASLLKGSLKKKADEVLASIDGFLMTDSQKARARIVKEHYDFLLGHIEKLDSKITSLAEPFEAAVSLSCSAPGVGRNSAITVLSEIGTDMSQFGSSNRLCRWAGLTPCNNESAGKKKSVKISRAGVYLKPALVEIAHAAVKSTSSPYYRIKFDRLAKRRGKKRAIIAIARMILTALFHMLSTGEIWNPSDLRQIDMPPDLRQKELQKSLRKAAKLLVAHGVVNPDAISITDTATA

SEQ ID NO: 416873 - protein, 387 aa, unidentified
MYFCGIDVAKRQHAALVVDDKGQTVQPAFSFDNSRAGFDQLSTALAELSVPVTIGLEATGHYWLALYDDLTQQGYPVTVINPLQVAAYRRSGIRKAKTDMLDALWIADFLRIANLRPTDQDLPVILQLRELSRFRFWLTQQIGDCKRKVLSILDRVFPEYETLFSSVFLKSSRALLKEAVSAQEIADFDLAELADLLHKASRGHFGQPKAEAIQNVARQSVGVGFLVDAVRVQMHCLLQQIDLLQEQVAQLEADLAELMDQIPQYITSIPGIGLANGAAILGEIGDVHRFDSVDKLVAYAGIDPTVYQTGQFKASKAHMSKRGSPYLRHALWLAATVAVQYDPDLRAFYEAKRKEGKHHGTVIGAVCRKLLARIYVILREQRPYVTR

SEQ ID NO: 416874 - protein, 303 aa, unidentified
MDTIFVGIDVSKDRLDVHVRPSREAFAVARDGQGLEELIDRLRALEPQLIAIEATGGFETIAAAAIAGASLPLAIVNPAQVRHFAQAIGKRAKTDPLDAEVIAHFAEAVKPQVRPVANEQARQLAELVARRRQIIEMIVAERQRERRAAIVRVRKGILRHVRTLEKDLLDVDKDIGAMVRSSPVWREKEDLLVTVPGVGNTLARTFLAELPELGTLNRREIASTRQSGRWKGKSMIGGGRASLRAALYMASLSAIRCNRSLKAFYQRLLSAGKPKMVGLIAVARKIIVILNAMLRDKTQWQPA

SEQ ID NO: 416875 - protein, 380 aa, unidentified
MRTDTHIAPQEPVYCRIDLHSNNLVLVLMDQQGHRLAQARVGCELDKVLGFLGPWKSRLKRVAVESTYNWYWLVDGLDDHGYPIDVVNPAQFSPYQGLKHSDDLSDACFIAEMLRLGVLPVGYKYSREDRPVRDLLRRRSLLVRQRTSQYLSLKSLHSRNYGKSVRLSELKKWDSQKADGIFPNKADQLLVTQQLLLVQQLSQGIRAIEKEVLRVAKLRPEFIRLQTVPGVGVILGMTLLMEIGQIQRFSSPEKLASYARCVPAPRVSNGKSKGQNNRKWGNRYLGWALVEAAHCAIRGDGPAQRYYQRKVAQTNPSVATKALACKLCKAVWHVWNDQTEYDPVRVFGPQPQSTSGRAAGSQERVCPSGSDLIGSCSPSP

SEQ ID NO: 416876 - protein, 356 aa, unidentified
MSRDIKYIGMDVHKEAVVIAVRNSTGQLVMESIVETKASSLLQFIHGLQGELHVTWEEGTWAAWLYDLLKPHVHEVLVCNPRRNALLKEGSKNDKVDARKLSDLLRTGMLRPVYHGEHGLRTLRELARSYQTISQDLNRVMNRVKALYRGWGIACSGTQVYAPRYRQEWFDKIEHAGVRRRAELLYQQLDGLQTLRRTLRPELLAESRKHKASKLLRQIPCIGPIRAARLLALMQTPHRFRSKRQLWTYSGLGVETRDSAQYRFVRGQLQRAKKPQQIRGLNRNHNHEMKEIFKGAATRASCGVGPLRDFYEALLAKGMKPEMARLTLARKIAAIALTLWKKEERFDAQQLKTQAA

SEQ ID NO: 416877 - protein, 337 aa, unidentified
MNKYIGIDVAKATLQVYIPKSDSDIEIKNSSDGLKKLYSKLKKQYKKELQDIVFVYESTGAYSTILEQFCQDKEILCFKVGAYQSASFSKVIKNRSKTDKIDARMLSQMHILAKEKDIKIPKRDEKAHQIRSYIKYYQSLVKEHRRQSNYLEAATCNLEDKFILKQVKKKIASLEKEQAMIIEKVLEIIKANPTFKQAYENITSIKGIAEKSGIILLYLFLKYPNASRQQITALCGLDPVQRSSGTSVQHKERISKQGLSLVRAILYMPILSIVLHNKEMKLIYNRLLERGKPKMLAQMAVMRKVILLAHSLYKSNQGYDENRYLNFTQIKELDMVE

SEQ ID NO: 416878 - protein, 416 aa, unidentified
MKIVRPICCGMDVHKNIIVATIGITNKKTRITEYIQETFSTLNPDLLNLKQWLINHKCFDACMESTGKYWIPIFNILEDEINIYLTHPKYVKAIKGKKTDKKDSKWICDLFKHDLIKFSFIPPKEIRALREISRYRYKLVGMRSSERNRYQNCMTVSNIGIGSVFSDPFGKSAQAIMKEVLESDIIEDEKILKCIHRSCKNKDKILDSIKHCNIETDQRFKMNESMTHMEELKVHIDNCEIEMMKRAAPMFDQFMHITQLPGISTLSAILIISEIGVDMKQFESDKQLTCWAGLAPANNESANKKKSVRISKAGQYLKPLLVQCALGAIKDKEGYFGIKYSRIKKRRGHKKAIIAIARMMLVSIYHMILTGETFNPSDYESFRNPKPPIKQQVLTEESAIEFLKKSGFDVSKLTKP

SEQ ID NO: 416879 - protein, 356 aa, unidentified
MAVYVGIDVHKKYCQAALMDEAGRIQRELRFDNTLEGASGLIHLAKSIDPHVKAVVEPSANYWIKIYDKLEDEGVQVKLSNPSRTKAIAEARLKMDKQDAKTLAYLLRGELVAESYVPSKKNRERRSLIRHRASLMRMRTEIKNRIHALLDKYDLSYEYTDLFGKEGQEWLRNLTLPNIDQQILQSNLQILETLTMEIRNADIQIAKDAVNEEQAKLLMTMPGVDYYAAMILLSEIGDVKRFTSREKIASWVGLAPQVHQSGETHWTGHITRKGSKRARWILTQCAQSARQHDPKMRTFYERIEQKHGSSKAIVAVARKMLAIMYVMLTRNEPYQGENRQLTEQKHKRLERIANTA

SEQ ID NO: 416880 - protein, 484 aa, unidentified
MGKSVSVYQRLSEGNRKQRKELQRRMYSDNPGLDVVHTNAAGIDIGNESHFVAVPPGRDAEAVREFGSWTADLERMARWLKSCGIETVAMQSTGVYWFAVYDVLEKHGLKVFLVNASHTKNLPGRKTDVQESQWLMKLHTYGLLRNSFRPPEQVRPIRAVWRLRDRHVQDAGRSIQHMQKALTSMNVQLANAISDIGGVSGQAIIRSILAGERDARKLAQLRDGRIRASEEEVARSLEGNWQEDQLFELQQAVDEYDFRQKQVAECDRKLEAWLAVLPTRIISAKDPGAAPPPPAGMGEERKRKKRAKKVGGGNAPSSFDLAMELTRVTGVDALRVEGINLITFQTVVAELGTDLGKWFPTEDHFASWLQLTPKRDVSGGKTIRHTHEPNRNRVAGALRLAANALLRSDSYLGARYRNLRTRLGSPKAIKAMARYLACIIYRLFTKGQAWVDRGAERYEENRRMRDLARLEAQATSRGLRLVPA

SEQ ID NO: 416881 - protein, 343 aa, unidentified
MQTITTIGLDIAKSVFQVHGVDAAGEVVIRRQLKRRSVLAFFQKLPPCLVGIEACASSHHWSRELQALGHTVRLMPPAYVKPYVKRQKNDAADAEAICEAVTRANMRFVPTKTPEQQSCLMLHRTRHLFIRQQTAVINSIRAHLAEFGIVAPVGRKGVTELLHIVADTSDKRVPAVGRACLAALGDQLLGLKRQILEFDRMIMAWHRSNQTSKRLHYIPGVGPMLATALVASVADPRTFRSGRNFSAWIGLVPKQHSSGGKERLGSISKQGNRYLRSLFVAGALAVIRYAKIHGTGHRPWLTALLGRRPAKVAAIALANKIARMAWAMMAKGERYKQPVALAA

SEQ ID NO: 416882 - protein, 340 aa, unidentified
MEIKTLGIDLAKSVFQLHGVDADGAVVLQKKLRRGAVLDFLGKLEPCLIGMEACATSHHWAREIAALGHDVRLISPSYVKPYVKRQKNDAADAEAICEAVTRPNMRFVPVKTDAQQSVLVLHRSRDLMMRQRMMTLNALRAHLAEFGIIAAQGPRKVVELVAELRDNETHKVPEVARVGLLALAAQLDSLATAIRNIERQLLAWHRHNPASQRLETIPGVGIITATALAASVPDPSVFKSGRQFAAFLGLVPRQNSSGGKYRLGHISKMGNGYLRRLLVVGATSVTRRAETTDTQTGAWVRSLLGRKPTRLVTVAIANKTARTAWAMLTRQESYRASAMA

SEQ ID NO: 416883 - protein, 361 aa, unidentified
MADSITWVGLDVHKERIIAAVVGSDGSLLGRFETTNSPKGKDRLIVRMKTFPGVQCAYEAGPCGYDLKRFLEQESVPCEVIAPSLIPRRPGDRIKTDRRDAEKIARMHRMGELVPIHVPTPRQEALRDLLRAREDASEDLLRKRHRLTKFFLRQGRRFEGKSWTREHWRWIRAQVFDDTNAADVLVEYILAVDQEVERVARFDQRIEEASKDPEIAPVVSRLTALRGIRTLTAVTLVAELVDLRRFSSPRDLMSFAGLVPGERSSGGKVRRTGITKTGNAHLRRVLVEAAWHYRHPTQKTGETIRKRREGQPPEVLETVRKADIRLHRKFFRLVTKGKRSTVAAVAVARELVGFVWAVGKA

SEQ ID NO: 416884 - protein, 417 aa, unidentified
MKKNTNSAMKKEPKAKRAKAQRLVQRERKEVLAELVEKLQGKLAVKATSARQAEAGARGELSPNLNRLTVGLDLGDQWSHFCILGLHGETLSEGQLQTREAEVAELFQAIPPARVVMEVGTHSPWMQEVIAGEGHEVVVANPRLMEGSKRRKRKNDRIDAKKLARLGRVDPQSLYPIRHRSREVRQDLVVLRAREALVAARTELINATRGLVKSMGTRLPKCSSPSFGQKVKDAIPEKVREALLPLVQLADALSDCIQSYDQKIEEMSSEKYGHTKLLRQVKGVGPITALAYVLTLENPAHFAKSRDVGPYLGLVPKQEDSGESQPQLGISKTGDTMVRKLLVGSAHYILGPFGPDSDLRSYGLRLCERGGKNAKKRAAVAVARKLAVLLHRLWVSGEVYEPLGYASSRGIVQPAAA

SEQ ID NO: 416885 - protein, 341 aa, unidentified
MQIKILGIDLGKNLCSLAGLDGSGQVVVRRRVRRENLLKVVSHLRPGMVAMEACGGAHHLGRLLRDAGFEVRLMSPEYVRPYVKAQKNDDRDAEAIAEAATRPTMRFVELKSAEQLDMQVLHRARDRLVAERTALINQLRAVLMERGIVIPQGWRKLNRALAAILEGDEPALSRRVRMLINDMRSEWGELDRRIHAFNDEFAACVRADQGALQLTTIPGIGVLNATALVAAIGKGQSFARGRDFAAWLGLVPRQQTTGGKPRLKGITKRGNVYLRKLLIHGARAAMTSLSATNTALGKWLRGLRARAHVNIVVVALANKLARIVWAILRTGRGFEAKEATP

SEQ ID NO: 416886 - protein, 343 aa, unidentified
MVVLGIDIGKDVFFAHLRAAEGCPPFTPCALPNVENTVAGCAQLLCWAASHGHASAELQVVMEATGVYWETCALTLHQAGCRVSVINPAQIKLFARSVLRRGKTDTMDAEIIARYGVVMQPSPWKPPLASVEELKVLVRERETLLQTLTQERNRRHALQHKARTMTTVVALVQQRIDLLKEQITALERSMHTLVAMNTELSEPLKLLLTIPGYGFVTAASVLAETQSFLGLHSSRQLSAYAGIAPAPHQSGAMTGPAHISKTGNEHLRRTAYLAAIGAMKCKGPVGQYYRQLRARGKPAKVALVALGRKLLGIGFAVVTSGRPYDEAFESKRMAALLGKQVLC

SEQ ID NO: 416887 - protein, 435 aa, unidentified
MSETVALKKKRARPSAGEARQFKQEYTSMKDSGKRYIGLDVHKHYLIALGVDEDLNVVLPARRVELSHLESWMKQTLTKRDEVVLEMTTNTWQLYDELCAYAGSVLVVHPPHVALITRSQVMNDKIAASILARLLAKGLLVGIWVPPQDIRELRGLVAQRKKMTGLATQAKNRLHAVLQRHHRLPPEGNPFHVSQHSWWLALPLGWLEKVNVESDLDTLQFAEQQLAYLTSLMNILASEDEHITRLLQLPGFGVVTAITAWAAIGNIQRFEDAQHLVGYAGFGTRVHNSGMTTRSGRITKAGRRDLRVVLIEAAQVAANTHPHWKAELARLQPRLGRNKAIVAIARKLLVAVWYILAQHKTDRFAQLEAIAQKFLKFAYQLGKENRPGQSAAQFVRQRLDTLHLGNELTHIAWGSKKPIPLPPSTNKVSDVPNTK

SEQ ID NO: 416888 - protein, 356 aa, unidentified
MSVREQAQGVVGGVDTHKDSHAVVALASTGQWLGWAQFPTNPAGYRDLLQWLRDRGPLLCVGVEATGSYGAGLTRHLVSQKVSVLEVIPPRRRSRRGRDKSDPADAEEAARAALSGQATGLPKSADGRVEALRMIRLVRSSAMKARTQAANQLHALVETAPAGLRERLRNHSIVDLVKEALRWRPGTIVDPVSACRGTLAPLARRWRQLAEEIRGYDREILRLTGELCPELLKRVGVGPEVASCLLVAAGDNPERLRSEASFAALCGVSPLDASSGRQRRHRLNRGGNRDANRALWVIAFVRLRMDPRTKQYAARRTAEGRSRNEITRCLKRYIAREVYRLLMDSRTLETSTATAS

SEQ ID NO: 416889 - protein, 378 aa, unidentified
MPSETTVYVAVELSVSSWLVAARSAGAEKSRLHRIQGGDTTTLLALITKLRSRASTKLGLAVDVACCFEAGRDGFWLHRLLTAHGIAAYVLEPTSILVNRRARRAKTDRLDAEGMLRVLAAWLAGDRQVCSMVRVPTPEEEDAKRPHREREHLVQERLRIENRIEALLFTQGIRKRPSLRSWVRDVAELRTGDGRELPCLLRIELERLRRRLVLALELIHEVEAERAEALAATTDDKMTQKIAALQRLRGIGPNFAAVLVREVLYRSFANRRQLASYVGIAPMPYQSGGMDRDRSISRAGNPRARTTLIQLAWLWLRYQPGSALATWFRERVGMLQGRTRRISIVAMARKLLIALWRYVETGVMPEGVEIRAEADATA

SEQ ID NO: 416890 - protein, 344 aa, unidentified
MTITTIGLDLAKNVFQVHGVNERGAAVLRKQLKRDQVAAFFAKLQPCLIGVEACGGAHFWAGKLASLGHQVKMMAPQFVKPYVKTNKSDSLDAEAICEAVARPNMRFVPVKNPEQQSVLTLHTARESFVHARSAQANQIRGLLTEFGLVVPQGIRHIYARVPDLIEDADNELPGRFRLLIQRLLDHLKELDRHVGELEREIEQWHRSSEVSKRLETIPGIGPLTASALVASAGDPGNFKNARQFAAWIGLVPHQNSSGGKTRLLGISKRGNVYLRTLLIHGGRALVQLARTRTDRAGTWLGRLVTRRHHNVAAVAMANKNARLAWALLSSGKAYEPGHVPAPKV

SEQ ID NO: 416891 - protein, 340 aa, unidentified
MGDITTIGLDLAKNVFQVHAVDVAGSVVLRKRLRRGQVLAFFAELPPCLIGLEACATAHHWARELIALGHETRLMPPSYVKAYVKRNKHDVADAEAICEAVRRPSMRFVPLKTAEQQSALMMHRARDLLIRQRTMLVNALRGHLAEFGLVEAQGLHKVARLIAIVMDEMDARVPDIARQVLKVIVSQIEDIQTRIAGLETQVLAWHKSNPVSQRLATIPGIGPIIATAVAATVADPSTFRSGREFAAWLGLVPRQNSTGGKARLGGISKRGGSYLRRLLVNSAHTVLLCSKVAKTDPWLTSLLSRKPRLVVAVALANKTARMAWAIMSRPDLYRHAAVTA

SEQ ID NO: 416892 - protein, 361 aa, unidentified
MTGMVTYAGLDVHARSTHAAAIDVSTGELVRARFGPGIEGPVAWLQGLPGPVRACYEAGPTGFGLYRAANAAGVSVEVIAPGKTPRGPSDRVKTDRKDAELLARLLLAGSLTTVVVPPVEVEAARELMRAHDACRRDLMTARHRVSKMLLRHGRVYPESSTWTVAHRRWLASQQFQETASELVFADLIASVDGLTARKSAIAERLSRLAEDEQWWPTVARLRCFRGVDTLTAFALHLELGGDWQRFQRANALSAWLGLTPSLHQSGESSHQGSITKTGSGFARRLLVESAWHYGRPPRIGVTLKNRQQGQPDHVLQIANRAQQRLHRVYHRMRGRGKPHNVTVVACARELACFLWAAATAD

SEQ ID NO: 416893 - protein, 401 aa, unidentified
MQETTQHDAVDVFVGVDVGKGQHHAVALDRNGKRLYNKALPNDEVKLRALIAELKTHRRLLFVVDQPSTIGALPVAVARAEGVLVAYLPGLAMRRIADLHAGEAKTDARDAAIIAEAARSMPHTLRSLRLADEQLAELTMLRGFDDDLAAQLTQTSNRIRGLLTQIHPALERVLGPRLDHPAVLDLLERYPSPSALAAANEKTLANRLTKLAPRLGKNWAAEIVQVLNEQAVIVPGTQAAAIVMPRLAQQLAALRKQRDEIAAEVERLVLAHPLWPVLTSMPGVGVRTAARRLTEAAPKAFATAAHLAAYVGLAPVTRRSGSSIRGEHPSRRGNKVLKRALFLSAFAALRDPVSRAYYSRKIQQGKRHNQALIALARRRCDVLFAMLRDGTIYPPKSAPNA

SEQ ID NO: 416894 - protein, 422 aa, unidentified
MSYCPVAGIDVSKQFSDMCILSPDNKIFAQEKIYHDETSINRANALLQKAERLFFSKPVIVMESTSHYHLILFQFFSEHGYDVIVVNPLQSNSMKDFSIRKRKTDRVDAFKLAMMYRTKTLRPSQIPQTATRALRQLCRHRAELLNDVSSYKNRLTALLDQTFPGYDKVFSDVGGVTSCAVLVRFPTPTILLVEEESELVEVIAAASKSGYSFAKKKAGLLISAAQKAQTLGIHSCADETLIVCTIQMLRTLSESVLQIETAIDNLMAQIKEMRNNVSLLQSIPGIGSHSAALLLGEIGDISLFKKPKQLAAYFGLDPTERQSGSFRGTKNKLSKRGFPYARAALHMGVVNSICKRGKDSAANPVLLSYYEKKCKNKPAKVAQAASMHKLVFIIFAVLRDQKPFELKTPEQHAVEQGFVKAA

SEQ ID NO: 416895 - protein, 372 aa, unidentified
MQGTTFVGLDVHKPWINIAVLLPGHDTPIEWRIANEPQAVRRMLKRVAHLAPGDVRYCYEAGPCGYALQRQIISWSHASCMLVAPSLIPRKPGEHIKTDRRDARKLAMLFRAGLLTEVHPLTEEDEAARDLSRARDDLREDLVRARHRLGKFLLRRAITFTPGKRAWTLAHRRWLESLRFDNPADAVVVADYLLAIDHIEQRLKALLVHVERLAQDPRYAEAVATLRCFRSIDTISAVGYAVELHNFERFTSARRLMSFLGLIPGEHSSGDKRRQGAITKTGNSHVRRLLIEAAWNYRHRPHVGTSLRNRRKGQPPRVIALADRAMLRLHRRYEQMTHRGVLPQKAVVAMARELAGFLWAALSPLSPQDQAQ

SEQ ID NO: 416896 - protein, 456 aa, unidentified
MARRSKAKGTRQRTKLHMIYPRAAGIDVGSTFHVVAVPPELSAEPVQTFQSFTGDLYRLAHWLVDLGVTTVAMESTGIYWIPVFDILEAHGLEVLLVNAQHIKTVPGRKTDVNDAQWIQQLHTYGLLRGSFHPAQDWSALRVYLRHRERFVEYAAAHIQHMQKALMHMNLQLHHVLSDITGTTGMKIMRAIVAGQHDPAVLATYRDARCKASEETIREALTGHYRREHVFALRQALELYDSYQARIEACDQEIQSTLASLQHDEIAMDTLPAARHKKRQSHEPLFDVREALFRVLGVDLSHIDGFSAYTALKLVGECGMDMSQWPTEKHFTSWLTLAPGNKISGGKVLNTKTRRSANRAAAIFRLSAMNVGQTQTALGAFYRRLASRAGKAKAVTATARKLAVLFYNTLRYGMAYEDPGAAYYEDRYRQRVLKGLHRRAKEFGYKLTEVEALEGVS

SEQ ID NO: 416897 - protein, 389 aa, unidentified
MLLDHPSDGLTAIRTHICAIFVSLELSRSNWLVTSLSPGKGEKMSKHTIAAGSVAELLTLFAELRRKTEVRTGQSYPIITIQEAGLDGFWLHRVLQQEGIESHVVDPASIATPRRRRRAKTDKLDGEALLRALLAYKRGEPRVCAMVVAPSPEEEDRRRLCRERKTLIEERITHVNRIKGLLFAQGVCDYAPMRRDRRARLEALRTGDGRELPSHLKAQIGRELDRIELLLGQIKAVEAAQDALLAAARKPASKEAAPEPVTMLLALKGVGANFTAVLWSEAFYRQFGNRRQVAAYAGLAATPWQSGGIRHEQGVSKAGNPRLRTTMIQLAWLWIRHQPQSALTRWFKQRSQQGRKRAIVALARKLLVALWKYVNQGVVIEGAVMKSAA

SEQ ID NO: 416898 - protein, 437 aa, unidentified
MRRKKNNANKSVNLRVLPVVNPNAAGIDVGAKEHLVAVPCDRDPQPVRTFQAFTPDLHELAAWVKHCGIESVALESTGIYWISLYEVLEQYGFEVRVVNARHVKRVPGRTKTDVLDCQWIQKLHSFGLLNGSFRPDQQIRKLRTYMRLRDNLVVESTQAVHHMQKALFEMNVQLSNVISDIVGETGLHIVEAVIAGERDPEQLASLCSSRIKASRQTVAKSLHGNWDEALLFALEVALKTYRFAQAEIQECDARIQDHLTQFESRAELTNSPQNLKTQLHRVCGVDLTKIPGIKEQAAQIIISEVGLDMSKWNSEKQFSSFLGLCPDNSISGGKVLHRSTRKVYNRAADTLRLCAQSLTHSKSALGAKYRRLKARLGAPKAIVAMGHHLARLVYRMLRYGQNYVEKGIEDYEQKFRLQRVKWLKKEAKALDLQLVAA

SEQ ID NO: 416899 - protein, 377 aa, unidentified
MCGGYLDGMVASRLNGPLGAADSSPERATLLVRHSADKENQMEPTTIAIDLAKRVFQIHYVEPETGAIHSRVLKRAQLVPFFANRPVSRVVMEACGSAHHWARVLARLGHDVRLIAAQFVRPFVKSNKNDAADAAAIWEAAQRPGMRFVAVKTEDQQAMLAMHRIRQQLVRIRVMQVNQLRGLLYEFGVVLPQGRRASIEGAKGALASLAGQLPAMLVDSLQDQFARLRGLDEQIARIEQRILEWRRNDDACSRISEIPGVGVLTATAAVSVIGQAKTFRSGREFAAYLGLVPRQNGSGGKVKLGSISKRGDVYLRTLLIHGARSVISASKHLPERMRAMLTRRPTNVVAVALANKMARTIWALLAYGRTYEAAPSR

SEQ ID NO: 416900 - protein, 336 aa, unidentified
MTIIRIGLDTSKHVFQIHGVDENEQPVLRRKLKRSEVEKFFARLAPTRIGIEACGASHHWARVLHRLGHAVVLLPPQYVKPYVQRGKNDAIDAEAICEAMSRPTMRFVPAKSAEQQAALTMLGVRDLLIKQRTMLINAIRGHAAEFGVTVAKAPKQMTELLQRLASDEGVPPLARAMISMLASQLNGLDIKLKALEARLMTWHRQDQTSQCLATIPGIGPIGGVSFALKVPDAKAFRSGRRFAAWVGITPREDSTAGRQKLGRISRAGDEDLRRLLVIGATAVIRAAKPGRTAPWLTGLLARKPKKVAAVALANKMARIVWAMMVSGETYRRPAQA

SEQ ID NO: 416901 - protein, 315 aa, unidentified
MKQTKLYVGIDVAKNDLEVAVFPSRWQGSYENSEIGYEKLIAQIKTPTPQLVVLEATGGLEIPVTVALVEAGIPVAVVNPRQARDYAKATGHLAKSDRIDAFVLADFAAKVQPQPRDLPDEQARHLSATLTRRRQVLELLVAENNRLGSMPDTDMQIRITKHIDWLKQDLKELDQLLAQLIKNSPVWKAKENLLRSMKGVGPVLSTTLLAELPELGQLNRKQIAALVGVAPLNNDSGKRRGKRSCWGGRAEVRRVLYMAALSAARTNPVIHIFYRRLLGNGKPQKVALTACMRKMLIILNAMTRDNAAFNPQFSS

SEQ ID NO: 416902 - protein, 375 aa, unidentified
MSMKGKTLVGLDVHAAQTHAAVLDTLTGELRVRRLICPPLEVVMFLEGLGGGVRAVYEAGPTGFGLARAARERGIALDVVAPGSIPKGPTDHVKTDRRDALKLARSHRSGDLTAVWVPDEDSEALRDLVRQREAAKQDQLRARHRLTKLLLRTGRRPPLGLKAWTERYMRWLEQVRYTQPAQQVTLRDCLNEVEHMSARVKRLEEAILEMVKLAPQPMQEVIRGLQALRGIAHISAVTIAAELGNISARFQSARKLMGYSGVFPSEDSSGKRIRRGSITKAGNAHLRRIVVESAWCYRHWPRVGARLRKRQQGIPAEITEIAWKAQNRLHKRYMKLSMAGKDQRKVMTAIGRELLGFIWAIAVKAEQAFQQPMAA

SEQ ID NO: 416903 - protein, 426 aa, unidentified
MINAALERCAGIDVGKKFLAVCIMTGPLDQEPRVERRRFGTITAELESLRDWLQAEHVTHAAMESTGSYWKPVFNVLEGSLKVCLAKPQEVQNRKGHKTDDKDGWWLAHLLRHAMITPSFIPPRPIRELRDLTRRRKRMLGDATAEKNRVQKVLEDANVKLGSVLTDVFGVSGQLMLDALLEGKAQPAEIAQYAKRGAKKKIPEIILALEGHRMSDHHRQMIRYSLKHMAFLEEQIAELDQAIRAQIQAEGLDQDWQLIQTVPGIQERSAASILAETGADPHQFPSAKHLSSWAGVCPGNYRSAGKNSHSRTTGGNPWLRSALTECAWAAAATKNCFLRDKFWSVRSRLGGKQAPALIAVAHTMLTLIYRTLETRQPFQDRKAPMLDEPQRQRMIRHHIRRLGKLGITIHRMASGPATGKAPTPAD

SEQ ID NO: 416904 - protein, 365 aa, unidentified
MNNETITSKGISAASLVNHVNRVLNLGLDVHYRQVTVAMQEGGGRIKSAGKMGHVDFLNWVGKKLAEGWEIHSCYEAGASGYWLHRELVKLGVKNLVVVPKAMGQGGKKQKTDKRDAGELCDCLDRYLRGQDKALSVVRVPTEDQEQKRALIRFHRQIMADRGRCEARGKGLLCAQGIQVHGRWWQGKAWLEVQSDPRLKDWIKEQLSGWRNKILSTDEEQGALRERIAALAPAILPKGVGAYSAAVLYYEMRGFERFSNRRQVGSMTGLCPGIHQSDGRGKEGSINRCGIGIVRWTLVEMVWRLRIWQPQYPPVRRLASGLVKGKRARKRLVVQAARRLAIDLWRLSTGQTTPEKLGLIMHRAQ

SEQ ID NO: 416905 - protein, 444 aa, unidentified
MSNRRGLSRGDKRRNARLSRLREVVRLDHAVLAVDLASTKQVCVLTDHVSRVLARRTVWCRPWGLVEVIEWGRREAVAAGYVGVTVSCEPTGHRWKVVAELADRAAVSLVCVQPLAVARARESEDYTRDKSDAKDALVIARLTTQLRVYLPERQDPTYARLRHLGALRMQYLTARGAARQRLRDLLECAWPAALEAAAKPLDSMTWLAAMDVAGCDPARIRALGRARFGRAVAARLPAWGATRACRRIIDAVYAATRDSRGVPAQRPAGLERAAYALTDLADARTQMDRVEASLVAVLDQLDLTGLVTSIAGLSAVGAATILAETGDLTRFDSARAVVKHAGLCPRENSSGNYTGKTTISGRGRPTLRLAAWRAVWGAVHANPVLAARYQHLTSREHNKLTDHQARVAIAGSLLRQLHAVVTTGTPWNPTTAAGSHRRTEVSAA

SEQ ID NO: 416906 - protein, 385 aa, unidentified
MAPPARPRVVIGLDVGKSAHWACVVTREGELLASRPIPNRENAIDGLYAQYPGALVVVDQVRNIGSLALSRAKLAGMPRAYLPGLAAHGASRLFAGDAKTDERDAMVIAKTALGIPDALLAVADRPPEVEAARSLAAQRDFLTCENTRSKNRLRSILLESCPEFEAQADLSDPATLKLMAAVGGPWSISEASPQSVGALTRGCRRAKVAALAGSVESSSRPHPAAVACEDRAVRLLARRISENAAEIESLTSEISALLSADETYRCLLTVPGIGPRTASELVISIDIADFPSHDRLASYCGLAPRNRRSGTSISSVSASRQGNKRLKNLLIFSCNCPARSRNRWGEYYARCRDRGMPHGKALKAVARKRLKVIYAVMRDKVPYAA

SEQ ID NO: 416907 - protein, 321 aa, unidentified
MTSQTESTCFGIDVSKRWLDIAEHGRSPVLRIDNTAAAIRGWLRTLPPGALRFACESTGTYHRLLVRLLIGAGHQVYLIDGYTLSRYRDTLGQRAKTDRHDAGLIARYLAHEGARLRAFSLPPRAVTELRALLRRRATLVRGLGRIRQSMEELPGFAREVRAVTERIQALIKRLEQRIAALIGASGWSDPYRRILKVEGIGALTAAGLCATFHRARFSGGDAFIAFLGLDVTVRQSGTQRGRGVLSKKGDAEMRRLLYNAAMAASRSSTWQPFYQRLLQRGFSRTQALVALARKLARIAFSLMKNESDYLPQQHENACART

SEQ ID NO: 416908 - protein, 399 aa, unidentified
MRKVAGIDVHKEFLEVAYRLPSGRIETKQVEYTPKGISRLIKLLRRHGITDVYMESTGDYYLPLYYALKGAGIRPHVMNAYKIRRPEPNKTDKKDAIWLLEIGESEFFSDSYVPDEDIQALRFLIRKRMKLVDRISDIKREINSILWRLGLQVAHYAKKLRSKKKRMLLLALLEGRLRPDSINDSDVRHLYDILSRPEFRAYVFVLRSRLVDLAHLESQLEEFDREIVALARKFEDTIRILMSVPGISFILAVGILAEIGDINRFPSPAHLASYAGLVPTARNSGGKRRSGRPSKKSNKYLRRYMFLAGMAATRSNSRVVREFFTRLLGRGKHYKVAVVAVARKLLCVIWYLLRRDKFWCEDGYFKHPRRLPRGRRIRISVREAIAILVRAGYEVRRKV

SEQ ID NO: 416909 - protein, 385 aa, unidentified
MTQPAHDISFIPRDYDIFAGLDVDKKSMAVTFRDHGTMRKSLKLPYSGRQLLNYTRKHFPGQRVAFVYEAGPTGFGLHDELTAAHHPCLVVSPAMVPTAARPRVKTNRLDSNKLAEGLRGGQLRSIHVPATSYRELRHLVQLRDTQVAQLRASKCRIKSLLLYEGIPFPAANGQWSGQVLRRLEALPCSGAVRFKLDQLIDALQFHFQSAARVQKEIRHYCQADPELRQSISFLTSLPGVGTITATHALARLGDWREISNVRQIAGFLGLVSSEHSTGDKENRGEITRIGDSRLRNKLIQCAWTAIRKDPELRAFYRRIYERHPKKVAARKAIVAVARKLTTRMYAVLKEQRPFVIRPDSSIAPLTAEETVGPRERLDSAQNEQP

SEQ ID NO: 416910 - protein, 365 aa, unidentified
MQSNRISFKGQKIYVGIDVHLKKWSITVITEKGFKHTHAQKASARELLDFLERRYPEGEYHAVYESGFSGFSTFYSLRDVGINCIVINPADIPTSQYEKVMKTDSVDSEKLAKALRAGLLTPIYIREKENLDDRAVMRIRKTAQAQLSSYKIRVKHLLHQNGVELPERFDRPGTYWSGSFIRWLKEEVVLLSSTRLSLDLLISQVLSMRKNVLDCTRELRKISQSDKYRERFNLLLSVPGIGMIVAMCILTEIYDIKRFSNERQFASYLGLIPTCHSSGEKVSHGEKTYRGNKVIGPLITEASWVAVHKDQGLNAAYGYYCQRMKPHKAIIRIARKLSNIIFHVLKNNTRYEPHQWDKGRQKTCL

SEQ ID NO: 416911 - protein, 375 aa, unidentified
MNDHSEAFVGFDTSKLRNAVAIADGVRGGEVRFLGEFENSAAATAKLVKKLAAKYQRLTFCYEAGPTGYGLYRQIKNLGPECIVVAPSLIPKKPGDRVKTNRRDALGLAKLLRAGELTAVWVPDRGHEAMRDLTRARETAMMDLRSKRQQVSAFLLRQGLYYSERKKTWTKTHMNWLASQKLEYAEQRLVFEEMMLAVRQAQERLERLEQAIRVAVPDWSLAEVVTALMAMRGIDLISAATFLAEIGDLSRFQHPSELMGYLGLVPSEHSTGDKIKRGPITKAGNRRARRMLVECAWSYQHPPRVGLEKQEKVAAAPRAVREIAWKAQCRLHGRYRALVRRGKLKTVAVTAVARELAGFIWAVNRAITTARAVAK

SEQ ID NO: 416912 - protein, 469 aa, unidentified
MAYPILNHIQGKNGSRWAQFVRETGSENMLIVAIDAAKYTHKAMICTFYGDVLVNPFEFDSSLTGFEKVKEQIQVQKELHGMKAVVIGVETTGHYYEDLVRRSHSQGYHVRILNAATTAQERQALLNWSKTDNLDLMAIVQSMIHGRGTSSELSTGSVHNLQKLTRARRELVDERTATQNLIRVHLDHIFREFQGKSVWVNGKREHVQPFSTLFGKAPRYLMKHHLHPSDILSLGEQGLRDLSIRENLKIRDKSIEILIEFAQNSISQPKELLEANLFLLNQGLDRLDLLDEQIKLLERKIEDLFVQTEGAIILSVQGIGVVTGAELYAEMGNISDFDHAGQLIKMAGTNPIVKQSGGRKPSYYGVSKQGRRSFRNVTYQVGKSLAVNNPEMKRKYQDLKERGKHPRQAFIALGNRMIRLAFSMIRHQTLYRTNQSNYVLYDEISKKLHMPNVKQFFENFVSPGVYQSA

SEQ ID NO: 416913 - protein, 360 aa, unidentified
MIFERTSVGLDVHARSVVATGLDSATGQVFKTTLVPEHEAVIAWLRGLPGPVAATYEAGPTGFGLYRAITAAGIRCEVVAPSKLTRPSGDRVKTDAKDALLLAQLLQVGQITGIRVPTVSEEAARDLVRSREDVRGDLMRARHRVSKLLLRHGHVYSGGRAWTGAHEAWLRRVRFDQPGTRAAYEADLEAVEFALARRNRLDAAIAAMAADSEFTPTVRNLCCLRGVSTLTGFALAVEIGNWERFTGASIGAYLGLVPSEYSSGQSRRQGAITKAGNSHVRRLLVEAAWHHKPRYTVGKVLQARWDQAPVAARTRGHAGNQRLHRRWTTLAARKKKHTVATTAIARELAGWCWSLATLPD

SEQ ID NO: 416914 - protein, 315 aa, unidentified
MNSKQVFVGIDVSKDHLDIGLHPVGKTWQVVHDEVGKKQLYKELRKLKPELIIMEASGGLESAFASQLQEGKLSVVVVNPRQVRDFAKAEGILAKTDRIDARVLARFAERIRPDVRPLPDEAQRALEGLMARRRQLVVMIGAEKNRLRRASAEVARGIQDHIEWLKNQLEGVDRDISGRIQRNDVWKQKEKLLKSAPGVGLVLSRSFLSGLPELGTISGKKISALVGVAPFNCDSGRFKGRRRIWGGREHIRSVLYMGTVAAVRWNPVIRSFFLRLLKAGKSKKVALTACMRKFLVMLNAIIASNEPWKFGKVVY

SEQ ID NO: 416915 - protein, 406 aa, unidentified
MKKKVIEFEQVVECGCGMDVHKDLIVATIQGKVIKTQTKSFKTFTSSLIKLKEWLLENGVTHVAMESTGVYWKPIFNVLGDDFEILLVNARHVKNVPGHKTDKKDSCWLAKLLLSGLLKGSFIPERPIRELRDLTRYKTKLTNQISAERNRFQKILEDANIKLSSVLNDVFGATGTKIINHILSHESYRPEELLQYVHGKVKANRQDIKEALTGYITHHHRFMLRTIMGNISKIESTVAEVDAQIEICIEPYKIERELLESIPGVGRDGSICIIAEVGVDMGQFPDQNHLASWAGVCPGSNETAGKNKSGRITHGNKYLRSLLVECGWAASRTKDTYLSAKYKSLVGRRGKKRAIIALGHKILIATYFIIKDKVAFKELGEDHLNNFRKDRLIAYYQQQLEKLTAA

SEQ ID NO: 416916 - protein, 316 aa, unidentified
MTATPTYVGIDVAKNHLDLAMRPSGECQQVGNDERGIRYVVSRLHKVHPTLVILEATGGLEQPVAAALALAGLPVAVVNPRQVRDFAKAVGKLAKTDTLDAKVLAHFAEAVRPEPRPLPDEQAQLLSATLLRRRQIIAMITSEENRLSTAPKPIRRRIEMHLRWLKQELKRTNEELEQIVQESPIWREKAALLRSVPGVGPTLSVTLLAELSELEHLNRKKLAALVGVAPVNRDSGTLRGVRTVWGGRSGVRTVLYMATLCAVRFNSTIKVFYERLRAKGKPKKVALTACMRKLLTILGAMLRNRTPWQPQAAVIS

SEQ ID NO: 416917 - protein, 412 aa, unidentified
MEGETVIAGVDTHKDVHVLCLLDGLGRKIWSGSFGADPEGYDRLAEAIGDPGSCMVVGVEGTASYGAGLTRRLVELGYNVVEVLRPKRDKVRPGEGKSDPLDAERAARKAASGRGCSVPKSQDGWVEAVRQLYVARRLAVATSTSCVACAKSMLTTAPSALRERFRGRERPKDLMPLLARGRKAGDALEESVLASLRSVAAVWKEARSQVESLDERIRALLEANAPALLGVEGCGTTTAAALVVAAGDNPGRLKGEAAFSMMCGASPIPASTGKTDRHRLNRGGNRQANWALYEIAIKRMAYDERTRRYVARRTSEGKSRREAVRCLKRYIAREVYHVLMDPNPDGAAPEGPELAKMRKAMRVTQKKAAAELGLSAATLGHLERGKRRSTKLERRYYELLCELERTLPQTAS

SEQ ID NO: 416918 - protein, 310 aa, unidentified
MDSITVGIDVSKDRLDIAVRPSGEVFAIERNPAGLEQLTLRLGALSPNLVALEASGGFETVVAAALAAARLPVVVVNPAQIRAFAKAIGQRAKTDPIDAAVIAHFAEATRPEPRPMPDEATRLLADLVARRRQILEMMVAERQREKRVTVPHLRKSIMRLLKVLERELTSVDTDINDAVRGSPAWREKEDLLASVPGVGPTIARTLIAELPELGQLSRRQVAALAGLAPFTRQSGQWRGKSFIGGGRTSVRTALFMGAMVAKKYNPVLRTFFKRLVAAGKPKMIALIAVARKLLTMLNAILRDRRPWQTA

SEQ ID NO: 416919 - protein, 432 aa, unidentified
MENTRAHIGIDFGEKGVHCALIDGDGRMLVKHRRFDNSAFGLAELKEWFLEIGQGYGFRELNVSGEATSYYWLPMYLGLEEDVELRQAGLKLYLHNPRWVKKYSQSFSHQNKSDVQDPFFIADYTRTHHPHVWQAQREWLPLRWYTRTRYRFSQELTRLKNTFLINLFIRCSGYSLHQPFSDPFGRTSCQVLSHLDASEDWAEMPVEDLAAKLVEWGSNHLPDPMVNAQRLQAAVRSSIRLEPALNHSLDHVLQLLLENIRFMNQQIEKVDALLAQEATQHPQIACLDTIPGIGLVFATGIAAEIGDLQRYFEGERWDPHHQCSRPKNLRDVEDEIAKAACLWWPSNSSGSFEAEERHMPRDGNPYLRYYVVAAADRMRLFIPVYATYYQRKCDEVPKHKHRRALVLTARKAVGLIVGLLHRQEAFDPKEVA

SEQ ID NO: 416920 - protein, 384 aa, unidentified
MNRIVKIGMDVHSTNYTLCAMEPVLDGEDRIFANIKVTPDYKNVIQFISKLKNKLGASDTYSIECGYEAGCLGYSLYHQLTDAGVKCTILAPTTMLTPQGKRIKTDKRDALMIAQCLSYGGYNAVHVPNEKDDAIKEYLRMRDDHKLVLKKIKQQINAFCLRHGHFYDGHKWTIKHREWLKTLNLSNLYRETLDEYMATYEEQESKIERLDRRIEELASDSAYKEKVKKLGCFLGIKTHTALSLIVETGDFKRFAKGNTYAAFLGLAPGESSSGDNVNRTGISKAGNSHLRTLLIEGARGICKGKIGHKSKDLRLRQAGNSAEVIAYADKANVRLRSRYYRFMRHEKKKNVAVAAIARELACFIWGMMTDNISIMPERGKQNVA

SEQ ID NO: 416921 - protein, 341 aa, unidentified
MMKEKKCNRGGIDVSARWLVAAVRKGAELIKKKFCNDVVGHKELIRFLRPRRNVRAQVCLEATGLYHLEATLALDAVEIEVMVLNPRVASDYQKACFKRAKTDPIDAAGLLDYLERQQFVAWTRPPEELLLVRQLSRRMEQVKEERRAEQCRLAAIRVLGPRARLLVADIQQSVRQCEQRLKRLQKQALALIQADADLCQRYELLLSVKGIAQVSAIRILGELCLLPKDMKPAQWVAHAGLDPAPRESGQSVHAPRHISRQGNAHLRATLYMPALVAVRFNAPVRAYYEHLLKKGKKKLVALVAIMRKLLHCIWGMFHHMHPFDPGRFTSLNFENKHQIAA

SEQ ID NO: 416922 - protein, 408 aa, unidentified
MPRYYLGVDWADKSHQLYVCDESARKIKEQEVQHTVGELVELGRWLDESRQNGIELWGAIEKPHGRIVDFLLDHGVMTYPINPKALDRARDRFRMSPSKSDAFDARVLAEFLRTDHAHLRALEPDSIAAQELKRLTRDHQRLGRQKIRLINQIKITLKEYYPRALEVFGDLETQIALDFLNNYPTPQALSKLTQRSSMRFATREHHLGEARAKELWDKLNPIQLPVPEHVVRAKTKLLLALVVQVQASIKAVDSYNEEIQSFFAAMPPAQLAKTLPGAKSATTVATLWAELGDAPSRWSSFRHLQAQAGAVPITKSSGKNRLVQFRSACNKHLRQTLYWFSFNSLSRCEWAKKYYRDQRVKGHNKHQALRALGAKWLKIIFVMWKDHKPYDENYHLANIARQRMRQAA

SEQ ID NO: 416923 - protein, 455 aa, unidentified
MARKRKQNKGWCGPTRPVLEPNAAGVDVGAREMYVAVPPDCDPEPVRVFDTFTNDLEALVKWLQQCRITTVAMESTGVYWIPLFQMLEDAGIQPCLVNARGLKNVPGRRTDWHDCQWLQYLHSVGLLRAAFRPEQEVCAVRSVWRQRTELVSMASQHVQHMHKALTQMNLQIHHVINDITGVTGLAIIDAIVAGERDAEKLAQLREPTIQASPETIRQSLVGDWRREHLFVLAQSRRLYQSYREQIAACDREIQALLGPLPPRADPRDLPPPSKPVRKTKRTAGAITFDYRAEAYRLFGVDLTRIPGLEGSVLALFSEVGRDLSRFPTAAHFVSWLGLCPDNDKSGGQVLWRGARKIQQRAGQIFRLAAHSLHRNRSRLGEFLRRMKAKLGPKAATTATAHKLAVIFYTLVSRQIEYDESIWAAHDEQNRKRMEKRVKRQASLLGFQLVPIEVPQ

SEQ ID NO: 416924 - protein, 374 aa, unidentified
MNKIQHLAIDVDDQQFHGCLLSGDGQCIEFSTPPDVGALAKKVESLRDREAELKICYEATYVGFRLQRDLAKRGYHCDVIAPSLTPRKPGERVKTDRLDSRKLAEYYQRGLLTLVHIPDESQEKVRGLIRSREFLVGQLKALKKHILSHCRCMGLDYRRSGTGGAQISHWTGLHRQWLLGRIREMHEDGLKLNLQMLLLQMEHLERSVAGYDEDIKRIAEQAEYKKAVGAVCCYRGLDVLSAMTLICELGDIRRFDHPRRLTAYAGMSIVESSSGAHQRRFHISKMGNRFIRTTVIEACQTVGSLPRISRQLAKRREGAEKIWIEIADRAMARLHKKAMHLWHVNKPKNKIKVACARELLGFIWESLRAVASNA

SEQ ID NO: 416925 - protein, 365 aa, unidentified
MSTITMGVDLAKNLFSVCAVDGAGHVQRRQDLGREAFALWLAQVPAGTVVAMEACSGAHHWARRCLEVGLQPRLMAAQFVTPFRKSRTLKNDRNDAEAIATAARQGNMRFVPVKSVEQQARLAWHRVREGYKTEGLEISNRLRGLLAEFGIVMAQGDRALRIALADLDAAASLPAELKELLRDLSAHWAQVRDRIAACDARIEAHAKADERCVRLRALIGIGPLTADAMVASVGSAKEFKNGRQLAAWLGLVPTQHSSGGHTRLGTISCRGDAYLRTLLIQGARSSLQRAKVTAQDRATPEQIWIRQLACRMPFGKLLVAIANKHARQLWAMLAREEAYDAEAWLKHPMVQRPAGKRAVRIAGMA

SEQ ID NO: 416926 - protein, 400 aa, unidentified
MNAVGIDVSRRKSTVAIMRPFGEVAAESFKVSHTEAELRSLACFFEKLPGETRIVMEYTGSYWQPITKVLHDAGLYVSVVNVLLIYKYGNNFIRKGTTDKLDAVKIAIYCLDRWTTLERYAPADQIRQMLKTCRRQYDQYIKLKVNLKNNLTSLLDGTFPGLNTLFKSAPRDTDGHEKWVDFAAKFWHRECVCGSTEKAFINQYRKWYGKAGYRFSKEKAVSIYAHAASQVSTLPMADAVKRLVTLAVDQLNTIIKTVSSIQHEMLTLASQLPEYPVVMQMFGVGPVLGPQLLTEVGDVRRFDRKQSLVAFAAVDAPPCQPGSFESRNRHISKRGSPRLRKTLFQVMPALIQHAPADDPVFQFLDRKRQEGKLYYVYMTAAVNKFLRIYYGTVTAYLSKL

SEQ ID NO: 416927 - protein, 344 aa, unidentified
MSEVITIGLDIAKHVFHVHGADERGRSMFSKRISRGRLLEFFATQPSCKVALEACGGAHHWARQLTQLGHEVRLIPPAYVKPFAKRQKNDAIDAEAICEAAQRPSMRFVAVKSEEQQAAGLLFRTRDLMVRQRTQLINAIRGHLTEYGWIAPKRPSHVAMLADLIEEDEMARSLPEAAHAMFRLMLGLLAGLNSKIADLDKEIARRAREDEVSRRLMTVPGIGPISATAIAALAPPVETFAKGRDFAAWLGLTPLQRSTGGKQKLGATSKMGERTLRRLLIIGGSAVVQQASKRGAPKGSWLEQMLARKPRMLVTVALANKMARIVWALLVKQENYRAPVPARA

SEQ ID NO: 416928 - protein, 349 aa, unidentified
METDIILALDLGRYNSVACWYDPRTRVAEFRSIQTTPDEVRSVLAREPVSSVVFEACSQAGWVHDLCEAAGLSARVASTTGSAWQWKHVKRKTDRDDALKLARFEAVGEIDPVAIPDRNTRQWKSLICLRKRLVSERVRTQNRIRGVLVSQGLSSPRGFSAWTAAGLNGIATLALPLAECSPDQLWKGELSVLLERLRSLEEQVHLTETRLDGLAKGDHRVRLLLSIPGVGPRTAEVIAVHLPDAKRFRKADEVSAYAGLVPRQYQSGETDRRGRITRRGPRLLRAALVECAWCSLRYNTWARETWLRLQANGLSKKKAVIALARKLLVRAWAILRTGKPWCVAPAAVA

SEQ ID NO: 416929 - protein, 717 aa, unidentified
MKVLHERVAGIDVHKDMVKVAIRSPGDKPWTRKTEILEFRTFYGVLQHMAAGLRRRGVSHVVMEASGACTEPVYYALAEEDFEEIAVINPAHARALKGHKTDAKDCARLAELSGCGLLRGSYIPAPELKEVRDLTRYRMKTVQARTSEIQRLAKALESAGIKLGSVASDITGKSATAMIEALIDGERRGQVLADLAIGRMRTAGKLADLSQALAGRFTGHHALLCRLHLDRIAGFGTAVDDPGQRIAGKAGRWQREADLLKTIPGFGDVVAWAWLGEIGPAPHRYFPGHEKLASWVTLCPGNNISARKRKHGRTGDAGTYIKPMLVQAAWAAIRVRGRLQARYSRLVRRFGGDKNPGAKKKAITAIAHTLLKIAYQVLQAGTPYQEPGADFRTRRESPQHRQAFLERQLQKLHPGCTITITISPPEAALPPGPQAPLTLPARSRRRSAPRPTRRTNQRHRQALAAAPARVGCRAPTGDPVFVSAVPLLREADALALRGDRDVLVAVEDHLRAERRVPGHLDHQVPERRVHDVKAVVAGVLPFLLQPGDDTARRAVHLPHRGRRPGGQDQEHPGRHRVLLQVLLRDQVLTLPGRAEDHRDPVRGRPRFDPAGEPARHPHQVRVIQLVVAAAVQPPPPGPEPARVMTYREEGVQHHPVHAVIAAIDQVPVPFGKVIGHMPTVEPARSSHQDISHTAPEGGHSFRAKSRTERRAPSVPRL

SEQ ID NO: 416930 - protein, 367 aa, unidentified
MDESITSFVGLDVHKDSIAIAVAEGRDAPRFLGTVQSELQQLLKAFKGLGKAQSVLVVYEAGPCGYGLYRQLRSRGYGCAVIAASRMSRPRGERIKTDRRDALTLARLARSGDLVRVLVPDERDEAMRDLSRAREDALAARLKARQQLKALLLRHGRRYPGKSSWTLAHERYLSAVSFEHAAQEIAFVEYRHAVREAHERVERFTEALRTQCDHWRMKEVVTALTSLRGIDFVAALTLVAEIGDFKRFAHPSDLMGFLGLVPSEYSTGDTRHRGDITKTGNAHARRVLVEAAWNYRFPARITRRLLLRQEGQSKTVREIAWRAQLRLGHRYRRLSSRKLHQNKICVAIARELAGFVWDVARQVNVTT

SEQ ID NO: 416931 - protein, 287 aa, unidentified
MKSSTSYVGLDVHKSTISVAIAEDGRGGDVRDYGVVENRADILVKLVERLGRRGQLLHFCYEAGPCGYGLHRLLSGLGQDSTVVAPSLIPKKAGDRVKTNRRDAAMLARLHRAGELTAVWVPDAAHEAMRDLVRARATAARVLGKARQHLTGFLLRHGQVYAGQRAWTVAYRRWLTTVRFTHPAQQIVLQDYIHAVEDAEKRIAMLVEQIEQLLVHWSMAPVVTAIQAMRGVAFIDAITLVAEIGDFARFTNPRQLMAYVGLVPSEHSTGDSVRRGGITKAGNNQAR

SEQ ID NO: 416932 - protein, 316 aa, unidentified
MSKIICGVDVASASLQARISREGAEGCFPNTENGIAELAAFCRQHQVELVAMEASGGYEKLPFALLWAQGLEVAILNPRAVRQFAEGMGLLEKTDRIDAGKIAWFAEVKHVAPTQPHSAEQQRLKALVVRLRQLTELQAAQRNQQLLVEDALVRKSFTRLLTVVKSQMRELEKAIADLIAADPLWAKLNQAFRSIKGVAKRTVARLMAEMPEIGTLSNKAISKLAGLAPLARDSGKHQGKRVVRGGRRGIRAILFVVSLVVRRYNPDFAAFHQRLTAAGKAKKAVRIALAHKLLVRLNAKAREVRRELATTAVSTV

SEQ ID NO: 416933 - protein, 342 aa, unidentified
MHNPDVCGLDVSAKELVVMVRRDGKTEPHRSFPNTHLGHQELRRYLTHRRERVRVCMESTGLYGLDAALALQADSRIELMVANPRAVKDFSRALLQRSKTDPLDALVLLEYAARMPFQPWQPPPAKALQVTALARRIHALTQQCTMEKNRLHAVTATATTLRVIVQDLRRSVRGLEAAIARLSREAHRILAATPELERRFRLLQSTPGIGPVSALQLLGELVLIPAHGDVRQWVAYAGLDPRHHESGSSVHQKARISKVGNRHIRRALYMPALTAVRFAPHLRAFYLHLQARGKCKMVALVAVMRKLLHAIFGMFKYDAPFDGAKLCPALTLAAPPEVACAA

SEQ ID NO: 416934 - protein, 390 aa, unidentified
MIYVGIDVAKDKHDCCILGPDTEELFPVFTIRNNSDGYGELFHKIESVSKDKSQIKIGLEATGHYSYNILGSLLDHGYHTFVINPLHTNLYRKGQSLRKTKTDKVDARSIAEMLVTDKTLKPYTGTSYHSEELKSLTRYRFELVKERAKMKTSVSRLVNILFPELESLVPTLHMNSVYRLLQELPGAYFIASSNLTHLKALLADASKGHYGREKAIVIRETAKSSIGSPMPAKSMELRQTIRRIDTLTSDIKEVEQSIQKIMDECGSPITTIPGIKYRMGAMILAEIGDFTRFSNADQVLAYAGLSPSTYQSGKLISSYARMEKRGSKYLRYALFNAAIYVSGWDERFRLYLSKKRAEGKHYYVAISHVIKKLVRTIFRMEITHTSYQPL

SEQ ID NO: 416935 - protein, 405 aa, unidentified
MGKVFVGHDWAETHHDVYVEDGAGQRLGKARLDEGVSGVARFHELVSSFVVDPGEVTVATETDRGLFVGALVAAGYRVLAVNPMSAARYRERHSTSGAKSDPGDAFVLAELARTDGHHHRPVAADSELAEAVKVLARAHQSMIWTRQRQVNQLRSTLREFYPAALAAFDDLASSDALAVLALASTPSLGRGLSRSKIASALRRGGRQRRIDERAAEIQTILRADTLQAPGPVAEAMGASVRALVAVISEQVAQTARLEAELADHFELHPDAKIIRSLPGLGTILGARALGEFGDDPNRYTDAKSRKNYAGTSPITRASGKHHVVLARHARNRRLADVCYQWAFAALTASAGARAFYDQHRAAGDTHHQALRALANRLVGILHGCLRHRTPYDEHTAWGHRTAAAA

SEQ ID NO: 416936 - protein, 361 aa, unidentified
MQSTTLIAFDQHAATTVAAVLGPGQRTPALQSLPSDTGTIVRFVERLRRQSAVRCCYEAGPCGFELQRALTAHEVPCDVIAPALIPRRAGDRVKTDRRDAAQLAILYRAGALTPIHIPTDQEEAARDLLRCREDIRADLLRARHRLSKFLLRHGRRFTGTKKAWSKRHDAWLRAQTWPLPALEQTYTAYQRTVDEAVARLRTVEDDLRGLLTLAPLQPRVERLRCFRGIDDLTALTIAAELGDPRRFASAPRAMAFVGLVPSEHSSGTKQARGAITKTGNAHLRRVLVEAAWHYRHRPFVGAALRRRQREAPAAIIAQAWTAQQRLHRRYHRLAGRGKVPQQVNTAIARELTGFVWAALIQ

SEQ ID NO: 416937 - protein, 349 aa, unidentified
MIVIGIDPHKQTHTAVAIDKATGQVLAEITVRARRQGFERLVEWSRHLDRQRLFAIEDGRHVSGHLERYLISRGERSVRVPPRLMGEARRADRVRGKSDPIDATAVARAALAHPDLPAATLAGPEREIGLLAAHREQMVNERTAIQSKLRWLLHDIDPDLAPGPRTLDRFATLDRLQTRLRELAPTADVRICLDLVARCREITVRANELERELASLVDATTPELVQIPGCAVLTAAKIVAETAQIGRFPTEGHFARYAGTAPVPASSGAVHRHRFNRRGNRQLNAALHRIAVTQLRIHQPAKDYVAKKRSEGMSKTEAIRALKRRLSRVVFKTMTSVNRPTDGLIAAVA

SEQ ID NO: 416938 - protein, 325 aa, unidentified
MSQIWVGIDVCKAWLDVHIRPEQKIYRLPNTEAGVKELISQLPDPTEVGRIILEATGGMELTSALTLHQSGFPVVVINPRQSRNFAKATNQLAKTDKVDAKILAFFGEALRPEVRTMAAEETRQLNDLVTRRRQIVEMLTAERNRLASIRGKAREDIEANIEWLNQRLKGIDEQIAQQIKESTLWTEQEAILTSVPGVGLVVASTLLSSLPELGTLTPKQISSLVGLAPMNCDSGQMRGKRRITGGRAQVRSALYMAALVATRYNPVIRDFYNRLLERGKLKKVALTACMHKLLIILNAMLKQKTEWRKVAVTPATPVKVTNELA

SEQ ID NO: 416939 - protein, 458 aa, unidentified
MVTSRPKGNSVSKGMPIVHRHAAAMDIGSTFHVVAVPADADGEPVRKFSSFTGDLHRLADWLKHVGITTVAMESTGIYWVPVYEILEERGLEVVLVNARDAKNVPGRKTDVNDAQWLQRLHECGLLRASFRPQETIVALRSYFRHRARMIEFTASHIQHMQKALMQMNLQLHHVVSDITGLTGMQIIRAIVQGTRDPATLSKLRDVRCKASAATLCQALTGNYRAEHLFSLRQAVELYDTYQEKIHDCDKEIDRCLSQLNANREVPAAELPKRRQRRPGRNEPAIDLQSSLFTLVGGIDLTQIHGLGPYSALRIVAECGTDMTRWPTVKHFTSWLTLAPGSKISGGKVLSSKTRRSSNRATSLFRIAAIGVGKTSTAMGAFFRRLAARVGKARAVTATARKIAVLFYNTLRYGWAYKDPGVDYYEERYRQRSLDNLRRRADLLGFKLVESTASQIGVS

SEQ ID NO: 416940 - protein, 403 aa, unidentified
MKHVIAFDISMGKSYMVIYNAQKQCVFENEIKHSKPEFEKLQEKIHKLTDKTGELPEIVFESTGIYSRQLERFMQGKQYTYCLLNPLEVKLQCDSLRIHKTDRSDAHRLALTHFTVTRRVSNGTINSFHQLKSLSRWYSELDSELSIIRGRMHKVIQLTFPELERMFTSKSDLLLNFVQLFPHPDCVLSLSKTIIKNRIRANTNKKISNITAEKKAIQIIEIAKTSYPAVSQNDVLCDQLKLYARRYQELLYQKECCINKMVYIAEQRAEYGIILSLPGIGPNTAVRLMAEIGDITRFNNNKQLNAFASIDIRRFQSGKTFYKDKINKRGNKHLRKPLFLIIQNMIKQRRYGQNHIVEYYDKLKTQPYNKCHKVASIACVNKFLKLLFHLITHDIHYDYRLTA

SEQ ID NO: 416941 - protein, 361 aa, unidentified
MRVVFGIAVSKVSSEVAILVNGEKVHGYTIPNDAIGFTRLLGDLKTVHKPEIIFEATGVYSRRLQAFLEDNGYAYTRLNPLEAKKQLDSLRVRKTDQIDAEKLAQSQFVLNRKPTYVQEEVYQELRDLSRFYQNLTEDIVRAKNRLHKVLQVTFSELETILSTPTGEQYWNLVIAFPCKDFVLDLSKNELSKSIRQSTSKRISDKRVAYLAEKLTVLANQSYCAVKKTSPILEEVHYYAKELLRLSEQRQAVLDQMVELAQPLPEYDILLSIPGIAETTATSIIGELGDIRRFQSANQINAFIGIDLRHYESGNFLAKEHITKRGNPYARKILFKCIHNIASASHTNPCHIIVTPYQKIST

SEQ ID NO: 416942 - protein, 400 aa, unidentified
MNEHDEIGVFLGLDVGKSAHHGHGLTPAGKKVFDKQLPNTEPKLREVFAKLKTKFGTVLVVVDQPASIGALPLTVARDADCKVAYLPGLSMRRIADLYPGEAKTDARDAAVIADAARTMPHTLRSLELTDEITAELTVLVGFDQDLAAEATRTSNRIRGLLTQFHPSLERVLGPRLDHQAVTWLLERYGSPAALRKAGRRRLVEVIRPKAPRMATRLIDEVFDALDEQTVVVPGTGTLDVVIPSLARSLGAVHEQRRAAEAQITALLEDHPLSKVLTSLPGVGVRTAAALLVTVGDGTSFPTAAHLASYAGLAPTTKSSGTSIHGEHAPRGGNRQLKRAMFLSAFAALHDPVSRTYYDRCRARGKTHTQALLRLARQRINVLFAMLRDGTFYEPRTPRLT

SEQ ID NO: 416943 - protein, 364 aa, unidentified
MVKKATRISRFVAAVEDQPVVVGLDVHKKTSSVALFSTEDGLVESYTWPAGEAALAHQLAELGVNIEHIVYESGPTGVALSRVLSDAGFNVSVIAASRIPRGYAAAAKNDRLDAVKLATYYARGLLRPIAIPSVEQEGYRALVRRRKRIAKSRGKIKQKIKGFLLASGIDEPPSIQKWSLAASADLTALDVPPQHHMALASMVREYLFLLSEDKMLRAEIRTATRRMHSERFERLTSIVGVGETAASNFLAELFSPERFNWPEEVTSYLGLAPVVSQSGGGAARARIRPVGQKRLRGILIEAAWQWTWRDPEAKELFNRHFAKHGIGQKAIVAVARKLAIKLWRLAVDTPPTPMGDAARGVRSA

SEQ ID NO: 416944 - protein, 307 aa, unidentified
MNGIGIDVSKAMLDVAVHRGPFARFHNTPAGHRKLLSWLARREAGQIVLEASGGYEQRVLDALFDAGHQVVRADARRCHAFAAATGVSAKTDRLDAANLACMAATLELRPYQPMEPWRRKLREFVRARQQLVDLTMSAENQLEHVTETTLRRALQANINQMKKNCLRLEKHIAEQVRQQPQLEAMRAFKGVGATLQAVIASYLPELGTLDGKAIAKLVGVAPIAHDSGSMRGMRRICGGRIEVRNVLYMACLSAIQHEPRIREFYRSLRARGKPGKVAVVAAMRKMLVILNARARDTLAGVAQAIPT

SEQ ID NO: 416945 - protein, 424 aa, unidentified
MKRTQNEKILQIKFETLIVGIDVGKEAHYARAFDFRGLELAKLLRFSNTRQGYESLENWMQEIMREHGKTEAIVGFEPTGHYWFTLGDHLQRQGHRLGIVNPFHVKCTKELDDNSPTKNDRKDPKTIAMLVKDGRFREVYIPEDLFQELREAVAERERLLEQLTILSNQVLRWLDIRFPEFSEVFKDWNRDAAWLTLRHHSTPQKVVTAGVAGLMKTWRQEMKRPSLKRAERLVKAASESIGRTAGSEAAEAALQNILTQYELIDRQKQETEMLMQELLLRVPNASKLLDIKGIGMVTAAVIVSEIGDIHRFHDPRQIQKMAGLSLRENSSGKHKGKTTISKRGRKRLREGLFRAIITMLATNQEFRAIHRRNLTRENNPLTKMESVIALCGKLIRVIFAILTKGNDYDAKKMMDDMNRSMKAA

SEQ ID NO: 416946 - protein, 343 aa, unidentified
MQAITTIGLDIAKSVFQVHGIDAEGNVVLRRQLKRRYVLAFFQKLPPCLVGIEACASAHYWSRELQALGHVVRLMPPAYVKPYVKRHKNDATDAEAICEAVTRPNMRFVATKTPEQQSCLTLHRTRHLFIRQQTSVINAIRAHLAEFGIVAPVGRHGVAQLLGIAADANDKRLPEVARACVAALGAQLWMLKARILQFDRMIMVWHRSSEASRRLDDIPGVGPALATALVASIADPKAFRSGRDFSAWIGLVPKQNSSGGKDRLGHISKRGDRYLRSLFTTGALAVIRYAKIHGTGHRPWLTALLARRPTKVAAIALANKIARMAWAMMAKSERYKEPAALAA

SEQ ID NO: 416947 - protein, 355 aa, unidentified
MSSEKYIGMDVHQATISVAVRDSQGKLIMESILETKAATILEFLGGVRGTLFVTFEEGTWAAWLYDLLKPHVAKVLVCNPRKNAALKQGSKSDKMDARKLAERLRLNDLNPVYHGESGVRMLRELARSYLTIVKDLTRVMSRVKAVYRSWAIPCAGRDVYYRRHRNQWLDKIPEPGVRCRAERLYQQLDMLQQLRQQARRELLAESRKHTITAKLRQIPSLGPIRSALAVALIQTPNRFRTKRQLWTYSGLGLETRDSGEYQFVQGQPRRRKKQVFVRGLNRDYNHDLKGLFKSAAVRASVQPGPFQEFYQRSLAKGIKPTMVRLTLARKIAAVTLTLWKKGENFDAEKLKSQAA

SEQ ID NO: 416948 - protein, 348 aa, unidentified
MIHVGVDIHQRFCYMTALDSRGRQLNAQAVPNETGALRAYFRQFRKPVRAAVESCGFWPAFRAAVGDEVEVKLVHAQRVKAIAAAKLKNDRIDSATLAHLLRCDLLPEAWMADESTRQLRQQVRLRATLVRQRTRLKNQVHAILHQHGLRSGASDLFGKAGREWLQQAPVGEGARGALSTYLHLIDEFTGHVKQQDQQVKQFVGQEQRAQWLMTIPGIGPYSAMLLLAEIGDIRRFADKHALSNYAGLVPWLRQSAEKRRSGGITRVGSPWLRWIMVEAAQVAVRTSPAVRCYFEQLRRRKHRNVAVVAVARKLLVAVWALLQQGECFDENTFAGDCGKDGAVRLGKR

SEQ ID NO: 416949 - protein, 363 aa, unidentified
MPVPMLAELVDAVVGIDTHRDTHQVEIALPNGAPIALTAISNDSTGYAELLAWIVDHAPGPRLALSIEGTRSYGVGLARAATAAGLTVLECEQPNRKARRGKGKSDPIDAHLAVLAALRLDADRLPIPRTDGDREALRILLGARGELTTASTAQTNRLRALLLGGDDTDRTLARGTLTESRLAGLARRRPPREASREQAVRHAEIRRLALALREAARALKANRVQLQTIVNDVVPGLTERRGIGPVSAAQAIVSFSHPGRCRNDAAFAALAGASPLPASSGRTVRHRLNRGGDRALNRALHTIAVTRMRSCPTTQAYVARRTAQGKNPKEIRRCLIGEVSASRPASWSWLSVASGDGPVALPW

SEQ ID NO: 416950 - protein, 391 aa, unidentified
MIYVGIDAAKDKHDCCILGGNGQTVQEAFAFRNNHEGFEQLICAIQRSSEAEGSGQIKAGLESTGHYSGNLEAFLRDSGVELVVFNPLQVNLYRKSQTLRKTKTDKVDAKCIAQLLMTAESNPVSVSYQIQELKALTRHRSRLVSQRTKLKVSISRLVVILFPELPAACNSVTQAAIKALLLELPSARQIAACRIDRLTNLLRTASKGRYGRAKAEEIKSLAQQSIGANSPAAALELQLTLQHLDFLQKQVNELDKAIRAAVVQTQSPILSIPGIGPTLAGIILAEIGDIQRFSSPDKLQAFAGLDPSTYQSGKFKADKTPMVKHGSTYLRWALMQAARLAAVHCETFGRYLAAKQAQGKHYFVALGHTAKKLIRVIFRILSANEVFVPQT

SEQ ID NO: 416951 - protein, 369 aa, unidentified
MSSLAHRGLTYLGMDVHKDSISIGILAPEDDVPEVEKIFHDEASVRRFVARFPDTRRLVACYEAGPTGYELYRLLISTGVSCQVIAPSLIPRTAADRVKTDRRDCRKLARLHRSGNLVAIRVPNRQEEAIRDLCRARADMVEDLDRARKRLGAFLLRHGEVWRGGSAWTMKHHQWLTARRFDDPAMAATFAHYRSVVDARSRELTAAEADLAPWYGRDPFADSVRRLGAYRGVAQLGALTLASEVGDWRRFGRASAFMGFTGLVPSEYSSGGKTSRGHITKAGNWHMRTQLIESAWAYQSGPSVGVELRKRQDGVDADTVKRAWAAQTRLCGRFRRLAARKNFKNVVAAAIARELCGFLWAEMTAQKSA

SEQ ID NO: 416952 - protein, 388 aa, unidentified
MRPTDKTRNQDLARNQGDHSTLYVSLELSRSSWLVTSLSPNSDKMSKYSIAAGDTPKLLALLARLRGRAEQLVGGSLNVVVIQEAGLDGFWVHRSLEANDIESHVVDPASVAVSRRRRRAKTDGIDGETLLRTLLAWKRGEPRVCEMVVPPTPEQEDQRRLSRERANLLRERIQHVNRIKGLLAGQGIIGYDPLHKDRRTRLDGLMTGDGRPLPSRLRAALLRELARIELLLQQIADVEAERDVSIEADVDGRPSPVALLARLKAIGPQIGAVLYHEGLYRNFANRRDVAAYAGLVPTPWRSGSIDREQGISKAGNRRLRHIMIELAWLWLRHQPGSALSGWFRARVGNERGRIRRITIVALARKLLIALWRYVTQGEVPKGAVLKAA

SEQ ID NO: 416953 - protein, 400 aa, unidentified
MLSIGIDVSKGKSTVCGMKPGGEIVYTPFEVQHTREGMSELVSLLRGSGEEVRVVLESTGSYHCPVVAALLENGIFVSVINSLRMKRFCSQSIRKVKTDRIDAMQIALYGLAYWQELQPTKLPEDTYRELQLLARQYYQMTSMLIKAKVDFNALCDQVLPGMQELMNDHAGRHKLSDFVLRYHHTTHILEMGETRFRKDYCKWAEKKGYRNCERMAALIFATAQNGIPVLPNAPSTQIVITEAIRVLHTVEASRDAILTQMQALAKTLLEYSLVREMPCIGDTLAPRLIAEIGDVRRFHSKRALIAYAGIDAPPYQSGKFCANNRHISKRGNRYLRKTGYEVMQSYVMHKPANDPIFTFIEKKRGEGKSGKLAMVAGLNKFLRVYYGKVTELYRSLPTIE

SEQ ID NO: 416954 - protein, 722 aa, unidentified
MAVDNSVDPAGWLAEQIGACEPDVLRSMVKTMAEALMSAEADAVCGAGYGTRSDERVNRRNGYRVRDWDTRAGTVELAIPKLRSGSYFPEWLLERRRRAEQALVSVVATSYLLGVSTRRVDKLGEQMGIKGISKSQVSEMSKVLDAQVAAFRNRPLEGGPYAFVWVDALTQKVREGGRIVNVHVLVATGVNADGHREILGVEVSSAEDGAGWLAFLRGLVARGLSGVQLVISDAHAGLVEAIGSTLPGACWQRCRTHYLRNLLTRVPKSAQPWVATLVRTIFDQPAAEEVHAQHARGPGPWSNWPCCLWIDLPTLAPGSACCRRTGRRVPIGALPSQGTITVLTATPARRRPSTPDAVPRSPMTTVSMHDADVDHQEEDVVLGVDTHKDIHVAAVLTLTGGVIAHASFPTTTAGYQHLIAWTRSFGVARRAGVEGTGSYGFALARVLQAEGLTVLEVNRPDRAVRRRRGKTDTIDAENAARAVLAGEATAIPKAADGPVEMLRVFKIAKDSAIKARTQSINQLKALLVSAEPALRDQLTRLSNPRLITACAALDPSTALATARATLYTLKLLAERIQYLTAQVDELAKHITSAVEAAAPALLQQPGIGPDSAAVLLITAGDNPERLTSEASFAALCGVSPIEASSGKSNRRRLNRGGDRQANAALYRIALSRLRWDARTQDYLAKRTSQGKTRREIIRCLKRYIAREVHRLITDSSSLSPQT

SEQ ID NO: 416955 - protein, 398 aa, unidentified
MPKPNDTSRSPVALDQDSTLIAVIEMSQTSWLVAGIVPGVARQPLKKLGAEPDARLALLERWRAEAGKAGRPIRRVAVAYEAGRDGFWLARWLRVRGVEAHVIHPTSVAVARTHRRAKTDRLDTQLLKRAFLGWLRGEPDHCTMAAIPTPAEEDARRPQREREALVGEKTRIVNRLKAALARLGISGFKPTLRKAGGRLAALRTPDGEPVPPNTLAELRRDMARLALVREQIAEIEAARRHRLEQAPDHSPGQAADKGPHAMLELVARVRGIGIDTAELLVNEVLARNLRDRRAVARYGGLTGAPDESGKRRREKGLARAGNARVRGAMIQLAWRFLMFQKDCDLARWYRARTEEIAGDRRVIRKKLIVALARKLLIALWRMATTGEIPNGLVLRPAA

SEQ ID NO: 416956 - protein, 313 aa, unidentified
MIIPLRCVGIDVSKHHLDVFDETIGAPERIANVPHAITELVARWRCDAFVVFEATGVYDRELREALHQAGIRFSRINPARARDFARASGQLAKTDPIDACMLAAFARAMRPATEQVSTAARNALARLAKRRDQLVLMRAQEKNRRSEVDDCAMAERISRLIEVLDHEIAGIEAEISVLIKAEPELSEDAQLMRSLPGVGPVTCIQLITQMPELGHVGPKQAAALAGLAPFNVDSGAHRGKRKIGGGRKRVRDALYMAALNAVRRAHPFKAFYAKLRQAGKPAKLALIAVARKLLTILNAMLRDRKEYTITQAT

SEQ ID NO: 416957 - protein, 402 aa, unidentified
MNAVGIDVSKGKSMVAIMRPFGEIVSTPFEIKHTSSDINSLVKLIKSIEGESRIVMEHTGRYYEVLAHQLSEANLFVSAINPKLIKDFDNDSLRKVKTDKADSVKIARYALDKWQNLKQYSVMDELRNQLKTMNRQFGFYMKHKTAMKNNLIGILDQTYPGVNTYFDSPARSDGSQKWVDFASTYWHVDCVRKMSINAFIDHYENWCKRKKYNFSKSKAEEIYGKAKELVPVLPKDDITKLIIKQAVDQLNSASITVESLRTLMNETASKLPEYPVVMAMKGVGTSLGPQLMAEIGDVSRFTHKGAITAFAGVDLGVNESGSYEQKSVPTSKRGSSDLRKTLFQVMDVLIKTHPQDDPVYQFLDKKRAQKKPYYVYMTAGANKFLRIYYGRVKEYLASLPES

SEQ ID NO: 416958 - protein, 331 aa, unidentified
MKIKQTIGIDISKLTFDVRIHSNQFYQAFDNNLKGFKELVKWVEKNNPISKEQTLFILEHTGLYSEQISLFFDENNISFALIPGLEIKKSLGISRGKDDKVDATKIALYGYRLRDEIKPYKLPSKSINQLKRLLTLRERLVKQRAGHKSTLKEQKRIYIRKDNKLLLETQDKMIKFLTKQIRNIELEMSEIIKSNEQLKQQYKLIVSIKGIGNQTALFMIVTTNGFTMFASWRKFASYCGIAPFPNRSGTSIRGKTKVSNLANKKLKSLFDLCAKSAIQNNPEMKIYYNRRIEQGKNKMSTINIIRCKLLARIFATIKRQTPYVDTLKYVA

SEQ ID NO: 416959 - protein, 360 aa, unidentified
MCILKENGEKIEEVFGTLTPDLERLRDTLVAHGVGHVAMESTSVYWIPIWRVLDPDFDVKLVNPYFIRQLPGRKTDVKDAQWIATVLQKGLIKGSFVPEGRIQELRLYNRRIAHLHRNLQRADQSIDLILQRCNIRLSNYVSDIGGKSMRKVVRAISQGQTDPEVLVTLVHTRTKNKHGVQVIKDAVTGVLSLTDMDVLAAALQESEFYEKQLTACQEKLIELCGNYYREELELLQGVPGIKEQSAASIIAEVGADMAYFQTASNLVGWAGLRPRNDQSAGKIKGRKTLHGNKYLRIMLVQCAWGASRTKNSSFSLRFNLLRKRMNHNKALIANARKLLVVIWNISQKAGLHGKSCVARF

SEQ ID NO: 416960 - protein, 411 aa, unidentified
MRIVGFDVSRSVAEIAYLEDGTLHAGGRTGLRRDELERFAEKLRATDHVVLEATGNTAAIVNVLRRHVARVAIANPLQVRLIAEARVKTDKIDAAVLAQLYASGFLPEVWMPDEHTLALRRQISRRSQLVRQRTRLKNEIHAVLAAHLIERCPATDLFGKKGRAWLGVQPLPLDERLGVEQRLRELDRLGEDLREVEQALAQATIDDARLRVMLTITGVNTTVAIGLLSAIGDIERFPNPEKLVSYFGLNPSVYQSGPTPARHGHITKRGRSYARAMLVEAAWGATQAPGPLRAFFLRVRDRRGQQIAIVATARKLAVIVWYVLTRDEPFAWDRPALTAHKLRALELQAGMPAQHGSRKGSAAAYSLKSVRQQERAVAEQSERTYQKLFNRWKQSRPKSDSAPIRRPEART

SEQ ID NO: 416961 - protein, 407 aa, unidentified
MNNLFIGIDVGSRDNAVYIMMPDGSKHSSFMVQNNLGGAKTLSKRVVSALTEKKLSAVVIGMEATSVYGENLLCFLREDGALRQFDRKLHVLNPRQVKKFKDVHPDLPRNDLVAAFVIADNLRFGRITAPVYMDDYRYKALQNLTRARFYTAQNLTREKQRFMNHLFMKCSGLAQEKTFSDNFGAAALAVFEEFDTPDDIEEMDTEQLASFIAEKGKNRSPRPAEIAKAVQAAARGSYRLPKTVNDSVNQVLSISISSMRAMQTQIKALNREIQRQFENIPNTLTSVPGIGPVFSAGIIAEVGDIHRFAGQASLAKYAGLAWTENKSGMFEGQNTRLIRSGNRFLKYYLCEAAYSLVRCDTEYKRFYDLKFKEANKYQHKRALALTARKLVRLIFRLLKDNRLYRPA

SEQ ID NO: 416962 - protein, 429 aa, unidentified
MTKTYILKTQTVPADRSAVETYLAPPPPSKGKIIGLDCHPDTFTAAFFVGQTPHDARKIGSRENLSLDALLKWAAAELTPQDIILMEAGSNSFELCKRLGNLGLKACVLESCHVGKHAKTYADNDKMAAARIALVYLAGNAPCVWVPDEQSRERRELLHAYRKAVDEHTAATNSIKSYLNGRGLRLCKHSLDEKTTSQWILDQADWSVLQKNILAEHLANITESKERRKRLYRLIAAEIAVDPTMMRCMKVLGVGIVSAFALLAVIGDIGRFHSPEKLVAYIGLNPGQRQSGKGKDIRLGVGRRGRGDIRNLLIQGAHAIMRSGRNTPLGQWGWKLFARKGNRNVAVAAIARKLLVQVWHLLHGNPPLALESDTSFRIKLQKLAVALGSTLRTGIGLGKTLEDSVKTLISRCQTHAEPSASPCETPQPA

SEQ ID NO: 416963 - protein, 328 aa, unidentified
MRDQYIGIDLHKTFFQACAIAPTGERVWEGRFPRSAAGLEALAARCTPRSALAVEASTPTWHFADGIVTAVGELRIVDPLKTKLKAGYAAKTDRLDARRLADALRRDSVVGIYYPPVAIRELRELCRYRHALVQVRTAIINRLRAVLLRQGIADGRRLARTRSDAWLETLALPPRAAASIAGLRRLLQTVRAEAQHAQGAVEAAAASDPIAERLQTIPGFGPVLSLMVRAEIGDIARFPTPGHLASYAGLVPRVDNSARRIRYGRITRCGSPWLRWALVEAALQGTRRTDRIGRWGRSLALRKGALKARVALARTLCEEIYRHWSVVA

SEQ ID NO: 416964 - protein, 407 aa, unidentified
MDLLKTVFGIDVSSRKSNVCIMVNGQKVNDYAISNDMVGFNQLLGDLKQVTNPQIIFEATGVYSRRLQAFLDMHELRYVMMNPLEAKRKTKDDLHQNKTDKLDVLYLAKLQSEHPQRLAYVQNKEYQELMANNRIYEQASHDLITNKNRLHKAVQLTFPEIEHLLANPRGKNYWSIALRFPHPDIVLETKEADIIDFLKGLSGIGKKRANDITQNLIRLAKVACPAVKKNSAHIRGLKMAINNILSAEEECQTALQEMAKLAPKRDLEILTSIPGIGENTALRIISELGDIRRFNNPSQLNAFVGVDPQVYESGNLTAHLSISKRGTAIGRKVLYLAINQIQSAKKAGNPCHIADYYEKRKRSSETASHKKAAIASIHKLLRTIFALIKNDQLYSYDVAKHNQRLLS

SEQ ID NO: 416965 - protein, 389 aa, unidentified
MLCVGIDVAKRKHDCCIIDSDALKTVESFTFPNSREGFDMLLSKISELGIPKDKIRVGLEATGHYSSNLAHFISEHDLPLNIFNPLLTNRYKQGFSLRKTKTDKVDACAIAQMIVSGKASQTYSPLLYHNEELKSLSRYRSQTIQKCSKLKISVSRLVTILFPELEGLTSSIHLASIYALLKAYPGHEQIAHCSMKRLTRLLSDASQGRFDKSKALEIHQAACRSIGTVSLSASMELVHAITDIEVLKQHVAEIDEKIKEMADQEESSIIDIPGIGYILCASILGEIGDFKRFPDVDKLFAYAGMSPSKYESGGFHSNHNKMEKRGSPYLRKTLFVAVRLVAQNVPKFKEYLEKKLSEHKPYKVALSHVAKKLIRLIYRLGVSRCPYLA

SEQ ID NO: 416966 - protein, 325 aa, unidentified
MLEETHDRDQIIQRVAALDVGKAELTCCARVPGQGNSNRRLQEVRTYQTMTRWLLVMADRLAELGVTRVVMEATSDYWKGVYYLLEAHGFEVWLVNARDVKHLPGRPKTDTLDAVWLCKLAERQMLRPSFVPPRPIRQLRDVTRYRADLVAARTAEKQRVEKLLEDAQIKLSVVASDIFGVSGRAMLGALIAGERDARVLAQLARTRLRAKLGPLAEAFSGFFTDQHAFLLGKMLARVDALDADLADLDARIEELIAPFAGAVDRLDEIPGIGQLAAQLLIAELGTDMTRFPTAGHLVSWARFAPGVSESAGKRKGRGSTGHGNP

SEQ ID NO: 416967 - protein, 304 aa, unidentified
MRNNITYVAMDTHKKEHSVALHYPRQEEIFRFSVRNNVREIKKMVNKIKKKAPANIKFCYEAGVCGFTLKRRIEALGCKCVVIAPSLTPIKPGDHIKTDRRDALKLLTMFQAGLLTEVYAPSIEQEAARELTRCRQTAQENLKRIRHQLLKFLTRHGYVYTDGNHWTQKHFQWLRNLDSDNPLLADVFDNYFTEMQHCLACLASLDKQVGKLAETKPYKQIVGLLRCFHGIDTLTAITVITEIFEFGRFSTPGELMSYLGLTCSEDSSGQTRHRGSITKAGNNRVSPHFSQPLILSYFFVAQGG

SEQ ID NO: 416968 - protein, 347 aa, unidentified
MTIVETTRPITGGVDTHLDVHVAAAVDANGGVLGVESFATTPAGYVELHGWLAGFGTVDRVGVEGTGAYGAGLARHLRGEGLVVIEVDRPNRQERRRNGKSDELDAIEAARAALSGRASGIAKSADGDVEAIRALLVARRSARDVRIKYLNQIRHLGFTAPDELRERLRDVPVDQLAATAAALRPTAGSDTVVYATKLAIATLGRRIVALDTDGQRLDDVLDMLVRRRAPRLLEVYGVGTHTAAILPVAAGDNPHRLRNEAAFAHLCGVAPLPASSGKTQQRFRLNPGGNRQANHALWRIVFTRMSNDERTRKYVARRLAEGRSTREITRILKRYVARELYPHLVRD

SEQ ID NO: 416969 - protein, 361 aa, unidentified
MEKASSQVGKINMPVDEVTMTQILSFVGVDIASTSFMGCAGTAPWKVTVKPAKFENVEDGFISFLGWLKEHNLMPETTVVCMEATGVYSESLAYFLYASGYTVAVEPPLNIQRKFPVNGSKTDELDCQYIAEYACRYVDKLSFWKPRAEILEQVKLLLTTRQHFSVQLTGHKNALHAVNRKKVSSALAKQVHQNMIEQITKHIKSIDQEIRRLIESDPTFKQTVLLLLSVPGIGLQLAAHLLIVMQETLDPKTLAAFIGICPIKHESGTSVYSAPTSRHYGPSVLRKLLYLAACSVRTHKKQFQQYFFRKVAEGKHKKLVLNNIQNKILKIACAVVRSQKPFVPNYVSVNPLVFQKTLTLS

SEQ ID NO: 416970 - protein, 339 aa, unidentified
MQLYAAFDLHANNSLLGIIDGDGKRVFKKRLHNERELILEVLRPHQEHIGGIAVESTYNWYWMVDALMEEGYRVHLANPSEIQKYEGLKHADDNHDAFWLAQMLRLGILPEGYIYPKQERPVRDLLRKRGHLVKIRTSLILSLQNIITRNCGLRLNVNDVKRLRENRVSPLLEENDDLALAGMVSKETIDFLTHKIRKIERAVEGKIQLKEQYRYLLTLPGVGTVLALTIMLETGPISRFAKVGNYVSYCRKVSTQWTSNGKKKPGGNKKNGNRYLAWAFSEAAELARRYNSQARAYYNCKMQKTNFMVAHSALSHKLARAAYFIIRDQVVFEPEKLFR

SEQ ID NO: 416971 - protein, 336 aa, unidentified
MEWSVAIGVDTHKDTHAAVACDRLGRQLDSLQIPACLAGYRQLLAWAETLGQPAFSVEGSGSYGVGLVRFLVAAGVSVVECERPHRRDRRRGKSDLIDAALAARKLVVGDGLSGLRGDGVREDLRLLLLERRSAATARTAALNQLHAVVVTAPERLRRRLDRFGGSALGPACARLRPSVKSHHAAVLARLGRRVLALDRELESIDSEISERVQTLVPELLDECGVGAFCAAQLLVSSGDPTRMRNEAAFAALAGTSPVDASSGKQQRHRLNRGGDRQLNRALHVITLARVRHHPPTAAYYQRLLDTGKTPREARRCIKRTLARHFYRKLREAQISP

SEQ ID NO: 416972 - protein, 400 aa, unidentified
MIDTSDIGVFLGLDVGKGEHHATAVTPAGKKAFDKRLPNSEPRLREVFGKLQAKHGTVLVVVDQPASIGALPLAVARDMGCPVAYLPGLTMRRIADLYPGEAKTDARDAFVIADAARVMPHTLRSVDVEDETIAELEMIVGFDDDLAGEATRVSNRLRGLLTQIHPHLERVLGPRIQHPAVLQLLERFGSPAQIRKAGRRRLVGLLRPKAPRMAERLVEDIFTALDEQTVVVPGTDAAGLIVPSLAGSLTAVLDQRKVLATRIEELLDSHPLSEVLTSMPGIGVRTGARILIDVGDGASFPTAAHLAAYAGLAPATRSSGSSIRGEQPSRRGNKQLKRAFFLSAFASLADPVSRAYYDKKIAQGKHHTQALLCLARRRADVLFAMLRDGTFYQPQTPATT

SEQ ID NO: 416973 - protein, 339 aa, unidentified
MKKKYFIGIDVSKHTLDVAFIINELSSFSKPVWKQFNNTVQGLQQMKKWLAEIQVPLSEQTIVVIENTGIYHRLLWQFFSSLNVDICIENAAQVKWSLGIARGKSDKVDSRRLALYAVRNADRLKPTPALHCTVMPLKDLLTIRNKLLVQTRSLETALKELKHVSTSAADTAALKKLLQPALKGLQQSLKQTEQKIKDVLKQDDIVYKTYKLLNTIPGIGHITAIYLICCSNLFTMCTNGKQLACYCGVVPFDCQSGISIKGKHHVHKMANKELKRLLHMCALTSIKNHKEFKDYYERKKEEGKHAMSILNAIKNKLVLRAFAVVKNERPYVDNYAKAA

SEQ ID NO: 416974 - protein, 382 aa, unidentified
MYYIGIDISKFKHDCAVIDDSGEIVTPSWSFTNDAEGFSQLKLLLNSLDTETGIGLESTGHYGMNLKLFLESNNFSFMEFNPLLINRFVKSKSLRKTKSDSIDCMMIAHYLMTVEYKPYPSSFYHTEKLKSLTRFRDSLIRFRSRQLVELTNILDKVFPEFKPFFGSRFSVTALYILSNYSSPEKIANMNSKSYESLRKLSRGRFSTVDFAKLKQLAKNTIGTTEDYLLLQMQIVLDIYRQLDSKVDETEVSIKECVSDMNPPMLSVPGIGIESAAVILAEFGDFSKFKNASQMLSFAGLEPGYFQSGTSETTGKMVKHGSSYLRYALMNCAQTVVNYEPTFAMFYSKKRAEGKPHRVALLKSCYVSSTHCKLKTLHMMLIL

SEQ ID NO: 416975 - protein, 357 aa, unidentified
MDGSKDRPRTTAGLDLGDKYSYLCLIDQQSGEVVEEGRLRTTPEALKRRFVSERPLRIAIEAGTHSPWASRVLEECGHEVLVANARKTRLIYANKQKTDEIDAENLARLARVDPKLLYPLKHRGEDSQAHLAIVRSREALVGCRTQLVNHVRGAVKSFGARLPKCPARSFHKRAAEHVPEPLLPALGPILEQIGSLTERIRDYDRKLEEISEEHYPETDLLRQVEGVGPLTALTFVLTLEDPHRFEKSRSVGAYLGLVPATDRSGDRDPQKRISKEGDEMLRRLLVSGAHYVLGPFGSDSDLRRHGQKIASRGGKNSKKRAVVAVARKLSVLLHSLWVSGEVYEPLRNSHRFGGRAA

SEQ ID NO: 416976 - protein, 350 aa, unidentified
MKSKHPVIIGIDTHKTTHVAVAINTQGTRLAALSIPTNPKGYMELERWSRSLGQVLAFGIEGTGSYGAGLTRHLLAQDHSVVEVTRPNRQLRYTQGKSDSLDAEGAARSVLSGQATAQPKTQTGSSEMIRHLKIARDTAVKSRSQAMVTLKTLIINAPVDMRETLDQIKGKVGLIRHVAAFRPGDIDNPTASAKAAMRALARRWLWLHDEIIAHDKELERLVTERAPELMASHGIATLTIAEMLILVGDDPTRIHSEAAFAKLCGVCPIPASSGKTHRFRLNRGGNRQANAALYRVAIVRMRSHEPTLAYVKKRTKDGKSKSEIIRCLKRYIVREVYSQLCVSKSVKIAT

SEQ ID NO: 416977 - protein, 347 aa, unidentified
MTQVHILAIDLAKRSFQACGTDRGGAVLFNRVVSRARLQQLLSEQSPCIVAMEACATSHFWGRFSQGCGHNVRLIPPIYVKPFVKRQKNDAADAAAIAEAAQRPNMHYVEVKSAERHARAVAFRTHQCFVRQRTQLINALRGHLGEFGIVVAQGPANLTAVVGILADQTNDLPAGVRKIGALYLDQIRLLTEKIDGPMLKPRDATKSNEDMRRLCTVPGVGPVTAGATLAFAPDLRAFKSGRNFAAWLGLVPRQHSTGGKTRLGGVSKMGQTDIRKLLIVGAVSLIRWIVRKGVLPDNWLGSIPGRKPKMVAAVALAEDGAQYLGNDDQGEKLQNSVIRCLSRKAMR

SEQ ID NO: 416978 - protein, 427 aa, unidentified
MKSKLTDFAATLGLDWADQKHDLWIQPADGSKAQHLRLEQTPEAIHEWVAKLRERFGNRPVALAVETSRGPVISALMAYDFIVLFPVNPKALKDYRAAFSVSGAKNDRSDAQLLEQFVRLHRDKLLALEPDTELTRKLAGLVEDRRRLVDERTRLVNQLHSRLKTYYPLAQSLLDSLMNTPLAAEFLARWPDLSSLRRAEPKTLRAFFFKHHSRSAKTIEERLEAIKNAQALTTDPALIEPARLLVGALSQMLRGLHQAIAQFDQAIEQAMNQHPEAALFRSLPGAGPALSPRLLTAFGTNRARFGSAQEVAQFYGLAPVVMQSGTSKTTHMRRRCPKFGRQTFHENAACALRQEPWAHCYYEQQKKRHENKHHQACRALAYKLIRIYFACWRDRQAYQPEKYLRALQTNGSPLHKALETQPQKNCE

SEQ ID NO: 416979 - protein, 366 aa, unidentified
MPDGMALDSHCAPPASAVPDRVDANGARRSIVMGLDQHRAQIAAEWLHTETGEVGRARVTPADRVGVRRFLARFEGSELEVALEATTGWRFVVEELATVGAVARLAEPAQTSALRGNKRRAKTDRADARHLRELLMAGRLPESWIPPAHLLDLRARVRLRHTLVDQRGEWQQRIQAVLYHHGLPKRSGLLSGENRAWVEQVALPAAAAEQVSVALALADALDVQIAPIDKQLGSFARRQSGCRALMVHYGIGTITSVVILAELGDVRRFSSSRQAVRYAGLDITVHQSDKRRAPGHLSRQGPPALRWALYEAAQAARRPGSPDRDYYLEAAERLGSNRACLALARKLLKRSYHTLRELGEEGIAAA

SEQ ID NO: 416980 - protein, 410 aa, unidentified
MTFSLERPDTRRLVAHLREGDVIAEVIGWQPAQAAANLLATLEAVEAEGYGECFWLEPTGHYFENLARQLQARPQPVTLINSYAVKQNRSQQMMRREKTDEIDVAAVGDLLRRGEGTPYRPASGLYLQLQQLDRARLAKLKLQTMLKNQILGHLDRIFPGLVLQGQEATDRYQPLFSSSFWQCQTLQHLVRVCPDPCRLACLSPSELVALFHDRHYRLGQQNAAKIIAYAQKILWPDPDLSAIRNDLLQADLTLFEHLQFQLDQLEQRLSDLLAQTPAAVWATLKGVSPVQAASLAAAMGDPAHYTYAAQIFRRAGLVSGRNDSGNRQRKGKGQGVLKVGDVYLRRALMTLTETLILHQPLLRQYYTTLKKTKHPGVARVATARKALGILWATLRDQRSVTLGLKKGRPM

SEQ ID NO: 416981 - protein, 360 aa, unidentified
MKIQRTSVGLDVHARSVVGCALDGETGEVFQRRLSPDHRQILEWINGLPAPVAVTYEAGPTGFGLARFLLASDIECLVAAPSKLVRPSGDRVKTDARDAAHLARLLHLGEITPVCIPSVEREAARDLVRAREDCRADLMRARHRVSALLLRHDILYSGGPTWTGAHEAWLGRQRFDAPPAQTAFDTALETMLATVDRRHRLDTAIAEMALESEFSAVVRRLGCLRGVSTLTAFGLAVEIGDWSRLSGRAIGAYLGLVPTEYSSGQSRTQGAITRTGNAHARRLLIEAAWHHRRLYHPGVELRRRWQAASPTARRRGQQANQRLHARWQSFDARAKRPAVANTAIARELAGWCWSLAVLEE

SEQ ID NO: 416982 - protein, 344 aa, unidentified
MDNHTQYLGFAGVDLAKKVMQIHFVTEDGEITDKSAKRAEFLDFFRNRGKCLIGMEACGSSQDWARKLEAMGHEVHLLPPKAVKPFVSGQKNDHNDAIGIYKAMFNGVRRVPVKSTEIRDLQTLRRIRSQVTKDKVKEINHVRGLLAEYGIVMGKSLNAFNKDISSALEILTERGDVSPLVAEELRTTVEAIKAKIERQKKLDQEIEQLARGCKNYENFLKTPGVGPFTAAMLCVLLCDPSIFANGRQFAAYIGLAPRSRGSGGKNYVTGIPSKFNCDSESRAVLVECAQAIARCKNKSLWVEEILRRKPKKVALIAIANKLARQVWAMANKGESFKQMAVLTA

SEQ ID NO: 416983 - protein, 405 aa, unidentified
MPYILALDVSMGHSYSVLYKDDTCLFEDEIEHTQRGFHALLEEIQHLPERPLIVFEATGIYSRPVEKFFQDHHFSYCLLNPLEAKKQMEESTLRSWKTDKSDAHRLAQTHLKNQRQPKEVQSNFYLEMRDLARFYQEIEKKITRLRMDLHNCLQLTFPELEQFFSNRLTPYALTLIRLFPHPDFVLASTRTKIKNKLINETRKKISANRAEQKADQIIHYAQCAYPAVEKDSIHCQKTIYYAELLQDLLEQKEALATQMIKKAEGSPCFLLYQTFPGIGALTAALLLGELGDITRFKTHKQLNAFVGIDIRRYHSGKYTGQDRINKRGNPKARKIIFFTIRNMIRQQRAAPNHIVDYYYKLKKQPIPKKDKVATVACMNKLLKCMHAMVRAHTEYDYAYAVSVDH

SEQ ID NO: 416984 - protein, 378 aa, unidentified
MEIITRNEKILYVGIDVHKDTFSLCCFDFQRNELSDEMTIKATTKGVIKYLEAIRKKQKGEVFFACGYEAGPTGYGLCRGLQKAGYGCVVMAPTTMSNPEGKKRVKTDRIDARAISRILAYKSYSQVHLPSEEIEALKEYTRARDAKKRMFKKAKQELLSFLLRNGKTYPESGNYWTGKFFNWIKTVQFSEKWMQEAFNEYLAEVYSLKAKTEAMDMKIRDIAGLEIIKDKVDKLVCFSGIDVTTAVETVVEINDFTRFSTAAQFASYLGLCPGQDSSGKTKKMLGLTKAGNCRVRALFCESAKAIKRTNPYGQKSKRILERQKNASPEIVAYADKATKRIRTKMKHLEERGKNYNVSSAAGARELACFVWGMMTQFA

SEQ ID NO: 416985 - protein, 334 aa, unidentified
MYDHYIAVDWAQTNMAIARMTAVVGKISVKEAPANVKELQLYLSQLKGRKILTIEESTPSQWLYTELKSYVDEIIVCDPYRNHLLSEGTKNDKIDATKLVQLLRANLLKPVFHSGDDFIYLRKLVSGYQDLINAGVRARNQRAAIYRANGKRWQNGEKLESSAETFVLEGLEKSIESYKEEKKRYEKEFLRLSKKHKEIGLLKTVPGIDDINAVKIVAYVVEPRRFKSIGHFLSYCGLVKLERSSGGVVYQRKNSRYCRVLKTLFKMSVYSVTAQDKENAIQDYYKYLIHEKNLASHDARSAAARRIATLAMGVLKSGQKFDPQRRTKKSINLN

SEQ ID NO: 416986 - protein, 344 aa, unidentified
MNYYAGIDVSLESSSVCIVDATGEIVKEARVESHPDALVKFFKAFGLPLTVVGLEAGPLSQWLYAGLTEAGFVTSLMETRHVKAALSATTVKTDRRDARGISQLLRMGWFRPVHAKSAESQEVRALLVARKQLQHKLRDIELSLRGILRGFGLKVGKVTDKTFEARIRELVTGHPMLEQIAEAMLAARAALLEQFNKLHKAVLKIVRQDEVCRRFMTTPSVGAIVAITYKSALDDPGRIKKSKNAGPLFGLTPKRYQSGETDITGGISRVGDQMVRTALYEAANVLLSRVTRFSALKRWGLEVAKRRGLKRAKVAVARKLAVILHRMWIDGSTFRWTKTEEAHA

SEQ ID NO: 416987 - protein, 354 aa, unidentified
MTIVADTYTYVVGVDTHAATHHYAIIEARTGAVVDHAQFPTHTKGLLRAAAWIARRTGEPTGDLDQVLVSIEGTRSYGAQLATLLAHTGYRVVDAPSPKRERGSGKNDHIDAIAAARGRLNKDTTKLADARAGQVSAALQVLLTARNSMTSERTRAVNALNALLRVHDLGVDARRKINRPTIRTIAAWRTRKNDTLVLTTARGEAIRLATRILALDVEVGANERDLLAIVASTAPTLLDLTGVGPVNAAIVLTAWSHPGRVRHDAAFAKLGGACPLEVSSGNHDEHRLNRTGDRQLNRALHSIAKTRMRHDPRTRDYVERRTTQGLSKPRIRRCLKRYIARELYRHLATGVDTL

SEQ ID NO: 416988 - protein, 297 aa, unidentified
MSEAVFIGIDVSKDTLEVASSAQASSWQAVNDTAGIEALSTQLLAMAPALVVLEATGGYEFEAACALQAAGLDVAVVNPRQARDFARAMGALAKTDSLDARMLAAFARVLHQHPERSRFVKPLADEALQRLQALVLRRRQLVGMLTSERQRLRMSHASARPSIERTIEFLKAQIHDMAIEAGEHVRAHHGALAAALSSVKGVGAATVSTLLAELPELGQLRRRRIAALVGVAPLNRASGQMRGQRSIWGGRTDVRKTLYMATLVAVRHSPVFKAFYERLAQPASPRRSPWLRPCANC

SEQ ID NO: 416989 - protein, 339 aa, unidentified
MKYTPVGVDIAKHVIQVHFINEHTGEVVDKQVRRQDFLAYFSNREPCLIGMEACGGSQHWARELTKQGHKVRLLQARFVKAFVMGNKNDVMDARAIWMAVQQPGKEIAVKTEEQQSILVLHRSRRQLVKFRTAQINALHGTLLEFGETIHKGRAAMEREFPEALERMKERLPLYLITVLENQYNRLNELDSLIDDIEKQLTSVARQNETCRRLLDIPGVGPLIATAALAIMGKASVFKSGREFAAYVGLVPRQTGSGGKIRLLGISKRGDKYLRTLFIHGARAAALLTKEPGPWITELKKRRPASVAIVAMANKLARTVCAIAAHGRKYDKNHVSIRPY

SEQ ID NO: 416990 - protein, 359 aa, unidentified
MTNGSTELKEAAGLTVGLDVSDIYTSFCMVDKEGNVIEEGRVRTTEPALARRFSVVAPCRIVLEVGTHSPWMSRLLADLGHEVIVANARRVRLIAESDHKRDRTDAELLARLGRVDPGLLGPIQHRGPEAQRDLALLRARDALVRTRTNLINHVRGAVKATGGRLPACSAATFHRKAEAHLPEALRPLLTPMVTMIAELTARIRDYDHQVELVARRYPGVRSMRQVAGVGPLTSLGFFLVIENPERFRKSREAAPFVGLTPRQRQSGEREPQLGITKAGDPLLRRLLVQSAHYILGPFGPDTDLRRWGLRLAASGSSRAKKRAVVAVARKLAVLLHRLWVTGEVYEPLRNEKETPARAG

SEQ ID NO: 416991 - protein, 375 aa, unidentified
MDNHSEAFVAFDSSKLRNAVAIADGGRGGEIRFLGEIENTEAATAKLVRKLAGKYERLTFCYEAGPTGYGLYRQIKSLGHECMVVAPSLIPKRPGDKVKTNRRDALSLVKLLRGDELTPVWVPDLGHEAMRDLSRARETAVMDLRSKRQQVSAFLLRQGRHYPDNKKTWTKAHMGWLASQTFEHPERRLVFEEMMLAIRQAQERLERLEHAIRLAVPDWSLAEVVTALMAMRGIDLISAATFLAEIGDLSRFRTPTELMAYLGLVPSESSTGDTIKRGPITKAGNRRARRMLVECAWSYQHPPRVGQNKQQKVDAAPPAVREIAWKAQCRLHRRYRALTRRGKRKTVAITAIARELAGFIWAVSREITTARAAAK

SEQ ID NO: 416992 - protein, 342 aa, unidentified
MEHYAGIDVSLECSSVCVVDANGKIVREAKVASEPQALIAWFGSLGFGLERIGLEAGPLSQWLFAAMREAGLAVELLETRHVRKAFEAMPVKSDRNDARGIAQLMRLGWFRPVHCKSMSAQETRSLLTARKLVQSKFHDVENSLRGILRGFGLKVGKTTGQKFAGRIEELVTGHPHLQMIAKALLAVRAVLRTEFAAFEKQTRRMVRSDMQARLLTSIPAVGPIVALTYASAIDDPARFKSSKQAGAHFGLTPKKHQSGETDYTGRISKIGDASVRTALYEAANVMLTKPVKGCSQLKSSAMRIKRRAGMSKAKVALARRLAVIMHRMLADGTPFNAAAAAA

SEQ ID NO: 416993 - protein, 347 aa, unidentified
MSHKTAATVALTIGIDTGKNTLHLIGLDDKGAIVLREKVARGRITARLANVPRCLIGIEAGMATHYVARELSALGHDVKQVPPAYAKPFRQGHKNDFRDAHAIAEAVQRPSTRCVPVKTDDQLDLQALHRVRSRLVGQRTAVINQIRGFLLEHGIAVRQGLRFLRQQLPDILAKRSDVLSPRMIRIMEDLSGDWRRLDERIEHVTEEIEVLAHGSEGCRQLMTVPGIGPIIASAMVAAIGNGAAFAKGRDFAAWLGLVPKQMSTGDRTILGRISKRGNRYLRTMIMQGARVILLRPANWAKHSFGPWLTAAANRLHHNVLATALANKLARIAWTVLMQARSYEARVN

SEQ ID NO: 416994 - protein, 410 aa, unidentified
METIFARCAALDVHKAQVTACVRVPGRGGGRQGQVAEFRTTVSGLMTLRDWLAAHRVSHVAMEATGVYWKPVWALLEDDFECILVNARHVKQVPGRKTDVSDAQWLAQLMEAGLLSPSFVPPKPLRALRSLTRYRKTQIAERQREANRLHKVLEDTGIKLDCVASDILGASGRAMLDALCAGTTDPEVLAALARGRLRAKLPALREALQGRFDAHHALVIGAILAHLDFLDEQVERLSEAVAEALAPFAPEVELLCSIPGVGRRTAEVIIAEIGTDMSQFPSARHLASWAGQCPGNDSSAGRRRSGRTRKGSKWLGAALEEAALSASRSSVGYPTALYRRLRPRRGHGRALGAVKHSILVACWHMLRTGELYRDLGGDHFERQDAERAVRRLVRQLQDLGQEVTLQPVAP

SEQ ID NO: 416995 - protein, 331 aa, unidentified
MHYAGIDLHKRTLSVSIENENGPIGKPKTFSCQEEETVVRFFSDLRPFRAVIEASGGYRWLYGLLSPLGDVVLAHPRRLKAIVAGRAKTDKLDAALLAKLLRAGLIPTAYIPPERYAQLRDLTRARARLSRHETEAKNELHAILARNNVHLPVKTPFCRRWILLASRLDLGPVDGAVRDELLARIHYFEKQMKRTDDALAETAKSFPEMNALLPIHGIGLFTALLIVAEIGEPRRFKDGRQVGSYAGLTARVDQSGGHCYHGSITRQGSAWLRWALVQAAMRVTARDPKLSNFYARIRKRSSAKIARVAVARKLAGICWLRLMRWHFAQAA

SEQ ID NO: 416996 - protein, 469 aa, unidentified
MGFEPEHARWPPLRLARVSRELVSVVVVSPLLLREFNNQEEDEVRSVGRSIGLDVHRDFCEVAIAQDGEVRSSGRVDTTPERLELFGASLHPQDRVALEVSGSAWEVARILERHVARVVVVSPADTGIRQARAKTDRLDARTLARLMAAGELDAVFSPDEGCRVMRRRLSRREQLVRARSRAKNEIHAVLVRRLVGRPPVSDLFGVKGRRWLAELDLPLEESETIDACLRHIEFLDSEIATVERQIASEALRSAEIRRLMSVPGVNVICAASFMAAVGEIRRFQNPRALTGYLGLDPRVYQSGSAPATGGHISKQGSASARWALVEGAWSVVRQPGPLHAFYARIRARRGHGIAIVASARKLACLFWFLLTRGEDYAHQQPSLTAKKLRLLEIRAGAPTLKGTPTGVWATRQAMREGERRLAEQAEASYQQTVRDWQAAAPKKVGASVTPGRASQKPSKGKVTRQTTSP

SEQ ID NO: 416997 - protein, 344 aa, unidentified
MDNHTQYSGFAGVDLAKKVMQIHFVTGDGEITDKQVKRAEFLDFFRNRTKCLIGMEACGASQDWARKLEAMGHEVHLMSPKAVKPFVSGQKNDHNDAIGIYKAMFNGVRRVPVKSTEIRDLQTLRRIRSQVTKDKVKEINHVRGLLAEYGIVMGKSITAFNKGISSALESLKERGDVSPLVAEELQTTVESIKTKIERQKRLDREIEQLARGCKNYENFLKTPGVGPFTAAMLCVLLCDPAIFANGRQFAAYIGLAPRSRGSGGKNFIIGIPSKFNCDSESRAVFVECAQALARYKNKSPWVDGILRRKPKKVAVIAIANKLARQVWAMANKGESFKQMTILTA

SEQ ID NO: 416998 - protein, 353 aa, unidentified
MSEQYAGHQIVGMDLHRRRSVLVRMTETGEQLETVRISNDPEYLQAVMARAGEAPDVVLEACYGWYWAADTLAELGATVHLAHPLGVKMFSLRRVKNDQRDAADLADLLRMGRLPEAWIAPPACRELRGWVRHRAKLVGLRSQLKCQIHAVLAGAGVQVLMSDLFGVAGQDLLAAIQLTSESRARVDSALRVIGGLDFEIELFGKLVAGRLRADPGYLAIQAIPGVGPVLAAVFVAEIGDIDRFRRAAQLASWAGLTPKHHESDTTVHRGPITKQGSRLVRWAAVEAVQRVPGHTRLGQVRDQVGQRRGRNIGIVAAARELTVLVFYGLRDHHIRALSRPPSITATTPTTPAA

SEQ ID NO: 416999 - protein, 324 aa, unidentified
MDTVIVGIDVAKEKLDVCLRWAGRQKFGQFENTVAGHQKLMGWVGKQRGTHQVHVCLEATGQYGDGVAEYLYQQGLLVSVVNPARIKHYGRSQLRRNKTDKADAQLIADFCASQKPEPWSPPPAEFKTLQALVRRLEDLMAARLQEGNRLQSGISTDAVVEDIQSHLAYLDQQIQKIKCLIQEHIEQHPRLCEQQQLLVTIPGIGKLTAAKLLGEIRSIHEFEDARQLAAYAGLTPEIAVSGTSVRKKPHLSKTGNANLRKALFMPAISAKRYNPIIAAFCVRLSLAGLLPMQVIGAAMRKLLHIVYGVLKHGRLLTLIISQNV

SEQ ID NO: 417000 - protein, 390 aa, unidentified
MGVIIGMDPHKRSATIEVVNERGVVLSKARFGTDKLGYGDMLAEGRRFPDRVWAVEGCNGIGKHVAHRLVHDGETVLDVPAKLSAQVRVFATGNGRKSDPVDAHSVAMAALHNPGLLRVEVDDALLVMGMLTDRRDELGRNRTQTVNRLHRLMLELFPGGAKQFLSAQQARALIATIKPRDLPGKTRRRLAVELIGEIEVLDRKIKAAKKELTALVDTRGSTLLQLPGIGPSSAARLLVDVGDIHRFGNRDRFASWNGTAPLDASSGNQQRHRLSRAGNRRINRALHIMAIVQLRHATEGRAYYDRRKAGGMPSMMAMRALKRRLSNVVYARMLDDQKRRQPKLGASPGGHSGNDSDSSAADSHPSTDSSDKPHPGPATSQPRTKLTAAS

SEQ ID NO: 417001 - protein, 339 aa, unidentified
MVHVGVDLHKRSSQLAVLMPDGEVTQQRLENDPRQLERFFAQVPRGARVAIEASGTWWWFVDLVERLGHHAILSNPKQTKAIAAARLKNDRVDAERLALLLRGDLLPTVWIPPARLREARELVRHRVSLVWVRTEIKNRLLALLSRRNLQPTSSKRWLTVRGRRELAELPLDAIPSTVREDCLALLRVLDEQIRRLDHELVQRWGDDPRVQRLRTIPGIGPFTAILLILELGEIQRFPSAKHLASYVGLTPRVRASANRVRLGHISKEGNRLLRWALVVAATQAARRPGPLRAWFRAVQQRKGMKIARVALARRLAEIVYQIWKHDLDFVTLVRGGVRG

SEQ ID NO: 417002 - protein, 316 aa, unidentified
MSAPQCFVGIDVAKAHLDIALRPTGERWAVGNDDAGIAALVERLQALQPTLVVLEATGGYQRAVVAALAAARLPVAVVNPRQARDFAKATGQLAKTDALDARALAQFAEAVRPPPRPLPDAQADELRALLARRRQLVAMRTAEQNRLGNAPPRLQPDIQAHITWLNSRLAALDDDLDTTLRTSPVWREREDLLRSVPGIGPVCTRTLLLDLPELGMLSRQRLATLVGVAPLNRDSGTLRGSRTIWGGRAHVRTALYMSTLVAVRYNPVLKAFYERLCTKGKAAKVALTACMRKLLTILNAMVKHHTPWQVQEVPNA

SEQ ID NO: 417003 - protein, 374 aa, unidentified
MKEKLRFLGLDVHAETIAVAVAEPDGEVRSLGTIPNRSESIRKLIKKLGPADKLRACYEAGPTGYVVYWQLAELGVECEVVAPTLVPVKAGDRVKTDRRDAEKLARCYRSGDLTAVWVPDEGSEALRDLVRAREAAKQDQTRARHRLSKFLLRSGQRPPSGVRSWTRSYLIWVAQLRFSQIAQEFTRLDHLHEVEHMRERVARLEQAITEAVKLASPELKQVINDLQALRGIADISAVTIAAELGQVSRFDSARQLMGYCGVVPSEDSSGKRTRRGSITKTGNAHLRRIVVEAAWSYRRPPGVWYGLRRRQETISQETKEIAWKAQHRLHKRYMKLGAAGKDQRKIVTAVARELLGFIWAIGSRAETVVRQQAA

SEQ ID NO: 417004 - protein, 324 aa, unidentified
MEVFHLGVDISKAKFDVALLRPDGKFHHRVLPNTAAGFQQLSAWLSKQKAHSIHACMEATGTYSDALATYLRSAGYLVSVVNPAIIKAFASTEMSRTKTDKTDASLIARYCQKHQPPAWTPPPAEISELQALVRRLEALLEMLQQERNRLAAGINSSSVKEGLEQHITYLDEQITHTQSLIRDHIDQNPTLKQQRYLLTSIPGIGEATAAKLLAEIVDVNHYRSARQVAAFAGLVPKHRESGSSVRGKPRLCKVGTARLRKALYFPAIVATRHNPVIRAVSQRLSERGKCPMLIIGAAMRKLIHIAYGVLKSGKPFDPDYGKTA

SEQ ID NO: 417005 - protein, 482 aa, unidentified
MKTKNSPALAVGIDVHKKRHYARVKIRETREIISPILKIYNSKRGLDFLLEKVNHLMEKYQAKGVIFALEPTGIYWKPLGYALHDKGCLVHLVNPVQVHYKRKEEDPAANKNDKIDPGLICDLVCDGKSNPARFMLGIFRLLQKTVRSRRDIVLELSSKKIKLKTVIYELCPELVDAFTDIAGRVSMAILRFSPSIDLLESTPLEELSSIFRIYGSHKTKISPEKLLSQVQFSLGIRNDNQAHIKQIQMILEQIDLLKRQISILEKDINGYLKELGQTLTSIKGIGPILAAEVIAEVGDINTFSSGRQLVKLAGLDTVESSSGETKRRRYISKKGISSLRTTAILAAFSLIKSCPPFTDYFLYQTKVLAKKPMQAIIAVADKFLRVCFYMLKNKTSFDPKRIGTGNLRTKAKFLNQSLEVSLDSKEIANLDLNLLDIFSKSPKVVLFDEEDPTWVKIRVNSKVETFDLEEPRGLILALLNAL

SEQ ID NO: 417006 - protein, 334 aa, unidentified
MNYVGIDLHKVDLVVSVENGQGPVGKPVRIACRDVAAITRFFTKMVPFRAVIEASSSYRWLYDLLSPMGQVVLAHPLKLRAIVSARAKTDKLDSGMLARLLRADLIPESYVPEERYQFLRDVTRARARLVHRATAAKNEIYALLARANVQSPYVNAMCKGGRQWIGRQDLGYGSDLVKGELLRRMEYYQREIKQVDLEFATIAPRFPEVYALLDLYGVGTFTALLVVAEIGDPERFANGDQVGAYAGLTARVRQSGGQEYSGHISKQGSPWLRWVLVQAAMKLVRQDEKLRDFYTRVRRRSGAKIARVAAARKLAEICWVRLRRWQREQLRKVS

SEQ ID NO: 417007 - protein, 361 aa, unidentified
MAETMTVAGFDVHARSVCGAALHLPTGELVRIRFGGGVEGPIAWLRSLPGPVRACYEAGPTGFGLYRAAVAAGIDMRVVAPSKTPRGPGDRVKTDRKDAELLARLLLSGSLKPITVPSPRVEAARELVRAHDAVRRDLMTARHRVSKQLLRHGRVYPKPSTWTQEHRRWLTRQCFEEAMTELAFADAIAAVDGLTARKTALAERISRLAADGEWWPTVARLRCFRGIDTLTAFALHLELAADWQRFERPKALGSWLGLTPSLAQSGESSHSGSITKTGSTLARRLLVEAAWHYARAPRIGATLQNRQAGQPDHILQIANRAQLRLHRVYHQMRGRGKPHNVTTIAIARELACFLWAAATTD

SEQ ID NO: 417008 - protein, 340 aa, unidentified
MKDIKVLGIDLAKNVFQLHGNDARGKKVLTKRLTREKLIEFLSQMKPCAVGIEACIGAHYWARVFGKMDHTVKIMAPKFVKPYVMSNKNDANDARAIAEAVTRPDMRFVPAKSIEQQDMLLVHRAKELNMKHRTALVNHIRGLLLEYGVVIPQGITHIKKLLIILEENKNKLTERSVIIFKKMYEQFKNYNTEIDLYDEEIALFSKENAVCKEIMKIEGVGPITASAIVATVGDAKVFKNGRQMSAWLGLTPRQHSSGNTTRLGGISKRGDGYVRKLLVHGARSVVQNCNKKTDKKSKWIADKKNRIGYNKASVALANKNARTIWAIMATGECYRKSVAA

SEQ ID NO: 417009 - protein, 459 aa, unidentified
MRRKKVKEKKGGSSFSIINPNAAGIDIGSSEHWVAVPEDRDEHSTRPFGCFTQDLNTLADWLTECGITTVAMESTGVYWIPLFQVLEARDFEVKLVNARHVKNVPGRKTDVSDCRWIQRLHTYGLLSGSFRPDDTICVLRSYWRHRENLVRYASGHVQHMQKALTEMNVQLHKVISDITGVTGIKIIEAILRGERDTQALAQLKNPHIKSSEETIAKALAGDYRREHLFALRQAFELYFFYKQQIEACDREIETYLHDLDSRIDVESHPLHTLKRGNQKPQRNEPRFDLRTHLYRISGVDFTRIDGLHVITVQTILSEVGLNPDKFPSCGHFTSWLGLCPNNRITGGKIKSSKTSKVVNRAATAFRLAAQSLSNSKSALGGFYRRMRARLGAPKAITATAHKLARIFYHLWKNGGTYEDLGAGYYERHYAERVLHNMRRKAKQLGFEISLTPLEGVTVS

SEQ ID NO: 417010 - protein, 482 aa, unidentified
MKKRNIYPNQSQQLLNLFEQAANNAKVMCVPIDYAKKDHVVMFCNGYGDILRKPFSVKNSPQGVDYLTDQVMRSCRQRAISEKHVFFGGEEVGSFADNFVSTLRSQGWLVAGVNAHEAKTQRENLQASTDRLDLMGIAKSLLNRRANCSPAQSGIYLNMRTVARHRRKLVDITTEVRNRIHAVVDRLFPGFLNEKKSGITPFSKSSLWLMQERFSAPQIRRRRRSSLIEALRRLGTKKPEDTADMLQQYATEVLKPPQEYVHMLQLSLTQHVKHFCCLQESIGQLEKEIAVNLAQTQGAFLTSVRGIGIVLAAGVSAEIGNPYEQKPLNNLVSYCGIIPRVKQTGGPQGQTKTGKVAKRCNRILKDYIVKSASHLGLHGPEDLKSDYQRRDAAEQHADFGMARRYLRMAMCLMRTSQTYLPSQLRKDQAQIQQRADYYVMTWPQLRDKWQKSGALETAFKADQPLGQWRKIVQQFYGIKLTL

SEQ ID NO: 417011 - protein, 370 aa, unidentified
MTKSSTIFVGLDVHKDSIAVAYAPEDRQADVIYLGPIGTRQCDIDKMIRRLQSKGHKLVFAYEAGPCGYSLYRYLKRKGLECIVVAPSLIPKKSGDRVKTDRKDAVHLARQMRSGDLTPVFVPEIEDEAIRDLCRAREGFMRDLKASKLRLKSFLLRHDVRYSGRANWGPAHLRWLSEITCHTQAQQIVFQEYIRAIEDHRQRLTRMETELKEQAATWRLNPFVEAFQALRGVQFIVAATTVAEVGDLTRFDNPRQLTAYLGLSPSEYSSGDKRRQGGITKSGNTHARRVLVEGAWSYRYTAKVSRIIQVRQENLPQSIKDISWKAQVRLCKRYRRLISRGKHSNVAVVAIARELASFMWAIAQEVKSAA

SEQ ID NO: 417012 - protein, 315 aa, unidentified
MNAKVTRVMGIDVSQQWLDVASTETHEIERYDHTDQGIKEIVAQAQGWSVERITVEATGGWQTALVAALADAGLPVVVVNPRQVRAYARAAGKLAKTDRIDARVLCDFTCAVQPPLRALKDAQAQALSALLARRQQLLSMRTAEKNRLALGAKGKVRKNLREHIRWLDRHLADTDNEIRKLIEASPVWQAREELLTSAPGVGPTTARVLIGQLPELGRLDHKQIAALAGLAPFNRDSGSLRGQRVVWGGRSEVRRALYMATISAIRSNPPIRTFYTRLKDNGKPSKVAITACMRKLLTMLNAMLRDQAPWTTVNA

SEQ ID NO: 417013 - protein, 349 aa, unidentified
MTVYVAVDFHAREQTISYCDTADGEIHRGKLRHQHDDVRKFYEQFSGQVIVAFEASGYSAWFEQMLAELGHTVWLGNAAEIRRKAPRRQKNDRRDADLMLELMLKGDFPRVHTFSAESRTVLRQLRYRHKLVKVRTIAKNSVHAIGINAGLPLRGRLLTAAGIEQLEALSLSPVLSQQRDEWLALIKLMHKQISTVEESLEQRAKGDAAVELLRSHPGIGLLTALALRYTLEPVSRFTTTRRVTAYVGLDCVEDQSSERRRMGSISKQGSRLLRFLLNEAGQTAARRDPQLKQFYKRLLQRRDKPKAKVAVARKLLVRSFIMLRDQIDYAEFVRRGVAARVARETHSPK

SEQ ID NO: 417014 - protein, 335 aa, unidentified
MKKYFIGIDVSKEKLDICLIQNDQIIAEAIVTNDTVAIKYKLDILLTENYLDKQDVLICAEYTGQYTYPLSCICEELKIDLWLENPTQLKYRSGIQRGKNDKMDARKIATYAKRYQDDVRLFSLPEKQISTLKQLISERDLYVVDKAKYQGQLTDQKRFMSQEDYKRKSKRLNKLILELEDAINQIEQEIQSIIDKDDTLSNQHKLLCSVDGIGDRTAIKMIVETNAFQDFKDPRKFCCHAGVAPFEYTSGSSVHSRNKVSNRADKSIKALLHMAALSVATRKSGELSEYYRRKVAEGKNKMSVLNAIRAKLVFRMFAVVKNNKFYEKNYINSLV

SEQ ID NO: 417015 - protein, 379 aa, unidentified
MSKIRFVGLDVHADTIAVAIAEPDGEVRPLGIIPNRLDSIRKLVAKLGPAKQLKVCYEAGPTGYVLYWQLTALGVACEVVAPSLVPVKAGDRVKTDRRDAAKLARSYRAGDLTPVWVPDADHEALRDLVRAREDARQDQHRARQRLSKFLLRHGRRPPEDVKKHWTLKYMTWIQEQVHFEPAALEVTLLDYVHEVEHMADRIQRLETAITEAIQKAPPEMRAVIEALQALRGVAQLTAVTVVAELGSLSRFHNPRQLMGYSGLVSSEYSSGNRIQRGRITKTGNAHLRRVIIESAWAYQHRPWIGGFLLKRQQGLNLSPEVKEIAWKAQWRLHTRYKKLAGAGKKKPQIVTAVGRELLGFIWAIAVHTETEFREQPKAA

SEQ ID NO: 417016 - protein, 351 aa, unidentified
MYTLGIDLHKQSSLWILIDEHRTELLKENVLVHPKDISIALRKIHVPLKEIQVAIEPVCGYRWVTALLEEVGMNVHIAHPRKVQLIAQSTKKNDTEDARTLANLLQSGFFPEAHKSSDEIYKLRLLLRERSFVVRMRTSVKNQLHGVATTQGLHNIKSGNPLHKKGKVGIMASDNFVLKELHQLNDLLEKHIEPFDEQLKEEVKKYSDGILLMSMPGVGIVTALTIIAEVDNFSRFSTSEKLTRYAGLVPRERSSGGIVKHGGITCEGSAPLRTVLVESAMRIKENNAPALYAFVKRLTPITGAKKARVALARKMLGIMWKMIKDQKPYNKNILSFPNTTKVSDLEARTDA

SEQ ID NO: 417017 - protein, 339 aa, unidentified
MTLYCGIDLHSNNAVVSVIDDEDLVIFEKRLPNRIEVILEMLLPYLRDIYACVVESTYNWYWLVDGLMDKGFDVRLANTAAIVQYNGIKHTNDLTDARYLAHLLRLGILPEGHIYPKAQRAIRDLLRRRLLLVRQSTVQHLSLQSLITRHTGLRMTSNGIKRLNDQQLNRMFPDPNVLLAARSANHMIITFRQAINCLEEQILKSQKERPEYELLCSIRGVGKIIGLTILLETGDIHRFPSPGHYASYARCVNSAKISNGKTKGHGNTRNGNKYLSWAFMEAAHYAAIWDPVMKKYYQRKKDKTHIMIAKKALANKLARACYHMLMKGERFEVNRAFAA

SEQ ID NO: 417018 - protein, 477 aa, unidentified
MPLLGRNHNHTNMKSKTPKSKKGKRKVSVDQGWEAINPRAAGIDIGAKEHFACVPAATTPKNVRSFGTFTADLGALADWFKECGVTSVAMEATGVYWIPVFQILEARGFAVILVNARQTKNVAGRKSDVQDCQWIQRLHTYGLLQGSFRPEDSYCVLRTYLRYRDELVSARSTQCQHMQKALQQMNVQLTQVLSDVTGVSGMAIIQAILAGERDPVKLAALVDRRVRARPIQIQKALAGDYRQEHLFVLQQAVSLYGTYEEKINACDEQIVRETAALPDKVDPQRKPLPPRKEGRPASKDQMQGQDMREMLYRKFGADLTAIEGIGVTTALVVLTEVGPNVAGFRTEKHFCSWLGLCPDNRISGGKVLSSHTRRVINRFSDALRMAAVTLERSQSALGGFYRRMKGRLGAAEAITATAHKLARIIYRLIKHGEAYVRQGMEDYERKFRERKLHALRKTAMSMGFNLIERQEVTSPVS

SEQ ID NO: 417019 - protein, 323 aa, unidentified
MELKRIAIDTSKHVFTIHGIDVNDRPVLRQELRRGRVETFIAKLPPTDVVLEACAGSHHWGRIFERLGHRVSLIPPQYVKPFVKRGKNDRNDAEAISEAASRPTMRFVPVKGVEDQAAMLVVKHRQMLVAQRTQAINALRGHASEFGIVVAKGGQHVATLLTLLDENAAIPVVARAMFGEIGQHIADLDDKIAALDKQLLEQHKANPVSRLLAEIPGVGPITAITMALTVNPADFGSARHFAAWLGLTPREHSTGGKRRLGRISKAGNERLRQLLVVGATAVTRYARPGSKSASGWLLQLLDRNRLRSRRWLWPTRWPGSSGP

SEQ ID NO: 417020 - protein, 272 aa, unidentified
MLHAGLDLSRRRLDVCLLGGRGELVAETAVPADADGLRGLAGRLAGRRVRAVIESMNGARFVHDTLEELGWEVLIADAQKVKGLAPLACKTDRIDARVLAELSWRDLVPAIWLPDPTICRERELARFRLHLVRHRTTLKNRIHATLITFGHPCPVSDLFGLAGRELLDRLQIPDPWRCNVDVSLGLIDDLELQIARLTVQLKQRGADHRYIPLLVTAPGFGWINAFTVASEVGDIERFASPAKLVGYTGLCPRVYQSGATDRRGPLSKQGSR

SEQ ID NO: 417021 - protein, 348 aa, unidentified
MNTTHYIGFDVHKKTISFCVKTAAGEIVEEGSMLARRAEVRQWAGARSQPWQGAMEATLFSSWIYDTLKPYGEQLEMAHPAKMKAISAGKKKSDTLDARTIADLLRCNLLPACYVAPPRIRELRRLLRYRSLVVSEAVRMKNKMAGLLMETGALYVKEKLHRKKYFATLLEELEEVPESVIDLLRLSRGALEMFESTQKRLVRELLADPELTQRVERLMTIPAVGEITALTWALEIGDPQRFRCNSDAMSYCGLTAALKSSAGKQQRGPISKQRNRWLQTTLIEAAKLAPRWNPQLAALHARELERGHRNRATLAVARKLVAYLLAVDKSAQAFQVRAPLEVPTQKAA

SEQ ID NO: 417022 - protein, 343 aa, unidentified
MEECNIVGIDLAKNVFQVHASDQTGRRLFSKKVSRGQLLKLMSTIKPCVVAMEACASAHYWGRKITELGHDVKLIPPIYVKPFVKRQKNDAVDAEAIVEAASRPTMRFVAIKSADQQAAGMAFKTRDLFVRQKTQLINALRGHLAEHGVVAPQGVVHLKRLKTALFDDTNGLPTAVVLHAELILGQISVLQSRIEALEKDILAVSREDALAVRLMTVPGVGPITAAALLAFAPDPATFQRGRDFSAWMGLTPKQYSSGGKERLGRTSKMGQRDLRRLLITGAMAVVRWATRKGAPEGSWLARMLDRKPTMLIAVALANRMGRIIWALMAHGGIYNSHREKAAA

SEQ ID NO: 417023 - protein, 329 aa, unidentified
MKKEVLGIDISKLTIDVYLHVNQSHELFNNNPAGFRKLISWLKKKKIILKDLLICFEHTGMYSFELANFLTIKNIDYVMESAIQIKRSMGIVRGKNDKIDAQRIADYAYRRRDKLEFSVLPSKMIFKIQKLLSLRETMVKQRAGYKVTVQENSRILVKSEYKCFFEAQNKLIKSLTTQICKVEEEIKLIITSDFKLENTYNLITSISGVGFIVAAYFISTTSCFTKFKNGRKYACYCGTAPFEYSSGTSIHFKTRVNPMANKKMKSLLNMSARSAITCDPELKEYYHRKVEQGKNKMSTLNIIRNKIIHRVFAVVNRGTPYVILQNHLS

SEQ ID NO: 417024 - protein, 342 aa, unidentified
MYYIGLDVHKKTISYCVKDASGQVHREGKVGATRWELDDWMKTLPQPWTVAMEATIFTGWIYDHLLPHAQQVKVAHPLMLRAIAAAKKKNDRIDAGKIADCLRCDFLPECHMASTAIRDRRRTLRYRHLLVRQMVQMKNRISGLLMETGVSHNKQRLHKVGYFRELLASNEEVNESIRPLLRVSRDSIVRLQKTEYALVSSLQRDPLLAKRIKRLRTVPGVGPITALTWALEMGEVSRFPSIRQAISYCGLCGDEKSSADKVTRTPLSKQRNKHIQRVLVEAAKLAPRQDHNLALVYEREKQKGNANRATLAVARKMVAYLLAVDRGQRDFVPFADSQSAAA

SEQ ID NO: 417025 - protein, 454 aa, unidentified
MKKQDSYDYYVGIDCAQNKHDFAMKNNQDKFLIKRGHFSNTLQGYEKFLNTVLSKCLNKDKILFGMEVTGIYGTNLYERLKSDGYHVVMISPDSVKNYRDYKRLNKTDKIDSGCIAELLLNGDAQIVHVAKNGYTDLKAYIRRRNALKVTCTQETNRFLAKVCLYFPDLLKVFPSGRATLKAIFSIYPTPYSIIEADFDELVSVLQKASKNKFGVDKANELIHAARNSIVVRKSISDGELYNIHSLIDSIDSLESEIRNLEKIIDYKAEEFPAYHVLLTLTGCGKITAATIVAEIGDISRFHKASQIVSLAGLYGDNSKSGSSVNKRGKISKKGSRYLRHAIYMVAEFARRNNPIFKAYFTRKKNGDRTKHTLAVNAVANKLCKVIYSLMKNQSTYIIQYRDLVKLSESTQNEFFQNAETDFSAKTRRKKYLYEDEYGELHEFVFKSIKTALIE

SEQ ID NO: 417026 - protein, 316 aa, unidentified
MSQSEQVIGIDVSKNLLDVAVVPENDTWSVDNDEKGIRTLIKDAKRLRPRLIVLEATGGLEAAVVAPLAAARLPVVVVNPRQVRDFAKSLGKLAKTDKIDALVIAHFGEATKPEIRPLKDQQAQQLSALVARRKQLVEMLTAEKNRLMTALEPVDNDIKAHIAWLEQRLNDINKDLRKAIKASAVWRAKEELLRTVPGVGPVLSVSLLAGLPELGRLNRKQIAALVGVAPFNRDSGKFRGRRCIWGGRAHVRAVLYMGTLTAIRFNPVISAFYQRLCAAGKAHKVALTACMRKLLIILNAMMKNHAPWQPYSRETA

SEQ ID NO: 417027 - protein, 400 aa, unidentified
MLSIGIDVSKGKSTVCGMKPGGEIVYTPFEVQHTREGMSELVSLLHNSGEEVRVVLESTGSYHCPVVAALLENGIFVSVVNSLRMKRFCSQSIRKVKTDRIDAMQIALYGLAYWQELQPTRLPEDTYRELQLLARQYYQMTSLLIKAKVDFNAICDQVLPGMQELMNDHAGRHKLSDFVLRYRHTTHILEMGETRFRKDYCKWAEKKGYRNCERMAALIFATAQNGIPVLPNAPSTQIVITEAIRVLHTVEASRDAILTQMQALAKTLPEYSLVREMPCIGDTLAPRLIAEIGDVRRFHSKRALIAYAGIDAPPYQSGKFCANNRHISKRGNRYLRKTGYEVMQSYVMHKPANDPIFTFIEKKRGEGKSGKLAMVAGLNKFLRVYYGKVTELYRSLPAIE

SEQ ID NO: 417028 - protein, 366 aa, unidentified
MTSLALAAERIYLGMDVSRDKIAVAVLRPGEDVPAVEVISHDGEMVRRLIGKFSDRSVLAACYEAGPGGYELYRLLTSMGVACDVVAPALIPKAAADRVKTDRRDSVRLALSHRAGLLTAIRVPSEQEEAVRDLVRTRADLVDDRKRMMQRVGALLQRHGRVWRAPRWTYEHRAWLDRQSFAEPALQAALRTYLAAVDARDAELAVLESQLRGCWASVDPLAQMVRQLGCYRGIAELTGLTLAAEVADFRRFPSAPAFMGFTGLTPSEYSSGARTRRGGITKAGPQLIRSTLIEAAWAYRHQPAIGAGLRRRQAGCAAETLARSWKAQQRLHATYAKLTRRGKIPSVAVTATARELAGFVWAEMTS

SEQ ID NO: 417029 - protein, 349 aa, unidentified
MFAGVDTHKDTLAVAVIDQAGRVVRQLELPNQDSGYARLLALLSSHNVVRVGIEGSGNYGWPAAIYLLERDVSVVDVPPLMTSRERLSRPGQGKTDPVDAVAIARITAREDALPPVRPMTGHAADLRVLTEYRDQLVNERTATANRVHTDLLWLRPGYQHQLPHLTNISHLHAALELLDGDDSVRAAVTRARLDRMLTLTEQLGKLRIQIDALVRATSSTLPELYGIGPVVAATIIGHVVDVRRYPTRHHFATANGTAPIPASSGRTVRHRLNRGGNRQLNRAIYTIAITQIRADTEGRAYYQRKRAEGKTSREALRCLKRRLSDLIYRTLRTDLANTAQQTPSLSSAA

SEQ ID NO: 417030 - protein, 317 aa, unidentified
MNTPIYCGIDVAKKQMVIGFTHKAKTKTFTQNTTDIQHAVAYLLAAAPELIVMESTGGLEIPLAKALYHAGLRVIIANPRQTNQFALSQSLAKTDVKDAKMLACYAQMMAIRDNVEVSLYIPPSEEQQKLEATVKQRLHFVELRTAEKNRLQQIDESQRVNTEAFIGYLDNLIAKLDKDINEQHQHFSDKIELIKDIKGVGQNLTAVLMSMLPELGTLTGKQIASLVGVAPHPKESGSMKFHRRCWGGRKAVRNALYMSALVASRYEPAITLFYQRLLARGKPFKVAINACMRKLLTIINALVKQGEKWDSLRYLAA

SEQ ID NO: 417031 - protein, 360 aa, unidentified
MNNLKYVGLDVHQASTSVAVHDSEGKVLMQSTIKTTPEALRDLIRGLSGSVHVTFEEGTQAAWLYDLIKPLVAEIIVCDPRRNRLLKSGNKGDRVDANKLAQLLRGGLLNAVYHGENSTRTLKELAHLYDCLVTDTTRVMNRIKALYRSRAVPCAGRDVYHARNRDRWLAKLSEPGVCIRATFLYQELDQLRQLRRDAKNGMLKEARRSSGFKILLRLPALGPIRVPQIIASVGSPYRFHSKRQFWAYCGLAVVTRSSDDYRFVGSVVERRRRVVATRGLNQNFNRRLKRVFKAAALDGASREPFLAHYQKLIAKGIRPELARLTLARKIAAVALAVWKKGDEFVELKLGSLSSSLSARS

SEQ ID NO: 417032 - protein, 391 aa, unidentified
MSMYFIGIDISKYKHDCCIISAANQKVVSKVIIKNNKAGFNELLTIIHSLANPADIRIGFESTAHYALNLELFLENSLLTFMEVNPVLISEYKKSKTLRRTKTDSVDCESIARWLMTVEYKPHSKGFYHAYSLKSLTRLRDKLIRQRSFYLVKITNVLDHTFPEFKPFFNERLSKTALYLLENYGSAEKMARMNSASYEKLRSVSRGKFSPQQFLRLKELAVNTVGVNNSIFDVELNSLLSLYKSLVKEIDTIKKEINQLIEEVHPHYMSVPGIGPLSAAVIYSEYGDISNFTNPGQMLAFAGIEPGINESGTESHGGKMVKRGSSQLRYTLINCCLPLIRFDMTFATYYAKKRGKGKPHRVAITHVAKKLIRVIYALESQDIDFNAQELR

SEQ ID NO: 417033 - protein, 485 aa, unidentified
MAAVMIGVDPHKASHTAVVISAAEEPLGELRVRACAAQAGQLLAWAAAWPQRTWAVEGAGGLGHLLAQQLLAAGERVLDVPPKLGARVRLLATGNVNKNDPNDARSVAIAALRSAGVREVRADDHAAVLKIWSKRYRDLGRTRTQVVCRLHAVLCELVPGGVSKAITAPRAARLVASIAPSGAVEAARAELAAAFLEDLRSVDARIRETRKTLAAAVQAAGTSLTGLFGVGPVIAAAVIGDVRTVSRFPGRDHFAAYNGTAPIEVSSGPRKIYRLSRRGNRRLNHAIHMAAVTQIGHRHSQGRAYYDKKLAEGKTPKEALRALKRQISNAMFACLQADARPPPPRAREGSRGTTLSPARPAHTPGTGSSDKPLPGPVTTLRPPLAAQHPGLPRRTDPAPRARLAIPRSLPPRRRRSRRSRWSARSEARTNDLEVRQDNGHTRPRGRPRTAGQATMPDGHLTSREKDRRKPLTQRLHATFVAPADG

SEQ ID NO: 417034 - protein, 341 aa, unidentified
MDIVVLGIDLGKNSCSLAGLDASGRVILRRRMRRSSVESFVNGLGRCIVAMEACCGAHHLGRVFVAQGHSVRLMSPEYVRPYVKAQKNDELDTEATAEAATRPTMRFVAVKSQYQSDVQALHRARERLVSERTALINHLRALLLERGIVAPQGRRKLQEELAVFADEDGIEALSPRIRLLIEDLRSEWRALDERIAAFDAEFVRMAREDEAVRRLTTIPGIGTINATALAAAVGNARAFRRGRDMAAWLGLTPRQMTTGGKPRLLGISKRGNRYLRKNLIHGARAVLPYLVERETPLGRWARGLLARAHKNVVVVALANKLARIAWAVLARGRTYEAASPV

SEQ ID NO: 417035 - protein, 429 aa, unidentified
MNNEALIRIMQFRQFKERIRGSEEYLIVGIDISKNQHHAFFGTANGKTIKRRLIFKNDFKGFMDFLSMAQVLRGQNGLSQIVFGMEPTGNYHKPLGTFLIKRNQEVVLVSGIATQRNRELLDGRWDKNDTKCAANVADLISQGKCLFYDYPEPKISGLRSLLSLRERLKKNYHILRMRIRNNLVSEYFPEFDRYFGQSPKQTLSIVKYCLDPVKINQMEFKEFLLKVTTTNRGLAQEKRLRKIHALASESIGCESNRYTEFEAKILVDQIEQTTIFIKEIEDKIAEVAGEFEEYHFLLTIPGFGPYISALVLAKIGNPFRFENRKQVLKMSGFDLSAKRSGKGSDKAYPVISKKGSNALRYALFQGAVISSSRNNYFIQYFTNTLKGREKERGIKIKMRVKLAAKLLVIAWTIMKTKKAFDPALLHSVK

SEQ ID NO: 417036 - protein, 385 aa, unidentified
MANQNDLSRSLVAFEQDNTIIAVIEMSLNSWLVAGIVPGIERRPLKKLSCDEQMLLQLLYRWRDEAVKAERKITRMVVAFEAGRDCFWLARWLRSRGIEAYVIHPTSVAVSREHRRAKTDRLDTELLIRAFLGWLRGEPDHCSMAAIPNLQEEDAKRPTRERENLVGERTRIVNRMKACLIRFGIRNFNPILRRATERLNALCTPEGVSLPPNTLAELRRDMARLRFVMDQINEIEAARLRRLEQAPAEEPHAKVRLLARVIGVGLETADMLVHEILSRKLRDRRAVARYAGLTGAPDESGSKRREKGLAKAGNARVRRGMIQLAWRFLLFQKNSALSQWYRTRTESAGKKRKTMIVALARKLLIALWRLVTTGEVPAGVVLRAV

SEQ ID NO: 417037 - protein, 314 aa, unidentified
MESIFVGIDVCKARLDVAIRPTGEIFAEENSIPGVARLADRLKALEPTLVVLEATGGLERDLVLALVQQGVRVVVANARQVRDFAKATGRLAKTDQLDAMLLALFAEMVRPPARKVPEERVRALGDLVDRRRQVVDMLVMERNRLHSVRAEAVRADLHAHITSLEKRQSELDQELKALMETDLQWRAQRDLLMSVPGVGQVVTLTLLAQLPELGQVSGKQLSALVGLAPFNRDSGKSRGRRSIWGGRAEVRTKLYMAAVTGIRVNPVLRDVFQRLVAQGKPKKVALVACMRKLLVILNAIVRSQVPWRLVDGTV

SEQ ID NO: 417038 - protein, 391 aa, unidentified
MIYVGIDVAKDKHDCYIVNSDGEVLAEVFTISNDQDGFSLLFQKLQSVAPDLSNVKVGLEATGHYSYNILGFLLDKGLTTYVINPLHTNLFRKSTSLRRTKTDRVDARAIAAMMMSDVVLTSYTATSYHNEELKSLTRYRFEKVQERAKLKQSVARLVNILFPELEKLVPTLHMQTVYTLLAELPGAKQIASCHLTHLKALLHDASRGRYGRDKAIEIRNAAQRSIGSAMKMKSMELQHTIRLIGELDTEIDEIETAIQEIMDEMAPPILTIPGISYRMGAMILAEIGDFSRFDSPDKILAYAGLSPSTYQSGKLANAYPHMEKRGSRYLRYALFNATKFVCNWDPSFASYLAKKRSEGKHYNVAISHAAKKLVRLIFALMKSGKAYCPAT

SEQ ID NO: 417039 - protein, 357 aa, unidentified
MKTALVMRRGSVVGKDIYVGIDVHKESWQITVRTEGEEIFNGRIPGQYQSLKKFFERYQGCRMKVAYEAGPFGFWLSDKLTMDGIEVLVVPPSLIPTESGNRVKTDRRDSKKLARLLESNMLKRVYVLTPEEREHRDLLRTRRQIVDHRNDVARQIKSKLLFYGITPPLTTSERWSLTYIKWLRTLQFDTTYLRECLDLLIDLYEYLTRQIVRINRKVALLCRDKKYRDRIRLLCTAPGIGRLTAIEILVELQDMSRFESAEELASFIGLTPSEYSTGERTRQGRITRCGNKRVRTYLVESTWILIAKDPAMRLKYLKLKNLRGGKRATIAIARKLLLVIRRMLLDNVPYRMTAMAA

SEQ ID NO: 417040 - protein, 379 aa, unidentified
MTSTEVAAEARETVYAAIELSKKTWVLGIAFPDRDRPSIHRVSGGNVAELVSRLRVAARNERRILVCYEAGYDGFWLARVLAKIGIECRVLDPASIQVNRRARRVKTDRIDVLALLRALIAIDRGERHVCAIVRIPSVEEEDARRSHRERQRLIRERTGHINRIKGLLFAQGIRDIKPNLRRTRIDFAALETAEGRPLPDRLRRELEREYARLALIETQLREVEKERDMADAQDPTVERKRQMLVALQGVGGTSAAILAREVFARPFASRRQLGSYLGLTPSAYDSGSVTRCQGISKAGNSWARRILIEVAWLWQKHQPVSPLSHWYTQKTSGQSSRIRRIMLIALARKLAITLWRYVETGLVPEGVVIAEAEPRSAPA

SEQ ID NO: 417041 - protein, 372 aa, unidentified
MVASSGVSSTSEPKEAPRICCTLVWISVVGGWITGRVDYCLLDEDGERVEVGAAPADADALAGLVRLVELRHGPGPVSAVIESMNGARFVHDTLERLGWEVQIADAQRVKGLAPLACKTDRIDAWVLAELSRRDLVPAIWLPSFAQRQERERARWRLHLVKHRSALKQRVHSELMAFGHTCPVSDLFGVRGRELLERLEFPEPWRSGVLCAVELIDELESEVDGIERELRALGADHPYVPLLMTVPGISWVLAYTIAAEIGDITRFATPTKLCGYSGLCPRVYQSGDTDRRGPLAKHGPKYLRWALMVAATNAAKHPLYRDRYRHTKQRLGRQRGAKVAQIQLARTLTEAIWHMLTRNQKFAPAGAPLPLAA

SEQ ID NO: 417042 - protein, 390 aa, unidentified
MTKRKTETVNDLSRCLDPLDMDATLIAVIEMSQSSWLVAGIVPGVERQPLKKIAIDEHALLKLLSRWREEAEKKGHKITRVTVAFEAGHDGFWLARWLRMRGIEVHVIHASSVAVTREHRRAKTDRLDTELLKRGFLGWLRGERGHCKMVVVPTLAEEDAKRPSRERETLVGEASRIITRLKAAFVRLGIRSFNPKLKAATERLGTLRTPEGEPIPPNTLAALKRDLERHHIIKRQIREIEQTRLDHLAQAPAKGPHPMVLLLARVVGIGVETADMLVQEVLSRNMRDRRAVARYAGLTGSPDESGAKRREKGLARSGNARVRRGMIQLAWRFLWLQKDSALAEWYRQRTQAAPATRKTLIVALARKLLIALWRLAHDGIVPEGVQMRPA

SEQ ID NO: 417043 - protein, 343 aa, unidentified
MSEDQYVGLDVHQASVSYAVLESGGRLVAEGVLATEPVRLAGWVRGLGSGVHLTFEEGPYADWLYELLEPVVKELVVANPRRHLGTGEGKSDRLDARDLAERLRGGFLVPVYHDRSRYRELQHLVDGYRSLVQDSVRLQNRRSALARSRGLCVKEVLSGASLGSPMALERFGWLTEELAGITAVRERAHDAVVQASRRSEACRLLQTVPGFGPIRSAIVVAKVRTPHRFRTKRQLWKYAGLAVVTHSSSDYVVGAQGLERRRWQATRGLNRHYSRSLKEVFKSAALDASRRGALSPCYEARLAAGQRPEMATLTLARKLAATCLVLWKRRETFDISKALSSTA

SEQ ID NO: 417044 - protein, 429 aa, unidentified
MICAAVERCAGIDVGKGFLAVCVMTGPLQGEARKQTRRFGTIIAELERLRDWLKQEEVTHVVMESTGSYWKPVFNVLEDTVTVYLANPREVKVRKGHKTDDKDGWWLAHLLRHAMIHPSFIPPRAIRELRDLTRRRKKLLGAGTGEKNRVQKILEDANVKLGNVLSDVFGVSGQLMLDALLKGKAEPAEIAEFAQRRAKQKIPQIIAALEGHRMSDHHRKMIGYSLEHMRFIEDQIGKLDEDIVAQIKKAGLEREWQLVQSAPGLKETSAANVLAEIGPDMSQFPSVRHISSWGGVCPGNNRSAGKNKSSHTTGGNPWLRAALTECAWAASAKKECFLKEKFWRITTKSGGKKAPAIVAVAHTVLSLVYEALRTGEPYQEKKVADLNPGQKDRMIRHHLKRLGKLGVTVRSSSIKQQTKTAKTKNAKRT

SEQ ID NO: 417045 - protein, 429 aa, unidentified
MAEEKSLELRVSVDVGYRRHSVAMGLSSGEVLEEFEIDHRIEGFQEFFSRIEKHRKEKNCVVAVAMEGYNGHARPLDSMVRERGYRLYNLNNLKFARFKEIFPGAAKSDRIDARKGLELFQLSDHLPLAKEVLQEVSGTPPANEVLKRLTRRRRRLVNERVRVVNNLQADLQAVCPGLLEITREASNQWFLNFLLRADTLPQLARLKRSTLLKIPSVGVKSAAIIEGWQKRSHFSQEVDWVGEMIQDDARRCLELDEKIKRLEAKIAEIAKDSKIAKTLRSIPGFGAVCTSELAGEIGTIERFGSEGSLSLYLGMSTLDNSSGKYQGTKAPKHVNTRAKAAMMIGVDRHRKYVPESQRYYEKKRSEGKKHNQAIRALGRHLSRIIYKMLKEERDYEIRPEKGDTKTKVSLRSLIKTQIRRPKISVKGKK

SEQ ID NO: 417046 - protein, 354 aa, unidentified
MSQKLNSEIAVIGIDIGKNSFHLVGQDRRGSIVLRQKWSRGQVEARLANLQPCLIGMEACVGAHHLSRKLQALGHDARLMPAKYVRPYSKGEKNDYRDAEAIAEAVQRPTMKFVATKTADQLDLQALHRVRQRLVSQRTGIINQIRAFLLERGIAVRQGLHFLRAELPGILAKRTDVLSPRMLRIIEDLAGDWRRLDERIESLSAEITRVVEQDPACQRLTTVPGIGPIISSAMVAAISTGDAFAKGRDFGAWLGLVPKQMSTGDRTILGSISRRGNRYLRRLFVQAAWVVLVKVGPEQWERYGLKSWIEAAKKRLHHNVLAIALANKLARIAWAVLHKGRAFECVKTNASRPV

SEQ ID NO: 417047 - protein, 387 aa, unidentified
MYFIGIDISKFKHDCAIIDEAGDTVTASWSFANNCEGFSLLKQLLDALDGQKKIGFESTGHYGHNLKLFLETNNFSFMEFNPLLVSKFVRSKSLRNTKTDSLDAVSIAQYLMTVEYKPYPPSFYHMDQLKSLTRFRDSLVRQHSRQLVELTNILDKVFPEFKPFFDGRFSATALYILTHYQSPEKIANMNAKSYEALRKKSRGKFSMVKFAQLKTLAKNTVGRSDAFLLKQMEITIDIENQLDAKIDEIESQILECIRALNPPILTIPGIGELTAAIILSEYGKINKFENPAQLLSFAGLEPGYYQSGLAEHQGHMVKHGSSHLRYALMNACLPLITYEPVFAEYYAKKRAEGKPHRVALTHVAKKLLRVIFTLQTKNISYDPTLIR

SEQ ID NO: 417048 - protein, 414 aa, unidentified
MFAVGVDVSNGRSMVAVLQPKTSVLMKPFEIPHTAEGFASLAGKLAGLDGEVRIVMEHTGRYYESFARAMHSAGFFVSAINPLAIKNYQDGINIRKVKTDKADAMKITRFALDKWEILPQYTPMDTIRYDLKTMHRQFQLSSKTKTALSNNLVAPLEQSYPGAHQYFDSPVRPDGSQKWVDYVDAFWHVDCVAKVSQSAFVERYRKWCKRHGYHFSQQTAIDLHTDARQKFPLVPKSDTCKLLVRESVSQLNAVSRTVETYRTEMDRLASRLPEYETVMAMTGVGKSMGPQLMAEIGDIRRFAHQKSIVGFAGTDPIKDDSGDKVSDSKPSSKRGSPYLRKTLFVIMSILLQLHPQDDPVYQFLDKKRSEGKPYYVYMTAGMTKFLRIYYGKVRDGLKEQGLWEQTPREPGKAD

SEQ ID NO: 417049 - protein, 389 aa, unidentified
MRYYVGLDVSDTTTNICVVNESGAITCETVASTNPHAILSSLNSLNIPIEKIGMETGAKSNWLHLTLSAHCKVTCYDACKMSKLISMKINKTDKNDARVIAEVVRVDCLTHVLDLEVYVKTSHSQEIITLVRARESISQRLIQIYNQVRGIYKTHGHELPMTKPEHFTKAVLESLEKLSPLVAFSVQGLILPYDSTLQSLNQMTQKIEELAKQNSKAQKLMSIPEVGPITSLYFATIIDDPKRFLKAQSAGSYFGLTPLQYSSGQQERQGSISKRGDTLMRKLLAGVAQRLLRTMAKSNALKKWGQKKEKKLGKGKAVVALARHLSVIMLALLMKEDLYREPDSHPPQRGVVFTIEELDRITKLAQETGAIELKSIKQLKKLAHTKIKV

SEQ ID NO: 417050 - protein, 367 aa, unidentified
MKKISTVVARQSKNFREQKLTIGLDLGDRSSWYCVLDEGGEVLLEQRLGTTPKAMKEVFGEMPRSRIGLETGMHSPWVSRLLSELGHEVIVAHAGNVRWIGESRRKDDRFDARTLARLARIDPQLLAPVQHRSARAQAHLMVIRARAGLVRARTSLINTARGLTKSYGERLRGCSPRNLNAEKARQLSPELQAALEPLLAAIESLSERIYEYNQQIGKIARESYPQVARLQQVKGVGTLIALTYMLTLEDPQRFRKSRDVGCYVGLQPGRRNSGQSEPQLHISKEGDAYLRTLLVQGAHHILGPFGADSDLRRWGLKLAERGGKNGKKRAVIATARKLAVLLHRLWVSGEAYEPLRHSRAMPLPAAA

SEQ ID NO: 417051 - protein, 408 aa, unidentified
MEIVGIDWGRKKHYCYLLHQGKKLVLKNKEEDFAKLLKIKEAVYVIEDGNNRIVDYLLRNNRQVYILPSRRSSEARSFFVIEGKSDFIDSKVIAMTYEHNPEWCLQVKREGIAFELDVLVEENAVINVSMMQDIGRLDAYLERYWPEVKEVFSGTSARKLAFISICPTAKDFLSMSDKEILQKLKEMGFLINSNLKSKLKELRKIALERYVPASIRTLIVAFSRYAMEKKVMKEEIGKQMKEIIEESEFSVLLTLPGVGAIIASQLIVAYLTHKFSSYRDLQRYAGTTPTYYGSGNKNTTKMRSNCNHYLRGTLHIASLAATNSSKWMKRFYDNKKSEGKSSAHALRALANTILKIAFAMLRDLTPYSEEKFFKRNPLSDYTPSKKEGEQKPEYSLKVSSVATCRSTA

SEQ ID NO: 417052 - protein, 317 aa, unidentified
MAKHTTICAGIDTGKRKLDIAIDGRAEQLQVNNTAHGHEKLIAWLRQHRVKRIGIEASGGYERAVVAALRRNRFVVVVFQPAQVRAYAAFHLQRAKNDKIDAALIASCTAAVKKIHAPPDPRLEPFADHLTMIDQISEDIARLKTRREPCRDPRIRQLWKEEIARLKKLEKTELKSLVAAIRQHGDLAQRLDLIYSIDGIGLRTAVAILVRMPEIGRITREQAAALAGLAPYDDDSGNLVGVRHIAGGRERLRGALYAAAFAAAFHWNTQLIALYKRLNRAGKLHKVALIACARKLLIFANTVVARGTPWTTQAATA

SEQ ID NO: 417053 - protein, 423 aa, unidentified
MAYRIAGIDVHKRKLAVVVADVEVEDEYQFERRWYGSNPEQLRVLSEWLLEQQIEEVVMESTAQYWKPVWGALERYWKPRCQSREGAGRMSGTLHLAQALSNRGRRGRKKDFRDAERLVKRLVSQELVLSFVPDSEQRMWRTLTRTRYQRTRDKVRLQNQLEALLEEAHIKLSSLVSDLLGASARRMLKALADGETDPAALAALADQRLRATPAQLQDALGACTELNPVYRRLVKMTLEGLQFVEQQIGQLDQEMASLLRQHQDAVERLAVVPGLGVDSAQQIIAEVGAKAATFPSAEKLSSWVGACPGEEESAGVNRSRHSPKGNRQMRRVLNQAANAAVKHKGSIFEIVYRRLVPRLGHNKTIGVITHRLCHLIWIILHKGVRYEERGPAVSEKSRQRRTARMVRTLRILGYRVEPLANPT

SEQ ID NO: 417054 - protein, 376 aa, unidentified
MEHDSTVYVGLDVHKESITAAYAVGMGEVELLGKIGTTKTDIDHLCKRLQSKARHVNVVYEAGPSGYGLYRDLAQKGFECMVCAPSLIPKKPGERVKTDRRDAVKLVRALRAGDLSAVHVPDVEDEAFRDLARAWAAAKMDLRQARQRLKSFLLAHGVRYAGHADWGAAHRRWVSTFAFPNHWQQLTFDEFRRTIEDRLAQCDRLEATLHEAVVSWRFYPAILGLQAMRGIQFITAVGMLSELGDLSRFEHPRQLMAWLGVTPSEHSSGDRRRQGSITKTGNSYARKLLVEAAWSYRYPARVSPDIQRRHEGIPKPIIDRAWDAQVRLCRRYRKLAARGKNVNIAVVAVARELAGFIWDIGRLAMSLSVPYEAQAA

SEQ ID NO: 417055 - protein, 403 aa, unidentified
MNNVAGIDVSKGKSMVSVLRPFGEVVAKPFSVGHTGSELKELADYLKSLDGETRVVMEHTGRYYEPVARFLHDEGVFVSAVNPKLIKDYGNNTLRKVKTDKADSRKIARYGIDNWAELRQHTPMDTIRMQLKTLNRQQSLYTKTKTMMKNNLIALLDQTYPGVNALFDSPVREDGSQKWVDFATAFWHVDCVRNMSLTAFAERYRKWCKRHGYNFSQSKAVEVHAGAQDLIVMLPKDALTKTMVRQAIDALNAVSASLERLKAEMCTLAAQLPEYPVVMAMHGVGDSLGPQLMAELGDVTRFTHRNAITAFAGVDPGADQSGTHEAKSTRVSKSGPPELRRALFLVMDCLLKTQPQDDPVYRFMDKKRAEGKPYLVYMTAGANKFLRIYYGRVKEYLASLEGN

SEQ ID NO: 417056 - protein, 371 aa, unidentified
MEKNTIFVGLDVHKNTIDVGLADAGRDSEVRFYGSIGGDLDSLHKVIRKIQSTGATLRVVYEAGPCGYDIYRSLTRRGVECVVVAPSKIPRKSGDRIKNDRRDALNLARLHRAGELTPVYVPTVEDEAMRDLTRGREDAVKAHRTGRQVLLAFLLRHGYRYSGVSYWSKAHWNWIGDIKMPHPAQQITLQEYVHAVHEQSARVQRLTQQIQELVAQWDLALLVQGVQGLRGVSLIVAATTVAELGDLTRFASAKQIMAYLGLVPSEHSSGDSVKRGGITKTGNSHVRRALIEAAQAYSHPARESRVLLGRLAGLPEEVRKIAWKAQVRLCERFRRLTARGKNRNTVITAIARELAAFMWAIANELRPMRKA

SEQ ID NO: 417057 - protein, 321 aa, unidentified
MNKYKEIYGIDISKDVFDVYGSKSGHNQFKNDAKGFVSFLKHLPKDVLIVMEATGYYHYRLAQFLYKSGLSVSVVNPLSVKRFIQMKLAKVKTDKSDAKAISEYGEMNDVPLYTALTDVQSECLQLFRLLDSYIKHRTATKNKLKGEEVLGIPSRFVYRSLTRNLKHLNKEVLVLESRLLALVKQDQQHQLTLIKSIPGMGVKTALFLIVVTDGFKKFENASQLCSYVGITPTIRKSGSSVRGRSRISKVGNKKLRNLLFLCSFSACKHNKACREIYERLVAKGKSKKLALIAVGNKLLKQAFVIAKRGKPYDENFVSRLA

SEQ ID NO: 417058 - protein, 405 aa, unidentified
MGIYVGIDWAEAHHDICVLDETGLVLGKRRIGEGLEGVGQLHAMLADHAAEPDQVVVGIETDRGLLVGALLAAGYQVYAINPLAASRYRERHVTSGAKSDPGDAKVLADLVRTDRHNHRPVAGDSELAASLQVLARAHQNLIWSRQRLVNQLRNNLREYYPAALAAFGTELAHPVALGVLDAAPTPAMGRTLSQSKLAAILRRAGRERGVEEKAAAIQAQLRAPQLAAPALIGEAYGKSVASTVRILREVNAELASLEAELAPSFEKHPDAEIYRSLPGLGIVLGARVLSEFGDDRTRFAHPKARKNYAGGSPITKASGTHRVVLARRARNRRLADACHQWAFCALTRSAGAHDFYHRLRQRGKTHHQALRALANRLVGILHGCLDHRQVYREDIAWPSSLTVAA

SEQ ID NO: 417059 - protein, 315 aa, unidentified
MSEATFVGIDVSKKSLEVHVLPSGEHFSVNYDEAGLTALIQKLKTLQQLQVILMEATGGYEKLIAAELCAAGLNKVCISNPRFIRDFARSTGKLAKTDTIDAAMIALFAQMFNLEPETIPSQAEEQLKALISRRQQLTKIRTAENNRLEKATSPRVITSLRKIIKLLNSEIKNLDQNIEQTIRQNPVWRAKEKILRKVKGVGRVTASQLLATLPELGQLNRREIASLAGLAPINHDSGQFRGKRMIGGGRSAVRKALYMATLVATIYNPTIRNFYNRLLATGKPKKLALTACMRKLLIILNSILKNEPINICIQS

SEQ ID NO: 417060 - protein, 343 aa, unidentified
MQVVRIGLDLAKYVFEVHGVDGQGNVVIRKTLRRGSVVTFFANLPPCLVGMEASNGAHYWARALTELGHKVRLISPQFVAPYVKSNKNDRNDAEAICEAVGRPTMRFVPPKSREQLAIQALHRIRQRLVQSRTRLVNQIRGIIAEHGIVIARDIWRLRWALAEITGHVTDDLHTLVRVLIMEAQAELMELDRRIASCDRRIRELYRSSELCQRLGEIEGIGPVTATALVAAVGDRSCFKNGRQFAAWLGLVPKQRSSGGRHRLFSISKRGDRYLRTLMIHGARAALGKAGGKQDPRSRWLAGLRQRRHPNVAAVALANKNARIVWAMLAGNVSYELERTVQAA

SEQ ID NO: 417061 - protein, 346 aa, unidentified
MKILALDLGKYKTVGCAYDSASGVPQFKRVCTTPAGLAKLVQEVKPERVVIEVCSIAGWVCDLLWGLGIEVQVANTSDDAWRWRKVKQKDDRRDALKAARLSAVNQVREVYIPANEVRQWRALITYRQQVIRRRTKIKNHIRDLLLREGQLLRRGSGCWSEAGIKQLEEQAQPFSECGPAELWRGELQLELEQLREIQRQLATVTAQLDKLGAGDARVQLLRTAPGVGPRLAEAIVALLDQPQRFRKASQVSGYIGMVPKAMDSGETERRGHITRQGSRVVRSLLVEVAWAGLRHNAWVRQTYQRLSGGKKGRKKIAIVAVGRKLLVKCWAMLRDNRAWDWQPQIT

SEQ ID NO: 417062 - protein, 350 aa, unidentified
MNDTMIGVDLAKSVFQLHGASMTGQLKYRKKLTRPRFRKLMADQPPSVVVMEACGSAHYWTREMVRFGHDVKLIAPQYVLPFVKRQKNDAADAEAIVIAAQRPEMRFVEPKSQEQQARAVLFRARERLVHQRTELVNALRAVLYEFGHAVPKGIGNIKQFDVILEDPNCDLPALVRDECGDLVKQIAEQTIRIDAKTKTAKEMATTANTARRLQTMPGVGPLTALAIEAFAPAMQSFKRGRDFAAWLGLVPRQHSSGGKERLGRVSKAGQTDIRRLLIIGAMSRLNWMGRKTITEGSWLARMLARKPRMLVAIALANKMARGIWAMLTKNEDYRDPVPAVAARSTCAATT

SEQ ID NO: 417063 - protein, 322 aa, unidentified
MRYIGIDVSKATFVVAYSSDKGGEIRTFNNTTAGIRQFIGTLPKDGSIHCVMEATGNYSALLLYMLNVAGITVSMENPLKVKNFAKALLSTVKTDKSDARLITLYGEKMNPRPFKVQGEAILRLRQKRTVIRQLTKQITAMSNLRGSLACLPVPDKGATHTVDETIKFLEKKRDRLQAELTELVEVEFSRQLALLTTIKGIGITLATALIITTGGFTYFQNAKQVSRYLGICPTYEQSGTSVNIKGHINRNGDAYTRGLLYIAAWPASRFNAQCKETYTRLRQNGKSGKLAMIAVANKLIRQAFAVVAHDKEYIDGFVSNRP

SEQ ID NO: 417064 - protein, 274 aa, unidentified
MSKVIVGMDPYKNSATIEVMGGDEAVVGGGRYGTDAAGYAAMLAGVRRWPDRIWAIEGCRGIGRHLASRLVADGEQVVDLSPKLSARTRVFTAGQGRKTDATDAHSVALAATRMRGPHLVTDDAQLEVLRILADRRRALGEDHTRMICQLHRLLLELIPGGAKRSLSAAQARALLARVRPRTVAGQARRRVAAELIADLERVHQRKKAADKELTAALKATGTTLMALDGIGPSGAARLLVEVADITRFPDRGHFASWNGTAPIDASSGDHVRHR

SEQ ID NO: 417065 - protein, 406 aa, unidentified
MLETMVRCCAGLDVHRRQVVSTVIREGSKEAREYSTFHRELQELAHWLQHEQVELAVMESTGIYWKAIYAALEEAGIETRVVNARHVKQVPGRKTDVQDSEWLAELARCGLLRSSFIPPRDLRELRLLTRYRRKLTGMLSAEKNRLHKVLDDAGIRLGCVVSDIDGISARAMVEALIRGGSTPEQMAEKALGRLQKKRDALQLALEGEISDRHRLVLKKILLHVKWLQRQIVTIDGQIVAAMKPYQEEWKLLQTIPGFDILSAAMLLAEIGVDMGRFASRDRLCSWAGMCPGNQESAGKKKSGRTRKGNAYVRSLLCEAANSAKKTQSQFQGLYKGLVIRRGHKRAIVAVGHKILQVVYVLLSRKEPYRDPEIDYEALVVHRNAPRWLDALHKYGYLESIKGSVER

SEQ ID NO: 417066 - protein, 372 aa, unidentified
MDDDIAIYVGLDVSKEKIAIGLAEAGRKGEVRYYGEIANRADAVRKFVGKLADRHGRLCFCYEAGPTGYGLYRQLTSLGYECLVVAPSLVPTRPGNQIKTDRRDAVSLAAFLRADELSSIWVPDETHEAMRDLCRAREVAVSNLRRARQHLLSFLLRHGKIFEGRTHWSKAHRNWLARQRFEQRAQQFAMEEYIHAIKQIEERRDRLVQQMQELLPEWSLSPVVQAIQALRGVAQISAMTLVSEIGDFRRFQSPRQFMAWLGLVPKEHSTGASISRGSITKAGNTRARRMLVEGAWTYRLPARISPELLKRNEGLPEEIRMIAWKVQVRLCQRYRRMQARGCLTNIVIVAIARELAAFVWAIATTVLLASQR

SEQ ID NO: 417067 - protein, 378 aa, unidentified
MSSMPRQRSNSQHQPTSGAAQQGTGAAIEEVILGVDTHKNVHVAAVISTVGALLGTRDFPATVVGYRALLTWARTFGTVLRAGVEGTASYGAALNRMLSREDVTVIEVNRPDRADRRRRGKTDATDAEAAARAVLSGRANALAKAGDGPVEMARMFKLAKSSAVKSRTQAINQLKAVLVSADPGLREQMSGLSTPLLVRACAALEITDPTTGTSQAARHTLRLLAERIILTKEIDDLDVRLTTVLATHAPDLLARNGVGPDTGATLLIAAGDNPDRLRSEAAFAALCGVSPVEASSGKTQRRRLNRGGNRQANAALHRITLSRLRWDLTTRAYVERRVRNGKTRREAIRCLKRYNARELCPLLTTPASRPPSSALTGA

SEQ ID NO: 417068 - protein, 346 aa, unidentified
MRPRSRFQVVVSKSRLFFHKSFLMNKYTETFGIDISKDVFDCYGSIQGHLQFKNTAEGFVKFLQISHPNTLVVMEATGYYHYRLAQFLYKKKVIVSVVNPLSVKRFIQMKLAKVKTDKSDAKAICEYGIINEVPLYNALTDVQSECLQLFRWLDNLIKKRTATKNKIHGEQVLGIPSKFVYRSLNKTKKFLDKEILGIEEKLLSLVKQEQQVQLTLLQSIPGIGLKTALFLIIVTDGFKKFENAKQLCSYVGITPTIRESGSSVRGRSRISKVGNRKLRNLFFLCSFSACKQNKGCREIYERIVNKGKSKKLALIAVSNKLLKQSFAIAKSGNPYDAGFVSVLKVT

SEQ ID NO: 417069 - protein, 364 aa, unidentified
MKIVGCDLHARQQSIAMVDTETGVLTEKVLKHVGNAVREFYAALEGPVVVGIEATGAMQWFLELLEQLGIEYRVGHPAKIRAAETRKQKHDRRDAEVILDLLLMKDRFPEIGMPSTEQRDLRTLLRDRHQWVKMRTRLQHTLQAIALNHALREGRALWTAAGRQSLQDLTLPKYTAQRRDELLRLYTQLDKRIQQLDKQVETEARQRPQARRLLTHPGVGPVTALATEVFLADPHRFAGANQVASYIGMIPCEHSSGKRQRLGKLSKEGNSLLRYLWIEATLHAAVKDPELKRFYRRKLVQKGMGKARVATARKLGIRLWIMLRDEIDYEEFCRRGKLPQKGKTHAGMPDYNSGPARAVTGSTE

SEQ ID NO: 417070 - protein, 359 aa, unidentified
MQTQSNKIDFNGQNIYVGFDVHLKSWTVTIMTEKLTHKTFTQPPKPEALYQYLRKTFPGGIYHSAYEAGFCGYWIHNKLIKFGVNSMVVNPADIPTTGKEKVMKTDPRDSIKIARSLRNGELKPIYVPSLQTLEDRGLVRTRATLVKDLTRYKNRIKSFLYFHGIELPEAFSKSKSHWSNRFNKWLEDVEMTESSGKDSLNALLVQSHHLRASVLQVTRQIRELSKTDRYKMQLVLLCSIPGIGILTAMIILTEIETINRFSNLDQLCGFIGLVPSTNSSGDLEVIGEITPRGHSVLRTAIIESAWIAARLDPALNKCYHDYCRRMEPNKAIIRIARKLTSRIMFVLKNNQPYVCSVIK

SEQ ID NO: 417071 - protein, 353 aa, unidentified
MDRYVGLDAHAETCTVAVVGPSGRRLTSRVVETNGQALVEAIRSIPGRVHLCLEEGTQSAWLHEILEPEVSEIAVVSPPETRGAKDDLRDAWSRAEELRVGAIRTRVYKAPRHWAGLRSAATTYRMATQDVVRAKNRLKAVLRGRGILADAGVYEGKSRGKWLKELPAAGHRPAAEWLGRELDQLVPLREEAEEWLLKEAKAHPIIKKLSTAPGMGPLRTAQLAAIVITPHRFRTRRQFWSYCGLAIVTRSSSDWMQGQNGKWTRAVVRQTRGLNRKRQPVLKTVFKGAATTVITQLHGHPLHMDYERMLQSGIKPNLAKLTLARRLAGIVLSMWKREEVYDPERHKLVMVKS

SEQ ID NO: 417072 - protein, 403 aa, unidentified
MNSVGIDISKGRSTIAVMRPFGEVVISPFEVRHTDSELSELARQLKSLDGETRVVMEATGNYHASVAKLLHNAGLYVSVINAKLVHGYGNNELRRVKTDRKDAVKLANYGLDRWLTLPRYIPEEDTRLLLKNCYRQYRQYSKVQTVLKNNLISLLDTVFPNANRLFSSPIRGDGSEKWVDFVAEFWHCRCASEKSERAFTSKYLRWCRKHGYNFREAKAHTIYAEASGHIGVMPKSETTKLLVKQAVSQLRATSTALAALKQEMQSLASVLPEYPVVMDLFDVGPTLGPQLIAEIGDVRRFYSKKALVAYAGLDAPPNDSGDVTGRHKSMSKIGASSLRRTLFLVMSVYLQTAPLDEPVCQFMDRKRAEGKLYRVYMMAFANKFLRIYYATVKAYLESLEHTA

SEQ ID NO: 417073 - protein, 409 aa, unidentified
MKLFVGLDVSSFDIKVCFLNGEGNELNSFTVTNDLPGATQLRDEILNVVQDESVSELKIGLESTSVYSFHPSMFLHNDESIRALGGQVLVMNPKQIANFKKSYSDMDKTDEIDAFVIADYLRFGRLPMSIVKEEQYVALQQLTRARYNIVRQITQEKQRFLQYLSYKCNTFTEEVESSVFGKAMMDLFLENYSLDELSNMPLEDLADYLRTKGKNRFPDPEYVAESIQKAVRSSYRLDKVVEDSIDTILSTSITLIRTFEKQIKEIDKSIKRIMKGLPQTLQTVPGIGPVFTAGIIAEIGQIERFEDETKIAKYAGLYWRKHQSGRFTADDISLSRNGNQYLRYYLVEAANSVRRQIPEYSEYYAKKYQEVPKHQHKRALVLTARKFVRLVDALLRKNQIYTPERSVNT

SEQ ID NO: 417074 - protein, 397 aa, unidentified
MLNPAPFELRVGIDVGAHRHAVAVGLSDGALLEEFEIAHGAGGFRDFFARIEAHAGARGLPVAVAMEGYNGHARPLDSLVRARDWRLFNVNNLKLARFKEIFPAAAKTDRLDSRKTLELFQLSDHLAMARGVLQEVLATPEENDILKRLTRRRRRLVDERVRYVNALQSDLRAVCPGLLEITGSAANLWFLRFLTKPAKLTSLARLTRASLLAIPGVGVGYADAIQAWQKRAHFAREAAWTGGMIQKDAARVLELGEEIKALEGEMERVASEIAQLLRSIPGFGPVCRAELAGEIGAIGRFRDEGGLALYLGMANLDRSSGQTRGSKAPRHVNRRARAAMMTATDRHRKQVPQSQRYYKKKRAEGKTHNQAIRALGRHLCRVIFKMLATNRPYRIET

SEQ ID NO: 417075 - protein, 444 aa, unidentified
MAMRKREDEVFPNAAGIDLGASSHWVAVPAHLAELAGDEPVREVGAMTDDLNALAQWLVKLGVQTVALESTGVYWIPVFEVLEQHGLTVWLVDARQMKYVPGRKSDVHDCQWLQKLMSLGLLRAAWRPSAEVCMLRAVARQRQTLLTEQASWVQRMQQTLVQMNIQLTEVLTDVMGQTGEAIIRDIVAGERDPKVLAKHRHRRVKASEDDIVKALTGNWREEHLFVLKQALAMYDDIDGHLAECDAKLDALLDQRATTKVDLGPAPREGSKVRAEHDIRQRLADWAGVDLTRINGLGVTVVMKLLSEIGPDLSRFASVKHFCSWLGLCPGTKISGGKVLSSGTKRSANRVRQALKMAAQSLCRSESALGAYYRRLCGRMDKPRANTATAHKLARMVYFMLTRGEAFVDQGQKRYEEQQRQRSVAALRRRAAALGYQINPVAAAA

SEQ ID NO: 417076 - protein, 400 aa, unidentified
MLSIGIDVSKGKSTVCGMKPGGEIVYAPFEVQHTREGMSELVSLLHNSCEEVRAVLESTGSYHCPVVAALLENGIFVSVVNSLRMKRFCSQSIRKVKTDRIDAMQIALYGLAYWQELQPARLPEDTYRELQLLARQYYQMTSMLIKAKVDFNALCDQVLPGMQELMNDHAGRHKLSDFVLRYRHTTHILEMGETRFRKDYCKWAEKKGYRNCERMAALIFATAQNGIPVLPNAPSTQIVITEAIRVLHTVEASRDAILTQMQALAKTLPEYSLVREMPCIGDTLAPRLIAEIGDVRRFHSKRALIAYAGIDAPPYQSGKFCANNRHISKRGNRYLRKTGYEVMQSYVMHKPANDPIFTFIEKKRSEGKCGKLAMVAGLNKFLRIYYGKVTELYRSLSAIE

SEQ ID NO: 417077 - protein, 404 aa, unidentified
MNDSMIGYAGVDWAMDGHAVCVVNGHGTAVIEFDVEHSAEGLSEMCRRIAGTGARRVAIERPDGPVVDALLGAGLEVVVVSSRSVKALRERYGTSGNKSDRSDAFVLADCLRTDGHRWRSLEPDSPATVTLRAHVRARKDLVETRVAVANQLRAHLRIVFPGAVGLFSAIDRPIALRFLERFPSATSAGWLSEKRLATWLRANSYSGSKDPAELYTHLSAAPAGVIGVDGDARGAITLAYVNVLKTLRTQIDELNTRLDELLDAHPDAPIFRSLPRCATVRAATLLAEIGDCRARFPDPESLCCLAGVAPSTRASGRHRVVTFRFSSDTKLRAAICDFAGDSWRGNEWAAHRYHELRASGKTHPHAERILARSWTHIIWRCWQDNTTYDPTRHGAHQRLTTQTA

SEQ ID NO: 417078 - protein, 347 aa, unidentified
MAHFVGLDVSVKETAVCVVDEVGEVVLEQKVPTEPDDIVMLLTSIGEAYGRVGIEAGPLSQWLVNGLATAGLPVVCVETRHMQALLKGQQINKSDRNDARGIAQMMRVGLFKPVHVKTLVAQEQRMLLTSRKLLQRKLLDVECDLRGTLRNFGLKVGRVSTRGYEARIRELVEDFPKLAAIVEPLLTVRRVMRQQFAVLHKMLLDTVRHDPICRRLMTAPGVGVVVALTYRATIDQPQRFVHSRAVGAHVGLTPKRYQSGEIDYDGRVSKCGDTMLRTMLYEAAQSLLTHSRKWSWLKAWGMRVAQRRGMRRAIVAVARRLAVILHRMWVDGTDFRWSNGPAVAKAA

SEQ ID NO: 417079 - protein, 423 aa, unidentified
MPGTVNTMETEREVVCGADIHKQFLLATILTKDGQKFQDRFDSNFEGLLNFRQWLLDHDCQRLAVESTANYWQPIYFVVGKDVEFVLANAYQIKHIPGRKTDVLDSEWIAELCFKDLISPSRIFSEDDRDLRSMTRTRENYVKMRSQIKNRIHQELESACIKLSSVLSDIFGKSGIHIIRGILNGLSIDDILDRIPSKKLKAKRGEIQDAIQANISPVQIDLISLLLDSVDFLNREIESIDKQIQSLISTRQEDLKIAMSIPGMGFTSASTILAEIGNLKDFNNGEKLAAYCGLVPSVYQSAGKLITGHITKHGSPHVRRMLIEVAHAISRTKADSKLKRFYFRIKSRHGAKVAVVALARKVLCILHHLIVNREMFEDGISSKSKREKTGRSSSSTEMIIEDAIQILVRAGYLVQKRSEKEGG

SEQ ID NO: 417080 - protein, 340 aa, unidentified
MTITTVGIDLAKNVFAVHCVDQNGKTVLVKPKVSRAALPELIASLPPCVIGMEACSGAHYWARMFRQYGHEPRLMAAKFVSPYRMAGKSGKNDAADAQAICEAVRRPHMRFVPVKDESQQAMQCLHRTRQGFIEEKTATYNRLRGLISEFGIIAPQSTDALRHMVSEQKNSLPLQVQQCVDDLLEHINRIEDNIAEYDRILSRMAKTDHRSQRLMELKGIGPTTACALVASIGNAHDFKNGRQLAAWLGLTPSQYSSGGKSKLGRITKAGDSYLRTLLVQGARSVLIGAEKRTDSFSRWVCTLVERRGYWRAVVAIAAKNARLCWASLHYGDDFRLYSAS

SEQ ID NO: 417081 - protein, 429 aa, unidentified
MKIIYPRVCGIDVHKKFIVAVICISESVEPIYLKKRFSTFHNDLIRFREWLIQNDCQNVCMESTGKYYIPVYNVLESHISNIVVANPKWVRAVKGEKDDDKDAKWIADLFKFGIVRSSFIPQKDFRILRELTRYRYKLVNMRSSEKNRFQNALTSGNCKLDMVFTDVFGKSASNIIDLILSDNPYTDEDILSKVHKKCKASPDMILDSVNGTDLTPVQKARIKLVNDHIKQLSSNIQKLDKLIDLMIEPYEDYISFLCQIPGVSRNSAIIILSEIGIDMNQFTTSRRITSWAGLTPSSNQSAGKKKSVRISRAGVYLKPCLVEVAHAAVKDKSHPYYANKFNKISKRRGKKRAYIAIARKILVAAYHMLLTGEIWNPADLSEVETPVEQRLKYVKNNLKSDIKQLLDIGLTVEELTLMMQQNANIIATQ

SEQ ID NO: 417082 - protein, 337 aa, unidentified
MSRIKGKARPDHSPVEATVAGIDVSKAHLDVFFHPDGERFRVPNDAAGHHDLLGRCVTGGIGLVVMEATGRYHRAAHAVLHAGGIQVAIINPYRTRRFADVLGRLAKTDEIDASVLAEFAATMKPAPTAPPPEAMAHLSELIVARKQVVEELMALENQKDQSTLPAVTAQIEEQIALCRTHRKALEAELVKVIRADRRIARRYAILTWIPGIGPATAAILLSDMTELGSANAAEIAALAGVAPMNRDSGTLRGRRMIRSGRQSVRNALYMAAVVAVRWNEDIRVFYERLKSAGKPFKIAITAAMRKLLLLANTLLKEDRLWSSSPPAREQAPQIHRA

SEQ ID NO: 417083 - protein, 424 aa, unidentified
MKRTQNEKILQIKFETLIVGIDIGKETHYARAFDFRGFELAKLLRFNNTRQGYEALEDWMQGIMREHGKTEAIVGFEPTGHYWFTLGDHLQRMGHRLGIVNPFHVKCTKELDDNSPTKNDRKDPKTIAMLVKDGRYRDVYIPEDLFQELREAVLERGRLMEQLIILSNQVQRWLDIRFPEFNRVFKDWSRDAAWLTLRHYPTPAKVVAAGASGIMDVWRKEMKKPSLKRAEKLVVAATESIGRTAGSEAAEAALQNLLAQYEMIDRQKQDIEALMQELLLRVPNASKLVDIKGIGMVTAAVIVSEIGDVRRFRDPRQIQKMAGLSLRENSSGKHKGKTTISKRGRKRLREGLFRAIITMLATNQEFRAIHRRNLTRENNPLTKMESVIALCGKLIRVIFAILTKGNDYDAKKMMDDMNRSMKAA

SEQ ID NO: 417084 - protein, 425 aa, unidentified
MKNIDVLNTLYVGIDVGSQTNAVYATDFCCDKTFKCNVGNNHPGAVSLAEKIAAFMNDKHFSGLVIAMESTSVYSTHIASFLSTADMLMPFTPYVYCLNPKITSAYKKTFVAEGKSDPEDAYAIADFARCGKIKSEPWRGSQYLAIQRLTRHRLHLIEAVAREKNYMLSNIYLKFSELAVIDDASQPFSDRYGATASAVLTDFLSTEDIASMPLLDLTAFVNQKGRGRFADPEATAKLLQQAARNSYRLDKCLYEPITLSLASSFNCLKAFEKEVKAIDRAILETIRGFNTNEYQCFTSIPGIGPVYAAGVLSEIGTIQAFKSHESLAQYAGITWPRNESGKFKADDKHLSKQGNAYLRYYLIEAANSVKNHLPDYKDFYNKKYAEATTHKHKRALALTSRKLIRLIFGLLDKNQLYTPPSEGVT

SEQ ID NO: 417085 - protein, 332 aa, unidentified
MKFSETIGIDVSKNWIDARMHLARQERRFDNTIGGYKKLISWVEKNLLIPKESILFAFEHTGLYSYGLSCFLSSGGYHFILIPGLELHRSMGIVRGKEDRIDATKIALFAYRRKDEIVPYQMPARIIDHLRHLLSLRDRLVVQRAGYQASLKENARFLQKNQDPDFFQIHDRMIHYLSKQIERIDLKLNHTIQQDQNMNRLFEMICSIKGVGSQTAYYMIVLTHGFILFGEWRKFASYAGTAPFPYQSGTSIRGKTKVNHLANKKIKSLLHSCALSAILYNPEMKAYYNRRTESGKSKMSTLNIIRNKILARIFAVATRGTPYVDIHKYAAA

SEQ ID NO: 417086 - protein, 337 aa, unidentified
MTQITTIGLDLAKRVFQVHGIDAVGKVVLRRQLRRRQVVPFFTKLPGCLIGLEACGTAHHWGRTLQALGHDVRLIPPAYAKAYVRRNKTDPADAEAICEAVSRPWMRFVPIKSEANQAMASVHRVRERLIGQRTMVQNMLRGQMAEFGIVASTGAWHVKELVARLGEAGSLPEPLRQALLGLGQLLAELARQIAALDAQILAWHQADRRSQDLATIAGFGPILSSAMSVRVPHPERFASGRDLAAWIGVVPKQASSGDTIRLGRISKQGDVYLRRLLVNGAQAVLNSKRGKTDPWIQRLLATKPRLVVAVALANKMARIAWAVMVRQTRFRQAVAAA

SEQ ID NO: 417087 - protein, 336 aa, unidentified
MFQLGIDVSKKTLDLCLLREGVKGKVKTRKLKNDFNAADAVIGWLSKQHCEPANVHIIMEATGVYHESLAYGLYKAGAKVSLANPHRSREFARGMDILTKNDQVDAYMLACYGALKVPEPWVPPPENVRHLSALLRRRDAPVTDSTREKNRLEKCRATDTPLAVTESIENVLRNLSAEPEHLDALILTHLDQHPELKKDFDLLTSIKFVGYQLGLNMLVILRGHHFDTAEQVAAFLGVVRVEKYSGTSVRGKPKLSKIGPPEIRAKLYLASLCGLRFNPVMKAMYERLCLRGKTKMCAIGALMRKLVHWCYGVLKTQKPFDAEYLSSDARSACKAA

SEQ ID NO: 417088 - protein, 387 aa, unidentified
MAGQSLKQGGRVVGNHSEAFVGFDSSKLRNAVAIADGGRAGEIRFLGEIENSGAATAKLVKKLAAKYQRLTFCYEAGPTGYGLYRQIKNLGHECIVVAPSLIPKKPGDRVKTNRRDALSLAKLLRAGELTAVWVPDRGHEAMRDLTRARETAMMDLRSKRQQVSAFLLRQGLHYSERKKTWTKTHINWLASQKLEYAEQRLVFEEMMLAVRQAQERLERLEQAIRVAVPDWSLAEVVTALMAMRGIDLISAATFLAEIGDLSRFQHPSELMGYLGLVPSEHSTGDKIRRGPITKAGNRRARRMLVECAWSYQHPPRVGQEKQEKVAAAPRAVREIAWKAQCRLHGRYRALVRRGKLKTVAVTAVARELAGFIWAVNRAIATARAVAK

SEQ ID NO: 417089 - protein, 340 aa, unidentified
MQLYAGIDLHSSSNYMAVIDVDGKRVFKKKMSNEPRSILSGLEDFKEAMVGVVVESTYNWYWLVDLLSEAGYRVHLANPSAIQKYSGLKHADDKHDAFWLAEMLRLKILPEGYIYPKDERPIRDLLRKRGHLVKLRTSLILSLQNIVARGLGVRVNVNDIKKFKENVVVPLLESNGDLALAGVISKETIDFLTRKIRSIESVVEQKVKLKDEYGLLLTVPGIGKILALTIMLETGPIGRFPKVGNYVSYCRKVNTKWTSNEKAKGKGNKKNGNKYLAWAFSEAAELARRYDTRCRSWYNRKMQKNNFMVAHQALAHKLARAAYFIMKNEVPFMPEKLFAI

SEQ ID NO: 417090 - protein, 319 aa, unidentified
MVIGIDVAKAELVVASGSQGETTSWANDESGVRALVEELEGIDAELIILEATGGYELLCVSALAAAQLPIVVVNPRQVRDFAKATGQLAKTDRLDARVLALFGERVQPTVRMLPDEQTRELGAALTRRRQLLEMRQAEQNRLLQLVGQGRRPIKQSLKKHIAYLERELRMTETDVGRMIRESPVWRDKDNLLQSAPGIGPVVARTLLAELPELGSLNRRAIAKLVGVAPLNRDSGTWRGQRTIYSGRASVRTALYMAALAATRWNPVIKAFYQRLVAKGKPKKVALVASMRKLLTMLNQMVRTGEHWRAHPHPQPTLPR

SEQ ID NO: 417091 - protein, 498 aa, unidentified
MKRRPKDATKKNRRRNGRNRVAKFLERVHLNAAGIDIGSASHWVAVPEDCDDQPVREFKSFTRDLHALIDWLNVCGIDTVAMESTGVYWIPLFEILQERGFEVLLVNARHVKGVPGRKSDVSDCQWLQQLHTFGLLRGSFRPDAEITAIRTLVRHRSTLVQEAAAHIQRMQKTLTMMNIQLHNVLTVVTGVTGMAILRDIVAGHTDPALLVRHRDYRCKASKDEFVASLTGHYRPELVFALGQSIELYDVYQDKIRACDEQIEALIRNLQAQCLTPDLQLASRTKTKRHRKNEPHFDIRSPLFALCGGVDITDVPGIGPYAALQLISEIGLDMSRWPSPDHFASWLTLAPHNKISGGKLLASATQPSSNRAAKTLRLAVMSFTRSDHALAAFYRRLAGRIGKAKAITATARKLAIIIYCMPRDHSPYRDLPAAAYRPATPHACPSWPPQTRQVPRLRPRSARHWTRSAMTAFPPNTTEQFLRRRCRRQSLATLSERAQ

SEQ ID NO: 417092 - protein, 323 aa, unidentified
MQGKITPERSADEAVYVGIDVCKAWLDVYLHPLGRRLRLANGRDGLTRLKRALAGRRVVLIVVEATGKYHRQAHRSLHAAGFAVAVMNPLRARLFAEATGALAKTDRLDARLLAILAESMAPQATPPACELIEELQELVRARQAATAEATALANRRQASQTAFLRAELKRRINSLKTHIARLETEIKRRIASDPALMRRCAILLSIPGVGPVTAATLSVAMAELGALTGKAAALLAGLAPIACDSGERNGGRRIRGGRAHVRTALYMAALAAVRCNPDLAAFYKRLRAAGKKPKLALTAVMRKLVVLANTLVKEDRLWLPSPP

SEQ ID NO: 417093 - protein, 440 aa, unidentified
MDVIYPYCAGMDVHKLTIVVCCMTPDATGQNSLETRTFGTMTQDLLALSDWLTSKQITHVAMESTGELWKPVYNILEGSFTILLVNAQHVKNVPGRKTDVQDAEWIADLLRHGLLRGSFVPPLGQRDLRDLTRQRTLLVRERADVVNRLHKVLEWANIKLTSVATDVRGVSGRAMLDAIVAGQEDAVVLADLAKGKLRDKRDLLIRALGGRIRQHHRFLMAEHLIHIDFLSERIAVFDQTIEQQVAEQTPPPPTVHQEGNEPGPGAEKPTDPLSWEQAVRLLDTIPGIGVTTAEKLVAEIGTDMSRFPSEAHLASWAKLCPGNNESAGKRHSGRTGKGNPWLKGALTEAAHGAVRVKDCYLSAVYHRLVGRRGAKRATVAVAHHILVAAYYILLRREPYQDHGPMQLDDQRKNRLANRLRYRLEKLGYVVNLQEAVPVAG

SEQ ID NO: 417094 - protein, 412 aa, unidentified
MQVVHERCAGLDIHKKSVYACVICLEEKGKKRQEVRSFGTMTADLLELSDWLRELQVTQVAMEATGVYWRPVWAVLEGQFELLLVNPHHIQAMPGRKTDAKDCEWIADLLQHGLLRGSFVPPTEIQDLRDLTRYRAELTQAQNRVANRIQKLLEQCNIKLSSVASNALGVSGRQMIEAIIAGENDPERLAGLARRRLRAKIPELQLALSGKVRDHHRFLLREFLDEWKALGERIVRIEQEIERRIVPFERAIALWQSIPGMDRVTASNLVAEIGVNMGQFPSAQHLASWAGLCPGNNESAGKRMSGTTRQGNKWLRRTLCQSAWAVTRKKDCYLSAQFRRLAARRGMKRAVMAVAHTMLTIAYTMLKSGRSYQELGGTYLEQINKKQLQRYFVKRLQRLGLKVIVEPVIQTA

SEQ ID NO: 417095 - protein, 359 aa, unidentified
MGVMEGREHRIVGGVDTHKDLHVAAVVDEQDQVIETRCFATTRQGYRQMLTWMRSFGELQRIGIESTGSYGAGLLRFMQQAKVPVLEVTTPDRQDRRRRGKNDDLDAQNAAHAAFAGQRTVTPRSRDGMIESLRVLMACRKTAVSARRVALQMIHNTIVCAPDDLRDQLRRLTRMQLVRTLAAWRPDLTAYRDLDSAYRISLKSLARRYLELHDEIADLDTMITAIVDELAPNLVARNSIGHIGAAQLLLTAGDNPERLQSEASFASLCGVSPVPASSGKIVRHRLNRGGDRAANSALHIIAIGRLRTDQRTRDYIARRMAEGHSKLDAIRALKRYLAREVFTLITQRRREINATRIAA

SEQ ID NO: 417096 - protein, 344 aa, unidentified
MRYVGVDLHKQTISLCVVELAGRERNVVARKRFRCEDEEAIAAYFAGLGSYEAVVEATASYEWFVKLIEPTAARIVLAHPGKLRVIAESKKKTDRLDAQTLAEFLAFDEVPQAWRPTPRVREHRTLVRLRAYCQGRITSAKNKLRWIVANYNADRTDLFSRAGRAYLAKLELTAADRLAVDLLCEELDQHAVRLKTIDRRLQKFSQAAPLPEREARAVLASIPCVGPVTTEVVLAEAGDVRRFGSQRKATAYAGLAPGIRQSDKRTKQLPITKTGSRLLRTALVELAWRLTNKTRRWGLLYERLKKRCGAKKAIVAVARRAWCVIVSLLHSGQAYRPIGEPTAG

SEQ ID NO: 417097 - protein, 283 aa, unidentified
METAYDGRQVVGMDLHRRRSVLVRMTEDGRWLGTARITNSPQELRREIARAGKSPRVVLEATFGWYWAADTLTAAGAEVHLAHPLGVKAFTYRRVKNDERDAADLADLLRMGRLPEAWIAPAEVRELREITRYRHKLVHLRTSCKDQVHGVLAKLGVPVTCTDIFGTAGSAWLDALGLPQPYAGKVTSLRQLTGELTTEITMLSEVIADLLRGDRGYQVIQQLPGIGPVLAAVITAEIGDVTRFQNAGQLCSWAGLTPRHRESDIKVTRGTSPSRARGYCAGR

SEQ ID NO: 417098 - protein, 347 aa, unidentified
MRFYNRQHRHYCGIDLHVKTMYVCILDAGGQVLVHRNVKSTPEAFLETVAPYRDDLVVSAECMFTWYWLADLCAGEGIAFVLGHALAMKAIHGGKSKNDKIDSHKIASLLRGGLLPQSYVYPATMRSTRDLLRRRLHLVRKRGQLLAHIQNTRAQYNLPEFERRLAYPANREGVSDHFPDPSVRKSMEIDLALLEQYDTLITDLELTLVRTAKQHDADAFHRLRSVPGIGKVLALTILYEIHDIARFDRVQEFASYARLVKGRKQSGGKMLGTSGAKMGNVHLKWAFSEAAVLFLRHATGGKKFLATLEKKHGKGKALSILAHKIGRAVFYILSRDTVFSMEKFMAA

SEQ ID NO: 417099 - protein, 337 aa, unidentified
MNNSVIGLDIAKNIFHMYTFVEDKPIKKKLRRAELLAFFANYPTSLIGIEAYGSAHHWARELTKLGHEVILLNTRFVKSFVIGNKNDFNDAAAIFDAVTRPNRRIAAIKTIEQQDIQLVHNIRQGLVGNRTALVNQIRGLLSERGIIIPQGINRLREQLTLILEDAENDLTVLSREVFAEQYENLRGLDDEIKEQDRRISRLCNNNELSKRFLEVPGIGPMTASIIASDIGNGKGYPSSRDYAASLGVVPRQHSSGGKFVYLGISKRGNKYIRTLLIHGARSVLKNSGKKTDKLSLWLQSLVERRGFNKAAVALANKNARILWAMATQEKEYNALLV

SEQ ID NO: 417100 - protein, 349 aa, unidentified
MNSTTVAVDLAKNVFELAIANGEWKITERLRLNRKSFSAFFVHLAPSRVVMEACGSAHYWARHIAGHGHEVQLLPAQYVRAYVKRNKTDRADAAALLEAMRCAEIRPVPVKTLEQQQVLGLHRLRSQWMSTRQRYVNTLRGILREFGIVIAPGVWAAKRHIAQQLAQSPSALSPAIRPLLTQMLQEIADLEHNVEQVERQLTSLSRSDERVQQMRQIPGIGLLTSTAIRATVGDIQRFPSGRHFASWLGLTAREYSSAEHRRLGGICKRGDVYLRTLIVHGARSALLAAHRAQRTGRPLDYLRRWALECERQRGHNKATVALANRLARIIWATWKYERSFDGNWAVPIA

SEQ ID NO: 417101 - protein, 366 aa, unidentified
MKKISTVQVLGNEILKEQKLTIGVDLGDRWSFYCVLEEAGKIILEQKVATTPEAMKQTFGKIPRSLIALETGTHSPWASRLLTELGHEVLVAHAQKVELITKSNRKDDRHDARTLARLARIDPELLGPVRHRCAKAQIHLTVIRARAELVSARTALVNAARGLVKSYGEGLPKCGTQQVNRELAAGLNTELREVLQPLLKEIESLNERIPEYDERMEKIAKEVYPEVSLLEQVKGVGTQIALTYVLTIEDPYRFEKSREVGCFLGLKPGRRNSGKSEPQKHISKEGDRYLRTMMVQGAHYILGPFGEDSDLRRCGLKLAERGGKNAKKRAVVAVARKLAVLLHRLWVSGEVYEPLRNSQKTMRAVA

SEQ ID NO: 417102 - protein, 295 aa, unidentified
MRKPTPLFVGLDVHKETISVAHAAGGTVEPPHFVGQIGTLQRDLDKLVRRLQSLSPQLVFAYEAGPCGYVLHRYLTEKGLDCRVVAPSLIPKKPGDRVKNDRRDALELARLLRSGDLTSVYVPSVEDEAVRDLCRARDATRVTLKSAKLRLKSFLLRLGFNYVGRADWNDAHRRYLAQVVCPTPAQQIVFQESLRAVDEQVERLARLERELLDLAPTWRLYPVVESLQALRGVQWLVAITVVAELGDLTRFDNPRQLAAFVGLTPSEHTSGEKRRQGGITKTGNGRARRVLIEGA

SEQ ID NO: 417103 - protein, 390 aa, unidentified
MDVLYQSCAGIDVHQANIVVCILHGPLTSTRPKREMATFDTTTKGLRACHDFLSQFHVEAVGMESTGVYWRPVWHALCDDFELILAQPAHMKAIPGQKTDKKDAHWIAKLTRIGLLPRSFVPDETIQELRELTRQRKHYVESRNRETNRIHKILQSGGIKLTTYIEDIMGLSGRNLLQLLVDGTPITPRIVHQSVYTSLKKKVPQLLEALDGYFSDHHRFMLKQSLEIYDFYQKQIELLEERMNVYLSRYENHVEILDSIPGIDVITASVIISEVGVDMSQFPTAGHLASWAGLCPGNNESAGKKRSTKIRHGNSYLKKCLCQAAFAIKKQKGSPLADRFYQIQSRRGSQKATIALAHQLLKIAYILLKEQITYPEFLAQKKTTRDELVA

SEQ ID NO: 417104 - protein, 408 aa, unidentified
MEVLYPRCAGLDVHRDTVVASARVVAAGDLRQEVKTFGTTTSQLLALSDWLTERGVTQVAMEATGVYWKPVWHILEGSFELVLANAMHIKNVPGRKTDVNDAMWIADLLAHGLIRGSFVPPTSIQELRALTRTRKQLVREKASHVQRIDKILQDANFKLGSVLSDIMGESGRTILEALVAGETDPHCLASLVNFRVKAGRELIVEALRGRLSKHHRFLLKLHLGQIDALGAAIADVDLEVGESLRPFRSAAERLTTIPGVSDTAAAVIVSEIGVDMSRFATPGHLISWAGLCPRNDESAGKRRSTRVRKGAPWLKTLLVQCAWCATRAKGTYLRAQFLRLKSRRGPRKAILAVAASILTAVYFMLKKGVPYADLGPDHFDRTDRTRTAMRLVRKLGELGFQVQIKDAA

SEQ ID NO: 417105 - protein, 346 aa, unidentified
MPHVGIDLHKAQSQICVLLEDGQVLERRVLTRADRLRKVLQEHRGSPVLIEASTESHWVARCLEDDGHTVIVADPNFAPMYGMRQRRSKTDLRDAQALAEACRTGTYRRCHQASDESRAIRVELRVRAMLVRQRAAQISLVRALARGDGGRIPNATSRSFVSQVRRSGLSERLMVQLDPLLAMITALCDQIAELDVRLADRARDHATARLLCTAPAVGVITALAFVSALDDAGRFTDSEEVASFLGLVPREWSSAERHRFGHIHKAGPAQLRWLLVEAAWRILLLKDPASEPLRRWAQRIAVRRGRWIAIVALARRLGCVLYTMWRSGQPYSAARLTSRLAVGKVA

SEQ ID NO: 417106 - protein, 323 aa, unidentified
MTSIICGVDIASKSLEVRIGQQGAASSFANDAEGINALGDFCRTHQVELVAMEATGGYEQQAFAQLSGQGLAVAILNPRAVRQFAQSMGSLEKTDRIDAGMIAWYAEVKKSQPVCLAPENQQHLRALVTRLRQLTDVRASQLNQQRLVTDRKVQASFKKLLTLLARQIGELEQSIAVLLEKDPLWRQLDEAFRTVKGVADRTVARLMAEMPEIGTLSNKTISKLAGVAPLANDSGKHQGKRAVRGGRAAVREILFIVASVVGRHEPDFIAFRERLRAAGKPPKVVRIALAHKLLVRLNAKAREVRQRMATLQPNSVVLLAELG

SEQ ID NO: 417107 - protein, 359 aa, unidentified
MANNEDGTRHVVGGVDTHKDLHVAAVVDGQDRVLGTACFATTRQGYRQMLVWMRSFGDLRRIGIESTGSYGAGLLRFMQQAGIDVLEVTAPDKHDRRRRGKNDDLDAQNAAHAALAGRRIVTPRSRDGMVESLRVLTVCRKTAVAARRVAIQIIQTTIVSAPDGLRDTLRSMTRMQLVRTLAAWRPDLTAYREVEAAYRISLKSLARRYLELHDEIADLDAMISAIVDDLAPELIARNSIGYTGAAQLLLTAGDNPERLRSEASFAALCGVSPVPASSGKTIRHRLNRGGDRAANSALHIIAIGRIRTDSATKAYVARRTSKGHSKLDAIRALKRYIAREVFHIITRRHREINQTRIAA

SEQ ID NO: 417108 - protein, 427 aa, unidentified
MQYALIQVLPDVPAGGVCAGIDWATADHVACVAGMAGRVKDRFSAAHDKAGLDAMITRLRRNKATEVAIERGDGALVDALLAAGLTVVVITSRQVKNLRSRYGSSGAKDDRFDSFVLADTLRTDRARLRPLVPDTAATIALRAAVRARRDLVAHRVAACNQLRAHLAAAFPAAVGLSCELDSPISLAFLARFGSCDAAAQIGEQQMAAWLQTVPARGNTAPASVLCARLRVSAPGATGAAGTAQAGVTAALTTTLSALSAQVKALETQIAARLASHPDGHIFTSLPRAGTLRAARLLAEIGDCRSRFPDPQSLAGLAGVAPVTRQSGKHASIEFRWAVNRQLRDAVCDFAAGSRHASPWAASVYDAARDRGKDHPHAVRVLARAWIYVIWRCWHGAAAYDPAKHNALQHLLDRQHGEAADSIWQEDR

SEQ ID NO: 417109 - protein, 322 aa, unidentified
MSLSVLGIDIAKQKFDAALLVNGKTKHKTCKNSAEGFEALNLWLQKQGIQKLHACMEATGNYGEDLAIYLHDAGHIVSIVNPARIKGFAQSELVRTKTDKLDAALIARFCLAMKPGPWIPPAPEIRSLRALVRRVDSLVDMRTQEKNRINTAHESIIFLIKEHIAYLDQEIEKIRRQIADLIKQHPDLKRKKELLDSIPALGKVTIPHILAELDDPGKFNHVREMVAFIGLAPKETLSGSSVKGKPRLCKIGHARLRKALYMPALVSIQCNPVMITFYNRLKDKGKNGKVIVCAIMRKLVHVIFGVLKSGKKYDPNFQPVSA

SEQ ID NO: 417110 - protein, 372 aa, unidentified
MNKKVIYIGLDVDDTQYHGAAFDKGAGEIVSFKCRPTLKGLIAQLEKMQKYFETDSLKLCYEASYIGHCLQRDLMQAGYDCDVISPGSIPRKGSKSIKTDRIDALDLAQFYANDLLTIVQVPNAATEQDRDLLRSRQQLMKQQNDLRRHIQSLLRRNGLHYKAETNNKTHWTKHHCCWLERTVEGCSGSLGTNLQLLLRQLESINEIVSAYSEEIELMAKRPNYQQAVSALVCYKGIKNLFALTMITEIGDVKRFAHPRQLSAWVGMDIREYSSGGKHHRYGITRQGNRHLRTAFIEANQRAYRTTKLSREIKARRANANPEYIAIADRCLRRLSKKGNRLLEAGKHPNKVKVACAREMIGFVWESLNKVAA

SEQ ID NO: 417111 - protein, 366 aa, unidentified
MKKISTVQVFGNEIFKEQKLTIGVDLGDRWSFYCVLDEAGKIILEQKVSTTPEAMKQTFGKIPRSLIAIETGTHSPWVSRLITELGHQVLVAHAQKVELITKSNRKDDRHDARTLARLARIDPELLGPVRHRSAKAQIHLTVIRARAELVSARTALVNAARGLVKSYGQRLPKCGTRQVSRELTLGLKAELREVLEPLLKEIESLNEHIKEYEVRMEKIAQESYPQVELLKQVKGVGTQIALTYVLTLEDPQRFAKSREVGCFLGLKPGRRDSGESQPQMRISKEGDRYLRTMLVQGAHYILGPFGEDSDLRRWGLKLAARGGKSAKKRAVVAVARKLAVLLHRLWVSGEVYEPLRNSQKAIRAAA

SEQ ID NO: 417112 - protein, 412 aa, unidentified
MRLFVGIDVSSEDLKVCVMNIDGDTLDAFTVPNNYHGATYLRDKLLSLADQEKPKEIHIGLESTSVYSWHPAMFLHEDRSLQERGTKVFTINPKLISKFREAYSDLDKTDYVDAWIIADRLRFGRLPMTVVLQEQYVALQRLTRMRFHLIHNLTREKQYFLQHLFFKCSAFTSEVESSVFGRAITELLLEQYSLDEIGSMELADLADYLKEKGKNRFPDPEKVAKCIQKAARSSYRLSKCVEDTIDILLATSIESIRTIKQQIKQIDEAIVRLLDGIPNTLETIPGIGRVYCAGILAEIGDVHRFKDQAAIAKYAGLTWQKHQSGKFEAEDTKRIKSGNRFLRYYLVEAANSVKRYEPEFRDYYQKKFAEVPKHQHKRALVLTARKLVRLVDALLRNDQIYTPRRKVNPASR

SEQ ID NO: 417113 - protein, 403 aa, unidentified
MSQNSSVAAERRRDATTDGRVPMAIYCTYFGIDSHLRTTTICALTPEDGELRTRTFKGNDYGEMAEWMAGFPQPSHGVYESGCTGFVPARMLTRGDTLVEPVASSKLPSSADSRSRKNDRRDAERLARLALAGEVSPVWVPPEQVEGLRELAQAMDDLACVREAARQRVNAILCRHGISWDERTPTGRLKKRWGQHFWNWLRSIDLGDAGSQAAYLAALSAAESAEVACDELRARAEGIARASDLGPVIDALMCVKGVGFSSALAFAAEVGDFSRFASGRKVTSYFGLAPSESSSAESRRLGRISRNGCALVRKLLIEGAWVLARGNPACRKRGGTPVPLAIREHARACSGRLLGRRRELVSRGLMPCKANTATAAEMARMLLYIGRDAQEAAALAAEVALVA

SEQ ID NO: 417114 - protein, 409 aa, unidentified
MRLFVGDDWAEDHHDVEVMDEAGRVLAKRRLPEGAVGMALLHGLVGGCLDADEDPDEAQVLVGIETDRGPWVAALVAAGYLVFPVNPLQSARFRARHQVSGAKSDAGDAHVLADMVRTDAHQLRPAAGDSPGAAGIKVLARTHKTLIWERSRQVQRLRHQLREYFPAALEAFGDDLDASEALELIAKFPEPARAAKLTRAQVSAALKRAGRRDITGRATAILAALRSGQLGQPPVLTLAYAATVRSLIAVITTVNEQVKILQGEVEAHFGRHPDAEIILSQPGLGPVLGARVLAESGDDPARCADGKARRNYAGTSPLTRASGKKKTVTARFVHNDRLVDALNAQAFSALSASPGARAFYDQQRANGHTHNDALRRLANRLVGILHGCLKTRTRYNEDTAWAHRHQQAA

SEQ ID NO: 417115 - protein, 405 aa, unidentified
MEILYANCCGLDVHKKTITACIITPKGKELRTFGTFTADLLDLADWIKAKDCTHVAMESTGVYWKPIYNILEQYDLKEILVVNAQHIKTVPGRKTDVKDADWSANLLRHGLLRGSFIQNREQRELKELVGYRKSLVDERAREVNRIQKVLEGAGIKLASVATDITGVSGRAILDAIVSGIDDPKFLASLSKGRLKNKREQLEQALHGLVGRHQRMLLSTQLQHIDFLDREIAKLDQEVEGQMRPFEQEIALLDGITGIGVRSAQVVLACIGRDMSRFPTKSHISSWAGLSPGNNESAGKRRKAKTTKGNPLLRTTMIQAAKSASHTKNTYLSAQYHRIAARRGKNKAAVAVAHTILVIIYCMLKNHTPYQDMGADYFAKVNSKAIAKRAIKQLEMLGYQVKIEAA

SEQ ID NO: 417116 - protein, 344 aa, unidentified
MILVGCDFHSRYQQIASVDTETGDLVEKCLEHENGEAREFYRALPAPARIGVEATGNLQWFSRLLAELGHELLVGDAMKIRAMMVRRQKTDARDASHLLELLMTDRFPKIWVPTPVENDLRQLLWHRQKLVWMRTSVKNQLHALAMSQGVCRKAKLWTEKGRTELEQIALDPWASRRRTELLHLLDHLDESVDELNQAVEEAGQHREDVRLLMTHPGVGRIVALAFALMIGPVDRFPSSKKLVSYLGLNPSEHSSGGRQRLGAISKQGNRLMRSLLVEAAQTATRVEPNLRRYYRRLKSRRTGAIAKVAIARKLAVRLFWMLRSQADYAQLVRMQGSSGATLVD

SEQ ID NO: 417117 - protein, 367 aa, unidentified
MGKSSKLFVGMDVHKESIDLAVAEEHGEVRHQGAIGGDMSALGRAVRKLESLGKTLVFVYEAGPCGFVIYRFLRTRAHQCWVVAPSLTPRQGSDCVKTDRRDSLKLARLARAGELSPIYVPDAADEAMRDLVRIREDAVIMQRQARQRLAALLLRNDIRYAGKSAWTKAHRRWIASLKLPHAAQQVAFEEYVQAVQEATARVERLEQAIIAERAHWRWLPLAHALEAFRGIQTIHATRIVAELGDLRRFSHPRSLMGYLGLVPSENSSGPRRRQGAITKAGNSSARRAFIEAAWAYQHNARVSWVIARRQTELPQPVIDLAWKAQLRLCARYRRLCARGLNRNKIVVAIARELAGFVWVAGQNIKPV

SEQ ID NO: 417118 - protein, 371 aa, unidentified
MKSIVYVGMDVHSSNYTLSCYMVENDRCFATVQVEPDYKEILKYLDNVQKNVGEPCEFHCGYEAGCLGYSLYHQLMDHGVDCTILAPSTMPTYKKNEIKTDKRDAMKIARCLAFNTYRAVYIPTKEDSDVKEYIRMRDAHKLALKKVKQQILAFCLRYDFRFTSGKSYWTQKHLAWLRSLAVDALMREILDEYLQTYQNLVDKLERFDKRIEELAGGASYAEKVKKLSSLIGIRTHTALALIVETGDFARFAKANQYAAFLGLVPGEKSSGDKQNRTGITKAGNTHLRRLLTEAAQCYGRGRVGFKSKALKERQYGNTPETIAYADKANERLRRKFYHMVLNNNKKHNVATAAVARELSCFIWGLMTGHTA

SEQ ID NO: 417119 - protein, 353 aa, unidentified
MVYSPNEYDIFIGIDVDQKSFSFTVKNHNTMSNSYKIPASPENLYQHIRNRYNNQRVICAYEVGVTGYYLHDYLTSQNIRCLMVPPQSVPKASNDRTKNNRLDSDRISQHLKNGDMEPIRIPDYDYRELRQLLRSREEYVDLRKVSKQRIKSLLLFAHLHTLLKDTTQYWSYAHIKRIKELPCSPATRKRLDLLLNDLDYSRNQTVIIIKELKSFSDQNASLKRNIHYLRSIPGIGFITAITILASIGDPQRLRNPRELSAFVGLVPSEYSTGERITRGRITHLGSSILRSLLIEAAWANITKDARLRQFYDRIRSKHHPQVGARKAIVAVARKLTLIIYRVLKEQREYITNI

SEQ ID NO: 417120 - protein, 373 aa, unidentified
MIVIGTDTHKRTHTCGAVDAFTAAARGELTAAAREGSFGKLLRWARALDPERVWAIEDCRHVSGGFERFLIARGERIVRVAPKHMAGARRSSRERGKSDSIDAFSVARAALKEGIENLPGAQLDGAALDIRLLVDHREDLIAARTADQQRLRWHLHDLWPELEIPAGALDTNKWLGKISRRLARAPQATRVRVARELVRQITARTTRARELEAELAALVESYAPQLLAERGCGPLTAAKLIGEIAGADRFATDAKLARTGGAAPIPASSGNTNRHRLDRGGNRQLNCALHRLAVNKANWDPDTAAFLARKQAQGQSRKEALRSLKRHLARRVWRLLRSTTAPNATLPPTDIPDSPKARETIPGTAPHPMTCIS

SEQ ID NO: 417121 - protein, 310 aa, unidentified
MERRFVGIDVAKATLDVHVRPSDDAFQSGNDEAGIRELVKRLHGLSPTLIVLEATGGYEVAVAAALASAGLPVAVVNPRQIRDFARATGQLAKTDRLDAAANARFAEAVQPAVRPLPSAEADALGELIARRRQLLDMLGAERNRHGQVRARRLQRRIGAHVEWLKNAIAEVEQDLNDTIRSSAVWREKDDLLRSVPGIGDVTAQTLIADVPELGELTRRRIAALIGVAPLSRDSGTLRGRRMIAGGRPAVRRVLYMAALVAVRYNPVIAAFYTRLTAAGRPKKVALVAAMRKLLTIVNAILRDQRPWQPA

SEQ ID NO: 417122 - protein, 344 aa, unidentified
MKALKSHVAGIDVHKEMLAITVLIGELDGEPKEYQFESSTFTDDLMALGLKLKEMGVTDVAMESSGIYWKPVFNVFNPLGLKVVVANAAHIKNVPGRKTDMNDSRWIAELHRFGLIRASFIPDGEFQRMRLLSRHRTNLTEDLARVKNRIQKVLEDGNIKLSIVVSDIFGVSGLKVLKQIAGGYTHPNILITEVTTKIKRMEEMKKALTNCLTTEHCFVINVLMKQYEELKNRIEEGENELCKKVEPYAHLVEELDKIPGIDAILAMGIIAESSANMSSFKDERAFAAWSAVASGNNESAGKKKRAKCRKGNPALRKMLIQAAQKATTARNPFIALNTTNSAFA

SEQ ID NO: 417123 - protein, 336 aa, unidentified
MRMRKVVESVAKSNYDHYVAIEWSIENMAIAHMTQREDVPRVFERPTDLKELKVYLSSLKGHVIVTFEESGSAQWLYLELSDYADRILICNPFENRLLFHGPKTDKIDAGKLCELLRVGLLKEVYHSDSVLYELRNLVSAYQDVVKAGVRALNQKEALKLGHREKGTSASLIGGILQENIDLYRRSKQQYEQRFRDLARRNKLIRVQRELPGIGTIGAVKIMACVVDARRFPDAGKYFSYCGLVKHEKLSGGRSYGRRKPRYSRILKSVYKTAAIAALKGKNPMREYYDHLLAQGVAEHNARHAVARYIARISYGMLKSGTRYEPYRKRDKEQKAV

SEQ ID NO: 417124 - protein, 407 aa, unidentified
MEVVYRCCCGIDVHKKVIVACLVNGGEQELREFGTTTSEIKTLANWLTESGCEMIAMESTGVFWKPLYNLFELMDLDAMIVNAAHMKALPGRKTDVKDAEWIADLLRHGLLKASYIPNREQRELREITRYRKNLTEERCREVNRLQKILEGANIKLDSVVKDITGKSARKLLQRIIDDDIPDSDEVSKLVHGRMRPKLEQIVASIEGITTPLQRKLLAQIIDHIDDLNRRIGELDKLVQEYMAEYEAAIEAIDEIPGIARRSAEVILAEIGLDMGRFPSAAHLCSWAGVCPGNYQSAGRRKHGKTTKGNKALKTILTQCAKSAKTVKSSYFFAQYQRISARRGKNRATLAVAHSMLIAIYHILKNKTAFHDLGSDYYDSFNRDRKINSYLKRLKALGWEPDAIPSSA

SEQ ID NO: 417125 - protein, 400 aa, unidentified
MRVVFGIDVSKASSEVAILVNGEKVHGYTIPNDAIGFNRLLGDLKTVHQPEIVFEATGVYSRRLQAFFEDNSYTYTRLNPLESKKQLDSLRVRKTDKIDAEKLAMSQFILNRKPSYVQEALYQELRDLSRFYQNLTEDIVCAKNRLHKVLQITFPELENILSAPTGEQYWNLVITFPCNSFVLESDDATLTAIIRQSTAKRISEKRVTYLVDKLTKLANQSYCAVKKTSPVIEEVKYYAGELLRLSEYRQSVLEKMVTLAQPLPEYEILLSIPGIAETTATSIIGELGDIRRFHSANQINAFIGIDLRHYESGDFLAKEHITKRGNPYARKILFKCIHNIASASHTNPCHIADFYEKRKRQSQVTSTKPHTIASIHRLIRTMYYLITHNKLYDYTSTQNR

SEQ ID NO: 417126 - protein, 334 aa, unidentified
MEKVTTLGIDLAKSVFSLHGVDEKGQVMLRRTVRRDQLVKVVAGIAPCLIGMEACSGAHEWGRRFQEFGHTVRLMAPKFVVPYRKSGKNDGNDAEAICEAVSRPSMRFVPVKSAEQQALLAMHRVRQGFVVERTATINRLRGLMSEFGVVLPLRSITVRRQAATAAENLPELARRAIGDLLDQLRVLDERIGGYDREIETQAKLCEPAQRLMRIRGIGPTTALAIVATVGNAREFKNGRQFAAWIGLVPGQYSTGGKTRLGHISKRGDAYLRNLLVQGARSVLHTAAAHRDPISRWALELQPRCGYYRTLVAIANKNARIVWALLAKNESLRTV

SEQ ID NO: 417127 - protein, 340 aa, unidentified
MSTINILGIDIGKFTFHLVGHDLSGREVCRKKFSRPKLIQFLSTIEVTTIAMEACGGCHWLARKCQAFGHKVLLIPPQYVKPYVKTNKNDFIDADAIAEAATRPTMRFVSVKTESSQVISVIQRIRSSYLKDRTACMSRIGSILLEFGMALPKSHAKMKALFQWLAEHGEPIPPMLLLELRDHHDYYLKLNQLILTQDKKLKEIVDHDERAQLLKTIPGVGNLTASRCLSDISNIADFKNGRNLAAWIGLVPRQFSTGGKPTLLGISKRGNKGLRELFIHGARAVLVRPEKAVAVFGNWILELLSRKHFNVVVIALANKLARIAWSVLSTKQAFEVRVQA

SEQ ID NO: 417128 - protein, 370 aa, unidentified
MAQRAKETAMTEGKDIILVADYHAENIEFRWFNQATGEERTGRYATTQAGILQQIDQAAKELEPGGNLVWVMESTTGWARVKDLIGQRARFVMANVLQMPMPPKARRRKTDKIDTGRIMREYLHGSLPQSFQPEPWWRRVRRVVDLRQDLVERQTAIKNWITSLLHHETWQNRKNLWSDCGLRRLRAMRLPAEDRVLVDLKLSQLDHLVEQIGQVEAQMRQIYDAWPEAQWVDEVRGIGMVTAVSLLAHIGPIARFPTAEDLISYAGLAPGMWQSDGTCHHGRIGGGGTDSHLRYLLIEATTWLCQIPRYRPTYERVVKKRGKKIARIVVARLLLRSLHKMLTAKVRFNPSPRPTAKETAKETATAGCSK

SEQ ID NO: 417129 - protein, 411 aa, unidentified
METLVERGCGLDVHQATVVACLLMVRKDGKVQKQVRTFGTTTRELLSMREWLLSQGCTHVAMESTGVYWKPVYAILEGAFQIVVANAQHVKKVPGRKTDVKDAEWIADLLCHGLLRQSFVPPQPIRELRDLTRYRRKLVESQSAERNRLLKVLETANIKLSSVATDVFGTSGRLMLRALIEGKTTPEEMAELAKRKLRSKIPQLELALEGKVEDHHRFLLKLQLDRLERAEGDLAVLEKHIQEKLEPYAAQLALLDEIPGVDWTLAAVIIAELGVDMSVFQSVSQLASWAGVCPGNNESAGKRKSTRIPKGNMYLKTALVEAHAAAKTKGSYLRDKFYRLKARRGYKRAAVAIGHKILVSIYHMISQNVSYNDLGDLYLDKLNKNHLTRNLVHRLERLGYSVTLAPQQKAA

SEQ ID NO: 417130 - protein, 377 aa, unidentified
MLDTKTFIKTADKLFIGMDLHKNTSTFVVKDKEGKLVNSAKVLTDKNDVTRYINSLKRNSGGKELSLAVEPVSQWYYYADLIENLGVDVHLAHPMDVKAIAHARIKTDKIDAGVLADLLRTNFLPEAYFAPAEVRSWKEQCRFRASVINLRTQVKNKIHAILFKHSLRHNFSNLFGKSGRRWLAGLDLKEPFKGNLDKYLLLIDQLTEQVVRAEEIITNTVINCPQAYLLISIPGISYCSALTIMAEIGNIDRFISVKHLQSYAGLIPSTYNSGDKQIHGKITKRGSKWLRWIMIEAAYHQMNCKRIPGFGSYYNTLKKRKGSKTAAVATARKLLAVVWRLLKDNRPYEAIDPRCWKSRPIASKYSSVSTVVNTTED

SEQ ID NO: 417131 - protein, 354 aa, unidentified
MKQQAIQYLALDVHQATTVASLRNEQGKILMHATVPTEAKAILALVGSAGPRVHVAFEEGTQAQWLHDLLVDHAERVIVCNVRGRGELTNKSDRIDADQLSEQLRLGALKPVYHGTPEILILKELVRSYLCLVEDSTRVMLRIKAIFRARAIPTPGVSVYRPSQRKKWLAMLEAGARARAAALLAQLDVLLELRPKAKAAMIGAARRQPGWKVLGSIPFLGPVRVAVILAIMRTPFRFRTKRNLWPYAGLAVVTRSSADQEMREGKLRRSRKAPLTRGLNRNHNPVLKSMLKGAAAAAVAKPGPLRDDYEASLARGVKDEMAMVTLARKIGAVVLRLWKKGELWDPKKLTMQAT

SEQ ID NO: 417132 - protein, 402 aa, unidentified
MTTPYDVILGLDVGKTAHHGCALDAAGAKLYDKELPQDETALREVIGQLQDHGSVLVVVDQPNTIGALPIAVARGCGATVAYLPGLAMRKAADLYPGRSKTDARDAFIIADTARTMPHTLRAVDRDSDLLSALKVLAGFDDDLARECTRAINRLRSLLVQTYPSLERVFTGTILTRPIVIELLTRYHGPQGLNAAGKSGVKRWAKNHTRTDPSTLVDQIFDALAQQPVVVPGAATVELVIPRVAAQIKELKAQRALVAAEVEEMVDAHPLTQVLISMPGVGIKTAATILLTAGDFSSFATPGHLAAYAGIAPVTRRSGTSIRGEFPARSGNKQLKNALFRSAWVASCHDPTSKAYYDRKRAEGKKHNAAVICLARRRLNVMFAMVRDGSFYQVAPEKVLQAA

SEQ ID NO: 417133 - protein, 615 aa, unidentified
MSSVSTLERIGVGIDTARYGHRVAFLRPDRQFAAKPMTVLESRAGYTALQERLEQLHQQHPQAHFNIRIDAAGQYAANLEHFLRGLPLPMTLSVGEPKRNKDYQKAHFPKRTTDDTESQAMARFAVVELPPATAPISSAMIALREVAGRLKTKVKQCTQASNRLHNLLARVFPELANLTDNIAASWVLELLDKYPTAQRIGQARLASLQKIPYLTPELAGQLHLVAQQSVACLSGDVVEELVRDLVAQVRQALSAKERTHQLLVDAYGALPDSPHRQVVTIPGIGVATAAALIAQAVDINRFQTPERFVGYFGVFPEESSSGVDKDGNPLPAGTMCMSSKGNDLARHYLWNAARAGIRHNPAIGALYRRLTAKGKRGDVALGHCMRKLLHLVYAVWKTDRPFDEKHFAWETPNAPADHTQNASAAGNDPAPCNPAADGDRDHCAPGNDTPQGKAPNGANAVSANETAAGHKRDLPAEKVVTAANTTLAPKPAAVKPPPAPNRPARPKVDFAFLREQVSMEQVLRHLGLLDKLRGRGLQRRGPCPIHGGPNDSQPTFSAHLGKHIFQCFHAKCRAQGNALDLWATIHKLPLYEAALHLAETFHLPRNREEEPVRTR

SEQ ID NO: 417134 - protein, 360 aa, unidentified
MFAVGVDVSNARSTVAVLQSKTKVAIKPFEVQHTADGFAALVGKLNKLNGEARIVMEHTGRYYESFAMSMHQAGFFVSAINPLAIKEYQDGVSVRKVKTDKADAVKIARFALVNWEILPQYTPMDTIRYNLKTMHRQFQLSSKTKTALSNNLIALMEQSYPGAYKYFDSPVRPDGSQKWVDYVDTFWHVDCVAKLSQKAFVERYQKWCKRHGYNFSEKKAIELYADAKQKFALVPKSDTCKLLVKEAVSQLNAVSRTVETYRAEMDRLASQLPEYDTVMSMTGVGKSMGPQLMAEIGDIRCFAHQKSLIGFAGTDPIKDESGDKVSDSKPSSKRGSPYSDCCASQNAWVITGAACRKSQH

SEQ ID NO: 417135 - protein, 402 aa, unidentified
MNAVGIDVSKGKSMVAIMRPFGEIVSAPFEIKHTASDIHSLVELINSVEGESRIVMEHTGRYYEVLAHQLSEANLFVSAINPKLIKDFDNDSLRKVKSDKADAVKIARYALDKWQNLKQYNVMDELRNQLKTMNRQFGFYMKHKTAMKNNLIGILDQTYPGVNTYFDSPSRSDGSQKWVDFASAYWHVDCIRKMSLNAFIDHYQYWCKRKKYNFSQSKAEEIYGKAKELVPVLPKDAITKLIIKQAVDQLNSASTTVESLRTLMNETASKLPEYPIVMAMKGVGTSLGSQLMAEIGDVSRFTHKSAITAFAGVDPGVNESGSYEQKSVPTSKRGSSDLRKTLFQVMDVLIKTHPQDDPVYQFLDKKRAQGKPYYVYMTAGANKFLRIYYGRVKEYLSSLPES

SEQ ID NO: 417136 - protein, 340 aa, unidentified
MTIVAGFDVHRAQITFDALDRETGEVHRGRIPSTPEAVAGWVERFPGREMHVAVEAGTGWLFVCEALAAAGATPHLAEPCETSALRGPKRRAKTDREDARWLGTLLAEGRLPEAWIPPAHVREWRTRTRLRKTLVDERTAWLVRVQATLFHHGISGVPDKLMSAAGREFLAGLELPEAARERIEVALAMIEAIDGQLAPLERELRRLARRQRGCRALMRHYGIGELTAPTILCELGDVTRLSASRKAVRCAGLDIGVHRSDRRSRVGKLTRQGSPQLRWALYESAQAACRPSSPDRADYLALKARGLSHTRASITISRKLARRCFHTLRQLGPEALEPVN

SEQ ID NO: 417137 - protein, 342 aa, unidentified
MKKSLFIGIDFSKKTFDVSVIHQSNLQAVDYQQFENSKEGCIALLKWIKSLTKEPSADWLFCGEHTGLYSICLSEFLIKKGLFVWLENPLQIKMSSGIKREKNDKADSREIALYACRYQDRARAYHLPDKALKSLELLLSFRERLVGNKQTLLVSSAEIRRVLKRDSTARFIYERSAKEIERLNKEIKEVERRMLEQIASEESLQENYELVSSIKGVALINTVAILVATQNFTRFENSRQFACYAGMAPFGKQSGTSINTKPRVSRLADKKIKVLLTQAAKCAIIHDSNVKRYYERKLAEGKDKWLITNNVRNKIIHRIFAIVRNKQKYQIDYRNPLQKNVA

SEQ ID NO: 417138 - protein, 315 aa, unidentified
MNEHVFIGIDVAKAELEVAVGPEGEGWSVANDTVGIGKLVSSLGKLNPALIVLEATGGYQRDATLALAEAGLPVVVVNPRHVRDFARSTGQLAKTDQIDARVLARFASQVRPELRPIPGPETAVLKALAVRRHQIIDMIVAEKNRRETALKAILPQIVKHIRSLERDLHNIDADIDRTIRSSPIWCETDTLLRSVPGVGPATSTTLLTHLPELGSLNRREIAALVGVAPMNRDSGTFRGRRMIIGGRARVRSGLYMATLVGIRHNPELAAMYQRLTHRGKVPKVAIVACMRKLLTILNAMARDRVPWSPDRSIYA

SEQ ID NO: 417139 - protein, 339 aa, unidentified
MKYIPVGVDIAKHLMQVHFVDEHTGEIIDKQVKREKFLEYFSNREPCLIGMEACGGSHHWARELQKLGHKVRLLKGRFVKAFVMGNKNDVMDARAIWLAVQQPVKSVAVKSEEQQATLGLHRMRQQLVKFRTAQINALHGLLLEFGETTHKGRAALAKEVPEALERLKERLPLYLINMLDEQYQRITELDEHLDHIEKQLQAVARQNETCQRLLNIPGVGPLIATAAVATMGDASAFKSGREFAAFIGLVPRQTGSGGKIRLLGISKRGDKYLRTLFIHGARAAALLTKETGPWITELKKRRPASVAIVAMANKLARTVWAIAAHGRKYDKNHVSIRPD

SEQ ID NO: 417140 - protein, 347 aa, unidentified
MKHSVGLDISVKETAICIVDENGKVVRETKVTTEPEAIIAFLNSTGLEYERIGLEAGSLSQWLVNGLAEAELPVICVETRHMKAVLKAQWVNKSDRNDARGIARMMRVGLYKPVHVKTLASQQQRMLLTTRKLLRDKLQDLENDMRGTLRNFGLKVGAVSSGRFEARIRELVAGHPRLEMIAVPLLTVRQVLRQQLAKLHKMLLDQVRSDPLCRRLMTVPGVGPVVALTFRATVDQAQRFARSKTVGAHFGLVPRRFQSGEVDYDGRISKCGDAMMRTALYEAAQVLLTRTQKWSWLKAWAMQVARRRGVKKAIVALARRLAVVLHRMWIDGTEFRWRKETDPTAAV

SEQ ID NO: 417141 - protein, 337 aa, unidentified
MNSVAVYVGLDYHQSAVQVCVMDKHGRVLLNRSCRNDWEEITKRANSCGRVQGAAIESCTGAADLADELVTLAGWTVNLAHPGFVHRMKQNPDKTDYSDARMLADLERVGYLPKVWLAPQEVRELRSVVRYRDQLVHERRNLKLRVSAILRQQRIRYSAGGTWTRKWEAWLRSVKGLSPQGRWVINRHLRHMASVLEDIAEVEEHLAELTADNSMVAALQRMPGIGPVTAWTIRAEIGRFDRFRSGKQLARFCALTPRNASSGDRQADAGLIKAGNRALRTVLIEAAHRLIRFDDEWISFAEELLRRGKPKCVVVAATANRWVRRLYHDLQPSQLAA

SEQ ID NO: 417142 - protein, 374 aa, unidentified
MTMMQHRQIRYIGLDVHKVSITVAIAEEAGAPTSYGSIPNDPSAIRKLMTRLGGPEVELRVAYEAGPTGYALHRQLAKMAIDCIVVAPSLIPKQPGNKVKTDRRDALKLARLLRSGDLTPVWVPDEAHEALRSLVRARADAKADQLRAKHRLSKLLLRQGCRPPSGVRTWSQRHVQWLRQLEFEHLPDRIVFADYLAEVTAAGERIKRLEAALHQCAQNSSQVALIRALEAFRGIGFLSAVTLVAEAGDLRRFRTAPQFMAYAGLVPSESSSGGKQQRGSITKTGNSLLRHVLGETAHHARHAPRVSSKLKQRQADLPREIVELAWRAQLRLHARYRHLSSRIGSLKALTAIARELAGFIWAAGQVLQEVPTAA

SEQ ID NO: 417143 - protein, 425 aa, unidentified
MKNNILKTLFVGIDVSSTTNVLCALDFNGNKLLNLKALNNQPGAESILDNILGCLDSNSLEYAVIALESTSFYSTHIANFLASNEVLLAYKPLVYCLNPKTVSNYRKSFVDMDKTDPLDAYIIADFARCGRITSEPWRGAQFLALQRLTRHRLHLIECVTREKTYMISNIYLKFSELAVLDKQERPFSNTYGVTSAAVLTDFLSLDDITYSSIEELVSFVSEKGKNRFSDPVKTAKLLQKAARDSYRLDKVLYEPLSVSIASSFNVIKALEDEVKTIDKAIEKTIKGLNTTEFQSLISIPGIGPVLASGILSEIGTITSFKSHDSLAKYAGLTWRVNQSGDFKSDETRMTKTGNKYLRYYLIEAANSVKNNVPEYKEYYYKKFGEVTKHNHKRALALTSRKLVRLIFGLLTKNQIYSSDKVGEIK

SEQ ID NO: 417144 - protein, 395 aa, unidentified
MELVTIHKSVIGLDVHQAQITACALIEMPDGSTRVEQRQFGGFKRDRRELAEWALALKPDEVVMESTGIYWKSPHAALEAVGILAKVVNARHVKNVPGRKTDIGDAQWLAMLSRAGLLRGSFIPPAVLRELRLIARQRQKLVSQLTGEKNRLHKILADGGVRLSVVVSDLHGQSARILVKAIIRGCSPQEVLDQASKRLRASREVLYDAVQGELTDSHRFALGEIMQHIEEIEARLARFEARLLNGLQPEHNALALLQTVPGIDLMGAAMLLVEIGSDMTSFGSADRLASWIGICPGNHESAGKRKSGRARKGNPYVRRLLCEFAHAACRSNCAFKPKFDALMPRRGYKRSIVAIGHSIIRTIFFMLQRREHYRDRLVGYEAMAVKRNAPDGSRH

SEQ ID NO: 417145 - protein, 514 aa, unidentified
MLWPYHLGHVQKQRLVSYFAVRQKKHPAYNIFNTSDATCWRLFYKIKNMNKEEQKTERYERMPVVNPSAAGVDVGSSSHFVGIGQNKEDVTEFGVFTENLHALCKHLVANKITTVALESTGSYWQPLFVLLQQYNLNPILVNGKFTKNVKGRKTDVQDCQWIQKLHTMGMLEGSFLPDLFTEKVRQYYRHRQTLVDNAAGYINKMQKALRLINIRLDSVLRDVMGRSGKDIIEAILKGERDPKVLSSLAQPTVKKSKEEIIAALTGDWREEYIFELRQCYEIYQHYHKKIDECDEAIKQLLAAEIKRKQKEENLPLAKDIKIKKKKARKNEARINVQQLAVDLTGGVDISAIEGVGLGLVLCIIAETGLDLKAFPTAKHFSSWLGVAPNIKKTGGKVINSRTRKGKGRLAKAFMHSANAIGNMQNSNYLLHFFKRKERKIGRAGAITATANKLSKIIWNMLVKKQSYCPIMPQQYLDKIKKKEVKNIQRKINQLNIQDNEILFMKFIWKKVFDV

SEQ ID NO: 417146 - protein, 435 aa, unidentified
MEEVEDEPLFCDRVAGIDIGKATVMVTIRVPSEARAKGRQQEAREFGTTRRELLALADWLRGWQVERAGMEATSDYWKPVLFTLEQEGFDCLLYQASQVKALPGRPKTDKLDSVWLARITEQGSLAGSFVPPEEIRRLRTHTRCRRKLVQMRTAQKERCEKLLEDAHLKLSSVISDIHGVSGRDMLRAIAAGERNPKVLAQMARGVMRSKIARLEQALDCSFFTGEHAFILTMMLDSIDSLTAQAGVLDARIADMCQPYQRQLEQLDEIPGFGTTTAQDLIAEIGTDMNVFPTAGHLASYARQAPRVKESAGKRKGKNATGRGNPYIGGALGEASISAGRTQTFIGEKYRRLTRRMPKRKAQVAIMRSQLVIAHALLSDPDARYQDLGPDYYERKADIRRRARNHARALERLGYKVTLEAIDPGTGELHLVATAG

SEQ ID NO: 417147 - protein, 313 aa, unidentified
MTKTTNTNPIDYIAIDVSKATLQVQDDQRSFAIDNDSKGYLKLLKHLKTCQNPLVVFEASGGYERGLCEFLHKKAIPLAMVNPARIRDFARSEGVRAKTDPIDTKMILAFAKSKALRAMEAPSETSIELAALLDRRGHLVEQLAREKNRLQNSEKFILRSIQRMIKILEKEISAIDKAIDELVGSEPGLKSRSEIIQSVQGVGKITAWTLLAYLSEIEHLNRNRLVALAGIAPFNRDSGKFSGKRSIIGGRAKVRRCLYMAAHTAANCNPVIAAYVQGLRDRGKPYKCAIVAAMRKLLIHIQALVKKHQLSPC

SEQ ID NO: 417148 - protein, 426 aa, unidentified
MKLEEKELEKPIRAWIGIDWADEKHDVSLYDVATGKQEALTIRQSPEALQEWLGQLRSRYEDGYVAVVLEQGRGGLLNALMGCEFLVLYIINPKSLSSFREAFYGSGATSDPVDAQLMRDMVRQNPGRFRAWRPDDVMTRSLRLLTEGRRHLVNQSTALTNQLTALLKGYYPQALAWIGTLDTAWACDFLEQWPTLQSLQASRRRQILRFYEKHPRASLDLDEQLKQIHNARALTRDEAVLQSSALMVQALVSQLRPLLASIAEFDRKIAMIFRKHPDRPIFESFPGAGAALAPRLTAAFGTDRDRFQAATEMQELAGIAPVTEKSGKKSFVHWRYACPKFMRQTFQEFADHSRRWCKWAKALYELLRRRGKSHNAAVRALAYKWIRILFRCWKDRQLYHDEVYTKSLLKHGSRLSSLLAEPVENP

SEQ ID NO: 417149 - protein, 364 aa, unidentified
MVPTNQSSEKKEPNMLIIGCDYHPGFQQIAFVDSETGELQERRLQHPEEAERFYRDLGERKVRVRVGMEASGHARWFARLLEELSVELWMGDAAKIRAKRVRKQRTDRLDAQHIFKLMLKDDFPKIWVPSWENRDVRQLLWHRHRMVQTRTRIMNQLQAVAINEGVRYKKRLWRDAGRKQLESLSLAPWASRRREDLLQVLDRINPTIAELTQAIEEEAEKCCEARRLMTHPGVGALTAVAFVLIIGEAHRFDCGKQIAAYLGLVPEEDSSGERRRLGHISKQGNSLLRFLLVEAAQATARSDGRWRNQFFHLAQRRGRKIAKVAMARRLAVRLYWMWRRGWDYEQLQSFGSHAGQPGHPRGVQ

SEQ ID NO: 417150 - protein, 394 aa, unidentified
MIYAGVDIAKTDHVIGAVDERGAEMCRPMPFKNTEAGLERAVAWLEGLAGSPSDVVVGMEATGHYWMACYSFLVARGYSVAVINPMQVKAVRKLKKLDKVKNDRIDARLIAETLRIGQYDETRLATDEVASLRSLSRYLQSLRGMAAELKTQCVCLMDAHFPEYAGIFSDMFGAGSRAVLSRSPLPFELARRRASSLARDIAEASRRGGKSAGYAAKIKAAARSSIGVRLGQEAASFQVKSLIRQIEFADSECAKVEARVRALLDEVEPLVLTIPGVSYATGAQIVSEIGDVSRFRNASALVSYAGLNSSVSQSGQFDSGGGPITKHGSPYLRRALWLAANRARQYDPGLRAFYDKKRAEGKPHRVAVTAVARKLCHIVFAVMRDQVPYDPGRE

SEQ ID NO: 417151 - protein, 327 aa, unidentified
MAKRTTICAGIDTGKRKLDVALDGSSEQLQIDNTPEGYKVLLDWLRRHRVKRIGIEASGGYEQAVVAELRRKGIVVVVFQPAQVRAYAKFHLQRAKNDKIDAALIAACTAAVKKIHPPPDARLLPFAEHLTMIDQIGEDIALLKNRLETCRNARIQQVWKDDLARLAKRERIEFKALVAAIREHRDLAERLDLIYSVSGAGLPTAVAILVRMPEIGQLTREQAAALAGLAPYDDDSGKHVGVRHIDGGRERLRRALYTAALPASFRWNPQLITLYKRLIAAGKGHKRALIACARKLLIFVNAVVARGIPWDHERPPTVAATALPQTG

SEQ ID NO: 417152 - protein, 407 aa, unidentified
MEVVYRCCCGIDVHKKVIVACLVNGGEQELREFGTTTSEIKTLANWLTESGCEMIAMESTGVFWKPLYNLFELMDLDAMIVNAAHMKALPGRKTDVKDAEWIADLLRHGLLKASYIPNREQRELREITRYRKSLTEERCREVNRLQKILEGANIKLDSVVKDITGKSARKLLQRIIDDDIPDSDEVSKLVHGRMRPKLDQIVASIEGITTPLQRKLLAQIIDHIDDLNRRIGELDKLVQEYMAEYEAAIEAIDEIPGIARRSAEVILAEIGLDMGRFPSAAHLCSWAGVCPGNYQSAGRRKHGKTTKGNKALKTILTQCAKSAKTVKSSYFFAQYQRISARRGKNRATLALAHSMLIAIYHILKNKTAFHDLGSDYYDSFNRDRKINSYLKRLKALGWEPDAIPSSA

SEQ ID NO: 417153 - protein, 376 aa, unidentified
MQAVQRQGYEQEAVLYMAMELSNSNWKLGFSNGQRTRRRSIEARDRFQLIEEVQLARQKLGLEPDTQVVVCFEAGRDGHWIYRWLSAEGFRVLEIDSSSIETPRGRKHVKTDRIDVEKLLDMLIRYCLGFRKAFRVVRVPSKEAEAEQRLHREDEYLIRQRARVSNRLKGLLVNQGIVEVPLKRGFEGWLETAQTWDGSGLSEALKTEIRRLYVQYQLMNAQIAEVEQVYQQELLSDTAVADKRRQLERLKCIGPKTSRILSAEVFSWRVFSNGKQVGGMAGLTPTPSQSGDVSREQGISKAGNRRVRRVMIELAWFWLRWQPESHLSQWFNQRFAHGGKRMRRIGIVALARKLLIALWRYVEDGVIPKGAILKVA

SEQ ID NO: 417154 - protein, 355 aa, unidentified
MDSKKYIGMDVHKESISIAVLNGAGKIVMESVIETKASMILQFIDGLRGEVQVTFEEGTSAAWLYDLLKPHVTKLVVCDPRKNASMKEGNKSDKIDARRLAELLRLNHLNPVYHGEHGLRSLKELVRSYLTITKDLGRVMLRVKAIYRSWAIPCTGKQVYAPRHRAEWLGKIAEPGVRRRAEFYYQQLDALRTVRQEVRRELLAEGKKHQAWKRLCQIPSMGPIRSAVLLGILQTPHRFRTKRQLWTYSGFGIETHSSADHRSVDGQLQRAKKQISIRGLNRNCNHDLKNLFKGAAIVASSKPGPFQEFYTALLTKGIRPEMARLTLARKIATIVLIVWKRGACFDAQHLKPQTA

SEQ ID NO: 417155 - protein, 398 aa, unidentified
MISVGIDVSKGKSTVCFLEPYGKLLKKPFEVEHDKISLSTLVTMLKKLDGEIRIVMEATGVYHLPILLYLKEHDFFVSVINPYEMKTYCTCGLRRAKTDRQDAIKIADFGINNWYRLKNYNVSDDVYSELKLLVRRYNHYMRMHVESILELTHILEYTMPGIKKLLQGWNEATNKDKLSDFVETYWHYDNITKLSEEEFIEDYTKWAKDKGYQCKQSKAVKIYALANTSIPTITSNTSSVKMLVQEAVRVLREVNNTLKKILTQMQKLAKRLPEYSVVRKMGGVGDVLAVKLIAEIGDVKRFHNGKALIAYAGIDAPPYQSGQFIAKERKISKRGSASLRKIGYEVMRCLKSHAMPEDSAVYEFIIKKELEGKSKKAAKIAGLNKFLRIYYARINEIY

SEQ ID NO: 417156 - protein, 315 aa, unidentified
MNETLLFVGIDVAKAECVVAVRPTGATWTAPQTEVGWATLSRRLQALAPTLVLLEATGGLEIPVTSVLAGAGLPVAVVNPRQVRDFAKATGTLAKTDAVDAAVLAHFAEAIRPVPRPVPDATTQALGALVTRRRQLVEMLTAEENRFGSAPPSLRAGLRAHIRWLQRQLAGLDTDLDQAIRSHPGWRVQDDLLRSAPGVGPVLSATLLGGLPELGTLSRRAIAALVGVAPWARDSGRRRGSRRCWGGRADIRAVLYMATLSAVRWNPVLRAFYQRLVAAGKLKKVALVACMRKLLTILNAMVKSQTPWAPCIGEV

SEQ ID NO: 417157 - protein, 427 aa, unidentified
MDAAAQRLRAQCALAVVGVDAGKFHHALVVRGRDSRDSKPLIFPTTRAGFEQALAYIRAGSADADPGSVLVGIEFAGSYGATFAFFLDTHGYPVVSVLGNATKAWAKAVHGTPLKTDAKDAITIVDLVSHGRFAGYPFLKPVYAELRVLTAGIRRVVRLRGGAVNTLRSVLQSVWPEYETHFTSFTQTVTPLRLLAKYPGPVAFQAAPRRTVLAALKSFSRGYFGTDQYDILRASAEQTVAIPGTETILQTQVTQLIHLIAVYDEQIEVLEAAMATAMQNLPEAQALLTIPRVSVRSVGLFLGAIGDPRAYEAPEQVLRLAGLNLMTKESGIQRGTHRISKRGRSEVRQQVYLLALGMVQKDMVYHAAYQAMIARNGGRKKKALVAISRRVLALMFSIARDRRPFDATRVSVSAPYRRAEGEASPSA

SEQ ID NO: 417158 - protein, 342 aa, unidentified
MSEYDGKQFVGIDLHRQRSVIVRQTDTGERLAAVRIVNDPVALGLQLENAGQNPEVVLEATYGWYWAVDTLQAAGATVHLAHPLGVKGFRYRRVKNDVRDASDLADLLRMNRLPEAWIAPPPVRELRELIRYRAKLVALRSGLKAQVHAVLAKAGVLIPVSDLFGVTGRQRLAKVGLGNAYAQRVISLLEIIDVLDTHETRFTVTIADQLHTHAGYRAIQELPGVGPTLGAIFVAEIGDVHRFAGPDRLCSWAGLTPRHYESDTVVRRGHITKQGSKLVRWAAVEAVQRHPTTAKIAADKKRIEDRRGKSIAKIAAARKLLTLVYYGLRDEHIRALSRGRAA

SEQ ID NO: 417159 - protein, 393 aa, unidentified
MICVGIDVAKDKYDCFILSSEGEVLADVFTIPNNAEGFDTLLQTIRRCARPEDKIKVGLEATGHYSYNILGFLLNEGLDTYVINPLHTNLYRKSLSLRKTKTDRVDARTIAAMLMSDVDLKPYTDTAYHNEELKSLTRYRFDKVRERAKLKQSVSRLVTILFPELEKLVSSLHLASVYALLIEFPGAKQVAGAHLTHLKAILSDASKGRYGRDMAVTLRDAARCSVGSVMPAKSLELQHTIRLIRELDAEIEDIETAIQSMMDEMQSPITTIPGIGVRMGAMILAEIGDFSRFDSPDKILAYAGMSPSTYQSGQLSLSGPYSHMEKRGSRYLRYALYNATKYVCLWDPAFAAYLAKKRGEGKHYNVALSHAAKKLVRLICALEKSQQSYRNAA

SEQ ID NO: 417160 - protein, 331 aa, unidentified
MFPVGIDVSKNTQDLCMLYDGIKGRIKTRNIQNNRHSVENILRWLRLQHCGPEDVHVVMEATGVYHERLATELHDAGFRVSLANPHRSREFARGMGIMTKTDKVDAYMLACYAFLKKPHRWEPPAPEIRYLGALLRRRDVLLGDALREENRLEKYLSTDTPADIISSCRRMAQLLREEVSNIERQIKAHIKASPALRRDYTLLTSIKSVGPQLGMHMLVVLRSHNFVSAEQAAAFLGVVPIEKRSGTSVRSRPRMSKIGPPQLRAKLYMSALCGKIYNKRMRNIYDEMCLRGKPKMVAIGALMRKLVHWCYGVLKTGTVFNDEDLKPVLST

SEQ ID NO: 417161 - protein, 312 aa, unidentified
MAQGEVFVGVDVSKDWLDVAVWPAGQTARVANDRAGRGELTRRLKRLGDLQAVGFEASGGYERGLLKALLDAGLPARRLNPVRVRRFAEACGLLAKNDRIDAAVIARFCATLPGRLAERNAAADALAELVTARRQLCEEMTRAANQGQHAGQPLLKRLAGRRASRLAQDIRTLDAAIAKAVAADPDLAAKDALIRSVPCAGPVLSHTLLGLMPELGSLSNRAAAALLGVAPFDRDSGTFKGQRRIAGGRQPVRDVAYMAALVGARCNPTLAAFKKRLQDAGKRPKVILVALMRKLITILNAILRDQLPWAVT

SEQ ID NO: 417162 - protein, 339 aa, unidentified
MSKRSIQIQETLYCGIDVSAKSLTVAIQRVGQLVEQRIFPNSQNGHRALIVWLRKAKSPVRVSLEATGIYSLDLAFALDAAEGIELAVLNPKVANRFAQTIRRSKTDAADAEVLAEYTHRMPFTAWIAPSSSSKRLRSIVRHVESLSVQSAQNQNRLHAAHGSTSTPGCVVQDLKRSVAFLEQRIHKLRREAMTLVRQDDLLRKRFELLVSIPGIAQVSAMQLLAELSTLPPDLTVREWVAHSGLDPAHEISGSSVRKASRISRAGNRHLRRALYMPALVASRCDPHAKAFFESLLARNKARLQALIAVARKLLHAIYGIFRSGLKYEGTKLFPRITLS

SEQ ID NO: 417163 - protein, 401 aa, unidentified
MVSDFRKGRYNLMKIYVGIDIAKLNHFAAAISSDGEIIIEPFKFTNDADGFQLLVSKLESFDKNSLIIGLESTAHYGDNLVRYLVTELYQVCVLNPIKTCQMRKNNVRKTKTDKVDTYVIAKTLMMQDNLRFVSFFDLDMMDLKALGRFRQKTIKQRTRLKIQLTTYVDQVFPEIQYFFKSGLHQHAVYALLKEAPSPKEIASMHMTHLANLLKVNSHGHFTKEQAKELRVLAQKSVGANDSAISIQITQTIQQIELLDSQLEKIEAEMTDIMKFNDSVIMTIPGIGYINGGMILGEIGDIHRFSNPNKLLAFAGLDPSVYQSGNFQAKTTGMSKRGSRVLRYALVNAAWNVVRNNATFKAYYDAKRAEGRSHYNALGHCSGKLVRVIWKMLTDNVEFNLK

SEQ ID NO: 417164 - protein, 407 aa, unidentified
MRIIGLDIHRAFAEAVAWDDGKLKRLGRVDMRRHLLEAFAKKLTKEDVVVVEATGNAASVAAVIAPHVKKVVIANPKQVRIIAHAKIKTDTIDASVLAQLYASGFLPEVWVPDQPTQALRRQVTRRNQIVRQRSRLKNIIQSILHSHLIPSCPHADLCGASGRAWLFHQVLPEDERLAVERHLREFDRLGEDLKVIERDLARSALADAAVQRLMTIPGVDMVVALAIVAAIGDVGRFEQSQKLVSYLGLNPSVRQSGPGPAYHGRITKQGRGHARGMLVEAAWAAARAPGPLRAFFLRVRARRGQHVAAVATARKLAVIIWHLLSKGESYAWARPALHARKLRDLELKAGHRAERGQKGAAHAYNIKSHRDQEWVEQAEAAYARFVAGWNPRGPKRARTGAANEVRR

SEQ ID NO: 417165 - protein, 343 aa, unidentified
MQTITAIGLDIAKSVFQVHGVDADGQVVVRRQLKRRYVLAFFQKLPPCLVGIEACASAHHWARELQALGHTAKLMPPAYVKPYVKRHKNDAADAEAICEAVTRANMRFVATKTPEQQSCLTLHRARHLLMRQQTSVINAIRSHLAEFGIVAPVGRNGVEQLLGVVADSNDKRLPEVARACVAALGAQLRVLKVQILEFDRMIRAWHRSSEASMRLDQVPGVGPVLATALIASVADPKAFRSGRDFSAWIGLVPNQNSSGGKERLGNISKRGDRYLRSLFTTGALAVIRYAKIHGTKHRPWLTSLLARRPTKVAAIALANKLARMAWAMMAKGERYKEPTALAA

SEQ ID NO: 417166 - protein, 363 aa, unidentified
MDDGSKGQPKMTAGLDLGDKYSHLCLINTESGEIMEESRLRTSPEAFRRRFSSEQQPLRIAIEAGTHSPWVSRVLEEGCGHEVLVANPRKTRLIYTNKRKTDEIDAENLARLARLDPKLLYPLKHRGEDSQAHLAIIRSREALVRCRTQLVNHVRGAVKSFGARLPKCPARSFHNKAPSHIPEPLWPALGPILEQIGSLTERIHQYDRQLEMICQEHYYPETKLLRQVEGVGALTALTFVLTLEDPSRFVKSRTVGAYLGLVPARDQSGDRDPQKRISKEGDEMLRKLLVGSAHYILGPFGSDSDLRRHGQKIASRGAKNAKKRAAVAVARKLSVLLHRLWITGELYDPLYNTHRRIEQERAA

SEQ ID NO: 417167 - protein, 320 aa, unidentified
MIAETTLVGIDVSRDWLDGFCLPGQSRFRHSNTKGGHIALVAMIRQIPGSVKVGFEATGGQEWVLWTELADAGITATQLSPAQIKAFALSRGTRAKTDRIDAELIARFMAFRPEAGRELPDENLRILRTLTTRRGQLVDMRKRLKAQIGARKRQGVSAGVEVMDDDLIYLLDAQIDYVERQIESVIARVQPLAAKANLLRSIPGIGPVSAAMLIAEMPELGRMTSGEAAARTGLAPVPHDSGAMRGRRAIAGGRRSLRRVLFQAALAAACHNPVLKPVAKRLKERGKPHKLVIIAIARRLVTIANAIIKTGVPWQLQPGA

SEQ ID NO: 417168 - protein, 309 aa, unidentified
MNGEHYTTIGMDVSDRTTKVCVMAKARGARRIVEEATIPTSKESLRTYLSGKSTDWPVVFETGAHCRWMKREVESLGMKAIVANPSKLRMVTESNTKNDRNDARELARIALADVGLLHPVRLRREPCQQALRLLKARDGLVKVRTALVNELRGFAKSMGFRLPDCPANRANALDKSGCALVASIDADPSRFRKARDAGAYFGLVPRQRQSGDVDEQCHVTKAGSALVRRLMIEAAQMVMRNSSRDTDAKLKGERICARGGRIAKKKALVAVARCLVVTAVALLKKPEAKYVPLSEAARREFEALRTTAA

SEQ ID NO: 417169 - protein, 287 aa, unidentified
MKTKPILPNHPAFFLGIDVGKADLFCHLIGPDEPISSRFDNNKTGIKLLITWLLKASASQSFVACLEQTGHYGDAIAETLYKIETTGIYLVNPQRIKSFGMQKLRRNKSDTADAKLIARFIKSEYLELRSWQPRSLIQQRITTLSRYADSLTQDNARLKTMMEAMPDKTISTSLKRRISASVKEIAALRREINKLIKEDPDLQKKSKLIKTIPGLGEIATHIVIAELPDLELFDDARQLAAWAGLTPRHHTSPHKRHIGKNPNPNHQDRIDSSQAWTLHARDDRSRV

SEQ ID NO: 417170 - protein, 351 aa, unidentified
MIISQNVGIDGGLKDFKVCFMILHQDQSLKVKGTRTFTNNLKGFEAFFCWAEKKKEQTDPLRFTMEATGVYYEQLAYFLHRKAQHVSVILPNKTKAYFQTLNLKSKTDKLEARALAQLGLERKFAKWEPLSKQMYELKTLCRERVMLLEEKTMVSNRLHAETHCQSPNSSVVKRLKKRIDFIKRQIKEVEKQLKTIVKKDKELDKRMDNICQLKGLSFITVITVISETNGFALFRNRAQLTSFSGYDVVQRQSGSSVLGKTKISKKGNRYIRRALHMPSLCVIKYNEEYRNLYERVFERTKIKMKGVVAVQRKLLLLIFSLFKKNQAYDPDFSKQKTAKNCRQDTIPAYAG

SEQ ID NO: 417171 - protein, 427 aa, unidentified
MKFKQSDGQNQRIERISTSHLIVGIDIAKETHVAQATNFRGIILTKRHLSFSNTIEGYMKLERWIHEIGQKHHLKNVIIGMEPTGHYGYNLANWLADKGKDVVMVNPATTKRNKENRDNSPYKNDPKDALVIADVVSRGFYYDFARHAIAFQRLQTIMSDREFWVTNSVRLQNRIIRWLDIRFPEYFSVFKDWTSKRSLATLKEFPSPQEIDLLSVSEVITAWRKHMKRAAGSTGTQKAAQLIATAKQSIGDTTALLEAKQDLKRLLEEFERIVEVLDTIEKDIEILLSGIPVAKQLRSIGLGFICIAAILSGTGDLRQYAHGRQLLRKAGLNLAESTSGKRKGQIVLSKRGDATLRKYLYLATLQLIGNNPVFRQLHEYNVQIKQMKKQQALFKVLGKLARIIIGIVARGEDFSPERVVPPFNQAA

SEQ ID NO: 417172 - protein, 425 aa, unidentified
MSYRIAGIDVHKKMLAVVIADVATAGEYEFQQRKWGANPSQLQALAQWLVDEAVEEVVMESTAQYWRPVWQSLERYWQTERRKREGSGTKSGTLHLAQAESNRARRGRKNDFEDAERLLKRLVAQELVLSFVPDAEQRVWRAVSRRKNQLTQDKVRLRGQLEGLLEEAHIKLTSLVSDLFGVSGRRMLEGLAAGETDAGALASLADFRLRATPEQLRDALGACAELNPVYRGLLQMSLAELKLMEDHIAQLDRQMCRLLEAHHEAVQRIAEVPGLGPDSAQQILAQVGPAAEAFDSAQQLASWVGVCPGREESAEQSRSDRSPKGNRTLRRILNQAAHAAIRVKGSIFEMTFRRLVPRLGYQKTVWAIAHRICRLIWKILHQGVRYQERGPSVSAKSKNARIIRMIRELRSFGYRVDALQTECGR

SEQ ID NO: 417173 - protein, 369 aa, unidentified
MTESSDYESIQVFIGVDVGKDTHHAVAVNRSGKRLFDRALPNDENKLRALISDLKQHGQILLVVDQPATIGALPVAIARSEGVLVGYLPGLAVRRIADLHAGEAKNDARDAAAIAEAARTLAHALRTLKVADEQIAELSMLCGFDDDLAAQTMQASNRIRGLLNQIHPALERVLGPCLDHPAVLELLQRYPSPEKLASLSEKKLAAQLSKLAPRLGKSLAADITRALTEQSVVVPGTNAAIVVLPRLALQLITLRKQRDEVALEVEQRVLVHPLYPVLTSMPGVGVRTAARLLTEVACRAFASAAHLAAYAGLAPITRRSGSSIRGEHLSRRGNKTLKGALFLSAFAALRDPISKAYYTRKINQGKRHN

SEQ ID NO: 417174 - protein, 456 aa, unidentified
MRRTKRRSSKIRPALPMVHANAAAIDVGARMHVAAVGADRSAEPVRSFGTFTTDLHRLADWFAECGVETVVMESTSVYWIPIFELLEARGFTVFLVNARDAKHVPGRKTDVSDAQWLQRLHSHGLLRASFRPKGEIIELRAYLRQRERLLEYAASHIQHMQKALSEMNLQLHHVVADITGTTGLRIIRAILAGERDPAVLALLRDTRCHASVGTITQALTGHYRAEHLFALEQALALYDAYQEKASACDARIEAVLKQLSFRRGRGVGPLPAPRRGMRRQPNGPAFDVRAALFALLGKDLTQINGLGPYLALKLIAECGADLSAWPSAKHFTSWLCLAPSNKISGGKVLSSRTRRSGSRAAALLRLAAVTIGRTDTALGAFCRRLSARIGKIKAITATARKIAVLFYNALRHGMDYIDPGASSYETRYRARVIENLHRRAKAFGFVLHPAAPQAVS

SEQ ID NO: 417175 - protein, 411 aa, unidentified
MMEAIHRCVAGFDVHSATVAVCLRRVEDGKVSKEIRTFGTMTRDLLALSDWLRAERATHVAMESTGVFWKPIYNILEGQFEILLANARHIKNVPGRKTDVKDCEWIAQLLQCGLLRASFIPPKPQRELRDLTRMRTQLSGEMATVANRVHKVLEDANVKLGLVATDALGVSGRKMIAALIEGETDTAKMAELACGRLRDKIPQLEQALLGKVTDHHRFLLKALIDHLTYLEGQIDRFNQRIEEAARPFEKAITALIPMPGYDRLSAQSVIAEIGPDMNQFPTDAHLCSWAKVCPGNNESAGKRKSGTTGHGNRWLQSTLVQVAWAASRKKRSYFQAQFRRLSGRRGKKRAIVAVAHSILNDTYHILKDGASYRELGGDHFDRIHHDRIRRYHVKRLQALGYPVVLGERQVA

SEQ ID NO: 417176 - protein, 339 aa, unidentified
MDHVAIDLGAKKSQICVRGADGRILEEKRWPTSDLESFLAGRPASRVVVETCAEAFCVADAARKLGHETRVVPATLVKTLGVGARRLKTDLRDARALSEVSCRIDLPSVHIPKTESRDRKTMCGMREALVGARTKIINNVRGWLRSRGRRIERGGRASFKQRVEAAWQGPLPSYVDRQLLVLEVLTTQISEANAELESWAEADETCARLMTVPGVGPLTALRFVAAIDEVARFESAHQVESYLGLVPGESSSSERQQRLSITKAGPRALRWVLVQAAWALRTRCRKPEAIPLQLWAERIEQRRGKRTAIVALARKLAGILFVIWRNGSVYDGSRGAKMI

SEQ ID NO: 417177 - protein, 352 aa, unidentified
MTVTIVETRPLARAITGGVDTHADVHVAAALDPVGGLLGVAEFPATAAGYARLLGWLGGFGPVCLVGIEGTGSYGAGLARHIAAAGIRVVEVDRSDRQDRRRAGKSDPLDAVSAARAALSGRAAGMPKGRDGQVEAIRALMVAKRSARSERIQTINQARALVITGPDDLRARFARHAPAELVAELAALRPRPGSMIRYHTLLSLRELGRRVAFLDGQLQRLDELIVPLVTARAPGLLCLYGVGHDTAAKLLIAAGDHPERLRSEAAWAHLCATAPLSASSGKVTRYRLNPGGDRQANHALYRIVITRLSSHPPTRAYAGRRAKEGLSKKEIIRCLKRYVAREVYPHLRPPAG

SEQ ID NO: 417178 - protein, 387 aa, unidentified
MNRSNHRVVGLDVHPDSFAGAILEGSDPWQARVKSTSTRVALRLLEKWALRHTRESDCLVLESSANAFAVAERLGRLKRKVLILDSHRAGKVGQSYCATDRVDAIKIARIYLSALSPIVWQPDQKTRERREVFSAYQAVVKEGTRLKQQIKSMLNEHCVRLEKGFRLSHPTAIERLLQRRKWTEAQKMLLEQLHAGLVGARSRRQQLRRYMAREILAEKELLRLTRLCGINLITLYGLIAAIGDINRFANSRKLVAYLGLNPSVCQNGEWEGATALKRHGRGAIRALLIQSAKKLLQVNNPLQKWGLAIALRRGRNKAAVAVARKLCVAVWHVMQGHVIGAIERLDTLHAKLHKLATDLGVPAIKALGYETKEAFVQKKLYLLQSYP

SEQ ID NO: 417179 - protein, 355 aa, unidentified
MKSEIRQLDFSGQKIYIGIDVHRKSWRTTIHIGDFQQKTINLSPPSAESLSEYLKRHYPQGKYLCAYEAGYCGFWVQEQLIQQGIETIVVHPADIPTTDHERQHKDDVRDSRKIARALRNGELKGIFIPTMQQQQDRSLVRRRYAIASDRRRAMTRIKMYLHFLGLFPPQGVLADWAWTKTFIQWLHKQAQHDPVLNSMLDEYEAVRQREQTIVKQLRRLFANDYYEPQMKLLRSVPGVGFFTAIQLLTEIGDMRRFRTLDKLCAYLGLVPQTHKSGDTDQANRRTTRGNKRLRSALIECSWKAIQQDSELSLCYLKLRKRFDGPHAIIKISRKILNRIRRVWLTGQPYTPIQNT

SEQ ID NO: 417180 - protein, 347 aa, unidentified
MNYVGIDWAYGRAAWCALTESGGIESEGLIPADEDGLARLALKLGPEVKACVEMMSGAIWVKDQLELCGWEVQVAHARKVRDIAPLACKTDKVDARVLAELCRRDLVPAVWVASLSDRAIRERLRRRAHLVKLRTSARNRIFGLLTQFGLRVSFTRLRRPDGVELLEQRGVPAVWRDSIATHLDQIDELDRRITPIDRELAPIARSDPRAQLLQTIPGVGPLISLTFAAEIGDVSRFSSASKLVGYAGLAPRISQSGERSATGRLSKAGSRTLRWAAVEAANQAWRPSNPFHEHYRRLAARHGKNPAKSSVARKLLITSWHMLSRDQVFQPTRSTTAAESSSRFLAA

SEQ ID NO: 417181 - protein, 387 aa, unidentified
MTEIRCLVTGGVDAHSDSHHAAALDERGRLLGDSAFATSAEGYQELLAWLESFGQVARVGVESTGSYAAGLARFLAARGVAVVEVNQPHAHTRRRRGKSDPLDAEAAARKVLAGEAAGVPKHTGGIVESIRQLRVAREGAVKANTAALNQLYELVITAPDELRQQLAARKTTRGKAVLCLRLRPDRARLHEPLQAAKLALRSVAERVRDLDRQIGLLDQDLAPLVATAAPRTMSLLGVSTQHAGQLVVTAGQNIQRLPNDGAFARLCGASPIPASSGRTSRHRLSRGGDRKANRALHLIAVCRLRYCARTRAYANRRTAEGLSKPEIIRCLKRYIARELYHTLRADLADLNLSAASAQQAVTINCGAGPIGITPTRSTTSRRRRRRT

SEQ ID NO: 417182 - protein, 424 aa, unidentified
MSIDHVRTETAAIKTQINAVFASLELSRSKWVVTSISPGAGEKMSRHVVEGGDLSALCDRLEAVEAKARARTGSRKPYEIIVMQEAGLDGFWLHRALQARGYTSHVVDAASIAAPRRKRKKKTDRLDGEALLRALLAWSRGEPRVCSMVRPPTPEQEDVRRACRERKELVKERIVHVNRIKGLLFAQGIGDYEPLRRDRRRRLEPLRTGDGRALEPNLKKQLNRMLDRLELLLDQLAEVEQARDERVGLAPKRKKAAAKAAPTAQPACTASQGAIDEGMAAPAATTTRTVGVAQMLIKVGGIGAEFTSVLSTEGLERDFRNRRQAGSFAGLTSTPWISGQLDHEQGVSKAGNPRLRTTMIQLAWLWPTHQPHSALTRWYKDKLAHASGRGAKQKLVVALARKLFIALWRYTAFGEPIEGAIMKA

SEQ ID NO: 417183 - protein, 364 aa, unidentified
MTSNTNDTVAERDAQDEQIILGVDTHADMHVAAVITTLGALLGTRSFPATAAGYAALLDWAVSHGRLRRAGVEGTSSHGTALNRHLARHHVHVIEVNRPNRAVRRRRGKTDAIDAENAARAVLAAQATAVAKRGDGAVEMIRLFKIAKDSATKARTQTINQLRAILARAEPALREALAGLGPITLIRRCAELPDTDTQDLDGAAVHVLRVLACRVQALDTEIRSHQQHLSTIIGTCAPDLLARPGIGPDTAAALLITAGDNPDRLTSEAAFAALCGVNPIEASSGKTTRHRLNRGGDRRANTALYTVVFTRLGRDQRTRDYAERRTTEGKSKKDIMRCLKRYVAREVFPIIIQALTPRTTTTAT

SEQ ID NO: 417184 - protein, 297 aa, unidentified
MMVTLGCDAHKKTHTIVAADEAGAEVGSVTVPATTEGHLRAVRWAGQFQQRQWAMEDCRSLSRRFEADLLTAGERVVRVPPKMMAGVRRSARTRGKSDPIDALAVARAALREPGLPVARLDGPSREIKLLVDYRESLVRERTAAQNRLRWRLHELEPGYDPPPGGLNRYRILNDVEALLAQHHGLVADLARREVARIRDITGEVNDLERDITARVTQIAPSLLHLTGCAGLTAAKLIGEAADITRFKGRDAYAMWSGTAPIPVWSGNPQRAQPGRKPANQRRTPPHRHHPDPMPPRR

SEQ ID NO: 417185 - protein, 460 aa, unidentified
MRTIGIDLAITGDHKAVILDDQGNPIGKVFRLRTDPAGLEALLRRAREGIGEDEPLRAVMEPTGLAWLPVASYLIQRGVIAYLVNGQQVEDLRKFYKKHAKSDRIAARVLARLPWVNPEALHPLQLSPADYLSGQRWCKQLEELAELMTAIKNRVQAWERTFWPGLEEVVSDPFAPWVRRWREKWYDPWQLQAVPTRQLAAFLAETGADPQAVEHLASGLQEVAQRAVALFGTPQGGPSPYVNYAALQDQVLRELRLLAGYEAEHQAVRRKVQELYRQCHPQRHLESIKGVGEEGAAVYTFFIGDVSRFATQKDFRGWSGMVPASAQSSEAEEKGLRITCAGPDPVKKYAYINAEIARQWDPQIAAIYYDQMMHKGNHHCQAVCACATHLLDRVRAVLRDERPYELRDVDGRPVTWEEARAIIAERYHVPEEVRRRTSKRARKHRRDQQAEKKRRSRPDR

SEQ ID NO: 417186 - protein, 349 aa, unidentified
MPNYNQAHQFYAGVDLHARSLFVHVLNAKGKTVFERDLPADPDAFLDAVGPFRKNLVVGCECMFAWYWLADLCEAKRIPFVLGHALAMKHIHQGKSKSDKIDAGKLAAMLRGGLFPLAYVYPKAKRQTRDLLRRRSFFVRQRSQLIAHIVNTNSQFNLPPFAKKLSYAGNRSDAIAQRFPDPSTKLMIATDLAMIDAYDEQIAEVERHLLKSAKVDDPVTFGFLRTVPGIGPILGLILLYEIDRIGRFPEAGNFLSYSRIVRCAHESAGTVKGFGGKKIGNAHLKWAFSEAACLMLRTCAPVKAWLARQEKKRGKRKALSVLEAKIGRTVYHLWRQQRAFDLQRFLRNG

SEQ ID NO: 417187 - protein, 427 aa, unidentified
MAYRIAGIDVHKKMVAVAIADVEVVGAWQFERRQIGTSPTQLRTLAEWLVEREVDEVVMESTAQYWRPVWETLEGAWQPRMRQRVGASVRAGALHLAQAQSNEGPRGRKRDFPDAERLVKRLVAQELTLSFVPDVTQRLWRTVARRKYQSTCNRVQLQNRLECLLEEMHIKLSSLVADLIGRSARRMLRAIASGETDPRAVAALGSRRLHATPDQLRDALGACTDLHPVYRRLLTLTLDELDVIEAHIRHLDEELGQLLRGHQGAIERLAAVPGLGVDSAQQIITEVGATAATFATAKRLASWVGVCPGHDESAGINHSHRTPNGNRQMRRLLNQAANAAVKTKGSIFELVYRRVVVRLGHAQAIGAIAHRLCRLVWKILHDGVTYDERGPAVTKHRAQRRAAKMIRELRALGYRVEQVSAPAISPA

SEQ ID NO: 417188 - protein, 408 aa, unidentified
MQVLYPRCAGLDVHKDTVVACVRCVSEPEHHETRSFATTTRELLALGEWIASHGCSHVALEATGVYWRPVWHVLEGQVELVLANAHHIKNVPGRKTDVNDAMWIADLLAHGLIRSSFVPPQPIQELRDLTRTRKQVVREISQHSLRIQKVLEDANIKLGSVLSEVLGVSGRAMLGAIIEGERDPHKLADLAHGTARRKHDALVEALHGHIRPHHCTLLKLHLNLIIALEHTVAEVDAAVGKCLDPIHQRARLLTTMPGVRDTVAEVIVAEIGIDMTRFPTPGHLLSWATMCPRNDESAGKRRSTRLLKGNNWLKTALVTAAWAAVRTKTSYLRAQFLRLKARRGAKKAIIAVAASMLTAAYFILRDGVPYRDLGPNHFDRQQRGKTVRRLLRRLHDLGYNLPLQNQPV

SEQ ID NO: 417189 - protein, 428 aa, unidentified
MTPNSHDVFAAFVGIDWADAKHDGCLQAAGSAKRERFQLEHTPEAIDAWVTTLRTRFNGQPVAICLELNKGPLVFALRKYDFLVLFPINPLTWARYREAFTPSRAKDDPTDAELQLELLLTHRDKLQPLNPQSPTMRALEQLVEHRRRVVGDKVRITNRLTSTLKNYFPQVLHWFQDKDTHIFCDFLSRWPTLKAAQLARRATLETFFRDHHVRSEDVIAQRLQAIKAATPLTTDEGVIAPNALLVQALVAQLRVTLHAIADFDTAIAQRAQTHPDFPLFQALPGAGPVFAPRLLVAFGEQRARYASAAELQKYAGIAPVTERSGKKSWVHWRLQCPKFLRQTFVEWAAESIRHSFWAQIYYQQQRDKGKAHQAAVRALAFKWIRILYRCWQDRTPYDESAYLQALNQRGSSLMQNLAKLSGTTVKIP

SEQ ID NO: 417190 - protein, 404 aa, unidentified
MIERYDAAHSGKDLANLVDRIRKTCPGPAIQTGIALEVSWGALVETLAEAGFSVFSINPKQSDRFRDRHTAAGAKDDSRDALVLASALRTDPKSFKRVQVDDPSTIRLRELSRLDQELKNDLHRAANQLWEQLHRYFPQMLKLSSGADDPFVWALLSEAPMPAKAAKLKVSRVGQILKSHRIRRFTADQVVTILKEPSLQPAPGAAEAASEHVLLLLPRLALLNEQIRDVARRTAKLLKDFPQNADLNGIVPEHRDVDLLLSLPGLGPTIASTILAEAPRPIRERDYDALRCYAGSAPVTKQSGKRRIVSMRRACSERVRQAVFHWSGRSIMVDSRSRQHYDRLRAAGHGHARALRGVGDRLLAVLTAILQSGRPYDASLRGTSTSTLTKPAGPSNASYKIGKH

SEQ ID NO: 417191 - protein, 367 aa, unidentified
MEKKIAYIGIDYHSETLSLAVIVDGKKDFFDSITMKNNDKIILKYLKKLSKEFELKACYEASCNGYTFQRKMKNWGFHCDVIAPSLIPKKPGDKRKNDYRDARNLTQLYANGQLTIVHPPTEEQESIRSIIRCRLSLKENEKNVKLQINSFALSHGFRWPQSKWTVKHRTWLSTLKLRDDYSQQVLAEHLGHLEYLSARISSLDEVIREIAGSEIYEPSVKKLRAFKGIGTLSAMILITEITDFRRFPNPRSLMAFLGLIPSEDSSGNKQKGGAITKTGNHRCRTQLIESVQHLMKKPIISYKMKQNLEQADPASANIAIKCMHRLNKRFWALTMKGKSRNKAITAIAREFVGFIWAMMTQPEPATI

SEQ ID NO: 417192 - protein, 421 aa, unidentified
MKRADTRKVRGVRDDTLIVAIDVGMEMNRGYCTTPDGRNTKPFKFDNTREGLDTLWGMIIASKNRFKCNEVIVGYESTGPYGEPMVHYLIKKPVKMVQVNPMHTKRVKEINDNSPLKTDDKDPRVIADIIKLGRALSIVIPEGDAAYLRRLNNSRERHVRERTALVNQLQQLVFLLFPEFRKVIKDIKCRTPLYLLKKYPTPEAISVLDTHVLGEEMRKKSRGKFREYHAGMLINLARNTIGIKEGVSGLSMDIRHILVQLEMLKSLIAEIEGEMEITLGRIPYSSKLLSIKGLGVVSVAGIIGEIGDFKKFGTQPEIMKLAGLDLYEISSGNMKGQRRISKRGRSLLRKILYYAAIQTIRKNGILHDYYTRLTERGMKRMMALVAVSRKLLRIIYAIVRDDSEYSVNFKSMKRQVIKKAA

SEQ ID NO: 417193 - protein, 384 aa, unidentified
MEKYTTYVGLDVHARSIAIRALNVETGEKAGTVLSDCPSATDVMEWLRERLDGPYYLAYESGCTGFHLCRELRALGADCDVIAVTTLARSVKDQQNKNDRVDSRAILREIVSPMPEYSVVWVPDEETEAARMLARAYDAAVVDLKRKKQRLIAFLLVMGYTWNERTATGNLRQRWTGPFRDWLDSISFGDPAAQAAYDLHRRAVDDAGELVDRASGLIRAEAAKPRWKPYVDALCRMKGVDVLSAFLVAAEIGDFERFESGRKVSSWLGTTPAESSSGERESHGHITKAGNSYVRRTLVEGNAGMSRRRTSRKKPDPGANVPEGVESMARKANARLKKRFEHLTAEGLHPNKARVAVASEQIRWMWAIGRAVQRGLAAEGAATV

SEQ ID NO: 417194 - protein, 426 aa, unidentified
MKSTTQNAKIAAITEKTLIIGIDVGSETHFARAFNWRGYEFSRKPLEFSNTEEGFETFRIWIDELKTKHGMDKVIPGMEPTGHYWFNLGKFLQDNGMTPVHVNPHHVKKSKELDDNNPTKNDRKDPKVIAGLVKDGRYFRPYIPDGIYAEIRVLSGLQVLAQSEITRLKNRIARWFSIYFPNYKDVYGNVGAVSGLMVLKAAPLPEDIVKLGVDGVNRIWRDAKVRGVGLKRAKTLVAAAEHSIGSREAQEAARVEFKILLSDYEMQTAREAELMALIEEKIMEVPYVDKLLEIRGVGLKTVIGFVAEVGDITRFDDPKQLQKLAGYAIVKNESGKHKGESHISYRGRKRLRYVLYEAAVSVVSHSPEFRSIHQYYTTREKNPLKKMQSMIAVACKLIRVFYLILQTGTTYDAAKLMGDIRRPVAA

SEQ ID NO: 417195 - protein, 351 aa, unidentified
MKYYTSTTEFNCGIDLHARVMYVCVMDRQGNKLVHSNIQGNDWDFFLKRIEPYRHSLTVVCESTFNWYWLADACYEAKLPFVLAHALYLKHIHGGKNKNDRIDSEKLAHLLRANLIPPAYVYPAERRPIRALLRQRMSYVWQRSALLTHVSMNQTAEGLVPAAKGGINRDVWVERILAQYENPLHRMAVTCEMDVIRAYDTQIQTLEDEIVRQAKRHEGRDYHLLNTVTGIGQVLAITILFEIDAIERFPTVKNFLSYARLVKGSVASAGKIKGLTGGKMGNAYLRWAFGEAAVSCKRYHPLITLYADRLIAKRGKFKGNAILAAKLARAVYFMLQKGTVFDAEKLIATSL

SEQ ID NO: 417196 - protein, 322 aa, unidentified
MAMLSFCGIDVSKDRLDVMVLPEQQCSSVRNDVAGWSELIERLRGFSIAAIGLEASGGYERGVMRALLAAGMSVRQINPFKLRQFAKASGVLAKNDRLDARMIASFVAIMPTHPAQRRSPAAEQLAEMVTVRRQLSDEKIAAENASRMLENAMLQRLSRRRIARLATDIAAIDERLVEIVVSDVALAHRYRLLTSMPGVGAVLACSLIAFLPELGQLSRTKIAALVGVAPYDFESGKLKGMRCIWGGRTSVRNVLYMAALSASNWNPTLKAFHDRLAATGKKPKVVIVAVMRKMITILNAMVRDGIVWADRHSARRSVPTAR

SEQ ID NO: 417197 - protein, 344 aa, unidentified
MHIASIGIDLGKATFHLVALGERNKILLRKKFSRAQLLAYTANLPSSLVGLEACAGSHCLGTVLREPGHPVRRMPAQFVKPYRKTHKNDFLDAEAIAEAVTKQNLRFVQVKTQDQLDIQAMPRVRDRLVQRRTARINEIRGFLLERGIPFAAQPIHLRKNLPAVMEDAEQNLSPRLRWLLDRLWQEWKQIESDVQVITEELERISNEDPRCRQLRQIPGFGPLVSTATVAAIGNGAAFRRGRDFAAWLGVVPRQYSTGGKQKLFGISKRGNIYLRRMLIHGARAVLFRVKYDTGGFGQWVQRLAQRAPRNKVVVAIANKLARIAWAVLSSGQDYRHQPLPSSAA

SEQ ID NO: 417198 - protein, 349 aa, unidentified
MKKLSKMPQQIRETIGIDLGDKVSRYCIVDHSGDVVEEGSFRNQASSIEKHFGGEPRRIALEAGAQSAWISRELKRLGHEVIVANPRELKWITSSDTKNDPVDARKLALLARADVRLLAPVEHRTAEQQTELAVIRARDAILRARTLLINSARSIAKGFGLRLPKSITGTFGERASEVLPEFLHTALTGLLKQIDAISEEIAGYDQKIGELAGHHPELARLESIAGVGRLTALTFVLTLGRAERFAHSRDAAGFLGLRPKQRQSGARDPQLGISKSGDPYMRKLLVQCAHHILGHYGKDSALRQWGLAKSEGGKKATLRAIVAVARKLSVLLHRLWVSGEFYKPFPKMA

SEQ ID NO: 417199 - protein, 310 aa, unidentified
MEPVFVGIDVSKDRLDVHVRPGGEVFVVSRDGRGLEELVGRLQELGPTRVAVEATGGFETIVAAAVAGAALPLAVVNPAQVRHFAQAVGKRAKTDPIDAGVIAHFAEAVRPVPRTLPDEAARLLAELVGRRRQIIDMIVAERQRENRATNVRVRKSLARHLAMLEKELGAIDQDINTLVRGSPVWRVKEDLLASVPGIGKTLARTLLAELPELGSLDRRHIASLAGLAPYTRQSGRWRGRSMIAGGRSAVRSASFMAALVASRHNPPLKDFYLRLICAGKPKMVALIAVARKLLTILNAILRDNRPWQSA

SEQ ID NO: 417200 - protein, 342 aa, unidentified
MEKLVIGIDFSKETMNFCCLQGSVDGVVLEGAVSNDREGCREMIRKLRALHNGLKVCDFLFCGENTGCYSLEVADYLFSEKYLIWLENPLQIKLSSGMRREKTDAADARMIAEYAFRYHDKAKGYNPQPKSIQKLKAWLKAHDYLRGIKVSLQNLLQSMPVVPGTLQETLEDIVAQLKQTDKKIRELLKKEDEFSMNASLMMSVPGISCISTAAILVDTCNFTRFTNPRKYATHTGCVPHKHDSGTTIHRKPQVSKASNRYINSLLTQGAVSLITHNQEIKEYVIKKKKEGKHTGCIINNIRNKIIHRLFAVIREQKSFDPNHRCEMQKKMHLQVGSGDTSF

SEQ ID NO: 417201 - protein, 371 aa, unidentified
MNHVTSIGLDVHARSVTAVALDSITGEVRSQKFGYSPAEIAGWILQLDSPKAVYESGVTGFHLVRELRGMGVDCIVGAVSKMHKPASDRRKKNDRNDAEFLARQLMAHNIVEVFVPDVETEGARNLSRALEDVRDDLTRAKHRLTHLLIRWGYIWNEFNEDGKRRGSWTHAHWEWIRGIELPDAAARESLDYYISEVRHIESQKKAIEKRVAQCASRPRWRDRVEALRCMKGIETVTAFALTVEAGVFSRFDSARAFASWLGLVPSEHSSGERASRGGITKAGNSHLRKLLVEASWHYTRATKERKRSLCDESVPASISNHAAVGVKRLVERRRHLSCELRKRPVVANVATARELACWIWALGRMSEGALA

SEQ ID NO: 417202 - protein, 337 aa, unidentified
MEYFAGLDVSLEETHVCVLDREGAVVHEAKAASTPEAITDELAKAPACRGVVFETGRMAPMLYHGLREYGVPVVCIESRQAYQALKSLATHKSDRNDARGLAHLARTGFFKPVHVKSLPAHAVRSLIIARKKLVSQRVTLENQIRGLAVVFGIRLPRGLSPAFIEQALRASAGVDGLSAAMRGLAAVRAAVLSAIAAIDADMKRMAKASAACRRLMTIPGVGVLTGLAFTAAVDGHERFRRSRDIGAYFGLVPRRYQSGEVDYTGGISKCGDRTVRTLLYEAANVMLTRYKGTLKLKDWALAIAKRSTMRKARIALARRLAIIMHAMLRHGTEFQAA

SEQ ID NO: 417203 - protein, 407 aa, unidentified
MARYYLGVDWGEKHHGVCVREETGTIVWEKMVAHTASGLSDWGRQLDTWRAAGIELWAAIERPDGRVVDCLLDHGVVVYPVNPKALDRARDRFRMSASKSDPFDSRVLAEFLRTDHAHLPPLKPSSVAAQELKLLTRDHTRLVRQQTRTLHQLTSTLKDYYPRVLELFNDLTTQRALDFLQTYPTPATLTTLRLSQWKRFARQHRLGPAQTTEWWVQLKAPQVPVPEHVVRAKARLVDVLLAQVLVTHRAVTDYQAEIERFFGTLPAAEWRQTLPGGLSGTMIPRLWAELGDAPDRWASWNHLQAQAGTVPLTRQSGKSCVVRFRVACNKHLRQAIWQLAFQSLRHSEWAKHYYQRCRARGHQHNQALRALGAKWLKIIFRMWQHQVPYDEAYHLANMTRQYLRATA

SEQ ID NO: 417204 - protein, 368 aa, unidentified
MKKRSTRKGPSAQGRKRRRRAFTVGLDLGDRSSRYCVLNEHGEAVMERSLATTTKGLDQAFGSIPRSRIALEVGTHSPWVGRHLAKLGHEVIVANARRVRLISDSTRKNDKLDAKTLARLARIDPQLLSPIRHRSEQAQVDLIMIRARAALVEARTALINSVRGLTKSYGERLPSCASYQVCEELAGTLSDPLQVALAPLLMEVESLTERIREYEQKLEELAQQRYPEVELLKQVQGVGTLIALTFVLTVEDPHRFRSSREAGCYAGLRPKQRESGQSRPQLGISKEGDPYLRKLLVQGAHCILGRFGQDSDLRRWGLKLAARGGKNAKKRALVAVARKLAVLLHKLWISGERYEPLRASNKPQTAAA

SEQ ID NO: 417205 - protein, 402 aa, unidentified
MFDTEDVGVFLGLDVGKTAHHGHGLTPAGKKVFDKQLPNSEPRLRDVFDKLAAKFGTVLVIVDQPASIGALPLTVARDAGCTVAYLPGLAMRRIADLYPGEAKTDAKDAAVIADAARTMPHTLRSLELTDEITAELTVLVGFDQDLAAETTRTSNRIRGLLTQFHPSLERVLGPRLDHPAVTWLLERYGSPAALRKAGRRRLVEVIRPKAPRMAARLIDDIFDALDEQTVVVPGTGTLDTVIPSLARSLAAVHEQRRALEAQIKALLEDHPLSKVLTSMPGVAVRTAAVLLVTVGDGTSFPTAAHLASYAGLAPATKSSGTSIHGEHAPRGGNRQLKRAMFLSAFAALHDPASRTYYDKCRARGKTHTQALLRLARHRISVLFAMLRDGTFYEPRTPEAAVA

SEQ ID NO: 417206 - protein, 343 aa, unidentified
MQTITTIGLDIAKSVFQVHGIDAAGQVVVRRQLKRRFVLAFFQRLQPCLIGIEACASSHHWSRELQALGHTVRLMPPAYVKPYVKRHKNDAADAEAICEAVTRANMRFVPTKRAEQQSGLMLHRTRHLFIRQQTAVINAIRAHLAEFGIVAPVGRRGVEQLLGVVADPNDKRLSEVARACIAALGAQLKMLKERILEFDRLIMAWHRSSEASRRLDDIPGVGPALATALVASVADPKAFRSGRDFSAWIGLVPKQRSSGGKEKLGNISKQGDRYLRSLFTAGALAVIRYAKIHGTRHRPWLSALLARRPTKVAAIALANKIARMAWAMMARGERYKEPAALAA

SEQ ID NO: 417207 - protein, 409 aa, unidentified
MNLYLGIDVGKSNLAFCALDSDRQCRFQDETTNDLNGARQIKQTILAETHHQDYNQIIAGMEATSIYNFHPMTFLSTDPELKALGLTVIIINPYTSHHFSQLFDDGKTDKIDARHLADLLRVEPLGNPVMRQEKYVALQRLTRERYHLVRQLTDSKNHFLNNLYYRCNTLDQTVPTSVFGATMLTLLTDEELSLDEAAALPLAQLVDHLQRLSHGKFGDTEAVAKAIKQAVRSSYRLTKVVADSVNEILAVYAEEIRMLNKQIKSIDKTIAQVSSQVKGIQCLTSVPGIGPVYAVGIVAELGQIERFPDESHIAKYAGLAWLPHESGTSVRQKTPHTRKGNQYLRYYLVEAANSVRRYDTTYQRYYQKKYNEVPKYRHQRAAVLTARKLVRLVEVLLKNRQLYTAPPVA

SEQ ID NO: 417208 - protein, 350 aa, unidentified
MSNNKNVVTFGIDLAKSLFHVCGLDTDGKRVVSKKLRRTQIVTFFANQPPCVVAMEACAGAHWLGRKLSGLGFQVRILPAQYVKPFVQNQKNDANDALAIAEASQRPSVRPVPIKTQSQLHLQALHRVRDRLVNQRTRLINQIRGFLLEEGIILRTGVGNFKSQLPVVLSDPSEEISPAMTALINELWDELLGLENRLKSINTQIESWASQDQSARRLQSVPGIGALSATAIIAAIGNAAQFNKARDFSAWLGLVPRQHSTGGKTTLGGISKSGNPYIRRLLIHGARSCTLHLNRENDRLGAWITDLERRMPFNKVVVALANKLARIAWVILTRPAATYEQIQPARQASY

SEQ ID NO: 417209 - protein, 342 aa, unidentified
MHISSVGIDLGKTTFHLVALDDHGKVVIKQKFSRKQLLAYTANLDSSLIGVEACSGAHFIGAALRDQGHDVRLIPAQFVKPFLKSNKNDFLDAEAIAEAVARQNMRFVPIKTDDQLDLQALHRVRDRLVHRRTALINQIRGFLLERGITFAKGPANLRKQMPAILEDAEQNLTPRMRHLLIHLWQEWKYLNSDIERISGDIDAIACQDAACQRLRQIPGVGPLVATATVAAIGNGAAFRKGREFAAWLGLVPRQHSTGGKARLLGISKRGSIYLRRMFIHGARAMLLRVKYDTGRLGQWAHQLELRAPRNKVIVAVANKLARIAWAVLSSGNQYRNAAVTAA

SEQ ID NO: 417210 - protein, 336 aa, unidentified
MTLYCGIDLHSNNHVIVITDEEDNKVLDKRVPNDLETSLLLLSPYKNRLKAVAVESTFNWYWLVDGLMEAGYAVDLVNTAAVKQYDGLKYSGDHQDAFHLAHLMRLGILPTGHVYPKERRAIRDLLRRRFQLVKQASTHQISIQNQIWRSMGYRVSCNLIKKSDFELPFEKESYLYFSANSNLLLLRQLQQQISQIEKLVLKVIEPEGAYKLLTDITGIGPILGLTIMLETGSIERFDQVGNYASYCRCVNSIRESNGKKKGTGNRKAGNKYLSWAFSEVAHYMVRFNDKAKRFYERKKAKRNGIVAIRAIAHKLARAVYYVLKNKQPFDINRVFV

SEQ ID NO: 417211 - protein, 334 aa, unidentified
MEQITTVGIDLAKRVFALHGVDAGGRVVLRSIVRREQLLEAMAKLPPCVVGMEAGSGAHDWARQLQRLGHTPKLMAAKFVSPYRRKGKNDGNDAEAICEAVSRPGMHFVPVKSLEQQALLSLHRVRQGFIVERTATINRLRGLLAEFGVVLPVRAVVVRREACKAAESLPALGRRAIEDLLAHLRTLDERIAAYDRELEQQARQCEPARRLMKIRGIGALSALAIVATVGNARDFRSGRQFAAWLGLTPRQHSSGGKTRLGHITKRGDAYLRCLLVQGARSVLHTASRHADGMSRWAQTLEARRGYHRTLVAIASKNARIAWALLSRNEVLRPA

SEQ ID NO: 417212 - protein, 423 aa, unidentified
MDTMHERCAGLDVHKAMIVACVRLTSGGKVNRECRTFDTTTAGLLALLAWLTESGCTHVAMEATGVYWKPVWNILSDGAFELILANAAHIKNVPGRKTDVNDAMWIADLVACGLIKASFVPEQAIQELRSLLRARKQLTREQTSHIQRIQKTLEEANIKLDSVISDILGLSGLRMIEAMIAGVRNPAKLAELADRRIKASPKELYDALHGRLTDHHRFLLRLYLKQYDALDDAVAEIDRQVDASVTRMDEEAKSGRPPFRSLIALLCTIPGVSTLGATVTLSEIGSDMSRFPTAGHLLAWAGLCPGQNESAGKRKSSRLRKGAPWLKTLLVQCAWSATRKKDSYYKAQFNRLRAKRGPKKAICAVAASMLTAIYHMLKDGTEHRDLGAAYFDRRSTKVKTNRLVAQLTKLGFKVELQPLAEAA

SEQ ID NO: 417213 - protein, 309 aa, unidentified
MTVYIGIDIARKKFDAAELCDGAYRCKTFENTPAGFTALYNWLKAGSIPDIHVCLEATGNYGTALATFLYEKNLKVSVVNPARIKGFAASELTRTKTDKADSRLIARFCKAAQPDPWRPVPAPVRKLQALVRRIGALNGMLRMECNRRENADIDAQESVERMINHLKMELESVRRAIKEHISNVPELKKQNDLLLSIPGIGTVSASLILSFMASKEFTKAKEVTAFLGLNPRHHQSGTSVRGKTRMSKMGDAKLRCVNRPGFPGECFICELRLPDHRFRWKHNKLFLLLPGEYGPAFPAIVDCYTSPPT

SEQ ID NO: 417214 - protein, 336 aa, unidentified
MSELVTVGIDLAKSVFQIHGVDASGRVLVRRQLRRSQLLAFFEKQPRCLVGMEACGGAHDWGRRLQELGHDVRLMPPSYVKPYVKRGKTDAADAAAICEAVTRPSMRFVAVKSEACSAVLVLHRTRDLLVRQRTQIGNAIRAHMTEFGIIAAKGAQNVDRLRTQLHQLPDAARLPVSLLFEQLVDTDTRIERLTGEIEAKHAQCETSQRLATIPGVGKLSATIIAATTPDVGNFDCARDYAAWLGLTPKPHSTGGKQRIGRISKMGNRYIRRLLYLGAMSQIMVRSRCGPRQDWLSDMLARKKTKVAAIALAHRMARTIFAVLRDGSRYQPQATTA

SEQ ID NO: 417215 - protein, 410 aa, unidentified
MSLYCGIDWVTAHHDVAVVDADGRVVARERVSNDAAGFSQLLTLLAQVGDTAEHPIPVGIETDRGLWVAALRETGRVIYPINPLAASRYRSRYAVSGAKSDATDAVLLANILRTDAAAHRPLPADSELAQVIRVLARAQQDAVWARQQIGNQIRDLLKDFYPAALVAFAELPTGGLARADSRTILAAAPTPAQAAALTPARLRRLLTKAGRRRDLDRDVERLRAVFTDTYLHQPPQVESAMGVHLSALLHQFDAACTAADNLAEAVSAHFEQHPDAKIITSFPGLGMLAGARVLAEIGDDRTRFADARGLKAFAGSAPITRASGKKTIVLQRHIKNRRLAAAGSIWALASLRASPGARRHFDARRAVGDWNRQAQRHLFNKFLGQLHHCLHTGQLYNEHLAFPPPLPLAA

SEQ ID NO: 417216 - protein, 482 aa, unidentified
MKTRPSERAKKTTDDAKHVHWHEMNRKQRREMMREIQNEDISLEVVHPDAAGIDIGNESHYVAVPPGRDSLQVRRYGCTTDELKAMAAWLKLLGIRTVAMQSTGVYWIAVFDTLEAAGLEVYLVNARDTKNLPGRKSDVQESQWLMKLHTYGLLRNSFRPSQEVRMMRTYWRQRNDLVRAAASHIQRMQKALTQMNVQLANVLSDITGVTGQAIIKAILGGERDPHKLAAFRDCRVKASEEQIARYLEGNWQEDLLFLLKQEQEAYEFCQQQMAACDRQMEQYLQQRKEPNPDARLPEETRRCRLKKKIHNPQFNLRAELFRITGTDLTQIDGIDVLTAATILSEAGWDMSKFENDDHFVSWLRLCPNNRITGGKVIGKGRLPTNNRASIALRMAASSLRTGKTYLGAQFRRLRTKLGAPIAIKAMAAKLARLVYRMLRYGMKYVDRGAALYELKHRELQVKQLKWKAASLGYQVTPVPAAA

SEQ ID NO: 417217 - protein, 484 aa, unidentified
MAKHKQSTFERLRNGKLPCNRKQRRELERRLNSADPGLEIINPHAAGIDVGNESHYVAVPAGRDARPVREFGSWTAALEEMAQWLKSCGVETVVMQSTGVYWIAVHDVLERHGLEVNLVDARGTKSVPGRKSDVQECQWLLKLHTYGLLRSCFLPAPEIHGVRTVWRLRDQHVKDAGRCIQHMQKALIEMNVQLHIAISDLSGVTGQAIIRALLSGQRDPRALASLRHWRIQATEEEIVHSLQGNWKEDALFELQQAVEAYDFYRKQMAACDTQLKSYMAALPTREAVPTTPAASEPAVAVDGRKKRRPRKPKGNQPAFDLAEELERILGVNAKRIDGIDVMTIQTVLAEVGPDLSAWKTEDQWSSWLNLAPKRDISGGRVIRHRREYRTNRAGNAFRMAAESLVRSQSYLGARYRYLRAKLGGLKAVKAMARVLACLYYRLVTKGQVWVDRGTAEFEQRRQQHDLATLQRKARSVGMQLVPTT

SEQ ID NO: 417218 - protein, 308 aa, unidentified
MHYLYYVGLDVSKETFDASLVAFEDANEMAHRKFANSRKGICSCLHWVEKRHGIRLVDVIFCAEDMGSYISEMAVCASDRTLNFNFSLISPLVIKYSMGIARGKTDRVDARRIAEYAITHYRKIALYLPAEKELCQLRTWLILRAHLAKQRVAKLVLLEKLDYKEKFADVSIQRSMLQEEIAYAETHMKTIEREMKELITADSNICRNYKLLTSIKGVGPITAIVMLCSTLNFTKITDHRKFACYCGLAPFEHSSGTSVRGGCHTSSMANRDIKVQLNRSALIAIRCDPQLKAFTNAKWLKVNINSAS

SEQ ID NO: 417219 - protein, 425 aa, unidentified
MEVIHRRCSGLDVHKETVVACVRLVLDDKITREVRTFETTTSGLLLLLAWLTELGCTHVAMEATGVYWKPVWNILSDGDFELVLANAAHIKNVPGRKTDVSDAAWIADLLAHGLIRSSFVPEQEFQELRELLRTRKQLGRQQSSHIRRLQKTLECANVKLDSVITDIVGKSGRAMLQALIAGETDPVKLAALADRRIKASAQELREALRGRVTDHHRFLLHLHLQHIDFADSAIRDIDRNVTALITRMDQEVEAGHTRATFQDLILLLTTIPGIDVLSARIILSEIGRDMSRFPTAGHLLSWAGLCPRNDESAGKRRSTRLRKGDPWLKTLLVQCAWAARRKKGSYFNAQFLRLRGRRGPKKAACAVAASLLTTIYHMLKDGTQFQDLGADHFDRRSKDVRAKRLVAQLANLGFNAKLTPLAQAA

SEQ ID NO: 417220 - protein, 453 aa, unidentified
MGKSNKKAIKIGFHEGLPQIRANAGGMDIGASEVWVDVGGKDPEPVRRFETFTAELQEMGDWLKRCGIETVAMESTGVYWIPICQVLESKGIEVVLVNARYAKNVSGRKTDMLDCQWLRILHSYGLLEASFRPARDIGVLRAYMRHRQMLIEYAAAHVQHMQKAMTQMNLQLQHVLSDITGTTGMRIIRAIVDGERDRNRLAAMRDVRTKANETTIAKALEGDYRAEHLFALKQSLELFDSYQKQIEACHQQIADHLRSLESKADPAAGLKPARTTKKKRRNQPDFNIREEAFRISGVDLTEIDSIHESAALGLLAEIGVDLSPWKTEKHFASWLTLCPNNKISGGKVLHRSTRKSASRARDILRLCAQSLLVSRSALGAYCRRMCARLGKPKGIIAAAHKLALLVYRMLKFGRRYVDIGQEQYEEKYKERALKQLARKAQHFGFQLVPSSQQ

SEQ ID NO: 417221 - protein, 409 aa, unidentified
MNTQKICFVGVDTHKFTHTAAIIDETFTLLGIVETKALPSCYPEFIMHIKRKARGARLIFGLEDVRGFGASLFQFLKSRNIDTREINPIETKRERCHRINPDKSDPDDALDIARVLGQRWKTLPSIHNDPLILALHQIVRQRDDLVHQLVSAKNRLHAALHQMYPGYQNFFTSPFHVGALAFWKQFPTPAHIKKAGHQAVTAFIRNKFTEAKTKKIVTAIKEQCCEKDIASPIKITCETIIPSLVESIGTIQHNIKTIEPMIENLVKQTPYKLHTMEGVGIISAAQIVAQVAPIERFASASKLARFVGIAPRKWGSAQYMRHRSSLRGRRSLHQTFYLVALSQITLNRNGKPRCPRARSYYLRKIKDGKSKSVALKCLQRRLVDVVYAMMKSKAAYNPEMSKNNKTVNL

SEQ ID NO: 417222 - protein, 344 aa, unidentified
MEYYAGIDVSLESSSVCVVDAKGQVLREAKIASEPEALVGWFNQLGVELARVGLEAGPLSQWLYAGMRDAGLAAELLETRHVRDAFKAMPVKTDRKDARGIAQLMRLGWFRSVHCKSLPAQETRALLTARKLVQSKHHDTEMSLRGILRGFGLKVGKTSQRTFASRVRELVAGHPTLQLVAEALLATRAALGEQLSKLEKRVRMLARSDPQVRRLMSTPGVGVIVALTYAAAIDEPTRFRSSKAVGAHFGLTPKKYQSGETDVTGRISKIGDASVRTALYEAANVILTRPVKGSSLKSWAMRLAARAGMRKAKVALARKLAVVLHRMLVDGTTFSAERAAATRA

SEQ ID NO: 417223 - protein, 384 aa, unidentified
MKKRSTEETRTTRVTKRAGGIKGAESASSGSARSLTIGLDLGDRMSQICVLDSMGEIVEETRVATTKNGLMRVFDVERLGKCRIAMEVGTHSPWVSRLLREIGHEVLVANSRKLRFIYQNRGKTDRVDAQSLARVARMDPALLSPVKHRDEEVAQDLAVLRARDLLVRTRVKLIGHARGAVKSAGHRLKASSTRSFTAETESMLPDELKETLGAVFSAIDAISEQIRALNERVRELAKKKYPETELLRQVTGVGFILSLAYVLTLETPDRFEKSRMVGPYLGLVPARRQSGDSDPQLRITKEGDGFMRCLLVQGSQYILGPFGPDCDLRRFGLALEGRGGKYAKKRAVIAVARKLAVLLHKLWRSGEVYEADRRLALLPEPAKA

SEQ ID NO: 417224 - protein, 394 aa, unidentified
MVISVGIDVSKDKHDCFIQSSEGEVLVDVFTIPNNMDGFNILLEKIQRCATSQDKIKVGLEATGHYSYNLLGFLLDNGLATYVLNPLHTNLYRKSLSLRKTKTDRVDARTIASMLLSDVGLKPYTDTAYHNEELKSLTRYRFDKVKERAKLKTSVSRLVCILFPELEKLVPSLHIASVYALLAEFPGAKQIAAAHLTRLKALLETASKGHYKRDMALEIRDAARNSIGSWMPAKSLELQHTIRLIRELDAEIEDIETAIQAIVDEMQSPITTIPGMGVRMGAVILAEIGDFSRFDSPDKILAYAGMSPSTYQSGQLSLSGAYSHMEKRGSRYLRYALYNATKHVCHWDPTFAAYLAKKRAEGKHYNVALSHAAKKLVRLIFAMEKSGKTYLPTA

SEQ ID NO: 417225 - protein, 418 aa, unidentified
MFKIFRKNCCGLDVHKTWIYACIGITDANSRTEYFQARFSAFSKGLQELSHWLDKYNCKEVCMESAGKFWIPVFNILEKTCLVTLAHPKYTKPQKGNKTDRKDAKWICDLFMCDMIKPSFIPPPAIRHLRDLVRYRGKLTNMLTGEKNRAQNCLTVSNLKLDDVFADVFGKSARSITEYILAHPGEPFDVAQFVDRRCKSPLSEIQAAVDGAISPEQAVKLRQCLDHIDQLRLLRQRLEQEILRICEPFADILQLLRTVPGLGNDPMTAIAVLSEIGGDMSVFPTAKNLCSWAGCCPRNDQSGAKVKSSRISRAGSYLKPLLVQVANALIHSRKHPEFAERYRRIKARRGHKKAIIAVCKMLLTAIWNILSKLVPYSPAGFLSASHDLPPSKSLTVAQGLSLLRRRGFILTDDPLSAP

SEQ ID NO: 417226 - protein, 328 aa, unidentified
MVDKVTEAAVVGGVDTHKDLHVAAVVDQNNKVLGTQYFSTTRQGYRQMLAWMTSFGTLKRIGVECTGTYGSGLLRYFQNAGLEVLEVTAPDRMERRKRGKSDTIDAECAAHAAFSGIRTVTPKTRDGMIESLRVLKTCRKTAISARRVALQIIHSNIISAPDELREQLRNMTRMQLIRTLGSWRPDASEYRNVTNVYRISLKSLARRYLELHDEIADLDVMIAAIVDELAPELIKRNAIGYESASQLLITAGDNPQRLRSESGFAALCGVSPVPVSSGKTNRYRLNRGGDRAANSALHIIAIGRLCYQRCKTDPPQRLKIDPGVNLLL

SEQ ID NO: 417227 - protein, 354 aa, unidentified
MKRTTKYVALDVHQATTSASVREEGGRVIARTILPTAAPALVEFFQGMRGAIHVAFEEGTQAQWLHDVLAPLVDRVIVADRRGTAQQGNKGDQTDADQLSELLRRGALRAVYHSSSHRETIRELARAYTNLVEDSTRVMLRLKALFRARGIRTPGKHVYHPSHRAEWLARLSGQGVHFRATALYAELEVLRELRPKAKAALLTEARRDPAWHVLRTIPFLGPVRVALLLATMQTPWRFRTKRSLWAYSGLAVVSRSSADYLLVQGRPVRRGRAPMTRGLNRNHNRVLKNVFKSAATAATARPGALQAFYRGMVARGMREDLARVTLTRKLAALTLRLWKTGDHYDPAQLTVQAQ

SEQ ID NO: 417228 - protein, 390 aa, unidentified
MIYTGIDVAKDNHDCLIVDSDGVILFPTFTISNNKQGFNELLKNLKMCGSDLAKMKVGLEATGHYSDNLLEFLIANDLPTTVINPLHTSLYRKGLSLRKTKTDTVDAHSIVTMLRTESLKPYSKTSYHVRELKSLTRYRFSLVQDCARLKTSYARLCVILFPELEKLVPSLHMASVYALFSKLPSARFISECHLTRLANLLTTASKGRYGKEKAVEIRNAARNSIGSYSDVKSLELQQTIQRIQVMENQIKQVESKINPIVDQLHSPLLTIPGISYRMAAIIIAETENFSNFNSAEKVLAFAGLEPSVYQSGQLTSTHARMVKRGSKYLRYALFNAAKYVCLWEPVFGQYLAKKRAEGKAYNVAVSHVAKKLTRVIFHLVKTNQPFVSQT

SEQ ID NO: 417229 - protein, 311 aa, unidentified
MTLPRDVLGVDVAKGWIDVFSLATGARRHVSVTGGALARFARTAAGALVVFEASGGCERPLAAALAQAGVPFARVNPRQARDFARATGRLAKTDRVDAEVLARMGRALDLAPTPPEEPDRARLADLLARRDDLVGMIQAEKNRASTARDPWIARGIARVLRVLERHLAALGAEIDGLVAACEPLADEARRLRSAPGVGPLVSATLVARLPELGRLDRRRIAALAGLAPHACDSGLSRGSRHVWGGRAEVRRALYLAAFVASRCDPRFRAFRHRLQAAGKPLKVAITACARKLLTILDAMTRTGQDYRRPAP

SEQ ID NO: 417230 - protein, 406 aa, unidentified
MQILFSRCCGIDVHKDSVTACVLVYTQGKEPEVRKKEFPAHFKSLGNLRSWLRAQKVTHVAMESTGVYWKPVWQALEGHFELILANPFQIKTVPGRKTDARDSQWIAELLAHGLIRPSFVPPRETRDLRDLTRYRVKLVQERNRVHNRIHKVLEDACIKLDTVASNILGATGRAIIQAIIAGQEHPDWLADKAKGTLRGKRPELRLALRGQITDHHRLMLRELLEDLEFVERKIGRLEKEIATKVDHGKLDRLCSIPGIDLITGFTLLAELGSDMSVFSSPQHAASWAGLCPGNHESGGKRLSNRTRKGNHWLRRALCQAAWAATRKKNSYIAAFFYRKAGKHGIRKAIVATAHKLLTIAFCILRDGTEYQELGDNFFDRLHPERTRNRLVRRLQRLGLETPASGS

SEQ ID NO: 417231 - protein, 341 aa, unidentified
MEHIAIDLGRRESQICVRDGTGQILEEARHTTSELRAYLRRRPTGSRVLVESSAEAFTVADWASELGHEPRVVPSILVPALGVGERGLKNDVRDARKLSEMDCRMAVPSVHIPSAARRAQQAQLTAREALVRMRTKLINTVRSFVRMRAMAPIRATPPTLPRAVRATLVRTPEGVPDYLEALLCTVEHLNTQIQQADHALREVAHHDPVCRLLMTMPGVGPVTALSFVSAIDDVTRFEDASRLTSYLGLVPGERTTGFKTRRTAMTKAGPSRVRWTLTQAAWTLVRVQPDSPLGQWYEQVSKRRGKKIAISALTRRMASILYAMWRDQRPYAATRAASRHG

SEQ ID NO: 417232 - protein, 353 aa, unidentified
MKCDKYIGFDLHQATTVVAVLDAEGKVVMETIVATEAAAIIRFLKSLSGPLHITFEETTQARWMYDVVRGYVKEVVVCDPRRNKLLGEGSKADKPDARKLAELLRAGLLRPVYHGHEATRQLKELVRGYETLSADTQRMMVRIKAIYRAHGIRTPGSAVYQQRQREQWLQLLTEPGTRQRVNWLYEELDHLRPLRKQAKMAMVAEGRKHQAFRLLRTIPQLGPVRCAMLVATVDTPYRFRTKHQLWAYSGLAIVTYMSSEYEIKSGRVVRSRKPLATRGLNRNCNRRLKELFISAAVAGSRSEPYRSYIEGLQQKGIRAEMARLTLARKIAAVALRVWKEGEAFDPKKLNSTT

SEQ ID NO: 417233 - protein, 456 aa, unidentified
MQTFYLGIDASKGYADFIILNNQKKVIVESFQLDDTFEGHCFLYELLLNLLADHPESTIFAGIESTGGYENNWYTALLAFQGSLNLQTARLNPLGVYHNSKADMKRNVTDKISAQSVAEYIIAHPEKVSYQSQDSLASLRKQWGFVKMLTKQSTQLLNQLESLLYSANPEIMAYCKDGVPTWILKLLIKYPTATNLAKAKVTSVARIPYVSSDRAEIIVQNAKKSVASATDEITQHLVVATVKQIIHLKETIKTQTEIMAKACSVPEVELLKTFIGIKDFSAIGLMLNIQSVKRFKTVKKLASFFGLHPAVKISGDGVSVVRMSKKGRTEPRQILYMVAMTAITKNPLISEIYQEHVQKGMKKMAAIGLCMHKILRIIYGMLKNNSPFDPETDRRNREKSVQKRKSTKENKIRRYQNYDPNAPISRRQKIKRMEQEQSQSDNGAECGILAPVPFST

SEQ ID NO: 417234 - protein, 340 aa, unidentified
MSEITRVAIDTSKSVFTLHAVDAQDRPVLRRNLRRQDLVPFFAKLPPVDVSMEACGGSHYWGRTLQALGHRVRLIPAQYVKPFVKRSKNDRNDAQAISEAAARPGMQAVAVKSADAQARAMLLTVRELLVRQRTQLVNALRGHATEMGLVAPVGGKGLAALRSEIEADATLPEAAAEALQLLGREIDRLEARLAQIDKNLLAQHKTDPDSRRLSAIPGVGPMSALSFSRMVDATQFKSGRHFAAWLGLVPREISTGGKQRLGGISRAGNERLRQLLVLGATAVIRFAKPGHPGASAWLLALLERKPRKLAAVALANKMARIIWAMLTSAEPYRHPAPIAS

SEQ ID NO: 417235 - protein, 312 aa, unidentified
MSDAVYAGIDVAQEWLDVALSFSETGKRWANDEAGIAAAVTWLKEQQPTLVVLEATGGLEVPVVAALACGSVPTAVVNPRQVRDFAKALGKLAKTDRIDAQVLARFGAAVKPSSRRLPDAQAQELNSLVARRRQVLEMHTAEVNRRHRALPVVRRCIDQVLRLLEVQLAELDKDLQDRLKASPLWREQEDLLQSVPGVGNVLTFTLIADVPELGSLNRKQISALVGVAPLNRDSGNFRGKRRVWGGRASVRAILYMATLAATRWNPIIRSFYQRLLAAGKPKKVALTACMHKLLVILNAMVKYKTLWNPRFV

SEQ ID NO: 417236 - protein, 347 aa, unidentified
MNFYTQQHKHYCGIDLHARAMYVCILDEQGTKLVHKNLPTTPEAFLRLIAPYREDLVVGVECMFTWYWLADLCSQEGIAFVLGHALYMKAIHGGKAKNDKIEAHKIAVLLRGGMFPQAYVYPSEMRATRDLLRRRCHLARKRAELLAHIHNPNSQYNLPEIGKRLANKSNREDVAEHFPDPSVRKAIEVDVALIDQYDQLLGEVELYLTRSAKAPDVQPFARLQSVPGIGQILALVILYEIQDIARFPRVQDFVSYCRLVKCAKESNGKRFGTSGKKIGNVHLRWAFAEAAVLFIRQSQPGKEYFAKLEHKHGKAKALTVLAHKLGRAVYYMLSREQAFDLKRFVTA

SEQ ID NO: 417237 - protein, 367 aa, unidentified
MKKVSTVAVKQSRKISEQKLTVGLDLGDRSSWYCVLDESGAVVLEQRLSTTPKAIDEVFGGMPRSRIALETGMHSPWVSRRLSELGNEVIVAHARNVRLIGESRRKDDRLDAQTLARLARIDPQLLCPVKHRSAKAQADLTVIRARAGLVRARTSLSNTARGLAKSYGERLRGCNVRNMNPEKAEALSPELQHALQPLLVGIESLSEQIRDSSERIERLADESYPQVAQLKQVKGVGTLIALTFLLTLEDPHRFQKSRDVGCYLGLQPGRRNSGQSEPQMHITKEGDPYLRTLLVQGAQHILGPFGVDCDLRRWGLKLAERGGRKGKKRAIVATARKLAVLLHHLWVSGDVYEPLHNSKRSAMETAA

SEQ ID NO: 417238 - protein, 372 aa, unidentified
MQEESEVYVGLDTSKLKISVAVAEAGRDRDVRFLGDIDSTPEAVERLVRKLAKRHRRMAFVYEAGPTGYGLQRQIAALGHDCAVVAPSLIPKRPGERVKTNRRDALTLAKLHRAGELTPVWLPDPGHEAMRELVRAREAAMEDLRAKRQHLQSFLLRHGRVYTGRAAWTKAHTRWLCEQQFEHPAQHPVLAEYRQAIADAETRLERLTRQVAELVPSWSMAPVIAAYQALRGVAFLTAVTFVAEIGDLRRFDNPRQLMAYLGLVPCERSTGERVRRGGITKTGNSRARRVLIEGAWTYRFRARMSRLLEERQSGLPKAVREIAWKAQLRLCGRYRRLMAKGKRQAVVTTAVAREMAAFLWAIAREVEPRLAG

SEQ ID NO: 417239 - protein, 376 aa, unidentified
MENDSTLYVGLDVHKDSITVAYAIEMGEVELFGKIGTMQIDVDRLCKKLQLKARQICFVYEAGSCGYGLYRRLVDKGFDCMVCAPSLIPRKPGDRVKTDRRDAIKLVRSLRAGDLSAVHVPTVEDEAFRDLARAWSAAREDLKAARCRLKSFLLAHGVHYLGRPNWGPSHRRWLSTFSFDSAWQQLAFNEHRRSIEDRLAQCERLELALREAVINWRFYPVVLALQAMRGINFTSAIGLVSELGDLTRFEHPRQLMAWIGVTPSEHSSGGKRRLGSITKTGNSYARKLLVESAWSYRHPARVSIDIQRRHEGLPKPIIDRAWDAQLRLCRRYRKLVARGKTPHVAIIAVARELAAFIWDVGRLGMTLATPYSEQAA

SEQ ID NO: 417240 - protein, 260 aa, unidentified
MRPLSIDCDAHKHYSQLEVQDANGQVLNRARLDHRPGVIASFFSRFPSGTPVAFESVGNWYWIADEIKAAGCLPLLTNPAKAKLMMGHVNKADNLDANGLATLLRIGTLPTVWLPPAALRDQRELPRTRMALCAMRTSLKNRIHSTLAKEALSPEDGAELFSKRGRAGLESSLSRLPQETARFPYAPQFSSYCGTIPRISSSGGKTRYGKMRSESNHSLMWAFIEAVIGAVARHLAESTVWILSKNEPYREPSRFSPRQG

SEQ ID NO: 417241 - protein, 339 aa, unidentified
MKLFVGIDLHGSNNVIVIRDETGHTHLRKRLKNELELVLNQLAPFREQVEAITVESTYNWYWLVDGLTDHGYPVKLANPVEIQQYNGIKHTNDMSDAEFLSELLRLGILPTGYICPKETRHLRDLLRKRLLINRQRVTHILSFQGTLQRNLPSFMKAQDIKKLEEGDLDGMFDDPHLSLSARKSIGIIQFLSKQLKEVEAVINRSVSKIDIHSDLLTVTGVGKTLAAAITLETAEISRFHTVGNYVSYCRLVNSSRISNGKKKGENNRKNGNKYLSWAYTEVAQFSRQWCPQAKRFYQRKLAKTNKMVAQRALAHKMARACYYVMKDHVPYDPVRAFGH

SEQ ID NO: 417242 - protein, 432 aa, unidentified
MRPNAGGIDVGATEIVVAVPADRDTDSVRSFPTFTENLHELADWLQQCRVDTVAMESTGVYWIPLFQILEARRIEVHLVNAQHVHHVPGRKSDVLDCQWLQYLHSVGLLKASFRPEQAVCEIRSLMRHRESLVEMSCVHVQHIHKSLDQMNLQIHHVISDITGVTGLAIVDAIVAGKTDPRELAKLRDHRIKASMETVTKSLVGDYRPEHIFTLKQSLTAYRYYLQLIADCDQEIQQRIQTFHSKNQEPTAPADITDTAMSTESSFDLHSHLERIFGVDLTLIPGFECLRIQTILSELGPDLSKFPTDDCFCSWLNLCPKDGSSAGRRIRATKVKTKNRVAQAFRFAAQSLHNNQSYLGDYYRSQRARHGAPKAIKNTAHKLARIFYHLVKIRQPYDETVFAKLELSNQKRRLRKLQSLAKQMGYSLVEVHA

SEQ ID NO: 417243 - protein, 367 aa, unidentified
MKAPQHTRAHQHSGMLQGKSPIQPWRCCMKLYTSFDLHSNNSFLGIKDENGKPVFRKKLPNEPERILNALRPYKNDIAGIVVESTYNWYWLVDLLKKEGYNVHLANTSAIQKYSGMKHTDDQDDAFWLCEMLRLNILPEGYIYPSEDRPIRDLLRKRMHLVHLRTSLIVSLQNILTRNNGFRLKTSDVKALKEDRVAPYLSDNEDLALAGSVSKKTIDFLTEQINEIERVVLAKVKLKASFTRLLTVFGIGKILALTIMLETGPITRFAKVGNYVSYCRKVASKWLSNEKIKGKGNKKSGNKYLAWAYSEAANCAVRSYTPARAYYQRKLQKSNMMVAYNAIAHKLARAAYYVIRDDVNFKPEKIFS

SEQ ID NO: 417244 - protein, 391 aa, unidentified
MIYVGIDVAKDKHDCFIINSDGEVLFRAFSIANNRNGFNDLYQKIESVMEDVTKVKVGLEATGHYSYNLLGYLIDKGLPTYVINPLHTNLYRKSLSLRQTKTDKVDARTIASMLMSDVNLKSYSDTSYHNEELKSLTRYRFDKVKERAKLKTSVSRLVCILFPELEKLVPTLHMASVYALLSEFPSAKHVATAHLTRLTNLLSKSSKGRYGKDTAIAFRNAARTSIGSNMPAKSLELKHTIKLIQELTSEIDEIENEIKIIMDEINSPILSIPGINYRMGAMIIAEIGDFNRFDSPDKILAYAGFSPSTYQSGQLDGAYAHMEKRGSRYLRYALYNATKYVCHWDPTFTAYLAKKRAEGKHYNVAISHAVKKLVRVIYHLEKTNQQYIKAA

SEQ ID NO: 417245 - protein, 432 aa, unidentified
MKAIIERCAGIDVGKKFITACTLIGASDAEPTIEKRLFGTFNEDLKTLRCWLLERGCTHVVMESTGPYWKPIFNILEGALVVILANGEQVKARRGHKTDWKDCAGLADLLRHGMVRPSFIPPRPVRELRDLTRRRGRILGDASSERNRVQKILEDANVKLGSVLTDVFGASGQLMLEALLQGSSTAAEIAELARGTARKKIPAITDALRSHRMSDHHRMMIRLSLEHMAFLEQQLQQIDRDILCKISESGFERAFQLLQSIPGVQQDSAAVILAEIGPDVQAFPSAAHLSSWTGVCPGNHRSAGKEMNPHIGYGNRWLRPTLVECAWAASVKKGCFLKDRFWRLAAGNRKRALVAIAHALVILIYNALSSGEPYREQGVIEIDEAKRQRLIRHHIRRLGRLGVCFSSRMQDYVTVDLRRKRKSSLDLPTAQT

SEQ ID NO: 417246 - protein, 457 aa, unidentified
MSSEAVPWFETHSQEASHRGLYYRDCRGTKAACRIHQGRCEMEYAAYVGWDWADKEHELAIEDASSGRRSRKKVAGSPGALHEWAAEMRLEYGGRPIAVGIETSRGAVVAALMNYDHIVLYPLNPQSVAKFREALHPSGKKDDPVDAETALEIVAHHRHKFRPLEPADEKTRTLGLLSEQRWKLSKDLTRATNRLRANLKGYFPQALALVGDLATPMALHFLEKWPNLEKVQRARPQTVESFYRLHNSRSRTRIEERLALIHSARSLTDDPAMLSVGMTTTLSQALVIRALTDAIKMVDRQICDVLASHPEHELFRSFPGAGDVYVPRLIAIFGTDRSRFEAAEELQRLTGIAPVTKRTGGKNGTISVHRRIKRSKFLHQTIVEWAGHFSLNSEWGRAYHESQKEKGKSHWAALRALGFKLLRILFRCWKDNTLYDERHHQEELIRRGSPMAKRLAA

SEQ ID NO: 417247 - protein, 357 aa, unidentified
MLSSNVKYIGLDVHKEAIAVAVLDGAGKLVAESIIETKASTLLDFLHGQRGELHVTLEEGTWAAWLYDLLKPHVREVVVCNPRRNALLKEGSKSDKVDARKLAELLRSGMLRAVYHGENGLRALRELARTYQVVSKDLKRVMNRLKALYRSWGIPCTGTRVYSQRHREQWLKKIGEAGVRRRAELFYQQLDALQALRHTVRGELLAESRRHQAVKILRQIPFIGPLRAAQLVAVMQTPHRFRSKRQLWTYSGLAVETHDSSQYRFVDGQLQRSKKPQQVRGLNQNHNHAMKEIFKSAALSATRRAGPFQDLYEGLLAKGMKPELACLTLARKIAVTTLTLWKKGECFDARYVKPQAA

SEQ ID NO: 417248 - protein, 363 aa, unidentified
MQTCERAKTLFVGVDVHKDTHTAVGLSPFGEKLFELTIGNYPQDFAELAEKVKSMAETANLSPRIGLEDCHGFGQRLAEYLDNDGYMVTHVAPILVDHKRKKAAHPEKNDSLDAQGVAEVMIQKIDTLPVNKITQDSQIAKDIQELSLDREYQVKEQTRLKNQLHLLLHRIWNSEYREKFKDPFSVKGLRFWKKSVPKNTSSFLSKNMKRKVKKLEALRLEIKELESDMETLIEKSRHKIHTANGCGTVLAAMIIGEIGDISRFKSPSALAKYAGCAPREHSSGKTHRHRKTRSGNRRLNCAFHRLALSQISRMGNKKAKTYFLRKISEGKSKQQSLVCLRRQIVNIIWMIMKHKTNYNLQKS

SEQ ID NO: 417249 - protein, 339 aa, unidentified
MTLPILIGAPGHKAQKLLRSFGTTTRELESLRAWLIEHGVTHVGMESTGVYWKPVYAVLEGHVDLIVGNAHHIKNVPGRKTDVKDAEWIAQLVRHGLVAKSFVPPPAIRDLRELVRHRRTLIETRTAVRNRVLKLLEGANIKLSGVTSDVFGVSGMAMLEALAAGTNNASEMAGLARGRMRRKHAALEAALEGRMREHQCFLLGMQLRTLRTIDQDVDALDARIEAQLEPYQAQHRLLMQIPGVDWVMAAAIIAEIGTDMDVFATARRLAAWAGVAPGNYESAGKPKGAGTRRGNVFLKSALFAAASAAVRTKGSYYRDKYNRLRARRGPVRAIMAVAH

SEQ ID NO: 417250 - protein, 430 aa, unidentified
MGGRCAGVDWASEKHDVLVAEADGERVLEATFAHDERGLRALCATLVRLGVGLVAIERPDGLLVERLLDAGLRVLALHPNQVHAARPRFRTSGGKSDRFDAFVLCELARTDSHRFRVLVADSDATKALRALSRAREDLVQSRVELANQLRAELERFWPGAAIVFRDVDSAIALAFLERYPSPADARGLGEQRLASFLARHGYCGRKTPAALLEKLRGAPDGRAGEAETDARRQVVLAYVAALRPIIAKITELTSEIAHRIHAHPDGHVFLSFFRDPRSVVCAAALLAEIGDCRARYPTAEALAADAGMSPVAVESGKRKVACFRRGCDKRLRDATSTLADATRHWHPWAADRYATARARGQDHPRAIRTLGRAWCRVLWRCWQDGVAYDPARHRGLQQHITVTIAHPSRPGLDESATKRMAGTALTDHEG

SEQ ID NO: 417251 - protein, 315 aa, unidentified
MTTITNNLHIIGIDVSKNKLDIYWLPSNKQELILNDDKSILKWIRKQESHTIQNIILEPTGGYEKKLVRLLLKSKLPVHIGHPTRMYHFGQSKGLFAKTDKIDAKMLALYGEQEDPHANAAQIEERHLFKELATRQQQLKELLTIEKMRYKDHLSNASKKSIKRTIQYLEKEIKEIEKALEAEMCRSQENQEKVTRLETFKGVGKRTAHLLLAILPELGCLNRTKIAALVGVAPKNKDSGQKKGHRFIQGGRFYVRKILYMVALVAIRYNPKMKAYYENLRSKGKAAKVALTAIMRKTIITLNAMLRDHKDWQVC

SEQ ID NO: 417252 - protein, 286 aa, unidentified
MEPGECFVGIDVSKATLDVATRPAATPWTEAHTEAGITALVARLQSLKPTLIVLEATGGLELPLAGALGAAQLSVAVVNPRQVRDFAKATGQLAKTDRLDAAILAQFGHAVRPTARVLPDALTQELSALVARRRQLVEMLVAEKNRYSAAPPRVHAEIRRHIRWLETALARLDETLAGTIQRSPLWRANDQLLQSTPGIGPTMARTLLAELPELGTLNRKQVAALVGWRRSTGTAGPSAANARSGAAGHRSARHCSCVRWWPCVTTRSSRCSISGSAPPAKRRKWR

SEQ ID NO: 417253 - protein, 461 aa, unidentified
MRTDRKKNGKSKGVLPSALPAIQPKVGGIDVGSSQHWVCGPAKDDGKPNVRVFATTTDQLNQLADWLIEQGVESVAMESTYVYWIPIYELLESRGIRVLLVNARQLHNVPGRKTDFSDCQWLQLLHSCGLLRGSFRPGDSITRLRALQRQLGNLVEERTRCVQWMQKALDQMNVQVHRALADITGMTGMAIVRAIVDGERDPAKLAMNRHPRCKKPVEEIAKYLTGTWREEHLFNLASALRLFDALEAEIATYDARLMKELETLQPPERQQQAVPSHPNPAKEKAIKHRGEQPSRTALWRFAGVDLTRIDGISAGAAQVILTEVGFNMNAFPSEDHFVSWLRLCPRTPVSGGKPLKKRRNGQGANRIAGVLRMASTALQRSKTALGASFRRTARYKGGAVAVFATARQLARLVYRTLRFGHDYVDIGEKAYEQQFQLRRLAALTENAKQLGYSLVSDVAKV

SEQ ID NO: 417254 - protein, 292 aa, unidentified
MQKDNILFIGLDTHKEQTQVAYTLDYRTSEVIDLGRIQSTKAGFVKLARQLQSKYPHATLHFVYEAGPCGYWIYRLLTSLGHCCFLVAPSLIPKKPGERVKTDKRDAQKLARLLKNNDLDPIYVPEPEDEAVRDLSRAREAAMRDLNDAKHQLKSMLLRNNIRYTGTANWSLKHMRWLTEMVLPHPCQQIVLQEMIQTIDERTKRLKRLDNELTHQVKKWRYYPVVKAIQAMRGIRLLIATGVVCELGDLSRFDTPRKLMSYVGLTPSEHSSRDKRKLGSITKCGNGRVRNC

SEQ ID NO: 417255 - protein, 412 aa, unidentified
MQVIIERCCGLDVHQETVVACLLIGSPGVQPVKEVRTFRTVTRDLEALRDWLWAAGVTHVGMESTGVYWRPVYAVLEGHFELIVGNARHIRNVPGRKTDVKDSEWIADLVRHGLIAKSFVPPQPLREMRELLRYRRKLVESQAAERNRLLKLLETANIKLASVMSGGFGVSGRAMLRALIEGKASADAMAALAKGQLRRKCADLILALDGRIEEHHRFLLAMQLRRLEAIEADIAALDLRIGQRLEPYRTQHALLVQIPGVDWLVAAVLIAEVGVDMSVFLSVYHLAAWAGVCPGNNESAGRQKSGRARKGNIHLRTILVGAAISAARTKGSYLKDKFHRLKARRGTLRAALAIAHKILVSAYHMLAKNLAYRDLGEAYLDQIGQTRTVANLKRRLERLGYHVTLQPTPHTA

SEQ ID NO: 417256 - protein, 376 aa, unidentified
MEVIIERVCGMDVHKDNITACIMTPEGKEIQTFSTKTVFLIQLMDWIKSHGCTHVAMESTGVFWKPIVNLIEAEEMEFLVVNAQHMKAVPGRKTDVKDAEWIAQLLRHGLLKASFIPDRNQRELRELVRYRRSIIEERARQHNRIQKVLEGANIKLGSVVSDIMGVSSKDMLHAIAFGEDDPEKLANLARRSMKKKKDDLILALNGYVNPHQRMMLKTILTHIDFLTEQIKNLDQEVAQRVSVYQENIERLDSIPGIATRMAEQILAEIGTDVEKQFESAARLCSWAALVPGHNESAGKRKSTRGKKGNKYLKSALTEAAHSVGASKNYLGALYRRTVSAKRKKTSWNCRCPRHVKNFLLSFNKERNVCRLRRRLF

SEQ ID NO: 417257 - protein, 348 aa, unidentified
MRPFGEVVVSPFEVLHTDSEPSKLAGLLKSLDGETRVVMESTGYHHTPVAWLLHDAGLYVSVVNAMLVHDYGNNSLKRAKTDKKDAVKLANCGLDHWLTLPRYVPEEDTRLMLKTCYRKYQQYSKVQTMLKNNLISLLDIAFPDANRLFTSPPRADGSEKWVDFVAAFWHCECVCNLSEKAFTAKYHKWCRKHRYKFCEDKTLDIYSSACGHFGVIPKTDTSKLLVEQAVFQIRATSTTLAALKQEMQSLAASLPEYPVVMGMFGIGPALGPPLMAEIGDVRRFHSKKALVAVAGIDAPPYQFGQMDVRSHSISKRGSASLRRTLFLVMSVILQHAPMNEPVYQFMNK

SEQ ID NO: 417258 - protein, 422 aa, unidentified
MKMVAPRGALSEICPSGLRSGAGPVPLGGLIRSLPGPLQRNLAHHSPAARAHSPGRRRHDVSREGSTPQLAIVADQYDFVIGVDTHAASHTLALITAGTGAVGQQAQFPTSPSGLRRAVDWIERHTHQSPTPIVIDSAGSYGATFTEQLSATGLTVAEAPDVAATTRRRRGKSDAVDAVAMAQAARSLDINELCWPRAGGDRTALRVLTVAREQMSGERTRAVNALTALLRTVDPGIDARRALTTTTIATVAAWRTRSDNATLAVCRAEAIRLARRIRALDAELAANHTALHEAVTAQAPQLLALPGVGAVVAATVLLAWSHPGRVRSEAAFAALAGASPLPASSGNTTHYRLNRGGDRRLNRALYTVALVRMGHDPRTRDYVTRRTRERRTKREIMHSLKRYISRQLFRTLNGTHPATSTT

SEQ ID NO: 417259 - protein, 334 aa, unidentified
MGRQKVELGQIAFDVGASKHAFAAVIGSKRKKGELENAPEQILRFLKARRGACQRLQVIMEATGVYFLDLALLALQAGAEVMVINPKAAHHFAKARGQRNKTDAIDAAMLLDYLQRMPFKPWQAPQQALLELRQYGRHLNRLTDQRTRIKNQLHALEATVTSPRALREDLRESIADLDRRIERISGLAMAQVRADERLSAQLDAVDSVIGIGEATAISLLGELLVLPADLNSRACVCHAGLDVRVHQSGTSVALAPRLSKHGNKYVRRALYMPALVAIVHDPHARAFRDRLLARGKKKMQAVAAVMRKLLTAVWALIRNPARYDGSKLFAAVEA

SEQ ID NO: 417260 - protein, 464 aa, unidentified
MKTKLQNQKKKKTKINLASLPLLEPNAAGIDIAHREHWCAVPGDRCEKPVRPFGTFTEDLEKMADWLQECRITTVAMESTGVYWIAAFQVLERRGFQVLLVNARHVKNVSGRKSDVLDCQWLQRLHSYGLLNASFRPADAMCVLRSYLRYRDDLVCARGVQCQHMQKALQQMNVQLHQVLSDVTGLSGLRIIAAILAGERDAQKLAGLADRRVRASQATIQKALRGDYRTEHLFVLQSALDLYQTYDRKIHLCDEQIIAQMAQLPARVDCQEKPAPPRKPGRSRLQDMVAGTDLREELYRCTGVDLTAIEGIGVLTAQVVISEIGLDMTRWRSEKHFAPWVGLCPDNRISGGKVLSSHTRHVLNPVADALRIAAATLHKSKTALGAFYRRMRARLGAVSAITATAHKLARIIYRLLKHGELYVQQGLEAYENKYRQRLLHNLTKTAATFGFQLTPTPQPASSVS

SEQ ID NO: 417261 - protein, 315 aa, unidentified
MNNTVEIFVGIDVSKATLDVALWQPEQAWQVRNDIEGVGKLLERLQELRPNLVVIEATGGYEKLIVAELVLAKVAVSVVNPKRVRDFARSVGQLAKTDKIDARILAQFAQAVRPAPRPLRTEEEERLSALISRRRQIIDMLTAERNRLAVAYLATRKRMEKHIEWLQQELADIEADIDQFIQGTPLWKQKDELLRSVPGVGEVTAYTLLADLPELGTLDRQGIAALVGVAPLNKDSGIKRGKRRVFGGRETVRNVLYMAALSAARFNPTIKTFYDRLIKAGKEKKVAIVACMRKLLVILNSILRHQRPWQPNFHA

SEQ ID NO: 417262 - protein, 362 aa, unidentified
MSHGISRQTERTVGLDLGDKYTYLCVLDTETGELVEEGRLRTIPDDLRRRFDSEQRMKVAIEVGTHSTWVSRLLTECGHEVLIANPRKTRLIYGDKHKTDKLDAQKLARLARVDPELLYPIEHRGEESQAHLALIHSRDVLVRSRTQLINHVRGTVKSFGARLPKCSAESFHKKVADALPPELAEALEGVVATICSLTERIRDYERRIKRVCKESYPQETGLLQQVPGVGTLTSLTFVLTLEDPDRFEQSRAVGAYLGLVPAQEHSGQRDPQKRISKEGDKMLRRLLVSSAHYILGPFGPDSDLRRHGEKIASRGGKNAKKRAIVAVARKLSVLLHRLWVTGEAYEPLHNARLTGTLGEEVA

SEQ ID NO: 417263 - protein, 312 aa, unidentified
MEAKFVGIDVSKARLDVDCLPVSTSRQFSNDAGGITALVEWLLGSGVERIVVEATGGYEIAVASALAAAGLPVVVVNPKRVRDFAKAQGVLAKSDRLDARVLALFGERIAPPVRALPEAAQRDLTELLDRRHQLVTMRAQEQARLATVLPVARGDVEQHIAWLDQRIRKHETVLLKRLRANEIWDAKVKLLDSVPGIGPVNLFTLVGRLPELGTLNRQQIAALVGVAPFNDDSGKRRGQRYIRGGRAEVRCALYMATLSAKRWNPVIAQMFERLIAKGKPFKVAMTACMRKLLTILNAILKSTQPWENRLTT

SEQ ID NO: 417264 - protein, 351 aa, unidentified
MLIIGLDYHPSFQQIAFVDEETGECGEWRLGHANQEAENFYRDLKKRGVRVRVGMEATGHARWFEALMTELGFELWVGDPAQIKARRVRKQKTDRQDAQLLLKLLIEKRFPQVWVPSLENRDLRQLLWHRHRLVQMRTRVMNQLQAVALNEGVRRKKGLWSKSGRAQLESFLLAPWATRRRQDLLELLDRLNPNIAELSTAIEQEGKKQPAVVRLMTHPGVGPLTGLAFVLIIGPPERFRCGKQIGSYLGLIPCEDSSAGKQRLGHISKQGNSLLRFLLVEAAQIAVRDEPNWRRKFLHLAMRRGRKIAKVAMARKLGVRLYWMLRKEWNYEQLLKFGSHAGQLESGHGVK

SEQ ID NO: 417265 - protein, 369 aa, unidentified
MKKHRYIGLDVHKESISIAVAEAGRNGEVRDYGRVGGSLIALERTLRKLNQSGQVQLHCVYEAGPCGFVIYRRLKQLGIDCAVVAPSLVPRKPGERIKTNRRDAIKLARSHRAGELTAVHVPDARDEAIRDLCRARTDAVRDQRRSRQQLKALLLRLGYHYTGKSSWTEAHLRYLRELEMAHPAQKVVLEEYLIAISQAGERIGRLTGQIELHVASWRMKPAVEALMAMRGIQLLAATVLISELGDRRRFDHPRQLMTYLGLVSSEHSTGNVRHQGPITKCGNTHARWFLIECAQHYALPPKISKELTKRQEHQPQRIKELSWKAQIRLHHRFWMLMQRGICRQIAVVAVARELCGFIWALWREVPAVT

SEQ ID NO: 417266 - protein, 372 aa, unidentified
MKQNILHVGLDVDDTQYHGAAFNKETGEVIDFNCRPTLKGLLQQLDRMARHFSGCTIKLCYEASYVGYCLQRDLISNGVHCDIVSPSSIPSPRGKAIKTDRIDAGYLAQFYANGLLTIVQPPDAEQEQDRDLLRSRQKLLQQQTQLRKHLQSVLRRNGLHYKAETGNKSHWTKHHYCWLARTIDGLSGSLKVNLELLLRQLKGLNEILAEYGQQVEVLASTPRYQQAVQSLTCYKGIKNIFALTMITEIGDVKRFPHPRQLVSWIGMDIREYSSGGKHNRFGITKHGNRYIRTAFVEANQRGYRTTKIGQDLKARRKDTAPELINIADRCLRRLSKKGNHLLLAGKHPNKVKVACAREMVGFVWESLNKVAA

SEQ ID NO: 417267 - protein, 425 aa, unidentified
MNYKQNEKINQVKESTLVVGIDIGSTTQYARAFDWRGIELGKVFTFSNSREGFESFKAWMQHLQDKYKKLDAIVGIEPTGHYWFDLGAYLEDEGILLVMVNPYAVKQTKELDDNNPNKNDRKDPKVIAKLVTEGRYSAPYTPDGVYADLRIMVTNRKRLIREMTQIKNRFARWFAIYFPEYTDVFGDYEAQSSMLLLKKVCTPEAIVELGAEKINQIWRDAKLRAVGMKRATTLCETAKRSIGLKKGSSAAQYEMKLLLEDYEYKKAQLDAVMEEIEKLCRKIPESEQMLAIKGIGVITVAGFLAEVGDVRRFESPRQIQKLAGLSLRENSSGKHKGQTTISKRGRSKLRAVLFNAAIPLIATNPEFKSLHEYYTTRANNPLKKKQSVIAISCKLIRVFYAILANGVTYDAQKMLSDIHRQPQAA

SEQ ID NO: 417268 - protein, 416 aa, unidentified
MTYRIAAIDIHKKVLMVVVAIAAAEVADAAGEALEFICQRFGTGAEERRRLVRWLQQQEVTEVVMESTAQYWKPIWLELEPHFQKLHLAQAQSNRAPRGRKHDFKDAKRLARRLLAGELSLSYVPDPEQRLWRVMTRTKQQLVRERGAIRNRVEALLEEMQIQLDSVISDLLGVSGRRILKALSEGETDPVKLAQLGDERLKCSQAELADALRGHPTPMHISVLKLHWEHVELMDRQIADLDRLVAQALKPYQEAVLRLAEVSGFGVDSAQQLIAEVGVLADAFPSAGEFSSWVGTCPGSNVTAEENHSSRSPKGNHFARRILTQAANAAIKKKGSHFQNVFRRFVFKLGYQGAVWVVAHRLTRLVWLILNKQVRFVEKGDETSPKAKQRRAQKLAQSLRRLGYEVILKPMQPAQA

SEQ ID NO: 417269 - protein, 427 aa, unidentified
MPHRIAGIDVHKRMLAVVVSDVEVADEYQFERRQLGSNPAQLRALAEWLLEQQVQEVVMESTAQYWQPVWGALEQYWKPPCQKSEGARPRSGSLPLAQAQSNRARRGRKRDFLDAERLVRRFVANELVLSFVPDPEQRLWRTLMRRKYQMTRNRVQLQNQLEALLEEAHLKLSSLVSDLLGASARRMLRALADGETNAVALAALADYRLQATPAQLQDALGACAGLDPTYRRLLSMALEELQLLEKQIGQLEQEMADRLRPHQDAVQRLAEVPGLGADSAQQILAEVGATAATFPSEGDLASWVGACPGDEESAGRSYSHRSPKGNRQMRRLLNPAANAAVKLKGSIFALLYRRYVTRLGHNVTIGIIAHRLCRLIWKILHQGIRYEERGPAASEQSKRQRARRMIRELRSLGYRVELPNPQPAVPA

SEQ ID NO: 417270 - protein, 366 aa, unidentified
MNHFIPKAQKLYCGIDLHSRKSYLHILDEEGSRIKSGEIDTTGQSFRTFFKELIGQNEISAAIEIGSLTFRYCDVLQSMGISIHVVNTLKNAYISKSMKKTDKEDARRLAIQLWKDILPEPVHIPDASEYQLRTLVSHRASLVKSQIRLINRVRYRLRDYEIQLPARTLKKTGKWEMILEGIFPLELPLLHLQVSQMTEQFRILENQIRETEKQMLCQIHQDPEFDTLYALLLTIPGMGMITAAAVLALIGHGIERFGSARKLVSYFGQCPRVRESGGKSLGRSGITKQGNSWVRGYFTQVAIGALRSKKEDAVPLHDWYDRIRRRKGWRVARVALSRKMAAISYGVLKHKRPYDPSLVTWEEKGA

SEQ ID NO: 417271 - protein, 410 aa, unidentified
MVKENFIYVGIDLHKETHTAVMIDCYNQKLGEITFPNRPAAFPKLVTKVKKCNTDGKEVVYGLENAHGYGRALAVWLIDKGYLVKDVNTAISHRQAKHRGAMYRKSDSDDAKAIALATLNMLDKLPDACPNDAYWSLGQLVHRRDNIMKQRTRLVNQLHEQLCIAYPSYKQFFNDISRPTALYFWEHYPSRKYLKGKSVEDLRAELVPVSHNKCSTKTCEKILDAVASDKVKNNAYQDARDMVTLSIVSDLQHYDSQLTEVDKMLEQMYKMLGCTLTTIPGVNVITAVKILAEIGDIKRFSNANKLAQFAGIAPLHLSSSGKGKDVATKQGNRRLQATIYFLAIQMVQISSKGTPRNPVVRAYYEKRKAEGKTSQQALICISRRLISVIYGMLKNGTEYRMPVVENAGEK

SEQ ID NO: 417272 - protein, 398 aa, unidentified
MKTCGLDVHKDTIFCAIYNGKDYSEVKEYDATTPKIRQMGEYLSSEGVNNVAMESTSTYWVPVWDLLLEMGFELMLVNPFLIKQMPGRKSDIKDAQWIACLLHKGMLRGSMIPSPVIQELRTYCRKYTKLQQQKTRSLQKMDRVMVMCGFRIGSCMSNLGTKSVINIITSLINGESNPDALSKLVYGSTANKKSGKLREALTGNLKEHYRQQLEWDKQEYDLFEKQTQQCLMQMRGICQEHYSKEIELIKSIPGVSEISAMMIIAETGGDMSVFENSGKLSGWAGLRPRNDESAGKYKSTATTKGNKYLRSVLVQVSWAASRIKNGWFKEKFNRLSMRKSRKKALIAIARKLLTVTWNVLYYKTNYNPQLTHIYDPIKVEAKMVYHQLEMERMQKLLK

SEQ ID NO: 417273 - protein, 379 aa, unidentified
MIENITHVALDDHKKRHQVAVLLPGMDREEAITWRIENTRAGIRKMVRKVLKMAPGDVRFCYEAGPNGYVLLRQISEFDRVSCVVVAPSKTPRRPGERVKTDLRDARKLVGLFRAGELQSIVPPLEEEEAVRDLCRCRRTAQMRVTASRHHLDKFLMRNGYIYRDGKNWTRRYWEWLRSLKFDDWRRERTFQAYLFGIEQDEDRVKRLDLEIVQAAEEEPYRTLVGFVRCFRGLDTLSAMILTSELYAIGRFTTAPSLMGFVGMVPSEDTTGWNPHRGPITKAGNGHARRILVEAAKHYRHPARVSKALTQRRKGQPDWVIAIADKAQTRLHQKYWKLVMGKGKHPNVAAIAVARELVGFIWAVLIQAATTANIEELVA

SEQ ID NO: 417274 - protein, 323 aa, unidentified
MYVGLDVHKRVCHGTVIDEEGHVVKRERFSNDPDSLKSFMKDIDEAKVVMESGYCWQPIYDRLEEAGYDVRLAHPLKVKAIAEAKIKTDEIDSETLAHLLRADLLPESYVPPKEIRDLRELVKRRAFLVGMRTRLKNRIHAELAKRDIDPGSPLFTRRGRALLACLGIDAVSQLLPVMETLDRQIGEISAVLKRAAAEDGRARILTTIPGVGYYTALLLVAEIGDVNRFPDAERLCSYAGLVPSVRRSGGSTVYGHITKEGSRWMRWALTEAVHSHLRYDTELSRFHKRLALRKPGQVATTATARKMLKAIYWMLKAREPFQP

SEQ ID NO: 417275 - protein, 411 aa, unidentified
MEPKLVVAGIDVHKRMLAVVVVDEDNPEQALDLRKFGSSASELKHLSAWLMAHGVTQVVMESTAQYWRPVWLALEKDFALHLAQAQSNAGPGGRKSDYVDALRLARRFLAAELRLSFVPDGEQRSWRCLSRSKYQKRRRRVQLQNQIEALLEEGQIKLSSVVTDLLGGTGYRILRALARGESDPQELIKLAANNLKASQEQLADSLSGPMQPRHRKVLTMQLEELDLIDKHIAELNQQLQEALQDHQQAVLRLCEMPGLKQDAALQIIAEIGPDAAVFETPEQMASWIGVCPGREESAGESKSNRSPKGNRAMRRLLNQIAWGAARTKDCFFNELYHRLVYKLGVHKAIWAVAHRIAKLIWKVLHERVKYIERGPLALDPVAMKRRVTRLSRQMRKLGYTLEVKPIAVATN

SEQ ID NO: 417276 - protein, 341 aa, unidentified
MGEVITIGLDLAKSVFQAHGADEAGSVVFRKKLRRGQVLAFFAGQPRCLVAMEACAGAHYWAREIAAIGHQTRLIAPAYVKPFVKRQKNDMADAEAICEAAQRPTMRFVTPKSAEAQAAGTVFRARDLLVRQRTQLINALRGHLAEYGMVVRQGAENVDKLIELVVDPTSDLPEEARSTLQVLTQTLAFLQTRIAVLDVEIARRAKTNALVKRLMTIPGVGPVVATALVALAPAPQTFRRGRDFAAWLGLTPLQHSSGGKERLGRTSKMGERTLRRLLIIGASSAAKAAAIKGAPTDSWLGRMLSRKPRMLVVVALANKMARIAWALMAHGGLYKAPAAAA

SEQ ID NO: 417277 - protein, 443 aa, unidentified
MPDVTSVTQPDPEWAAFAAIDWADKKHAWRLVPAGSSRHEQGALENTPEAVDVWARGLAVRFGGLPIAVCLEQSRGPLVYTLSKYPHLVLFPVHPTTAANYRKVFSPSGAKDDPRDAASLLDLLLTHRSQLRRWQPETVINRHLQRLVEQRRVMVDEKTRQSNRLTACLKMHFPQILQWFDDLAAPVVGDLLKRWPSLQELQGAHPGTLKKFFLQHNSRSLKRITERIEAIYQAVPVTNDEAVLRSEATVALGQLALLKTLCENIDRLDQQIQQLVAVHPDAPLFASLPGAGAVMIPRLMVAFGSNRERYQSAYEMQCYSGIAPITEASGKHEWIHFRWACPKFLRQTFHEYAFLSIRDSEWAKAFYQHKRDDDVAHPAAVRALAYKWIRIIFRCWKDGKPYDEKLYMESKQKRSHPLGVLSTTLEWKDVAGFKTLSIKPLTE

SEQ ID NO: 417278 - protein, 360 aa, unidentified
MRHLSAKLLSVRISSEWEPSMGEVTTIGLDLAKHVFQVHGVDAEGTTVLRKQLRRGQLLAFFSRLPSCLVGLEACATAHYWARELGALGHEVRLMPAQYVKAYVKRNKNDAADAAAICEAVRRPTMRFVPAKTADQQAAVLLHRGRERLVRQRTALVNALRGHLAEFGVVAPQGLRNVGKLIAIVRDEGDARLPDMARQVLQVLATQIEQLETAVAAVEKQLMAWHKSNPVSQRLATIPGIGPIIATAIAATVVEPTAFRSGREFAAWLGLVPRQNSTGGKIRLGGISKRGNRYLRRLLINGASANLLRSKATNADPWVIGLRRRRPSLVVAVALANKTARIAWAVMHRQEDYRQLAAAA

SEQ ID NO: 417279 - protein, 355 aa, unidentified
MTDKHQKIIIGIDTHKDFHHVAVISALGESLTDRKFDATPDGYTALIAWVTGQGDVLRAGVEGTGSYGAALTKRLRTAGITVIDILAPDKQERRLRGKTDQIDAYSAARAVLARRARTVPKIRDGEVEAMRVLRTTRKMVVKQRTETMNQLHSLLVSAPENLRAKLAGLKAKDIAKASARLRDLATDDVVTAATKDAAKSLGRRFLELTIESDRLEDRIDALVTAYAPELLAVYGVGPDVAATLLTVAGENVDRIGTESALAHLAGTAPIPASSGKTNRHRLNRGGNRQGNAAFHRIVLVRMVRHPETRAYVEKTIARGKTKRDTMRLLKRYLAREIFPILVAVQQRHAATQLAA

SEQ ID NO: 417280 - protein, 343 aa, unidentified
MKRVYYIGLDIHKRIIAYCIKTNTGRLYSQGKIEASRSSLLEWVKGLPGPWVGAMEATIFTGWVYDFLKPHAVDLKVAHPEMLKAITAAKKKNDRADAERIVDLLRVDLLPECYMLPEEIRELRRILRYRNHIVRTAVKMQNKMTGLLMEVGVTYSKKRIHGKKYFREFLERVEEIPPSVKELLKLSRSNYEIFSSCQKRLVEALRHNDLIRDRVEGLMGIRGIGELTALTWVLEVGEPGRFGSIRQAVSYCGLCSAQRESAGKEQRGPISKKRNKHLQTILIEAAKLAPRWNRPLAILHERELQKGNPNRATLAVARKLVAYMLTVDKQQTGLQLLGERQAA

SEQ ID NO: 417281 - protein, 356 aa, unidentified
MNRTSDSVVSSSHLQDRVKTISITPVITSTPVTTSVAPVTPPVFVGIDIAKDKFDVHVRPFSKTWTLTNDLKGFEQLVVHLNQFPTLQLLVVEASGGYERTLVSQLIEANIPVAVVNPRQARDFAKGLGHRAKTDPMDASDLAQFAELVKPKLTHKTPENQQQLQDLVTRRRQIIHLQTIEKNRQHTTHGVIPNKTIKETLALFDKQLATLEKAIAELFDASDDWTAKTAILTSVPGVGKITAQQLLAEISELGTVKRTQIAALGGLAPYNHDSGKLKGRRCISGGRQSVRTALYMAALTARRFNPVFIAFAKRLKQAGKPYLVIQVACMRKLLVTLNAMLKSRTDWNHTLVQESS

SEQ ID NO: 417282 - protein, 318 aa, unidentified
MENYEQKSYIGIDVSKMFLDVYVFPFKKHMRFKNTPKEVDKLTVKLKLFSPALIAMEATGGYEKLVSKTLTRSQLPTAVVNPRRVRDFAKAKGILAKTDKIDAAVIALFAEKMQPKINIVYDENQEKLQGINTRRRQLVDMLTMEKNRLDVVNKELKKSLNRIIKVLQKELDEINNALEKAIKNDPTAEQKSKLLKTIKGVGDVVSATVIADLPELGTLSAKEITALVGLAPYNRDSGTFRGKRTIWGGRGSVRTMLYMATLASIRRNIQLKEFYTRLCHSGKAKKVAMVACMRKLLIVMNSMLKNNEPWRYSDVVLN

SEQ ID NO: 417283 - protein, 314 aa, unidentified
MSACFIGIDVSKAALDVSVRPSGATLRLPNSPAGVRRLVALCTRLEPVRVVADATGGLERLVVDALRAAAQPIVVAGPDRVRHFARALGVRAKTDRVDAGVLALYGERVQPDVRPGPGADARRLAALAARRRQLTAMLAAEKNRLAMVPSAVRADVRVHVRWLERRIAHLDTEIARAVAANPDQAEASARLQTVPGVGPVVAHTLAAELPELGHLGRRQIAALVGLAPFPRDSGLLRGTRAIWGGRATVRTVLYLAAMSGVRCNATLRTFYTRLVAAGKPKKAALTAVAHKLLTILNTMARAGTTWSPPTHTIA

SEQ ID NO: 417284 - protein, 335 aa, unidentified
MYSHFIGVDISKDTLDIAVVSPANALLHEQRIANKKTAIVAFFKQLARRVPGFSPATALCCLEHTGLYNRPLLEAVPVLALPTWVEHAPQLTASTGLSRGKTDQADARRIAAYAARFVDRARLWTAPRPVLAELDRLSARRARLVKVEKMLQTPLTSSETFFSAAEQRAEERGCAASLQALAADLAAVDKAIQALIAADEVLARHYERITSVPGVGPVTAVEVLLTTNEFRTSTDPKQYACYAGVVPFERSSGQRKGRPGVSHRANKRVKTLLHLAALAAVRYCQQTKAYYARKVAEGKNKMLVLNNVRNKLVHRIFACVQQDRNYDKNYAPALV

SEQ ID NO: 417285 - protein, 328 aa, unidentified
MYHLGIDVAKNKLDGCLLNPENDQRRAKTVPNTPAGFTELRDWRIRQKVPDLSQVHLILEATGVYHEAATLWFIEAGAGVSVVNPAQVKAFGQGVAVRTKTDARDSPVLARYGALVNPPRWQPPAPEIRELNALIARLDAVEADLRREQNRLEKTAAVPAPATVLDSLQQHIAFLRQEQTRVQTAIHDHIERHPRLKQDHDLLGSIPAVGEKTAQRLLAVLHGHDFTSADQVTAFLGLVPIEGQSGSSLHRRPRLSKAGAPRIRAALYMAAVVATRHNPHIQALYQRLLARGKAKIAALGAAMRKLVQLAFGVLKHQQPYQANWTLAP

SEQ ID NO: 417286 - protein, 366 aa, unidentified
MRSVPQDNQLVYVGLDVHKDSISAGVLTPGREVPEVDRFFADEVCLRRFLEPLGDPKRLRVCYEAGPTGFELARLLQALRVPCAVIAPSLIPRAPGDRIKTDRRDARRLVRLFAAGQLTRIHVPSRQEEAVRDLCRARTDMVIDRNRARHRLSKFLLRHGEVYRGGTEWTDRHDRWLTGIRFQDPALQTTFRHYRGVIEARTAELRAVEGDLIGWWARDPFAEAVHRLGAYRGITHLGALSIAAEVTDWRRFPRAETFMGFCGLVPSEYSSGTHTWRGRITGTGNTQLRTHFVESAWSYRHRPAIGRDMAKRHDGVDPEVLARAWHAQQRLCTKFRRLAARKNAQKLVAVAVARELAGFCWAEMTA

SEQ ID NO: 417287 - protein, 410 aa, unidentified
MRTVVERCCGLDVHQAVIVACLLVGKPGQKVKKDLRSFPTTTAGLLALRDWLDDAGCTHVAMESTGVYWRPVYELLEDAFEVVVGNAQRIKNVPGRKTDVKDCEWIADLARHGLIAPSFVPPRPLRILRDLMRFRRSLIEARTNCRNRILKVLESANIKLASVASDVFGVSGTAMLEALVEGSRTPAEIANLARGRLRKKLVRLELALHGSLNDDHRFMLDQLLRSLEQEDQRITATEDLIAQKLEPYQEEHGLLTTIPGVDWAVAATMIAEHGVDMTPFASPARFGAWSGTAPGNNESAGQHRHAPARKGNPYLKTALYTAAVSASRTSNTYLADKYHRIKARRGPGRAAGAVAHKIAIAAFHILTTHKPYHDLGGDYLDKRTQRRTKQRLIQRLERMGYNVVLQPKAA

SEQ ID NO: 417288 - protein, 407 aa, unidentified
MEYYVGLDWASTAHAACVIDGEGTILAEIEIQHTAEGLRQLLARLARTAPPQQLPVAIERPSGLVVDTLVDAGHPVVPIHPNQLKACRPRYRAAGGKSDPGDAYILADVLRTDGHRLRPLRPLSDEVRALRALVRTRDDLIAERVGFANQLRALLDSFWPGAAALFADIDSPIALAFLERYPTPARAHNLGPKRLAAFLARNAYSGRRDPAELIARLRSAPRGLAGPLEEQAKGEAVLDLAGVLSTLVARVRRLTCAVEHAVAQLPTGRLVMSFPRAGKVNAAQILAELGDDPQRFPSEDLLAAEAGVAPVTHASGKSRGVSFRWACNKRLRNAITTWANNSRHDCPWAHQVYSRARLRGCDHPHATRILARAWIRVLWRCWHDARPYLPERHGAARQLLQTPQHAA

SEQ ID NO: 417289 - protein, 432 aa, unidentified
MEEVTDEPLYRDRVCGIDIGKAEMYATIRVPSEANPARRAQETRGFATTRRGVLALADWLRCWQVPAVVMEATGDYWKPVLYRLEAEGLECVLADARQVKNLPGRPKRDPSDSRWLASCFERGSVTSCFVATPEFRIIRLHTRYRRDLTEDRTREKNRAEKLLESAAVKLSSVVTDLHGVTGRDIMDHLIAGERDPKALAQLARARARRKIAELEQALEGAEFFSPEHAALLKAMLERIDWINDEIARLSLVIERLLAPYEEQLQQAESMPGWGRRSAEDALAETGTDMTRFPTPAHLASWAGRTPLDHQSGKRAGPSKRKKGNRYLGAITGETAVAAGKTDTREGARYRKLARSRGKAKACVAVGNTQMRVYHKLISTPGARYQDLGPGYHEQQRARSRQVSHHVGKLSDLGYKVPLAPLDTETGELTTRS

SEQ ID NO: 417290 - protein, 345 aa, unidentified
MESMYYIGLDVHKKTISYCVKDGSGQIHAEGAIPATRADLDLWMKTLPQPWTAAMEATLFTGWIYDHLLPHAAALKVAHPLMLRAIAAAKKKNDRVDAHKIADCLRCDFLPECYMVSTAIRERRRTLRYRNLLVRQAVQLKNKISGLLMEAGVSYNKQKLHKVGYFRELLATNQEIGEGLRPLLRICRETLVRLQKTESALVRSLEHDPLLAERVERLMTIPAVGPITALTWVLEIGDVQRFSSIKKAISYCGLCGAEKSSANMIQRTPLSKQRNKHLQSVLIEAAKLAPRRSSGLALVYEQERQKGNANRATLAVARKLVAYLVAVDRSQREFLVVKNQNRTAA

SEQ ID NO: 417291 - protein, 434 aa, unidentified
MPAADLDSVTTVWSALMAEVMIGIDPHKSSHTAVAIGSGEQRLGELQVQACLAQADQLLGWAAAWPERAWAVEGAAGLGHLLAQQLVAAGEQVLDVPPKLAARVRLLQAGDTNKNDPNDAFSVAVAALRSPAKRPVLAEDHAAVLKVWAKRHRGLARLRNQATGRLHAVLCDLVPGGVRKEITAGQAARVLERVTPAGAVARARCELAAEFLTDIRRLDAQRRDTGKKLAAAVKASHTSLTGIFGVGPVIAGTVIGDVRQVFRFGSRDHFAAYNGTAPAEVSSGGRKVYRLSLRGNRRLNHAIHMAAVTQIRHTHSQGRAYYERKLAEGKTHKEALRALKRRISDAIYAALVADARQAAAICPNGPGGQPGNHSVSRAASSHPARRLFGQATPGPATTLRPATTTGPAPSQPNRALRRRAKNSPAGSKKPKTTT

SEQ ID NO: 417292 - protein, 391 aa, unidentified
MLICGIDIGKFRHEACIINETGRQLAKTLSFTNTVDGGEKLLEYFKQNNPDNQVIVVGMEATGHYYLSLYCFLFDQGYQVHAINPIQSDAIRNLFLRKTKNDAKDSFLIAETIRIGRFSSTPLADEDILSMRQLCRHRIDLVDYIADQKRKIIGVMDRVFPEYQHMFSDMFGKTSTELLHKAVTPEELLAIDTIELCELLKKHSRGRFGEAKAEELRSAAKRSFGITIGTSAFAMQLRQLLEIIALLEKQLLELEEEITQYLRKMDTYITTCPGIGDVLGAIILSEIGDISRFSQPKNLVAFVGVDPSVSQSGEFIGTQSKMSKRGSPHLRRAIFLAANVAAFRDPVLSAYYQKKRAEGKHHYTAIGAVSRKLICIIYAVLRDNKPYVPNY

SEQ ID NO: 417293 - protein, 430 aa, unidentified
MKSNTQNAKIEAITEKTLVLGIDVGSETHYARAFDYRGIEYSKKPFKFSNTEVGFATFKEWILDLKERHEKDKVVPGMEPTGHYWFNLGKFLQDNEMKPVLVNPHHVKKSKELDDNNPTKNDRKDPKVIAGLVREGRYMIPYLPDGVYADLRTASNIRFQLQAELTRIQNRISCWFNIYFPEYKTVYGKPDAKSGMLILKAAPLPEDILTLGIDGVNQIWRDAKLRAVGKARAKTLIEAAEHSIGSKEGTMSARMEIRMLLEDYESKNMRLQEVMVLIEELVKEIPMAEKLLEIKGVGIRTVSGFLAEVGDISRFNNPKKLQKLAGLALVENSSGKHKGKTTISRRGRKRLRYLLFEVAMSLVAKNPEFRELHNYYTTRRLNPLKKMQSLMAIAAKLIRVFYAMLTKGVDYDPKKMISDIKRPTVYLQAA

SEQ ID NO: 417294 - protein, 340 aa, unidentified
MTVMIGIDPHKLSHAACAIDDNEHELAQLSVRAGQRQLGQLLGWAQPFVPRRWAIESAGGLGYLLAQQLIGAGECVVDVPATLSSRVRLLGTGRSNKNDLNDAHAVAIAALRAPSLATVRREDHVTVLRLLAKAHLDTGRARSRACCRLHAFVRELIPGGIRKEVVVSQAETILAAVEPTGAAQQQRLELAHELLDEIRTLDTRLKASRTRITNAVVASATTVTDLYGVGPIIAAIAIGYSGDVRRFPTAGHFASYNGTAPIELSSAGRTVHRLSRRGNRTLNHAIHMIVVTQIRNPDSEGRHYYDAKVAAGKTKREAMRALKRRISDRVYRHLVTDARR

SEQ ID NO: 417295 - protein, 325 aa, unidentified
MSDPLHSIGIDVCKRFLDIHVCPTGKCWRVPNSIVGLLSVQSQFPEPDGVKRVVLESTGGYEREAALWLSQAGYPVGVINARQGRNFARAMNQQAKTDKVDAQVLALFGDKITPAVRPLASEAQQQLDDLVTRRRQLVDILTAERNRMALLRGKAQANVEGHIEWLTEQIKELDGEIEAQIQACQAWRHTQELVLSVPGVGKVMASTLVSALPELGKLSHKQIAALVGVAPFNDDSGQMRGKRRVSGGRANVRQLLFMSAMVAVRYNPVLKEFYSRLLQRGKEKKVALVAYMHKLLTTLNAIVKQGKAWVSPIAEAETEKVALSA

SEQ ID NO: 417296 - protein, 341 aa, unidentified
MSKVTVYVGLDYHKDSIQVCVMDQSAKVLANRSCPNDVEVLRLLVVPLGDHVRAAIEACTGAAELADELVTRHGWDLDLAHPGYVHRMKQSPDKSDYSDAKMLADLVRVGYLPKVWLAPQDVRQLRTLVRYRQQLVNERRAVKLRITALLREARLAEPKLRRWGRPWREWLAETAGLGSEARFVVHCHLSNLCRLDDQIVQVELRLAAVTADDPVVKQLVALRGVGMVTAWALRAEIGRFDRFRTGKQLARYCGLSPRNASSGQRQADAGLIKAGSELLRATLIEAAHRLIRFDPRWGGLATSLRAAGKPACVVVAAVANRWVRWLFHQVEGGSITLKTAV

SEQ ID NO: 417297 - protein, 358 aa, unidentified
MAVIEGVCRIVGGVDTHKDLHVAAIVDEQDRIIGTRSFATTRQGYRQMLAWMRSLGELQRIGVESTGSYGAGLLRFMQQANVAVLEVTTPDKQDRRRRGKNDDLDAQNAPHAAFAGQRTVTPRSRDGMIESLRVLKACRKTAVSARRIALQMIHNTIVCAPDGLRDQLRSLTRMQLVRTLASWRPDLTAYRDLDSAYRIGLKSLARRYLELHDEIADLDAMIAAIVDELAPNLVARNSIGHTGAAQLLLTAGDNPERLRSEASFASLCGVSPVPASSGKTVRHRLNRGGDRAANSALHIIAIGRLRTDQRTKDYVARRLAEGHSKLDAIRALKRYLAREVFTLIMQRQKEINATRIAA

SEQ ID NO: 417298 - protein, 283 aa, unidentified
MFIIGCDYHPGFQQIACVDTDTGELSEHRLAHREEAEAFYRVLKQRNLSARVGMESSGHSRWFERLLQELGFELWIGDPAEIRSKRVRKQKTDRQDAQLLLRLMLENRFPRIWVPDAENRDLRQLLWHRHRLVQMRTRVMNQLHVVPLNEGLRRKKALWRPAGRKELESIALAPWASRRRQDLLDLLDQLTPKIQDLTHALEEEVEKRPVTRLLMTHPGVGPLTALAYELVIGTPERFHCGKQLASYIGLVPTEESSGDRRRQSAGVAQQVLSSRHAPRAEDR

SEQ ID NO: 417299 - protein, 405 aa, unidentified
MAIVFGIDVSKATSNVAVINDDTTVWQSKINNDWFGFQELLKHLQEYREPQIVFEATGVYSQRLRRFLDDHQYRYSQLNPLAAKKQLDGLRTRKTDKNDALHLAQTQLIFKRRLTYYQEPVYRDLMNLSRFYQEVNSDLVREKNRLHRSVQLTFPELEQLLSKPTGKMYWTIVQLYPHADCLNEQTPEDVYEQISSVVSHHGKAALKAIATKLLNLAKASYPAESIDSPMLEQTRYHAKQVTEREAHKDQIINQMVQLAKGLPEFEILMSIPGFAEKTVVRLIGELGDIRRFGSSNKLNAFVGIDLRHYESGNYIASDQISKRGNHIARAVLYRAITNIFSAAKTKPNHINDFYQKRKKQLPVVNGKTVGSKKVAVAAMSRLLRTIYHLVTTSQLYQYGVQRQPI

SEQ ID NO: 417300 - protein, 416 aa, unidentified
MSGKREIACGVDVHNKFIVATILSSDGLRLQERFDTNLEELLKFKNWIKENGCHKVALESTGNYWLPIYHVLEGSVNFILANAYQIKHIPGRKTDSLDSEWIAEICLKNLISPSRIFTKDHRELRSLTRARESLIKVRTKIKNRVTHELEAACIKLSSVIADVFGKSGRHIVDGLLSGMDLEKILESIPSRRVRKNKEEIRGIIQANLSSSQIFLLRSHLNTIDAVTKQIEEIDAKISDQIFLRNEDMKIALSMPGMGFVSASTILAEIGDFRDFSSANKLAAYCGLVPSVYQSAGKLINGHITKHGSPHIRRIIVEVAHAIILTKRISKLKKFFLRIKARRGAKIGIVALARKVLCILYHLLVRRELYQDDLLGKPRCIKNPRLHSTAAMDLDEMIRTIMKAGYEVRKNKCLESG

SEQ ID NO: 417301 - protein, 338 aa, unidentified
MKSVARIGLDIAKSKFQVHGVNAHGTAVLRKQLSRGEVLRFFAQVPVCLVGIEACAGSHYWARELQRLGHDARLMAGQFVAAYRKSGKNDANDAEAICEAVGRPNMRFVPIKGEEAQAVLTVHRARQLLVSERTALANQIRGLLAEFGIVMAVGLGRLRGALGRIGTGRQTLPLLARETVGELHDRLRLLDACISQYDRKIEAIARASEPARRLMRVEGIGPVTSTALVASVGNARAFTNGRQFAAWLGLTPSQHSSGGRSRLGHISKRGNVDLRTLLIHGARSVLQFTGKKTDRKSVWVEALKARSGTNIAAVALAAKQARIIWALLARGTEYRPAT

SEQ ID NO: 417302 - protein, 535 aa, unidentified
MRGLRAGASLTHVRGLPDKKSLARPIRQLWEAPVFHERTSVGLDVHARSVVATAIDGVTGEVRTERLVADNDVVIAWIVRLAAPVAVAYEAGPTGYGLYRSLRAAGVDCVVAAPSRLIRPGGDRVKTDARDALLLARLLRMGEVVPVTVPTLAQESARDLVRAREDVRRELMSARHRVGKLLLRHGHVYSGGQTWNGVHDAWLRRIRFEHPGTRVAFETAHEAVVMATARRDRLDEQIAVMAADSEYTGVTRRLACLRGISTLTAFALAVEIGDWHRLTGGTIGAYLGLVPSEHSSGDKRSQGGITKTGNSHAPPAAHRVRLASQAAIRTRQDHSRSVGLGPSTRRSPRRRRQPSPAPAVGPTRSPQEEAHRHHHRHRARSGWLVLVPGRHGQLTHDSFPARWTQREEPTRPDYCEQPPRPRSTSDRANAPAEPPPCGTQPANIRLTAPSTDTRPQPCRERRGAAEQPARRRLTMPSLTESTYISVVAFSGHYEDLRGLRQHGDRYFAVRVLVATQAEESQALAGFESVVSRGCA

SEQ ID NO: 417303 - protein, 312 aa, unidentified
MMIGIDISKARLDVYFSVTDCHQAYSNDEAGIGALTQALVAAKPERVVMEATGGLERALVAQLIAANLPVAVVNPRQVRDFAKAVGRLAKTDRIDAQVIAHFAQAVRPALRELPAAAAQEFADQLTRRRQLVEMLAMEKQRCRQASGTAVRKDIKIHIEWLVNRLRAADTGLKTAVEASPAWQSQYDLLSEVKGLGPVTTMTLMACLPELGKLDRKAIAALVGVAPMNRDSGQSRGRRSVWGGRAAVRAVLYMATLTAVRHNPALKAFYTRLRASGKLAKVALVASMRKLLTILNAMARDQTPWRNDFAQIA

SEQ ID NO: 417304 - protein, 492 aa, unidentified
MKKPPRKIQSVYRNQNALVRAVFERAGDARKVLCIALDYAKRKHVALICDGHGDVLKSSFPVENNAAGIDHLIKEVTATARRRKIPKDQIFLGGEDEAAYIANFTEALRAKGYLVVRVNAYEAKENRENLLASTDTLDLLGIAKTLLSRRARITGDTSSSAAYHHLREITRCRRTLVRQQTAASNRIHALADQLFPGFLNGSKSAITPFCDASLELMKERFSAPEIARRKPASLANLLRRHRVQHPDETSSQIIQLAREALPPTAHRVATLQRTLAATVDLYQCLQRNALELRADAALTLATTPYVMLTSIPGIGFVLAAGLAGELGDPKHLGRLDSLCAYAGIVPRTLQSGGPDSPAVQGHASPRCNRILKDWTVQSAQKIHLYGPPELKDRITRWNAEGKHGIFAAARHHLRLVSTLVKNEHPYLAPQARTRQATPDQIAGAAQATWAILQRKWRTVSGGLDLILDEAHPLGFWRKVMLELHGIDLPTRQ

SEQ ID NO: 417305 - protein, 415 aa, unidentified
MKKVYDNCCGIDVHKKLMVACFIHGKEQEVREFGATTRELLELADWLAKGGCQIVAMESTASYWKPLYNILESSGLNAMVVNARHMKAVPGKKTDVKDSEWIADLLQHGLLQASYIPDREQRELRELISYRKSLVQDKTRELNRLQKMLEGANIKLSGTITDINGKSGRSIIETILCGTVIDSAKYDEMYDRKVIAHNLKASKEQIMDDLNGFMSPLQRKMMKELLKHVDELDVHIEHLNQEIDNHMKPEEKRAVNAIKDVTGLGGKSAQAVISVIGTDMERFPTDAHISSWAGLCPGDNESARKRRSGKTRKGNQLLRTTLIVCAHSAVKVKNSYFRAQFQRISAHRGSKKAYVAVAHSMLIAIYHILKDGAAFQDLGADYYNQFNKERKITAYLKKLKALGWEMPVAMEAQPA

SEQ ID NO: 417306 - protein, 312 aa, unidentified
MLTPSVYLGADVSKLTIDLGCPHFAVPASIANNPAGYRTLIKTLVRRPAPVHVVCEATGPYHKAFVAALHQAGVVVSVVNPRLPRDFARARGQLAKTDKIDALLLADYGRTMHPAATPKPEASMTLLDDLVTRRAQLVEDRAREKTRLQQTTRAETVTSLKLHLRHLDGQIEKLLARIAEVVEASPALRAKVARLVTVQGVATLTASALLAALPELGTLSKNEVTALAGLAPFNRDSGAFRGTRSIRGGRFDVRIVLYMAALSASRCNPILKAVYQRLRAAGKAHKVALTAVMRKLLVYLNSLLKSLPCSPA

SEQ ID NO: 417307 - protein, 469 aa, unidentified
MGTCHAKKGLARGQAKEGLFEVINPDAAGIDVGASEMWVCVPGENEQERVRKFGTDTVELEAISTWLLQRGVRTVAMESTGVYWIPLFQVLENHGLEACLVNARHVKNVPGRRKTDRLDCRWLQKLHACGLLSASFRPTAEICRLRTCMRHRATLVREQAAQIQRMQKAMREMNVQLDAAVSDVTGVSGMRIIEAILAGEHDPATLARLADPRAHKSPEQIARCLHGDYRPEHVFVLRQALAAYRFFMDQMRDCDGEVERYGNELEQMAGRADTALPAAVAGEKRKPRSKSMPEYDVRTHLYRLCGVDLTRIPGIAELTAQGLISETGLDMSRWQTAKHFASWLDLCPSPKVSGGRVIGQGRRHASNRAAQMFRQAASSLSNSLSWLGSFYRRLRVRIGAGPAVKATAHKLALIYYHVLSTRTEYRQIEAQQYDQRQRERTLRNLQRRARQLGMDLVPAEGTAEALARA

SEQ ID NO: 417308 - protein, 346 aa, unidentified
MEINRVGVDLAKNVFQLHGADRNGKGVWKRRLSRSKWLQVLCDTVEPGTEIGMEACAGAHHWGRQLMQRGYVVKIIPPQFVKPFIKSNKNDANDAQAICEAMVRPNMYPVRVKTIAQQDMQALHRVREEVKRHRIAKGNQIRGLVAEYGLVAPQQLTALRNAIPDWLEDAENGLTFLFRQLLQGLWEDLRSLDRRMAELDRQIALIAQEDPAARRLQQLRGVGPLIATALVATVGDARQYRNGRDMAAALGLTPRQHSSGGKDRLLGISKRGDAYLRCLLVHGARAAVRTVKDKEDRLSRWIINLQSRRHSNVVAVALANKMARMAWAMMARGVDYDPDLAAISTN

SEQ ID NO: 417309 - protein, 304 aa, unidentified
MNGIGIDVSKRQLDVGTTDGETLQVSNNLTGFSELDVWLREHPAAQIVLEATGGYEQPVLDFLHKAGHPVVRANALRARRLAQGMGHIAKTDRLDAYALAQMAALVKLPPYQPLQHWQQKMREFVRARRQAMEMLTIARQQQEMVGDRELRRLLQANINRQQALVERLGKQIAEQVAQQPQLAVLKSMKGVGPALQAVLASYLPELGRISGKRIASLVGVAPMSHDSGTMRGKRSIQGGRAEIRQVLYMAAMSAMRHEPRLRDFYQSLRARGKEGKVAIVAVMRKMLVILNARVRDAESGPIPA

SEQ ID NO: 417310 - protein, 348 aa, unidentified
MDHIIRIGMDTSKHVFQLHGVNAAEEPVLRRKLRRNDMVVFFERLAPTIIAIEAAGASHHWARLLRSFGHEVKLIAPQLVKPYVKRGKNDAADAEALCEAMSRPTMRFVPVKTAERQAALMLLGLRDRLVRNRTQLANAIRGYAAEFGLAAAKGIAHLAPLLARIQSDESLPGLARELFAAHAQEYAQLQAQIDEVEGKLMAWHKTNPGSQRLAQIPGIGPIGAAMLIMKTPAPETFRSGRQFAAWIGLTPKDHSTAGKVRLGVITRAGDEGLRSALVVGATAVIRHLRNGKGRSMLSAWVEQLLKRKPPKLAAVALANKLARIAWKFMVTGETYTAKPRPIASAGIA

SEQ ID NO: 417311 - protein, 343 aa, unidentified
MDHFAGLDVSVKETSVCIVDDSGRIVREVRVASEPEALLPVLTNPVYHFKRIGLEAGPLSQWLFGALAEAGLPVICVETRHMRAVLKAQINKTDRNDARGVAQMMRAGLYRPVHVKTLRSQKLRTLLTHRKLLQSKAIAIDNDLRGTLRNFGLKVGMVGTVQFEARIKELVENLPDLAVLIEPLLVVRRVLREQLGILHRRLLTIVRDDEVCRRLMTVPGVGPVVALTYRATVDVPARFRNSKSVGAAFGLTPSKYQSGEINRTGAISRCGDEMMRVMLYEAAQTMLVVSTKWSWLKAWAMKIARHRGMKKAIVALARRLAVIMHRIWVDGTEFRWTRDIAAA

SEQ ID NO: 417312 - protein, 350 aa, unidentified
MLADQLDYVVGVDPHRDSHALAVVDVISGAVVFESTVFASSGGYAHALQLVDQHAPGRRAFAVEGTGSFGAGLTRFLSVRGEQVLEVGRLRRERRSGGKTDALDAVRAARSVLTSERPVTPRAGGERQALQALVAAREGAVNAKRAGLCQLRDLLITTPEPLRSQLRPLTRARLLQRLAATRPGGGRDPELRGSMLALRSVARRVLQLTVEERELAREIEAITRKLAPQLLDQPGVGPHAAAQLLLSWSHQGRISSEAAFARLAGAAPIPASSGQTIRHRLDRSGDRKLNRALHMILVTRKRSHPATSTYIERRLQEGKTRREANRCLKRYLARNLYRLLEHPPMTACLL

SEQ ID NO: 417313 - protein, 345 aa, unidentified
MIIGCDFHPSWQQVSWLETETGECGERKLVHAAGDAKMFYQQLVAPVLIGMEATGNSQWFVELVEDLGHEIWIGDAAQIRASYVRKQKTDKRDAAHILKLVVEGRFPKLWTPDREQRDLRQLVLHRHKLVEIRSRVKNELQHLSMNKGMQKKRTLWSQAGQKMLRELPLKPWASCRREDLLGLLGMLNQQIGALDAAVQKAAEEHPQARLLMTQPGVGPNTALAYVLTIGEVSRFQRGKQVASYLGLIPREESSGGRQKLGAISKQGNGMLRSLLVEAAQIAVRFDPGYRKQYLHRCHQKPKGVAKVAAARKLAVRLYWMLRTQVGYPEIVRIESSPRVPLVGAS

SEQ ID NO: 417314 - protein, 352 aa, unidentified
MQAQVKENALNGQNFYCGIDLHNKTWAVTMETDELCLRTFTQPADKHALVRFFEKNYPGVKIIAGYEAGYFGFELYRFLQDHGIECRVLHAADIPTTHKEKDQKRDPLDSKKIARALKTQGTRSIWVPPVSVQQDRQLLRTRRALSKDQTRIKNRIKAFLQTYDIAYPEAFADSKKHWSKKFIGWLKRIRLQQDAATESLQVLVRNLEFLRSELTGVSRHIRDLAASESYRDPYNKLIQITGVGLITAMTLLMEVGDIGRFKNTDQFRSFIGLVPSAHCSGEKDYHGGITSRANHHLRNLLVESAWTAARRDLYFLEVFTRYKKRMQGNRAIVRVAVKLANKMYYCLKHNSN

SEQ ID NO: 417315 - protein, 447 aa, unidentified
MDTESATQYAAYIGIDWADKDHAYALRATEDKKVEQGKVEAKPEAIEEFVARLRQRFGGKAIAVALEQSRGSLLFTLSKYDHLVLYPVHSSTLDSYRKACHPSGAKSDPDDAALILDLLQKHPEWLQPFAPDTVPTRTLQFLTEERRDAVNDKTRYLNQLTAALKTYFPQMLEWLDVDSKVMCEMLQRWPTLEQLQQQKPSVVEEFLREHRYPVVRVKPLQEAMEKAIPATTDQAVIEAKKFTVQRTIAQLEALRANIAELDRRIEQITRLHEDYRVFASLPCAGKVMVPRLIAAMGTQRDRFQTASELQCQTGIAPVKEASGQREWIHWRWACPKFLRQTFVEWAWLSTRKSQWAREFYDRQRAKDKSHHAAVRALAFKWQRIIFRCWKDRCPYDEARYLATREQRARTAKASTDGSPQLKSSQAGGVEITWKNVSGFSRPDSISC

SEQ ID NO: 417316 - protein, 420 aa, unidentified
MLSVKHFVCCGMDVHKKFVVATIAITDYRGVTSYIKRRFATFNSDLKALKKWLLDHNCSEVCMESTGKYWIPVFNILEDSCHVVVANPKYVRAIKGQKTDDKDSAWIADLFKFDIVPSSYIPCKEIRALRELFRYRQKLIGHRSSEKNRFQNALTVSNIALSSVLTDTFGKSAIAIVDYILTCDVFDPDYCKSLLLKKAKDKADDVVKSIIGYELRGDQSLKMKVCRKHFDYINECVDTLEEAISDLSKPYHKFIELATTIPGITEKSASFIISEIGVDMVVFKSSKRLCSWAGLTPQNNESAGKKKSVHISKAGVYLKPLLVQCANAAIKDKKNPYFKYKYDRIKKRRGHKRAIIAIARMMLTCLFHMFSKQEAFNPADTDYSAIPEEMYQKFQAQYDKNAIKRLEKRGFTIIPPVATV

SEQ ID NO: 417317 - protein, 474 aa, unidentified
MARTRKRPASPPVPGDAGTEVTDEPVQVISRAAAIDVAKGSGMVCMRLPHESRAARRTQKVREVTATFAAVVALMDHLVCQGVERLVLESTSDYWRIWYYLAEAAGLEVWLVNARDVKHLPGRSKTDRLDCVWLCKLNEWGMLRRSFVPPEPVRDLRALTRLRASLTHDRVRHQNRIEKILEDALLKVSSVISDLMGGSGRRFLQALADGERSPAALAALGDYRLHASKAKLQEALTGRFRDIHAFEIGMLLELIDDLTAKITELDERIEAQLENVPGLGGVCTSCGQPGPDGPCTGCGEPVPGVIARLDEITGIGRGAAQVIVAELGTDMTQFPAPGHAASRAKLTPRAIQSGATSKAGRTGKGNPCLRGATGAAVMTAARTDTFLGARYRRHARRRGKQKAIVAGSRTIIEIAWRIIADPGFRYIELGPDYHDQLDPGRKTRDKIRQLEKLNPGMTVTLTPRPEPGGQAPAA

SEQ ID NO: 417318 - protein, 347 aa, unidentified
MSIVEVTRPIVGGVDTHLDVHVAAAVDPVGGLLGVESFPTTPAGYHDLSSWLSSFGPVERVGVEGTGTYGAGLARHLSASGIVVVEVDRPNRQARRRNGKSDELDAIEAARAALSGRASGAAKSATGNVEALRTLLVAKRSARSIRIKTIGQLRHLVITAPDDLRDRLGGLTTKALIRQAAALRPRPGSDPMGHAIKTAIVTLARRVQAINTEIAALDAHIDTLVRATAPALLEVYGVGSDTAAIFLTAAGDNPGRIRSEAAWAKICGVAPVPAGSGKTNGRHRLNQGGNRQANHALWRVVLTRLGQGEPRTVAYMQRRLAEGRTKPEIIRALKRYVAREIFQQIPT

SEQ ID NO: 417319 - protein, 350 aa, unidentified
MSIIGCDLHTRYQQIALLESATGEVVTRRLEHENGEARRFYASLPERALVGIEATGCTQWFERMLAELGHELWVGDPAEIRARAVRRQKTDSRDAEHLLDLLVANRFPRIWVPSPEERDWRQLLKHRGKVVQMRTSVKNQLHYLAMSQGVCRKRKLWSARGRQELEGLALGRWASRRRQELLELLDGLEPRIEELNQAVEAEAERRPDVVRLMKQKGVGPVTALAFVLTLGPVERFRNSRKVVSYLGLNPSEHSSGGRQRLGHISKQGNEMMRWLLVEAGQSAAQFDPELRRKYLRLKFRRGAKVAKVALARQLAVRLYWTLRQASETTPPVRMPSSPAQTLVDASPSSF

SEQ ID NO: 417320 - protein, 348 aa, unidentified
MRFYTQQHQYYCGIDLHTKSMYICIVNQEGKILYHYDLPTQSEALFQVIKPYLPNLVIAVECIFTWYWIADFCAQHHIPFVLGHALYMKAIHGAKTKNDRIDSQKIALLLRAGMIPMAYVYPAEMRSTRDLLRRRMYFVHKRSELLSHIQNTRSQYNLPNFEKRLDRKNNRIGINQHFNDPSVRKSMELNLSLLDTYETLLKELELFLVHHAQVHDPNNLYLLKTIPGVGKILALVMLYEIHDITRFPTVQNFVSYARLIKPRKESAGKITGTANRKMGNAYLRWAFGEAATLMLREIDDVKAYHQKLKNKHGKAKAMAILSHRIGRATYFMLKNQRAFNLKKFITVK

SEQ ID NO: 417321 - protein, 354 aa, unidentified
MMLIGIDPHKSTHTATAVDPETNRDHASIRIDVTLQEYERMLDWARQWPRRRWAVENARGLGHHLTSWLLARGEQVVDVPPRATARVRQLSRGAGRKNDRIDAAAAACVAALQGDARPVQPENSTDALALLDERRSNLAQARVRAVNQLHALLRALLPGGAPRDLSAAKAEHLLESVVPVGPAEITRHVLAADLIAEIRAWDVKLKDNAKAMAALVTQSDSRLTDTPGIGAVTAARLLGRTGNPTRFPTAGAFAQYAGTAPIEIASADRARHRLSRRGDRQLNAALHTVAITQIRMPGTRGHAYHQAKLAEGKTPREAQRCLSGCCCTDLGVCRSNGSLDWVVAGCSAHTSRAS

SEQ ID NO: 417322 - protein, 331 aa, unidentified
MQILDTVGIDMSKLNFDVRIYSTQSYAQFENSNKGFKKLISWTYKNSSFVRENIFFVLEHTGLYSHKISVFLTEKKVPFALVPGLEIKRSLGLSRGKDDKVDATNIAKYAYRLRDEIKPYKMPSKQVQSLKRLLSLRDRLVKQRSGFKSSLREENRILIKKENHVLFKSQEKMVDYLTKHIEIIEKEMMEIIKSDELLNKQFRLIISIKGVGRQTALFMIAYTHAFTKFENWRKFASYCGVAPFPNLSGTSIRGKTKVSNLANKRIKSLLDLCSKSAIQRNAEMKTYYNKRIDEGKNKMSTINIIRNKLLSRIFAVVNRSTPYVDMMKYAA

SEQ ID NO: 417323 - protein, 365 aa, unidentified
MQKISTMQASGKNIFEGQLTIGLDLGDRSSAYCILNEAGEIVLEHKLATTPEAMKQVFGSMPRCRIAMETGTHSPWVSRLLTALGHEVIVGHAQKVRLITKSRRKDDRLDARTLARLARIDPELLSPVKHRSAQAQLHLTEIRARAVLVSARTALVNAARGLVKSYGERMGKCGTQQFSRETASGLSMALRQALEPLLRGVESLNERIQEYDRRIEKMAQQTYPETALLKQVKGVGDIIATAYVLTFEAPHRFRKSRDAGCFVGLQPGRRNSGASEPQMRISKEGDEYLRTLLVQGAHYILGPFGEDSDLRRWGQKLSARGGKNAKKRAVVAVARKLAVLLHRLWVSGEVYEPLRNSQKAMNAAA

SEQ ID NO: 417324 - protein, 402 aa, unidentified
MKNNTAILYIGIDVSKDKCDVCIKNQGGNDLVKRFQISNTKADLNKLYETIEKIKLKNPENSDVVFGLEATGIYYLPLYSALRRDGQKIRLYNPIQTSGFRKMNIRKTKTDPIDAAIIADMLRYSEPPLANGIQDLNLYQLRELVRIRHRLIDKRSRCKLQLIRNLDIIWPGYKTIMPTVFGKTSMMILKKYSAPSKVITKSFEDFYEQVQKVSRSQITRNKAEEIYAHAGNILAIPELESITSIEIKTLIEQIELYDEQNQAIEMKIGYVMEFTESKIMSIPGVSGILGPIILGEIANVDRFTSVKKLIAFAGLDPVISQSGRFENKTGPISKRGSPLLRQALFLAANVARMNDENLKRFYNKKIVEGKHHYSALNATAAKLLRIVFWVLKNNEEYQPQLN

SEQ ID NO: 417325 - protein, 423 aa, unidentified
MAGVMIGIDPHKGSHTAFVIDGREKPLGQLRVRASCEQVEALLGWAGRWRQRTWAIEGARGLGQLLAQQLLAAGERVLDVPPKLTARVRLLESGQINKTDENDARAVAIAALRARQLPQLTVEDQTIVMRVWARRYHDLGRLRTQAVCRLHTVLCELVPGGVRKQLRTSQAIAVVDSITAESPVAQAKLELAHDLVADLQRLDAQRREVKRRVSRAVAAAPTSITEVYGVGPIVAACVLGYVRDIRRFPSRDRFASYNGTAPIEVSSGDRKIYRLSRRGNRQLNHAIHIAAVSQISHRGSEGHAYYQRKRAKGMTGKCALRALKRKISDTLYERMLHDIRPRKDPGGHSGNDAASSAAGSHPDGPALRTSHSRATANSKTATTNQRPLTSPPAPDKRRTSRSGTGVKLQPRPRPRRGRGQERA

SEQ ID NO: 417326 - protein, 314 aa, unidentified
MNDKKVAGIDVSKLTLDVALLPGGETLQLGNEAAGIGELVKRLKAACLDLVVMEATGGYETAVASALAAAGLRVAVVNPRQVRDFAKATGRLAKTDRIDAMVIAAFGAAVEPHIAQLPDEQAQELEALLVRRAQLVAMRVQELNRLELSQGATRKQIKLHIAWLDKAIDKLDTDLTAGLRSSPAWRAKDELYRTLKGIGPVTSSTMVIALPELGRLDRRAIAALVGLAPFNCDSGNMRGRRRIYGGRSRIRSLLYMAAITAIRSNPVIQAFYQRLKLRGKPHKVAIVACMRKMLTILNAMARDGTPWTPEKAVQ

SEQ ID NO: 417327 - protein, 400 aa, unidentified
MIDISNIDLFLGLDVGKGEHHATAVTPVGKKAFDKRLPNSEPRLREVFGKLQAQHGTVLVVVDQPATIGALPLAVARDMGCHVAYLPGLTMRRIADLYPGEAKTDARDAFIIADAARAMPHTLRSLELDDETVAELEMIVGFDDDLTAEATRLSNRLRGLFTQIHPHLERVLGPRMQHPAVLKLLSQYGSPAQIRKAGRRRLVTLIRPKAPRMAERLIDEVFTALDEQTVVVAGTDAASLIVPSLADSLTAVLDQRKLIAARIEELLEAHPLSQVLMSMPGIGIRTGARILIDVGDGTNFPSAAHLAAYAGLAPTTRSSGTSIRGEQQSRRGNKQLKRAFFLSAFAALADPASRIYYDKKIKEGKHHTQALLCLARRRADVLFAMLRDGTFYQPPTPITP

SEQ ID NO: 417328 - protein, 334 aa, unidentified
MEQITTVGIDLAKSVFSLHAIDGAGHVVFRRTVRRDQLLGVVAGLAPCVIGMEACSGAHEWGRRFQEFGHTVRLMAPKFVIPYRKSGKNDGNDAEAICEAVTRPNMRFVPVKSLEQQALLAIHRVRQGFIVERTAIINRLRGLMSEFGVVLPLRSVTVRRQAAEAAEALPALARRAIGDLLDQLRVVDERIDGYDREIEAQAKLSEAARRLMQIRGIGPTTALAIVATVGNAREFKNGRQFAAWIGLVPGQYSTGGRTRLGHISKRGDAYLRNLLVQGARSVLNTAGAHQDRMSRWALELQPRRGYYRTLVAIANKNARIAWALLARNEDLRTT

SEQ ID NO: 417329 - protein, 319 aa, unidentified
MAQNDLVVAGIDVAKDKVDVCIRSLSLRRTFASTAEGRRELATWLRRKKVGKTVMEASGGYERDWAKALRDAKIEVRIVDPKRVRSFAQSAGRLAKNDTIDAEMIAWFAETFGEARSQAYDATREQLHQMVHARQALKDMQSKLASQGEHAVPAAVQRIHARISKTIAVELVKIEAEITALIQATPHFTELAEIIESVPGFGRTTSAALIAAMPELGQANNKIVAALLGVAPYDDDSGRRRGERHIKGGRRRTRNVFYMACLGAATQHNPVLKAFYDRLVAKGKEKKVALVACMRKLISILNIMIERRQKWDASRYAVS

SEQ ID NO: 417330 - protein, 307 aa, unidentified
MGRFAGIDVSKATLDIFVTPGFRLQVTNDEPGHLRLVVELGKSPPELVVLEATGGYECAAATALRKAGLPVAVVNPRQVRDFARAMGRLAKTDRIDAEVLACFARTLRPKPRPPPDDATRVLAALVGRRQQILNLLVAERHRAAIADPAVRDLVLGHVPALVELLAHIDGKLEEHQRADKALNAKVELLQTVPGVGPVVAATLAALLPELGTLSRKQIASLVGVAPLNRDSGMLRGRRTVWGGRGQVRPVLYMAALVAARRNKAIKPFYDRLVAAGKVKKVALTACMRKLLTILNVIARTRKPWRFP

SEQ ID NO: 417331 - protein, 402 aa, unidentified
MYSSFVGIDIGKWNHQAAFLEVSGKETARSLAFQNTSEGFQSLSKSLAPFDKGQTVIGLEATGHYWLALFSFLVDNGWTVKVINPMQSDALRNMNIRKAKTDRKDCVVIADVLRFGRYTETVLPDEDLLQLRELSRCRVAHVELLGDLKRRVLGILDRVFPEFASCFSTVFGAAPTELLQECTDPEELADYDIDKLIKLLEKESRGRHSREKAEELKAKASRSVGTRFGRDALKFELKMLLEQLDFIKGQVKELDKFLKKLMKNHELIYTIPGISVTLGSAILGEIGDVKRFGTPQQLQAFAGMDPSVTQSGNFQGTQGKMSKRGSPYLRRAVYLAANAARRFDPVFKDFYDRMIARGKHPKQALAAVGTKLLRVIHAVMTSQKPYNPQKLLTPAAISQLNP

SEQ ID NO: 417332 - protein, 346 aa, unidentified
MMIIGCDFHPSWQQVSWLDTETGDCGERKLVHASGDAKMFYEQLAAPVLIGMEATGNSQWFVELVEDLGHEIWIGDAAQIRASYVRKQKTDKRDAAHILKLVVEGRFPRLWTPDREQRDLRQLVLHRHKLVEIRSRVKNELQHLSLNKGVQRKHKLWSQAGQKVLRELPLKPWAACRREDLLGLLSMLNQQIGKLDDAVQTAAEENPQAKLLMTQPGVGPNTALAYVLTIGEVSRFRRGKQVASYLGLIPREESSGGRQKLGSITKQGNRMLRSLLVEAAQVAVQHDPGLRKQYLHRCHQKPKGVAKVAAARKLAVRLYWMLRTQVGYPEIVRIESSPRVPLVGAS

SEQ ID NO: 417333 - protein, 343 aa, unidentified
MQVSTIGVDLAKNVFQVHGVDSAGKVVITRQLRRKQVIDFFSKIPPCLVGMEACGTAHHWAREVSKLGHTVRLMPPSYVKGYVKRSKNDAADAAAICEAVTRPSMRFVPIKSADQQALLMLHRTRDLLIRQRTQLINALRAHLAEFGLVAETGREGLAQLAAIITDESNREALPSAMKQALQTIVDQLTALELQIGTLDRAISAHHRANDMSCRLETVPGIGVIGATALASTVTDPSGFKTGRDFAAWIGLVPRQHSTGGKERLGGISKQGDRYIRRLLVIGATAVVRHARQHPQKHPWIMRLLAKKPAKLVAVAVANKMARIAWAIMAKGGYYRAPELAAAA

SEQ ID NO: 417334 - protein, 343 aa, unidentified
MITIGIDPHKRTLTAAALDPHSGLLGQQRLAASSQAGRQLLAWAKQWPERRWAVEGASGLGRGIAQLLVAAGEPVLDVPAKLAARSRLLSSGSGRKSDLADACSVAAAAIHHRRLRPVALEDHTVVLRLLSDRRDDLVAERTRTLSRLHVLLADLQPGGAARELSAARAAALLRRIHPITVVDVERKRIARELLADVRRLDRQVKMASQAIRTAVREHGTTLTEVYGVGPVLAAKLVGHAGDITRFPDRDHFASYTGTAPVEASSGDVRRHRLNRGGNRQLNTALHLIAVCQIRDVSPGQAFYQRKLAEAKTPEEARRSLKRHLANVVYGHLVTDHRHRTRVC

SEQ ID NO: 417335 - protein, 421 aa, unidentified
MKFKAQEKQNQLIENISSLHLVVGVDIAQESHVARAVSFRGIALGSPLEFGSYDEGFQLFGRWIQDLLQSYKLSKIIVGMEPTGHYWLSLARWLSSRGIEAVLVNPHLVKKNKENRDNTPSKSDRKDALVIADMVKNGYYSPVRFNPEAYEELRILMANRDTVTKRLNSAVNQIHRWVDIVFPELRHVFKILTCTSAIATLRLFPLPKEISRLTTEQVIAGWKQYVKRHAGLQRAEQLITFAKRSVGATKALHAYKIHLDQLLEEYDLAQRQLEQIAHEVHLVLERIPYAQKLLTIRGVNVTSLAGVLGEAGDLSGYAHGNALLRHAGLNLAEASSGKWRGKMVLSKRGRPRLRRFIYLMTMCMVMTNPDVRALHHYNVDVKKLKKMKSIMKLCGKVARMLVGLAKSSEAYSSVKVFPQSA

SEQ ID NO: 417336 - protein, 341 aa, unidentified
MNKPSTICIDLAKNVFQVALFNQHGKLKSNQKMSQAKMVTFIAQYPASMIYMEACGSAHYWGRYFQNNKHHVHLLPAQIVRMYRAGNKNDANDALAIYEAAQRPDIHFVSVKTTEQQDIASVLHLRESYIKQRTAISNRIRGFALEYGIKFPQSITKLRALLPLELEDPNNGLTSSARFVLHKLLNQLIELDKPIQEVTDYLISYAKQIPACQLLMTLRGVGWIVASALYARMGDASAYKCGRDASASIGLVPAHSGSGGHNKLLGISKKGDRTLRAVVVHGARSVVSNIKDKSDQLSCWLRALLERNHFNKVVIALANKTVRMACAMLKSNQPYQEKLPA

SEQ ID NO: 417337 - protein, 424 aa, unidentified
MKFKMQNKQNQLKERISVKHLIIGVDIAQQFHVARAVNFRGIMVGDPLTFNNNEEGFASLLQWIKNLQRLKNLDEAIVGMEPTGHYWINLSKWLFKQNIEVVTVNPHLVKRNKENRDNTQSKSDKKDALVIADMVKNGYYSEVRYTSESFEKLRVLMSNRDVVVKRLVSSINQLNRWVDIVFPELRQVFKEIKSKGAIATLRLFPSPVELEKLQPHDVIAGWKSIMKRQPGLKKATLLLEVARKSIGTRQALDAYKFHLEQLLEEYDLAVTQLERVEKQVIDVLNKIPFAKQLLTIKGISGISLAGILGEAGDLSNFSHGNSLLRHAGLHLAEASSGKWKGQIVISKRGRSRLRRFLFLATMSLVANNQEFKALHNHNVNVKKMKKMKSIMKLVGKLARIFVGISRRNETYCPDKVQPLLPLAA

SEQ ID NO: 417338 - protein, 420 aa, unidentified
MTRIQTKKTQAVNQKSLIVTVDIGKKTNMGYYRFSNNRGAKPFPFGNHAHGFGLFWDRIAQVQRQNQLEEIVVGFESTGAYGEPLMHFLKRKGVKLVQVNPMHTKRLKELTGNSPNKTDRKDPKVIADIMELGHALTVIVPEGSAAELRRLTQARERNVVRRTGLLNQLQDLVFLVFPEFLTIMKGVKSKTARYLLNRYSTPGDFVACGDLDLLCSRVKKISRGRIGRERIEPLYRAACSSVGIQEGRDSLVLEIRQILSWIELVDGFIARLEEAMIPHLRQISYSDSILSIKGVGPVTTAGLIGEVGDFGSFRTIPEMEKLAGLDLFEISSGLHKGRRKISKRGRPLLRKLLYFGAINVVRRGGILHGWYHRALDRGMPKTKALVAVARKLLRIVFAVVRDHREFTYDYMNQPKLRMTA

SEQ ID NO: 417339 - protein, 342 aa, unidentified
MLHVGLDVHERSSAVCILDENGKKVKEHSLRGHPRRVIAWLRRHVDTPFQICFEASTSYGYLYDELRRIAHRVVVAHPGRLRLIFRSRRKNDRVDAAKLAKLLYLDALPAVYVPSAEIRSWRGMIEHRHRCVRSRTRCKLTIRALLRTHGVETLGRRRLWSKRGRAWLESVELPDEISWLRLEGLLADLDHFDARIGRLESILERIAEKHPAVALLRTIAGVGIRTAEAFVAYVDNPDRFRRSKSIGCYLGLIPRQDASSDTNRLGHITKEGPGTVRQMLAEASWQAIRRSPTVRAFFERIAQGRKDRRKIALVATAHYLARVMLHMLKTGEVWQEDQMITA

SEQ ID NO: 417340 - protein, 413 aa, unidentified
MEVLVERCAGLDVHKDTVQACVRVPGPGGREVHQHEFGTTTRELLALRDWLAALGVTLVGMESTGVYWKPVYYVLEDAFECHLLNARHLRNVPGRKTDVKDAAWICQLVEHGLVRPSFVPPKPFRELRNLTRYRKTQIEERTREAQRLDKILQDAGVKLSSVASDICGASGRAMLSALVEGTRDPAVLAELAKGALRRKIPALREALEGRFGHHHSLIVSSILAHLEFLDESIDRLSDSEEIGEAIAPFGLAVEMLRTIPGVDRRTAEVLVAEVGVDMDRFGSPERLASWAGLCPGNNESAGKHYSGRTRKGSKWLRAALTQSAKATARTKDTYFAAQYARLKGRRGHGRATVAVAHSILVVVYHLLDRATPYEELGADYFLRRHDPARQATRLIRQLNALGYRATLDPIRAA

SEQ ID NO: 417341 - protein, 337 aa, unidentified
MKRYLGVDLHRTQFTVCTRLENGRTYLRQWPLRELKLFAAQLRKEDEVAVESTGNTRLFHDAVVEHVAHVAVVNPSQFKVISQSVKKTDKNDAELLALYLAKGLLPEVRMKERKQREMSHLAQTRDLLVKQRSALKAKINNLLSAEGINLKRESLSSNKALERVLAMPLSPLMLAEARVLTGQIRSLNQSIAELEGLIEEEGPKLAGHRNLMSIKGIGPVSAAVLLSVIGDIRDFSDPGKLAAYLGLVPRVQNSNETEHSGHITKQGNKLARTALVQCALIAKRYSSFLQNFYQRIQRRRGGGKANIALARKFLGVIYHTLKNDWVFEDFPNFVLAS

SEQ ID NO: 417342 - protein, 384 aa, unidentified
MQKPNDLNQSRIVLKQDSTLIAVIEMSLSSWLVAGIVPGVERQPLKKLAVDESALLKLLNRWREEAEKAGRRIERITVAFEAGRDGFWLARWLRARGIEAHVIHASSVAVSREHRRAKTDRLDTELLKRAFLGWLRGERDHCKMVAIPTTKDEDAKRPNRERQSLVGEQTRIVNRMKAALIRLGIRGFNPKLKKAAGRLEDLRTPEGEPIPPNTLAELHRDMERRRLVSDQIRQIEKARLERMEQAPGDGPHAMVRLIARVVGVGIETADMLVHEVLSRKLRDRRAVARYAGLTGAPDESGSKRREKGLAKAGNARVRGGMIQLAWRFLLFQKDSALAQWYRTRTEGGRNRKTIIVALARKLLIALWRLVTTGEVPAGVVLRAA

SEQ ID NO: 417343 - protein, 341 aa, unidentified
MKTNRTVVGVDTAKRVFQLHWVDMETGEIVDLKLTRAKFLEHFANLAPCAVAMEACGGSQHWARRLRQLGHEPWLLPAKAVRPFVSGNKNDAHDARAIWTAAQMPGIRTVAVKSEEQQAILALHRMRQQLVKFRTAQINGLRGLLTEYGEVMPRGRAGMRRGMAEVLERVAERLPAMVIDTLREQWARVGRLDEEIGEIERRIGVWHRGNADSKRVAEIPGVGVLTATAVVAAMGDPAAFRSGREFAAWLGLVPRHEGTGGRVRMLGISKRGDRYLRTLLIHGARSVLTHAKAPPDWAVRLAERRPPNVVTVALANKTARTIWALLAHDRAYQANFVSQPA

SEQ ID NO: 417344 - protein, 338 aa, unidentified
MQITTIGLDLAKNVFQVHGIDHEGKVGVRRSLRRSEVVDYFGKLPSCLVGIEACATAHHWAREIGRFGHTVRLMPPAYVKPYVKRNKNDMADAEAICEAVTRPNMRFVAVKTAAQQSVLMLHRCRALLVRQRTMLANAIRAHLAEFGIAMPQGIRTLLMALNAPKDAVNNLPELVRIALTPMTASLIELGQRIKALEIEIAREHRGNETSRRLETIPGFGVMTSTAMAATVTDPTAFKSGREFAAWLGLTPRESSWGGKQRLGGITKMGDGYLRTLLVVGATAVIRFAREEGSAKTAWIRKLMERKPAKVVAVALANKMARIAWALMARGEVYRVIPA

SEQ ID NO: 417345 - protein, 400 aa, unidentified
MNFIGIDVSQGKSHATQITDEFEKRTFAFNHNKSGFNYLSTHFTSDTCIIFETTGYYSNALTRYLQQKNIKFIELNPFEASLRMAELRRNKNDSNDSFKLAMLGITQYDEIKFRGRQYSEGSYKNLKKYCLDYLYLQKCQTRAINHLRSLIELSFPELNSIFVHASSVMALQMFRMYAHPDFLVGLTVKNMVDRLYQIIGKHINRTLIEKYCAKVWLAAKGSYPSIKADDPIILLISDYCDEIEAYNNRLIKDKKEVIRRASKFKEFRIITSIPGTGQLSTALLLGFTGDLNRFSTYKQLNAFLGVDLNRYQSGKFEKRDKINRRGSSQGRYIESNMIRSMLRNQARINNHIIDYYYKMRKPPYSKKDKVALIACVNHLNRTIINLVHTNQLYDYQKAIH

SEQ ID NO: 417346 - protein, 457 aa, unidentified
MSQARRSRGRQELSPVHPNAAAIDIGATMHVAAVGPDCDEQPVRTFQTFTADLHRLADWFAQCGVKTVVMESTGVYWIPIYEILEQRGFEVMLVNARDAKHVPGRKTDVSDAEWLQCLHEYGLLRPSFRPQAEMAGLRAYLRQRERLLDYAAAHIQHMQKALTQMNLQLHHVVSDITGVTGMRIIRAIVAGERDPAILASYRDARCHASVETVRQALVGNDREEHIFALTQALELYDVYQAKVVACDGQIEAVLTRLKQSAVPPAEKLPAARHKAHSSNAPAFEVREVLHAILGVDLTQIHGLGPYLALKLVGECGTNLSAWPTAKHFTSWLGLAPHNKISGGKVLSSKTRRTSNRAATLLRLAAITVGRTDTALGAFFRRLSGRVGKAKAVTATARKIAVLFYNTLRHGMTYADPGASYYEDRYRQRVLSNLQRRAKSMGFVLQQAEPAGAQAGVS

SEQ ID NO: 417347 - protein, 370 aa, unidentified
MLNTTTFVGLDVHARSIKAVALDAMTGEVRSATFGYDAAEVAGWVSSVDPSAKCVYESGVTGFDLQKRLASMGIDCVVGAVSKMIKPPADRKRKNDRNDAEFLARMLSVGNVVEVWVPDDGCEAARDLSRALDDAREDLKRCKQRLSKFLLRHGYAFSETTPTGRRKGSWTAAHWAWIKSISFPEKADNDVLAYYVDAVRQAMEDKARLERLVEAEASKPRWKRRVDSVRCLKGIDVTSAADLVFEAGEFSRFKSARSFAAWLGLTPSEHSSGESVRQGGITKAGNKHLRRVLVESAWHYLGCSPRSKDLAKGQVPDPAARRHAAKGVRRLVERRRAMLERGVHKNKANVATARELACWCWAVGRMIENG

SEQ ID NO: 417348 - protein, 451 aa, unidentified
MTGHRPELKTVNVGAAAIDVGSKIHMAAVNPAYADEPVRSFGTFTQDLHNLADWFKACSVTTVAMESTGIYWIPVYEILEQHGFEVILVNARYAKNVPGRKTDVSDAAWLRELHSYGLLRGSFRPDAEIATLRAYLRQRERLVEYAAAHIQHMQKALMEMNLQLHHVVTDITGVTGMRIIRAIVAGERNPDVLATYRDVRCHSSIETIRAALVGNSRHEHVFALTQSLELYDVYQAKMLDCDRKLEVLIAALSNRAVKPAGRLSKPRIKTKQVNAPTFDVRTALYGVLGVDLTEIHGLGPSLALKLVGECGTDLRAWPSAKHFTSWLCLAPGNKISGGRVLSSRTRRSSSRAAALLRLAATTVGRSDTALGAFYRRLSSRAGKSKAVTATARKIAVLFYNTLRHGMSYRDPGADHYEQQYRNRVLTNLQRRAKSLGFVLQAIPENANPAVS

SEQ ID NO: 417349 - protein, 339 aa, unidentified
MTVKTVGLDLAKDVFQVHGISESGRVIFNKAIKRAKLLSFFETLPPCRVGMEACGSSHHWGRQLRKLGHDVRLMPAGYVKPYVKRGKNDAVDAEAICEAVRRPTMRFVEIKTEEQQAILSIHRTRDLAVRQRTQMANMIRSLLREFGHILPIGIEAVTAFAKRHLDGDHPDMPEIANGMLGMQCYQFIGLNTRIDGYSKMIEQHALLNADARRLMRMPGIGPITASAIVATIGDAKQFRTGRDLAAWLGLTPLNKSSGGKERLGKITKQGDRYIRKLLVVGMTSRAVMAKRSPEKVDLWTAKIIADKPFRLATTAMANKAARAIWAMLTKKQEYRQPAF

SEQ ID NO: 417350 - protein, 466 aa, unidentified
MNFMGKGQKNTEKKQRINDFVQLPLVNANAAGIDIGDTLHVVAVPEECCKGPNVRDFGTFTDDLFSIVEWLTECGITTVAMESTGIYWKNLGLLLIERGFEVYLVNARHTRNISGKKNDQSDAQWIQKLHSCGLLKNCFLPDDQTDVLRTLVRQRRKLIRDSSTAVLRMQKALELMNLKIHTLIRDLMGKTGKAMVEAILSGERHAESFLPFVDCRIRADRSAIVSSLKGNWREEQLFLLEQYYNQYMFFQAQLVQCEQRIEGQLQQMHAKTNDGVSEPEKEIKFTPTGRILKQKKTKGQPFFDTGSYLNGIHGIDVIDIYGLSEVSALEILSETGTDLSKWPSAAHFASWLNLCPNNKISGGKLISSKLQRKKPNAASQAFRMAAGGVQKSGHLLGHFFRKMKSKGGYKYAVIATARKLACIYYKMVTEKQSFNPLNSEEHLNKQKKARIAAMEKALSALRLQVA

SEQ ID NO: 417351 - protein, 359 aa, unidentified
MDRMYAIGIDYHKRYSQMTVMEKDGTIVKEGKVANRPEAVKEFLGSYEGEAQAAVEATLNWTVIFDMVEELLGEGQVKLCHASKARAIAEARIKTDTLDSRALAHLLRTDLLPEAHVRPKKERAIQQALRQRMFFVRVQTMVKNRIHVLIDRQVTVRETAQGFTDLFGKAGMEFLRAVELPGPERELLDGELALLEAVRERIAESNALIHELAEGDPRVPLVESIPGLGSFFSVLVAKEIGEVERFASPEKLCSYAGLVPSVHASGGRSYTGRITKQGNKWLRWALVEAVAPAIRTDAGLRGYYERIKRRKGVNSAKVATARRLLTIVYRCLKENRVYEERLPGVEYGHKSVRTAFSCP

SEQ ID NO: 417352 - protein, 347 aa, unidentified
MKFYTQQHPHYCGIDLHARTMYLCILNQAGAIVLHRNMKADSDSFLKAIAPFRDQIVVAVECIFTWYWLADLCAREGIAFVLGHALYMKAIHGGKAKNDKIDAQKIAVLLRGGMIPQAYVYPQDMRSTRDLLRRRMHLMHHRSQLLAHIQNTNSQYNLPEIGKKIAYKSNRAGVAERFADVSVQSGIRFDLRRIDFYDGLLNEVELEILRHAKLHDANTFRLLDTVPGVGKILALVLLYEIHDISRFPTVQDFVSYCRLVKPKKESAGKTYGFIGAKIGNAHLKWAFSEASVLFLRNNPEGQAYVARLEKKHSKGKALTILAHKLARAVYYMLRRNEAFDMKRFLNR

SEQ ID NO: 417353 - protein, 271 aa, unidentified
MNYVGIDLHRKQMVFSVENEQGPVGKPVRVDCHSVLLIESMFRKLAPFRAVIESSTSYRWLYDLLSPLGECILAHPLKLRAIVSGRAKTDKLDSAMLAKLLRADLIPRSYVPEENYQFLRDVTRARARLVRQATHAKNELHAMMKRCNVRSPYSNALCKRGRQWIAMQDLGYGSDFAKHELLRRIEYYEREVTEMDLQLAGIAHAYPQAEALTDLYGVGLYTALLVVGELGAPERFFSGDKVGAYTGLTAEVRQSGGHEYRATSAGRVRRG

SEQ ID NO: 417354 - protein, 358 aa, unidentified
MSTVAGPEVIRTVQVVIGVDTHQDKHVAVAIDQQGVRLAECHAPATSCGYGELERWSRNLGDVRAFGVEGTGSYGAGLARFLVGRGFSVVEVNRPDRSVRYRKGKSDPTDAEMAARAVLAGVAVATPKSGEGEVEMLRMLKSAKDSAVKARTQAINQMRALVVTAPAGLRETLDGLPATALAVRCKGFRPGRLEDPTAAAKYTLRSLACRYLQLDKETRELQAELERLTQMAAPALVSAFGVGPDTAATLLVSAGSNPQRLRSEAAFASLCGVNPIPASSGKTNRHRLNRGGDRRANSALYRIVLVRLRYDLRTKEYMQRRTGEGMSKAEVIRCLKRYVAREVFTALQNAIRLPLTIY

SEQ ID NO: 417355 - protein, 459 aa, unidentified
MNRKKSKSKVDRTMPMVHPNAAAIDVGATMHMAAVGADRAQEPVRSFGTFTADLDQLVKWFVECGVETVVMESTSVYWIPIFELLDARGFAVFLVNARDAKHVPGRKTDVSDAQWLQRLHSFGLLRASFRPKGQIAELRAYVRQRERLLEYAASHIQHMQKALTEMNLQLHHVVADITGTTGLRIIRAILAGERDPEALACLRHYSCHSSVETIAKALTGSYRAEHLFALDQALALYDAYHEKASACDVRIEAVLKELIIHRGHDHGSAPPVSRRRNRTDQANALAFDVRASLFGLLGKDVTTIDGLGPYLSLKLIAECGDHLTSWPSAKHFTSWLGLAPSNKVSGGKMLSSRTRRSGGRAAALLRLAAVTVGRTDTALGAFYRRLSSRIGKAKAVTATARKIAVLFYNAVRHGMDYVDPGASSYETRYRTRVINNLHRRAKTFGFVLQPLEPGTGAVS

SEQ ID NO: 417356 - protein, 411 aa, unidentified
MNAVGIDISKGRSTVAILRPMGEVVMTPEDVCHEASGLDGLADRILSLDGDTKVLMEATGRYHETIASELHERGIFVSVVNPILIHHYNPDSTVRKVKTDKKDSVKIAKYCLEHWNDLREYSPMDTIRQQLKLFSRQYNLYMKNNVSLQNNLISLSDKTFSGVNTLFTSPEKADGHQKWVDFFTTFWHVKCVTGSSKQAFIERYQKWCKRNDYNFSASKAAEVYDYSLRQLTTLPKSDVTKVLIQTAAKELTSANELLARLRQEMNRLARQLPEYDVVRAMYGVGDITAAQLIAEIGDVRRFPRRSSIVGFAGVDPEVEQSGKSNPEGKPATKRGSPHLRKTLYQIMSTYIKLSPADEPVYQFLDKKRSEGKPYNVYMTAGANKFLRIYYARVKERLQALDNAPDTDELNS

SEQ ID NO: 417357 - protein, 344 aa, unidentified
MDHFAGLDVSVKETSICIVDDAGKIVREVKVASEPEALLAVLKNPAYHFKRIGLEAGPLSQWLFSALAEAGLPVICVETRHMQAVLKAQINKTDRNDARGIAQMMRAGLYRPVHVKTIRSQKLRMLLTHRKLLQSKAIAIENDLRGTLRNFGLKVGMVGKVKFEARISELVENLPDLAALVEPMLIVRRTLREQIVILHRRLLAIVRDDEVCRRLMTTPGVGPVVALTYRATVDVPARFRKSKAVGAVFGLTCAKYQSGEVDRNGRISRCGDEMMRVMLYEAAQSMLHSKKWSWLKAWAMQVARRRGMKKAIVALARRLAVIMHRIWVDGTEFRWTREQATAAA

SEQ ID NO: 417358 - protein, 389 aa, unidentified
MFFLGIDIGKNSHVASLINDKKKVIFKAFSFSNSTEGASPLIKKLEPFCDSLDIAMEATSHYWINLFSFLLQKNFSVHLINPIQTNGWRNSTEIRKRKNDTIDSILIADLLRYGDFIESSLSNEDYLLLKNLTRFRSYLISSTGDLKRKTIALLDQVFPEYERCFSDVFGKTSKEILLSFTTPQEFENISSSKLSKTLENITMKKFAKKKIEELSEKAKTTIGVKFCLDSFSLQIKMLIEQISFIETQVESIEEEISTIMTKLNSPITTIPGIGSVIGATILGELGDISRFSNASKIVAYAGLDSVVSQSGNYEAKSMSISKRGSSYLRKVLFQAALIAEFCDPVFSDYYQKKIAQGKHHLVATNAVARKLCYTIFTVLTKNEAYKIQQ

SEQ ID NO: 417359 - protein, 352 aa, unidentified
MAGVMIGVDPHKASHTAVAISGAEEPLGELRVRACAVQAERLLAWAAAWPERTWAVEGAGGLGHLLAQQLLSAGERVLDVQPKLGARVRLLATGNVNKNDPNDARSVAVAALRSPGVREARPDDHAAVLKVWSKRRRDLASSRTQVVCRLHAVLCELVPGGVPKKIIAAHAARLLGSITPPDAVAAARWELAAALLEDLRRIDAQLGETRKKPGTAVRASGTSLTGLFGVGPVIAATIIGEVRDVSRFKNRDRFAAYNGTAPIEVSSGQRKACRLSRRGNRRLNHAIHMAAVTQVRQKHSEGRAYYDKKLAEGKTRKEALRALKRQVSDAVFTRLQIDAQRTQAQVRDPGGQ

SEQ ID NO: 417360 - protein, 383 aa, unidentified
MFHSPSADASFSDSTHTIFLALELSRRSWLVALHAPDAAKIELHRLPAGDGQAVLDLLARIRTRVERRTGASPHVSCCYEAGRDGFWLHRLLEAHGVSSHVMDPSSLQVDRRARRAKTDRLDAQALLRALMAWSRGEPKVCSMVRPPSPDEEDARRPSRERATLLQERIRLVNRIQGLCATQGIADYEPLRPDRRRRLPQLITGDGRPLPPRLSEEIAHQLDWLELVLRQLAEVETRRDAEAAAAKAATSSKLGALLHVKSIGPELATVLAKEVFYRCFASRRHVASYVGLTPSPFASGRRSREQGITKAGNARARKALIELAWLWVRNQPDSALAGWFRSRVGSATGRVRRIAIVALARKLLILLWRYVETGALPADVVVKP

SEQ ID NO: 417361 - protein, 344 aa, unidentified
MCSLTSQTVFVGLDYHSESVQVCVLAQDGKLLVNRSCRNDWRAVVAAVREKLGSQVQVQAAIESCCGAADLADELIAKAQWSIDLAHPGYVARIKQSPDKTDYSDARLLADLERVGYLPRVWLAPEEVRELRRLVRYRQRLAQERRDLKLQIGATLREARQKPPAELNSWTRAWLAWLQNTALLSHNARLIVGWRLARLAELAKQIRAVEELLAQQTAQDPLVQKLMTLKGIGLVTAVTIRAEIGRFDRFRTGKQLTRFCGISPRNASSGERQADAGLIRAGNPQLRAVLVEAAHRLMRYDEKWTRFAARLSGRGKPVSLISAAVANRWMRWLFHQMQPQQLAA

SEQ ID NO: 417362 - protein, 417 aa, unidentified
MNTMTMQPYAAFVGIDWADTKHDVCIQSADSLRREFAVIPHKVEEIDEWARSLHRRFSGPIAIALELSKGPLVYALQKYDYFVIFPINPSTLAKYREAFQPSRAKDDPTDAELALDLILRHPERFEPLQPQSVEIRELAALVEQRRRLVSDRVRLTNRLRGTLKLYYPQALEWFNRIDTKLFCDFIERWPTLMQVKRARTTTLTTFFRAGNTRNPALLETRLASIRSSQHLTLDEAVIAPNKLHVLMLVGMLQVMLDAIKTYDQTIAELAPQHDDYDLFSSLPGAGPSLAPRLLVAFGEQRSRFKNAAEMQKYSGIAPVTERSGTKHWVHWRWRCPNFVRQTFVEWAAQTINKSYWAGEYYRQQREKGSAHQSALRALAFKWIRILYCCWQTRTQYDEATYLKALQRRGSPLVAKAV

SEQ ID NO: 417363 - protein, 337 aa, unidentified
MQDVTMVGIDLGKNTFHLHGQDRRGKAVFRKKLGRRQLVEFFATFHACTVVMEACAGAHHMARLLTTFGHQVKLISPQFVRPFVKSNKNDFVDAEAICEAASRPTMRFVTAKTESQQTLSALHRLRESFVRDRTRTINQMHGLLLEFGVSLPVGKASVARLPAFLTEHSLPPRLIAILQRLHEHYKYLDSEVGHIEKEINTQLADDELGQRLLTIPGIGPVMAAEMGDGNQYRCGRDFAASVGLVPRQYSTGGKATLLGISRRGDKNIRRLLVTCARAYMLRLEGRTGHLAEWVRAMLTRRHSNVVACALANKLARTAWSLAAHGTAYCAGLTVASD

SEQ ID NO: 417364 - protein, 374 aa, unidentified
MHKYIWVGLDVHKVTIAVAVAKGEEVPHSLGTIPNDPDAIAKLMRKLGPSARLRVCYEAGPCGYVLYRQLTAMGIDCAVVAPTLVPVRAGDRVKTDRRDALKLARLLRSGELTAVAVPDEAHEALRDLVRAREAAHKDLRRARHRLQKFLLRQGHRCPLRTKAWGVRYLAWVSGLHFAHAPQSVVHREYLAEVERLAERRTRLDRELEVALAQAPAPIQTVVRALQVLRGVAFVTAVTAVAEVGQFRRFTRARQLMAYSGLVPRESSSGDTVWRGAITKTGNAHLRRVLIEAAWQYRHQPRAGITIRQRRKGQAAALCAIAEKADHRLHLRYRRLLARGKSKGKVVTAIGRELLGFLWAVAVHAENGSTMPAAA

SEQ ID NO: 417365 - protein, 377 aa, unidentified
MHSENIAAYIGLDVHKETLAVAIAAPERLGEVRYYGTINNEAQAVRRLFQKLQGLYGNILSCYEAGPCGFGLYHQLTAMNIKCQVIAPSRIPKSPTDRIKNDHRDAISLARLLRAGELTPVWIPDLTHEAMRDLIRARAAAKRDSRVARQRILSMLLRTDKRYVGKHWTGKHRTWLANQSFSQPSQQIAFQHYCQSLEQIEDRILQLDQEISRLLPEWSLCNLVCQLQALKGVGQLTAITLVAELGDFSRFSSPKQLMAFLGLVPGEYSSGNSIRPRGITKVGNSELRRLLYEAAWSYRTPAKVGAWLIYYRPDSVTQYSKDIAWKAQQRLCSRYRSLTAKGKKSQVAITAVARELTGFMWDIALAAQSPFSQQKQN

SEQ ID NO: 417366 - protein, 335 aa, unidentified
MLRLLHRWREEAVGAGHAIERITIAYEAGRDGFWLARCLRARDIEAFVIHSTSIAVSREHKRAKTDRLDTDLLKRAFLGWLRGEPDHCHMAAIPTLNEEDARRPSRERENLVSQQTSLINRMKACLVRLGIRNFKPTLRQASERLETVRTPEGAPLPPNTLIELRRDMARLRLVRDQIKEIEAARMQRLSQAPEEGPHAMVRLLSRVVGVGVETADMLVHEILSRPLRDRRAIARYAGLTGAPDESGRRRREKGLARAGNARVRRGMIQLAWRFLQFQKDSDLVRWFHARTSDGRSGIRKTMIVALARKLIVAFWRMTTTGEVPQGVTLGCVTVS

SEQ ID NO: 417367 - protein, 430 aa, unidentified
MNEDLFARLSRRYLALDIHKHYSVVAGVNFEGQVVLEPVRIEHADLEGWLVKNIQPTDYVVIESTTNAWHIYDLLEPLAEKVVVANPIKVKQIAQARVKTDIRDTLILARLLAANMVPAIWVPPAHVRNLRYLLSQRRHLVGMHTQTVNRMHSMAHRHHLSHPKGKRFNEKNTKWQRDDELSDSEKFQLELDMSTKEHLAEQTEKITEKLRRMSHQNPWAESMMYLMQLPGFGVITGMTVLGAIGEITRFEDFKKLSSYSGLTPGVEQSGVKNRGKRITKEGRKDLRWATLAPHCVWCSAGVVEVARRAVKSDPLWTHRFIELCRRMHKNQAIVAIARRLLELVWYVLSRKQAYRNFSDERIAYKYLTWSWQLSEKDRDGLTRQQFTRYYLMRLGIGHDLEQIALNPRYKRNLASEAEVLALRPELKQTE

SEQ ID NO: 417368 - protein, 334 aa, unidentified
MLGIDVSKKTLVCTLLAPDTQKILWRKEVENSEAGIATLSANVPAASPWILEPTGRYSTPVAKSAQAVGRDVRLAPSREAKAFLQSLPHRAKTDKIDSHGLAVFGCSRVLPKYPVKEASVETLDQLLSARKLLAKSVTKLHQQQQELPEAAPYLQVALAALSAQVTALDKQIASLCQTTPAFASVKRLQSVPGIGPVTSAAVTSRLAAKGFAHPDAFVAYCGLDLRVADSGEKRGKRTVSKRGDAELRRLLYLAAQSNLRCKSSPFKDQYERERAKGLSSTAALVAVARKLAKVCWSLHKHGATYEESRVTVQGKSPQNTASTQIFASALDKQP

SEQ ID NO: 417369 - protein, 383 aa, unidentified
MAVGALTTKNGDKHMKKHKHYVGLDVHKDTIVVAIAEAGRGGEVRSYGTIANTPYAFERLIAKIGGESVELHVAYEAGPTGFVLYRWMKKRGIDCIVVAPSRIPQSPGPHQKTDRRDAIQLARLHRAGELTAIHVPDETDEAIRDLTRARLDAVADRTRARNRLKGFLLRHGYRYSGKSNWSEAHMRYLRTLELPSPIHKSVLEEYLLTIDQAVERVDRLEALIEVRAPQWRFYSAVQALMCLRGFKLTAATVLIAELGDVKRFAHPRQLMGFLGLVPKENTTGKARRLGSITKSGNVQARWILIEAAHHAFHPPTVSRSLALRQAGQPEPYKALSWKAQSRLHKRGWHLLKRGLMKQKVVTALARELAGFVWALLSQVPSPA

SEQ ID NO: 417370 - protein, 338 aa, unidentified
MYQYIGVDVSNQTLQVFDGLRDFTFPNETKLMEFDFFIREWKKKIKQSESIDTELVIIFEPTGPYSSYLRDYCSKKKLKAHIMNPMQSSYFAKASGNRSKSDPIDARMLYSYHIMLNHKKCLVPILTDHVKKLSSYLKSYQLLIKTETAFQNHFQSTEREGSASKTLLKVLKKGIQHIQKEKDQVLEEVISYIKADLVLADSYQNLCSIPGVGPLTSINLLIHFLKFPTANRNQLTSLAGLDPAVKTSGTSLNKKPHISKRGNTLLRKTLYCAAISGVQCNPDLAKQYEHLQERKKPKKVALVAIMRQILLMSHSLYLEKRKYEVREVKKAKPILNFS

SEQ ID NO: 417371 - protein, 391 aa, unidentified
MAMYFVGIDISKYKHDCCIISAVDQKIVSKLTVKNDKAGFEQLLTVFNSLSNPDNIKIGFESTAHYALNLELFLENAHHSFMEINPLLIKEYKKSTSLRRTKTDSVDCESIARWLMTVEYKPHSKGFYHSYSLKSLTRLRDRLIRQRSFYLVKITNVLDHTFPEFKPFFHERLSKTALYLLENYGSAEKMVKMNSAAYEKLRSLSRGKFSPQQFIRLKELAANTVGVNNSIFDVELNSLLALYKSLIKEIDTLEKEINRLIEEVHPHYMSVPGIGPISAAVIYSEYGDISSFSTPAQMLAFAGIEPGINDSGTESHGGRMVKHGSSQLRYVLINCCLPLIRFDMTFAAYYAKKRGEGKPHRVAVTHVAKKLVRVIYALERQGVDFNALKLR

SEQ ID NO: 417372 - protein, 366 aa, unidentified
MRKNSTVQAFKSEIFEEQKLTIGLDLGDRWSFYCVLDEAGQVILEQKLPTTPEAMKQAFGKIPRSLIALETGTHSPWVSRLLTELGHKVIVAHAQKVQLITKSNRKDDRHDARTLARLARIDPALLGPVRHRSVQAQLHLTVIRARAELVSARTALVNAARGLVKSYGERLPKCGTYQVSRELAAALSTELRDVLEPLFKEIESLNERVKEYDERMEKIAKEVYPEVSLLKQVKGVGTQIALTYVLTIEDPYRFPKSRQVGCFLGLRPGRRNSGESEPQKGISKEGDRYLRTMMVQGAHYILGPFGEDSELRRWGLKLAERGGKNAKKRAVVAVAGKLAVLLHRLWVGGEVYEPLRNSQKAMREVA

SEQ ID NO: 417373 - protein, 403 aa, unidentified
MVFVGIDWAEAHHDICVVNEEGQVLAKRRVPEGLDGVGKLHALIAEHAEDPSRVVVGIEIDRGLLVGSLVAAGYQIYAINPLASSRYRDRHATSGAKSDPGDARVLADLVRTDRHKYRPLAGDSNLAEAVQILARAHQGLVWTRQRQVNQLRNALREFYPGALSAFDDLDAADAVAILQQAPTPIRGRALSQAKIISALRHGGRERNLEAKAVQIQAQLRLPQLEAPALLVEAYGHSVAATVAVIKQLNLQIAALEQELAASFEKHPDAEIYLSLPGLGVVLGARAMAEFGDDRTRFLHPKARKSYAGTAPITKASGTRKIVLARVARNRRLADACYQWAFSALTRSEGARHRYDVLRARGQTHHQALRALANRLVGVLHGCLVNRQAYSERIAWSALVEVAA

SEQ ID NO: 417374 - protein, 353 aa, unidentified
MLAGIDTHKDTLAVAVIDDTGRPVVVTELANTEAGFDALEQLLDKHPVTRVGIEGSGNYGRGAAVRLAMLGTAEVVEVPPSLTSRERAGRPGAGKTDPGDAVAIARITAREPNLPPVRLPIGAAADLRALADYRAQLVAERTTLASRVHAELHGLRPGYQHTITRLTGPTFTTAAKDLLAEDTSVRAALTRRRLTRLAELTAEIQEVTGLITAAVDEVQTGLTDLYGIGPVSAATILGEVADIRRYRSRHAFAAANGTAPIPASSGRTSRHRLNRSGNRTLNRVLYTMAITQIRADTEGRAYYLRKRAEGKTSREALRCLKRRLSDVVYKTLHEDLDAHLERQRTAVLAGEGR

SEQ ID NO: 417375 - protein, 403 aa, unidentified
MKHVIAFDVSMGKSYMVIYNAQKQCILEIEIKHSKPEFEKLQNKINELTNEAGELPAIVFEATGVYSRQLERFMQNNQYSYCLLNPLEAKLQCDSLRIHKTDRSDAHQLAVTHFTASRRERTFTNNLFCQLKSLSRFYNELDAELSVIRNRLHKVIQLTFPELEQIFTTKSDLFLNFVQLFPHPDLIQHLSKTIIKNRIRTISQKNISTRIAEQKAIKILEASKLSYLAVDFDDVLCEQLKTYAKRFQDLLGQKEKCINAMVDIAKQRTEYGIILSLPGVGPNTTVRLMAEIGDMARFTSHKQLNAYAGIDIRRYQSGKALFKDRINKRGNKHLRKLLFLIIQNMIKQRRYSQNHIVEYYDKLKTQPYNKCHKVASIACVNKLLKLLFYLITHDIHYDYRLAA

SEQ ID NO: 417376 - protein, 444 aa, unidentified
MLRFVGCDVHKRTAVFTLLLEDGTLFARYTVPVTREALTAFAERQLVGEDRLAMEATTNTWAVAGVLRPFVKEVVIGNPLRVRAIAEAKIKTDKVDSRVLAELLRCDYLPKVWQPDPETQRLRRLTHRRAALVSDRTRLKNRLHSILHHTLVPLPEGDLFSKKGLAWLRQVPLAQEEALARDSDLRLLEQTELEIAELDERLVREAWQDEKVRLVMSIPGIDYTVAQTCLAAIGDVSRFANAKKLAAYLGLNPSTRQSGEHCYHGKITKQGNAHARWLLVQAAQHLGQYRGPLGQTMRKMIKRKNRSVAVVACARKLAVLLWHVLTSGEPFRYAPARSLETKYSRLRVRATGQRRRGGVAKGTTRSAQYGHGRTRVVPSLPQVLAQNGLPAVAPLSKGERVMLERKRLDEFYRELQTPSRIQTNTRTTQVEEREEDVKSELTQS

SEQ ID NO: 417377 - protein, 317 aa, unidentified
MTVVGIDVAKASLAVALRTLSGTVRQKRCPNTPAGHAELLRWLRRHTDGAVHVGLEATGGYQDAVALALHDAGHTVSVFNPAALEAYSRSQLRRAKTDPTDAALIADYVRTQVPPGWSPPPTEMRQLQALERRLDALLGMRTQERNRLEPAAAIVRPSIEATLTHLETAITGIKAQIAAHIDQWPTLRQSRDLIVSIPGIGATTAAIILGELLQVTRFASARQLAAFSGLVPHVRHSGTSVRGRGTLSKLGAGRLRKALFFPALVAMRYNPVLRPFAARLRAAGKPPMVIVAAVMRKLVHQIYGILRSGRAYDPAHA

SEQ ID NO: 417378 - protein, 296 aa, unidentified
MTLFVGLDVSVKETAVCVVDDTGKVVCEQKVSTEPDDIVRLLASIGKDYGRVGIEAGPLSQWLVNGLTAAGLPVVCVETRHMMALLKAQQINKSDRNDARGIAQMMRVGLFKPVHVKTQMAQEQRMLLTSRKLLQRKLLDVESDLRGTLRNFGLKVGVVSTGKFEARIRELVAGFPRLTLVVEPLLAVRRAMRQQFAVLHKMLLDTVRHDPVCRQLMTAPGVGVVVALTYRATVDQPQRVVHSRTVGAHVGLTPRRHQSGEIDYDGGSPNPTIPCYVPCSTRRRSRCSPSPANGRG

SEQ ID NO: 417379 - protein, 418 aa, unidentified
MLKIVYPICCGIDVHKTFIYCCIATTDSKGITKYKSKRFSTFTNDLKRCADWLQENNCKDVCMESTGKYWIPVFNILEVSCNIVLAHPKYVKAIKGKKTDKKDAKWIADLFKHDLINGSFIPPADIRQLRDLTRYRYKLTNFTVGEKNRAQNCLTVSNIKLDAVFTDVFGKASSNIINALLLNPSEKISDVSQFRTRGMKSTNEEILAAIDGNICNEQAEKLKIIRSHMDSIEECKANLESVILNLAEKYLPQLNLILTVPGIKSFSAVSIISEIGVDMSVFPTSKNLVSWAGCCPRNDKSNKTVKSSRISRAGSCLKPTLVQVANAVIKSKDHPEFGIRYRRIKAHRGHKKAIIAICRMLLTAIWNVISKREPYSPDGYAVPQPSFVAKPLTKSQGLALLRQMGYVIKDDNPPPVPA

SEQ ID NO: 417380 - protein, 341 aa, unidentified
MDHVAIDLGGTESQICVRGPDGKVLEEIRWGTRRLAAYLKKRPPSRVILETSTEAFRIADAARELGHDVRVVPATLVPSLGVGARGVKTDRRDAQVLSEVSSRIELPSVHIPTEISRTWKSTCTARESLVSARTQLVNTVRGWTRSQLLSIRSGSLCTFPDRVRKAAIASSIGLPEFIESVLQVIATLNDRIAFADKQLKDLAIEHPVCERLMTIPGIGPVTAVRFVAAIDRVDRFRNAHALECYLGLVPGEDSSSKRQRRTAITKAGPPQVRWALGQAAWVLRQKYKSDPLALWAAEVEKRRGKMIATTALSRRLAGVMFAIWRDGTRYEPTRHRPPTPL

SEQ ID NO: 417381 - protein, 358 aa, unidentified
MKIYRVQDFVVKGKEVFLGLEDSKSTWKIAVRCERMLIHEVSMEARYPALIGYLRNKFPECAIHLMYEAGFKGFNLYDRLTEDSIDCVVIPPHMVTEPKVSKVKTDKRDAKRLAYILENHDFKDPCYVPDKERREDRQVSRTLMAVQKDIICNRNRVRKLLDFHGIEVPYADKNEWGRKEFCALRELPLSEPVRVGLNALLTILEQLWDQQIVLRDYLRGLCKKERYIKAFEIAKSLPGIGWFTAIRLILELGEDLSHFTNGKKIAGFVGLTSSEYSTGDTERKGRITGMGSGFIRYCLIENSWVAIRKDQALLSKFSRVWRSSGSKKKAIVAVARVLIVRLRACIIAGTPYRIGVVQ

SEQ ID NO: 417382 - protein, 339 aa, unidentified
MNFIGVDLHKKIITVCVMDEKLAVLARRTLYCDQPDRIVEFFRQFRPFKVVVEATASYHWLVELLEPLAEKVVLANPKKLRVIAESTKKTDRLDAQVLAEFLARDMIPQSYIPTPRQRQHRALVRQRQHIRGRMTAVRCKLRRVLSDYNADRRDLFSAKLGPEYTKQLALSDADRFVVGQLWADHEHYAKQLDELGGMLKEFAKKAPHREKEARAVLKTIPGVGAVTIEVVLSELGDITRFRNAKTVCAYAGLAPIVRQSGGKKAKDLGISKAGSGLLRWVLVEASWRAVRISPRWRRALERISKRAGGKRAIVAVARKLLCVVYAMLKTMTPYRILPT

SEQ ID NO: 417383 - protein, 279 aa, unidentified
MQITTVGLDIAKRVFQLHGVDAAGKAVLRRKLQRSEVLAFFKALPPCLVGMEACGTAHYWAREIRELGHEVRLMPPSYVAPYVKRGKTDAADAAAICEAVTRPTMRFVPIKTAEQQAVLMLHRTRDLLVRQRTTLVNALRGHMAELGVIAPQGIARVADLMAVLLGEDTTNVPALARQALRGLAAELEALDRRVKEIEVAIVTWHKDNEASRRLATIPGVGPIRASAIVAIITDPFQFHSARHLAAWIGLVPRQHSSGGKQRHRVIATCADCWCWVQPR

SEQ ID NO: 417384 - protein, 392 aa, unidentified
MLFIGIDVAKSKHDCCIIDGGGVVHTDSLSINNSKEGFDTLYSTILSILDSDDLSNIKIGLESTGHYSTNITHYLHSKGFHVHIMNPLATNLFRKAHTLRKTKTDKTDAKVIATMLFTDESKSYSPLSYQIQELKSLTRHRYRMIGYRSKLKLSVTRLIDIIFPELPSFVWSIHQISSYTLLLQLPTPSAISSCHLTKLTTLISKASRGQYGKEKAIALKELATNSIGSSNRSIAFELQQTIRLIQSVQQEIDALDRQIQLVVDELDTPLITIPGIGYTLAAIILAEIGDIHRFSTPSKLLAFAGMEPSTYQSGNYKASKTPMVKRGSTYLRWAVMQASRLVAMRDTTFKAYMAKKRSEGKHFCVAQSHVGKKLIRVIFYLLKNNIAFVPQM

SEQ ID NO: 417385 - protein, 378 aa, unidentified
MDRELLAKILTIGVTDRPPLGTIDPVLELGSSHHSLKSPNSCEGHRARISQGRELENTYEEVHMSFVGIDVSKLQLDIAVRPEGKRWSTGNTEAEIAKVVEMLTGVSPQVIVVEATGGMEMPLVAALGQACLPVVVVNPRQVRDFAKAMGRLAKTDRIDAEVLAHFGEAVKPEVRLLKDEDTQVLTALVTRRRQVIDMLTAEKNRLGISPKVVRKDIQKHIDWLQKRLEDMDRNLDSAIRNSPAWREKDDLLRSVPGVGQVLSVSLITGLPELGTLSRRQIAALVGVAPLNRDSGLFRGKRTVWGGRAHLRAVLYMAVLSASRANPTISIFYRRLIEAGKKPKVALTACMRKLLGILNAIVKNRTPWQADHSTCQAIK

SEQ ID NO: 417386 - protein, 348 aa, unidentified
MKNIVIGIDISKKTTDWCLVDGTKVVSYHNVENKIGTIEAKLRELMKSMPMEPCNLMVCAEHTGHYTYPLTIACHNLGIDLWLESGYNIKCEARKERGKSDKEDSRRIAEYGYKNQCDARFHVLPSKELSLLDSLLSERDSYVTEKAKLEGQLHDQKDFTDPDAYKAKAKRLKKLIGQYAKSISEVEAEMEKVMKSDDTMRHQSELLQTIPGVGRQTAMAMIVATDCFTLFENGRQFCCYAGTAPFTYNSGTSIRSKSRVSHRANKSMKSLLHLCAVSLLRTKKQANQFVEYYRRKIEEGKNAMSVLNAIRSKLILTMFAIIRTDEPYSMEVVHNYVEKYSGKSIVKP

SEQ ID NO: 417387 - protein, 416 aa, unidentified
MELIVERAAALDVGKDEVVACIRVPDPAGGGRGRGRRRQEVRTYPTFTSSLETLADWLQAEDVTQVVMEATGQYWKPIWWVLEERGLELLLVNARHVKILPGRKTDVGDAAWLCELLECGLLRGSFVPPPQIRELRDLVRYRKRLIQAHSAECQRIQKTLEDAGIKLDSVAADVLGVSGRAMLAALVGGERDPQVLAELARGRLRAKLPQLRQALRGRFGEHHALLVGLALDHLEHLEAAIARLDARVDEVIAPFAVARDRLDTITGVGKRAAEVIIAEIGVDMSVFPTAGHLASWAGRCPGNNLTGGKRRSGKPTKGNHWLADVLTECAWAAARSRDTYLAAQFWRLARRIGKKKAAMAVGHSILVICWYLLTEDCDYHDLGGDFFIRRDSDRARQRAVAQLQALGYQVTLQPAA

SEQ ID NO: 417388 - protein, 387 aa, unidentified
MKQSTTPSAARATRLNSMSMSSRKEASMQGASAATWPTSVTVGLDLGDRCSHFCVLDAGGQPLEQGRVAMSPAELTTFFERVGPARLVVEVGGHSPWVSRLAQAAGMEVIVANPRRVQLITRNERKNDRTDAELLARLGRVDAQLLSPVTHRSVEHQADLAVKRARDAAVASRTALINHVRGAIKSFGLRLPTCSPDGFHRRVLAHLPKELAPALEPIVRLISQATVEIKNFDAQIEQLADERYPVTKVLRQVSGVGPVTALSFVLTLDTPERVSDSRQVGPYLGLVPRTHDSGASSPQLRITKAGDPGLRRLLVIAANYILGPFGPDCDLRRFGLKLAAQGGKNGRKRAKVAVARKLAVLLHHLWKTGEVYDPFHLAKKRGELVPA

SEQ ID NO: 417389 - protein, 374 aa, unidentified
MMKNTRYVGLDVHGETIAAAIGEGHGKARSLGQFPNRPESVRRFIEQLGGPEGLKICYEAGPTGYALYWQLTKMGIECEVVAPSLIPRKPGDKIKTDRRDAEKLALCYQSGTLTPVWVPDAAHEALRDLVRARAATKRDESRAKHRLVKYLLRNGLRHPEDSRAWTHPWWRWVQAIKFDFEPQQVTLGDCVAEVLHQGERLGRLDLAIDHAIASAPPEKRAVVEALQAMRGVAKLTAVTIVTEVGTFQRFRKPTELMGYTGLVPSEYSSGGREAKGRITRTGNAHLRHVLGEAAWHARHRPWLNVRLKKTLPTLPAGVSEIAWKAQERLHRKFTKLTFHRKPPAKVATAVAREFVGFIWAIGRLAESHATAGTT

SEQ ID NO: 417390 - protein, 341 aa, unidentified
MQITTVGLDIAKNVFQVHGIDTEERVVVRKQLRRGQVIRFFEGLSPCLVGLEACATSHYWARELTKLGHEVRLMPAKDVKAYVKRNKNDAADAEAICEAVRRPTMRFVQVKSAEQQAQLMQHRARDLLMSQRTQLINAMRSHLAELGIIAPQGREGVKELLAIVANDATSHLPNDARASLLVLAAQLQALQTTIGAIEKRIVVQHRADKQSKRLQTIPGIGPIGASAIAATVTNPKIFRSGRDFAAWIGLVPRQMSTGGKLKLGPISKQGDRYLRRLLVVGAVSTLRRAKQNPQKFPWITRLLARRPFKVVAVALANKMARIAWALLISDKTCRSAWFAAA

SEQ ID NO: 417391 - protein, 434 aa, unidentified
MIAAVIERCAGIDVGKKFITVCVMTGPADGEARSETRSFGTTVAELEQARTWITAEGCTDVIMESTGSYWKPVFNILEGHVRVALANPHQVKARKGHKTDPKDAWWLAHLLRHGMVTPSFIPPRPQRELRDLTRRRRKLIQAASAEKNRVGKVLEDANVKLGSVLSDIFGVSGQLMLEALLAGRAGAPEIAEFARASARKKIPDIIAALEQHQMNEHHRRMIRFSLEHMRFLEEQLAEIDQVIGEHIQQAGYGPQWELLRTLPAVRENAAAVLAEMGPDPSQFPNEKHLGSWSGLCPGNQRSAGRDKSSHTNKGNKWLRAALTESAWGVSRMKEGHLREKFWRIAGKGEPKRSRPIAVVAIAHDLLKLAYFVLQRGTPYEEDRGHPISEQQKQRLIQHHVRRLGKLGVPVRLVPASTDGKSRASCKRKRPSANP

SEQ ID NO: 417392 - protein, 377 aa, unidentified
MKNCTRYLGLDVHAETITAAIAEGRDRIRNLGKFPNRTEAVRKFIAKLGGGKNLKVCYEAGPTGYALYWQLTQLGVDCEVIAPSLIPKKSGDKVKTDRRDAEKLARSYQSGDLTPVWVPTPEHEALRDLVRQRAAAKGDESRAKHRLVTLLLRHASREPNGSRAWTHPWWRWVQALKFEHESRQIVLADCIAEVLHMGERLARLDKAIERMVESAPPHMRAMIAALQALRGVAKLTAVTIVTEVGTFQRFHRPTQMMGYTGLVPCEHSSGSRHAQGGVTHTGNAHLRSVLVEAAWHARHRPWLNRRLKQLLPTLPADVAEVAWKAQERLHKKFSKMIYSRKHAGVVAAAVARELVGFIWAIGTMVEAKHNETMPKAA

SEQ ID NO: 417393 - protein, 393 aa, unidentified
MQTPIYVGIDVSKDKFDYAAIDTQNTTIKKGSLQMNRDGFQELEKLIQSYPNAVVGFESTGTYHINIMSFLLSITNHVHLLNPALVKKFAEADSLRKTKTDAVDALVIARFLIHRQHNISATTEIDSAYLTQLARLRESITRDVAKTKTHLKQMLNIAFPELLKSANVFTDTLLHILIQFPSAKAIRKATKKGIRKTFYNLTKSRGKNPNLNPDQLYELAKKSIGTADESLEMAIQFDIKHLEFLQKQLDEVTSKLIDNVNKHFANELEILKSIKGIGDTTASHFLSEVKNIHRFSSAKQLIAYSGTDPSVKQSGNMIKKGKISKRGVSSLRRVGYLITCSVIRHDGVFRDYYLRKRAEGMVYRKAVIATWNKLLRVIFAILTKQVKFDHNHG

SEQ ID NO: 417394 - protein, 392 aa, unidentified
MAGASTDRVVIAVDPHKASWTAAAVDASLQPLDVIRVPVSAQGYQALRRFAKRWSDPGWAIEGAGGLGATLAQRLCADGIEVADVPAKLAARVRVLSTEHGRKTDEADAVSVGIAAMTATRLNTATIDAAVTAMRALVEHRDDLVKTRTQTVNRLHVLLTHLTPAGAPRGLTADRAADILRPIRPREPAVKTLRSLAVDLVAEIRALDRRIAKAAGDIQAAVDSSGSTLTELCGIGTLNAAKILSRVGSIHRFRSAAAFGSYTGTAPIDVSSGDVTRHRLSRAGDRQLNCCLHNMAITQIARDTPGRAYYRRKRAAGKSHREALRCLKRRLSDVVYRHLLRDAATRAGAGPAGHTEATQASSAAGSHPYTSTSDQSLTGPANRHPTTVDQIA

SEQ ID NO: 417395 - protein, 376 aa, unidentified
MSNLRFIGLDVHAETIAVAVAEPRGEVRSMGVIPNRAAAIRQLIKKLGPTKRLRVCYEAGPTGYVVYWQLTALGVACDVVAPTLVPVKPGDRVKTDRRDALKLARSYRAGDLTPVWVPDAAHEALRDLVRAREAAKKDQLRARHRLSKFLLRQGRRPPTGVKAWTQAYLTWVRREVRFAHAAQEATLVDYLHEVDHVAGRLERLEQALDAAVQTAPARMRAVIAALQALRGIAQLSAVTIVAELGALARFGNPRRLMGYSGAVASEHSSGERTQRGGITKTGNAHLRRIVIEAAWAYRHRPALGATLRKRQATLDDGVKATAWKAQHRLHARYRALLARGKTPQQAATAVGRELLGFIWAIAVAVEAQTTDAPKAA

SEQ ID NO: 417396 - protein, 316 aa, unidentified
MNTNTEIIVGIDISKKNLDIQIQEDGPYFTCGNDLMGIDNLVEKLRSVQPSLIVLEATGGYEKAVVSALVEAELPVTIVTPLWVRYFAKSSGTLAKTDKIDAKMLVRYGRANLPPVVIKRSEEQERLSELMTRRSQVSLALITEKNHLENVTSEVVKKSIQKTILFLKQEIKELEAEIDEIVKSYPTLKNNEQIISSIPGAGKITAAILLADLPELGTLDHKKIAALVGVAPFNRDSGNNRGKRRIKGGRRSVRKVLFMAALAAIKWNPVIKEFYERLLAGGKVKKVAIVACMHKLLTIMNAMIRSQTSWKPIATP

SEQ ID NO: 417397 - protein, 354 aa, unidentified
MPSIALTRHDVIIGVDTHKDQHVAVAIDGLGGQIGDSRQVAANPDGYAELLTWACSLGNLHAFGVEGCGSYGLGLARFLRRHEYVVREVARPPRKGQRRLAGKSDPIDAEHAARTVLSGTGTATPKLACGQIEAMRLIKIARDSAVKARTTTIISLRAVLVTASDELRLELEPLSEHKLVLACAALEVGDNLANPRVAMRHTLSYLAERWLSLHEEIKVHTTHLKTSTKAAAPQMLERPGVGFDSTAEMLIAAGDNTDRIRSEAAFAKLCGVCPIPTGSGKTSGRHRLNRGGNRRANAALYRVVLVRMRWHAPTIAYVERRTLEGLSKKDIIRCPKRFVAREFYQLLPTVSENP

SEQ ID NO: 417398 - protein, 517 aa, unidentified
MLPNNDCPTNFQGEFYHMPLSNTQSQSTQQKQPSRNLRSLKNAAALPAASPVTAQAEPVISPATASDPSVRYVGLDVHKKQITYCILDRDGVTLREGEIMLTRERLTHFAKDILQPTDRVALESTTNCWAVVQHLQPHVPNVVVSNPMATKAIAHSKIKTDKVDAKVLAQLLRCDFLPTVWQPDEATRLRRQLTGRRASLVGQRTQLQNRIHSVLAMRLIIPPGDYALFGTRGLAWLKTLTEETIDLDGLMMIQSDLRLMENLQTEIDVFDLRLARLAYDDERVKLLMTIPGVSIVVGQALVAAFGDITRFESGDSAANYLGLTPSTRQSANTVYHGPITKHGNSTARMMLVQAAQQYSRQAGPLGHFFQRLKRRKCHNVAVVATARKLAIIAWRLLTTGEPYRYAQPAATATKLASLRIAAGGEKRRGGSPRGVKPTAKLPGGSKTIRSLDDTYENEGLPTRSPLLPGELRHLADTNTLQFAEKISKSQLIPRKPNANAQTAKNTGRQPENSRSEK

SEQ ID NO: 417399 - protein, 468 aa, unidentified
MPSASTHRKRQLDELACVHPNAAGLDIGSEEIVVAVPPDRDPQPVRVFQTFTADLHALVAWLVACGIDTVALESTGVFWIPIYELLEAAGIVPYLVNARHVKTVPGRKTDWNDAQWLQKLHALGLLHASFRPDAEIRTLRTLARYRSELVERRAPHINHMIQALKHMNIQLNLVLSDITGVSGLAMLRAIIAGERDAERLAEFRQPGCKHSFAEIVKALTGTWDDAQIFILTQSVELFDYYSTKLEACDGQLEQQYQAMESRWEKDAPLPDLPPAKGESKSKNAMSFNARAQIARVIGVDLVAVMGLSAITVQTIISEIGTDMERFPTVKHFCSWLGLAPHNDISGGKVLRSRTMKVHSRANQAFRQAAHSVARSHSSIGAYYRAMRARLGPKQAIVATAHKIARIVYHLLKTGEPYREESDVEYERKRQEREIKHLARRAQKLGYTLTAVSATASESPPKPRGDGSF

SEQ ID NO: 417400 - protein, 461 aa, unidentified
MESYLGIDVSKGYADFILLSQEKTVLEKVFQLDDNRAGHDALKNMLGKLIKKHHISMLYCAVESTGGFENNWYSSLIGLSKTMDLKVARLNPSGVKKNADAGLRRNVTDALSAFYIAEYLIGHSEKVEYNEQSSQYASFRSINKHIKLQLKQQTQIINQLKMALYSAFPEMVCYCRNSVPNWVLEVLIKYPTASKLKNISIGKLCKNKHVTSDKAESLIKKAKTSVGSRTEDADGFLITSLAEQLIEKQQLIKKHKQYLEKHCKGPEVTLAESITGIGAYSAAAIMVEIEDINRFASPKKLVSYFGLHPELKESGDKKAVARMSKKGRSSMRGILFMCAQTAVMHDSHFKGIYHNQRKKGMGHKQAIGVIMQKMLRVVWGVLTYKKAYHSDIDKQNQDRKVVAIVNHNERQELKAKRRYNALATDAPVSNKQSKKRKVHLESQAELVGQVRDHQNTPGVKI

SEQ ID NO: 417401 - protein, 332 aa, unidentified
MMAQNELVVVGIDVAKDKVDACIRSLSQRQTFPSGAEGRRKLIAWLRKHKVGRAAMEASGGYERDWAKALREAGIEARIVDPKRVRSFARSAGRLAKNDAIDAAMIAWFAETFTDAPSQTCDAARDKLVQIVKARQGLLDMQTSLQNKGEHAAPEVVQNMQARLLKKIVLEVAKLEAAIAALIKGTPHLAELVEIIESVPGLGKITSAGLVAAMPELGQVSNNVVAALLGVAPYDDDSGQRRGDRHIKGGRRKVRNLFYMACLGAATRHNPVLKAFYDRLIAKGKEPKVALTACMRKLICILNTMIARREKWDATRYQMSDPARLPPSPCIA

SEQ ID NO: 417402 - protein, 424 aa, unidentified
MNCTQNERINQVSEQTLVIGVDIASELNYARAFNWRGIEKGKVFKFFNNLEGFQAFNEWAHQVMSANKLTNLIVAAEPTGHYWFGLADYLKDEKLKLVLVNPFHVNRAKELDDNHPSKTDAKDSKTIAKLVIEGRYMEPYIPEGVYADLRIMYNCRQKVTKAMISLENQLKRWFKIYFPEYLSVFGNLSGQGSMAVLEKAVLPEDIISLGVDGINKLWRERKLRAVGMKRAESLYEAAVKSIGRREGSVGGRAEFRMLWEDYCHKMEQMEKLNIELESLLHKVPQAEEVLKMKGIGVVSVAGFFAEVGDLRRFESPKQIQKLAGLAIRENSSGKHKGQTTISKRGRARLRAVLFNAAIALVGRNGAFKSIHEYYIGRKANPLKKKQSIVAVSCKLIRIIYAICRHKEAYDEAKMLRDIRREQLA

SEQ ID NO: 417403 - protein, 351 aa, unidentified
MDKITRVGVDLAKRQVQVHAVDGGERVVLARAMGRERFAQWLAQLPAGCVVAMEACSGAHHWARRMRALGLEPRLIAPHFVTPYRMEGKGGKNDAADAAAICEAASRPKMRFVAPKSCAQQGVLAIHRLREGYKEERTACTNRVRGVLSEFGLVVAQSAEQLRCALPLLLEDASNELTADVRLGLERAMTHWRELDEQIAWCDQRIAAHAREDAQAREAMKIRGIGVTGASALVASVADFRQFERAAQFAAWIGLVPRQHSSGGKTQLGRITKRGDDYLRTLLIQGARSAVANAARHDDPVSRWIVQLLARVGWQKTLIAVANKNARMLWAVLARGRSFDLHHVPRHPHAA

SEQ ID NO: 417404 - protein, 368 aa, unidentified
MGNFLSIQNKLLMEQIIKQCVGIDIAKKDFEVTFSVCDVFREIDYLGSRKFINDFSGFKAFNKWIGKFEKKSIPLQFVMEATGVYHEHLAHFLFDLNLDVSVVLAKRAKDFSKTLKVKKTTDKIASRYLSVMGLEKKLDLWVKPAEVYAKLKRLGREKEQVQGRIVQLKNQLHAENSCVWPSKNTIKRMKQTLKFLQKQKQEILNEIKQVVDSDKKLKAIVEKVTTIPGVGLITAVAVIGETNGFNQIRNKRQLVSYAGYDIINQESGSSIRTKPRISKRGNKNIRKAMHMPALASIRAGGNSKELFVRLVSRSGIKMKGVVAVQRKLLIMIYTLWKNDTVFDPDYETKKGGNLKSPRELDLVRSIES

SEQ ID NO: 417405 - protein, 331 aa, unidentified
MQISHFVGIDISKETLDAALYPSRDRKTDFLHFANSTKGLGEMMSWLKSRGVKSSELLICAEHTGIYTNTLIAFAHKKGIALSLNSPLDIKRSIGLARGKNDAVDAARIAEFAYTRRDKLRLYEKPSEGIIKLQYLLTERRQYVRQRTAIINLHSAMGQYETSAGRSRNESAINHTEKLIKKVEEQMHTVISEDPAIKRNFDLVHSVKGIGLINAINTIVYTNNFKSFESPRKYACYIGVAPFDYTSGTSIRGKTQVSKICRTQQKAELSMAARSAIVHDPGLRRYYQRKMKEKGGDKSAHGIVINAIKFKLILRMFAVVRAGEPYRVLNY

SEQ ID NO: 417406 - protein, 328 aa, unidentified
MHFIGTDVSKLTLDLAYFAQQRTDWSRPCKLSNNPQGWDTLILWAQNQTQALREDICIVMEATGVYHLKVAAYLSREGLNVVIVNPQRASQYAKSQNQQNKSDKLDARALQQYGSQLKKYHLFIPDTPEISQLKALLSRMHQLGKDLRRERNRLEKCAFQEGGSFARTSIKRTIKFNLSEQQRTQQQIDQLIKQNRALKHNQKLLCSIKGIGKLTSQWLLPLLSTQRFKSAREAAAFLGLVPCHKSSGTSLKTRGRLSGRGDANLRSRMYMPAVCAITHDPAMKAFYQQLVLKGKAPKVAITAVMRKLVHVCYGVIKHQSPYMENYAA

SEQ ID NO: 417407 - protein, 346 aa, unidentified
MLYAGLDLSRKRLDFHLLDAEGATVQVGAAPPDADGLRGLSERIAVHDEPIRAAIESMNGARFVHDQLERAGWQVEIADAQKVKGLAPLACKTDRIDAWVLAELSRRELVPAIWLPDPHVRAERERARWRLHLVRHRSSLKQRVHAVLLAHGKPCPVSDLFGVSGRKLLARLALPEPWYGNVQASLRLIDELDREIDDCEHELRRLGADHRYVPLLCTVPGISWVLAYTIAAELGDIARFPTPRKLAGYSGLCPRVYQSGESDRRGPLSKQGPKYLRWALVEASTHACTHPAYRDRYLRTRTRLGKQRGAKVAQVDLARRLAEAIWHMLSRNQPFAPAGATDPLAA

SEQ ID NO: 417408 - protein, 409 aa, unidentified
MRYYLGVDWADQTHAVWVVDERGTKLTARTVPHTAEGLSEWGRELDAWRAQGLELWAAIERPDGRVVDFLLDHGVVVYPVNPKALDRARDRFRQSGAKSDPFDARVLAEFLRTDHAHLRALQPSSEAAQELKLLTEDCQRQVRQQTRLVNQLTATLKAYYPRALEVAELTTALAREFLQAYPTPAAVAGLTERQWPRWARAQRLGEARTQELWAVLQRPQLPVPAHVVRAKARLMQTLLTQLGPVVAAVGEYRQAVEDFFAAMPAAQWIRTLPIGDHGVTAPTLWARLGDAPGRWESFHHLQAQAGSVPVTVKSGKQHVVHFRFACDKMLRYVVDQVAFLSLRSSEWARAYYDEQRARGHSHHEALRALGAKWVKIIFVLWERQVPYDEQYHLATMARQQLRQRPKKIA

SEQ ID NO: 417409 - protein, 350 aa, unidentified
MSNATRWIGIDLHRRRSQIAVIDEHGELTVSKRIVNDRDTFRELLGDPEGAHVVLEATYGWEWLAELLEEAGYDLHLAHPLRTRAIAAARVKTDAIDAKTLAQLLRAGFLPEAYIAPRELRDLRELLRHRATLTRMRSAVKNRVHAILAKHGITNEYSDLFGKGGRAFLTNLQLRDAPRRRLDSLLSLVEDFDREINQTTTEIEQQAKLDDRVEVLTQIRGVGRYTAMLIIAEVGDIHRFPSARHLCAWAGLTPTVRSSDGKARIGHISRQGSPALRWALVEAAQKITTGSGPLRDKYERIAKRRGRKIAKVAVAREILTLAFYGLRDGEIRCLARRSRASAKAKLATAA

SEQ ID NO: 417410 - protein, 410 aa, unidentified
MLSIVYPNCCGIDVHKTFVVATIAITDDHGITHYYQKRFSTFTKGLRALNEWLDYYSCFDVCMESTGKYWIPVFNLLESSRHVCLAHPKYLKAIKGKKTDKKDSKWIADLFKHDLLMSSFIPELPIRELRDLTRYHFKLTNIASSEKNRLQNSLTVSNIALSSVLSDTLGVSGRRIIDAILEKPIDEIDLPALIHGRLKNKLSDLELAIDGKITPEQAGKMRIIKGHYDSLMASKDQLTQLIFTTATPYERERKLIQTAPGCANPLTAVKILSEIGVDMTHFPTAGHLCSWAGLTPTNNESASKKKSVRISRAGQYLKPLLVQLANAVVRSEKHAEHRQKYLQLKKRRGHKKAIIAIARRLLTAIYYMLLRDEPYNASLYKTEGLRPGREMTVEQAISFAKSHGFSIKVS

SEQ ID NO: 417411 - protein, 364 aa, unidentified
MAEERRFVVGGADTHRDRHCAAAVDATGAQLGCRFFAADGGGCAELVSWLEGLGELRALGVEGSGGYGAGLCAYAQGRGAPVVEVSWPDRAERRRRGKSDQMDAYHAAASVLSGRAHGPAKDRRGDVEGLRALRVACEGAVKARTAARNSLHALVAAAPDRMRARLRALPARELVGACASLRAPGEGPLDAERAAEAALRSVARRVRALDGEAAELGALIDAMTLELAPATRALPQVGPQCAAALVLCAGASPGRLASEASFSALCGASPVPVSSGRTDRHRLSLAGDRRANSALYLIAIGRMRSPGESRDFVAARMASGKTKREATRMLKRYIARQVFHALRRDLARLAGASGADGGPARTAP

SEQ ID NO: 417412 - protein, 336 aa, unidentified
MTIIRVGLDTSKHVFQMHGVDENEQPVLRRQIGRGAVEKFFAKLPSTRIGIEACGASHHWARLLRGLGHEVLLMPPQYIKAYVKRGKNDKIDAEAICEAMSRPTMRFVPVKTAEQQAALTMLGVRDLLVKQRTMLINAIRGHAAEFGVTTAKGPKQIAELLARLASDEDVPGLAREMIGVLASQLNGLDIKLKALEARLMTWHRQDQTSQCLATIPGIGPIGGVSFALKVPDAKAFRSGRRFAAWVGITPREDSTAGRQKLGRISRAGDEDLRRLLVIGATAVIRAAKPGRTAPWLMGLLARKPKKVAAVALANKMARIVWAMMVSGETYRRPAQA

SEQ ID NO: 417413 - protein, 356 aa, unidentified
MLNKFSKNLDFTGHNVYVGLDVHGDSWAVNIIVDEIEHRRFTQPPNPVVLYNYLCKNFPGASYYSAYECGFCGYHHHRKLLELGIHNIVINPADLPITDKEKTNKRDPMDSRRISRALQNNQLKGIYVFNPDHEQFRSLNRMRWRAAKENRRVKNRIRSFLHYYGINPPEELNPEYWSIAFLNWLKQLRLPTEAGTMALDYLLIAYQNTRTQVLQVTKHIRRQVKLHYSNVYKRLITVPGIGPINAMCMIAEIGDMSRFKSCKHLASFVGLVPRSHQSGSKDPNCSLTYRSNKYLRSALVESSWMALRYDPALLKYYKERIVKHKAQVVITKIAHKLLNRIRNVWLNENTYQIGLS

SEQ ID NO: 417414 - protein, 374 aa, unidentified
MEQSTAFVGLDVHKDSISVALMSAEGVAVELGQIVNNPAAVRKLVQRLAAKHSRLSLTYEAGPCGYGLYRQLKDMGHECLVAAPSLIPKRPGDRIKTDRRDAMMLARLLRMGELTAVWVPDAHHEAVRDLVRCRDDFKQVERRCRQRLLAFLLRQGRHYDKKNWTLEHRRWLKSQQFDHQEHEKVFTNYLYAIMESEERIGQLEREMAEALGSWSLAPLVHGWMAMRGVKLVVAMTLASELGDVSRFVRPDGLMSFVGMVPSERSSGQSRRQGGITKSGNRHVRHVIIESAWAYRHKPCLSASLRARGKDASEAVRAIAWKAQKRLHKRYHRLASLCKPSQVAVTAVAREELGFIWAIGCQVIREQQSPVKAGV

SEQ ID NO: 417415 - protein, 325 aa, unidentified
MQGKEVSEQETLKCSAGIDVSKSWLDVHILPASESLRVANAREGMRRLKRWLLVRKVELVAVEATGKWHRELVRSLVASKIAVAVTDPYRVRMFAKAHGIFAKTDHLDAKVLAMFAALMAPKCRPPAGEALEAMQELVTARNSAVAEETALKNQRSAATTPFLKAQLRRRLDQLSGHIKAIEKECLKRIKTDDALARRFAILISIPGFGPVVAMTLIAFLDELGKLTDKQIAALAGLAPVADDSGERRGVRVIWGGRASVRRMLYLAALSAKTCNPAMTAFHARLAAKGKAPKAALIAIARKLAILANILVAQNRLWQPEAPQNA

SEQ ID NO: 417416 - protein, 382 aa, unidentified
MRTIALDLGKMAIDWCEVKDGLVIGRGRVRSLEHLAPHLGEGTGAAVVGFEACRDSRHVHDVLTSWGQTPRVFDTTRVRRLGVGEHGRKNDRLDAEKLAMALERNHAAFAHVLGDDARQLRELQEMHRALVHARKRAITHVRGLLQGRGVRLPSCAAEHFVANVEEAHLPAPLKRLIEPLLGPLQSIEPELARVDLRIQELVSQQRDPVVERLASVPGVSLLVAAAFISAVDAPERFDKASQVSSYLGLCPREESTGGRHKLGSITKQGNAYARAMLVQAAWCVVRSRDSKDTLVRWAHRTAERRGRMRAAVAVARRLSRILWSLWRNGCYYDRSETSPTAAALAKPAQEQARKRGELKLARQKRGNQRTLQAAIARSEAMA

SEQ ID NO: 417417 - protein, 349 aa, unidentified
MTMTIVEAPPSITGGVDTHLDVHVAAALDPLGRLIGTESFTTDAAGYRDLLAWLSGFGEVTKVGVEGTGSYGAGLARFLRRQGVHVTEVNRPNRQARRNAGKSDTLDAVEAARAALSGRASGHAKTKDGAVEAIRVLVVAKRSARQARVKAIVQMRHLGVSAPDELHQQIKGLSVTALVHDSARLRPSRSPDPVTAATKSSLSSLAHRIQSLDAEIASLDEQIASLVHAAAPDLIGLFGVGPDTAASLLVAAGDNPERLHSEAAWARMCGVAPIPADSGKVTGHHRLHQGGDRQANSALWRIVMVRIAHDPDTRVYFERRVKEGRTKRDVIRILKRYVAREVYRHLPRG

SEQ ID NO: 417418 - protein, 408 aa, unidentified
MDFEENKYISSSFGNNQPGADQLVNMIAECMQKHKNLDTVLIVLESTSVYSVHISNFLSASEVLMPYRPYVFCVNPKAASNYRKSYIGMEKTDPTDAYLIADFGRVGRTKKLEPWRGGQFISLKRLTRHRMHLSECITREKTYMVSNLYLKFSELQLLEGDDKPFGSLYGATSSAVLTEFLSPQEIIDMPEEELLTFLAGKSRNRISDLSKTSELLRKAARDSYRLDKCMYEPLSISLASSFNCIHAYQKEIKLIEQAIEKCINGMNPNALLILQSIPGIGPIWASGILSEIGDITVFHSSDALAKYAGLYWPKGDSGDFTSEDNKMSKAGNPYLRCYLGEAANSVRKHIPEYADFYARKYAEVTKHQHKRALALTSRKLVRLVFGLLVKNQLYTGEKLDTEYNIESN

SEQ ID NO: 417419 - protein, 338 aa, unidentified
MTYYAGIDVSLESASVCVIDAAGKTIREGKVASEPEALADWLKATGVSLERVGLEAGPLSQWLHVGLRQAGIAAELLETRHVRRAFEIMPVKTDRKDAHGIADLMRMGWFRPVHCKSIDAQETRAMLTARKLVQKQVFEVESSLRGILRGFGLKVGKTTPVKFEGRVKELVAGNPSLERTADSLLATRAVLRREFNGFEWQLRGMARNDTRARLLMSTPGVGTIVALTYAAAIDDPSRFTSSKTAGAHFGLTPKRYQSGQIDYSGRISKLGDASVRAALYEAAHVILTKPLKGCTALKSWALRIARRAGMSKAKVALARKLAVIMHRMLANGTTFQSA

SEQ ID NO: 417420 - protein, 359 aa, unidentified
MFVAGLDAHTRYVVVSVVNRTGERLVKPTRVRVEDRPRLLALLAPYRPLEVVMETSSSWPWISEVLSGAGITFVLAHARRLRAIAEATYKSDDIDAELLARMRLAGCIPAVYVTPATQREWATLIRHRTALVRQRTMVVNRLHAQLHTRGLHLERGRLLTRAGWQWLRTEAWPHLSAEQRAVVRSHHRLLRVLTPVIRAADRHIAQVAATIPEAQLLMTIPGIGAHRALVVCAEVLPVARFRTANQLTSYAGLVPRTKQSGQGAVWHGPVPAGANRWLRGALVRAVVSHVQHAPTSWLTAHYTHHKARIGWPVARVATARKLARAIHAMLRTQTGWTNDPPRGELARAHAAPPGDGLFI

SEQ ID NO: 417421 - protein, 386 aa, unidentified
MINIYTNSKRQSQPQPQPCAEPAARKARTIKLGVDVHLDVYVVVRIVDGNTPQPPQRFKPEDFLAWCAKQLTLAEKVFTCYEAGPFGYTLHRQLTRLGVTNYVIRPRDWDEYGKKVKTDKRDALAMALCLDRYVGGNRDAFCVVRVPTEAQEQQRSVSRQRESLQKDKQRLAAQGRSHALYYGSHLQGAWWHEAAWQRALPELPAIVVNLLAPLRRLLAAIEAELQTRTQELEAAAPAGLPVGLGEMTSQILEREVADWERFQNRRQVASYTGLCPREDTSSQRRFQGSINKHGNRRLRPVLVEGAWRLVVFQPEYRPVKKWRAALLDRRSSPSRRKKIIIAIARIFAVDWWRVRTGRCRAEDLGLKLQPLPPKTPAKGRGLFAPA

SEQ ID NO: 417422 - protein, 316 aa, unidentified
MTGSEVFVGIDVSKARLDVAVGYAGELLGIGHDARGIVELAGRLQKLAPALVVLEASGGLETALVGELAAAGLPVAVVNPRQVREFTRCTGQLAKTDALDARALALFAERIKPPVRELPDEQTRQLQALVTRRRELVEMLTAERNRLASVPAVLHREIRAHVRWLQARLKQRDHDLDQMLRNSPLWREREDLLSSVPGVGPVLCATLIAGLPELGRLNRREIAALVGVAPYPHDSGKQRGRRTVWGGRAHLRATLYMATLAGVRYNPALRSLYCRLLERGKAKKLALVACMRKLITILNAMLKHRTHWSAPCPNPA

SEQ ID NO: 417423 - protein, 422 aa, unidentified
MLAVGIDWAEAFHLVALGRPGEGVIEVRRIDHTPGGVEALLAHIATMEADPAEVRVVIKTRHGMLVERLVDAGYTVLPVNPDLIARRRGPARNKDDAEDARIACLLALDRCASLRPLIPHGELAGELRSIARDDERATRDQRRLLNRLRQDLISTFPAALQIAGNDLGAPTILKLLQRWPTAQTLAAAPRHELVAFARAAHHGWPKRLADQVAAALASDQFTPRDYLVRAKADSIRLGATQLLAIGDQRRTWQRRMGALLLGAPRQGRANTPPEDQLGQAFPGGKVYLSFPGLGDRLAARVADEIGDHPEQFESPNALACYAGKAPVTRRSGKTELVVACRLACNRHLAAAVQQWAFCSLRESGRARAFYDAQRARGKTHHAALRALGNHWLEVLWHCLHKGVLYNEATHVANRNRAHGRAA

SEQ ID NO: 417424 - protein, 341 aa, unidentified
MQVHAVDAAERVVVRKAIARERFVIWFANLEPCLVALEACSAAHYWARKLRTLGHEVRLIPPQFAAPYRKGGPHVKNDAQDAEAICEAASRPQMRFVPVKSPAQQSVLVLHRMRTGFVEERTALVNRLRGLLAEFGVFLAQGIRTFHQHIVDRIEDGSNELAGPARQALMRGWTQCQALDQEIAWLDKQIAEHAGHDPQAQRCMDVCGVGPLTASAAVATVVDARQFKNGRQMAAWIGTVPRQNSSGGKQRLGRITKQGNDYLRTLLFQGARSAVLTAHRRDDRLSRWIVQLQARVGYYKALVAVANKHARILWAVLAKGEKFDPSHVCIAPRAVIWATNS

SEQ ID NO: 417425 - protein, 351 aa, unidentified
MNNATAGKRTQITIGLDLGDRRHTYYVLDGAGKMAREGSLGHTREQLATMARSYPGATVVMEAGTHSLWVSRFLQELGLRVIVANPRKTRAIYQNERKSDRHDAMMLARLARMDPTLLHPVEHGSQEAQQDMLQLKLRDSLVRARVALINAVRFTLKSLGYPVSNPSSERFHKLVLSEVPESIGEMIAHNVAAIAELTQRIKALDVSISRLAAERYPETIYLQQVSGVGPITSLYFVLKVGTPGRFQRTRDIGAFLGLCPRRDQSGETDKELRISKCGDQYLRCLLVNAAPYILGPFGTDSALREHGLRLAQEGTARAKKRAVVAVARKLAVLLLTLWKSREPYESFPTMA

SEQ ID NO: 417426 - protein, 342 aa, unidentified
MYYVGIDYHLEIAVVCITNEHGKEWKLVELPATPEGMDVLINIMKGKKYRVLGEAFTFSIDLHNYLIGRGITSDLVRPTDLVAITKCNKKTDKHDSRTIAWYLRLMDKGEIDLTPSLILRDEQRVFRDLCRLREDVADNLSVISQRMRSHMRINSEYLPVEIFGDRPDLGTKRVQQFVITEFGDDFTLQELLRQQAFYVERGKAIEKELEKCQYDTKAVELLMTIPGIGKLSAMELMSMIVDIKRFPDADSMRSYFGMAPRVRDSGETIHHGRITKQGDPMMRKILERAVSSHMRWCKESKISKMYNSVKTRSAGGVAMMAAANKLLDIIHSVLVNQRPFYS

SEQ ID NO: 417427 - protein, 428 aa, unidentified
MDEVNRNRLEEFRQLRQEIRHSGEYLIVGIDIAKDQHHAFFGTATGKTLLRRLVFSNDYEGFRKLLDQGETLRVRHGLKKVVYGMEPTANYHKPLGEYLITQGRKVVLVCGVTVKQNRESLDGRWDKHDVKDSANVADLISQGKCLYYEYASAKLRGLRGLLSLKRRLKKQEHGYRVRIRNHLIAQYFPEMDRDYERLGAEGLSIVRWCFPPSQMTELDVDPFIERVTSRRVGMEKRRRLEGVWERAGVSIGCDGVPGVEHEAKVMVEGLRQIREIIKETEDKIQELCEQFPEYKYLLTIPGFGPDVSSKVLGAIGEPDRFQNGKQVLKLAGLDLSADRSGKDSAKAVPEISKRGKADLRYALYQAALIASTRNPDFMRYYASKLEGRQKEKGIQTKMWVKLSAKMLLIAWTLMKKKEAFDPAYLTAD

SEQ ID NO: 417428 - protein, 385 aa, unidentified
MTSITYVGLDVHTTNYTAACYRFETDNTFAVAELKPKADEIEKYLKRVKKNLGEDCEFLCGYEAGCLGYSLYHELTAKGIKCVIMAPSTIESAPVNKIKTDKRDAKKLARCLATGGYKAVHVPTDEDNAVKEYIRMRDDVNGALKRIKQQITAFCIRNGKIYRGVVGKNYWTHKHLNWLEKLEFNNPFLRETLEEYIAVFYVLREKIDTYDAKIAELSQTPRFEEPVKKACCLLGIATHTAMATISEISDFTRFPSAGSFAAYLGLVPGEHSSSNKRNQLSITKQGNTHVRRLLIEAAQSYTKGQIGKKSAALKKRQAGMDPKIIAYADKCVERLKRKYVRIALHSNRNVAKTAIARELACFIWGLMTNNYGECRGNVENRPILC

SEQ ID NO: 417429 - protein, 336 aa, unidentified
MTLYCGIDLHSNNHVVVVIDEKDRRIVEKRVANSLDRTLALLVPYRDELAGIAVESTFNWYWLVDGLMEQGFALHLVNTASVKQYEGLKHTEDRYDAFHLAHLLRLGILPTGYIYPKERRPVRDLMRRRAGLVRIAARQLISVQSQIWRDTGERVSSNRIRRPDFEPPLTEPLSLLPTAAALRVYRVLQQQIDALEAAALTAVRLEPQFDVLTTIKGVGPILALTIMLETGDIHRFPNVGDYASYCRLVKSEKLSNGKRKGEGNRKCGNKYLSWAFSEAAHFAVRYEPLAKRFYERKQVRTNGIVAIRATAHKLARAAYYMLREQRPFDPNRLFAH

SEQ ID NO: 417430 - protein, 380 aa, unidentified
MEKACGLDVHKDSVFACILDEQGKKFFEKRYGTLTPNLMELRDTLVEMGCGRVAMESTSIYWMPIWHTLYGDFSLTLANPYFIKQLPGRKSDVKDAQWIAECLQKDLIKSSFVVDGMLQQMRQYTRQHYRLTKGRVRLEQQLDNQLQRCNVRFSNYVSNQGQNVSMRKIIKAIRDGERDPEKLCRLVHGRTKNKHGKQVITDSLSGVIQKVDVDMLTQCMEQIELIEKQQAACLNHLEELANKYYAKEISLLCTIPSVDKLSALSILSEIGNDMNVFPNANSLVSWAGLRPRNEESAGKIQSRKTLHGNKYLRKMLVQVSWSASNSNKTFLGKKHRALSKRMKSQKALLAITRKMLVIIYNVLKTKQPFDHSRNMQAIAA

SEQ ID NO: 417431 - protein, 350 aa, unidentified
MQSVCVGIDVGSSSCKLAVIDKETRKVLRETMVPTTAPALREQMQGLRGYEVHVHLEAGELAEWVRFVCKPLAAGVVVSHPTLNAYIAKDYRKNDKVDALKLAELLALKKYTPVYYTDDPRRAEFKRVMQLYLRVVKALSQRKTAIKIALRRVGIIEKGQTVYSPEGRAAAFKRLTESPMAGDVTRVAIESLYSLMDITQQQQRQMLRSFKPLTAHFPEIARFEEVPGVGYALACRFSAYVVDPARFSNKRKLWQYSGLGVSSRSSDDKALSREALDPACVHALKAMSRTAVLAAVRCKEENVIKRTVQAILRRGGSAVSARLTAQRKLVAILRAIWIGGTNYRNDPVKT

SEQ ID NO: 417432 - protein, 430 aa, unidentified
MRIVCGLDVHKDSIYLCILSSTGEILEQVFGVLTTQLEEMRDLMLKYNVQEVGMESTSVYWIPVWRVLESHFELKLINPYFIKRLSGRKSDVKDAQWIAECMMKELVRGSFVPPERIQQFRLYDRRIYDLDDEIIRKLAKLDAVIQRCNIRLSNYVSNTDSVSYKSVIDKICEGVTSPKELVKEIHGRIINRHGKEIIIASLKGCITEVDIDIMTQLKAEIDLAELHKQKCLEKMQDICEKEYSEQLSNLQTIPGVKMRAATSLIAEIGTDMSHFETANHLSSWAGLRPRNDQSNKTIKSRRITHGYRYLRRTIIQCAWGASRAKDYFFSRFSYYQTQVRKKNRMKVIVAISRKMLVCAWHILKENVAYKDFDIRYKRMTRYTIRIKANIFVVLTTRCYKLTNRTDGDGTQSEYNSKRKVSVYHRPHYGL

SEQ ID NO: 417433 - protein, 338 aa, unidentified
MRTTYIGMDIHKNFIQAAAMDEHGNILKEQKFKSDIDGIRRFVNGLDSKKIKAAIEATCTWYHVYETLSSLGIDTTLVNVRRTKVIAESKIKTDKLDARSIAHCLRTGFIATAYIPPKKIIEQRDILRHSISLRKDINRFKNKIHAILLRNGVKHKFSDLFGADGMRYLRDLKLKDSEQYRLDSYLTIVETLLRERKQTQKKIELLCRKNKQAMLLITMPGISYYSAMVILTEVGEFSRFSNPKKLCNYAGLAPRTIQSGSQVFHGKILKECNQNIKWILVQCAHVHIRYCQNSSITRLYNRVMDKKGKAKATVAASRKMLTCMWYMQMKGERFKYGE

SEQ ID NO: 417434 - protein, 349 aa, unidentified
MPFYNQTHRFYCGVDLHARSLAVCVLDADGKAVFHDGCDADPDAFLDAVAPFRDGLVVACECMFAWYWLADLCAGRGIPFVLGHALAMKLIHQGKTKTDHIDAHKIALLLRGGMLPQAYVYPKGMRETRDLLRRRTFLVRRRAEALAHLVNTNSQYNRPPLAKKLCYARNRAEIDLPARFDDPSVRTNVEVDLALIDAYDEQIARLELYLKRTAKVDDPQGYARLQSIPGVGPILALVLLYEIHDVGRFPDEGHLLSYARLVRGVHESAGKRQQGGNPKIGNAHLKWAFSEAVCLLVRASATAKAWLARRTAKHGKRRALGALQARLGRAVYHLLKKGEAFDEGRFFAS

SEQ ID NO: 417435 - protein, 262 aa, unidentified
MTRNHIGVDLSKDFLDVCDPRRGAARVPNRPEEVSGWVAGLGPDDVIVFEATSGCDRVLRRAVQAAGIPGVRLNPLHAWHFARSLNLAKTDRVAQNARFQRDAAMLARLGAERQPEPDPAPDPAREDLRALGQRRDQLKRMEVQEKNRRAACPLEAVAAGIGEMLAILAAHIERIDKAIAEHVSRHPGLKSADRLLRSIPGFGAVAAVTMLAHVPELGTVSRRAAASLGGLAPRARDSGRHRGRRSSATAGATSGGCSSWRP

SEQ ID NO: 417436 - protein, 366 aa, unidentified
MDAIYIGVDFHARQQTTCYLKTETGELVISELKHQDKEQVRAFYQQFPSPVIVGLEASGYSPWFEALLEQLGCEVWLGHATEIRRRARWRQKNDRRDAELIWDLMVHDEFPRLHRPAATSREVLRMLRYRQKLIKLRTMAKNSLQAIALQAGLAKGKQLFTAAGQEEFKSAALSPVLQWQREHWFALLRPLNQQLLETMVWFKAQSKDDLRIQRLRTHPGIGLLTALCLLHTLQPVERFRNPRKVAAYAGFDPVERSSAERQHFLGISKAGSRLLRYLLVEAVQTAVRYDEDLKRFYKRVAERRGRPKAKVAAARKLLIRAYIMMRDEIDYAEFRRRAVAVRLARGGQGPINVPAVLIGQPASPGA

SEQ ID NO: 417437 - protein, 354 aa, unidentified
MKRTTKYVALDVHQATTLASVREESGRVIARSILPTDGPALTEFFRGMRGAIHVAIEEGTQAQWLHDLLAPHVDRLIVCDRRGQPRQGNKDDRHDADALSEHLRRGGLRAAYHGGGTGAGLKELTRCYQNLVEDPTRVMLRLKAVFRARAIQTPGRAVYRPARRAEWLAQLPPGGARVRAEALWAELDALVALRPQAKTAMLATAAREPGWAGLRTIPCFGPVRVALLLATMQTPWRFRTKRQLWAYAGLAVVTRSSADYVLVDGQAVRRRRAPLTRGLNRNHHRLLKHVFQSAATAARARPGPLQDLHRALVARGLREPLADVTLARKLAALTLRLWKKGERYDPTQLTPQAR

SEQ ID NO: 417438 - protein, 335 aa, unidentified
MERLYGAIDIHKHVFQAAVFAAASGELVEERFPATREALAEWAGEWQGKLAAVAIEATSGWRWVVRELQRCGFVVQLADPGQAVALKGKRRQAKTDRLDARWLAMLLAKQMLPTSWIPPEEIQRLRDLTRLRLALSQDCTRWAQRLHAFLGHEGWPCSRSRLLTAKGRLWVASLALDPHAKAQTERLLRLIAALEEEIAELDSELGRLARSDSRLRALQTIWGVGPILACHLLAEIGDARRFRRARQLVRAAGLDPVVIESADNKRRGRLSKTGSPQLRWALVEAAQHACRSGSPDLELYQSVRERAGAQRATLTAARKIARRCFHTLTTAPDPA

SEQ ID NO: 417439 - protein, 383 aa, unidentified
MPSTNLQNSIDFKGQKFYVGLDVHKNSWAVTIRSMDIEVGRFTQPPSAATLVAHLQKNYPGGQYFSAYEAGFCGTGIHEQLCKAGINNIIIHAADIPTTDKQKKNKTDVRDSRSIADYLERGKLTGIHVMTREQQELRSLFRLRESKVKDVTIANNRLKSFLMLYSIELPEAISKKKYLSLKALEWLRNLEMASTAGTITLRQHIEELQYQRKQLYLVTKLLREQIQATDPQTYRCLLSVPGIGGVTAMGLIAEIADFSRFEDPDQYSSFLGLCPWEDSSGDTIKTKGMQPRCNRHLRPLLVEASWMAIRKSPALFAYYSKHAVRNPKQAIVKVARKLAMIAKGVATTQQLYQTDYLHNMRQKQQEQKQARKTKRFSSGIAQQ

SEQ ID NO: 417440 - protein, 497 aa, unidentified
MSNATGTIDRIEEVRRTARRQEKLRQEAAEAAKLASLPVQHSQAAGIDVGDATHWVCVDCDGGDAAVRELPAHTPGLREIIAWLRQCSVTTVALEASGVYGHVLFLTLLEAGFTVVMTAPSFTRQIKGRPKTDRRDCQWIQRLHRHGLLPSVFQPDEATQTLRDLVRQRANHVRLSAQHIQRMQKALELMNLKLTKVLNDVTGVTGLKIIRAILQGERDPHKLAALRDRRCQHTAAEIATALDGRYRMEHVTELKLCLTIWEQYQLVIAELDTVIAAQLRAMRPTRTLPPLEPKTRVRGRKPHDPHFDVRTALYYLAGIDLTAIEGIDEIHALTLISELGTDFSKWPTMKHFTSWLGLCPNWKKTGGKVQSSKTRKGKNRAATALRLAAWCLMRNKSYLGAYLRRQRSRLGAPKAITATAHKLARIIYNLMRHGVAYMREQEAAYAEQVRARLEKQLQRRAKELGYELRKIDPPAAPTMAAEATAQQPPTEQAAAAE

SEQ ID NO: 417441 - protein, 347 aa, unidentified
MTILSSTRLVTGGVDTHLDVHVAAVVDANGGVLGVESFPTTPAGHQALSAWLLSFGAVGRVGVEGTGAYGAGLARHLGREGFVVIEVDRPNRQERRRNGKSDQLDAIEAARGALSGRVGGLAKTGTGSVEALRALLVTKRSARSMRISAVVRLRHLMFTAPDELRQRLAPLSVKALVNEAARLRPRGDGDPVLYATKTAAVTLARRIHGLDAELELLDAQIEPLVKATAPALLDIYGCGFDTAAILLTAAGDNAGRIRSEAAWAKLCGVAPIPAMSGKSNGRYRLNPGGNRQANHALWRIVLTRLGQREPRTVDYMNRRLADGKLKPEIFRCLKRYVAREVYQALPR

SEQ ID NO: 417442 - protein, 359 aa, unidentified
MQRNKISFKGQKIFIGIDVHKKNWDVAIAPEIGIVKRHPQKASAKELFDFLKKHYPDGDYLAVYESGFSGYSTYYALKEAGIECIVIHAADVPTTQYEEVMKTDRVDSVKLVRSLKAGLLKGIYIREKENIDDRSVVRIRKTIQKQLSGYKARVKHMLHCNGVSLPERFEKPGSHWSKAFIKWLKEDVRLLSSTRNSLDLLIRQVETIRMTLLEATKIMRNLSQTERYKRKFDLLMTVPGIGVAVSMCILTEVYDVKRFHNENQFAAYLGLIPTSHSSGDKVAHGEMTFRGNKQLGPMIIEAAWITICKDAGLGSLYLRYKERMKPQEAIVRIARKLSNIIYTILKNEKEYVPYHQTGK

SEQ ID NO: 417443 - protein, 344 aa, unidentified
MVTTIGIDPHKATHTAVAIDGSENVLGEITIRADKDQTRKLVDWAGSVDGDGRLWAVEAATGLGYLLSQQLMAQGETVVDVPPVLASRIRVLSSGKSQKNDENDARSVAIAALRRDGLAEVHREDEAAVLRMLAKRHRELTALRTQAVCRLHAMLAVLRPGGMGHRLSAKQASRMLGGIRGLDAVGEQRRLMAKTHLVDIRRLDRDLDANKARIRQAVAAAETSVTDIYGVGPVVAAFLIGYTPPIERFTTPDRYAAYNGTAPIEVSSGGKVRHRLSRRGNRILNHAIHTAAVTQISHQTPGKVYYDRKIDEGKTNKEALRALKRRISDAVYRQLRQDAERRDG

SEQ ID NO: 417444 - protein, 419 aa, unidentified
MSFKILKNNCCGLDIHKTWIYACIGITDSFKRTEYKEARFSSFSKGLQELCDWLSKYNCTDVCMESTGKYWIPVFNILEKNNIWVTLSHPKYTKPQKGNKTDRKDAKWICDLYMCGMVKPSFIPPADIRELRDLVRYRFKLTCMITGEKNRAHNCLTVSNLKLDDVFSDIFGKSSRSITEQILQHPGETFDVSPFVDGRCKTPIEEIQAAVDGAISKEQAAKLRQCLNHIDELEIHKAEIEREIFRLSDKYECVLNLIRTIPGFDKNPLTAIQVLSEIGGDMSVFPTAKNLVSWAGCCPRNDQSNQKIKSTRISRAGSYFKPVLVQVANALIKSKKHPEFTTRYRRIKARRGHKKAIIAICRMILTAIWHILTDLKPYTSDGFLEARSVNKEKVLTTSQALNLLKQRGYIIKDVVVPVT

SEQ ID NO: 417445 - protein, 341 aa, unidentified
MQAIRFGVDLAKSVFQIHGVCALGEVVVQRQLRREQMLRFFAKQPPALIGMEACGSAHYWARELAKLGHDVRLMPASYVKAYVRRNKNDARDAEACCEAVSRPTMRFVPVKTVEQQSARAIHRARDLLVRQRTQADNAVRAMLYEMGLIASKGREGIAALIERIEAADTALPASLLVSLRALAAQWRALDAEVARLDQAIACQVRQDPVARRLMTVPGVGPLTAHAVICAVGDGRQFSSARDFAAWVGLTRLNHDTGGKTRLTGHISKAGDRSLRKLLVLGASSHLRRVRANHNAGSIWIQGVLARRPVKVAVIAQAAKTARIIWAVLAKNEDYTDQPHQA

SEQ ID NO: 417446 - protein, 321 aa, unidentified
MTYVGIDVSKVTFVVAYSSVKTNKTRTFKNTVNGVHEFVQTISASEHNCVLEATGNYSALLVYLLSEAGITISLENPLKIKNFARVMLTVTKTDEIDARLIALYGEKMQPAPYKLRSDAILVLKQKRTVLRQLKKQLVATRNLKGSMEVLPFFDPKCKKTIEKTITFLEKQIKEMEEELASLAQGEYKKQMDLLTSIKGIGVTLAAPLIVATGRFSYFDNAKQLTRYLGLSPTYQQSGTSVNVNGHINRNGDSSLRSQLYVAAFSSLRCNTECKACFDRLRSNGKPGKVVVIAVANKLVRQAFAVVTQGKPYVDGFKSEKP

SEQ ID NO: 417447 - protein, 354 aa, unidentified
MSHLNSGIAAVGIDIGKNSFHIVGQDERGAIVLRQKWSRSQIDARLANLPACLIGMEACVGAHYLSRKLRMLGHDARLMPAKYVRPYSKGQKNDFRDAEAIAEAVQRPTMKFVATKTAEQLDLQALHRVRERLVGQRTGIINQIRAFLLERGIAVRQGLRFLQAELPTILGAPSDALSPRMLRLIEDLAGDWRRLNERIEAISGEIEALARQDQACERLMTVPGIGPIISSAMVAAIGTGDAFSKGRDFGAWLGLVPKQISTGDRTILGSISKRGNRYLRALFVQAAWVVLVKLGKKWERYGLRSWIEAAKKRLHHNVLAIALANRLARIAWAVLHKGRAFECVKTDDIAPRPA

SEQ ID NO: 417448 - protein, 405 aa, unidentified
MTVYIGIDWSSQKHDIVFLNEEGGIVAYQTIPHTPLGFEAFDDRRRKLGVGVEECLVGIETEHNLFMDFLSSRQYPQIYVIPPTMIKDSRGRFGASRANTDRSDAHLIADLLRTDRARLHPWHADSPLTQQIAALSSLELFLTHTIIQTNNRLRNILWRYYPNAANVFSALDLQVSLEFICAFPTPQAAAELTFEQFKAFARSHHYPQPCKLPACYARLQKPQPQASQHTVLAFQSEAVRLAHLSLQAVQDKAATIREIQSLFARHPDAPIFSSLPGVGKILAPALLTKFGDDRQRFPTPQVLQAIAGTCPFTKASGKHKYVLFRHSCDHEFRTIVQQWAKCSIDDSAWAYTYFQTVRPHCDSLSHAYRRLANRWLEIAWRLWQDRVPYDEERHLRQHALRIKPI

SEQ ID NO: 417449 - protein, 346 aa, unidentified
MEHYVGLDVSLKLTSICIVDRTGKVEREGVVTSDPEAIATYIKLHTSHVVRIGLETEATSTWLWTELNKIGLPVICIDARHAKAVLKMQINKSDRNDAAGIARIMQCGWYKAVCVKDLDSHATKALLVSRALLVKIKRDIENQIRGLLKNLGLVIGRAKMNVFAVRAAQLAEERSELFAAVDPLLKAREAVEQQIADLDRKVLRLARNNAQVRRFMTAPGVGPVTALCFLATIDDPARLKRSRSVGAYAGLTTRRYASGEIDWTGRISKCGDKMLRSYLYEAANVLLTRVAKWSALKAWGIRLAKRSGLRKAKVAVARKLAVILHRMWIDGTEFKWSSRDAADQPA

SEQ ID NO: 417450 - protein, 313 aa, unidentified
MAMPARINTLGIDVAKDWLDIYDGERLSRIENTEQGVRAFVRTLSGEVRMAVEPTNYFHISIVQAAIKAGHTVYLIDPFRLSRYREGVGVRAKTDRLDAQLLRRYLLAEVSQLTPFRLPPKAVQALYDLLRARAKLTATKTALALALKGIGQLTATRQALVRRIDQALALIDRKLLSCLHQAGYAEDYRRCLSIPGVGPLNAAALVATFRRGHFATADAFVAFLGLDVRVRESGKYKGQRKLTKRGSPELRRLLFNGARSGSLTQRWNSYYHALRARGLSTTAATVAISRKIARLAFALLRDQTSYQDPLHNA

SEQ ID NO: 417451 - protein, 428 aa, unidentified
MSTFRSTLVPPAVLVAIDVAKDRSQVLVEYPNGSHKSLTIRHTHEDVGQLMRALKRFKSPIRAAFEATGDYHRPLAAMLAAHSVELHLVSSIATNRTREALYNTWDKNDPRDAQVILHLLKTGSTQIYHDAFLNAYDDLQELSNTYYTVSKRKTRMYHTLVTHYLPLYFPEAEPYISSSRCEWFIRVLMMAPCPAVILRYSKRAFIEAAAAIQYRKFDRSRWLGDLYEAAKTSAGVPVTDQSEAVAMFRLVLEEYLHVCRLREAIEQRITQRMCNHPDYLRLQTIPGVGPVLALTILAEGGDLRRFAHYRQFLKYCGFDLATEQSGKARGTTRLSKRGNARLRCAFWMAGVVAIHKRENTFRAKYEAYVKDNPKNPDLKRKAYTAVAAKVARVAHALIKHGADYRRFNAAIPSGRTSSQRAVEALATS

SEQ ID NO: 417452 - protein, 339 aa, unidentified
MMKVTTVGLDLAKLIFTIHGVDEHGKVVLQKTVRRAKLLELFAQLPACVVGMEACSGAQHWARELRKLGHDPRIMAAEFVEPYRHGGKNDANDAAAICEAVSRPQMRFVSVKSVEQQAVLAIHRLRQGLVEERTALANRLRGLLAEYGVVVGAGIDRLRRALPEILEDGANAIPGIAKEVFADAEQDLRQLDYRIASFDHRIAALAKASEPAQRLMKVEGVGAMTATAMVATAGDAKVFNNGRQFAAWIGLTPRQHSTGGKQRLGAMTKHGDVYLRTLLIHGARAVLRVSSKHHDAKSRWAEGLRRRRPDNVVAVALAAKNAPIIWALLARGTDYQRAT

SEQ ID NO: 417453 - protein, 305 aa, unidentified
MDSMQDAETVVIGGVDAHSDTHEAAALDERGALLGTETFETTFAGYAGLLDWLRAFGRVDVVAIESTGAYAAGLVRYLREHDIQVLEVNQPHAHTRRRCGKSDPIDAEMAARLALAGKATTIPKQTDGIVESIRLLRVTRASAVKARSAAMVGLSQLIITAPQQLREQLAVRRSIRGKATLCRRLRPILSDLDQPSQAAKLALRSLARRIQELDLEIAELDDQLKPLVARAAPRTTQLLGISTGHAGQLLITAGQNIDRLHGDGAFAALCGASPIPASSGRTTRHRLNYGGDRDANRTLHMIAVC

SEQ ID NO: 417454 - protein, 350 aa, unidentified
MIIGVDYHPSFQTIAFLMEETGECGEQELNHTDGQAEKFYRDLKQRGISVRVGMEATGYSRWFERLLAELGFEVWMGDPAEIKAKRVKKRKTDREDARLLLRLMLENNFPQVWVPGPENRDLRQLLWHRHRLVQMRTRIMNQLQALAMNEGYRWKKKLFSEQGRVQLEKLALSPWASRRRQELLELLDRMNPTIKELTAAVEREARKRPEVLRLMTHPGVGPLTALAYVLIIGTPTRFQRGKQIGTYVGMIPCEESSARKQRLGHVTKQGNSLLRFLLVEAAQAATRIHPDWRRRYIHLAMRRHKSIAKVAMGRRLAVRLYWMWRNGCEYSPSLEFGSYAGQLEIGHGVK

SEQ ID NO: 417455 - protein, 318 aa, unidentified
MRFVGIDISKAALDWAMVETADGDVVAEGSITNTAPGIAALVTTLAASAPALVVLEATGAYHRPLLAAVLAAELPATLVNPTQIVGFRQVRLGRAKTDRQDARLLARFGATYATELRRSTLPSTTQAQLRDWTRYRATLIRRQTQLAGQQEANRWQGDAQVRQWLTDDTQSIAAKIAEVEAAIADLLAQLPEAAVVLAIKGVGPIVTATVLGTLPVALWGDAKKASAYLGLVPRVAQSGKRSRSSMSKAGPGEVRRVLWLAARAAIDHDPAMHAWYAGMVARGKREQQAQCAVMNKLVRHMMGRLKAWQTTQLEAAMA

SEQ ID NO: 417456 - protein, 436 aa, unidentified
MIKAAIERCAGIDVGKKWLAVCIMVGPLDAEPRTETRRFGTNVADLEALRDWFKEERITHAVMESTGSYWKPVFNILEETLTVYLANPHQVKPRKGHKTDNKDGYWLAHLLRHAMIQPSFIPSRPIRELRDLTRRRKKLIGAGTSEKNRIQKELEDANVKLGNVLSDMFGVSGQLMLDALLDGKAGPQEIAQMAKRRARKKIPELVAALEKHRMSDHHRRMIRFSVEHMELLEKQIVRLDQDIEAKIRDIGLVKQWELLQTIPGMQASSSATILAETGADMTQFGDEGHISSWAGVCPGNNRSAGKSKSSHTNKGNPWLRSALTECAQGASKKKNCFLKEKFWRITTKHGGKRAPAVIAVAHNLLRFVFQVLSTGKPYQERSATPLEPQQRERMIRHHIRRLGKLGVAVGQRGPAPLRPHRRTHTAKGVASLAAST

SEQ ID NO: 417457 - protein, 407 aa, unidentified
MDLLKTVFGIDVSSRKSNVCIMVNGQKVNDYAISNDMVGFNRLLGDLKQVTKPQIIFEATGVYSRRLQAFLDMHELRYVMMNPLEAKRKTKDDLHQNKTDKLDALYLAKLQSEHPQRLAYVQNKEYQELMANNRIYEQASHDLITNKNRLHKAVQLTFPEIEHLLANPRGKNYWSIALRFPHPDIVLETKKANIIDFLKGLSGIGKKRANDITQNLIRLAKVACPAVKKNSAHIRGLKMAINNILSAEEECQTALQEMAKLAPKRDLEILTSIPGIGKNTALRIISELGDIRRFNNPSQLNAFVGVDPQVYESGNLTAHLSISKRGTAIGRKVLYLAINQIQSAKKAGNPCHIADYYEKRKRSSETASHKKAAIASIHKLLRTIFALIKNDQLYSYDVAKHNQRLLS

SEQ ID NO: 417458 - protein, 401 aa, unidentified
MAAQRDIAWVGIDVGKTHHWACVVDAEGKVLLSVKVANDEAAIVAFRANVGSLAMQLIWAVDIIGAPSALLLALLARAGQSVRYASGRVVAAMSAAYAGEGKTDAKDAYVIAETARLRRDLAVIDAGTDLVRNLAVLTGHREDLIADRVRMINRLRDLMTSVFPSLERAFDYSSHKGALVLLTGYATPDRIRRIGQTRLTGWLRNRNVRGSADVAARAIAAARAQTVVLPGQDLTASIITELANGILALDERLKALDAQIEVTFAEHPHAAIIQSMPGFGPFLGASLLVGANDLRAFPSAGHLAAAAGLVPVPNDSGRRTGNLHRPLRYSRPLRHVFYLAAQTSMMRAGPNRDYYLKKRAQGATHSQAVISLARRRIDVLWALLRENRTWTATPPPLAQAA

SEQ ID NO: 417459 - protein, 388 aa, unidentified
MIPSQRQEITGSTTGPRRIFAAIELSKSTWVVALQLPTIDKVSLFRVAGGDIEGLFALLDRARFRVGEPVEVCTCYEASYDGFWIHRALGARGIENTVLDSASIQVSRRGRRVKTDRTDAESLIRVLTALYRGEHQVAKTVHVPSPEEEDDKRLLQGRDKLLRERIRHTNRIRGLLNLQGVHHINPNLGGWTEALKKLRTGDGRPFPRQLMREIRREAKLLAMIKRMLADVEAEIAGMIRDSRKRRHPAQRGQSHPIAIRLAAIRGIGAQAAGVLATEVFYRKFNNRREVASYLGLTPTPYNSGSVTRDQGISKAGNRRARTAAIELAWIWLRNQPDSALSRWFHARVGDANGRVRRIAIVALARKLVVALWRFLEDGLIPEDAVMKA

SEQ ID NO: 417460 - protein, 349 aa, unidentified
MLIIGCDFHTRYQQIAMAEETTGELLLERRLDHEGGEAHAFYRNFHAPVRVGIEATGPIHWFERLLTELGHELWIGDSARIRASEVRKQKTDERDARLILDLMLAKRFPKIWVPTPVERDFRQLLYHRHKVVCLRTMLGNQLHALALSQGLCRKKKLFTKKGRVELTGLTLGLWASRRRAELLKLLDQLDAPIAELDRAVLEEAKRRDDAVLLMTHPGIGPVTALAFVLAVGPVTRFHRSRKLVSYLGLNPSEESSGGRRRLGAISKQGNTMVRWLLVEAAQKAARCDPTLRQDYQRLKFRRGHAVAKVAIARKLAVRMYWMLRSGADYAQLVRRQGSPGATLVDASTP

SEQ ID NO: 417461 - protein, 343 aa, unidentified
MQTITTIGLDIAKSVFQVHGVDADGQVVVRRQLKRRYVLAFFQKLPPCLIGIEACASAHYWSRELQALGHTAKLMPPAYVKPYVKRHKNDAADAEAICEAVTRANMRFVATKTPEQQSCLTLHRTRHLLMRQQTSVINAIRSHLAEFGIVAPVGRNGVEQLLGVVADAGDKRLPEIARACVAALGAQLRVLKVQILEFDRMIRAWHRSSEASMRLDQVPGVGPVLATALVASVADPRAFRSGRDFSAWIGLVPKQNSSGGKERLGNISKRGDRYLRSLFTTGALAVIRYAKIHGTRHRPWLTALLARRPTKVAAIALANKLARMAWAMMAKGERYKEPAALAA

SEQ ID NO: 417462 - protein, 333 aa, unidentified
MEKKWFIGIDISKKTLDVVIYVPTKKHADETNYERFLNKEEGYKSLLCWLKKKNMAKKRLVISMENTGIYSFDLCLFLEAASIDYRSFNPLHLKRSLGLVRGKNDRVDAERIAYFAYLHRDELSYSKLSGSSIIRLRDFAAERKRFVKQQAEYKGFLTDRKDCEMTSTIERAAHMVKILDEEIASVEEEMLQIINSDPSILRNYELLNSIKGIGTINAMNTIIHTNNFQAFETARQYACYLGIAPFEHSSGTSIKGKTRVYPTGAKLLKADLSQAANSAIVWDKEMKEYYERKRKEGKAYGVVLNAVKFKLVGRMFAVVKRGTPFVELMTYKK

SEQ ID NO: 417463 - protein, 405 aa, unidentified
MTVYIGIDWSSQKHDIVYLNEEGGIIAYQTIPHTPLGFEAFDDQRMKLGVGVDDCLVGIETEHNLFLDYLSSHQYRNIYVIPPTTIKDSRGRFGASRANTDRSDAHLIADMLRTDRARLHVWHADSLLTQQIAALTSLELFLTHTIIQTNNRLRNVLWRYYPNAASVFSALNLQISLEFIAAFPTPQAAAELTFEQFRGFAKAHHYPKPSKLPACFARLQKPQPEARLQTVLAFQSEAVRLAQLSLHAVQDKAATIREIQELFLEHPDYPIFSSLPGAGKILAPALLAKFGDDRSRFPTPQVLQSVAGTCPVTRASGKHKVVFFRRACDHEFRSIVQQWAKCSIDDSVWAYTYFQAVRPHCDSLSHAYRRLANRWLEIAWRLWQDRVPYDEERHLRQHALRVKPI

SEQ ID NO: 417464 - protein, 416 aa, unidentified
MIDQETFTWFAAIDWGTERHQACVLDARGGIAGERAFSHSGAGLALLCDWILSIAGSATVVAVAVEVPHGPVVDSLLDRGMAVHAINPKQLDRLRDRFCVSGAKDDRRDAYVAADGLRTDRHLFRRLHVADPRLVELREWSRLAEELQQERVRLSNRLHDQLWRYYPQMLGLSDDIAADWLLDIWTMAPTPAKSKQLRKTSVEQLLKRNRIRRIDAEAVLRTLRQPAIKVAEGVTEAATIHIRSLITRLRVVNRELRDATHKLDELCAGLDEAPPAAAEHGGEQHDIKILKSMPGIGRINLAILLAEASGPLSRRDYQALRTLSGVAPVTKQSGKSRVVVRRYAAHVRLRDAVYHWARVATQHDPKSRSRYVALRQRGHSHGRAIRGVADRLLALACTLLQRQTVFDPDFGTPEVT

SEQ ID NO: 417465 - protein, 338 aa, unidentified
MTIVMGLDQHRAQITAEWLDTATGELSRARIAPADRAGVGRFAARFCGQPLEVALEATTGWRFVVEELQSVGAQVHLAEPAETAARRGTKKRAKSDRADARHLRELLMVGRLPESWIPSEHLLDLRARVRLRHTLVDQRREWQQRMQSVLYHHGVPARGWLLTAQSRAWLAGLELPGAAREQITVALAMSDAHDAQLAPLDRELRAYAKRQPGCRALMRHYGIGPLTSITILAELGDGRRFSSSREAVRYAGMDITVHQSDTRRAAGRLSRQGPPALRWALFEAAQCARRPNSPDHDYYLETAARLGGNRACLAVARKLLKRSYHTLRELGEEALQPA

SEQ ID NO: 417466 - protein, 349 aa, unidentified
MKFYKQQHEYYCGIDLHANSMHVCVVDQAGKKPLHKNFDTKNPEAFLLALAPFRKRDLIIGCESTFNWYWLADLCTAQKLPFLLGHALYLKAIHGGKTKTDRIDSEKLALLLRGGNFPTAYVYPAELRDTRDLLRRRCTIVRRRGATITHVQMINHQQNLPAFEKSISYKSNRVGIADRFEGDSLQRMVSLDVDLIDFYDKQIQQLDLYLEQHAKLDDPDTFFRLQSIPGVGRILAMTMLYEIHDIRRFPTVGDFLSYSRLVKGTNSSAGKNYKPTGRKIGNPHLKWAFSEAITLLKRECPQAKAFAERIEKKHNKARANTLLAIKLGRAVYWMWKRKAAFDPNVFAKD

SEQ ID NO: 417467 - protein, 402 aa, unidentified
MNAVGIDVSKGKSMVAIMRPFGEIVSAPFEIKHTASDINSLVELINSVEGESRIVMEHTGRYYEVLAHQLSEANLFVSAINPKLIKDFDNDSLRKVKSDKADAVKIARYALDKWQNLKQYSVMDELRNQLKTMNRQFSFYMKHKTAMKNNLIGILDQTYPGVNTYFDSPARSDGSQKWVDFASTYWHVDCVRKMSLNAFIDHYQNWCKRKKYNFSQSKAEEIYGKAKELVPVLPKDNITKLIIKQAVNQLNIASATVESLRTLMNETASQLPEYPVVMAMKGVGTSLGPQLMAEIGDVSRFTHKGAITAFAGVDPGVNESGSYEQKNVPTSKRGSSNLRKTLFQVMDALIKTHPQDDPVYQFLDKKRAQGKPYYVYMTAGANKFLRIYYGRVKEYLSSLPES

SEQ ID NO: 417468 - protein, 326 aa, unidentified
MVSALGIDVAKAKLDVVLVNDAQQEYSGLFANSPKGFEQLQHWLSKRVKGDLHACLEATGQYGDGVAAFLYAAGCTVSVVNPARIKAFAASRLSRQKTDQTDARLIALFCQSQQPEAWTPPAPEQRALQAMVRHLRDIKAIRQQEYNRLTSGVSADVVAHALQQHIAFLDQQILELERQIHDHLERFPLLKQQRDLLDTIPGLGETTIAILLAEVPDIRAFDSASQFAAYAGVTPRHFRSGTSVRGRTRISKCGNATLRAALYFPAMVALRHNPLICSFGQRLRAHGLAPKAIVVAAIRKLLHLVYGLLKSGRPFDPHYLIQVSNA

SEQ ID NO: 417469 - protein, 442 aa, unidentified
MSDTGSKQQAEPNWAAFAAIDWADQKHFWKLLPAGSQQPEQGELENTPEAVEVWAAGLYQRFGGQPIAICLEQARGGLVYMLSKYSHLVLFPVHPTTAARYRETFSPSGAKADPSDTAYLLDLLLRHRDKLRQLQPDTVETRLLQILTEQRRRMVNEKTRQGLRLTDCLKTYFPQVLTWFGKVSSPLVGALLEQWPTLGELQRQHPGTLRQFFHAQNCRSEERIRERLEAIYQATPATRDPAVLEGFGLIAQGLVTLLHTLRSHIKVLDRRIAELALAHPDRALFASLPGAGPVLVPRLIVAFGTRRDRYTDAYQMQCYSGIAPVTEASGKRQWVHFRFACPKFLRQTFHEFANCSIRYSEWARAYYESQRAQGKEHHAAVRSLAYKWIRIIYRCWKDGKPYDEQLYLQALQRRNSPLRADPATGFGWKAVAGFAKFSNETS

SEQ ID NO: 417470 - protein, 384 aa, unidentified
MKNDSIIFIGLDTHKEFTEVVYCSDQRASALNHLGRISSAKASFVKLARRLQSKYPNATLHFVYEAGPCGYWIYRLLTSLGHCCYVVAPSLIPKKPGKRIKTDKRDAEDLARLLRSGDIDPIYVPEPEDESVRDLSRARERTMHDLNDARYQLKALLLRNNINYSGKANWSLKHLRWLTELILPHPAQQFVLQEMIQTISERIGRLKRLDNELTHQVKLWRYYPIVKAIQAMRGIRLLIATSVIVELGDLNRFDSPRKLMSYVGLTPSEHSSGGTRKLGSITKCGNGRARRLLIEAAHCYRYPAKVSTDLQVRQEGLPKEVIDQAWKAQARLCRRYQRLLKRGKPYNVIVTAIAREIIAYIWSISKEVVLPKVDPNKRLVRIPA

SEQ ID NO: 417471 - protein, 405 aa, unidentified
MSDIEQHDSVQVFVGLDVGKEAHHGVALDRKGKRLLDSALPNDETKLRALIRKLKEHGPILLVVDQPATIGALPVAVARDEGVLVAYLPGLAMRRIADLHAGEAKTDARDAYIIAEAARSLPHTLRSLKLADSQVAELTMLCGFDEDLAGQITQVSNRIRGLLTQIHPALERVIGPHLDHPAMLDLLERYPSPAQLAALTQKQLANRLVKLAPRMGKTWATEILQALSEQTVVVLGTQAASIVLPRLAQQLAALRIQRDEVAKEVERLVLAHPLHKVLTSMPGVGVRTAARLLIDVASRAFASAGHLAAYAGLAPVTRRSGSSIRGELPSRRGNKQLKRAMFLSAFAALRDPISRAYYARKISQGKRHNQALIALARRRCDVLFAMLRDGTLYCPPSHTKPLTTT

SEQ ID NO: 417472 - protein, 413 aa, unidentified
MRLFAGDDWAEDHHDVELMDADGRRLAKARLPEGVAGIARLHAMIGAQLGEDADEEDAGQVAIGIETDRGPWVAALIAAGYTVFAINPLQASRYRERHGVSGAKSDTADAHVLADMVRTDSHQLRPVAGDSAQAAAVKVVTRTHKTLIWERTRCTQRLRHALRDYFPAALEAFEDLDAADTLELLAKAPDPASAARLTTAQISAALKRARRRDIATKAERIQAVLRAAHLGQPDIVAAAYAASVRALIAVLATLNEQVKTLQGQVEAYFGQHPDAEIIASQPGLGPVLGARVLAESGDDPGRYISAKARKNYAGTSPITRASGKKKTVMARYVHNDRLIDALMSQAFTALRTSPGARAYYDHQRARGAGHNPALRQLANRLTGILHGCLKTRTLYDEATAWPHYAATPEKTAA

SEQ ID NO: 417473 - protein, 414 aa, unidentified
MEQKMLYVGIDWADDHHDIVITDDSAKTLDQFRIDHTCDGFALLHSHIANHQTSSSLVLIAIETSRGLLVHELLQKGYTVYAINPKAVNRYKDRHVLSKAKSDVLDALSLGHLLRTDRHLFRPLEPLPEDYRLLDRLCGDLRKAIDEKSRIINQVISCSKEFYPKALEMFSLNSQIFIDFLNAFPDHDALSACKKKTLLAFLRKHRYSYPDKAEELWKTIQSPSLQPDKITARSGRLRLGMLLGQLENLKKHITHYEREIQHILDHLPESTPVKSLPGVGERLAPELVAILGPNSKDGHHRFQAAAEIAKLSGCVPVVRESGKWRTVSLRYACVKPFRRTFRDWAFTSISRSRWARAFYDYHKQRNQNHSTILRNLGKKWIKILFALWSQGTTYNEMVHIQNLKAKKVPWAMAL

SEQ ID NO: 417474 - protein, 346 aa, unidentified
MMLIGCDFHPSWQQVSWLDTETGETGEQKLVHATGDAKQFYQQVAAPVLIGMEATGNSQWFIEMVEDLGHQIWIGDAAQIRASYVRKQKTDKRDAAHILKLVVEGRFPKLWAPDREQRDLRQLVLHRHKLVMIRSRVKNELQHLSLNKGMQRKRTLWSQAGQKLLRELPLKPWAACRREDLLGLLTMLDQQIRKLDRAVQHAAEENPQSKLLMTQPGVGPNTALAFVLTIGDVGRFPRGKQVASYLGLIPREESSGGRQKLGAITKQGNRMLRSLLVEAAQAAAQHDPGLRRQYRHRCHQKPKAVAKVAVARKLAVRLYWMLRTQKPYPEIVRIESSSGVALVGAS

SEQ ID NO: 417475 - protein, 332 aa, unidentified
MAEHSKEQMATVVGIDLAKRSFHVYGADAQGQPVFTKKLTRARLSPFMAKLPACTVAMEACGSAHHWARTFRTFGHEVRLMAPQFVKPFVKSNKNDAADAEAICEAAQRPTMRFVAVKTVEQQDIQAVHRMRSLVVERRTAQINQIRGLLLEYGIEIAQGRAAVGRRLPEILEDGDNGLSGRFRAELSELADELRHLDARVTHYDEQIEAIAASDEQVQRLMTIPGLGAKGATALVAAVGEDPALFRNGRGLAAWLGLVPRQHSTGGRERLLGISKRGDVYLRQLLIHGARAVLRWVERKADPTSRWATALKARRPTNVACVAMANKIARVA

SEQ ID NO: 417476 - protein, 388 aa, unidentified
MQFIAKESTAIRTNLGAIFVSLELSRSTWLITSVSPGGGEKMSKHCLSAGDIAALLARFSALKQRAFARTGKLFPIIVVQEAGLDGFWIHRVLQSEGIESRVVDPASIATSRRRRRAKTDRIDGEALVRALLAYERGEPRVCAMVRVPTPEDEDSRRICRERKTLTIERIQHVNRIKGLLFSQGVSDYEPLRRNRRQRLDELKTGDGRPLPPHLKRQINRELDRLELLLGQIKTVEAERDALFAPTAKTDQTPAPQAILIGLRGIGPEFAAILWSEGLYRSFANRKQVAAYAGLAPTPWQSGSVAHEQGVSKAGNPRLRTTMIQLAWLWLRHQPNSSLAQWFNERVSCNGGRLRKTMIVALARKLLVALWKYVTAGVVIEGAIVKAAS

SEQ ID NO: 417477 - protein, 410 aa, unidentified
MRRIRNRVAGLDVHRDSVTGCVECFDGVDVEVTKQRFSTTARGIRELADWLATFEVELVVMEATGVYWKPVYYGLEDLFDEVWLVNAHHVKNVPGRKTDMSDAQWLADAAAHGMVRPSMVPPPEIRALRELTRYRRTQVQARGVEIQRLEKLLQDAGIKLTSVASKVWSKSSRAMIEMLISGHADPAALAELAKGRMRSKIPALTEALESRWQPHHTVVARRILAHIDFLDSTIVELSDEIVERLRPFDALVQLWTTIPGVSTLTAQIMVAEIAVDMGRFPTAAHLASWAGVAPASYESAGKRRPAGTRHGSRHLRQALVEAARAASRTKGTFLSARYSRITRRRGPNKAAVAIAHAILVSAWHMAVTGETYTDLGDDFYTKRRHPARRVNHHIHQLESAGYTVTLTPAA

SEQ ID NO: 417478 - protein, 342 aa, unidentified
MKQYVGLDVSQKETSVCVVNEVGQVLFEGQAKSDPGALAALLRKRAPHAERIGFETGAMASWLWHELRRVDLPVVCIDARHAHAALSVRMNKSDQNDARGLAELVRVGWYREVKVKSEESQKIRAILVARSRLVTIRRDIENQVRSLIKEHGLLFSRAIGLQFRNQVRELLGENHQLLDVIAPLLSIHEHICKQQSKFDDEVRRLAKSDETTRRLMTVPGVGVVTALTFRHTIDDPSRFRSASTVGAYLGLTPRRNQSGETDTRGKISRWGDRLLRSYLFEAATVLLYRTKKWSSLKAWGMKLAKRIGVKKAKIAIARKIAVILHCVWVDGTSFDWGQAQPA

SEQ ID NO: 417479 - protein, 428 aa, unidentified
MKYNTQNAKIASITEKTLIVGIDVGSETYFARAFDWRNYEFTKKPFEFSNNEAGFLSFKAWVENLLEKNGKSVVIPGMEPTGHYWFALGKFLQDNGMRPVHVNPHHVKKSKELDDNNPNKNDRKDPKTIASLVNEGRFSYPYIPTGVYAEIRSLSNMRFQAQEELTRAKNRIARWFSIYFPEYKDVYRDFKAVSGRIVLQAAPLPEDIRKLGVEGINRIWRGAKLRGAGMKRAKTLVSAAEHSIGSKEAPEAARIELRNLLNDMDVYASRVEELLGMIEEKLKEIPYIDKLMAIKGVGLLTVSGFIAEAGDIRRFEDPKQLQKLAGYAIVANESGKHKGESRISYRGRKRLRYVLYEAALSLIGKNAEFKEIHEYYRTRKENPLKKMQSVVAVACKVIRIFYVILTKGVDYDPEKMMGDIRRPQIQAA

SEQ ID NO: 417480 - protein, 339 aa, unidentified
MMIIGCDYHPSFQQIAFVDTGTGACGERKLTHKVEAESFYRGLQGDGVRVGMEATGHARWFERLLAELHCELWIGDPGEIRAKRVRKQKTDRQDAELLLQLLVENRFPRIWVPSPENRDLRQLLWHRHRLVQMRTRVKNQLQAIALNEGLRRQKGLWSKPGRAQLEALELAPWSARRRQDLLELLDRLHPRIEELSAAIGQAAEQKPEAHRLMTHPGVGPITALAFVLILGVPDRFRCGKQVGSYLGLIPCEESSGGRQRLGHISKQGNTLLRFLLIESAHAVVRYEPDWRRRFLHLALRRGRPIAKVAMARKLAVRLYWMWRRGWDYQQIAKFGAHVE

SEQ ID NO: 417481 - protein, 433 aa, unidentified
MKVMYERVAGIDVHKDMIKVAIRSPGDKPWTRKTEILEYRTFYGVLQEMARELRRRGVTHVVMEASGVYTEPVYYALCEQDFTEVAVINPVHAKALKGHKTDAKDCARLAELFECGLLRGSYIPPAEQKEVRDLTRYRIKTVQARTSEIQRLGKALESAGIKLGSVASEITGKASTAMIEALIDGERRGGVLADLAIGRMRSAGKLADLSMALTGRFTGHHATLCRLHLDRIKVLDDAVDGLDGRIAAGAARWQREAGLLKSVPGFGDVVTCAWLAEIGPAPHKWFSRHEKLASWVSLCPGNNISARKRKHGRTGDAGTYIKPMLIQAAWSAIRVRGRLQARYSRLARRFGGQKNPAAKKKAITAIAHTLLKIAYQVLKSGTPYQDLGADFYTRRNSPEEQQKYLERQLQKLHPRCTITITISPPEVALPPGE

SEQ ID NO: 417482 - protein, 365 aa, unidentified
MEVPTVTDGMTSVALDAVCVELEGAIVAGFDVHRRQITFDAIDTESGEVLRGKLDSTPAAVEQWIARFPGRVVHVAVEACTGWLFVARALERAGAVTHLAEPIETSALRGRKRRAKTDRADARWLRQLLFEGRLPESWMPPEHVRQWRSRARLRNTLAGERTSWVQRIRAVLYHHGIAGAPDDLRTLAGRQFLATLELPVDASERIAVALEIIDLLEIQIATIERELRALARRQTGCRALMDKLYGIGELSSLVTLCELGDVSRLHASRQAVRLAGIDIGVHRSDRTARLGKLTRQGSAELRWALYEAAQSACRPTSPDYQDYHALKDRGLSHTRASLTIARKLARRSYHVLRELGPAALEPITD

SEQ ID NO: 417483 - protein, 470 aa, unidentified
MNNHRRRPGQHRRRPGKPRTSPSVLERINPNVAGIDCGSAEHFVAVPPDRDPCPVQSFRTFTGDLVRLADWLVACGVMSVAMEATGVYWIPVYDILEARGLNVLLVNARHIKNVPGRKSDVSDCEWLRELHSVGLLRGSFRPTATIVALRTYLRHRQTMIEDASTYIQRMQKALVQMNVQLPLVVTDITGVTGMSILRAIVGGQRDPERLAECRDPRCQASKAEIIEALTGHYQADHLFVLQQNLALYDACQQQIAACDRAIEAHVQILVATVEPPSTPLPPARARTGLKNEPAFEIRSPLHQLTGGVDLSQIEGIAPYSALKLLSEIGTDMTRWSTEKHFTAWLTLAPKNRISGGRLLSSKTQSSANRAAQILRMAAMSLGKTQTALGAFYRRLALRIGKPQAITATARKLAVLVYRALKGELVYRDPGADAYTAKQRTRIVRHLRQRAGSFGFDLVNRETGEIVSAVS

SEQ ID NO: 417484 - protein, 402 aa, unidentified
MTAPARPEAGVIGGADTHADTIHAALITTLGREVADREFPTTAVGYRAAITFLTSHGPIDQVGIEGTSSYGAGFADAVIKAGLRVVEVNRPSRADRRRQGKSDPLDAYHAARGVLSGQASSEPKDQSIEAIRSLHNTRRSAVKARTAVINQITAVLITAPDPIRSKYRALKGQPLITALTKQRAAAADPVHVAVLTALKMLAQRHQFLTTQADELTTLIDQLVTVANPGLRAAYGVGPDTAAQLLITAGANPDRLRSEASFAALCGVCPVPASSGKTTRHRLSRGGDRHANYALYRIALVRMSLEPRTKQYVARQVAAGRTKPEILRMIKRAIAREIHRLLTRNIEVPDYADLRPARQAKNITVTAAANAFSIWPTTISRIERGLQRDDELADRYRTWLQAA

SEQ ID NO: 417485 - protein, 415 aa, unidentified
MEVLFSRCCGLDVHKSSITACVRIQEVGGKPRKIVRRFGAMTADLRSLANWLIEEGVTHVAMESTGVYWKPVWNILEGQFTLVLANAQHVKNVPGRKTDTKDSEWLAELLQHGLLAGSFVPPRLIRDLRDLTRTRAVLTQESSRIASRIQKVLEDANIKLASVASDTLGKSGQAMLVALIAGEDNPEQLADLALGSLRGKIPQLRRALEGLTREHHRFLLKRLLVQWRFVESETELIDQRLEQIGKQEVPIAEAVARWDTVPGVDRFAAWGLVAEMGIDMEQFPSAKHAASWGGVCPGNHESAGKRLGGRTRKGNPWLRRILGQSAWAAARTKNTYVAVQFRRLAAKRGRKRAIVAVGHSLLVIGYHLLRKQSVYQDLGAGYFDRLNAEGLKRYLVKRLESLGQKVTLEPRESVA

SEQ ID NO: 417486 - protein, 396 aa, unidentified
MWTLGIDVAKRRHNATLLDEEGRTVFRNVSFAQRRDAIDAFLKRLAETGHSPAGIRVGMEATGHYWMILFQVFTRSGYVVQVINPIVTAARRNVTIRGSKTDAADSFLIAKILREENPKVSAIPEQDVRALRDLTRMRFECAKAATAEKQRLVALLDLVFPEYSEHFSDLFGATSREVLSEFPTAKDLAKVDVRRLTRLLKEASRGRMGRDEAERLKQAARTSFAFSGNTAGLALEIRFIVERLNLLIAQIAQLDKRFIEFLGDQQKLLCSIAGIGKVWAATMLAEILPVFHPELKHGARKLVAAAGLDVRLYDSGEFRGKGKMSKRGSRYLRTAAMQAAVAAVFNARDPLFIMVYERQRDLGKHHTVAISHVAHKMLHVIFSVLKNRKPYKPQLN

SEQ ID NO: 417487 - protein, 391 aa, unidentified
MIYIGIDVAKDKHDCFITNSDSEVLFKAFTIFNNLDGFNDLYQKIESVMDDVTKVKVGLEATGHYSYNLLGYLIDKGLPTYVINPLHTNLYRKSLSLRQTKTDKVDARTIASMLMSDMNLKSYSDTSYHNEELKSLTRYRFDKVKERAKLKTSVSRLVCILFPELEKLVPTLHMASVYALLSEFPSAKHVATAHLTRLTNLLSESSKGRYGKDTAITFRDSARASIGSNMPAKSLELKHTIKLIQELDSEIDEIENEIKIIMDEINSPILSIPGINYRMGAMIIAEIGDFNRFDSPDKILAYAGFSPSTYQSGQLDGAYAHMEKRGSRYLRYALYNATKYVCHWDPTFAAYLAKKRAEGKHYNVAISHAVKKLVRVIYHLEKTKQQYIKAA

SEQ ID NO: 417488 - protein, 346 aa, unidentified
MMIIGCDFHPSWQQIAWLDSETGETGEQKLVHAEGQAQQFYQALIAPALIGMEATGNSQWFIEMVQELGHEIWIGDAAQIRASYVRKQKTDKRDAGHILKLLVEGRFPRLWMPDAEQRDLRQLVLHRHKLVEIRSRVKNELQQLSLNKGMQKKRALWSQAGQQMLRELPLKPWASCRREDLLGLLAMLDQQIGKLDQAVQRAAEQHPQARLLMTQPGVGPNTALAFVLTIGEVSRFPRGKQVASYLGLIPREESSGGRQKLGAITKQGNRLVRSLLVEAAQIAVRFDPRMKKQYVHRCHQKPKGVAKVAAARKLAVRLYWMLRTQTPYPEIVRIESSPAVPLVGAS

SEQ ID NO: 417489 - protein, 406 aa, unidentified
MVFVGIDWSEQHHQVELQAGSGKVLKRLRVSADVAGLTRLQDAITGAAEEPSQVLIGIESHHGLLVNALVASGYRVYPISPLTSARAREGEAPSRSKSDPGDAHVLANLVRTRRQDLRPLAGDSEQAQSLQVRARSHLRAIRLQQRLRSQLRSTLAKFFVGALPLLGDEPEDLRDALAVLSLAVNPEQGRRLSLSKLRSSLARHGRQRNLEVKAVEIQAQLRTPQLELNAPKVVSAYSDEVSYLVRTLLQVRSELAPLEEQLAVDFREHPDAEIFLSLPGLGLVLSARVLGESGDDPTRYVNAKARKNYAGNAPVTKRSGKWEMVNRRRARNRLLADASFLWANSALSASPGARRYYDQLRARGKTHNQASRALANRLVGILHGCLRRRCLYDEAVAWLQPLKEAA

SEQ ID NO: 417490 - protein, 415 aa, unidentified
MEPIHKRVAGMDVHRMEHVATILLEQEDGTVSNETRKFGGFKRDMRALVDWLRSHRIQLVVMESTGIYWKSVFSHLETAGIPALVVNAFHVKNVPGRKTDVSDSEWLAQLARFGLLRGSFIPPKDLRELRVVSRYRRKLVQSLTGEKNRLHKVLDDAGIKLGGVVSDIDGVCARKMVEGLIAGKTPAELSALGHGKLKSSDELLQASMDGDLSPRHRLVLSTALNHLRYLEQQVAQLDRYLIEAMKPYAWAWRLLQTIPGIDEISAAMILIEIGVDMQRFGSASRLASWTALCPGNHETAGKRKSGKIRHGNPIVRYLLCEAANAARRTKTVFQAKYTSLVIRRGYKKTVIALAHKLIRTIYFVLTRRKPYHDTTVDYEAAIVTRNAPRWIKALKKYGYWPKAAAANPATATAMV

SEQ ID NO: 417491 - protein, 389 aa, unidentified
MDHVAIDLGGRESQICIRQDNNEVRLEKRLATIKLKGFFKTLPPSRVIVETCAEAFAVAGDAKEAGHDVRVVPATLVRALGVGLRGIKTDVRDARCLSEASVRIELGSVHVPSMLAREMKAVCTARDALVRSRTLLVNSVRAWMRGRLLAISTGATATFPGRVRACISVSEHELPPCLERQLVAIEALTEQVVACDQELRLIATTNEDCVRAMTVPGVGPATAVRFVGAIDDVSRFKTAHEVESYFGLTPGEHSSSDTKHRTPLTKAGSATVRWLLVQAAWTALRTRPNDPMVLWARRMSERKQNKFIAVVALARKIAGVLYALLRDKTNYQPQKGSTARADDLDGRLIASGAGLTALARSGSPDAAVHATQASKKRTGSASKRGRTAG

SEQ ID NO: 417492 - protein, 339 aa, unidentified
MLIIGCDYHPSFQQIAFLDTATGESGEGKLGHKEEAERYYRTLKGRSVRVGMEATGHARWFDRLLGELNFELWIGDPATIQAQRVRRQKTDREDARHLLRLLEEGRFPRIWVPSPEERDLRQLLWHRHRLVQMRTRVKNQLQALALNEGVRRKQGLWSQQGRVQLESLELAPWSRQRRQDLLELLDRLNPKIDELGRAIEQAGEQRPEVQRLMTHPGVGPITGLAFVLILGIPERFGCGKQVGSYLGLIPCEASSGGRQRLGHISKQGNTLLRFLMIESAHAAVRYDPDWRGRFLHLALRRGRAIAKVAMARKLAVRLYWMWRKGWDYQQVVKFGSHVG

SEQ ID NO: 417493 - protein, 404 aa, unidentified
MSVVGWDWASQAHDITVLDDAGAVLDRWAFPHTEAGWVMALARLRRRGEPGDLPVIIEKTSGLIVDRLLAAGHPVVPVHPNSFHAARPRWGASGAKSDPGDSYKLADYLRTDGHRLRRLEPADPGLRELQALVRLREDQVRARTAATNQLWAMLGNHWPGPRDLFCSLASGIALAFLTAYPTPQSAARLGEARMAAFLRRNSYRGGKSPALLLARLRAAPQAPVALPAATLAAMVGAHVQQLRSLQATITGIEHLIAERVAAYPRTRLLARLPGAGTINLAQLLAEVGPILDRATSAEQAASETGTAPVTRASGKTTGVYFRWAASTRARKAITAFAHNARMQSPWAAKLYADARARGKRNPHATRIVARAWIRVIWACWHTGTPYDPATHHATRQPSPAEDLT

SEQ ID NO: 417494 - protein, 345 aa, unidentified
MEPMYYIGLDVHKQKISYCVKEGGGKVFAEGWIPATRFDLDRWMKRLPQPWSAALEATMFSGWIYDHLKPHAAALKVAHPLMLRAIAAAKKKNDRIDANKICDCLRCDFLPECYMAPTAIRERRRTLRYRSLLVRQMVQMKIKISTLLMEAGISYNKSKLHKAGYFRELLANNPDINESLRSLLRQCREMVVRLSKMETALIHSLQQDPLLAERVERLMSIPAIGPITALTWALEIGEVQRISSIKKAISYCGLCGDEQSSGNSAQRTPLSKQRNKHLQTTLIEAAKMAPRYSPTLAMLYDREKQKSNANRATLAVARKLVAYLMAVDRGQTHFLVIDQETRTAA

SEQ ID NO: 417495 - protein, 309 aa, unidentified
MFVGIDVSKARLDVAVRPTGETFDVSHTPQGIAHLVDRLQALRPELVVLEPTGGFEQPAVLALAERRLPVVVVNARQIRDFARATGRLAKTDKIDAAVLAQFADAVRPQLRALPDPEQRSLDALVARRVQLVEMVTAERNRLQHTRNAAVRANIHAHLAFLERQLDQMERELLRAIETSSALKMRFDLMVTVPGVGKVTAATLLGDLPELGTLGNRQIAALVGVAPMNRDSGQIRGRRSTWGGRSSVRRVLYMAVVSAIRCNPVIRSMYERLRSAGKPAKVAIVACMRKLLVMLNAMLRSGTPWMRQAA

SEQ ID NO: 417496 - protein, 344 aa, unidentified
MRHYIGLDVSLKETHICVVDEKAKIVWQGECETLASAIADCVAPFGNTIEVVALETGGQSSWLQQGLRDLGLPAVIVDARRAKAALSCRLNKTDRNDAEGLAQLARTRWYREVAAKSENTRFIRSQLLGRHLLVKQLRDIQNQIRGILRGLGLQVGRVSRMKFETRIWELISDYPALEPALAALLSVRRTMIARIGDLDKSLSKLCQGSRLCRRLMSVPGVGPLVCLSFITAIDAPKRFQKSSSVGAYLGLTPRIYQSGDTLRCGRISKHGDSLSRHMLYEAANVLLTNPKGKWSKLKAWGMKLVKRIGSKKARVAVARKLCVILHRIWMDGTEFSWGNKEVAA

SEQ ID NO: 417497 - protein, 325 aa, unidentified
MKELYAGVDIHKENFVGNIMKKDGTIVREDSFPPTKEGAQSFFCGMPIKAIAIEACGIWRGAYGIFSSLGYKVKLANPVKTNLIACKKKTDKVDAKTLADLLRTNYLPEVFIPNENTLKLRDTVRHKCNLTRLKVRVQNKIKGYLLREGIVYPKKIWNEKALSELKKLEKEELNDLIDSYWFFRNKERKHLGKIGNISRNTKLSALLKTHPGIGEFGALMMVAEIADINRFEDAKHLLGYAGLVPGIYQSADKSHSVQNHAVNKWLKWIVTECASRAAMFDKDFMAKFAKVKQRKGFKVARREIARKMLRNVYYMLKNEEPYDAS

SEQ ID NO: 417498 - protein, 441 aa, unidentified
MAMRKRDEEVVFPNAAGIDVGASSHWVAVPRHAAEEPVREFGAMTDDLNAMADWLLACGVDTVALESTGVYWIPLYEVLEQRGLTVWLVDARQMKYVPGRKSDVQDCQWLQKLMSLGFLRAAWRPGDEVCVVRAVVRQREVLLEEQSSWVQRMQKALVQMNIQLTEVLTDVMGMTGQAIIRDIVAGQRNPKVLAQHRHGRVKASAADVQRALTGNWREEHLFVLAQALAMFDSVAQRVLECDRKIEALLAPLASHEVKLEGPAKRAGKNTPRFDLRTALARWAGVDLTRINGLAVTSVLTVLSEIGPDLSRFDNVKHFCSWLCLCPGTKISGGKVLSARTRRSANRVRQALKMAAMSLSRNGSALGAFYRRMCARMDKSSANTATAHKLARMVYFMLTRGEDYVDQGQQHYEEQQRQRSVAALKRRATALGFVVTATQTPA

SEQ ID NO: 417499 - protein, 464 aa, unidentified
MPLRLGIDIACRAAHQVSLADEQGQFLWTGRRFWTTPQDLARLWAMLPEDTDPAELLVIMEPTRNAWVPLAAWFRRRGAEVVLVPPERSSDLRRYYAKHTKSDRLDSQLLARLPMLHPDGLHAEQGLGPGDALKRAAKLHSTLTHRRSQSLARLDALLEILGPAWHAAIGADLANRTPLKFLAAGYADPYVVKRLGRTRLARFCYRHSRGAWGEPHADALLAAARQTLELWSDGELDYPELAEDIAIEARLALQLTEEIKDLDERTTLLLKQADPTGILTSAPGVATITAAAILGRLGDPNRFTSLAGARAFTGLVPILDASGLTGRHGGPTKRGDAVLRQALFMAAGQARRIDPTLAAKYQRLMLEAGKHHNSALCHIATTLLTRIIACWRAGQPYVLRDVDGAPVTIEQAREIIAERYAIPKDVRARRSTTTHKGTDRRSKESRSAPSTGPSNRNATTQTAA

SEQ ID NO: 417500 - protein, 321 aa, unidentified
MDNFIPLGIDVSKAKLDCALDRNGKFRNKVFANNSAGFAELSAWLQRHDVVQAHACLEATGIYWEAVAQHLADSGHAVSVINPALAKAHAQSLGLRSKTDAIDARVLADYCREKRPVAWQPPTAAERRLRALVLRHQALVQMQTQEKNRLESTRAEVRDSLDQHLAWLHRELERIERAIAQALDDDPDLRSKRDLLDSIPGIGERTIAVLLAYGLCGDRFDSARQFVAFAGLSPRLHESGSSVRTKPRLSKAGHSFLRRALYMPAMVTLYKTSWGKRFRERLSAHGKPPKLIIGAMMRKLVQVAFGVAKSGKAFDPALHGV

SEQ ID NO: 417501 - protein, 465 aa, unidentified
MKPNRRLPRKNPAAGPSLLERMNPNAAGIDCGAATHYVAVPADRDTTPVRAFQTFTADLHRLADWLTACGVTTVAMESTGVYWIPLYEILEGRGVDVVLVNARHVKNVPGRKTDVVDCQWIQELHSVGLLRGSFRPTAAIAALRAYLRHRETLVQSAATHVQRMQKALVQMNLQLPIVISDITGVTGLRILRDIIAGQTDPHALAQHRDHRCQASEAEITAALTGHYRPEHVFVLQQNLELFDAYQRQLAACDAAIEAHVLTLAAQAPPPPGPVPAPRTSKKPRANEPRFEIRTPLHQLTGVDLTQIDAIGPYSALRLLAEIGTDMSRWRTEKHFTSWLTLAPHNKISGGRLLSSKTQPSANRSAAILRMAAMNLGRTDTALGAFYRRLAYRVGKAKAITATARKLAILVYRTLRDGLVYQDPGAAAYDAQHRVRVLHRLRQRAAHLGFSLLNRDTGELLEGAVS

SEQ ID NO: 417502 - protein, 358 aa, unidentified
MNRNAGMNVGQIIGTMNGQQVIGLDIAKHVFQLHTVDMGTGEIINVQIKRAKVLEHFANKPPSLIAMEACGGAHHWARALVVLGHTVRLLHAKAVRPFVAGNKTDATDARAIWLAVQQPGVKFVGIKTTAQQATLTLHRQRELLMKMRTMQTNALRGLLYEFGATFAQGRKALFKDMEQTLEELSAQLPQMVADSLREQLERVKALSQDIQLIEKRLGLQLKADTQMQRIAQIPGVGLLTATAAIATMGQACAFKSGREFCAWLGLVPKQTGSGGKVRLGGISRRGDTYLRTLLIHGARSVLSHAREPGPWLAQIKARRPANVVIVAQAAKMARTIWAVTAKEQAYQLGFKSVRPLAA

SEQ ID NO: 417503 - protein, 462 aa, unidentified
MQDSQKRKSSSGNRREIEGLPVIRRRIAGIDIGSERHWVCAPTIEESGREVADFGATTPELIRMAKWLKERNVESVAMESTGVYWIAPHEVLEAEGLEVMLVDTRQLARVPGRDKKTDPVDCEWIQRLHSCGLLMGSFRPQEAVCMLRTLVRDKGNLVAEAGDWLRRMQKSLDQMNVRVHRAVADLQGATGMAIVQAIVEGERDPRKLAKLRDHRCHKSEAAIAEQLSGHWREDHLFSLRQALKMYHSILERISDYEQELLKKLAAMEREECRGQEAPKVNNPQKAHAIRRRGEEPMRHALYRMSGVDLTGIDAIGVATVEVVLTEYGPDMSRFPTEKQFISHVTLAPHRPTSGGKPVKKKKRNSASTRVAAALRMAALSLRHSDTALGAYYRNIARRKKGDVAVFATARKLATLIYRLLRWGQPYVDEGAQAYERRYQQTRIRGLMARAKELGYQLTPTTA

SEQ ID NO: 417504 - protein, 381 aa, unidentified
MITMTHTYASPAPSPLLLAFELGERSWKLGFSVGPGQRPRLRQIPAGAVSVLPNEIARAKARLALPSDAPVISCYEAGRDGFWLHRYLTAQGIVNHVIDSASIEVDRRARRAKSDRLDLVGLLSLLARFAHGDQRAWRVVRVPTVAEEDARHLPRAWETLTQERTRLINRLKGLLATQGVHVRIAADFLDQLRATRLWDGAPVPPGLQERVTQSWAQLQHLEGQLDQLKATRAAHERALATSTGIAIARLQTLRAIGPIGAWVLATEIFGWRQIRSRRQLGALVGLVPAPYNSGETEHDQGITHAGNAHVRRVIVQLAWGWLHYQPTSALSQWYHRRFGSGSRRIRKIGIVALARKLLIALWRYLETGLVPDGAQLKSMET

SEQ ID NO: 417505 - protein, 366 aa, unidentified
MLQKAELSCEADSENNLGGSSETMYYIGLDVHKRTISYCVKDAAGRVHMEGKIGSTRRELDGWIQTLPQPRTIAMEATIFTGWIYDHLLPHAEQVKVAHPLMLRAIATAKRKNDQIDASKIADCLRCDFLPECHMASTEIRDRRRTLRYRGLLVKQMVQMKNRVSGLLLEKGVTHTKRRLHKVGYFAELMSDSKEIDQSIRPLLKLSREHIVRAQKLDYALVSSLERDPLLRERLKRLRTVPGVGPITALTWALEIGDVARFRSIKQAISYCGLCGAEKSSADKMLRTPISKQRNKHIQHVLVEAAKLAPRQCHELALIYEKEMQRGNRNRATLAVARKIVAYLLAVERREKDFVPTEEFGGTAAA

SEQ ID NO: 417506 - protein, 388 aa, unidentified
MQTSITHVSMDTHKKDHKVALAYPDTGELEEFIVRNTVKDVRKMVRKVQRKAPGEVQFCYEAGVCGFALKRQIEAQGSRCQVIAPSLVLTKSGDHIKTDRRDARKLLSQFMAGQLTEVEAPSLAQEAAREITRCREAAKENLKRVRHQLLKFLTRHAYIYRDGRHWTQQHHRWLRSLQFDLADLREVFDWYYTELQHCLQRLATLDKEVAALADREDYREAVGALRCFRGIDTLTAVTVLTEIFEFGRFPSPRKLMAYLGMVPSEHSSGDSRRTGAITKAGNRRVRRLLVESAWHYRHRPLVSKELKRRRQDQPQWAVDIADRAMARLHKRYWRLLDRGKAPGVVVMAVARELAGFLWAVLHEQQWRAARPGACGVQVTQDDRRRVPA

SEQ ID NO: 417507 - protein, 444 aa, unidentified
MVGQYMAMRKREEVFPNAAAVDVGASSHWAAVPPGRTDQPVREYGVMTGNLHALADWFIECGVDTVALESTGVYWIPLYEVLEQRGLKVWLVDARQMKYVPGRKSDVQDCQWLQKLMSLGLLRGAFRPAGEVCVVRAVARQQKVLITEQGQWVQRMQKALVEMNIQLTEVLTDVMGVTGQAIIRAIVAGERDPKCLARYRDGRVKASAAEIAEALRGNWREEHLFVLSQALAMYDDIGRRLLECDAKLQQLLAERAEHAVDLGKAPRQGSKQRIGFDARQAMANWAGVDLTRIPGLGVTVVMTLLTEIGPDLSRFESVKHFCSWLGLCPGTKISGGKVLYSATKRSANRARQALKMAAQALSHSDSALGAFYRRLCTRMDKLRANTAAAHKLARMVYFMLTRGEAFVEQGQQRYEEQQRQRSVAALKRRAAILGFQINPIAQTA

SEQ ID NO: 417508 - protein, 355 aa, unidentified
MSQEKYIGMDVHQATVSAAVRDRNGNLVMECVLETKADTLLEFVQGLHGTLSLAFEEGTLAAWLHDLLKPHVNQVVVCDPRKAALLRNGNKNDRIDARNLSELLRTNQLKPVYHGEHGLRTLKELGRSYLTVSKEMTRTMNRIKSLYRSWAIPCAGTTVYAPRHRREWLAKIAEPGARVRAEHLYEQLDHLQPIRVRARRELLQESHKHDVVKRLRQIPSIGQIRAALLVALRQTPHRFRSKRQIWAYSGFAIETHDSGEYRYVRGKIQRNRERITVRGLNRNHNPDLKNIFKGAAISASSRPGPLQDFYETRVAMGMRPTMARLTLARKIAAITLTLWKKGANFDPQPLRRQAA

SEQ ID NO: 417509 - protein, 377 aa, unidentified
MSKIRFVGLDVHAETIAVAVAEPGGEVRCLGIIPNRLESIRKLLGKLGPVQHLKACYEAGPTGYVLYWQLTQLGVACEVIAPTLVPTKAGDRVKTDRRDAEKLARCYRAGELTAVWVPDAAHEALRDLVRAREAAKKDQLRARHRLGKFLLRHGQRPTHAGKAWTKKYLEWIKTHVRFDQPALEATLSYYVQEVEHMAERILHLEKAIDEAVAQASAEIRAVIEALQALRGVAQMTAATVVCELGSLSRFQSPRQLMGYSGLVSREHSSGNRIQRGAITKTGNAHLRRVLVEAAWAYQHRPNVTGFLLRRQKSLALSGEVKHIAWKAQYRLHKRYQTLAARGKNKNQIVTALGRELLGFLWAIAVHTEKQMQLPKAA

SEQ ID NO: 417510 - protein, 364 aa, unidentified
MYDSTTTVTVGLDVHARSIRLAAVRAEELLEERTLPYDEEAVERALRGWPVVRCCYEAGPTGFGLHRFLVERGIDCQVVAPGLVPQRPGDRVKTDSRDARKLARLLAGGLLEPIHVPAPALEAARDLVRAREDARLDRMRDRHRLSKFCLRHGRRLPGLSWGVVRRKWLSEQRFELAAQQQTFDTYLHAVDLVDARIEQLERAIRETADEQPWSGLVARLRCLRGVETLTALALVAEIGDFGRFKTAEEFMAFVGLVPSERSSGEQRRQGSITKVGNAHVRRLLVESAWHARRRPSVGYQLARRQRGQDALVIERAWRCQRRLHARWQRMAGRGKPQQKIVVACARELAGFVWAIANEQPLRRS

SEQ ID NO: 417511 - protein, 312 aa, unidentified
MEAKFVGIDVSKATLDVDCLPVITPLQFSNDASGIAGLVKWLVGSGVERIVLEATGGYEVAAASALAAAGLPVVVVNPKRVRDFAKAQGILAKTDRLDARVLALFAQQIAPPVRALADAAQRDLAELLDRRHQLVVMRTQEQARMATVLPVARSDVKQHIAWLDKRIRKHEGVLLKRLRANDIWDAKVTLLDTVPGIGPVNLFTLVGRLPELGTLNRQQIAALVGVAPFNDDSGKRRGQRYIRGGRADVRCALYMATLAAKLWNPVIAQMYDRLIAKGKPFKVAMTACMRKLLTILNAILKTEKPWEDRLAI

SEQ ID NO: 417512 - protein, 312 aa, unidentified
MEHSHALFVGIDVAKDRLEVYVHPTGATFSVSHDDAGLSSLAERLAALSPTLVVLEATGGYEVTVAVALAHAGLPLVVVNPRQVRDFARATGQLAKTDTLDARVIALFAEAVKPAVRPLADEQARALGELVARRRQLVEMLGAEANRRRLVRARSLQRRIAAHITWLERALQDVESDLRATIRSTPVWRETEDLLRSVPGIGPITASTLIADLPELGRLTRREIAALVGVAPFNRDSGKWRGRRMIGGGRADVRRVLYMATVTAVRRNPALAVFYQRLRVGRPPKVALTAAMRKLLTILNAILRDHRPWQPA

SEQ ID NO: 417513 - protein, 407 aa, unidentified
MSQSKSTPLRFIGLDVHKHYLIAIAVNPAGEQIGGPWRAQLSHLDEWAQSHLTPQDAVVLETTTNAWTVHDDLQPLVHSVTLVHPPHVALIVRAQVKTDNRAALALAQLHAKGLLPAVWVPPPSVREQRATVAQRTKFTRLATQAKNRLHSALHRHHLPLPAEGSPFALANREWWLKLPVSASERARLQSDLATLEFAEQQIAALTTALTADATQDERVPLLVQLPGFGVLNTLAVLAALGDIQRFESAKHLVGYAGLGSRVHDSGQLHRTGRITKAGRKDLRAAVVEAAQTAANTHPHWQAELARLEPRLGRNKAIVAIARKLLVAVWHVLTKGQADRFAEPARVARKFLNYTYKVGRANRRPGQSTAGYVREQLDRLGLGAELDSIAHGQRAIPLPPSTLKSKPT

SEQ ID NO: 417514 - protein, 409 aa, unidentified
MSTAPRFIGFDIHRQFVMITAVDAQQQVLFDAVRVSLDTFEEWVRTQLHAADQVALESTTNAWAVYDVVAPLVAEVTVADAHKISLISRSPRKTDQHDALVLAKLLAANLIPAVWVPPDAVRELRGLVAHRRHLVRDRTAAKNRLHSVLHRHNLHLPTGDPFSQTNQAWWQALTVSSTECLRVRHELLHIQHLSTLIDEVEAEIARLSIQSPWHDQLAFLVQMPGIGLLSGMTILSAIGDITRFPSPRQLVGYSGLGASVHASGNTYRTGHITKQGRRELRTVLVECAWSAVRYSPYWKLRFERLKAQIGKQKAIVAIARKMLVVVWHVLTKHEADRYADPQAVARALMKWASRHQAATALGVSRPDFVWQELDRLGLGNQLECFHYSGKLYVRQPEVPPVVREAAGSA

SEQ ID NO: 417515 - protein, 324 aa, unidentified
MTDAVLGIDVSKNTFDTNLGAGTKARSKSFANSPAGWHHLIAWLGEHKIGQVHACLEATGRHGLGIALALHEAGHVVSIVNPAQIRDFARTKLGRNKTDQVDAVHIREYAELFKPRPWTPPSPAMRRLCELQTIRAGTVAGLTEWKNRRRSGIMDDLALSLAKTTIQHFTSQLEAVDQAIAETIDNDVELSAKRDLLVSVNGVGEALAGIVLAELPGPDILGSSAAVTAYAGLNPQQNQSGISVNRPVRISKIGNAVLRTALYMPALSAMRYNPAVAALVDRLKAQGRLKGKQIVIAAMRKLLVLCFGVLKTGKEFDPAMAMGK

SEQ ID NO: 417516 - protein, 370 aa, unidentified
MLNTTTFVGLDVHARSIKAVALDAMTGEVRSATFAYDAAAVAEWVRSLDPAAKCVYESGVTGFDLQKRLAALGVDCVVGAVSKMIKPSADRKRKNDRNDAEFLARMLSVGNVVEVWVPDDECEAARDLVRALDDAREDLKRCKQRLSKFLMRHGYAFSETAPTGRRKGNWTAAHWTWIRSISFPEKADGDALAYYVDAVRQAMEDKARLEKLVEAEASKPRWKRRVDSVRCLKGIDVTSAADLVFEAGEFSRFKNARSFAAWLGLTPSEHSSGESVRQGGITKAGNKHLRRVLVESAWHYLGCSPHSKDLAKGQVPDPAARRHAAKGVRRLVERRRAMLERGVHKNKANVATARELACWCWAVGCMVEGA

SEQ ID NO: 417517 - protein, 345 aa, unidentified
MPIVGGLDIHRRQITFDYLDTVTGQVSRGQISPADREHLRAWLARFAGRDDVAFAVEGCAGWRYVAEELAAAGIAAHLAEPADTAARRGRKRHAKTDKTDARHLRMLLAEGRLPECWIPPGHILECRALLELYNDLRREHTAWVQRIHAVLFHQGAPALGEGTLRTGPGLAALRAAAAEHLSPAGQLQVATALEVLEALEARMHVVRHQLTDAARHLTGAKVLAARLYGVGPVTGLALTCWLAGAGRFSSSRQAVRFAGLDITVSSSDRKGPPGKLSRQGPPVLRWAVYEAGKTHARTSAPDHDYYAQVKDRKNSKRAALSEARKILRQAHHILAELGDDALSAA

SEQ ID NO: 417518 - protein, 403 aa, unidentified
MIFVGDDWAEQHHDVYLMDESGQRLGSRRLPEGLAGIGQLHELIAQHAEEPDQVVVGIETDRGLWVGALTAAGYQVYAVNPLAVARYRDRHHLSGAKSDASDAKLLADLVRTDRHNHRPVAGDSADAEAIKVLARAHQSLVWTRTRHTNALRNALREYYPAALAAFEDLAHGDALGVLDRAPSPIQGARLPLTAIQSALKRGGRQRNIAARAREIAAALRTQQLAAPAPVAAAFAATTRATVGIIAELNRQIGELETTLAEHFETHPDADIYRSLPGLGVVLGARVLGEFGDDPNRYTDAKSRKNYAGTSPLTIASGKKRAVLARHVRNRRLYDALDRWAFCALSTSPGARLFYDQRRAAENTHHQALRALGNRLVGILHGCLRHHTDYDENTAWAHRTPVAA

SEQ ID NO: 417519 - protein, 402 aa, unidentified
MNCVGIDVSKGKSMIAVMRPFGEVVVSPFEVRHTASELSKLAGLLKSLDGETRVVMESTGNYHAPVAWLLHDAGLYVSVVNAMLVHDYGNNSLRRGKTDKKDAVKLANYGLDHWLTLPRYVPDEDTRLMLKTCYRQYQQYSKVQTMLKNNLISLLDTTFPDANRLFTSPPRTDGSEKWVDFVAAFWHCECVCGLSEKAFTAKYHKWCRKHGYNFSEDKALDIYASACGHFGVMPKTDTAKLLVEQAISQLRATSATLAALKQEMQSLAASLPEYPVVMGMFGVGPVLGPQLMAEIGDVRRFHSKKALVAFAGIDAPPYQSGQMDIRSRSISKRGSSSLRRTLFLVMSVILQRAPMNEPIYQFMNKKRSEGKPYRVYMMASANKFLRIYYASVKAYLDSLGHD

SEQ ID NO: 417520 - protein, 364 aa, unidentified
MVCVGIDVAKDKHDCCILDSEGTTLVDCFTIPNNMDGFKSLLQTIQDCSQKSDKIKVGLEATGHYSYNIRGFLLDNDLPVYVMNPLHTNLYRKSLSLRKTKTDRVDAKTIATMLLSDVDLKSYTDTAYHNEELKSLTRYRFDKVQERAKLKQSVSRLVTILFPELEQLVSSIHGTSIYALLSEYPGAKQISEAHLTRLANILVKTSRGHYRKDKATHIRDAARTSIGSVMPAKSLELKHTIKLIQELTSEINEIEDAIRKIMDELKPPILSIPGMGFHSAAMILAEVGDFSNFNSPDKVLAYAGCSPSTYQSGKLTNCYAHMEKRGSRYLRYTRPFLSNHSFLTERLMRSSRMPYRVFASVDRF

SEQ ID NO: 417521 - protein, 397 aa, unidentified
MIAVGIDVSKSKSTVAILNGDGSIRAKPFDVHHVADELQALVDYIKRTSEPPTILMEPTSHYHYPLLKAFTEAELPVCLINPYQMKKYGDTELRKAKTDKRDSLRIAQYALEKSYSLIPYTPQDQKYEDLRFLSRQYSQGISTLTVAKVQLLSLLDETMPGITTILPLKSRDPDNCVLLRFIKRFKSFDVIRKMGKTRFLDSYQVLVKKTKDRFAGSKGLAIYELVLNSVTTRGENPLSAMTQDQCVDLVSTSQKAADEINLQMRIIAETMPEYKVLRSMAGVGDRLGPIILGEIGDIRRFHSGKALNAYAGNDAPPYQSGQFESRNRHISKRGNPALRKACFEVMQGLKLTKPQDDPVYLFLLKKEQEGKPYNVAKMAAVNKFLRIYYAHAMELYK

SEQ ID NO: 417522 - protein, 349 aa, unidentified
MNATIVAVDLANNIFEIAAADADWRIAQRSRLPRSKFFEFFVQLQPCQVVMEACGSAHYWARRISALGHTVRLLPAHYVKAYVRRNKTDRADAAALLEAARCADIREVPIKTINAQQIQSLHRLRSQWMSTRQRYINTLRGILREFGFAIPLGVNVAKDRIGTALADPESEVPPALRVTLAEMLQQIRLLEQKILGIEHQLNALTRHDVRVQQLRQIPGIGALTSTALRAIVGDIQRFPSGRHFASWLGLTPNERSSAEKRRLGKISKQGDVYLRTLIVHGARSALLGAHRAERSGHPLDHLRRWALDCERQRGHNKATVALANRLARIVWATWKFERPFDGNWSAEAN

SEQ ID NO: 417523 - protein, 338 aa, unidentified
MNKFSGIDLHSNNSVVVVSDEADRIVYQRRLPNDPVQIQAALAPHREDLVGVVIEATFNWYWLVDDLMKEGYVVHLANPAAIRQYDGLKYSGDFADAAYLAQLLRLGLLPEGYIYPPQGRQVRDLSRKRMQLVQCRTAQILAIENLFSRQTGGQMQGERVKRLDEVQVSGFGFAPDVTLAMQANLAVMQTLQEEIEIIEKRLMERVKLHPDYALLNSVPGIGPVLASTIMLETGTISRFAEVGNFSSYCRCVDSRRESNRRKKGEGNTKNGNKYLAWAFVEAANFAIRSCPEARRFYERKKRARNRIVAIKALAHKLARACYHMLREHKPFEIARCFG

SEQ ID NO: 417524 - protein, 489 aa, unidentified
MMPIATGGHPDLKMVNPTAAAIDIGSTMHMTAVSPDACDTPVKSFGTFTQDLNDLADWFKACGVTSIAMESTGVYWIPAFEVLEARGFKVILVNARYAKNVPGRKTDVSDAGWLRQLYSYGLLRGSFRPEAEIATLRAYLRQHERLVEHAAAHIQHMQKALIEVNLQVHHVVSDIKGATGMRIIRAIVAGERDPDVLASFRNVRCHSSIEVIKAALVCNDRDEHIFALTQSLDLYDFYQTKIEECNRKLEAAVAALTIKAICDVPPLAKARTKRSQVSVPSFDVRAALYGVLGTDLTQIHGLGPSLALKLVAECGTDLQAWKGAKHFTSWLCFVPGNRISGGKLLSSRTRRSSSRAAALLRLAAVTIGRSDTALGAFYRRLSSRIGKRKAVTATARKIAVLFYNAIRFGMACQDPGAAAYEERHRSRVLANLHRRAGSLGYAFAPLTNKPLRMTRPTITKACVNTPPPVTMTCSGLGMRGFRQLHPRLI

SEQ ID NO: 417525 - protein, 430 aa, unidentified
MKSNTQNAKIEAITEKTLVLGIDVGSEMHYARAFDYRVIEYSKKLFKFSNTEAGFATFKEWVLDLKERHEKDKVVPGMEPTGHYWFNLGKFLQDNEMKPVLVNPHHVKKSKELDDNNPTKNDRKDPKVIAGLVREGRYMIPYLPEGVYADLRTASNIRFQLQAELTRIQNRISRWFNIYFPEYKTVYGKPDAKSGMLILKAAPLPEDILTLGIDGVNQIWRDAKLRAVGKARAKTLIEAAEHSVGSKEGAVSARMEIRMLLEDYESRNTRLQEVMVLIEELVRKIPMAEKLLEIKGVGIRTVSGFLAEVGDISRFNNPKELQKLAGLALVENSSGKHKGETTISRRGRKRLRYLLFEVAMSLVSKNQEFRELHNYYTTRRLNPLKKMQSLMAIAAKLIRVFYAMLTKGVDYDPKKMVSDIKRPAVYLQAA

SEQ ID NO: 417526 - protein, 343 aa, unidentified
MEVKRVGIDLAKNVFQLHGVDRHEKAVFKRRLKRDRWLRVLLDNTDPDCVIGMEACSGAHHWARVLQSRGYTVRLIPPQFVLPYVKSNKNDANDAEAICEAMSRPSMRFVSVKRVEQQDVQATHRVRSELMKQRTAKAQQIRGLVSEYGLVAPLRLTALRAAIPRWLEDAENGLTSRFRALLHGLWRDLAGLDDRVAELTGEIEAIAKADPVAQRLQQLRGVGPLVATALLASVGDGHQYKKGRQMAAALGLTPRQHSSGGKDRLLGISKRGDAYLRSILIHGARAVVSTAKHKEDRLSQWVTQIAQRRHPNVAAVALANKTVRMAWSMMTSGSDYDPEFVIS

SEQ ID NO: 417527 - protein, 326 aa, unidentified
MAYPELVLQVGVYDTMNDPQIKIGIDVSKASLELSSFDKGKDSVANTPAGIRSLLRRIQKLPQLPVLCCEATGGYEKLVVNLCHEVEVPIAVVNARQVRDFAKSKGILAKTDLIDANVLSMFAEQNTLRLKTKTEPWRQSLQALLTRREDLKDLITQERNRLETLQDPFVRKQIEANLRMFKKQNQHILKTIEALVSSTETLQKLCSRMMQVKGIGLLVATSLIAFLPEIGQISDKQVAALAGLAPYNQDSGTWKGQRHVSGGRSKVRTALYMPAICAAHNNPVLKEFYDGMILRGKPAKVALTAVMRKMVCLANRIASDPEFIPS

SEQ ID NO: 417528 - protein, 342 aa, unidentified
MDHYAGIDVSLECSSVCVTDASGKIVREGKVASEPEALIAWFGSLGLALARIGLEAGPLSQWLYAQMKQSGLAVELLETRHVSDAFKAMPVKSDRNDARNIAQLMRLGWFRPVHCKSIAAQEVRAMLTARKLVQSKLLDVENSLRGILRGFGLKVGKTNKTGFAGRIEELVQGHPSLEMIARALLRARAVLLAEFRGFEKQVRQTSRLHAQARLLMSTPAVGPVISLTYACAIDDPARFTSCKQAGPHFGLTPKKYQSGETDYSGRISKIGDASVREALYEAAHIILTKPIRGCAELKSWAMRIARRAGMSKAKVALARKLAVIMLRMLKDNTPFNPAAKAA

SEQ ID NO: 417529 - protein, 339 aa, unidentified
MFMIGIDPHKGSHTAAAVDRSEVVIAVVRVDADGHQRDRLLEWAVGFEPRVWAVEGATGMGAMLAQQLVAAGQHVVDVPPKLSARVRLLDNGRIDKTDPNDARSAAIVAWRNPALNVVAGLDEHRVMLRLLADRDHQITAQRTRTVCRLHAVLCLLIEGGAKRSLTVAQAENMLASVAADTAVTRARIAAASEFVNEIRALDTARKDARTRTAGAVKACATTVTDIYGIGPLMAAIIIGHSGDIRRFPTAGHFARHNGTAPIEASSGPKKRHRLNPRGDRQLNHAIHMAAVTQVRNETAGRIYYRRKQAEGKSRKEAMRSLKRCISDAVYRQLLADTRC

SEQ ID NO: 417530 - protein, 307 aa, unidentified
MFIGIDVAKDRLDVHLRPGGEAFTIARDGEGVEALSAQLLELKPVLVVLEATGGFETVVAAGLAAAGVPLAVVNPRQIRDFARATGRLAKTDPIDAGVIAHFAEAVRPPVRPVASAEAQMLGELVARRRQLLEMMTAERNRRRQLTTKRLIKGIDHILAALQAQLSELEKDIGDAVRGTPAWREKEDLLISVPGIGHKIARTLIAELPELGSLGRREVAALVGVAPFNRDSGKWRGRRIIAGGRAVVRSALYMSVLVSIRRKLPLVATYNRLRAAGKPAKVAIVACMRKLATILNAILRDKNPWQIA

SEQ ID NO: 417531 - protein, 399 aa, unidentified
MIPAVIERCAGIDVGRKFVVVCVMCGDAQATPTLEVRKFSMLTEGLEQLRVWLHQNECTHVVMESTGSYWKPIFNILDDGQLEVVLANSQQVKNLRGHKTDPNDARWLAHLLRHGMIRPSFIPDRDTRELRDLTRRRKKLVECAAEERNRVQRVLQEANIQLGMVLSDVFGESGLNMLDALMNPDASAEGHRMTEHHRRLIRHSMEHLAFLEEQIAELDREIDDHTHSRPALKSATELVKSVPGIQQTSAAALVAETGADMGHFPSGGKLASWIGICPGNNESAGKRKSGQTRKGNPWAKRALVECAWSASRKKDSETKRYYERLKPRLQHKRALVATAHLMTLKVFEALSTGQPYQVDQQPELTAAKLRRLVRHHTHRLRRLNKWLQGHKKRHAQAPH

SEQ ID NO: 417532 - protein, 478 aa, unidentified
MTHARRLVGIDLGIASAHTVRVLDEAGQTVAKRKAWPTVSSLTDVETTALVGAPEGIWLEVVVEPTGPAWLPIAVFFTRRGHLVHRVSSAKAADLRRFLSRHTKTNGIDADTLARLPLFDPAGLQPLVLPGAEQAALDRRVRATDRLTQAGADHKRRIKDLVRQLLPMSPLTGDLGVADLAVLERYADPNALLRFGSKRLTTFIAKASHSHQGSDRAQQWIDAANASLDLYAGHPAAAFADLAAEIATEVRLLRAVQTELVAHAEHREIRYRRVDPAGLARSLPGVADIGGPALVAAIGDPTRFATGKAFRSYTGLTPKASETGDTDRKGQPMSKAGSRLLRTTLIRAADNARHQDPQLARIYYVQMVERGKDHLGALCVVAANLAERFWAVMNRGHPYLVCDTNNTPIDPVQAKAIIAAHWQVPAEVRARRRSKKGKAPQTVRTGQPKPPAQRESRRGDLPRPAWSATPPDEVNRSA

SEQ ID NO: 417533 - protein, 417 aa, unidentified
MNDPQQWQQHRAFGALDWAREKHSVIVLNPTGKVIEEFEIEHSALGWKKFREKLQAYGSIPFAIETSQGAAVEQLVEAGMMVYPLNPKSAQAYRDRKAPSGVKDDWLDAWSFADALRVDGQGWKALRPEGALIKELRLLCRDEVSLIEQRTAFIQQLRDALAQYYPAALEAFDDWTRVSAWMFLQRFPTPDALAQAGKRKWQNFLHSRRLWAGQEGTRRMEIFARATEFAGSPPTVKAKSLLALSLVQMLFAIEKQLSLYRQRIEELFARHPDHDLFGSLPGAGPKIAPRLLSEIGDDRERFGGDAQNLQCLGGTAPVTKRSGKRRYCYIRWACNKHLRYAIHLFAEQSLSRCVWAERYYQHHRQKGQSHANALRRLGHRWLKILHKMWIDRNPYDAELHHRNQLNHGSWIFQLKAL

SEQ ID NO: 417534 - protein, 328 aa, unidentified
MAKEKFDVSFFDLTSKKVSNQPSHKVVTNNLKGIGKFFKGLPSDAVLVAEHTGVYGDTLLKCCMDSNVKIAFVGGYVIHRYRATPDRAKTDVLDCALLRDFGERYPDKLKYKTFPEEALYELRQLARHREMLVEQRKQLITADKSEDCRPIRSLAVKRSMDHIKEMLDMEIAETEKEMLKVINGHESIHHNYELVKSVDGVGLITAVELLVKTENFTKITTARQYAAYAGTAPYEKSSGKMDKGAHISKIGNRRSKTLLYICAESARLHNKEIKLYYERRTLIDKKPRHYVLNAIANKLLRIIFTLVEKGEYYDANFIRQDPRVVKYN

SEQ ID NO: 417535 - protein, 420 aa, unidentified
MSNQNIELAAFVGLDWADQQHAVCVQEAGSNRRDKSTLDQTPEALHAWIQELRNRFGGKPVAVAVEQSRGALIYALMHVEFLHIYPVNPQMLAKLRQAFHPSGAKDDPRDADLLLEVLLTHRHHLRVLVPDDVLTRSIQLLTEGRRKLVDERTALTNQLTAALKSYFPQALDWFGDLHSPRACAFLHRWPSLQRLKGATPSSIRKLYQAQKYRGQDKLEQLLQDILKARPLTEDEAVLLAETMMVQALVKQIPSLTESIEDYDQQIAALFKKHDDSTLFGSFPGAGSTLAPRLLAAFGSDRNRFEFAAQIQELSGIAPVTEKSGKSCWVHWRLACSKFLRQSFHEFAAQSIPHSNWARAYYNQQKQRGKSHHAAVRALAYKWIRIIFRCWKTRTPYDEARYWKSLQLRGSSLAAALQPAE

SEQ ID NO: 417536 - protein, 314 aa, unidentified
MSFVGIDVSKTQLDIAERPGNKRWSAVNAEADIGEVVEMIGALSPQVIVIEATGGMEVPLVAALSQARLPVVVVNPRQVRDFAKAVGRLAKTDRIDAEILAHFGEAVKPEVRVLKDEETQTLTALVMRRRQVIEMLTAEKNRLGICPKVVHKDIQQHIDWLQARLEDIDRHLESAIRKSPVWREKDDLLRSVPGVGQVLSVSLITGLPELGTLSRRQIAALVGVAPLNRDSGLFRGKRTVWGGRAHLRSVLYMATLSASRFNPAISRFYRRLVEAGKKPKVALTACMRKLLVILNAIMKNRIPWQADYSTCLTP

SEQ ID NO: 417537 - protein, 360 aa, unidentified
MTTYYIGADVHSNSTELAIEKRNKIVARYSVPTTIPAISNVLDSLQGKKHLAFEEGPMAGWLYRNLNQKVDKLIVCDPRRNKLISSDGDSDDKIDAGKLALLLRGGYLRAVYHSDNDQRAELKHWVNLYHDRVRDAVRNINKIRARCRMFGLTIPRSALRDPAHRLKWLFKINHPALAKQLKMLWIGYDATAKQARIAKRQLSVLGKNHDIIKLWDRLPGIGLIRATTLFAYLDTPWRFKRKNKLWRYCGVGLQRAASGTDKKGRPKPARLRLPWAVNRTLKNAVLGAAISAINQKDNVFKDYYERMVQDGIITSNARHAVARKMLTVMWGMWKTNSRFDEKLLYLPSDLSKPTASVSSR

SEQ ID NO: 417538 - protein, 421 aa, unidentified
MRSVVRRDFAVVAVDLASAKQAAVVTDHDSIVFGRRMFTGNTWVIDDILDWAEPIAAKAGYAGVVVGCEPTGHRWKPLLDRSRARGLELVCVNPMLVHRGREEEDFTRDRSDFKDATIIAKRVAELRCYVPYVMEGHWCRLRHLGARRADQLVAVGSARQRLRDLLECAWPAVLSAAADPLDALTWRAAMAVATDPGRIVAMGFGAFADAVREQLPRWGGTRRNLRILRAIFDAAHAPGGVETERAAACERAAYALEDWHYALDQVADVEHRMVEVLDALDLYELVTTIAGLSVVGAAAILAETGDPARFDCARTWAKHAGLCPRANESGNFHGSTNVSRRGRPGLRLAAWRALWGALRHNPVYAARYTHLTTRADNPLCDGQARAAIAAALLRQLFVVVTRRVAWDPAIAAGTGVVPQAA

SEQ ID NO: 417539 - protein, 398 aa, unidentified
MGNNVALKTKKWGIIIALIDKNWGIYFALNWGILLALTGELWLPPTMRYAKIDSQYYCGIDLHARTMYVCVMDKQGNILLHRNMDNNFNEFKNYLEPFIPDVAVGVESSCYYYWISDACKKENIDFYLGHAFYMKAISGGKVKNDRVDSRKIADLLRANLFPLAYPYPEEMRATRDLLRRRHYFVRRRAGTYTHMQILCMQHGMYDVSSKIVKDEKDRLKLIKFFDNPDLKLMLQIDIDYIESLHPIIERLEKRIRKQAKHHNQRDYQLLMTIPGVGEMLGLVILYETHDISRFEKVQHYSSYCGVVKCERSSAGKIIGSKNNKIRNPYLKWAFGDVIIKAQQVEPKIDKLYQRLKSKYGLGRAKSIIAHRFNVAAYFMLKNKQVFDVDRFCQSSKYN

SEQ ID NO: 417540 - protein, 369 aa, unidentified
MEEYNAFIGLDVHKDSISVAIADAGRDGELRMYGTIVNSPDAVSRLMRKLVQRHGKIEVTYEAGPCGYGIYRQLTEMGICCRIVAPSHTPKRPGERVKNDTRDALMLARLLRAGELTYVWVPDATHEAMRDLVRARQVASQDVRAARALIRMFLLKHGLHCKSKAWCLRYRKWLTSLKFDHTAQKFALQSYINRLEQAEARKAEIEDQMADLIPGWALAPVVHALQVFKGIGMVIATTLAAEIGDFSRFASPRKLMAYLGLVPSEYSSGSKQRPGGITKAGNKIARVMLVEAAWAYKWPPKVGVDLMLKRQDYSQELKDIGWKAQVRLNKRFRRLESRGKRSTVAAAAVARELVGFIWATAISAMPKTA

SEQ ID NO: 417541 - protein, 345 aa, unidentified
MPIVGGLDIHRKQLTFDYLDTVTGEVMRGQIAPADRAHLRAWLVRFAGRDDVAFALEGCTGWRYVAEELAAAGVAAHVAEPADTAFARGRKRHAKTDKTDSRHLRQLLAEGRLPECWIPPSHILECRALLETYHDLRAEHTAWVQRIHAVFFHQGAPALGEAALRTGRDLQAVRAAAACHLSPAGQLQVDTALDMLAALEARLDVLRHRLLAAARHLTGAKVLAARLYGVGPVTGLALTCWLGGAGRFSSARKAVRFAGLDVTVWSSDRKGPPGRLSRQGPPVLRWAVYEAGKTHARPSAPDHRYYAQVKDRQDGKRAALSEARKLLRQACHILAELGDDAVSAA

SEQ ID NO: 417542 - protein, 482 aa, unidentified
MSKPTQHSKKPGEKKTAAGQGKRSRKRKGMCLEDRPILEPNAAGIDIGAREIFVAVPPDRDADPVRVFSTFTEDLEEMAKWLVSCGVTTAAMESTGVYWIPAYDVLEQHGVKPCLVDAHGMKNVPGRRTDWHECQWIQFLHSVGLLRAAFRPDGEVCAVRSLMRHRSDLVQMTNQHIQHIHKALTQMNVQIHHVIDDITGVTGLAIVDAIVDGQRNPLELAKLRDPRIKASEETIVKSLQGTWRPEHLFTLKQSRQMYRHYQDQIAACDEEIEKLLVAFQPRVDPAEKPLPPDRKKRKRGRQKKKNAKTKQGFDLRTESYKIFGVDLTQIPGLMAMVLTLFSEVGRDMSRWKTAGQFVSWLALCPDNDITGGRVAWRGMRRVHNRAGELFRMAAYSLHHDKSPLGDYLRRMKSKLGPTGATTATAHKIAIIFYTMVKKQVEYDATLWAERDTQREKRFEAKLKRQAQQLGYKLVPIEEKPAA

SEQ ID NO: 417543 - protein, 338 aa, unidentified
MVYGAIDLHMRYSWVRIINADGTVQREQRVPTSRERLVQAFEGLGVMRILLETGTESEWVAEVLEGAGHEVIVADPNFAPMYGELRRTIKTDRRDVAALAEANRRMWYRATHRVSREQREIRRILRSRRQLVQMRTGTLSLIRSLVRQAGFRAKANVAQGLPTYVAQLGLPATLADTVAPLCRLIDMLNREIAAIETRLQAMTSTDPVIARLQTVPGVGPIVAMTFRATVDDITRFARADQVSAALGLVPREDSSAERRHRGHISKAGPAELRSLLVQAAWCSWHTRTNVALRAWAERIATRRGKRIAVVALARRLSRILFALWRDGATYRAEALVAR

SEQ ID NO: 417544 - protein, 408 aa, unidentified
MEQLYVGIDVSSTKHAAYLMKPDGDKFSSFPMQNDRSGAKMISEKIVSALTKLGLKDVVIGMEATSIYGDNLVYALREDGNLGRFHRKIHVLNPKQVKNFKKSYPELPKNDPVDAFVIADQLRFGRIGKEVYMDDYRYKALQTLTRARFYAVQNLTREKERFANYLFLKCSGIAQSKDIPNTSATTLALMEHFETVDELANADLNELTAFVNRAGHGRFADPEATAKLVQAAARGSYRLPKTVNDSINQVMSASIAAMRALESQIRTLEKAIEKQFEIIPNTLISIPGIGKVYSAGIIAEIGDICRFTGQASVAKYAGLVWTQHQSNEFEAEDTRLIKSGNRYLRYYLLEAANSVRRCDSEFRRYYDLKFKEVNKHQHKRALALTARKLVRLVFRLLKDNRLYKPPGG

SEQ ID NO: 417545 - protein, 313 aa, unidentified
MSEVFVGIDVSKDWLDVAFSGGRSGLRVANDAKGHEAMVKAVTESTPMLVVLEATGGYQRAAAAALAAEGLPVAVVNPRQVRDFAKATGILAKTDRIDAAVLARFAQTIRPDVRPLADPERQSFADLVVRRRQLVLMRDAEKNRLGQSQDTRVLRSVRAMVRAIEEQIAALDEELGERIKKSPVWQHKVDLLKSVKGVGDQTARVLVAELPELGSLSRQRIASLAGLAPFSNDSGTFRGQRSIRGGREGVRRALFMATLAGIRYNPVIREYYQRLVAGGKRKKVALIAAARKLLVILNAIIRTDTPWRAANGA

SEQ ID NO: 417546 - protein, 437 aa, unidentified
MRVLYEHVAGIDVHKDMIKVAIRSPGEKPWTRKTEILEFRTFYGVLQEMARLLRRRGVTHVVMEASGVYTDPVYYALCEQDFAGVAVVNPAHARALRGHKTDAADCRRLAELFECGLLRGSYIPPAELREVRDLTRYRMKTVQARTSEIQRLGKALESAGIKLGSVASDITGVSATAMIDSLIDGERRGAVLADLAIGRMRTAGKLADLSMALTGRFTEHHALLCRLHRDRIAGLDAAVADLDDQIAGRAGRWQRELDLLKTVPGFGDVVAAAWLAEIGPAPHRHFASHEKLASWVTLCPGNNISARKRKHGRTGDAGTYIKPMLIQAAWNAIRTKGRLQARYSRLVRRFGGEKNPGAKKKAITAIAHTLLKIACQVLKSGVPYQDLGADFYTRRESPDQQRAYLERRLQKLYPGCAITITISPPEAALTSTVSNAP

SEQ ID NO: 417547 - protein, 389 aa, unidentified
MILVGIDVAKDKHDCFIQTANGKVLYKAFSFANNYEGFEELYAKILSCNDDVVRVGLESTGHYSYNLLGFLLSKELPTFVFNPLQTNQFRKSLSLRKTKTDKVDARNIALMLATESSDNAYSLQTYQNEELKSLTRYRTDKAGQRSKLKQSLSRLVTILFPELESVVSTLHSNSIYAMLLKYPSAKDVAKSQFHSLVNLLESTSRGKIGSDKAKEIRNLARKSVGVYVSAKVLELRHTIKLIQILDDEIVEIEENIKSYMQEIHSPIESIPGISFRLAAVIEAEVGNFKRFSSPDKILAFAGLSPSTYQSGKFISQNATMEKRGSRYLRYALFLAARLVSRYSKTFASYLQKKRDEGKHYFVALSHVAKKLVRVIFHLQRTGESFLDFA

SEQ ID NO: 417548 - protein, 346 aa, unidentified
MTIVETRAITGGVDTHADVHVAAALDPIGGRLGVQEFPATPEGYGRLLGWLGGFGTVSLVGIEGTGSYGAGLARHITWAGVRVVEVDRSDRQDRRRQGKSDPLDAVSAARAAQSGRARGASKGRDGAVEAIRTLMVVKRTARSERTQTINQARSLVLTGPDDIRVRFIHHTTAGLVADLAGLRPRPGATVGYATRIALRELGRRAQFLGGQLASLDELIIPLLTAHAPGLLALYGVGPDTAALLLIAAGDHPERLRSEAAWAHLCGAAPIPASSGKTVRHRLNSGGDRQANHALWRIVITRMSSHPPTRAYVERRVKEGLSKTEIIRCLKRYVAREVYPHLRPPAR

SEQ ID NO: 417549 - protein, 329 aa, unidentified
MNYKWFVGIDIAKKTLDVVLYKKELQKKSPYCQIHNNSDGFKNLIKWLKEQNVVLKHTLFCMESTGIYSMFLVNFIAEKTNYCLESPLHIKRSLGLTRGKSDKIDAFQIARFCYLHREELVPSKPASRIMVTLKSLINERERLVRTRTIDKTIVKELNYEENRSCIDRAKNRINILTEDIIQIEKEINLVIRENFDIERNYNLAKSVTGIGMVNAVMFILFTNNFSSITDARKYACYSGIAPFEHSSGTSIMGKTRVSKLSNKRIKVNLTNGARSAIINDPELKLYYKRKTEEGKEHGTVMNAVKFKLITRVFATVKRGTPYVKLRQAG

SEQ ID NO: 417550 - protein, 336 aa, unidentified
MICVGIDVAKDKHDCFILSSEGEILADVFTIPNNAEGFDHLLQMIRNCSRPQDKIKVGLEATEHYSYNLLGFLLDKGMPTYVINPLYTNLYRKSLSLRKTKTDRVDARTIATMLMSDVDLKSYTDTAYHNEELKSLTRYRFDKVRERAKLKQSVSRLVTILFPKLEKLVSTLHMASVYALLEELPGAKQIAGTHLTHLKSLLQTASKGRCRREMAMALRDTARCSIGSVMPAKSLGLQHTIRLIRELDAEIDDIETAIQAIMEENRSPIMTIPGIGTRMGAMILAEIGDFSRFDSPDKVLAYAGMSPSTYQSEQLSLSGTYSHMEKRGSRYLRYAL

SEQ ID NO: 417551 - protein, 252 aa, unidentified
MKNKMNQSINVGVDTGKYQLDIFLRPLDIYFTVSNDEKGIKEAIQTIKKYSIERIVIEATGRLEMPFIMACAKAKLPFVIANPIHIKRFAGAIGQRAKTDKLDAQLIAHYGEVIKPNLSQLKPDAMQTMSDLVARRNQLLVMQTMEKNRLQILPKELAMTIKPILTAFKHQITKIEKKLIALIESCPDYQAKNTILQSMTGIGKIASASIISNLPELGYMTSKQASSLVGVAPMNRESGRYKGQRKIQGGRH

SEQ ID NO: 417552 - protein, 316 aa, unidentified
MKNQSTVIYVGVDVSKTTLQVHIQGHQSLIKNISSDHNKFRQQLKALAGCHVICEATGGYEQAMVRALQQTGIPISVVNPAQVRAATQAKGQRAKTDRIDALMLSDYGQRYQPQPTPPVSQVQQELIALVRWLKQLIDFRSVAKTQAEHHEEAFVCKQHQQLLNHYDKQIEKVEGQIANLTKKDAALNQRVAVLDEIEGVGLRTAYLILAQAPELGKLNRQQVAALAGLAPWTRDSGAMKGMRLIGGGRSELRLALYMAALSAARCNPVLSPFFKRLREKGKPHKVAMVAIMRKLLIYMNHKLKNLDRLTEKPLAN

SEQ ID NO: 417553 - protein, 507 aa, unidentified
MAMVKAKRKMSAYERLRNGEQLNRTERRQVQQLVSSGDPTLEVVHRNAGGIDAGSKSHFVAVPGGRDPEKRTVREFGAWTEDLWRMAEWLKSCRVDTVAVQSTGVYWIALQEVLEKNGIQVDVVNARGTKNLPGRKSDVQECQWLMKLHTYGLLRNSFRPPEEVRGVRTLWRHRERLVGDAGRAIQQMQKALLIMNIQLPHTISDVSGVTGMAIIRAILQGERDPRKLAQLRDRRIKASEEEIVQSLQGHWRDDVLFELQQVLAGYDFLEKQIQDCDQQVCRYLVGQAEQRPAVAARVEEGAEKNGKKKRGKRKQGKRKRTRSRWQDPVGFDLRTVLHRLFGVDLTRIDGIDVMTALKIYTELGPDLRAFPDEGAFCSWLELVPRKDITGGKVIRQKARQSKNRVAGALRMAAESLSDSDSYLGARYRRMRGHKDGKPTVKAMAHYLARLVYRMLTRGEEYVDRGAKYFEKKREEREMVGLQRKAAQLGMKLVPAHDAKCSRPAPSA

SEQ ID NO: 417554 - protein, 447 aa, unidentified
MQKKNVKMEVINPHAAGIDIGSRSHFVAIGQGDSDVREFGVYNEDLHALAEWLTASGIKTVAMESTGTYWQSLFAVLQSSGLQVILCNGKFTKNIKGKKSDVQDCQWIQKLHTLGLLTGSFLPDEVTEQLRTYCRHRANLLEQVASTSKKMQKYLRLLNLRLDVVVNDVVGLTGIKIIEAICNGETNPEKLASLRNGNCKKSEAEIAKALQTNNRKDYLFALKHEYQMHLNLQTKIVECDLEIESLLNEQINKDNNKKQHHIKKKVYKKINKNTPKNMDINLLSYQYFEGVDLLAIEGVSYSTVLTLMSEVGTGIHKFESAKQFASWLRLSPNNKISGGKVLSNKIPKGSNRLKIALRNAANAIGNLKNTALSNFFARISHRKGRVSAISATARKLAVIIWNMLVKKVPYIPQTEYQFLDQKRKKITAMKKLIAKFDISPNDLNLQL

SEQ ID NO: 417555 - protein, 338 aa, unidentified
MKTRPGSRDRLHRCKVGERMVIGIDVAKAELVVARGSQGELSTWANEESGVRGLVKELEGVDAALIILEATGGYELLCVSALAAAQLPIVVVNPRQVRDFAKATGQLAKTDRLDARVLALFGERVQPTVRMLPDEQTRELGAALTRRRQLLEMRQAEQNRLLQLVGQGRRPIKQSLKKHIAYLERELRMTETDVGRMIRESPVWRDKDNLLQSAPGIGPVVARTLLAELPELGTLNRRAIAKLVGVAPLNRDSGTWRGQRTIYSGRASVRTALYMAALAATRWNPVIKAFYQRLVAKGKPKKVALVASMRKLLTMLNQMVRTGEHWRAHPHPQPTLPR

SEQ ID NO: 417556 - protein, 344 aa, unidentified
MDHFAGLDVSVKETSVCIVNDTGRIVREVKVASEPEALLAVLKNPAYHFERIGLEAGPLSQWLFSALAEAELPVVCVETRHMQAVLKAQINKTDRNDARGIAQMIRVGLYRPVHVKTLRSQKLRMLLTHRKLLQSKAIAIENDLRGTLRNFGLKVGMVGKVRFEARIQELVENLPDLAELVEPLLIVRRALREQIVILHRRLLAIVRDDEVCRRLMTTPGVGPVVALTYRATVDVPARFRKSKSVGAVFGLTCSKYQSGEIDRGGSISRCGDEMMRVMLYEAAQSMLRSKKWSWLKAWAMQIARRRGMKKAIVALARRLAVIMHRIWVDGTEFRWTREQAAAAA

SEQ ID NO: 417557 - protein, 409 aa, unidentified
MRYYLGVDWADQTHAVWVVDEGGTKVGLRTVPHSAEGLTEWGRELDEWRAQGIELWAAIERPEGRVVDFLLNHGVVVYAVNPKALDRARDRFRQSAAKSDPFDARVLAEFLRTDHAHLRALQPSSEAAQELKLLTDDYQRQIRQQTRLVNQLTTTLKAYYPRGLEVAELTTALAREFLQAYPTPAALTALTERQWQRWARTHRLHEARTRELWAVLQRPQLPVPAHVVRAKARLMQSLVAQLTVVMEVVGAYREAIEDFFAQLPAAQWIRTLPIGDHGITAPTLWARLGDAPGRWQSFRHLQAQAGTVPVTIRSGKQQVVRFRFACDKSLRYIIDHVAFLSLRWSAWAHAYYAGQRARGHSYRQALRALSAKWLKIIFVMWERQIPYDEQYHLAMMTRQQLRQRHEKVA

SEQ ID NO: 417558 - protein, 391 aa, unidentified
MIYAGIDVAKYKHDCFITNSDGEVLFKAFTIPNNRDGFEELYQKIQSVTDDLAKVKVGLEATGHYSYNILGYLLDKGLATFVINPLHTNLYRKSLSLRKTKTDKVDSHTIATMLMSDVNLKSYSDTSYHNEELKSLTRYRFDKVKERSKLKISISRLVTILFPELEHLVLTLHMVSIYALLSEFPSASAIAASHLRRLTNLLSTSSKGHYGKDTAIRFREVARTSISSKMPAKSLELKHTIKLIRELDSEISEIESEIKSIMDELNSPIISIPGISYRMGAMIIAEIGDFSRFDSPDKILAYAGLSPSTYQSGQLESCHSHMEKRGSRYLRYALFNATKFVCQWDPTFATYLSKKRAEGKHYNVAISHASKKLVRVIYQLEKSGQSYIKTA

SEQ ID NO: 417559 - protein, 458 aa, unidentified
MKRKSKRTKGMEEARPFEGMSKVNQNAAGVDIGATEIIACVSGGQAVQLVKAFGNYTVDLQAICEWFRKHEVKTVAMESTGVYWIPLFEELERQGFECLLISSRSLRKVAGQKTDVEDAQWIQTLHSYGLLKGSFRPQGDLVALRTLLRHRSQLVEHRSPHIQHMQKALLQMNVQLSQAVTDVTGMTGQKIIRSIVNGERNARVLAGFRDPGCKHSEEEIEKALTGTWRAEHLYVLKQSLELYDFYTEKVEACDEEISRRYGMTRPVWVSRELPVIPDKKRNSHSKNAPKDAKGIREHLYRINGVDLSLVDGMGVSLAQTVTMEVGSNVGEKFPSEKHFCAWLGLAPKHDITGGKVLSNRTLKTKNRAGQAFRLAANSVKKADCPFGMMYRRLRSRLGPAQATVATAHAIAKVVYKMLKYKVEYDPLSVNEYQKQYEEQQVKYMRKRAAKFGYQLIPA

SEQ ID NO: 417560 - protein, 384 aa, unidentified
MIVIGTDTHKYTHALAAVDEGTGRVRGQREIKADEAGHLAAVRWARGLDDERVWAIEDCRGVSRRLEQALIAAGERVVRVAPHRMGASRRGEREPGKSDQIDSLAVARAVVKDGVECFPAAFLDERAMEIRLRFDHRNDLVAERTRTINRLRWHLVVLCPELEASLKKRSLDQTRVLDRVDRRLRRMPQDARVRVAREQVHQIRMLTRQVNALGDELVELVKAHRPQLLAETGCGALTAAILIGRTAGAERFATDASFALQSGTAPIKCSSGQRDRHRLNRGGDRQLNHALHIIAITRAQRDPATKEYLARKEAEGKTKKGALRCLKRHLARRFHHLLALPVEPFLAEPEKPNDSSLPEIPAHPRRRENVDTTITGVSPMVCVS

SEQ ID NO: 417561 - protein, 351 aa, unidentified
MSRSSFSAVIATLGIDLGKNSFHLVGQDERGAIVLRLKLSRTQLTQRLANIPPCLIGMEACAGAHHIGRQLQALGHDVRLIPAQYVKPFLKGHKNDYRDAEAIAEAVQRPTMSFVAIKTPEQMDLLALHRVRSRLVSQRTGVTNQIRGFLLERGITVRQGLAPLRQALPGILGSSADALSPRLVRLIADLAGDWRQLDERIAAVSAEIEALAAQDDHCQRLMSVPGVGPIISSAVVAAIGTGAGFKQGRDFGAWLGLVPKQESTGDRTILGKISKRGNKYLRTLFVQAAHIVLVRRPHGARLGLWPWIEAAGRRLHRNMLVIALANKLARIAWAVLARGHAYQPRSASHAM

SEQ ID NO: 417562 - protein, 430 aa, unidentified
MKSTQNKKIEQVKETSMIVGIDVGSEKHYFRAFNWRGIELTRKPVPFSNSMAGFDMFHSAVVELMESNHLEEALVGFEPTGHYWFNLGQFLSGKNIKFVMVNPHHVHKTKELDDNSPSKNDRKDPRIIANLVKDGRYFYTYMPSGMYAELRNASNRRFVLMEEHTRAKNRLHKWIAVYFPEYKGVYTHIDAKGGLMVLKKAATPDEIIKLGVEGIQQIWKDAKLRGSGRKKAMQIVTAATNSIGLKEGLEEAKMELLDLIEDYELQTKRIERVNDLIKNLCSQINHVDKLLEIKGIGITTVAGFIAEVGDITRFDNVKELQKLAGLELVSADSGKHNGRTKISKRGRKRLRYLLVQAAVSVIGKNDEFKEIHQYYTTRDNNPLKKMQSLIAVACKLIRVFHVILTKGVDYDASKMLGDIRHPGAADRKAA

SEQ ID NO: 417563 - protein, 421 aa, unidentified
MDDIGDELELVQRVCAIDIGKTALVACVRVPHETLPGRRAQEVREQATTTGSLLGLADWLRCQQVELVAMEATSDYWKPVYYLLEAQGLRCWLLNAKHVKNVPGRPKTDKLDAVWLAKVVERGMCRPSLVHPRPIRQVRDLTRYRRSLVRERSREKQRLEKTLEDAQIKLDTVVASLHSVSGRAMLEAMIAGERDPHVLAGMARGVMRRKIPQLEEALRGHFDDHHGFICATMLRRIDALAADIATLDAKITELVDPHLEAIQRLDEIPGAGARSAQELIAEIGLDMAAFATAAHLVSWAKFAPIDAQSAGRRKTSSTGKGNPWLAATLGEIVAALSRTDTFLGDRYRRLARRRGKKRAIVAVGNSVLTIVWHLLSDPTAHFHDLGSDYYESRINTQRRQRDLVRQLEHLTGQRVTLQPAA

SEQ ID NO: 417564 - protein, 319 aa, unidentified
MNTTTAAHIDHRERNVGIDIGKSMLDICIFEPDVYLQYPNTPEGIRELLKKLSRYNLTRILVEATGGYERGLVEACAEKELPIIIVQPTQVRQFAKAQGIIAKTDKMDSRLIAQFSAVMKPEVRPLNSKKVRYIRDLLSRKRQLNEMRTQELNRQHKASVILAATHKRLIKVLDKEIEGINKLLVKAVNEVTEWQRTYKILNSVPGVGDGVTFTLLGELPELGQLSPRKIAALCGLAPFNRDSGIMKGRRRIKGGRAPIRTVLYMAMLSAIQCNPIMKKFYKKLVEQGKHKKVALTACMRKMMTILNAMVRDNCEWQAN

SEQ ID NO: 417565 - protein, 391 aa, unidentified
MHNVLAIDVAKGKSMVTLVSSSGEVLIDPYEVSHTYNDFNLLLKRIKRFDNISVIMESTGIYHRPIERFLLENNFKLFVINPIYGKMKKRNLRKTKTDKQDCFNLVNLFLSNTFKEYFKPEQLYLDLNALSRQYFALDELCVNIKNRYRNLIYLCFPEYEDIFKGNTIYSSISLEFIEKYPHANIIASTRIDALQNFFKKHNYKSWKSKPIKIKEYASNSYPSINMNDELVSNLSQIARLVNEYQKAIDIIKYKLVFLAKKSKYFESINSIYGIGEFTTAIIIAELGDINRFNNIKELTAYCGLDPSIKQSGKSVNFNGPISKSGNKYMRKILYIACSNIITIIGKTKQENDIESYYRKKRNEGKHHYASIVACTTKLLRKILALCKQLDK

SEQ ID NO: 417566 - protein, 318 aa, unidentified
MAVTGGTRRIVGGVDTHKDLHVAAVVDEQDRVIGTRSFATTRQGYRQMLAWMRSFGELQRIGIESTGSYGAGLLRFMQQAKVAVLEVTTPDKQDRRRRGKNDDLDAQNAAHAAFAGQRTVTPRSRDGMIESLRILMACRKTAVSARRVALQMIHNTIVCAPDGLRDQLRSLTRMQLVRTLASWRPDLTAYRDLDSAYRIGLKSLARRYLELHDEIADLDVMIAAIVDELAANLVARNSIGHIGAAQLLLTAGDNPERLRSEASFASLCGVSPVPASSGKTVRHRSTAAEIAPPIARYTSSPSDAYAPTREPRITLPVE

SEQ ID NO: 417567 - protein, 439 aa, unidentified
MTTPSLPVLDPTAAAIDVGSEQLHVSIGGGPPKVFGTTTGQLYEMRDYLLAQGVRSVAMEATGIYWLCPYEVLEKAGLQVVVVNGKYVKNLPGRKTDMKDCQWQATLHAHGLLKPGFVPPEHIRRLQDYIRLRTDHITLAGSHEQHMQKALDRMNLKIHDVISDLTGMSGLKMIEAILAGERNPVALLALCDAQIQKNKAGRLRAALEGTWKEEHLFALRQAYELWQFYQKKIAECDQAIEKVLVVLAGPEDPKNPAPPPTKRGGVNAPQITGLHGMLWRLCGNKELTSLPGVADYVLLQLLAEVGTELGKNWQTEKHFTAWLGLAPGSRQSGKRRGNQKRGRNRAGRLFCVIARSVGRSVDKALGGFYRRLKGRRGGLVANLALARKLAEMFWRLMVHGIAYVEQGLKKYEEKVARTEQGLLQKLARKYNLVLQPKAA

SEQ ID NO: 417568 - protein, 289 aa, unidentified
MESMYYIGLDVHKKSISYCVKDASGRIHAQDKIAATRYDLDVWMKTLPGPWMAAMEATMFTGWIYDHLKPHAVALKVAHPLMLRAIAVAKKKNDRIDADKICDALRCDFLPESYMVSTEIRERRRTLRYRNLLVQQAVQLKNRISCVLMQAGVTYNQEKLHNTGYFKELLTTNPDIDESLRRLLHQCREALVRLRKTEGALVRSLERDPFLAERVERLMSIPAVGPITALTWALEVGDVKRFSSIKKAISYCGLCGDEILQEQSAKQPGEHLYRQEKVGAAGDPASTIR

SEQ ID NO: 417569 - protein, 356 aa, unidentified
MISRKLSRKNEKDNSSLTQAEFYDHYIAIDWSIINMAIARLSKKMTEPIIIDVPSNVKELKLYLKKLQGSKILTIEETTTSQWLYVELYDYVEKIFICDPYRNRLLSDGPKNDKIDAGKLCKLLKNGMMKEVYHSSDELYELRKLVSYYNDEVKAGVRLLNQKSALYRSENKSYKKNEQLTDSGINKFIVTQLDEKISLYVDNKEKYEEEFEKISKKNKVIRSLESIPGLGLISSVTICSIVIDAKRFKSNNHYLIYCGLVKHDKLSGGRSYGRRMPRYCRKLKGIYKSASSSILRTENPIKEYYNYLINEKKLEEHNARNAVARYIAKISLGIMRTSKIYQPYKWRQNPKEKGAA

SEQ ID NO: 417570 - protein, 363 aa, unidentified
MRHYIGLDISMKETAVCIVDEDGKFVKEGTVPTDPNAIAEFLKRTDLTIEKVALESGSLSHWLIKELQQRKIPAICVDARHIAAVLSTTINKTDKNDARGIANALRCNMYREVYAKSTHSIEQNTLLKARSTLVDQRTHFTNTIRGLLKAFGIRLSCSASTNLFFTYVRKQIADLSESVRFSIEELLAIAEKLHARIKEFNKRIRGLIAEDEQARRLQTVPGIGPITAMCFKTEIDNPERFQRSRSVGAYLGMTPTQYSSGETQRQGRISKCGSKELRHLLMEAGFVVLTRSTRWSRLKAWGMKLMRKHGIKKAALAVGRKLAVIMHRMLITGEEFIYGEPKTGSENMLPVIKKAPRVIVAKA

SEQ ID NO: 417571 - protein, 345 aa, unidentified
MVMLGIDAHKATHTAVAVDDVGRKIGQRMVAATDAGHRQLLEWALRQWPGDGLRFAVEDCRQVSTRVERTLLLAGQTVVRVPPKLTAGSRSSARTRGKSVPIDALAIARAALREPDLPTATLHGQFREIRLLVDHREDLVAARTQMQNRLRWHLHALEPGQEPGPRALDRYCELDRLTAWLADREQTVLVRLASELVADIRAYTVRINQLKQELAQLVTPLAPRLLALPGCGVLIAAKILGEVGQVGRFRSESCFAMHAGVAPIPASSGKTTRYRLARGGNRQLNAALHRIAISQIRLGSPYYQRRRAGGDTTMEAIRALKRRLARVVYRLLHTVETTDSMAGAA

SEQ ID NO: 417572 - protein, 442 aa, unidentified
MAMRKREDSSEVFPNAAGIDIGGSSHWVAVPKGAAEEPVREFGTMTDDLHEMADWLLACGVDTVALESTGVFWIPVYEVLEQRGLTVWLVDARQMKYVPGRKSDVMDCQWLQKLMSLGLLRAAWRPGDEVCVVRAVARQREVLLTEQAGWVQRMQKALVQMNLQLTEVLTDVMGVTGQAIVRAIVAGERNPKVLASHRHGRVRASAAEIERALTGNWRDEHVFVLGQALAMFDSLGERILECDAKIEALLKPLGVHEVELSGPGKRGGKNTPHFDARTALARWAGVDLTRINGLSITTVMTILSEIGPDLSRFANVKHFCSWLGLCPATKISGGKVLSARTRRSTNRVRQALKLAAMSLSRNDSALGAFYRRLCARMDKPRANTAVAHKLARMVYFMLTRGEAFVDEGQQCYEEQQRQRNIAALRRRASALGFEITPAGQVP

SEQ ID NO: 417573 - protein, 318 aa, unidentified
MSEAVFIGIDVSKDTLEVASSAQAASWQMSNDTAGIEALGTQLQAMAPSLVVLEATGGYEFEAACALQALGLAVAVVNPRQARDFARAMGALAKTDSLDARMLAGFARVLHQHPERERFVKPLADAQLQRLQALVLRRRQLVGMLTSERQRLRLSHASARPSIERTIEFLKSQIQDMEIEAGEHVRAHHGALAAALTSIKGVGAATVATLLAELPELGKLCRRRIAALVGVAPLNRDSGQMRGQRSIWGGRADVRRTLYMATLVAVRHSPVFKAFYQRLVAAGKPKKVALVAAMRKLLTTLNAIAKSGRHWDEAIHLA

SEQ ID NO: 417574 - protein, 444 aa, unidentified
MTRRCFGLDVHREFAQVAIWQDGLVRQAGQIAMTPEALRVFADSLAPSDEVALEATGNTHAIVRALQGRVARVVVANPQKTRAIAEAKVKTDKVDAEILAQLLAADYLPAVWVADEDTQARRRQVARRAHIVRQRTRLKNQVQSILHRNLIPRCPAADLFGIKGRRWLAEQELPADERQAVRALLRQLDFHGQELGLIDSELARVALRCADTKRLMTIPGVDVAVAMSITAAVGDFSRFSSPNKLVRYLGLNPRVKQSGDQPAAHGRIAKQGRAHARGMLVEAAWVAVKTPGPLRAFYERVRSRRGMQIAVVATARKLAVLCWHMITRGEDYAFARPSLTAKKLRALELKAGMPARRGQKGTASGYSLKDVRTREKALAEQAERAYTQMVADWQAKAPANRNVGVAAANGARLSRPSDGATAARQDSAPEPALRSGVDHARTRG

SEQ ID NO: 417575 - protein, 454 aa, unidentified
MAVRNRSISKSGLSLTHPNAAGIDIGSASHFVAVPPDRDDDPVREFASFTADLHALADWLQRCGVDTVAMESTGVYWIPLYELLDSRGITVLLVNARHVKNVSGRKSDVLDCQWLQQLLSFGLLRGAFRPADKVCELRSITRQRAGLLRLQSRHVQHMQKALTQMNIQLANVISDVVGVTGQKIVRAIVEGERDGQALAAYRDVRIKASEEEIAKSLQGNWRSEHLFALKQALAGFDFCGTQLAECDAEIEQRLQALQTHEGSPAKGKKRSRARNAPKFDVREHLFKVCGVDLTRIDGIDVTTAMTVLSEIGPDMSRFPTVKHFTSWLGLCPGTKISGGKVLGAKSKRTGNRATQALKLAAAALRSSKSALGAFYRRMSARMDKPKAVTAAAHKLARLVYIMLTRGEDYTDQGQQYFEERYRQRVVRQLTKKARELGLDIVPAAPATHSSERSR

SEQ ID NO: 417576 - protein, 434 aa, unidentified
MEPQFAALIAIDWADQKHVWAMEIPGQTKPQMGSLSHTPEAVDAWAAELARRFGGQSIAVALEQSRGPLVFMLTKYPHLIIYPVHCSTLANYRKSFRPSGAKDDPIDAQLILDILARHGDKLRPLRTDTVETRTIQFLVEERRKLVDQKTACTNRLTAHLKMYFPQALGWFGELGSPIAVAFLERWPTLSDVQKSRPARIRKFYTSHNSRTGGDFLDKRIDEIQTAISATHDEAVIAGYSVAVLAWTGLLKQFLLAIKDYDQRIDLLASKHPDYALMKSFPGVGPVSAPRLIAALGSQRDRYESAYQIQCYSGIAPVVSSSGKKHHVHCRWACPAFLRQTFHEWAQHSMAGSQWAREYYEHQRKAGKGHNTAVRALAFKWIRILFRCWKNNVAYSEPVYTKSAANKKAQNLVGRAVEIKWEKKIGMSKFMGPST

SEQ ID NO: 417577 - protein, 361 aa, unidentified
MSESMALVGLDVHQAQTVAALLDPATGELRVERLRGEPASVVPVFLEELDCPVAAVYEAGPTGFALARVAEQRGLDIRVVAPGSIPRAPGDRVKTDRRDAKRLVRLFAAGELSYAFVPSEANERFRDLVRCIEDARKDLMRSRHRLSKFLLRRGQRFPCRAWTQPHERWLVKLRFEDAPSQATFLDYLSAVQALVQRRRTLIGVLEQTVPESSHAQTVERLRCFRGIDTLTAAGLCAEIGDFTRFAKPALLSGFLGVVPSEYTSDDKRTQGQITKAGPPHARRLLVEAAHHYRHQARVGERLAARQSGQDPRVVQVAWRCQRRLHARWSHLAGTRGKKTGTVAIACARELAAFCWEAATLD

SEQ ID NO: 417578 - protein, 412 aa, unidentified
MEGETVIAGVDTHKDVHVLCLLDGLGRKIWSGSFGADPEGYDRLAEAIGDPGSCMVVGVEGTASYGAGLTRRLVELGYNVVEALRPKRDKARPGEGKSDPLDAERAARKAASGKGCSVPKSQDGWVEAVRRLYVARRLAVATSTSCVACAKSMLTTAPGALRERFRGRERPKDLMPLLARGRKAGDALEESVLASLRSVAAVWKEARSQVESLDERIRALLEANAPALLGVEGCGTTTAAALVVAAGDNPGRLKGEAAFSMMCGASPIPASSGKTDRHRLNRGGNRQANWALYEIAIKRMAYDERTRRYVARRTSEGKSRREAVRCLKRYIAREVYRALMDPNPDGAAPEGPELAKMRKAMRVTQKQAAAELGLSAATLGHLERGKRRSTKLERRYYELLCELKGALPQTAS

SEQ ID NO: 417579 - protein, 311 aa, unidentified
MASNVFVGIDVSKNKLDVWLKPDDNYFSVSTDSEGLNTLVERMRQCDPQIIVIEATGGYENPVMTALAEQELPLVLINPRQIRDFAKAMGKLAKTDRLDAETIAHFAQTIQPAPKKLPSKEQQELKEMLSRRHQLVSMLTMEENRLNVASTKIKRQISANIESLNKQLRDIDKDLDDFINNNSTLKQKADIVKSVPGVGPAVTKTLIAHLPELGTLNRKQISALVGVAPLNRDSGRFRGKRKIWGGRKKIRSQLYMAALVATRHNPVIRSFYQRLIESGKESKVALTACMRKLLVILNSMVTHGTKWDPGF

SEQ ID NO: 417580 - protein, 339 aa, unidentified
MKTNVIGMDIAKRVIQLHTVCPETGEIGRFRLHRRDTLAFLARRAPAIVALEACGSAHWWAREISRLGHEVRLLAPKSVRPFVLRNKTDAADARAIWTAAQQPAARFVAVKTELQQSILALHRLRAQLLKFRIMQSNALRGILYEFGTVLPEGMAALGKALPGDLAELESRLPAVLMASLREQWARIQGLDAETVVIERRLTGILKESPPCQAIARIPGIGLLTATAAGASIGDANTFRSGRELAAWLGLVPKQRGTGGWVRQLGLSKRGDVYLRTLLMHGARAVVLRRGDQPWLAALRARRPFNVVVAAVANKLARTLWAVLAKGEPFKAAQFGLVTP

SEQ ID NO: 417581 - protein, 342 aa, unidentified
MKITTIGIDLAKEMFQIHGIDTQGKVALRKQLRRSQMAEYFAKLTPCLIGMEACGSAHHWARKLQDYGHTVKLMAPQFVKPYVKTNKNDAADAEAICEAVARPNMRFVSIKNIEQQSILSIHRVRQGFVKARTAQANQLRGLLSEFGIVMPQGIHSVKKRIPEILEQPKHVLPAAIHPLLQRLYQHLKELDIQVDALEREIKQWHKSNESSLKLEAIPGIGPITASAIVASIGDAKTFKNGRQLAAWLGLVPKQHSSGGKQTLLGISKRGDTYLRTLLIHGARAVTRFAKQKAEPASWLCQLMARRNNNVASVALANKNARIIWALLAKDRVFRPDYTTLAY

SEQ ID NO: 417582 - protein, 370 aa, unidentified
MSKSLVYVGMDVHKDSITIAVARQGQEPAEIWKTIPNDWVRLRKALKMLLRSGETLRVCYEAGPTGFGLCRRLREAGIDCIVVAPSLVPGKPGDRVKTDRRDARKLAHFLRSGDLTEVHVPAAAVEAIRDLERARDDAKRAERVARHQLSKFLLRHDRRWAEGTWTRRHLDWVRAQRFDFPAQQRVLEDYLKTVEDLAERVGRLTAAMEELVQATALAPLVKALQAFRGISVVSAVTIAAETDDLRRFATASQFMSYVGLVPSEDSSGQRRRQGPITRCGNGHLRRILVEAAWHYRHIPMLSKELRRRNQGVAAGVRRIAWETQKRLHKRLYHLLHVNKSPQKAVVAIARELAGFIWSVGQEETLLEATP

SEQ ID NO: 417583 - protein, 394 aa, unidentified
MEDVLRSCCAGLDIHQKVIVACVIRSVEGKKCPEKFFSQFDTTTRGLLELSDWLTSYEVTHISMESTGVYWKCVWRILQNNFELQLANPRHIKNIPGKKTDMKDAEWIARLTRLGVVPTSFVPPEPIQELRDITRYRKHLTEDLNREKNRGHMVLQNAGIKLTSVIKDIYGKSGRALLYALVEGKEINEALILECVYTTLRRKVPQLIEALTGFMTVHYRKMLALHLKQIECLEKQLRVTEELIDEYLFPYEEYVEQLEEILGINCKTAAVVLAEIGIDMSVFPTESHLASWASVSPGNNQSAGKTRSRRVGKGNSYLKKVLSQGALAVSQGKKNRIQAFFFRIRRNAGHKKAVVATVHLVLRIIYHMFSKQSQYKELGEKYLQNQKVVVPAKY

SEQ ID NO: 417584 - protein, 392 aa, unidentified
MIISVGIDVSKDKHDCFILTSQGQVLADVFTIPNTRDGFNELLQRIRQCSSPLDNIKVGLEATGHYSYNLLGFLLDNGLSPYVLNPLRTNLYRKCLSLRKTKTDRVDARTIAAMLLSDAGLKLYTATAYHNEELKSLTRYRFDKVKERAKLKSSVSRLVCILFPELETLVPSLHLASVYALLEAFPGAAQIAKAHWTKLTSLLVTASKGRYKRDMALKIREAAKQSIGSYIPAKSLELQHTLRLIRELDTEIAEIEEHIQPMLEELHSPITTIPGIGFRMAAMILAEVGDFARFESPDKLLAYAGMSPSTYQSGQLRNCYPHMEKRGSRYLRYALYHAAKYVCHWNPVFAAYLAKKRAEGKHYNVALSHAAKKLVRLLFAMEQSRTPYRLPA

SEQ ID NO: 417585 - protein, 344 aa, unidentified
MYHYAGIDVSLEQSAVCVVDGTGRIAREAKVASEPAALIAWFGSLATPLERIGLEAGPLSQWLYAALREAGLAVELLETRHVRDAFKAMSVKTDRNDARAIAQLMRLGWFRPVHCKSIAAQEVRAVLTARKLLQTKLLDVENSLRGILRGFGLKVGKTTERSFAARIEELTKGHAALASIAKAMLAVHTVLMREFRALDKQVLQLAKAQPQARLLMTTPSVGPIVALTYANAIDDPARFKSSKAAGAHFGLTPKKYQSGQTDYTGRITKTGDASVREALYQAAHIMLTKPIKNCTELKSWAMRIAKRAGLRKAKVALARKLAVVLHRMLADAKPFNPNVKLATT

SEQ ID NO: 417586 - protein, 412 aa, unidentified
MQQIYDRVAGLDVHRDNVVACFRRLGSRGGVVFEKDRFATTTAGLGVLEAWLAERQVQLVAMEATGVYWKPVYYALESRFTVWLCNARNVKKVPGRKTDMTNAEWLADVAAHGMIRPSFVPPPPIRELRELTRYRKTQIDARAHEVQRLEKVLQDAGIKLTSVASKVLTQSGRAMIEALIAGERDGAKLAELAMGKMRPKMAALAEALTGRFGAHHAVACRRILAHLDFLNESIAALTEQIDARTAAFEPVYTSLLPVPGFDRLTIDVIVAETGADMTRFPTPGDLASWVGLCPGSYESAGKRRRVGTTGGNQWLRRALVESARAAARTKRSYFGAQYRQIARRRGPNKAAVAVAHSLIELVWHLLSTGEVYKDLGEDYFTSRQDPERRARRLIAQLEDLGFKVTLEAATAA

SEQ ID NO: 417587 - protein, 343 aa, unidentified
MAQYIGLDVSLKDTSISVRQDGKRVWRGKCASDPKLLAEVIRKRAPNAERVVFETGPLSVWFYHALTAEGLPAICIDARHAKAALDMAANKTDANDADGLAHLAEVGFYREVRVKGFDSMLMRTLITARRQLLKMRVQMSNQIRGLMKTFGLVLPKGAGSVFERNVLTHLDGEDDLARIILPLLQAWRDIRLRAAELTTQLVRMAGSDQRCRLLTSVPGVGTVTATAFAAAVEDSINFKNSRAVGAWVGLTPKRYQSGEVDFEGHISRRGDAKLRSLLYEAASVILNRLSDTSTLRTWALALKERVGFKRAAVALARKLAVIMHAMLKTGELFDPKAGVALPA

SEQ ID NO: 417588 - protein, 350 aa, unidentified
MIIIGCDYHPGFQQIAFVDTETGELQERRLQHREEAEKFYRDLAAQGMKVRVGMEASGHARWFERLLSELQFELWIGDAAEISSRRVRKQKTDRQDAQLILKLMLKDDFPQIWVPSWENRDLRQLLWHRHRMVQARTRMMNQLQAVALNEGLRCKKKLWREAGREKLESFQLAPWASQRRRDLLELLDQLNPTIAKLTQAIEEEVKRYPAAQRLRTHPGVGPLTALAFVLIIGKADRFQCGKQIASYLGLVPLEKSSGNQRRLGHITKQGNSLLRFLLVEAAQVTVRSLPEWRSKYCHLTMRRGRKIAKVAMARKLAVRLYWMLRKEWDYEQLTKFGSHAGQPGNRHGVK

SEQ ID NO: 417589 - protein, 310 aa, unidentified
MNDTIGIDVSKDTVDAHRLSDGKHSQFANDATGLRALCRWLGAQPVRIVYEATGRYHRDLEQKLGSAGHGLVKVNPRRARRFAQATGRDAKTDRVDAALLARMGSVLDLDATPAPTPSMNEIKELHVARVGLIKDRTACRNRIQAARNKVVLAQLRARQRQVDTQIAQIDAELRRLVMADPALARRLDILLSIPGIGPIAAIALIVDMPELGTMSGKEAASLAGLAPITRQSGMWKGKAKIGGGRAALRTKLYMPALVATRFNRQLGQTYKTLCEAGKPAKVAITAVMRKLLTIANALIRDDRKWAEINP

SEQ ID NO: 417590 - protein, 359 aa, unidentified
MVPIGVDVHKRRCKVVEFSDSKVKVRKPMENTREEWLELLAELPPDAEIALEVSTAGYFAMSVLEEAGWGERAHWVHTAGIDSPRKQKYDRLDAERLARKLAVHHLDPLPEAWFPPSEIRELRLRARQRCWLARLRTQAKNRLQSLLEMHGLQPPGSDPFGRRGRDWLDQQKLPAALSESVPQMLRLVEVLGKELETSEGYLEGVESQFPELSLLRTIPGIGPLLAPVIWSEIGCLKRFTSASALVNHTGLVPSLYESAEVSVQGHITRQGPRWLRWALITAANVAIQHRNPLARRYYRLRRNKKKPNVAKTAIACSLARCIYGVLKHRSPFREERWGRKVGALEQEACGSAGSTKTVL

SEQ ID NO: 417591 - protein, 409 aa, unidentified
MQVVHPRCAALDLGKDVLVAAVRLHDATGINRECRTYGTTGHQLVVLSSWLESEGVTHVVMEATGSYWKAVWHVLESRFELTLANPAHIKNLPGHKSDVNDATWMADLHAHGLIRGSFVPPPEIGALRELTRTRKQFVREINRHTQRVQKTLDIAGIKLTGAISQVLGVSGRAILTALVAGETDPKTLATLGHPRLKASRDRLEEALEGRLTTQQRRLLGMHLNLIQTLETSIAELDAEIAKAVTPFQGIVERLHEVPELSEINVPALLGEIGIDMSRFATHSHLLSWARVCPRLDESAGKVRSTRTMKGAVWIKELMIQAAWAAIRTKDSYLRAQFLRLRARRGGKKAIVAVAASILTIVYYIIRDGTPYRDLGINHFATRDRARAARSLVARLKQLGYNVSVTEAVA

SEQ ID NO: 417592 - protein, 455 aa, unidentified
MADTSAGIDGVEEEIEQAAEMVERVAAIDIAKASGMVCVRLPHEDKPGKRVQRVFNTLATSGAILDLGDHLICQGVTRVVMEATSTYWKPFFFLLEARGLECWLVNARDVKNVPGRPKTDKLDAVWLAKLTERGMLRPSFVPPKPVRELRDLTRSRAVLTHERTRHKQRGEKLLEDAQIKLSTVISDIYGVSGRAMLEALIAGERSPKALAELAHGTIKASPSTLAEALTGQFEEHHAFMLRILLDTIDYLSVQIDKLTARITGKFAELSDLSADTEDHHSDDEPGQGLLMPLSDTERLDEIPGVGPATAQVILAEIGLDMSVFPTAGHLVSWAKLSPRTIQSGGKNTSGPTGKGNPWLRGALGEAAISAARTDTFLGARYRRIVKRRGHLKALVAVARSILVSVWHLLNNPHTRYRELGADFHTRNLDPQRKTRDLVRQLKALGHDVALTLAAA

SEQ ID NO: 417593 - protein, 376 aa, unidentified
MSNVRFLGLDVHAETIAVAVAEPDGEVRSVGVIPNRPESIQKLVKKLGAPESLRACYEAGPTGYVVYWHLTALGVRCEVVAPTLVPVKPGDRVKTDRRDAVKLARSYRAGDLTPVWVPDAAHEALRDLVRAREAAKQDQLRARHRLGKFLLRQGRRPPTTMKAWTQMHLAWVQTVHFAHAAQEATLLDYLHEVAHAAERIARLERAIDDAVQTAPPPQRAVIAALQALRGVALISAVTIVAEVGDLARFATPRQLMGYSGLVARENSSGERIRRGGITKTGNAHLRRIVGEAAWAYRHRPCVGAALRKRQAAVSPAVNAIAWKAQHRLHARYRHFTLKGKCPPKVVTAIARELLGFIWAIGVEVDAQHGREPSAAA

SEQ ID NO: 417594 - protein, 415 aa, unidentified
MPHGVAFIDVHKKMLAVVAGDAGKDEPVQLVRRKFGADAGELKALAEFLSALRVEEVCMESTAQYWKPVWAELEERGFHLELAQAQSNRGPKGRKSDFRDAERGWRRYVADELILSYVPDPEQRIWRTQSRMGVRLKRDRARLQNQLEALLEEMRIKLSSVVTDLLGVSARRILQSIATGERDVKILAGLAEPRLQAKPAELETALAGVTRLDPRYRLVLNQIMERLDLLDQQIAELQKQLAGSLQPYEDQVKRLAEVPGLGVDSAQQIIAELGPEAKKFESTAQVASWVGVCPGENESAGDNSNDTSAKGNRFMRRILTEAANAAVKAEGSVFQKRYRRMIGRDPKRHHEAIWAVAHAILRVTWKILHDGVRYEERGDRHNPKADKARASRLLRQLKGLGYTVFLQKQTEPLTT

SEQ ID NO: 417595 - protein, 241 aa, unidentified
MDAIYVGIDVSKDRLDVHVRPAGETFAVARDGKGLNELLERLRSIAPRLIAIEATGGYETIAAAAIAGAHLPLAVVNPAQVRHFAQAVGKRAKTDPIDAGVIARFAEAVKPEPRELPDEAARLLAELVARRVQLIEMIVAERQREKRADAVRVRKSIARHIASLEKELPIIDGDIDTMVRGSPVWREKEDLMVTFPGVGRGIARTMLADVPELGRLTRREIASLVGYAPFTRQSGSGREKA

SEQ ID NO: 417596 - protein, 354 aa, unidentified
MDDASIQSEVILGVDTHLDTHVGVIINHLGKVTGTLTSIPTNKAGYLRLLTWARSLGNVRRAGVEGTGTYGAGLARMLREQGIEVWEINRPDRAKRRLQGKSDPTDAENAARTVLSGNATATPKLQSGVAEALRTLSVARRSAVKARTQAINQLRSLLISAPDDLRERLWKTKPEQCVTSCARLRDVGGSVLLKTLTATLRLLAKRWLMLSAQLKELDAALDRLTGQSAKRLRNQFGVGPQTAATLIAVAGDNPERLRNEATLAALCGASPLQASSGKTTRHRLNRGGNRSANNALWTIAMVRMRSEPRTQAYVTRRIAQGMSNKEIQRCLKRYIARELYPLILADLSDATTIT

SEQ ID NO: 417597 - protein, 456 aa, unidentified
MPKKRTVGDRPELRPVNVGAAAIDVGSKMHMAAVNPACTDVPVRSFGTFTRDLHELADWFKTCGVTSVAMESTGVYWIPVYEILEQRGFEVILVNARYAKNVPGRKTDVSDAAWLRQLHSYGLLRGSFRPDAEIATLRAYLRQRERLVEYAAAHIQHMQKALMEMNLQLHHVVTDITGATGMRIIRAIVAGERNPDVLATYRDVRCHSSIATIRAALVGNDRHEHVFALTQSLELYDVYQAKMLDCDRKLEVLIAALNNKGAKPTGKLSKPRIKTKQVNAPTFDVRTALYGVLGVDLTEIHGLGPSLALKLVGECGTDLRAWPSAKHFTSWLCLAPGNKISGGKVLSSRTRRSSSRAAALLRLAATTVGRSDTALGAFYRRLSSRAGKSKAVTATARKIAVLFYNTLRHGMHYRDPGADHYEQKYRGRVLANLQRRAKSLGFVLQAISGDPDPAVS

SEQ ID NO: 417598 - protein, 343 aa, unidentified
MQAITTIGFDIAKSVFQVHGVDAAGQVIVRRQLKRRQVIAFFQKLPPCLVGIEACASSHYWSRELHALGHRVRLMPPAYVKPYVKRQKNDMADAEAICEAVTRANMRFVPTKTPEQQSGLVLHRTRHLFIRQQTSVINAIRAHLAEFGVIAPVGRKGVEELLCVVADPNDKRVPEVVRACVAALGSQLLSLKKQILDFDRMIMAWHRSNQTSKRLNCIPGVGPLLATALVASVADPKTFRSGRNFSAWIGLVPKQHSSGGRDRLGSISKQGDRYLRSLFVAGALAVIRYAKIHGSKHRPWLTALLARRPTKLAAIALANKLARMAWAMMATGARYNYPASLRV

SEQ ID NO: 417599 - protein, 389 aa, unidentified
MIFVGIDVAKDKHDCFIINSDGEVLFNVFTISNNIDGFNDLYQNIKSVSADLSNIKVGLEATGHYSYNILGYLLNKGLPTYVINPLHTNLYRKSLSLRKTKTDKVDARTIAMMLMSDVDLKSYSDTLYHNEELKSLTRYRFDKVSQRAKLKQSVSRLVTILFPELEKLVPTLHIISVYKLLLEYPSASHISSAHLTRLSNLLIEASKGRYNKDTAILIREAAKNSIGSVMPAKSLELKHTIKLILEISSEIDEIETEIKAIMDEINSPIMSIPGISYRMGAMIIAEIGDFSRFDSPDKILAYAGLSPSTYQSGYFESSHSKMEKRGSRYLRYALFNATKFVCNWDSTFGEYLAKKRAEGKHYNVAISHAAKKLVRVIYHLEKTGQLYTK

SEQ ID NO: 417600 - protein, 443 aa, unidentified
MPVVADRSAAPAAIRTDLGAIFVSLELSKSTWLITSLSPGSGEKMSKHAVRGGDITGLLARFARLQDKAQARTGRHFALVVIQEAGLDGFWIHRILEAEGIESHVVDAASIATSRRRRRAKTDKIDGEALVRALLGYKRGEPRVCAMVKVPSVREEDHRRIGRERKALVGERTCHVNRIKGLLFAQGITGYEPLGRDRRHRLEELRTGDGRALPEHLKGQIRRELDRLELVIAQIKEVQAERDALLAIEVAETPAATLLDLKGIDPDCAAILYSEGLFRHFDNRRQVAACAGLAPTPWQSGLVQREQGVSKAGNPRLRTTMIELAWLWLRNQPRSALTRTRDAQPRAPQKDNHRRPCKEAARGAVEIRDRGRRHRRCCHEGRLTRSHRYTHPSRPDQPRRIQEANRDPSWLECRIKDGSRLLGPCRRKRDIGAAVSSGDRMWV

SEQ ID NO: 417601 - protein, 444 aa, unidentified
MKTTSASPRGAVPIVAAWIGLDWADQQHVGCLYDVASGQQEAFSLESSAEAIPLWLAQLRQRYGGRRVAIVLEQRRGALIHALLGCEFVILYPINPQSLAKYRQAYFSSGAKSDAADAPLLMDLVRHRPDRFHPWQPDDPETRSLQLLTQARRRWVDQQTALTNQLTQLLKGYYPQALELAGDLSSPGACQFLKRWPTLAALQQARPSQIRKHYQRYGRPTAAELDGRLERIRQAQPLTQDPAVLLHGSLMLRALVDQLLPLFDTLREFERQIAALFAQHPDRPLFEHLPGAGKVLAPRLLAAFGTQRERWQQAAEVLTYWGVAPVTEQSGRSRWVHWRLACPKFLRQSWHEFAAHSRKHCGWAQAFYQQLRAHGKGHHAALRALAYKWIRILFRCWQTRTPYDEQVYLKSLEQKNSPLLAAIQALSSSSAPSKAVRGSLVKNL

SEQ ID NO: 417602 - protein, 456 aa, unidentified
MRKPQVIPDEDHVVVYERVAAVDVAKASGVVCMRTPDPARPGRYQNRVWHDVTATRARITELGQELLENNVQMVTLESTSDYWRIWFYVLEGMGLAVQLVSASQAKNLKGRPKTDKLDAIWLARLTHWGMLRPSFVPPAAIRALRDFTRARLDLVRERTRCMQRLEKLLEDAMVKITSVASDGMKAKSVVAMVQALIDGERDPARIADLAKGPLRAKRAQLAEALDGMFDSHHGVIAQALMDQVKFLDQRITQMENGATEALARIPQSWGVDATGETGPQAGKTPDSPVLAAAWRLAEVPGITLMLATAIIAEIGLDMTRFPTADHLVSWTGLCRTASQSGTRQGKGKQKKGNSYARCLAGQAAIGASGTSSFLGERYARVARRRGGAIAQVAVARSIMIIVWHLLADPQARYHDLGADWHQRRTGKDKKIRNHIRQLEALGLTVTITADPEEKAA

SEQ ID NO: 417603 - protein, 414 aa, unidentified
MSVLINKACGLDLHKRFLIATILSRSDEMAQKRFERNDQGILDLKSWIIEKQCDVVACESTSDFWVPIYDTLISHVTVIVGNARDMKAYSHKKTDKIDSEFIAQLALNNMVKPSRVFPKHHREFRSYVRLRHNLVRKRTDIKNQAHAILSSEMFHLSDVLTDIFGKNGKMVLSGICSGKKFDEIVDKLSPNVRKKSEQIKEILEREMSQSAAVRLRTCLNLIQDIDEQISIMETQMFNYVYKHHKHDMDILMSCPGIGELSAATLIAEIGDFNDFSSGDKLASWLGIVPNVYQSADKYHNGRITKRGSKVARWILTQIAQAASRKKASKLKEFFNRKKKTIGYQKAIIALARKIVTIIWHLITNNEMYEDETGYQKGEIQKRKIVETAEISIDERISILSEIFAIVNKKNTDVT

SEQ ID NO: 417604 - protein, 393 aa, unidentified
MESQRVVIGMDPHKRSVTIEVMAGDETVLGGGRFTTDPAGFEELGQYVRAWPDRVWAIEGCNGIGRHVALRLLDQGQDVVDVPPKLSARARVFATGQGRKTDATDAHSIALVGTRMAGLRPVVDDEQLAVLRTLVDRRRSLGEEHTRMVSQLHHLLLELVPGGAKTFLSAAQAKAILAGIRPRDAAGKVRRRVAAELVSDLERIYKRKKAADKELRELVRATGTSLLDLNGIGPSGAARLLVEVGDITRFPNRAHFGSWTGTAPIDASSGDHVRHRLSRAGNRQINRVLHIMATVQLRNPGIGRDYYDRKKADGKTSMEAMRCLKRRLSDLVYRTMLDDTAAHATGSRTGPGGHRGASLTSSAAGSHPHTDTSDQPLPGPVADEPRTVLPTAS

SEQ ID NO: 417605 - protein, 432 aa, unidentified
MKNDNRKYLSVGIDVGADFSLMAIALPSQELLGKSYRIFHNSKRSLDGAIDRIYSVMEQYDLPARIFMESTGIYHFPVYHKMREAGLDAYVLNPLVTHASKDINVRNIHNDKFDAQKIALLGLRPDLKTSIVPSDDVAAMKAILREYYAMKKETSMYICRLKDQLRQVFPQFIPVFSKVNGVAAMAVLYEYLTPDSILAAGADELERFMKTVISKGPLHIRKKAEALVEAARDAQNFGHGNTGVFYLIRHYIEMIRLLDAQTKQILTQVKVLLKEQKNSQMAKQVRLLQSIPGIGFLSAVTLVCEIGDFSAFKRPKQLFAYFGLDPAVRQSGNFSGADLKMSKRGSPYARRCIYVLAIQSVSLRVDGTAKNPVLRSFYEEKCKSKSKMTALGAVMHKVCNIIFAVLRDERPFVLITPEEHRTAYFSASVKAA

SEQ ID NO: 417606 - protein, 373 aa, unidentified
MEKAITVVGMDTSKASIQPALLKPADETPLVWEIPNDASAVRRMVRKVQREAPGEVMFVYEAGPCGYALQRQIESLGSRCVVVAPSLVPVKPGERIKTNRRDAKKLALLYRADLLTEVRPPSEAEESVRDLVRAREDALEDYLRCRHRLSSFLLRRGYVYTMGNRWTRGHRRWLKELPFENEADLAVFNDYLLAVEQLEARIGALEQSIDAYAEKDPYRERVGYLRCFRGIETLTAMTILVELHGIERFETARQLMSYLGLIPSEYSTGDKNWRGSITKTGNAHVRRVLCEGIPSYKHRPSAGGVLVKRRKGQPAWVIAIADKAQLRLHRRYWRLQEKGKPYGKVIVALARELVGFLWAVLVKGPAQQAPQVA

SEQ ID NO: 417607 - protein, 387 aa, unidentified
MIYVGIDIAKETHVAAAVDSDGVIVIEPFSFSNNHEGFKLLKSKLDSLDKSNLLIGLESTAHYAENVIFFLHGCGYELAVINSVQTAAMRKTGIRKTKTDKVDSLLICKTLMVNSFRRYTENDIKTLKLKSLCRFRQNLKKSKARLKIQLTSYVDVIFPELQYFFKSGLHIKSCYELLKVYSSPDDIAALHLTKLSNILTKASRGRFGKQDAESLKSLAKSSVGVKNTYISIQITQTIAQIELIESQLNELETVIETAMDELDSVIMTVPGIGKLNGAMILGEIGDIKRFSDSSKLLAYAALDPVINQSGKFNAKRTRMSKRGSKILRYALINAAWNVSLNNDTFKRYYDSKVAQGNSHYSALGHTAHKLVRVIFKLLNDNITFALV

SEQ ID NO: 417608 - protein, 428 aa, unidentified
MNEVDISRVERFRQFKNEIRGSDRFLIVGLDIGKSLHHGFLGSATGKTVKRGVRVENSARGFEHLLTSVQFYMDRDGFKEVVFGLEPTSVYHKPLAEFLITQGHLVVYVTNEAIKKNRALLDGRWDKNDTKDAANAADLVAQGKCQFYDLPDIGLRDLRALLSVRQRLKKQLHSTRVRIRNNLVAQYFPELDKCWKQAQAENLAIVRWCLSPHKISELSFEDFFKMVTTGNKGLRQYKRLSKIWEMAPYSIGCQPGIAMQLEARILVENIKSIEAQIALVDETIEDISLGFQEYQYLLSIPGFGPYVSAVVLAAIGTAQRFDNTHQVLKFAGFDLSANRSGKKSQSAVPVISKKGNAAVRYAVYQAALIASSLNAQFKGYYHQLLKGREREKGIRTKMRVKLAAKLLVIAWTLMKKMQAFDPSYLKAQ

SEQ ID NO: 417609 - protein, 380 aa, unidentified
MKKNTTTKKSSKQGKGQKPEIHRLAAKQKLTIGIDLGDQSSRYCILDEGGEVVSEDQVPTTKAGMDFLFAKMAASRIALEVGTHSPWVSRHLAEMGHEVIVANAHKVKLITQSVRKNDRIDARQLARLARVDPKLLSPIRHRGEEAQMDLAVIRARADLIEARTKLINSARGLVKPMGERLKACDADQVARGLGERLSEGAQAVIGPLLKAVEGLSEQIGKYDEQIEEMGKRYPETKLLQQVHGVGPLIAMTFVLTLEDAGRFAHSRDVGPYLGLTPKQRDSGDSHPELGITKAGDGLMRSLLVQGAHCILRKGGAASDLRTWGLEKMGEGGKRAKKRAIVAVARKLAVLLHHLWATGEVYDPQYNQKAAEAKAKGKVAA

SEQ ID NO: 417610 - protein, 339 aa, unidentified
MRLYAAIDLHSNNSVLVILNQSDKVVYEKRHPNDLPTILAQLKPHKKSIQAIAVESTYNWYWLVDGLLEAGYEVKLVNTVAVKTYDGLKYTSDEHDARHLAHLLRLGILPTAYIYPKEERAVRDLLRKRAQLVRDRVTHILSIQNLVTRNSGKQITQAGIRRLDENTLGLFCGGNAFRVMAIKSSLEILRCLDGQIAVLERKALEQAKVKPEFKQVTTIDGIGEILGMTIMYEAGDMERFEEVGQFASYARCVGSSRWSNGKKKGENNRKNGNKYLAWAFVEAAHHAVQYNERVKKFYQRKKARTNSVVAWKAVAHKLARACYHVVKDRIAFDEARAFA

SEQ ID NO: 417611 - protein, 342 aa, unidentified
MKLTTIGLDLAKAVFQVHGADERGRTVLKKQLKRAQVAAFFANLTPCKIGMEACGSAHYWARKFMAMGHEAMLIPPQYVKPFVKRNKNDAADAEAICEAVTRPNMPSVPVKSVAQQAILSLHRARQGFVKARTAQANQIRGLLAEYGFAIPQGIGHIAKRVPEIIEDGENDLPGSFRLLIQRLVDHLKELDRQAGELEQEIQLWHKNSPLSQKLAKVPGIGPITATAMIASVGDARQFKNGRQLAAWLGIVPKQHSTGGKARLLGISKRGDRYLRTLLIHGARAVVRIAERKAEIESWIKRLLERRHKNVAAVALANKNARIIWALLAHDRDYEPDYVKAAT

SEQ ID NO: 417612 - protein, 361 aa, unidentified
MDDGSKGTSRMTVGVDLGDHYSYLCFVDSESGGEVLEESRVRTTPEAFQRRFGAERHLHIAIEVGTHSPWVSRLLEGCGHEVLVANARKVRLIYGDKRKNDKRKNDKLDAENLARLARLDPKLLYPLKKHRDENSQAHLALIRSREALVGSPTQLINHVRGAVKSFGARLPKCSARSFHKKKVAEHLPKELTPALGALLETIGELTERIREYERKLEEIAKEHYPETGILRQVGGVGALSALSFVLILEDPSRLKKSRAVGAYLGLVPGEDRSGESDPQRRISKEGDEMLRRLMLSSAHYILGPFAHDSDLRRHGLKIAERGGKNANKRAVVAVARKLSVLLHHSLWVTGELYESSTTPGV

SEQ ID NO: 417613 - protein, 346 aa, unidentified
MLYVGLDLSRRRLDFDVLLPDGGRLERGAVPPDVDGLASLVQRLDDANEPVCAAIESMSGARFVHDQLELFGWDVRIADAFKVKGLAPLACKTDKIDSWVLAELGRLSLVPEIWLPDPSVRAERERARFRLHLVRHRTALKNRVHSTLITHGVPNPTSDLFGTSGRELLARLCLPEPWRSTTQASLALIDLLDAEISGIERELRALGVEHRYIPLLITCPGIAWVLAFTITSELGDISRFPTPTKFVGYSGLCPKVDQSGERDWRGPLRKNGPNYLRWALVEAAHTALRHPCYQPTLVRQTARHGRKLGRKIAAIEVGRKLAEAIWYMLSRNQPFAPAGAVQPLTA

SEQ ID NO: 417614 - protein, 316 aa, unidentified
MEAPVAGIDVSKDKLVVYFQGKYYEFPNDRQGYEEIIKILPKGCKVGIESTGIYHINLAKYLMGEYDVRIINPFILKKFKDFRGKKSDKNDAKKLAELVVSMGSEFTTSDARELTSQWDFVTRSIARVKNRLRRDLILLGYKDSLSKKNLEEVLRGGDSIVLAEVRFLLEELERLEVRKREIEEKLEDLVPKDSLIFTIPGIGKTLGCIILARVGDIRRFSDRKRFVAYCGLDPVIESSGKSVVSKGISKRGDAVLRRAFYLAALTAIRVNPVIKRFYEEHKGKLKGKKLIVACARKLAVITWAVLYYNKPFDASE

SEQ ID NO: 417615 - protein, 434 aa, unidentified
MSKLYDLPVIGIDIAANFSVATVLRPNGDIFKKNFRFSHSLDGFNSFLELFYKAEEEFNSKPKVFFESTSIYHLTLLHFLVDRQIDANTINPLITNSNKNFNIRKVKNDNLDSYSIARLCKFDDVKTSVYTSKDMLNLKLLVRDYYKLVDLKANAKKAFSNALYIYYPGLQNAFSDITGKTPLAFISKYPTPNDLLDADHYEVIGFLKASSRRSLAWATTKFNHLLRIASDALVLGINPAYFTFKVNRFVSTYNFYEQQRFDLLDEIKFFIDSAPFSDSFNQNISLLMSFKGAGFISAVTLLTEMNDIANFNNANQLVAFFGVDPSVNESGNFKGDANKMTKRGTAVGRRALYALAISSIRKTKSGVPINKILYNQYHVTLKGKKKKVRLVAIMNKLLRYIFSVLKNQKPYVERDPRIHQQMFMNNAIKNKSVA

SEQ ID NO: 417616 - protein, 402 aa, unidentified
MPMLSIGIDVSKGKSTVCGMKPGGEIVYAPFEVQHTREGMSELVSLLRGSGEEVRVVLESTGSYHCPVVAALLENGIFVSVVNSLRMKRFCSQSIRRVKTDQIDAMQIALYGLAYWQELQPTKLPEDTYRELQLLARQYYQMTSLLIKAKVDFNALCDQVLPGMQELMSDHAGRHKLSDFVLRYHHTAHILKMGETRFRKDYCKWAEKKGYRNHERMAALIFATAQNGIPVLPDAPSTQIVITEAIRVLHTVEASRDAILTQMQALAKTLPEYSLVREMPCIGDTLAPRLIAEIGDVRRFHSKRALIAYAGIDAPPYQSGKFSANNRHISKRGNRYLRKTGYEVMQSYVMHKPANDPIFTFIEKKRSEGKCGKLAMVAGLNKFLRVYYGKVTELYRSLSAIE

SEQ ID NO: 417617 - protein, 338 aa, unidentified
MRLYVGMDLHSTNCYTGIIDEDEKQRFAHKLPNDKAKIIAALAPYQHDIAGVVVESTYNWYWLVDGLMENGYKVHLANPAAMKQYEGIKYIDDKHDAFWLAKMLKLGILPEGYIYPRESRGTRDLLRQRSRYVVQKTSLKHTLQQIVCNQTGVTLSNNVINEIETENLYALLKNEDVSFSAGSMIETIRFLEEKIEAIEKRVLGHVKGGPIYPLLTTVTGIGEILGMTITLETGPIERFNSAGQYASYSRCVPSSHWSNGKQKGRGNVKNGNKYLSWAFAEAANFSIRYCKEAKKFYQKKCAKTNQPSAYRALANKIAKACYFMMKEKKAFDVERLFY

SEQ ID NO: 417618 - protein, 395 aa, unidentified
MSAEGEAIRSNDYRKDTTVKAPSTRPAAVLGLDVGKSSHWACLVDRDGEVPASAPVRNREAELDALFASAPAGTLVVVDQFRNIGSLAVRRARAAGLGVAHLPGLAASRAAGLFAGEAKTDERDAAVIARTALGVPDSLSGVPGRGEALEAARALSSQRDHVVACATRDKNRLRAVLLESCPALEAAVDLSDRRWLELLAGFGGAWGIAHSGAGGPRAEAAGEAAAASTAPPPALVEAENRQVRFLAARISEALDEAGALEAETAALLEGDETYACLLTVPGIGPRTAAQLAVSVDIGRFPDHDHLASYCGIAPRVRSSGTSVRSVRASRRGDARLKSLLIFSCNSLVRSSGRYGEYYRACRARGMGHGRALKAVARKRLRAIYAVMRDRVPYRE

SEQ ID NO: 417619 - protein, 358 aa, unidentified
MKKIRHWILDGKVVYVGLEDAKKTWKLCVRSGKTVVHETSMPALYEGLKHYFRNRFPSCKIRLMYEAGFRGFELHDQLVADGWECVVTPPHTVTQERCSKQKNDRIDCRRLAKNLENGDYKSCHVPDRQRREDRQVSRLSVQVQRDIARVCNRIRRAIDFHGLEWHFPAGNWSARHYREAEEKLTKIGLSESLQFTYQMYFRQLRELRSMKLQVLRQLRAFGRSDRYRKSVEILESAPGIGMLTAIRLALEWGDVTRFSRKEEFGKFIGLTPSDYSTGEQDHKGHITKQGNQQVRAWLIESAWVAIRHDPVLLEKYNRVISHCGSSKKAIVAVARKLAIRLRAMLIRGEPYQIGLLEC

SEQ ID NO: 417620 - protein, 341 aa, unidentified
MHQATIIGIDLAKRTFQAHGATSDGKVAFRKKLSRSQLLAFLTQQPRCVVAMEACATAHEWGRAARELGHEVRLIPPAYVKPFVKRQKNDAADAEAIAEAASRPTMRFVAVKSEAQQARAMVFRTRDLLIRQRTQLINALRGHLAEHGIVAPQGPANLKLLADAISDTKISLLPIVRDLGLLYLEQIKGLGEKIAALDRTLRRESKSATTACLQTMPGVGPITAVAIEAFAPAMTTFKRGRDFAAWVGLVPIQHSTGGKQRLGRTSKMGQRDIRRLLITGAMTIVRWASRKGAREGSWLARMMARKPRMLVAMALANKMARAVWAMLTKQENYRDPAAALA

SEQ ID NO: 417621 - protein, 407 aa, unidentified
MEVLHPRCAGLDVHAGSVAACARIASGMEVTYEHRTVSTTTRGRLELDEWLRGHRCTHVAMEATGIYWKPVWHVLDAHVTLVLANAMHIRNVPGRKSDMNDATWIADLLAHGLIRSSFVPPAPIQALRDLTRTRKQLVGEMARHTLRSQKTLEDANLKLTQVMSDILGTSGRAILEALIAGETDAETLADLPRGRLKAPRRTLVDALHGHVTDHHRFMLQLHLTQIESVTAAITAIEARIGDALGPFRAAVNLLTTMPGLSDTTARVRIAEIGTDMTRFPSVGHLISWAGLCPCLDESAGKRRSTRTRKSAQWLKPTLVNAAWAATRKKEGYLQAQFLRLKSRRGAKKAILAVANSMLTAAYYMLRDGVEYHDLGGQYFAQRDKDRVTQRLLQRLRDLGVVVDVKAA

SEQ ID NO: 417622 - protein, 411 aa, unidentified
MEAAVITAVGIDVSKSKSTVAVRRPGGEIALRPFEVHHTNSDLKKLASTLKKLGGDIRIVMEHTSTYWRPIALTLKEAGFFVSVVNAMLIHDFSDNTIRKLKAGRADALKIANYAITFWDTLPPFNNEEETRPLLKMQSRANERITATATALRNGLIALADQTFPGVNIAFDPNTKNANEHEKWVDFFLRYWHKDCVCQYSMEAFTESYRGWCKRKNYKFRTDTAHKIYLLAQEGVATLPKCESTKMLITQACKSLNAVCEAKQSTQLEMQRLAAMLPEYEVVMQMEEDGPVTGPALMAEIGDVRRFKNKKALVAFAGIDRPSFQSGAFESKSRHVSKRGSPHLRRTIFIISNIILTRPNPENAVYCFMDKKRSEGKHYYVYTVAGSAKFLRVYYARVTEFLRSQPSPDAC

SEQ ID NO: 417623 - protein, 392 aa, unidentified
MYIVGIDIGKNHHESSIVSPKGKQIGRSLRFATTHKGADSLMSFIFKNIGNSPCVFGMEATGHYWYPIYSFLKAKGYTIYVINPIQSDSLRKMYIRQTKNDSIDSFLIAEVIRFGQFGTTSMADENILAMRQLCRYRDSVISSRTEIKLRIGTIMEQIFPEYEKQFSSLWVSTSMGILEKYLTPENIENAPIDELFEIIKDKSHNRLTKAKAISIKEAAADTFGIKIAQDAFSFQLKQLIDRMNFLDKQIEALDCQILEYYEKFDCYLHTIPGIGMIAAATILAEIGDINRFKSSSALVAFAGIDPTVRQSGEFSSTHNHMSKRGSPYLRHAIFLAATTCSFHNSPLNAYYKKKRDQGKHHLTATGAVARKLTSVIYAVLRDSKPYEPKSFC

SEQ ID NO: 417624 - protein, 426 aa, unidentified
MIPAVVERCAGIDVHKRFVTVCVLVGAAHIEPKPQRRRFGTCNAELWQLRDWLLEEKCQKVAMESTGPYWRPVFNVLEEAGLEVVLANPQQVKNLRGHKTDMKDCWWVAHLLRHGMIRPSYIPSRTIRELRDLTRRRKQLIRHGATERNRVQKLLEEANIKIGSVLSDVFGASGQDMLLALVQGQATAKEIAELAKRQARKKIPELQAALEGHRMTETQRQLIRQCMSHMAFLEQQIEEVDEQIQEKVRSFGFSESYDLVQTVPGIKAEAGASVLAEVGDTVAAFPSAAKLSSWVGVCPGNNESGGKRKSTRTTKGNPYLRDVLLECAWAASRRKNSHMQCLYQRLEHRLGHKRAIVAVAHKQVEAIYYVLSTRRPYIDTAEPPRSATKLNRLIRHHTRRLRKLGCWLEQTTHHQKGSTSKSQRLT

SEQ ID NO: 417625 - protein, 348 aa, unidentified
MAHFVGLDVSVNETSVCVVNDAGKVVLEQKVPTEPSDIIALLTSLGATYGRIGIEAGPLSQWLVNALTAAELPVICVETRHMKALLTAQQINKTDRNDARGIAQMMRVGLFKPVHVKTLVAQEQRMLLTSRKLLQRKLLDVESDLRGTLRNFGLKVGVVSGGRYEARIRELVVGFPRLAAIAEPLLNVRRVMRQQLAVLHKMLLDTVRGDPVCRRLMTAPGVGAVVALTYRATVDQPQRFAHSRAVGAHVGLTPKRYQSGETDYDGGVSKCGDALLRTMLYEAAQVLLTHGSKWSWLKAWGMRVAQRRGIRRAIVAVARRLAVVLHRMWVDGSEFCWSKDSAAAPTVA

SEQ ID NO: 417626 - protein, 403 aa, unidentified
MTMRRRAWVGIDVGKTSHHACAIDETGKVVWNQKVSNEQRAIEQLVTRACKGAEQVRWAIDLTSPMALMLITVLLCAEQSVLYEPGRTVNTMTHAFRGEGKTDAKDARVIAETARLRNDLSNVVLPDELVVELTQLTGYRADLMADWVRGINRLRALLGSIFPGLEAAFDYSTRTPLILVSGLCTPAEIRAAGIDGMTAFLVDNHAWPTGIVKSAATAAALANEQPLALPGEAGTAALVKRLACRLLELDREIKDIDKTITARFRDHPYARIIESLPGFGPGLGAEFLVVTRGDLASFATAGRLASYAGLVPVPKDSGRITGNLRRPKRYNRRLRRVFYLAALSSLRADGPSRRFYDRKRAERLIHTQALLALARRLIDVLWALLRDDREFTPEKPITATAAA

SEQ ID NO: 417627 - protein, 421 aa, unidentified
MGKIIERCAGIDVGKRFLLCCVLTGAANEEPRGETLRFDATVPALERLRTWLQEERVTHAAMESTGTYWIPVFNVLEEQFAIVLANPEEVKNRKGHKTDRNDAKHIADLLRHDHIRSSYIPPKPVRQLRDLTRRRVQLTQDATRERNRVQKLLEQSNVKIGNVLTDVFGVSGQDMILALLDGQSTPAEIAALARGQAQRKIPKLIEALQGHRMSDHCRLVIRSSLRHLGCLQEEIELLDDEILNRMRTPPFERPFALLQTVPGVGRLSAAAILAEIGTDLEPFPSAEQLASWAGLCPGNRESAGIQKGRQTTHGNPYLRTTLVQCAWAATRKQGSVFAVRFRQLTPRTGEKRAIVAVAHLMIIILYCMLKRGMEFQGAECVHQQRRRERRAHHHMRSLRRLGLNVRVTAAADTIAGGESVP

SEQ ID NO: 417628 - protein, 396 aa, unidentified
MTTIGIDIGGRAHVAARCRDGQSRADREILRVSQDRAGFTALDAWLLRQPGPVTLVTMESSGHYWMPLASHLLRRDVPVAVVNPLAAKYFARSRLGRTKSDPADARSLAEMAMRDTPDARDPLAGVELRQAARFAMTLVTEQAKVCQRLIRLVELGFPELGELFDDPTCRTAREVLRVAPTARAATRRRTATLANANGGPGHRRLGQAKAGRLQVAAADSIAVPELDAEVAFEVRLLLDQYDLLERQITDADHRVAGLLDGETARRLQTIPGVGPSIAASLISEIGDIGRFDDFDQLLAYAGVHPAERSSGTKGANPETSWHMSKAGNAHLRAAAYRMALVGIQHNPVIAAHYARKRDAGKSKMNALGHCMRKALAIVWGVWRNGTDFDPTYGVEA

SEQ ID NO: 417629 - protein, 385 aa, unidentified
MQKLNDLSRSPNPLDPDGTLIAVIELSLSSWLVAGIVPGVERQPLKKLAVDENALLKLLNRWREEAAKAGHRIKRIAVAFEAGRDGFWLARWLSARDIEAHVIHASSVAVSREHRRAKTDRLDTELLKRSFLGWLRGERDHCKMVAIPTTQDEDAKRPNREHESLVGEQSRIVNRMKATLIRFGIRGFNPKLKKAAERLDGLRTPEGEPIPPNTLAELRRDMVRRRLVSDQIRQIEDARLERLKQAPSDGPHAMVRLLARVIGVGVETADMLVQEILSRSMRDRRAVARYAGLTGSPDESGRKRREKGLTRSGNARVRRGMIQLAWRFLMFQKDSVLAQWFRTRTENARGTRKTMIVALARKLLIALWRLVREGVVPDGVVLRPA

SEQ ID NO: 417630 - protein, 452 aa, unidentified
MEEKEISMEVVNSHAAGIDVGSRSHWVAVGQQEQDIREFGVFNQDLFEMADWFKEKQIRTIAMESTGIYWQNLYAVLISKGFHVILCNGKFTKNIKGKKTDIKDCQWIQKLHSLGLLSSSFLPDGKTEQLRTYCRQRANLLHLAAATSKKIQKNLSLLNLRLDVVVNDICGLTGLNIIRAICDGEASPEKLASLRHGNCRKSEAEIARALQSNGRKDYLFALRQELDTYDHLQRKISECDKMIEEMLNEIIDNDENKKQHHIEPKTYKRINKNTPKDIDLNLKSYQMFEGTDLLAIEGISYSTVLSIMSEIGIEGIRKFPAAKHFTSWLRLAPNNKISGGKVLSSKVPKGSNRLKIALRNAANAIGNLKESTPLRDFFHRINFRKGRVSAISATARKLAVIIWNMVVRGVQYINPEGYLFLDQKRKLGVMKRIQKQIAKFDLTVDDFKIAST

SEQ ID NO: 417631 - protein, 370 aa, unidentified
MKPSTSYVGLDVHKSTISVAVADEGRGGEVRSYGVVENRVDLLIRLSERLSRRGQHLHFCYEAGPCGYGLHRLLSGLGHDCTVVAPSLIPKKPGERVKTNRRDATMLARLHRAGELTAVWVPDAAHEAMRDLVRARATAARGLTKARQHLSGFLLRHGKICVGPRAWMVAYRHWLTTVRFAHPAQQIVLQDYIHAVDDAEKRIARLVAQIELLLEQWSMAPVVAAIQAMRGVAFINAVTIVAEIGDFARFTNPRQLMAYVGLVPSEHSSGDNVRRGGITKAGNSQARRALIEGAWTYRMQARVSRKLHDRIAGLPKSIRDTAWRAQVRLCARYRRLVAAGKKTVVVTTAIAREMIGFIWAIARQVELRSA

SEQ ID NO: 417632 - protein, 373 aa, unidentified
MNTIYIGVDFHARQQTICYLTTETGELVTAALKHEPKTAVRTFYEQFSGQVIVGLEASGYSPWFEQLLEELGHQVWLGDATEIRRRARWRQKNDRRDAELILDLMLHDEFPRLHRPSLQSREVMRMLRYRQKLIKMRTMSKNSLQSLALQSGIAKRGRLFTREGKAELDAAVMSPAMEWQRAHWWQLLEPLNQQVLETMTWLKAASQNDVSIARLRTHPGIGLLTSLCLVHTLQPVARFGNTRKVAAYAGFDPMERSSAERKHFLGISKAGSRVLRYLLVEAANTAVRKDEELKRFYQRLAQRRGRPKAKVAAARKLLIRAYIMMRDEIDYAEFRRRAVAARLARLRQGPQIPAALIGQPASTARQEPLPRGK

SEQ ID NO: 417633 - protein, 418 aa, unidentified
MSEDENTRGSRRYVALDIHKHYCVVAGVDRDGRILLHPVRVEHADLEVWLKKKLRPSDHVVIESTTNAWHVYDLLAPLVERVLVANPIKVKQIALARVKTDVRDTLILARLLAANLVPTVWVPPVHVRQMRQLLSQRRQFVETHVQIVNRMHSVAHRHHLKHERGKRFNEKNTLWQKDKRLSRMEQFQLSLEMENKAYIEKQIERISQEVRKLSHQKPWADSMTYLIQLPGFGVITAMTVLSAIGEIERFETSKKLASYSGLTPGLEQSGTKYRGKGITKEGRRELRWALVEAAQMAVKSDPVLKMRFQALQKRMHRNQAIVAIARHLLEVVWYVLTRRQPYRHFSHERIAYKYLTWSWQMDETARGGLTRQQFARYYLMKLGIGHDLTRIALDPKHPRRLASEAEVLALHPELTQIE

SEQ ID NO: 417634 - protein, 318 aa, unidentified
MKIDLVYLGIDISKRTLHLATPEKFLREFDNTPTGCRSLLKRIQSLDYAGVVLEASGGYERRIVELLQDHDIPISVAQPACVRHYAKSIKVLAKTDAIDAQVIARYAQAVQPGPTAKTPANVRKIRAFRDRRDQIVQDRVREENRLEACDDREIAESIQAQVERLRKIEKNLDRQILDFLKSDPTFQRKLKIMTGVIGVAHKTAATLLAHFPELGTLTRGQVAALAGVAPHANESGTYIGKRRIYGGRAAIRKAMYMAARTAVRYCPVMSEFYERLRSKGKPFKVAIIACARKMLIRLNTLLSQLEAGTKLRNEAPTT

SEQ ID NO: 417635 - protein, 346 aa, unidentified
MRRYGIIGGQHDDVLRLLKKLSATHPEADLQLCYEAGPRGYPLCRYVRSQGAHCSIVAPSKVPRQPGDRVKTDRRDADQLARLLRAGELTGIYVPDPQDEAVRDLIRARYQVKQQQHRARQQLKMFLLRQNIRYAGTKAWTAQHLRFLATVKLPFGEQQFVFQEMVNVISEAGQRLERYEKQIASVLESWRWEPVVRALMSLRGVALLTAATLVAELGDLERFATAPQLMSYLGLCPSEHSTGKDRQQGGITKLGNGIARKATIEAAWNNRSPVRISRTILERRQGLPKAVTQAAWNAQIRLHQRYKHLTTVGRKKSQVAAAALGRELAGFVWAIGRMVKPRPVKN

SEQ ID NO: 417636 - protein, 429 aa, unidentified
MRTESTPGARGPVFCGVDTHADSHWLCVLDWRGRKVLSRQFPADAAGYEALAGAIAAAGEPACVAMEGTSSYGAGLTRHLASLGMPVREALSPARTQRRRPGQGKCDEADAERAARAAMSGSKLGTPKSQDGWVDGVRCMLAARSGAVKARTSAINTARSLLTTAPEGLRSRFRGMAGPRLMEELPSVRAEGALGAALGALADLWAAARDAALDMERAIEASLEENCPALLAMYGCGPVSAAKLAVAAGDNPGRLRSEASFAAICGACPIPASSGKTVRHRLNRGGDRQANSALHEIARQRVMRDPETAEYAERARGRGKSDREVMRCLKRYVAREAYRALMHPHEIRRPEDASELVAARRAAKVSQVGAASILGTSEKYISMLERGQRELKPIRRAYEAWVEAGLPLDWDRRAFEAERKMDSKKHLAK

SEQ ID NO: 417637 - protein, 353 aa, unidentified
MTTSSPPALLYVGVDIAARSFTAASLTPDGPPSKPRTFDQSPTGFAAFHTTLCATTIAPCDTLIALEATSTYWVALAVTLHAQGYRVVVVNPAHVHHHAQSMTRRSKTDNLDAVLLADFAREKYRRLHDWTPPPQVYHELRQRLVARDGLLTMRTQTSNQMHALEQWPVQIASVREHLQSVLAMLDEQIAALERELKGVLRDGAWAKSAAHLQSITGIGLITASWLLVGTLNFTTCASAQSAAHYAGLAPMKKESGTSVKGREAIGHAGNGRIRTALFMATMSAATHNEMIKTFYNRLKAAGKPEKVVRIACARKLMHLCYAVVTKGQDFDPSFKKPPSLISVDRGVEMEIAA

SEQ ID NO: 417638 - protein, 328 aa, unidentified
MIEYLKEGSQAAGGAKVVVAYEASGNGFILCDELKEAGFECHVLAPTKIERSAKQKRNKNDDRDANRLLDIVRSHYLAGTKLPAVWVPDRQTRDDREPVRGRQDLSQKQAAVKTQVQMLLKRHGMEKPEGIGKSWNKPYRQWLKALSEDAHQGWGMKTVLASLLRQLEFLEKEIEQLNAAMEQLADTPRWKPIVEAMKKEKGVGLMTAMKYSTDIADFSRFRRGRQVGAFYGLTPSSNESGENNDRKGHITREGSPSRRQVLCQSAWSRVRYDEHEREVYRRLVLKNPKKKKIALVACMRRLAVRLWHVGFQAQLQGKATPVEQGTSS

SEQ ID NO: 417639 - protein, 386 aa, unidentified
MQKLNDLSRSLTRLDPDGTLIAVIEMSQSSWLVAGIVPGVERQPLKKLAVDESALLNLLNRWREEAEKAGRKIERIAVAFEAGRDGFWLARWLRARGIEAYVIHASSVAVSREHRRAKTDRLDTELLKRAFLGWLRGERDHCKMVAIPTTKDEDAKRPNRERESLVGEQTRIVNRMKAALIRLGIRGFNPKLKKAAGRLEDLRTPEGEPIPPNTLAELRRDMERRRLVSDQIRQIEDARLERIEQAPGDGPHAMVRLLARVIGVGIETADMLVQEVLARNMRDRRAVARYAGLTGSPDESGTKRREKGLARSGNARVRRGMIQLAWRFLMFQKDSTLAQWFRARTETARGTRKTMIVALARKLLIALWRLVREGVVPDGVVLRPAQ

SEQ ID NO: 417640 - protein, 391 aa, unidentified
MINIGIDVGKFKHCATVLDDSTGEVLIKPFFLTNNRKGFDLLYSKTKQFIHRKHSVGMEDTGHYMINLTNYLLDKKFTVKYINPRATCLRRKGLGISAKNDRKDALLIAEMLSEKRFWRSISVRSIENSKFRDITRLYHQLQEQQNQDMNRLQRALDIVFPEANSLSWTRYSKAYMKFLSTYPSASSIALEDIRILRKALKTEGRGRQCKVTAEEIRELAKNSVGEDNISIDLEVTSIIAIINTREEQIRMLEKKIEEFSHKLNSPIISIPGISHISGMTILAEIGDINQFQNTGNLISFAGMDPLVYQSGKYDAAHMPISKHGSRYMRKALYQAVFTVCKYSPTFHDYYTKKRNQGKSHRYAQGHCARKLLRVIYKLLSTNSLYDQNHIQ

SEQ ID NO: 417641 - protein, 277 aa, unidentified
MCKDKKVIGIDVSKDKIDVYKAGVSKVYSNDQQGFKLFKKELLCEYSHCVMEVTGAYHQLLAMYLHQKGVAVSVINPLIVKRFIQMQLHHNKTDKSDAKQIASFGEQQTLNLWTPPAKHVTQCKLIYACINQYNKQSTALKNKLHSLASQGIQTGALVRSVKRQVAHLKTEKNKLKEELEKLINKHDAELYTNLKSVPGLGKKTALLLIVSLDGFRDFENYRQVCAYLGLSPVEHSSGSSVRGRTRISKRGNPLMRNYLFMCSFTACEHNEQCKGTL

SEQ ID NO: 417642 - protein, 369 aa, unidentified
MKTKTTPSVVPTSPATVTPGGFTLGLDLGDRSHHVCVMDATGQIVREGSLLNTRPALAKLMAEFPRATIAMEAGTHSPWISRYLTELGATVLVANPRKLHAISRSERKCDRRDAQMLARLARVDPALLHPIQHGSAQAQHDLLGLKLRDALVRTRVNLINAIRFTLKSLGHSVRNPSSESFHKTVLADVPADCLPVIQPLLTVLAQVTEQIKGMERDLVQRSRKDYPATQRLQQIAGVGPLTALCFVLKIGDPQRFSRGRDVGAYLGLCPRRDQSGGTDKQLRISKCGDGLLRRLLVSAAHYILGPFGPPCALREHGLRLAGTGSAREKKRAVVAVARKLAVLLLSLWKHGTDYEPRVTASPVLVMTPA

SEQ ID NO: 417643 - protein, 409 aa, unidentified
MIYLGLDWAEDHHDVALMDEAGTVLDERRIGDTMEGVVLIHELVGQHEPNPSKVMVGTESVHGLVPQALVAAGYMVYEINPMASSRYRDRHHLSGAKSDRGDAKMLADAVRTDSHNHRPYVGNSDLAEGIKVLARTHQTLTHDRQDQVNNLRSALRQYYPSLLLAFPGFASPSERDSQDAMALVEKAPTPAQGRALTTSQITTVLRQAGRKRALDRRAQEIREALRVPQLETTPIVTQSYGSSAQAIAGIVRVMTVQIDLLTVELASRFEQHPDAKIICSLPGLGLVLGARALGEFGDEPNRYTDARARKNYATTSPVTKASGKLRVVTTRRGGNRRLGETSLRWAFSAAQSSPGAKRYYDALRSRQKTHAQAVRAVANRMVGILHACLEKRVLYNETIAWPEPLDMAA

SEQ ID NO: 417644 - protein, 435 aa, unidentified
MKRIRKNASGIDIGAKKVFVALENQPVVSYFTFTEDFETLRDYLLENKIESVAMEATGVYWVILYDILEESGIDVWLVDGRETKQVPGRKTDIKDCQWILQLHCYGLLNRCFVADPDIKELRSYMRLREDHIRSASMHINHMQKALTEMNIRLKEVLSQIQGKSGLTIIEAILAGERDKDVLVNLCHGSILKNKKELILKSLQGRYSSTGLFALKQAYEAYLFYNNQIKECDSQVNRVVNRMGDYGNEQLETRSRKPIRHHKPKIEKFGSNMLSIFDGKDATLISGITDYTWLQLLSETGRDLTKWTTEKHFTSWLGLAPGQNNSGNKRKRPRKKGRPAAGQIFRIIAQSLINSKDIAIGAYGRRLRARKGPSIAIKAMARKLAELYWRTMVKGLDYAEYGVKKYEQQLIAQKMKTTLRLAKELNLQIIDNQVYV

SEQ ID NO: 417645 - protein, 357 aa, unidentified
MGKSIRNLLTVTRVGLDLAKRVFQVHAVDAKGEIVVARKLTRSQLIPFFAELPPCVVAMEACASAHHWGRALIELGHEVRLIPPAHVKPYVRRNKNDPVDAAAICEAVGRPGQRFVPVRSIDNQAELMRHRARELLAGQRTAALNALRGHLAEIGLIAPQGAQHAYGLKRMAADGFNENGEIVVPDCVRGALRSLVGQIDALDEAIGAIDKELAASVKADETAKRLMTIPGVGPVTASAIVATIQDASAFASGREFAAFLGLTPRQNSSGGKTRLGRITKMGDRYLRKLLVVGACATLRHRKGHNDALRLWASGMLEGKTVKYKFNLTAVALANKVARIVFVLMTRGGRYDDRPVAA

SEQ ID NO: 417646 - protein, 326 aa, unidentified
MQVKAVSKKRTGDKSTAGIDVSQEWLDVHVLPAGQSLRVANTEIGIRQLKRLLLSLGTDLAIVEPTGRWHRLVQRSLHADGIVVAEVNPFRVRSFARAEGVLAKNDRLDAKVLAMFGVSMSPTARPPRSESLQELDELVCARSSAVAERTSLENQKATATTRFLLRQLRQRIAHISKVIDGLEEEIQRRIKAEPVLLRKFQILMSIPGIGVVTAMTLVVRLNELGAISSKAIAKIVGVAPLDWDSGKMKGLRRIFGGRKDVRRVAYMAALSASQFNPSLRAYFERLTDNGKSFKQAIVAVIRKLVILANTLVAEDRLWEKEAPKAA

SEQ ID NO: 417647 - protein, 324 aa, unidentified
MDIVGGFDVHRKQITFDYVEMDSGEVHRGKIRPADRESLREWLNEFTERFSGKRIAIAVEAATGWRYVIEELQRVGVEPRLAEPAETKALRGRKKRAKTDRLDAGHLRDLMVIDRLPESWIPPDHIQEIRTLMRLRHSLIEERTTHKQRIHAQLFHNGYPRQSNLDSIEGRAHLEDMELPGAARKVVDLSLAMIEHINEELAPIEKELRAYARSQAGCKALMMTHYGVGELTSVALLSELGDTRRFSSSKKAVRYAGMDIKPSTVPTTNGRRASSAGRARRYSGGRPSRRPRGPGGRTRPIMGTTYGTRNASERTGRLCPSPAS

SEQ ID NO: 417648 - protein, 343 aa, unidentified
MNEINMIGLDLAKNVFQLHGVDASGKVVLRRQLRRGAVEKFFAQLPPCTVGMEACGSAHHWARVIGGYGHEVRLMPPAYVKPYVKRNKNDGRDAEAICEAVGRPSMRFVPMKSVEQQASLAVHGTRALLVRQRTMAANALRAALSEIGIVAAQGYEGLRALMARLEEPSAEIPEMMRGALLLLAKHWQALDADERVIERQIAKAARCDRDAKRLMEVPGVGPMIATTVLAKVPDAKVFRSGRDFAAWIGLTGKDHGTGGKHRPGRISRQGDRVLRALLISGASAHLRQQIARGVSDPWLRDLLARRPYKVAMVAFAAKTARVIWAMMVKGEAYRDRASASAAA

SEQ ID NO: 417649 - protein, 351 aa, unidentified
MIIIGCDFHTRYQEIAWLDTNTGETQELRLEHAGDQVRKFYAALPGPVRVGIEATGYSQWFERMLRELGQEVWIGDAAEIRASVVRQQKTDQRDAAHVLELLITNRFPRIWVPTPAERDLRQLVLHRVKLVQLRSKVQNQLQAMAMGQGVCRRKKLWSTRGRAELERLPLDRWAHRRRAELLQLLDQLDQSIGELHGAVEQQARQHPEAVLLMTHPGVGPVTSLAFVLTIGPVSRFSRSKKVGSYLGLNPSEHSSGGRQRLGSISKQGNSMMRWLLVEAGQTAARLDPVLGRMYQRLKFRKGSAIAKVAIARKLAVRLYWMLRSRFDYARLVRMSGSSSSAVVPEDSGSGR

SEQ ID NO: 417650 - protein, 349 aa, unidentified
MVILGIDAHKRTHTVVAIDEVGRRLGEKTTMSTTTEVHLELVRWADRFGTERRWAVEDCRHLSRRLEADLLAAGEQITRVPPKLMAHARAAARTYGKSDPIDALAVARAALREPGLPLARLDGPSRELRLLVDHREDLVRDRTAHINRLRWHLHELDPSWDPSPRCLIRYKHLDALAARLEAMQGTVARIARDLIGRIRELTEKANALQREILGLVRSLAPTLLQITGVAELTAAKIVGEVADVRRFRSKDAFARHNGTAPLPVWSGNQVRHRLSRTGNRQLNAAIHRIAVTQKRCHEQAKSYLERRMALGNTKTEALRALKRKLSDVVYRALLVDAVPAVAASAEEAA

SEQ ID NO: 417651 - protein, 345 aa, unidentified
MPIVGGLDIHRKQITFDYLDTVTGEVKRGQIAPADREHVRAWLARFASRGEVAFAVEGCCGWRYVAEELAAAGIAAHLGEPADTAALRGRKRHAKTDKTDARHLRALLAEGRLPECWVPPAQILEYRALLETYHDLRREHTAWVQRIHAVFFHQGAPPLGEGALRTDQGLAGLRAAAAAHLSPAGQQQVATALDMLAATEAQLGPLRRQLRQAAAHLRGAKVLAERLYGVGPLTALALTCWLAGKDRFSSSRKAVRFTGLDITVHSSDRKGPPGKLSRQGPPVLRWAVYEAGKTHARTAAPDHGYYATVADRKNTKRAALSEARKIVRQACHILTELGDDALTAA

SEQ ID NO: 417652 - protein, 367 aa, unidentified
MNEPTRFVGLDDSKEFIQVAVADGDRNGEVRDFGVIPNTPGDLRKLVRRLGRVEELHFVYEAGPGGYGIYRELLALGTRCIVAAPTKTPRRAGDRIKNDRRDAANLARLHRAGELTPVWVPDEQTEAMRDLTRAREDCKYAQLKARQRLGAFLLRHGRRYSGKSHWTAAHHRWIIEQRFAHPAQQITLDEYYEAVEEASRRIARFETQIGTLLDEWSVAPTVKALMAHRGVSTITATTIVAELGDLTRFTRARDLMGFVGLVPSLCASGQKHRNGAITKTGNAHVRRVLTEAAWSYRHPARRSPHLRKRLAGQPEAVQQISWKGQVRLCGRFRRLRARGKQHNKALTAIARELVGFLWATAREVANS

SEQ ID NO: 417653 - protein, 396 aa, unidentified
MFGPIIAIDVSKDSSHTQLFESFKKPMGKPFVFDHDKQGFDLLSEKLKMLEEFTGEKVSVVLEYTGHYSIPVVRWCLQNDVKVYAISPLLSAKFRKKDLRGTKTDKKDCANIAGVYFSQDNLRVARPTDPLQELSRRYQRTNKRIVGLKCQFMKCLDQVFPMFEKKIGDPYADKSINVLINYSHPEKILKARRGNLGKFIAKVTSHTEKVSEKYADELIRFAKDCVSGCSIDSCVTEELSEYGQAIIDLTEKCESIIARIKEIEGERQIESVRKVCNFKSSKLIVLILAEIGDISRFKAKENLVSYAGMDPVVYQSGEQTGKGLSITRKGNSLLRKYTYLAVCCIIREDPSSPITQYFQKKIKEGKPAKVARIACCVKLLRLIHASLTLQDNFKLV

SEQ ID NO: 417654 - protein, 351 aa, unidentified
MLYAGLDLSRKRLDFHLLDGEGGTIEVGAAPPDVDGLRGLSQRLDRHGTPIRAAIESMNGARFVHDRLELAGWQVEIADAQKVKGLAPLACKTDRIDAWVLAELARRELVPAIWLPDPLVRAERERARWRLHLVRHRLVRHRSSLKQRVHAVLLTHGKPCPVSDLFGVRGRQLLARLGLPEPWQGTIEASLRLIDELDREISECERELRRLGADHRYVPLLCTVPGISWVLAYTIAAELGDISRFASPRKLAGYSGLCPRVYQSGERDLRGPLAKQGPRYLCWALVEAATHACTAPVYRDRYQRTKARIGKQRGAKVAQIDLARRLSEAIWHMLRRGEPFAPQGATDPLAA

SEQ ID NO: 417655 - protein, 355 aa, unidentified
MSQEKYIGMDVHQATISVAVMDAGGKLIMECLLETKAATIVEFIRGLHGTLSLTFEEGTSAAWLHDLLKPHVSQLVVCDPRKNALLKDGNKSDRIDARKLAELLRGNQLHPVYHGEHGVRTLKELGRSYLTITQDVTRVMNRIKALYRSWAIPCAGTTVYAPRHRAEWLAKIAEPGVRVRAERLYQQLDLLQPVRLEARRELLAESHKHSSVKLLRQIPSIGPIRSALLVALLQTPHRFRTKRQLWAYSGFAVETHDSGEYRSVRGKLRRNRERMTVRGLNDNHNRDLKNLFKSAAISASTRPGPLRDFYVARVEKGMRPTMARLTLARKIAAISLTIWKKGVEFDAQQLQRQTA

SEQ ID NO: 417656 - protein, 347 aa, unidentified
MNFYAKQHKFYCGIDLHTKKMYVCILDAGGNIRVHQNIETDPDAFLRIITPFREDIVVTVECMFTWYWIADLCVDQNIPFVLGHALYMKAIHGGKAKNDKIDSHKIATLLRGGMLPQAYVYPARMRATRDLLRRRNHFMRKRAELFAHIQNTRSQYNLPDPLGCIAKPQNREGIVERFDEPSVQKSMAVDLEIIQAYDRLLNQLEQDIIAFAKEHDLRSYALLQTIPGVGRILGLVILYEIESIERFPSVQDFVSYCRLVKCIKESNGKKYGPSGKKIGNAHLKWAFSEAAVLFLKGNEPAKKYLQRLTHKHGKAKALSILAHKLGRAVYFMLKNKEAFNQKKLLGL

SEQ ID NO: 417657 - protein, 369 aa, unidentified
MKHSITFVGLDVHKDSIDIALADDGRDGDVRHYGSIGGDTGALDKAIRRIHRAGAELRFVYEAGPCGYEIYRHLTTQGYRCDVIAPSMTPKKSGNRIKTDRRDALSLARLYRAGELTPVYVPREDDEAMRDMVRGREDAVNATRKARQRLSALLLRHGFRYSGRKAWSVAHLRWLADIKMPHPAQQITLQEYIHSIEENSERVDRLTEQILKLIPTWRMAPVVNALQALRGVAPIVASTMVVEIGDLRRFENPRQLMAYLGLVPSEDSSGQSTKRGGITKTGNGHARRVLIEAAQTYGVPAKVSRVLRKRQEGLPRVIKEISWKAQVRLCGRFRKLMAKGKSRNRTVTAIARELSGFMWAIAREVSIPA

SEQ ID NO: 417658 - protein, 402 aa, unidentified
MYSGGPTAGVDWASQTHVGCVVSGDGAVIDRFDIAHDASGLKQMVRRFRAAGVQGVAIERGDGPVVEVLLDDELSVFVVPSRQIKSLRSRYGSAGNKDDRLDAYVLADTLRTDGHRWRPLREDSDDTRALRALCRARKDLVETRVQVLNQLRSNLELALPGSVGLFTRPDSKITLAFLRRFPTADKVAWLSPRRLQAWLASVGYTGGVAATTLFQRLTQAAPGLTGAEGAARGRITLGLVTMVEALNAEIEQIEADISQLFSTHPDQHIFTSLPRSGMVRAASLLAEIGDCRERFPCDDALAALAGASPSTRQSGKREHTVFRWSCNKKLRAAVMDFANGSRIADPWAADIYQRAVARGCRHPHAIRILARAWIRIIWRCWQDGVAFDPNLHKGRQPVAYLT

SEQ ID NO: 417659 - protein, 344 aa, unidentified
MKTKHPVIIGIDTHKATHVAVAIDTQGTRLAALTIPANPKGYLEVERWSQSLGKVQAFGIEGTGSYGAGLSRSLLKQGHSVVEVTRPNRQLRYTQGKTDSLDAEGAARSVLSGQATAQPKTQSGSSEMIRHLKIARDTAVKSRSQAMVTLKTLIINAPADLREALDQIRGKVGLIRYIAAFRPREIDSTRASAKAAMRALARRWLWLHEEIVSHDKELERLVTERAPDLMASHGIATLTVSEMLILVGDDPTRIRSEAALAKLCGVCPIPASSGKTHRFRLNRGGNRQANAALYRVAIVRMRSHEPTLAYVKKRTKDGKSKSEIIRCLKRYIVREIYSQLCVPK

SEQ ID NO: 417660 - protein, 453 aa, unidentified
MNVMPALIAGIHVFSAFHDLLKLKTWITDKPRPRLCQYRARRDSAVDVEALFGARPEANPVTVPLTSAVLSFSNWPVMGWTRRALASRSRKPAWGCENQEHPMPRATSSTNVIATIGIDIGKNAFHVIGLDDKGAIILRHKLSRGQVYARLANIPPCLIGMEACVGAHHLGRQLSALGHDTRLMPARYVRPYSKGQKNDFRDAEAIAEAVQRPTMKFVAIKTVEQLDLQGLHRIRERLVCQRTSVINQIRAFLLERGIAVRQGLRALRTEMPIVLAKTDKLSQRMIHMLEDLCTDWRHLDRRIATVSKEIETLSEQDDGAKRLMTVPGIGPIISTATVAAIGTGEVFSKGRDFGAWLGLVPKQMSTGGRTILGPISKRGNRYLRMLFVQAARAVLLRPQSWEKHGLKLWIEAAARRLNRFKLAIALANKIARIAWGVLHGGRNFEVRPMNQAA

SEQ ID NO: 417661 - protein, 387 aa, unidentified
MSEAFDPRKSATAFDQASTVVVVLELSGKSWRVGASVPGVSRRPLRQLEARDLGGVLKAIEQWKGEAGAAGCEVKRVVVGYEAGIDGFWIARALRERGVEVYVIHPASVAVERRGRRAKTDRIDVDILLRALLGWLRGEPRHCTMAPIPSEAEEDMREPGRRREALTAARLKVENQMRSLLVRYGVVDFRPRLKKASEHLDKLCAIDGRPLPPNTKASLDRLMAQHRLLSGQLKEIETARERVVAVTDPDRMERMILALARLVGLGVETATTLVHEVFSRRFRDRKALAGFVGMTGTPYDSGGSTREQGLSKNGNPRVRRMLMQATWRWLMFQPQSALAQWFVARTAGAKGRMKTIMAVALARKLLVALWRLAEDGVVPEGARLAAA

SEQ ID NO: 417662 - protein, 313 aa, unidentified
MDAIAPIVGIDVSKDRLDVHVRGPDDRFDVPRDTEGIAALVERLRAVAPKAIGLEATGGLEAVVVASLAEAGLPVVVVNPAQVRAFAGALGKRAKTDAIDAAVIAHFIEATAPEIRPLQDAETRLLAELVARRRQIVAMMTSERQRRAGAPERVRKSIDRLLKALARELDSLDGDIDGAVRRSPAWREKENLLTSVPGVGSVIARTLIAELPELGTLDRRAIAALAGLAPWTRQSGRWRGKSFIGGGRASVRTALYLGALVASRHNPALKAFRDKLVAQGKPKMVALVATARKLLTILNAIIRDSTPWQMQDA

SEQ ID NO: 417663 - protein, 348 aa, unidentified
MNTTTVGLDIAKSCFQVHGVDAHGKATLQRQLRRAEVLRFFANMPACLIGIEACGSAHHWARKLGELGHQVKLMPAQFVKAYVKTNKNDARDAEAICEAVARPNMRFVAVKTVAQQELLMLHRIRQRLVMDRTAKANQLRGLLGEFGIVVPQGLHRLQRAMPEILADAENGLSCRLRERFSQLFSHLRELNASILEWEQQIVAWHRENPLSQRLDKIPGIGPLGASALVASIGDIRTFKSGRQLAAWLGLVPRQDSSGGRTRLLGISKRGDRYLRTLLILGARSVQRQMQRHPARAAQSWLGRLSARSHPHIAAVALANKSARIAWALLAHEREYQADYRGRMARAPV

SEQ ID NO: 417664 - protein, 355 aa, unidentified
MKRGSSAVPKLTTGLDVGDRWTALCAVDETGAAIERGRIATTPAGVERRFRQGPVQRIVLEAGKQSPWMSRLLASWGHEVIVANPRRVRLIAAAANKDDPRDAETLARLGRLDPQLLRPITHRSAEAQQDLAVVRARDALVRSRTLLINHVRGVVKSLGSRVPRCSAHAFARQADRVVPDALRPALAPMIAIIEQLTGEIRRQTRAIEALVQTRYPEALPLQQVKGVGPITALAYVLVLEDPTRFATARSVGPYLGLVPRRRQSSRADPQLRITKTGDGLLRRLLVQSAHYVLGPFGPECDLRGYGERISARGGKNAKKRAVVAVARKLSAVLYHLWVTGEAYEPGHGAAPKVAA

SEQ ID NO: 417665 - protein, 341 aa, unidentified
MRLRKVTSAETKGKSFLLEEFDHYVALDWSQETMAIAHMRRRDKEPVVFERGSELKVLKQYLRTLHGTIVLTFEETTTAQWLYLELREEVDRIVICNPYMNRLLSAGPKTDKIDAAKLCLLLRAGLLTEVFHSDNSLYELRLLVSAYRDLVQASVRALNQRSALLRGHGDSGTHAPFILEHLDKSLELYRHAKQEYQAKFEDFCRHNKQLKLLLPVSGIGTIAAVTILATVVDARRFPRTGNYLSYCGLVKLEHSSGGRSYGRRKPQYSRSLKAVYKMAALAAIRGNNPIREYYEVLLARGVAKHHARHQIARYIATVTYGILKTGTTYNPYQWRTYTKVA

SEQ ID NO: 417666 - protein, 401 aa, unidentified
MIAVGIDVSKSKSTVSILNGDGSIRAKPFDVHHVADELQALVDYIKRTSEPPTILMEPTSHYHYPLLKAFTEAELPVCLINPYQMKKYGDTELRKAKTDKRDSLRIAQYALEKSYSLIPYTPQDQKYEDLRFLSRQYSQRISTLTVAKVQLLSLLDETMPGITTILPLKSRDPDNCVLLRFIKRFIKRFKSFDVIRKMGKTRFLDSYQVLVKKTKDRFAGSKGLAIYELVLNSVTTREENPLSAMTQDQCVDLVSTSQKAADEINLQMRIIAETMPEYKVLRSMAGVGDRLGPIILGEIGDIRRFHSGKALNAYAGNDAPPYQSGQFESRNRHISKRGNPALRKACFEVMQALKLTKPQDDPVYLFLLKKEQEGKPYNVAKMAAVNKFLRIYYARAMELYK

SEQ ID NO: 417667 - protein, 359 aa, unidentified
MKTSVSKKQRFFNEINLTEHDDLYVGIDVHKANYHVAFYLNGAHAIDFITPADNAKLCTTLEKLKPAIKNIVYEAGPTGYSLARQLQQQSFPVHVIAPSKTPQYSARDSKTDRLDGRQLAEYAAKGLLRSIAIPTPRQEAIRQLPRLRNQFVVKLKQTKLQIKSFLLQYGIPQPEGLQHWSRIAVEKLKTLQLLSQLRYSLDTLIQEYDFLNEKIKDIDRKLNEAFAEKSHAKKIAILQTHPGVGSVTSMMFTAELFDPKRFNNTTELAKYVGLAPTIIQSGRTLRDGPITKTGRPQLRSTLIQAAWVWVARDHQAREVYLRILRNTGQKNKAITAMARRLAIHLWKMLCNNEPYRKTA

SEQ ID NO: 417668 - protein, 449 aa, unidentified
MGNCAGIDWASEKHDVLIADDAGNALLGETFAHDESGITALCDALVCFEVEVVAIERPDGVLVERLLEAGVQVLALHPNQVKAARDRFRASGGKSDRFDCFVLCELARTDRHRFRLLDPDSDQTKALKALTRAREDLVAARVALANQLRAELERFWPGPVGLFSSIDSPISLAFLTRYPSPADARGLGEKRMAAFLKAHHYPMSKTPAELLQRLRSAPSGCAGEIETRTRRQIVLRLTRTLAVMGEQIRELEAEIAAALDAHSDGEIFRSFFRSRDSVICAATLLAEIGDCRDRYPHRDAIAADSGQAPVAVESGKRKNAKFRWACNKRLRNALSTLAHNTRRWNPWAADRYANARQRGHNHRRALRTLGRAWARILWRCWQNRTPYDPERHTGLQQHITVTIPDLSGPRPDVPATQRMAGAAVTSQAARRAERAALDSKPSAAIPAPA

SEQ ID NO: 417669 - protein, 395 aa, unidentified
MANGNGVSRGDRNRNARLGRLRELVPLENAIVGIDLADKKQMVVVTDHDSKVLARKTFRCRAWDLGAALVWAAEKAAAKGFAQVTVACEPTGHRWRVLGQLAEQRGMPFVCVQPMLTSWARRTEDLTFDKTDEKDAVLIARLTAQLRCYVPEPVDETWGRLRHLGARRQQLITDAGSQVQQMRALLECVWPAVLDTAKQPFRSATWAAALAVVVDLDCGDLTRTRRLGLARFEHAVRREISRQGKQKPCLRIVRAVFTALADPAGVSAHRVGALERVALLLGDWKQTQLRLADTEARMTSVLDELQLTALATSIIGLSAIGAAAILAETGDPRRFATARALVKHSGLAPREKLSGTFIGRTKLTGQGRPAYGLRPGGPCGEHNARIPSTQPGLAT

SEQ ID NO: 417670 - protein, 345 aa, unidentified
MLAEEVAYVLGVDTHTDSHAIAIVETGRQKVEGSVSIPATRRGYRQALRLARLRAPGQRLWALEGTGSYGSGLARFLDSRGERVLEVERPRREGSRGRLKSDPLDAERAARAALSGAAGAAPRLSPQTQALRALLVAREGAVTASRAARNELGALILTAPPELRERLQGLPRAALIETCARLRPGTDSERAAVALALRSLALRVRHLNEEAKGLEQELATRVQALAPALLARRGVGPICASWLLVAWSEPGRLRSEAAFARLAGVAPIPASSGKLVRHRLDRGGDRRLNRALHTIVLGLRRTDAETQAYIARRVSEGKTQREAVRCLKRYLARSLFRQLEAMPRA

SEQ ID NO: 417671 - protein, 381 aa, unidentified
MKIASGLDVHKDSVFLCILHENGEKIQQKFGVLTEELELMRDLMLSEGVEECAMESTSIYWMPVWRVLERDFKLHLVNPYFIKQLPGRKSDVRDAEWIATCLIKRLISSSFVPEEKIQRLRQYNRRIFDLSSSISRNLVKLDACVQRCNIRISNYVSTVDSKGYRTVVKILSQGITDPEVLVGELHGRTVNKHGREVLVGALTGVINDTDIDIISQLMEEIELLQRHKDEAQQKMTELCRQWFPQELENLQTIPGVKERSATSIIAETGTDMSKFQTPKHLVSWVGLRPRNEESAGKIKSRRIVHGNKFMRKTMIECTWAAPRTKGSFYSAFYQRQTIGRRKNKMKVQVAIARKLLTVVWHVLHDGCPYVPYKDLSTQGTL

SEQ ID NO: 417672 - protein, 337 aa, unidentified
MNEVTTIGLDLAKRVFQVHGADAKGRPVLQKKLRREEVLSFFAKLPPCVVGMEACASSHHWAREIRALGHDARMIPASYVKPYVARQKNDAADAAAICEAVTRPAVRTAPIKSLTQQALRVLHRTHELLSRQRVSLINAIRSHMAEFGVIAPAGPQHVGSLIERISDPKTPIPDAVRAPLGILVDEYVALNARINALEAEMRKSCRDEPESARLLSIPGVGPITVSAILAGVPNIRGFRSGRDFAAWLGLVPRQNSSGGKERLGRITKMGDRTIRRLLVIGAMSTIRWSRSKQNFAESWLGRIIARKPIKLAAVALANKMARIIWAVMTREETYRPA

SEQ ID NO: 417673 - protein, 356 aa, unidentified
MSYDVKYIGMDVHKEAIVIAVLNESGKLVMESVIETKASSILQFLHGLRGELHVTWEEGTWAAWLYDLLQPQVQHIVVCNPRRNALLKEGSKSDKVDARKLADLLRTGMLRPVYHGENGLRTLRELGRSYQTISKDLTRVMNRLKALYRGWGIACAGTQVYAARSREEWLSKIPQAGVRRRAELLYQQLDGLQALRRNVRPEFLAESRKHKAAKLLRQIPCIGPIRAARLLALMQTPHRFRSKRQLWTYSGLGVETHDSAQFRFVSGQLQRSKKPQQIRGLNRNHNHEMKEIFKSAATRASAGRGPFHDFYAGLLAKGMKPEMARLTLARKIAAITLTLWKKEERFDAEQLKTQAA

SEQ ID NO: 417674 - protein, 392 aa, unidentified
MLAREEAARPADSGINGHIFVSVEMSRSKWVIGLHTPLADKIGAHTVACGDVDAILELVRREDAKLERTGYDGSTVVVCYEAGYEGFWLYRRLGALGIRVVVIDPASLLVDRRAKRAKTDRIDARSMVRALMAFTRGEQQVLSEVRVPTVEQEDTRRVLRERQRLVQERTAHTNRIKGLLKTQGIMDFDRRAADAVARLDKIVTGDGHLLGVCLKREIVRELERLKLVMEQTSQVEAERDAVVEEGRQRKGAAAEQKRDTTMIAVLNRLRGIGTNDATLLVREAFWRDFRNRRELGGWSGLAPSPWASGSVSRDQGITKAGPPMLRAHMIQITWRWLCWQPDSDLSKWFQKRTEGATGRMRRTMVVALARKLLIALWRYATTGVVPNGAIVT

SEQ ID NO: 417675 - protein, 342 aa, unidentified
MATIVTIGLDIAKSVFQIHGIDAAGAVVVRRKLSRGRVLAYFEALPRCVIGLEACNTSHHWARELTALGHDVRLMPAQYVKPYVKRGKTDAADAEAICEAVTRPTMRFVAVKTPEQQSVMMLHRVRLMLNRQRTQLSNALRAHMAEFGVVAPVGRMGLERLLSIVADCADKRIPTDARVCLEMLVRQLAVVKTQVLENDRRIRESARATEVGRRLMAIPGVEPLLASAFVASVADPRVFKTGRDLAAWIGLVPKQNSSGGKERLGGISRAGNGYLRQMLVVGAMAVIRQAQRHGTRRAWLLQLLARRATKVAAVALANKTARMVWALMTSGEVYREPAVAAA

SEQ ID NO: 417676 - protein, 376 aa, unidentified
MSTIRFIGLDVHADTITVAVAEPNGEVRPMGTIPNRLESVRKLVAKLAPATQLRACYEAGPTGYVLYWQLTALGVDCQVVAPALVPTKAGDRVKTDRRDAAKLARCHRAGDLTAVWVPDEAHEALRDLVRAREAAKKDQLRARHRLGKFLLRHGRRPAERMTPWTSRYMAWIASQVHFEQPAQEATLLDYVHEVEHAAARIQRLEQSIDQAIATAPEEIRSVIDALQALRGVAKVTAVTIVSELGVLSRFANPRQLMGYSGLVASEFSSGKHIQRGRITKTGNAHLRRVLIESAWCYQFRPGVSGSLRKRQQTLPDDVKEIAWKAQHRLHARYRKLTAAGKNKGQIVTALGREMLGFIWAIGVQTESRRRSPAAAA

SEQ ID NO: 417677 - protein, 433 aa, unidentified
MIKINYMSTLFVGIDVSSKSNVVYAMDFDENKYIDASFGNNQPGADELAGKIAACIQKHPHLNTIIVALESTSVYSIHIANFLSSCELLMPYKPYVYCLNPKMTANYRKSYVGMDKTDHMDAFLISDFARVGRTKKCEPWRGSQYLALKRLTRHRLHLAECITREKTYMVSNLYLKFSELQLLDNDSQPFSNIYGATSSAVLTEFMSLQEIIDSPEEELLQFLASKSRNRIADISRTSELLKKAARDSYRLDKCMYEPLNVSLASSFNCIQTYQKEIKLIDQAIEKCINGMNPNAFIILKSIPGIGPVWAAGILSEIGDITAFHSSDALAKYAGLTWLKNDSGDFVSEDNRVSKAGNTYLRYYFGEAANSIRRYVPEYAEFYSRKYAEVTKHQHKRALALTSRKFVRLVFGLLVKNQLYTGEKLDAELNTESE

SEQ ID NO: 417678 - protein, 343 aa, unidentified
MQIRSVGIDLGKTTFHLVALGASGKVLVKKKFTQKQLLAFTANMQTALIGLEACSGAHFLGRALRQQGHDVRLIPAQFVKPFVKSNKNDFVDAEAIAEAVERKNMRFVPIKTDDQLDLQAIHRIRDRLVSRRTAVINQIRAFLLERGMVFAQKPAKLKAAMADVLENADNALTPMMRNMIGILWDEWKTVEQQINELTDRLEQIAESDAGCCRIRQIPGIGPIVATAIVAAIGNGAAFRKGRDFAAWLGLVPRQHSTGGKAKLLGISKRGNIHLRKVLIHGARAGAMRIKRDRFPIGAWMNALEARAPRNVLVVAMANKLARIAWAVLSTGEDYRPAASATVA

SEQ ID NO: 417679 - protein, 416 aa, unidentified
MNAAGIDVSSRKSTVAVLRPFGEVVCLPFDIAHNTEGLASLAAQLKSLDGETRVVMEHTGRYYEPVAKALHEAGLYVSAVNPLLIKEYGANSLRRVKTDKADAIKIARYALDNWADLRDYTPMDTIRYDLKTLNRQFQLASKQRTACSNNLIALLEQSFPGIRKCFDSPVRSDGTQKWVDFAHNFWHVDCIRKQSLNAFSERYRKWCKRHGYFFKQSNAEEAYALAKNAVVLVPKTEVTKVLIQEAANQLTSISRSVETYRTEMERLASMLPEYPVVMEMYGVGKSFGPQLMAEIGDVRRFERKQALVAFAGIDPMPNQSGEKNVRSNKSSKRGSPYLRKTLFNVMGIYLKCAPKDEPVFQFLDRKRSEGKPFYVYMTAASNKFLRRYYAKVRDYLATLEDLPPVNMDSTGLQESN

SEQ ID NO: 417680 - protein, 420 aa, unidentified
MKPSLEAEFTAFIGIDWADSKHDICLQAADSAQREFDRFAHRVDRIERWACAMRQRFGGPIAVALELSKGPLVYALQKYDFFVLFPINPSMLAKYREAFKPSRAKDDPTDAQLALDLLLHHRDRLNPLQPQTAQMRMLLYLVEQRRRLVADKTRFTNRLGHALKQYFPQALDWFDQTDTPLFCDFLTRWPTLAQVKRARNASLEAFFQAHNVRFAKLVEERISAIKTATALTEDLAVVTAYQLQALVLVDQLRVTLQAIARFDAQIATIAPTLPDYALFRALPGAGPSLAPRLLVAFGEQRERFAGAGELQKYSGVAPVTERSGNKRWVHWRWQCPTFLRQTFVEWAAQTINKSFWAGAYYRRQRDQGSSHQTALRALAFKWLRIVYRCWQTRTPYDESTYLNALKRRGSPLLKAIGATT

SEQ ID NO: 417681 - protein, 288 aa, unidentified
MSQNLNSAIAVIGIDIGKNSFHVVGLDGRGARVLRQKWSRRQVEARLANMPSCLIGMEACVGAHHLSRKLKALGHDARLMPAKYVRPYSKGQKNDFRDAEAIAEAVQRPTMKFVATKTAEQLDLQALHRVRERLVSQRTGIVNQIRAFLLERGVAVRQGLRFLRAELPRMLATPPDVLSPRIVRVIEGLAEDWRRLDQRIDHLSDEITVVARQDAGCERLVSVPGIGPIISSAMVAAIGNGDAFSKGRDFAAWLGLVPKQISTGDRTILGKISKRGNRYLRVLFVQAA

SEQ ID NO: 417682 - protein, 428 aa, unidentified
MLKQNTEPDPAPDFAAFLALDWADEKHAFRLQVVGQNKIETGTLEQKPEVLGPWLAKLRERLGGRPIAVGLEQSRGALIHALMAYDFLVLYPIHPTTVAKYREAFKSSGAKNDPLDAGQILEILTKHQDRLHRLNPDTVETRLLGRLVEDRRKAVDLRTTHIQALGANLKEYYPQALELTHDNLKSRLAGDLLIKWPTFEDFQQAKPSTIKRFYYGHNVRSPEVIERVLALADKSQALTTDPAIVESGRRLTQMYARLIQALNPAIEDYDQRIQRVFDAHPEAQLFSDLPGAGPALAPRLLAFFGTDRSRYAAAFNVQSFTGIAPVTKSSGKSKVVYARAACPKFDRQTFHEFSRLSVPHCQWARNYVQYYTDKGKKYHTIIRALAYKWIRILFKCWQQRTPYNEDKYLETLKLRGSIFATWHLQKNS

SEQ ID NO: 417683 - protein, 350 aa, unidentified
MCQIEDERGPRRLLSKPEQLRGYLQPAPQGWDKVMEKPSRFVGIDVSSRTLEVSCGSGRECFQTGTDAAGLHVLIARLGPPAGVTVGLEATGGYERAVIAALSGAGFAVRLLDPARVRRFAGAVGLKAKNDRIDAKVIEAFTQAVAGAPVKPDARLAKLREYVAFRRQIGEAVTALQNERRLLVSPELRQMSRDRELLLLRQREAVQHGIAGIVAGDATLTALFDLLRSVPGVGPVMAWTAIAELPELGRIDRRHLAALVGVAPFDRDSGKHKGKRSIAGGRPSVRNVLYMATLAASKANPVIAAHYRKLRDAGKPAKVALVACMRKLLSILNAIARDNRPWTPEPAKAR

SEQ ID NO: 417684 - protein, 407 aa, unidentified
MNPLYVGIDVSSKDNVVYLMKPDGTKIKNFSVPNSKDGSKRLVKEVLSALTSFSLTDVIFGLEATSVYGDNLVYFLREDGSLTPYNRKIHVLNPKQVNKFKESYNDLPKNDYVDSFIIADCLRFGRINKEVYLDDYRYKALHNLTRARYVTVQNLTKEKQRFINVLFKKYSSLAQEKVFYDKFGATALAVYEEFDSADTLAYMDLHELTEFLQKKGKNHFSNPEEVAKAIQKAARSSYRLPKTVNDSVNQVLAISISAMRALEAQIKEFDKAIAAQMQLIPNTLTSVKGIGAVYSAGIIAEIGDINRFPDQAKLAKYAGLSWTQHQSGGFEAQNTRLIKTGNRFLKYYLGEAAMSLVRCDAEYSRFYHLKYNEVNKYQHKRALALTARKLVRLVFRLLKDNRLYMER

SEQ ID NO: 417685 - protein, 329 aa, unidentified
MKKQFIIGADISKLTIDVHCHGQTEVMTLSNDAKGYKQLLRWLKKHITTDFSSVIVVMEYTGIYTYNAERFLHGHDIDYVKRPALDIKRSAGIKRGKTDKADAMMISKYGWQRREELKPMKPVSDTQQQLQQLMAYRDKLVADKASYQSRLKELKGQMRENMNTKIAESTEYIMQVLAEEIKQTEASIEEVISTEKNIQTNYNLLTSVRGIGFVNAVHLLIVTENFTRFTEVRKFACYCGVAPFECKSGISIRGKTKTSHLANKKIKSLLTMAAKNAINHDPDLKAKYREKVKEGKPKKVALNIIRFKIIERVFAVIKRQTPYILSQAA

SEQ ID NO: 417686 - protein, 404 aa, unidentified
MDVINERCCGLDVHKKTVVACVITPEGQETRSFSAMTRGLLELADWLVAHRVTHVAMESTGVFWKPIYNLLEGLDLTLLVVNARHIKMVPGRKTDVKDAEWIADLLHHGLLRGSYIPDREQRELRELVRYRRNLIRERARTVNRIQQLLEGANIKLSSVASNVVGVSGRAMLEGLVAGQEDPEALAGLAKGQLRAKRPALEEALRGLMGAHQRTMLQSQLRHLDFLDGEVAQLDQEVAQRVGPFEDAVRRSDAIPGVGRRVTEEVLAETGLDMTRFPSSDHISSWARVCPGNYESAGKRKSGSTGRGNPWLRSALVEAAWGAARTKNTYLSAQYHRIAARRGAKRAILAVAHTILVILYNMLKHGTSYQDLGANYFDQRDQQGTLRRSIRRIERLGYKVNLQPA

SEQ ID NO: 417687 - protein, 344 aa, unidentified
MNSVPFYVGIDISNDDFAASIFTDPEISIKTLTQIPNEFSGFEKLESWLIENQVQTDNCVICLEATGVYGESLCYFLTAKGWLTAVEPPLKVKRAFSDKGHKNDKVDSKKISEYAYRYYDELQFWRPKANIIEQIKVLLMTREQLVGQRTASSNTLTILRKKVVQTPLANEIYQKNVERLSKQIKKIEKELKKLIDKHPDFKRTVTFLDSIPGVGMLLAANFLTVTNGFENEMAFQYRKAAAYIGICPYEHSSGSSVYKRPRIPKYGPAKLRKLLHLAARSIVTHNEQFFLYYQQKIAQGKEPKLVLNNVSNKLLKIMCAVIRTQKPYVDNYMSIHPQFALINP

SEQ ID NO: 417688 - protein, 323 aa, unidentified
MTTIYLGLDISKEKIDAVTNQTPHITVSNDAAGYRSLLDYLHGHQINTSQIHACCESTNIYYLGIAQYLYSHHIRISVVNPIAIKAYAKMQLRRVKTDKQDAKLIADYCRIEQPQAWQPESDGKRQLKVIHRRIEQLMAICVQEQNRLQVADECVRPSIEQLIDTLQAQIDQCRRQMQQVIDNTQDLRQKQQRLETIPGVGRSTAQILLSVLIDLDKFETAKHLISYLGLSPVIRDSGKFSGLQRVSKMGNRSVRTSLYMPARAACTRSKLWRGWFDYQVGRGKHPKQVYVMMMCKILRYAYVCLKTDKPFDAEMHQKALKNG

SEQ ID NO: 417689 - protein, 408 aa, unidentified
MNPLFVGIDVSSRNNVAYLMKPDGSKHSSFSVQNNLGGAKILSERIVSALESVPLSDLVIGLEATSIYGDSLVYALREDGSLGRFQRKIHVLNPKQVRKFKEAYPDLPKNDWVDAFVIADHLRFGRIAKEVYMDDYRYQALRTLTRSRFDIIQNLTREKQRFANYLFLKCSGIAQAKDIQNTSATTIALMERFETVDDLANADLDELTAFIAETGRGRFADPDAAAKAVQAAARGSYRLPKTVNDTVNQAMAVSIASMRALKEQVKVLDKAIEQQFEIIPNTLTSIPGIGKVYSAGIIAEIGDIHRFDSQASVAKFAGLVWHRNQSGDFEAEHSQMIKSGNRYLRYYLLEAANSVRRCDSEFRRYYDLKFKEVNKYQHKRALALTARKLVRLVFRLLKDNRLYILPEG

SEQ ID NO: 417690 - protein, 400 aa, unidentified
MKTVLSVDVAKNKSMIMLMNSDGEILIDTREIKHNLQDFDKVKEQINEINPENLTVFMESTGTYHLPVERYFKENGFNTLVINSLTTKNNFDTIRKTKTDKKDCYRLAKLFFVNEVEYHEISKKDLYANLKAMTRQYFYLTQVNIRCKNRYKRLINICFPEFEGFFARNRIYEDTALNFIKAFPHAYIVREKRIDALYNNLRKVDARHDYYYKRLARQLKDTAINSFPGVDKDHADVKNLSDMASILQENNRLIDEIRKNMIELAKQSPYFEIVNSFYGIGEVLAAELLGELGDITRFDNHKQLIAFCGLDPTIIQSGKSINVHGAISKRGNKYARWILFNISQMVVKLGHQCPEHPVYNYYLMKKAEGKHYYENLTACSTKILRMLYSMCKNNKQFLEK

SEQ ID NO: 417691 - protein, 370 aa, unidentified
MHDDTTAFVGLDVHKEAIAIAVADPGRAAARYLGAVRPALIPLTKALAHLGPPKSLALVYEAGPCGYGLARRLLKLGYRCEVVAPGKIPHRPGERIKTDRRDALTLASFARSAELTPVLIPDERDEAMRDLARAREDAVRARLKARQQLKAMLLRHGHHYSGRIFWSAAHQRDLAKVSFPHPAQQIAFTEYRLAVTEADERVARLSAALREQAETWRLQPLLNALMTLRGLQFLSAATVLAELGDLRRFPHPKQLMSFLGLVPSEYSSGLSRRLGPITKCGNAHIRRVLIEAAWSYRYPARLSRELQLRQQGQPKAVRDIAWKAQLRLCARYRRMQARGLHQNKTCIAIAREMAAFIWDIARHVPIAPAP

SEQ ID NO: 417692 - protein, 378 aa, unidentified
MKNDIRYAGLDVHAETIAVAVVEPDGEVRFLGTIPNRPEAVRRLVKRLGPATQLRACYEAGPTGYVLYWQLTGLGVHCDVVAPTLVPQKPGDRVKTDRRDAEKLAVLYRGGHLTPVWVPDQAHEALRDLVRAREAAKSDQLRARHRLQKFLLRHGRRPPQGIKAWTQKHLDWVRREVHFEAPAQEAVLVDHLAEVEHARERIRRLEGAIDTAVEAAPACLRAVIEALQGLRGIAQVSAATIVSEVGSLSRFRKPRQLMGYSGGVPREDSSGERVRRGGITKTGNAHLRRIVGEAAWSYRHRPTVRGELLKRQAGLSEEVKAISWKAQHRLYSRYRRLIGRGKTKQQVVTAVARELLGFIWAIGVHVEQQHGTAARRAA

SEQ ID NO: 417693 - protein, 532 aa, unidentified
MRNRLRRKPNVTNIISPSNFLEGVVFAMSNNPDVSDHPIFPDATELKGTEVIIHTEGDQGVEVQVLKSYGCGLDVHSCFIAVCVHVRNNNRVFKYMADFNTDWNSLLAAKQWVIDTIRKYSNPVPDMRQPLHYVLEATSTYHMPILRAWGDVPSVINPMLAGATKKKTDVLDAERLSFHDLTGVWPESFVATDDLSELRVLLAERNHYAKLATQCSNRINNIIVRFGITVGRGTSVTRNPDVRAIVEDLASESPSVYDNLCPDPLPSEIKVLIQKEYRLYDQYIVEAENYMFRVRQKVYSMDWETKDSTLPGSRMVDILCTTPGVGEISCFTWLAYVGTPRRFPNAKALAAYCGLDPSLKVSAGKVTSTKKRGGCRVLHAILATSADRIIRAHSEAFGRWGYLMAKSSGKWGKATNAVGRKLCVAMYHMMMTGMPFSYENYHIMDKAAVFDISIDELPMLNPDFKRYIKILHENGIHSTVDLITAYLTCSLAGTKGLGNKFFAVIRGFLQHQHKYQLEYKKLHPTAKVVEIQ

SEQ ID NO: 417694 - protein, 411 aa, unidentified
MNWEEEMVNVGIDLHKTQFTICARRKGGEEFNKCPTQEEGYQEFLAQVTKWRESGEEVRVAVESTGNTRYFKNRMEGAGIGVTVINTLKMKVVNESVKKTDKHDAATIAEFLEKDILPQSQLCSRESEKLRRFLKVRTSLVKTTTVMKNQIHALFLSEGLEDVKSSALQSKKGRKETLATLNQCTNGLVAQPLVEMIDRLEEEVNGIEKELRTLTKEDRMVELLMSIPGCGEICAWTIRAYIDDIKRFNDPKRLVSFAGLAPWVQNSNETIHHGKITKRGPKELRTAIVQVVMGLRRMKEKTVTWRLMQRYVLLKQYKGSGKAIIATARKVAVIIWHMLTKDEMFKLEMITDKKLGEKAEDMRKVAMGEKSDEKKVDEPQIEKQGKPVKDKGSRKAVKKTGVARKKNIKVG

SEQ ID NO: 417695 - protein, 463 aa, unidentified
MSRKSTRKAHKKVVALAEGEGRRKNGPVMGVDVHKNVLAWCVVGEVSLIDEGELPNTLEGIKKLQAVIKKRQVTSVAMESTAQYHFKLLYALIAAGTNVLLANPQQTKDTQGKKTDKLDANRIAIAHRDGRLKPSVISPQEIMSLRKAMRAHTRMVEDQTKIKQRLAQVFHQKDASFSTMLATNWGTEILKGLFDKDDVDSLIDKYLPRGRVKQRDELVTALARFKESMDEVERQVFRSEVEMLCFMEYQKERLQLVYCQICKQNPAFKRTMQLLISIPGIGPDTAAKVIAEIVDIAYFPSPKQLVKWAGLAPRVHQSGHRKNITGHIHKGGNKHLRRAVVLACQNIYAIGKADNPLHAFARRKKEEKDAYWLALCAAARKLLVTIWYMWTGGKPWALKKSAATLETSVKRVVDAKIAMLERSVQRYEKVRDKLALDATEALRATDPGGLSPKRLVLALLESV

SEQ ID NO: 417696 - protein, 449 aa, unidentified
MQEPQEVFDGEHEQVLARVAAIDVAKASGMVCTRVPHPEVAGRRVSKVWSVSATTNAILELANHLVELGVERVTVESTSDYWRPFLYLLEASGVPVWLVNATEVKNVPGRPKTDKLDAVWLAKLTERGMLRPSFVPPTEIRVLRDYTRLRADLTVERSRHAQRLEKLCEDALIKLSTVATDMMGVSGRAMIEALIAGERDPQVLAELARGRMRVKRAALVQALTGRFDAHHAELARMLLDAYDSADAQIRRLSERIEALIAALPAAQGVDADGTTGPHAGSGPDAPVLPALARFDEIPGVGAKTAQVIIAEIGLDMTRFPTAAHLVSWARLSPRTVQSGPRHRAGKTGKGNPYLKGVLGEAAAAAAKTDTFLGARYRRLVKRRGKLKALVAVARSILTIVWHLIADPTARYHDLGADYHTRRTDTERRTRSHIRQLEALGYTVTLAAAA

SEQ ID NO: 417697 - protein, 499 aa, unidentified
MKTTKTNQSRRQPKTVAPVQARGEGKHRHRGEKKVDVLEDLELIHLHAAGIDIGSAENMVCVPARSVGATQSKVRSFGVFTQEQDDLVGWLKDCGVTTVAMEATGIYWLTLYDKLESAGLEVLLVDPHSVRHVPGRKSDVLDCQWLQQLHTYGLLRGAFRPAAAVRRLRTLSRHRADLVAEGGSHLQQAQKALVQMNVQLPLVVSDINGETGLRIIEAILGGERDPQALVKLRDPHIKKSTVAEMAAALNGHYTEELLFVLGQNIEAWKFYQQQMEACDQQIEAALKAIASADKSIAPKAPPKPVPPAEPGSPGAKKKRQRPLHGNNAPKVDFSEQIRRVCGVDLTKVCGLNLLNVLMIISEIGVDMSRWRNAKAFSSWLGLCPGTKISGGKKLSRRTRHVVNRASVLLRLAALAAGKTDTWIGRFYRRKRAHLGAPKAITATAHKLACVIYHMLKYQEDFMPLDVAVYEMKAHDRRVRHLRKQVEELGYELVERKEAA

SEQ ID NO: 417698 - protein, 360 aa, unidentified
MNAIHYIGFDVHKKTIAYCVKTADGQIVEEGTLQAQRMELRRWAKRRQVAWQGAMEATLFSAWIYDTLKPYAQQLSMGHPAKMKAITAGKKKSDCLDARTIADLLRCNLLPACYVLPPHLRDLRRLLRYRNLVVRQSVRMQNRMAGLLMESGAPFDRERLHRKKYFADLMKSLREVPESVKDLLRMSRGSMEIFESTQKQLIKRLLCDPVLEQRLERLMSIDGVGPITALTWALEVADPHRFSSVADAVSYCGLTAAFRSSAGKQQRGPISKQRNAWLQTALIEAAKLAPRWNPQLAAVHAQQRERGHANRATLQVARKLVAYLLAVDKNGQPFQVRTPPPPPKAKPRKRKQPAALASAA

SEQ ID NO: 417699 - protein, 370 aa, unidentified
MKTKLSDYELATIAYHRDTLGVNPVAVDVASRVMQVCYYDSDKKLLKNFQLTRSKFFEFVEKAPEPLLFGIEACGSCNYLSRYFESKGHQCRIIPASKVKAFLKLDKNDKIDASGIFKAMLSSVESIPAKSLENQLIMNLLTIREQLIKQHTQCINAAHGILYEHGIVAGGAGVETSAKITLGFTDAQESFEHDPMASAHFSVIKNAVFNILDNLKEQIDTINQYIQKYGSSNKTCLNLTTIPGIGLQTAVALNTALGDPERFHSARAFSAYVGVAPIITGTGGKITVMGIRKSGIRSIKKSLYMGAMVYLTYAVKNGTQSSWVKDRLKTKKKKVIICAIMNRLARIAYAMVKNGEVFDETKCNLIKNLR

SEQ ID NO: 417700 - protein, 462 aa, unidentified
MPERNDRERGESNRRQLQGLPVIRRNVAGVDLGSERHWVCAPTQDGSGREIASFGATTRELLRLGEWLKARQVESVAMESTGVYWIAPHEVLEGQGLQVLLVDTRQLARVPGRDKKTDPSDCEWMQRLHSCGLLRGSFRPEEAVCMLRTLVRDKANLVAESADWVRRMQKSLDQMNVRVHRAVSDIDGVTGMAILRAIALGERDAQKLAQLRDRRCSKTQQEIAEQLTGHWREDHLFSLQQALKMYDAVQERIAAYEQEILRQLEEMEEPGQRGQTPPPLNNANKAKAIKRRGQEAKRQALYRMSGVDITQIDALGVETVEVVLSEYGPDLSRFPTEKEFVAHVTLAPRVPRSGGKPLKKKKRNSASTRVAAALRMAALSLRHSQTALGAYYRKLAQRLGGDVAVFATARKLATLIYRLLRWGQPYVDEGAAAYEHRYLQQRIKSLTAKAKELGYELTAVNA

SEQ ID NO: 417701 - protein, 329 aa, unidentified
MEYFAGLDVSVKETSVCIVDETGKIVREVKVASEPAVLLAVLKNPAYRFKRIGLEAGPLSQWLFSALAEAGLPAICVETRHMQAVLKAQINKTDRNDARGIAQMMRAGLYRPVHVKTLRSQKLRMLLTHRKLLQSKAIAIENDLRATLRNFGLKVGMVGTVRFEARIRELVEDLPDLAVLVEPLLIVRQALREQFGILHRRLLAAVRNDEVCRRLMTVPGVGPVVALTYRATVDVPVRFRKSKSVGAVFGLTPARDQSGERDCMGTISRCGDEMMRTALYEAAQVMLTHSAKWSWLKAWAMQIARRRGMKKAIAALATPVGSDNAPHMG

SEQ ID NO: 417702 - protein, 315 aa, unidentified
MQVGKLIVGADVAKAELVIHHDDRDEIIKVKNTKPEIKKWLKQQPLNTAIAVEATNVYHLDLVELAHSLGFEVYVIDGFQLSNYRKSVGVRVKTDPTDARLLSRFLRIEGEDLRPWTPPPAVYGKLQSLLRRRAALVTARTAMTQSWANEALLKAAFTTFVKSIDRLDLLIQKKIKEVLREAGLHEQVARCQAVEGIGFLTATALVMAFMRGEFKSSDSYIAFLGMDLRVIDSGQKNGRRRLTKRGCSEIRRLLHNAAMSASRTATWKGIYEQHRNAGKATTQALVILARKLARVAFALMKNQDEYVTKGGKAPC

SEQ ID NO: 417703 - protein, 371 aa, unidentified
MSHVTSIGLDVHARSVSAAAFNLYTGEVVERRFGPEAGPIAEWVLSFESPRAVYESGPTGFALCRELRALGVDCVVGAVSKMQRPAADKRVKNDRRDAAFLARLLATNNVVVVPVPDAGVEAARDLSRALDDARENVQRARQRLSKFLLRRGYVFDERDSLGRRRCAWTAAWWSWVAKIKMPEPAAKAALDHYIEDVRHEESSKLKLEKLVAAEAARPRWAAVVAALRRIKGVDTVTAFCLAAEAGSFSRFRSAPAYAAWVGLVPSEHSSGEKVARGGITKTGNSATRRALVEAAWHFASCSPSPKPPKSGSEAVPADIERRCAKCTARLAARHRALREAGKRPCVANVAVARELACWVWEVGCRAEGTLR

SEQ ID NO: 417704 - protein, 331 aa, unidentified
MDEVKRFVGIDVAKAALDVFIGSAGAAFSVANDEVGIQELLRQLKPADFVIIEATGGLEMLVASALAAARIPVAIVNPRQVRDFARATGRLAKTDRLDAEVLARFGEAVRPEARPLANEQAQALEALVTRQRQLVEMLTAEKNRRARAPKILHRSIDEHIRWLEKRLAGFDDELAEMIRDTPLWRERDELLRSVPGVGKVLSSTLLAHLPELGALNRKQIAALAGLAPFNRDSGSLHGGRCIWGGRAQVRRVLYMATVAGVRSNPVIKNFYTQLRARGKYPKSALTACMRKLLVILNAMLHNKTHWQTPALTSPTSNLSPLLGAVSEHGCC

SEQ ID NO: 417705 - protein, 402 aa, unidentified
MNCVGIDVSKGKSMIAVMRPFGEVVVSPFEVRHTANELSELAGLLKSLDGETRVVMESTGNYHAPVAWLLHDAGLYVSVVNAMLVHDYGNNSLRRAKTDKKDAVKLANYGLDHWLTLPRYIPEEDTRLMLKICYRQYQQYSKVQTMLKNNLISLLDTTFPDANRLFTSPPRADGSEKWVDFVATFWHCECVCGRSEKAFTTQYQKWCRKHGYNFSQDKALDIYSSACGRFGVMPKTNTAKLLVEQAISQLQTTSSALAALKQEMQSLAASLPEYPVVMGMFGVGPTLGPQLIAEIGDVRRFHSKKALVAFAGIDAPPYQSGQMDVRSRSISKRGSASLRRTLFLVMGVLLQCAPMDEPVYQFMNKKRSEGKPYRVYMMASANKFLRIYYASVKAYLDSLEHD

SEQ ID NO: 417706 - protein, 347 aa, unidentified
MEHLGIDLGKRESQLAILTEDGELVEKRIRTERTRLGEVFGSRPTARILLEAATESEWVARCLEALGHEVIVADPNYAPMYAQRSRRIKTDRRDARALLSACKSGTYKFAHRTSDARRHLRALLAVREGLVRTRARWISLSRTLLRRDGFRIRSGAPESFLARVAELAVPAPLRAEIAPLLTLVAPVTDQIKALDAQLAALVHTDEVLQRLTTVPGVGPVTATSFVATVDDVQRFRGAHQVQSYLGVVPQEWSSSETQRKGRITKAGNSRTRWLLVEAAWTILRGRKQSDTAPLREWAERIRQRRGGPIAAVALARRLAGILYAMWRDQTEYDPAKLRRGGAVQRAA

SEQ ID NO: 417707 - protein, 478 aa, unidentified
MLAVYEYLPQNSLMFTALLSMLQVRLSLITNTQGLHLNACYIAFAELWYTCRTLMFSIGRGVMIMTNINGKFSVYIGIDWANKKHDICLQGKSDNRREFCIIPHSPEAIDKWINALHKKFKGQIAVAVELARGPIVYALQKYSFVTIFPINPSMLAQYSKAFCLSGAKDDPTDAEFALDLMLNYPNKIKPLKLQSNAMRKLTYLVEQRRRLVEDRRRFTNRLISTLKQYYPQLLDMFSHRDTPLFCDFISRWPNIQKLQRARTETIRNFFLSYGGSAVSSIEERIKTIVSAVPLTKDSAVIETHQLLAVALTNQIMTTVQAIKLFDKEIEAVFKDMPDASLFISLPGTGACLAPRLLVAFGENRDRFNSAADVQMLAGVAPVTERSGQKSWIHWRWQCSKFLRQSFIEWSAKSVHSSYWAEIYYQKQREKGNSHQSAVRALAFKWIRILYRCWKTRTPYDESKYLKALRDRNSPLLTA

SEQ ID NO: 417708 - protein, 353 aa, unidentified
MEQFIGCDAHKKFSVFASINERGEYGPTIRVGHEREVFRAFLRKLPAGSQIALETCGFYYWIVDEFEQAGHTGRLAHARTAKRRMGGRHKTNDRDARGLAMLLRNGTLPEVWIPPAQLRDEREALRWRMCLSQIRARVKNRIHGALQRYNLDICVSDLFGDEGRAQMLARLDELPANTRASVLDQLQLVDVLETQIGEREAAIKEMLYPSVERDLLDTLPCVGQVLSAVLALEIGDVKRFAGPAWLASYAGLVPAARESADWKKQDRCPRDCNVYLKWAYVEAANLISTHRKQWPERHAVQLYERVRNKTKMHGKAAMAVARHLAEASWHMLSKQQVYQEPRSRRPALSSTHG

SEQ ID NO: 417709 - protein, 331 aa, unidentified
MFPVGIDVSKDTLDLCMLYDGMKGRVKTRNIRNDRSAVAHILRWLRLQHCGPEDVHVVMEATGVYHERLATSLHDAGFFVSLANPHRSREFARGMGIMTKTDKVDAYMLACYALLKKPHRWEPPAADIRFLSALLRRRDVLLADAVREENRLEKYQSTDTPADVVSSCIRMAQLLREEVRSIERQVKAHIQSSPDLKRDYALLTSIKSVGPQLGMHMLVVLRSHHFESADQAAAFLGVVPVEKRSGTSVRGRPRMSKIGPPQLRAKLYMSALCGKIHNKRMRTVYEEMCLRGKPKMVAIGALMRKLVHWCYGVLKTGTAYCDGGPYAALNT

SEQ ID NO: 417710 - protein, 415 aa, unidentified
MDVLFRVRIQGKECVERTTAANHLERNQKLMFYVGIDIAKTKHDLACMDETGETVITNFRFANSYQGFHQLKIKLEQLSPITQDVQIALESTGHYNYNIVAFLREIGYNVFAYNPFIIKQFAKSQSLRKTKTDTKYTLLIARKLRSDVTPDYYQTDKVMDELKELTRYQNRLIQSRSKCKNLYIRLLDIIFPEINSYVSNLHSHFVYELLTKYPSAQKIARARVSSLLKIKRLTADKAHQIQEIAKQTIGNTSTVLSLELVQLIESIKHYDKQINQVQEEINLLMIELNSPITSIPGIGSRLGAIILAEMKTIHNFRNPNQLQAFSGLDPAIYQSGQMDNTGHMVKRGSSYLRYALIQAAKLISIYSPHFKAYLKLKISQGKHYNVAVTLVAKKLIRVIYHLLKTNQTFDEAKLR

SEQ ID NO: 417711 - protein, 420 aa, unidentified
MKNWNELTHYAGFDWASNHHDVVIVDSAGQVIVQFRFEHSVEGWEQFRQKTKTYVGLGVAVETRSGAAVEELLRSDCTVFPVQPKAAARYRERKSPNGVKDDELDAWALADALRMDGRTWRALVPEDPMIQELRLLCRDEVALIQQRTVLVNQLRAALHEYYDTALQAFEDWTLPAAWALIVQFPTPEELTKAGQRKWEKFLHVHKVWRPETVQKRLELFAHAADWKRNTSVTRAKSRLAVSLAKMLQTLGRQLDEYRAAIEALFRQHPDHDLFGSLPGAGGKLAPRLMSELGADRARFDTPQSLQCLAGTAPVSFQSGQIHRVRMRRGCNAHLRHAVHLWADCSRAACGWAQAYYQAQRKKGKSHACALRCLGHRWLDVLWKMWQTHTNYDGDLHARNQQKHGSWVIQILTPSAVKLCE

SEQ ID NO: 417712 - protein, 359 aa, unidentified
MKIVGCDFHPSYQQIAVLDTETGEVVEKKLMHAHGEAEKFYGELERPALIGMEATGNALWFELLLQKFGHQLWIGDAAKIRASYVRKQKTDKRDAGHILTLLTEQRFPRLWLADSHQRDIRQLLIHRHNLVGVRTRLKTELQHLALNQGVQKKRQLWNEKGRVLLSTLALEGWTRQRREDLLQLLAVVEPQIAQLDKAVEQAARASSQAVLLMSQPGVGPITALAFTVTIGEVARFPRSKQVASYLGLIPSEHSSGSKRRLGSISKQGNVFLRTLLVEAAQSAVRHDPDFRKEYQHRCHHKAKGVAKVAAARKLAVRLYWMLKSNKPYPEVLLIEGSPRHPVAAKAKAVQLNGHPRISH

SEQ ID NO: 417713 - protein, 358 aa, unidentified
MEDSKKEADRTVGLDLGDRQSHYCILDTQGASMEEGRLATTKSGLEGRFGACARMRIALEAGTHSAWVSALLSALGHEVLVANPRKLRAIYENDSKSDKADAEYLARVARLDPKLLSPLTHRGEETRRDLAMLRSRDALVCVRTQLINHVRGSVKPFAGRVPSCSSNAFHTRAVEGIPAPLEEVLSGVLETIETLSAQIKVYDKRLEAIAEERYPQTALLRQVPGVGPLTSLGYVLVLEDPKRFKSSRSVGSYLGLRPRQGDSGSIRPQLRITKAGDVLLRRLLVNSAHYILGHFGPDTDLKRWGLALAQRGGKSAKKRAVVAVARKLAVLLHRLWITGEVYESLRKASKPVPQKLSA

SEQ ID NO: 417714 - protein, 373 aa, unidentified
MMFKAWVEDIAEKQGKTAVIPGMEPTGHYWFALGKFLQDSGMKPVHVNPHHVKKSKELDDNNPNKNDRKDPKTIAALVNEGRFSYPYIPTGIYAEIRSLSNLRFQTQEELTRIKNRIARWFAIYFPEYKDVYGDLMAVSGRMILKEAPLPEDIRILGVNGVNQIWRNAKLRGTGMKRAKILVSAAEHSVGSKEAPEAARIELKNLLNDMDVYVSRMEELLQTIEEKLKTIPYVDKLMEIKGIGLITVSGFIAEVGDIGRFDNPKQLQKLAGYAIVANDSGKHNGESRISYRGRKRLRYVLYEAAISLVGKNAEFKEIHEYYRTRKENPLKKMQSVVAVACKIIRVFYTILTKGVDYDPMKLMSDFSRPQLLAA

SEQ ID NO: 417715 - protein, 419 aa, unidentified
MSKRRYSATEFNRVNWAMIREQVAGQRAVFAVDVAKEDFLGTLFDAQRRALVTVKWTHPQNTRALVQQLERLRGQLDVVMEPSGTYGDALREQLARAGLSVYQISPKRVHDAAEIYDGVPSLHDAKAAYLIGRLHLEGASQAWRTPTELRRALAAQLNLLQMYKVRERASLNRLEAQLSRHWPEAIHVLEPSSVTLVKLIAVYGDAAQVAAQREAARALMRSTGRGALREEKIERLLASAGDTLGIRCIEAERRLLQTLAQDVLDTREKLHELERDLQRQVCADATLARMAAVVGEITSAVLVAALGVPQNYADVASYLKSLGLNLKERSSGKHKGQLKITKRGPGVARFYLYYAVLRWLNDPVIKSWYQRKVQRDGGMKGKAIVALMRKFSKALWYVAQGAPFEPRKLFNIQALEIAA

SEQ ID NO: 417716 - protein, 424 aa, unidentified
MKVTYQTCCGVDVHKSFLVATIVKTTGGIEPSYQKKRFSTFNNSILEFKQWLLDNDCHDVCMESTGKYWVPAFNLLEDEINVVIANPKWVKAVKGNKDDTKDSKWIGDLFRLGLVKGSYIPCKKVRILREYTRYRYKLVSCRSSEKNRYQNALTVCNVALDSVVSDIFGKSSTSIIDYLLEQSGSSINHEEIASKLLRSLKSKEDAVIESIEGYQMTDAQKYRMRLVRAHMDYITAEINDVDKMIENMISSNTDFENAVQFLCTIPGVKRDSAITIISEIGTDMSQFSSSRRLCCWAGLTPGSNESAGKKKSVRITRAGVYLKPALVQCAHAAVKSDKSPYYKKKYESLVKRRGKKRAIIAIARMILTAIYQMLSTGEQWNPSDLYKIDMPVALVEKQKAKAIRQAKKLLQREGTLPPDKPLAS

SEQ ID NO: 417717 - protein, 351 aa, unidentified
MAKDIEVVSQVIGVDLGDGHSQLCVLDVGGEVLEESRVPTTATAFTRRFVGQPRSRVVLETGTHANWVHDLLAKAGHEVVVANARKVRAISANERKSDRVDARMLARLGRADVALLCPVKVRAQDLRQDLALVRARAALIVSRTMLVNCARGLAKAAGHKLRSSSAASFHKQELHETLRAALAPMLELLEQTTDKIAAYDKAIDRLCEERYPQTKLLRQVKGVGPLSALCFVLTIGDPTRFRHARDVGAYVGLVPRRDQSGGKDPQLRISKTGDPMLRTLLVQCAHHILGRFGADCDVRRFGLKLASRGDKNAKKRAVVATARKLSVLLLALLRSAEVYEPLRNQALAKAS

SEQ ID NO: 417718 - protein, 355 aa, unidentified
MSSEKYIGLDVHQAMISAAVMDGQGKVVMESILETKASTLVEFFAGLRGSLFVTFEEGTWAAWLYDLLKPHVSEVLVCNPRKIPLHKQGNKSDKIDARKLAERLRLHDLKPVYHGQTGIRMLRELARSYLTIVKDLSRVMNRLKALYRSWAIPCAGRDVYYRRHRSEWLNKIPEAGTRRRAEQLYQQLDLLQPLRQQARRELLAESRKHAITAKLRKIPSLGPIRSALAVALIQTPHRFRSRRQLWTYSGLGLETRDSGEYHFVKGQPQRRKKQATIRGLNKDYNHDLKGLFKGAATQASVKPGPFQEFYQRSLAKGIKPTMARLTLARKIAAITLTLWKKGEDFDIEKLKSQAA

SEQ ID NO: 417719 - protein, 318 aa, unidentified
MLRTFIGIDVSQDHLDVHVRPAGLRRRFANTTAGIAELLAWVRPQAAERIVFESTGPYQKAAVGALLAEGLPAVVVNARQVRDFAKAMSYLAKTDTIDAAVIAHFAEVATTTVRPLEAQEIRDLRELYDRRSQLVHMLAMEKNQRHSATVAQASPKLLKSIEQHIAYLQKRIEDLEERMDQIIESSATFRARDAILQTITGIGPQVSRTLLAYLPELGTLNRQRLAALVGLAPFNDDSGTHSGQRHIRGGRSKVRVGLYQAAIAAIRHCPRMKAVYAALKARGKASRIAIIAVARKLLVLANAMVRDMQPYKAPPNSV

SEQ ID NO: 417720 - protein, 402 aa, unidentified
MNAVGIDVSKGKSMVAIMRPFGEIVSAPFEIKHTASDIHSLVELINSVEGESRIVMEHTGRYYEVLAHQLSEANLFVSAINPKLIKDFDNDSLRKVKSDKADAVKIARYALDKWQNLKQYNVMDELRNQLKTMNRQFGFYMKHKTAMKNNLIGILDQTYPGVNTYFDSPARSDGSQKWVDFASTYWHVDCVRKMSLNAFIDHYQNWCKRKKYNFSQSKAEEIYGKAKELVPVLPKDDITKLIIKQAVDQLNSASTTVESLRTLMNETASKLPEYPVVMAMKGVGTSLGPQLMAEIGDVSRFTHKSAITAFAGVDPGVNESGSYEQKSVPTSKRGSSDLRKTLFQVMDVLIKTHPQDDPVYQFLDKKRAQGKPYYVYMTAGANKFLRIYYGRVKEYLSSLPES

SEQ ID NO: 417721 - protein, 371 aa, unidentified
MKKRIKIEKTRRIESRKNDSYYIAVDIGKRNCVVCVTDKDGSILEETKYDNTLQEAERFASNLDKKYSNRKCHAVCESTANMWLKTYEAFEKNGIDVKLANPMKTKAIAEARIKTDKLDARVLAHLLRSDLIAESYIAPDKVRDDRSLLRLRINLVSGRTRVMNRVHSLLDKYDLKCRYEHIFGVNGIRWLKNIELKGNDQIQLANYIHSIEFLNSEITQIEKQISSEASNNEDVKILMSMTGIECFSAMLISSEIGDISRFRTAGKLVSWCGLCPTVHQSGNSLYMGRMKKDGNKKINWIMIQAANTASRTDERMKKYYMKIAKRHGHHVAITHVANKMIRIMWSMLTYKQLYNERKKELYEIKLKRIQK

SEQ ID NO: 417722 - protein, 345 aa, unidentified
MNNTRIGVDLAKDVIQVCIYARNKVLSNTEMTYQAFALWLINTKPTTIIFEACSTSNYWNQVALSLGYDAKLICPKFVSSIRKKQKTDANDALAIVQASFVPDITFISGKSIEQQQLQSIMRLRDLATKQKTALSNQLGALLLEFNIRCSPRLGGLRGAIESVLENAENEFSCALRNSLKAAWDHYLIICQSVATYDESLIKAINEHPECKKLLKLEGVGVINAVNLYIALGCSEIGVFAKGKDAAACIGLTPIQHSSGGKTKLGSVGKYVKNSILRSQLVVGSMAAIRMIVKRDAKTKKERWIQELVSRRGIRCAAVALANKNVRTAYAMITKGTDYKAELLAM

SEQ ID NO: 417723 - protein, 331 aa, unidentified
MADVKRYVGIDVAKTQLDVALGLNGERFAVGNDERGISALLKRLEPTDLVIIEATGGLEVPVASTLATAGIAVAVVNPRQVRDFARATGQLAKTDALDAQVLVRFGAAVKPQVRALPDAQAQALEALVNRRRQLVEMLTAEKNRRANSPKVIHKSIDEHIHWLEKRLAGFDDELTALVRATPIWRERDELLRSVPGVGPVLATTLLAYLPELGALNRKQIAALAGLAPFNRDSGSLRGSRCIWSGRAQVRRVLYMAVVSAVRSNPVIKNFYAQLRARGKYPKSALTACMRKLLVILNAMLHNNTHWHATALTSPTSTLYPPGDAVSEHGCC

SEQ ID NO: 417724 - protein, 365 aa, unidentified
MSEVSTIGLDIAKHVFQAHGADASGRVVFRKKITRSKLMEFSASQPRCVVALEACGGAHHWGREIGKLGHTVRLIPPAYVKPFVKRQKNDAADAEAICEAAQRPSMRFVAVKDEEQQANGVVFRARDVLVRQRTQCINALRGHLTEYGWVVPKGTAHVATLIGQIEDPNCSLPESARAIFRVLVTSLTSLEESIAVLDSEISRRSKEDPVARRLMTIPGVGPITATAITALAPPIETFATERDFAAWLGLTPLQKSTGGKQRLGAISKMGERTLRRLLIIGGSACCQPRLPTRRAGWVVARAHAGPQAAHAGDGGIGQQDGPDRLGLAGQGRGLPSSGCGGVSHPRSRGRRGRRGGRKESMAQRS

SEQ ID NO: 417725 - protein, 366 aa, unidentified
MRKSITVAAQQTRGFAEKKYIVGLDLGDRWSWYCVLDEGGEVVFEQKLSTTPKALREVFGAMPHSRVAMETGTHSPWVSRLMKELGHEVIVAQARKVRLIGESRKKDDRLDARTLARLARIDPELLGPIQHRSARAQADLITIRARAGLVRSRTALVNAVRGLTKSYGERLRGCSPRNMDAEKRKGLSTELQLALEPLLRAIESLSQQILAYNERIEQMAEGYPEVARLRQVKGVGTLIALAYVLTVEDPHRFSKSRDAGCYVGLQPGRRNSGNSTPQLHISKEGDCYLRTLLVQGAHHILGPFGQDSDLRRWGLKLAERGGSNGKKRAVIAVARKLAVLLHRLWVSGEAYEPLRQQRAVELTATA

SEQ ID NO: 417726 - protein, 418 aa, unidentified
MKKHSKSSQRSEPSLKRTKARGPVQRDAKEVLAEVLGKLTEKLDTPAVSTSAKENRRGNTVGPNRDRLTVGVDLGDRWSQYCILGLEGETLAEGQVRTTQEDVGEFFRALTATRVVMEVGTHSAWVQDVITELGHEVLVANPRLMEGSKRRKRKSDRIDANKLARLGRVDPQSLHPIRHRSREVRQDLVVLRARDALVSVRTELINTARGLVKSMGTRLPRCSSPSFAQKVKDAIPVEVREALLPLVQLVETVNDCIARYDQKIEELGRKKYGHTTLLRQVKGVGPITSLAYVLTLEDPQRFASSREVGPYLGLVPKQEDSGDSQPQLGISKAGDRMLRRLLVGSSQYMLGAFGPDTDLRRYGLRLCECGGKNAKKRAVVAVARKLAVLLHHLWVTGDVYEPLHHTGAETRTAQAAAA

SEQ ID NO: 417727 - protein, 319 aa, unidentified
MDYISQWVGIDVSKATLDVYIRPMGKAFQFANTETEIANLVKQLQSNDLNLIVLEATGGLETELIIQLQAALLPVALINPRQGRDFAKATGKLAKTDAIDAQILAHFGEAMKPEVLAIESEMSRQLGELISRRRQLVEMSTAEKNRRDRARGKALTDIESHIDYLEQHLQQLNQEIETLTQNNQQWIDKVNLLKTTPGVGQVISTTLVSDLPELGQLTAKQISRLVGVAPINHDSGQHKGKRMINGGRAHVRAILYMGAVVAMRHNPVIKTFYERLVERGKPKKLAITACVHKMLVILNAMIRDHLPWSISQDSQPISA

SEQ ID NO: 417728 - protein, 373 aa, unidentified
MKKVRFLGLDVHAETIAVAIAEPDGEVRSLGIIPNREESIRKLVKKLGPAGQLQACYEAGPTGYVLYWQLTALGVKCEVVAPTLVPVKAGDRVKTDRRDATKLARSYRAGDLTAVWVPNEEHEALRDLMRAREAAKQDQLRARNRLSKFLLRHGRRAPAGIKSWTQKFQEWVKQQVHFEQPAQEYTLLDYLHEVEHVADRIRRLEQAITEAVKLAPPQMQEVIQSLQALRGIAQISAVTLVAELGEISRFERARQLMGYSGAVPSEDSSGKRIQRGSITKTGNTHLRRIAIEAAWAYRHRPAIGPALRKRQERLSEEVKEIAWKAQHRLHKRYRTLSAAGKEKQKVVTAVGRELLGFIWAIGVQVERNHKRVA

SEQ ID NO: 417729 - protein, 346 aa, unidentified
MIPGASDVHKGRCLMAMIPSGENVKMLEPIECTREAWRERLAELPPEAEIALEVSTSGYFVMSVLEEAGWRERAHWVHTVGIDSLRKQQSDRLDTRRLVKKLAVHAVDPLPEAWFPPPAIRALRLLARQRCAMARQRAQTKNRVHSLLEMHGLRPQRCVFTARGRAWIQQQALSQAARLCFERMFRLYDFLSAERESSEAELLAAAAVFPQVALLQTIPGLGHMLAAVVWSEIGDLDRFDSADALLNHTGLVPSSYDSGEVSIHGPMTRQGPTWLRWALITAANALTRSQSPLGKRYWHLRRCHKHPNVAKAAVAGSVARCVYGVLKHGAPFQAERWGRRAGKLGQ

SEQ ID NO: 417730 - protein, 403 aa, unidentified
MRIFVGDDWAEDHHDVHLMNDNGERLGARRLPEGLEGIRGFHELVAAYVDDPSEVIVGIETDRGLWVSALVGAGYQVYAINPLSVARYRERHNVAGAKSDAGDAKVLADLVRTDRHNHRQIAGDSADAEAIKVLARGHQSLIWARTRHTNMLRSALREYYPAALNAFSDLADRDALAVLAKAATPAQGERLSIGQIQAALKRGGRQRNIERRASEIQASLRSAQLAAADAVADAFAATTRAAVGIIAELNRQIDLLEATLTERFRQHPDADIYHSLPGFGVVLGARALGEFGDDPNRYANSKSRRNYAGTSPLTVASGKKKAVLARHVRNRRLYDALDQAAFCSLTQSPGCRSLYDQRRAAGDLHHQALRALANRLVAILHGCLQHRTLYNEHTAWAHRTPEV

SEQ ID NO: 417731 - protein, 408 aa, unidentified
METLYRRCAGLDVHQKEIVACRRIVSGRKVGSQLARFPTTTQGLLALSAWLAEVKVTHVAMEATGVYWKPVWHVLCHDFKLVLANASHIRNVPGRKSDANDATWIADLLAHGLIRASFVPPRPIQELRDLTRTRRELTREIVRHTQRIQATLEEANIKLTSVISDILGWSGRRILKAIVEGQSDPRALAELGHRKLACTREELAAALEGRVRDHHRFLIGQHLKTIEQIETTIAAFDARLETALAPFRDAVDRLKEIPGVSDNVAQTLVAEIGPDMSAFPTAEHLVSWAGMCPRLDESAGRKRSKRLRKGAPWLKPVIVQAALAATKVKNSSLRARYYALMPRLGHKKAIMAVAAAILRIVYHMLKDGTFYQDLGPDYRRPKNPERAAMNLASRIRSLGYVVDIKKAA

SEQ ID NO: 417732 - protein, 411 aa, unidentified
MRDRQNYVFIGADVHKEQHTIVIINCWSEVLGDFTFESKISEYPKVMEKINEVIPDGLIPIWGLEDVCGNGRSLAVFLKENGYTVKEVNPSFSSSERKNHATTKKNDYWDAKCIADVLIRKLNELPEATPNDLYWTLKQFVYRRDSLVKSATTAKIQLHEQLVKNYTSYKKFFSNIDGSTALDFWEKYPSPTTLKGVTVIELRNFLRKVSKNSCSTKKAITILELIEGDGDTFREYQNSRDQLVKSYVRSLKYYKEEIEKLNKEIKGIISNLDYKLETLKGVGTVTAAQLIAEIGDINRFKSAEKLAQYAGVAPVRFSSAGKGKDKKSKQGNRNLNGVLYFLAMQQIQISKQSKMPRNEILYEYYQRKLTEGKTKVQALICIMRRLVNIIFGMMKNKTEYVMKYRHERIAS

SEQ ID NO: 417733 - protein, 349 aa, unidentified
MLADEVDYVVGVDTHRDQHVLAVVAAPTGAVVGQRSVTASGRGYAQALRFANQYAAGRRVWAVEGAGHYGAGLARYLSGRGETVIEASRTPPGERRLRGKDDQLDATRAARASLASDGLALPRAGQRREALRLLLLTRRSAVDVRRQALLQLRSVIVTAPDQLRAQLRGLPRRRLITRCSHLRATTTAPPDELATRHVLRSLARRIETATNEAAELETEILSHVRALTPQLLDEPGVGPIVAAQLIVAWSHHGRLRSEAAFARLAGTAPIPASSGQTTRHRLSRGGDRQLNRALHTVILHRRQHDPATKDYIARRLAEGKTTRDAVRLLKRYLARHLYRTLNTQAALMT

SEQ ID NO: 417734 - protein, 358 aa, unidentified
MTFVGFDLHKRYITACALDASGAPIAEIRQPATIETVLDWLDALPTPVVVAMEATLYWEWLVARLQEAGHTAHVADAYQVKLIWQARSKTDIIDSRKLAELLRVNLLPTIWVPDLETRRRRQLLRGRAFLVRERTRIKNRIHGHLTAENLLSPQSDLYGKAGRAWLETVALSPMLTAEVQRLLHLHDMLTKEIRRLDAQVQRAARSDPTAQRLATVPGVGVFGALFLQAEIGPIDRFQSSHQLAAYAGLVPTTRSSGGKTTHGPLAKMSNHWLKWILVEIVQTLKLAPGPVGAYYRHLLRAKGKPKATSAAARKLCCYLYWMLKQEWTYTEWLQQHLQQHQQVRRPEVRPTQRLGALA

SEQ ID NO: 417735 - protein, 395 aa, unidentified
MFIVGIDIAKRSHEAIIIAEDGQVVRKAFSFRNNCTGYNLLLEQVRRLTLVKSQIVFAMESTAHYWLALYVRLLKDGYTVLVLNPIQSHSLRELYIRKAKTDARDSLIIADLVRFGRCKASNVPQDKILALRELCRSRAYLVDMAADLKRKLIALLDRIFPEYESLFDSVFSKASIAVLSKYSTPQKVKNANLRKLTDLLMESSNGHFGEWKAHQLKEAACSSFGIDDSGGVYSTLLGMFLEQILSLTAQADSLEKQISVFFQEFNNPLTSIPGVGTVLAATILSEIGDITRFSSADKLLAYAGLDPSVKQSGEFKSNQNRMSKRGSPYLRRAIWLASTVAVHRDPMFQTYYEKKISEGLHYMNVIGHVSRKMTAVIFAVLRDGQPYQPILQSAG

SEQ ID NO: 417736 - protein, 306 aa, unidentified
MLHVGLDLGRKRIEVCLISDQGELIDRFAAIPDRDGLHGLARRVAVFGEPVRAVVESMNGARFVHDELVAHGWEVLVADAQKVKGLAPLACKTDKIDAGVLAELSFRDLVPAIWLPTVELRREREISRWRLHLVKHRSTLKNRVHSTLITFGHQRHMSDLFGVAGRRLLGELEIPEPWRSHVDASLVLIDDLETRITQIVKELRRSGADHRYIPILMTAPGFGWITSFTVACEIADISRFASPVKLTGYTGLCPRVKQSGQMDQRGPLSKHGPRYLRWGLMEAAIAASSHPLYRERYQRTDRKSVV

SEQ ID NO: 417737 - protein, 428 aa, unidentified
MSGRDYNRQAAKRQRISKRTLIVGVDVGKAFNAVGFMNKDGNVLGSCAKLYNSREGFEKFVEMTEELKAKYCFRDVLMGMEPTGHYWRKLAYFAKEHGYEVRFVRTTALKHHRELDESSSAKSDRRDAITIANITREGKYIDTVIEDGVLRQLRTLSKARERLLRYSVSAKNSLHAALDDYFPELHEIFWSMGSRSLWVILEQCPFPQDVALMRASTLQEMIARSSRKKAGSAQKAKALCAAAQKSIGVKQIGSADRYRLRMCLEEVKRTVLTLKDMDRQLKSMVKDIPSAIYLMSIPGIGSLSAAVFLGELGNPAHFHNARQIVKYAGYDPQESDSGSWVGRRFISKKGRWLLRKYLFFMSMRVVVLSKYFQEYYLRKLETRNRVGQHPRRKEILCAVAIKLIKVIFALLRDKRTFEDVAPVTLAAA

SEQ ID NO: 417738 - protein, 360 aa, unidentified
MNKIKPLDFTGDTIFCGLDVHKLSWRVNIRDKDMELKDFSQPPDAFTLHKHLSKNYPGAHYKVGYEAGFCGFSIQRELASLGIECLVLNAADIPKGDKDRKQKNDKRDARSISQHLSNKRDVKALYIPSTQWEHARSLVRNRQQQISDSTRCKCRIWQFLYFSGLPIPDKAETGQYWSGKFITKLQQMDCNNSAELKAALDIKLQDYLHKRKLLLESTRAIRKMYRQSSFWPLMKLILTIPGIGEINAAIILFELQDIFRFKTFDNLCSYAGLIPDTDDSGDTRRSKGLTHRRNNFLREAIIESSWVLAKKDPAMLMKYKDYCKRMHKNKAIIKIARHLMARINYVLRKQTSYVSGLIAG

SEQ ID NO: 417739 - protein, 355 aa, unidentified
MNQEKYIGMDVHQATISVAIMDSSGKLIVESILETKAATILEFIQGLRGSLSVTFEEGTSAAWLHDLLKPHVTDLVVCDPRKNALLKDGSKSDRIDARKLAELLRGGQLKPVYHGEHGLRTLKESGRSYLTLTKDVSRVMTRIKALYRSWAIPCSGATVYAPRHRAEWLAKISEPGVRLRAERFYQQLDLLEPVRQEARRDLLNESRKHPAVKLLRQIPSIGPIRAALLVALLQTPHRFRTKRQLWAYSGFAVETHDSGEYRYVRGKLRRNRERITVRGLSDNHNHDLKNLFKSAAISASTRPGPLRDFYAALVQKGMRPTMARLTLARKMASITLTMWKKGVDFDAKYLQPQAA

SEQ ID NO: 417740 - protein, 349 aa, unidentified
MLADELDYVLGVDTHRDEHVMAVVTAPAGVVVAGRSAAANARGYRELLRVAGRHAPGRRVWAIEGTGSYGAGLARFLAGRGELVLELSRTPRAERRLRGKDDTLDAVRTARAALASETLALPRTGQQREALRLLSVARRSAVDVRREALTQLRAVIVTAPDPLRSELRRLPLGQLLERCSRLRRSATATPDQLATRLVLRSLARRIQAATLEADQLEQEILARVLALAPALLEEPGVGPIVAAQLIVAWSHRGRLRSEACFARLAGVAPVPASSGQTTRQRLSRGGDRQLNRALHTIVLHRRQHDPATRDYIAKKIAEGKSRRDATRLLKRYLARHLYRLLENQDPLMA

SEQ ID NO: 417741 - protein, 342 aa, unidentified
MNDMIIGVDLAKSVFQLHGVFLAEGEVFRKKLTRTQFEKFLKDTAPCLIVMEACGSANFWARQLAEMGHEVRLIAPQYVRPFVKRQKNDAADAEALVIAARQPEMRYVEPKSREQQAQAVLFRSRERLVRQRTELVNALRATLFEFGFTLPQGPAAMKRAKELLDDPTVDLSDLVVTECRDMLCQLAEKTDRINKRSKEIKQLAEQTEALRRLTSMPGLGPITAFAIGAFAPAMTEFRRGRDFAAWLGLVPRQNSTGGKAHLGSVSKAGQSDIRRLLIIGAMSRLNWLGRKTIPDGGWIARLMQRKPKMLVAIALANRMARQIWAMTTRGELYNEPAKAVAT

SEQ ID NO: 417742 - protein, 420 aa, unidentified
MAMVLPSQQFLDKKTFRIYHLKPDSLAAAVEKIKKAEELHAMKVRIFMESTGIYHYPLFCYLKKAELDVSVINPLITNSNKNSNIRKVKNDKFDAKKIALMGLNPHLKVSNMPEELIMNFRNLTREYYHLSDIRASYALKLGAQLRIAFPQFKTIFSNLTGKTSLMVLKQYPSPEDLLKADRDEFIHQIAKSSRRKLSTATKKYDQLIQAATQAKSFGAGVRTNFYLIQEFISFIEFYDQKMEALLQQMTSLVEENQEERIVKQLTLLESIKGVGFLSALTLMCEIGDFTAFKKPKQLFAYFGLDPSVNQSGNFNGSRMKISKRGSRLARRVIHMVAVQSIGTTKNGVPKNPVLREFYLKKCQSGKPKMVALGAVSHKICNLIFTVLRDQKPYVLKTPEEHRHSYASTQVSNTILFSTAA

SEQ ID NO: 417743 - protein, 331 aa, unidentified
MTSQPNRPNETALTIGVDVAKALLEVAFSDGAAALAPANDSAGHAALLAHLAALREQGRTIALIVLEATGGLEMDVACALQLAGHPVVIVNPRQSRDFARAMGRLAKTDRLDARVLAHMGQTLVQRDDLHKLIKPLPDETQRRLQALLTRRRQLQAMHIAEQQRASGPDQRMLRSMRTILKALEREIARLDKDIQALIGAHHAQLAKLLGEVKGVGQATISTLLAEVPELGKLSGREISALVGLAPINRDSGAMRGKRTIFGGRPTVRKVLFMAALVATRFNPVIKAFYERLVAAGKPKKLAITACARKLLTILNAMAKSGQPFNSALHLA

SEQ ID NO: 417744 - protein, 450 aa, unidentified
MLQHTTDSPAQKAPSPLPSVTRGLRRHQAKLRRRREQVPADTLVVGLDLARERQAVSFVAGSEVVARRRLSCAPHEIVQVLEEAHHFAREHGRRGVVVAFEPASHYWCLAAEALERSGTPYVLVQPMSVKRAREESRYTPEKTDPRDADLIAQLAVQGRFTDTRLATSHDEDAAWQLAHDYFRVRTLAAAERARLHNFWHRMLPEFFSVLRDPACKTALAVGCALGPLSEIEHLTPKAWIARVRRSANGAPVLVSRAAALFPLLRAAHRDPARRSGEGMPYRIRHAAERRRLLEAQKADIRSELLKRYHLKTEAPILDSILGSNPFYNALTLALVGDFQRFDDPRAIVKLAGSEVNHYASGDWNGSSRISHRGRSPLRAAAYQQARQLVVRNDDFRARFHALIHRTTKRRLATQEAYVAIMNSFLRTAHRLVTRRTLYAPRAERDGPHMT

SEQ ID NO: 417745 - protein, 427 aa, unidentified
MKFNASNAINQRIEKITPQHLIVGIDIAKETHVAAAVNFRGIQQGRKLVFSNHADGLERLLRWVQDLQRAYGFTEVIFGAESTGHYFLNVAFALRKRGLTVVLVNPLTTKRNKENRDNKPSKNDAKDAVTIGDVVSRGYYTEWVVHDPVYRQLHALVNEREAMSDALTVIDNQLQTAIDQVFPEFWSVFKHWDGSRARATLRSFPLPADILANTLPELIEGWRTSGLKRAGGTTGIQIASQLLLAAGRSIGVTEAAELGRRIQRLLARYEHLLAQQAEVDVEIAALLERLPPAVLRPLQEVGLSPWFMAVILANTGDLRRYTHGQQLLALAGLNLAERSSGTCKGQVKLAKRGRRQLRKYLYLAVMMLLCNHAGFKRWHTYNIKTLRQKGIHSVLKLVGKLCRILVALAHSGEAFQEQKAAPLRNAT

SEQ ID NO: 417746 - protein, 416 aa, unidentified
MPLALPEALFFTGIDWAAATHAVCVMDAAGKITAEFTIAHSADGIAQLIRRLARYGDPASIPIAIERPNGRLVDLLLEAGYPVVPVSPNAIKTWREGEVLSGAKSDAGDAAVIAEYLRLRRHRLQVAVPCSGQTQALRTVVRTRTDLVDMRVAATNQLSALLEASWPGAKAIFADVESPISLAFLTRYPTPAPAAHLGEKRIAAFCASQGYSGKRPAAELLARLRSAPAGTADPALTTALGTAVLAMVAVLRALNTAVRDLDRSAAARLGEHPDGAIFTSLPRSGQVNAAQMLAEWGDCRQAYDGPDSVAALAGCTPVTQESGKHRAVHFRWACNKRFRKAMTTFADNSRHASPWAAKIYNDARAAGKDHPHAVRILARAWIRVIWPCWLNHTPYDPARHGAAAALAAALAEPIAA

SEQ ID NO: 417747 - protein, 375 aa, unidentified
MIYVGIDVAKTTHYAAAADSDGVVLVEPFAFDNDAPGFAKFISKIASFPKEQLIIGLESTGIYSENLICFLFDSGYKLAVINPIQTATLRKTNIRKTKTDKVDTLLIIKSLMVNSYRLYTEQDTQSLKLKSLCRFRQSLKKSKARLKIQLSGYVNLLFPELLSFFKSGIHISTCYTLLKRCSSPAEIAALRLDSLSRLLSNASRGRFSRSTAEALKSLAKSSVGVKNPYISIQIAQTIQQIELLEQQIDEIENVIKDTICELDSVIMSIPGIGAIDGAMILGEIGNIDRFASPAKLLAYAGLDPTVCQSGKFKARSTKMSKRGSKILRFALINSAWQLTLKNDTFFNYYQLKLSQGLSHYGALGHVAHKLVLDIY

SEQ ID NO: 417748 - protein, 422 aa, unidentified
MDSPEAIPSYDLLVSLDRSDRSAALALLDLRSGECREQTLDLAPEALDAWWRALRESHPQARIAVAFEQPAPNLLAFFSAREVAIYALNPSSVWAYRQSLVVSRARNDQSDARHQAMYVSRHLAELKPWQAAPAGAVLLDRLTRSRRRQVDARTALTNRLQALLKRYFPQAVELLHEDLWRPMNLDFLRRWPTAEKLRVAPLSRLRQFYLKHNSRSEACWERRRALIECLVPLTESTVAEELELECLLEQIEAINTAIAKHDRAIAEAFEAEGEAALRVAELPGAGPTLAPRIYSALAIHASRTASPEGLAAAVGVAPITDQSGKMHKVHRRLRCDNHTRQTFVEWAKESWKHSAWAEAFVRQRQAKGQGFHAILRALAYKWIRILWKCWRDGVAYNEERYLETLRLKGSPLVPKPLSIQCQ

SEQ ID NO: 417749 - protein, 357 aa, unidentified
MDDGAKWVVILNKQYKIMKKERKCYLGLDVSKLWFDISVLIVSDQQKQPMLTERFCNTTSGLVQLDEWLSKLQVSKDEHSLLVIENTGVYHRLIWDYCSVNKLPLHIGNAAQIKWSLGIVRGKSDTTDSQRLCMYCYKHAEDLKATAELNPVFLKLKDLITARSRLLSQLNSMKVYLNELKLSNDKEVQKMMETAHKAAMEGLKKSILEIEMNIHRIIKENSSIQVNYNLLISIPGIGHLTAAYLLCYTNNFTGNLTGKQLASYAGVVPFSDTSGTSIKGRNKVHKMANKDLKKLLHLCAMTAIRNYPEFRNYYDRKKSEGKHSMSILNAIRNKLVLRAVAVIKKQTSNVDNYKKAA

SEQ ID NO: 417750 - protein, 427 aa, unidentified
MNETESNKVDEFRQFKSQIRGSREYLIVGLDIAKRKHHGFLGDANGKTILKGLTVENSAEGFGHLLSQVCFYMQRDGFSRVVFGLEPTSVYHKPLAEHLISQGHLVVYATNEAIKKNRSLIDGRWDKNDTKDSANVADLVAQGKCHYYDLPDQRLRDLRSLLLLRKRLKKQVHSCRVRIRNNLVAQYFPELDLFWNNAEAENLAIVRGYLDPARIRQLTCEQFIAQVSTHNGGLRQQRRLRHIWEAAGNSIGCRPGAAMQLEAELLVTSLKSIQEQLDHVGQAIQELAEGFPEYDYLKSIPGFGPYVSAVTLAAIGNPHRFENRAQLIRLAGFDLCASRSGEKSNTAVPVISKKGKADLRYALYQAALVASSLTSHFRSHYTRLLDGRQREKGIRTKMRVKIAAKMLVIAWTLMKRKEPFDPTYIQA

SEQ ID NO: 417751 - protein, 424 aa, unidentified
MQNTAARKLKQVPEGYLIIGVDPHKKKHAAVAITQDFAVHCKFKFDNTREGLKVMLDHAREEMVRSGCRGVMFAIETGGHYWRNIAYFLDERGLPLRFINQYTLKRRREGKDLNHRKNDYRDSEVAAQLLCTGEFTESKIPQGVYAELRAAHNAYRRLVKERSRITNLMKGLLDGLFPEFTTVFKDPCGVTALSVLSNCVIPSVIATMTEDEFIVIIESKHEGRRLMRRKLRALHQTSKTSIGIGAGANSVASEIAFLAEKLKLIRGHIRIIENTLIRLVDETEEGKYLLSIRGLNYIAAAGLLAELGCFKSYRSAKQMIKMAGSNPTESESAGKRSIHTPMSKKGRPVLRYCGWTAVIPMLRFNPDFRAWAKQRRERPVYANPLGGRETVGAALNRLLRLAFAMVKNQTYYQDVKPASIPVAA

SEQ ID NO: 417752 - protein, 344 aa, unidentified
MKITTIGLDLAKSIFQVHGVDATGQTLVRKSLRRSQMLPFFAKLPPCLVGIEACGTSHHWARELIKLGHEVRLMPPAYVKPYVKRGKTDAADAEAVCEAVTRPTMRFVPVKSPEQQAALSMHRTRDLLVKQRTQLINMIRGLLAEFGVDIPKGLERALLMARQIIDGKAPEVPIEAARIVTTLSQQALDIHVRLREIDRDLAIWLRGNDVARRLMTIPGIGPVGATALAASVTDPHQFRSGRQFAAWLGLTPLQKSSGGKERLGRISKMGDKYLRKLLIVGMTSLVRRAKYNPGKIDPRLADLLARKPTRVATVAMANKTARVIWAIMARGETYRTGHQPALAA

SEQ ID NO: 417753 - protein, 355 aa, unidentified
MTASYDYHIGVDYHKSYSHLVVQDSAGKTLRSGRVKNDRQSLGGFLERYRENSHAVVEATRNWMVIYDWLDDICDDVVLAHPLKVKAIADAKIKTDKIDATVLAHLLRADLVPEAWAPSDEARELRVALRERMFYVRLRTMTKNRIVTVFDRYPEQTAQLKKLGDLFGKAGRVQLAQVNVSEIDRIQIDRGLAFIGDIDVRVKQSEATIRAMTKANTNVKLLKTIPGIGEFFARLIDAEIDEIKRFRNAKKLAAYAGLVPSTYSSGGKTFHGKIIKQGNKWLRWAFVEAVAPALASDPQLRAQYEHLKSRGVNKARVAIARKLLTIAFQILRDQRPYERRGGRSEDCASTISRLS

SEQ ID NO: 417754 - protein, 352 aa, unidentified
MPVLHYIAMDTHSYTTEICVKTRANGPARRWNVPTTIPAIREVIESIKRPRQLTFEEGPLAAWLYRNLKDAADRTLVCDPRKNAWISKGGDKDDPIDAGKLADLLAGGFLKAVHQTEDLSREVFKQLVGRYHERVARRVSESNKIIGWLRRWGVMVTARDFAEKSLRAELLGRLPADAELEPVRIGLELMFCGFDHAVRQETRLRRELIKRAKKEEFIVRLEELPGISWIRASTFFVYVDTPWRFAGKSALWKYMGIGLTRNTSGNGPQSLHVERKINRRLKSMILGAAKTVLERNGPDDPFAQQHRKWKESGLSPRNARRNVARNLAAVAWGMWKNGGVYEPKRIGMKSSE

SEQ ID NO: 417755 - protein, 346 aa, unidentified
MSEIITVGLDLAKNVFQVHGADSGGRAVLRKKLRRAQVLEFFGQLPACVVAMEACGGAHFWGREIGKLGHEVRLIPPAYVKPFVKRQKNDAADAEAICEAALRPTMRPTMRFVPVKSEETQGAAMVFRVRELLIRQRTQAINALRGHLSEFGRIVPQGAANAARLIAIVDDPDSGLPADAIPTLNVLVAALAHLETEIAKLDAEITRRAKENELARRLMTVPGIGPLIATAIATLAPPAENFHKARDFAAWLGLTPRQHSTGGKQRLGATTKMGERSLRRLLIIGANSVIIKRHTHAAARPGTWLGGMLSRKPPMLVRVALANKMARIVWALMARGGVYQSPAAAA

SEQ ID NO: 417756 - protein, 376 aa, unidentified
MNAKSGRSTRCYKKLNSAPKLIQRTTSEAPQRHMYFIGLDVHKKTISYCVKDAAGRVHQEGKIGSSRRELDGWIRTMPQPRTIAMEATIFTGWIYDHLLPHAERLKVAHPLMLRAIAASKKKNDRIDAGKIADCVRCDFLPECHMASTEIRDRRRTLRYRNLVMKQMVQIKNRVSGLLMETGVSYNKQRLHKVGYFAELMTTNKEVHESIRPLLKLSRDMISRSQKLDYALVSSLQRDPVLKERLRRLRTVPGVGPITALTWALEIGDYTRFPSNRQAISYCGLCADEKSSAEKVMRMPISKQRNKHIQRVLIEAAKLAPSESPELALTHARELEKGNRNRATLAVARKMVCYMLAVERRQQDFVPAEEFRRTLAV

SEQ ID NO: 417757 - protein, 316 aa, unidentified
MNVIGFDISKDTIDVTLLRTSGQSDYIKIANACEGFEKLNDWIRSKRIRKISISMEATGIYYEEAADYFSAIYQVFVINPLKIKDYSKSQFSHTKTDRADSRLIAEYTKRHLDKLTPFKPSENPTLYKLISLLQQLKQQQNESQNRLHAAKDTFIRATHEEIILLLAKQIDQTAKRIDLMIQQQDSLNTHYKNLQTIPGIGKDTAAILLRHLTDKQFKTANQFVSFAGLSPLIEQSGTSVNKKGRLSRYGHRRLKRALFMPALVAYRIKAFPKLVQNLSHKPKMVVIVALMRKLAKIAYYIHKTQKPFEKMRYQTA

SEQ ID NO: 417758 - protein, 374 aa, unidentified
MADYSEVFVGIDTSKLRNAVAIAEGGRNGEVRYLGEIRRDREHGGGDEQAGEEQHRRLTFCYEAGPTGYGLHRLIKTLGHECVVVAPSLIPKKPGDRVKTNRRDALNLAKLLRAGELTAVWVPDARHEAMRDLVRAREAAVDDLKSKRQQVLSLLLRLGRHFTGKRTWTRAHMNWLVSQKLAHREQRIAFEEMLLAVRQADERVIRLERAIAAAVPDWSLAGVVTALMAVRGLDLISATIFLAEIGDLSRFASPRQLMAYLGLVPGEESTGDRVWRGGITKAGNHRARRILVECSWSYRHPPRVGKKKLAKVEAAPPAVQEIAWKAQARLTARYRALARRGKRPTLVVTAIARELSGFIWAVSRAVSTPAAPTR

SEQ ID NO: 417759 - protein, 367 aa, unidentified
MKNHSSIDQSLSSSDLSACTTLAVDLAKQVFQVAGEDVLGQVRFEQRIKSREAFYEFLQKLPPHVVVLMETGPGAQAWARQLQDQGNSARILPAGLVAKHRSGPKNDRNDALAILRAGRDEKICAVPVKSVAALAMQALHRARQGYVRRRTAVSNQMRGLLLEHGVALAQGDVAISQKIPRVLEDATQPVPALLRELIDELLAEWRHLGERISVLTGRLEVAANADMTAKRLMTVRGIGPVTATALVAKETKPERFPNARKFAAYFGMVPDQHSSGEKIRLGDMTKRGDAYLRSLMIQGAHAVLQQLRPDSQQPDDRRLLRWMSRLGRKEAAIRLANRNLRIVWVLLQNDQTYRRHAGDGQQATMSH

SEQ ID NO: 417760 - protein, 294 aa, unidentified
MSQTIQRFVALDVHKNYVVVGAVDTRQEVVLHPRRVSLIRLDGWAKKHLKPTDAVVLEATSNAWHIHDLLKPLAARVVVANPYLVKLIAASFVKTDKRDALALARLLAANIIPEVWVPPQHVRELRALISHRRRLVSQRTAAKNRLRSVLMRHNIVPPAGQIFSTAHRDWWDRLSLSDSEKLRARHDLAVIDHLSPLMEEVAAELARLSVDELWADRVAFLVQLPGIGLLTAMTLLGAIGDITRFASAKKLVGYSGLGSRIYDSGQTHRTGRTLAPALQVQVSPSKAAGNCALQ

SEQ ID NO: 417761 - protein, 318 aa, unidentified
MPHRGRIVGIDVSKRQAEACLRSPPARLAQPSTPEGRQRMIAWLRERDVALAVMEASGGYEREWAEALRQAGVAVRIVDPKRVRYFARSAGRLAKNDPIDAAMIAWFAETFTAEAAPAEDPERAAVDRLMTARAMLVRLESQIKQLGEHRQPPLVERAQRAIAKAILAQRTKLEAAIAAKIERHAGFAARAGILRSVPGLGPRFTAGAIAWLPELGGIANRAAAALVGVAPYDDDSGARRGERHIKGGRREIRELLYMATFAATRCNPVIKAHYQQLRARGKKFKLALVACMRKLIVILNTMLARGQRWTPPAATAVA

SEQ ID NO: 417762 - protein, 338 aa, unidentified
MYYTGIDLHKFTSYLTTVDSSGKLVKQADIKNVNHNFIQYFSDLGDENITTVESTMTWYWLNDLLTSINIPMVLAHAKYVKAIAYAKVKTDKVDSHTLAQLLRMDYIPAAHKISAENRLLRDALRARLKIVQRHTSITNSMQMLLAKYNFDSPTQLTGIARFQYEQLSEVEEILNEQMLELEKQLYPFLIPNDDIQRLLWIPGIGKMNAFTILLEVDDIGRFADVKNFFSYSRLTPSARNSGGKSKQRSSKDGNKYLKVVFCDAAIHAVQYYPVIRNYNNSLIRKKNKQIAKTIIAKELAEIVYHVLKNKTDFNNKFKGQELEHKKSLQWPRITSPYA

SEQ ID NO: 417763 - protein, 365 aa, unidentified
MTTRQRSTSSSTDPPVRREVVLGVDTHGEVHVAVVISPLGKVLGTESFPATAAGYRQLLVWARKRGTVRRAGVEGTGTFGAGLSRYLLAQQIQVFEVNRPDRSARRLLGKSDPLDAQAAARAVLSGRARAQAKSGDGPVHSARIYKLAKDSAVKARTQAINQLKAVLVIADPVLRERLSSLGNAELFRTCATLSPPDGGGDEDAVAQATHMTLRMLAERIEQLTGQINELNQRLTRLVERHAPQLLVPVGIGPDSAVTLLITMGDNPERLNTEASFAALCGVSPIEYSSGRRRTRRLNYGGDRQANAALHRIVFTRLRHDPRTQAYYERRTQEGKTRREIIRCLKRYAAREVFNLVRTVSRTPVL

SEQ ID NO: 417764 - protein, 344 aa, unidentified
MKITTVGIDLAKLVFQIHGVDARGKVAVRRQLKRAEMSSYFVNLEPCLIGMEACGSAHYWARKLEGYGHTVKLMAPQFVKPYVKTNKNDMADAEAICEAVAQPNMRFVAIKTVEQQAILSIHRARQGFVKARTAQGNQIRGLLSEFGIIIPQGIRSITKRMPEILEDAENGLPGAMRNLLERLTENLKEMDRQVNELEAKIQLWHRENAASLKLAEIPGLGPITASAIVATVGDAREFKNGRQLAAWLGLVPKQHSSGGKPTLLGISKRGDTYLRTLMIHGARAVIRFAENKAEPNVWLGKLMARRNKNIAAVALANKNARVVWALLANNRIFRPDYTSAAAGM

SEQ ID NO: 417765 - protein, 322 aa, unidentified
MAAMMIGIDPHKGSHTAVAIDESEQPLGELRVRSSSTQVVELRSWAKRWPERIWAVEGAGGLGYLVAQQLLAAGERVVDIQPKLGARVRLLATGATNKNDPNDARSVAIAALRSTMLVEVVPEDHATVLKLWAKRARDLGRLRTQVVCRLHAVLAELTPGGFSGSISAAQATTLLEKIEPQGAIELARYELAHEFLADLTRIDEQMRQTKKRITVAVAASGTTVTEIYGVGPFVAAVVIGYVRDVSRFSDRDHFAAYNGTAPIEVSSGNRKVHRLSRRGNRRLNHAIHIAPSPRSAIATVRDAPTTTRRSPRAKVEKKRSAP

SEQ ID NO: 417766 - protein, 375 aa, unidentified
MYLCILDQAGETLLHRNMPATPEALLKAIAPYRGQIVLAAECMFTWYWLADLCAEHEIPFVLGHALSMKAIHGGKAKNDKIDAQKIAVLLRGRMLPQAYVYPAAMRATRDLLRRRMHRTRKRAALLAHVQNTNSQYNLPAIGKKIAYKTNRDGVAERFADPAVQQSIAVDLALITSYDELLRDVALTIVKTAKPHDAHTLSLLPTVPGIGKSLSLVLRYEIHQIDRFPRGQEFASYCRLVKCAKESAGKRFGTAGTTIGNAHLTWAFSEAAVFFLRDNPAGQKFLTRLEKQPRKGKALTILAHKLARAVYCMLKNKKAFDMATFLHREGRGVGALAASLANAGMTLTRYALPGPHTCVAERRGASRALSLSPAVG

SEQ ID NO: 417767 - protein, 430 aa, unidentified
MFVNVHTPSVRRETTEMSGSSFPMPAPAPLAYVVGIDIGMESCMMCGLTMEKRQVIKPSPFVNTAEGFTSLFERLERLGAAPDQILVGLEATSRYGENLYHVLLKRGYRVCLLHPAQMHAFAQQRGLRAKTDQVDATTIARALLSGEARFGYVPTEQVAIYRELVRLQQQLSEDVVRYKNEIHALLVVLFPEFTQVFADPTRPTALAFLKRYPSAQAVAQAEVSVLSQVLHQLSPKHYGRQTAERLLDVAKKSISSGVAISARSTSLRILCDQLEHTQANLKQLHQEIETLLDQDPKAKGVLLIPEFGVMTVAVLRAELGDLDRFARMDQVVAYVGMDLQVKQSGKWIGQTKLSKRGSGRVRRILYLAALRSIWLPNSPFGAYYHRLVERGMKKGMAVVAVMRKLLIVAAHLILTEEMYEPGKVAALSVR

SEQ ID NO: 417768 - protein, 483 aa, unidentified
MKSKPQEKNKRATNHPTQHHWHEMNRKQRREMLRKMQSEDLRLEVIHPDAAGIDIGNESHYAAVPPSRDSQPVREFRCTTAELKAMAAWLQQCRIRTVAMQSTGVYWVAVYDILEEAGLEVYLVNARDTKNLPGRKSDVQESQWLMKLHTYGLLRNSFRPPQEIRTMRTYWRQRNDLVQSAGRHILRIQKALTQMNIQLANVLSDVSGVTGQAIIKAILAGERDPHKLAAFRDCRVKASEEQIAQSLEGNWQPDLLFLLKQEQDGYEFCQKQMAECDRQLKLYLQRREDRSHGAPLPEEKRKGRLNKKRANKPQFDLREGLFRMTGTDLTRIDSVDVMTATTVISEAGYDMSKWETENHFVSWLRLCPDNRISGNKVIGKGRLPTNNPLSIALKMAASTLRQSKTYLGAQFRRLRTRLEAPIAIKAMAAKLARLVYRMLRYGMKYVDQGAAVYELRHRELQIKRLKAKAQKLGYRVTPIPAAA

SEQ ID NO: 417769 - protein, 339 aa, unidentified
MSLYSAIDLHSNNSHVAIIDDQQNKVFYRKLANDPKVIANAFAPYRERLKGIVIESTFNWYWLADLLIEEGYPVHLANPCGIQKYSGLKHADDKHDAFWLAQMLALKILPEGYIYPKEDRPLRDLLRKRSQLVRVRTSLVLSLQNMVMRNHGIKIRSNDLKKLTQDPVAELFKDQQELALAGKASKETIDFLTRQIQRIETAARNKAILKESFSKLLTLPGVGDILGMTILLETGPIERFKAVGHYVSYCRKVPSRWTSNEKSKGKGNTKNGNRYLSWAFSEASDHARQTHGPSRDFYNRKLNQTNASVAHNALAHKLARAGYYIMRDHVEFEEDKMFR

SEQ ID NO: 417770 - protein, 408 aa, unidentified
MEVVVVVGAGLDVHKTKIVACCIDGRSSPPTVVTCTFGTFRDEIERMRDWLIKRECTHVAMESTGVYWMPVYEVLEGALEIILGNPRHMANVPGRKTDVSDAHWIAKLLRHGLIQPNFVPPRPIRDLRQASRYRRKLMQTRTACLLRVEKLLQCAAIKLSSVASDIFGVSGRLMLAGLAGGVTDPRELSELAKGKLRGKRGALMRAFRGSFSKEDASLLRVELKVIADLEAQLERLETLIDQKLGPFEDVIALLDTVPGVNRTLAIDLVAEIGTDMTAWKTDRQFAAWSGTCPGNRESAGVRKKAKAREGNPYVKTILIQAAVSASQTIGSHLSFRFKRLAARRGPRRAFVAVAREIAVAVYHMISKKVPYTPPRNADPEVIRQQRSRHLMRELTKLGYEVNCKPLNT

SEQ ID NO: 417771 - protein, 317 aa, unidentified
MSHSDLFVGIDVAKDELVIHAHPAGMLWRVPNTKTGIAALGRKLVRLAGTACLRIGFEASGGYERKLAILLDRMDVTAYLLDPARVRSFARAERQLAKTDPLDAAVIARCLAALHPELTPYVHDPEAVRLAEHVRMRDLAVAQAVQFGNQLESIADPAMRRLVVAQVARLKALVLRIEKAIASVIAASPDLAAREALLRTAPGVGPVVAACLLARMPELGRLSSRQVAALAGLAPFDRQSGKTSRPGRCSGGRPSIRRCLYLAALSIARSGKGQLAATTNRLREAGKPFKLAIVATMRKLLVTLNAMVKNNTEYRTG

SEQ ID NO: 417772 - protein, 360 aa, unidentified
MKKVSKQMRKMEAMDKPEMTVGLDLGDRYSHYCLLNADGDLVEEGRIRSTEAALRRHFEGEPCLRIAFECGTHSPWVSRLLEKLGHQPIIANSRKIGAITSSDSKNDKNDAELLARFAAADPRLLWPIEHRRPERQSDLNLIHIRATLVRARTMIVNALRGLVKSAGGRLPACSTESLPARALAALPPALAEAATPLVDQVALLNTQIAGMDKQIEKLAAKYPEIKLLRTAPGVGPIVAAAYVLTLDRHDAASNRSAGAFLGLRPGQSQSGGSDPQKRITKAGDKCLRSLLVQSAQYILGRFGPDSALRQWGLKLAATGGKRGKKRAIVAVARKLAVLLHSMWRNRQPFQAFPQPANAVA

SEQ ID NO: 417773 - protein, 362 aa, unidentified
MSKKLWVGLDVGEREMMVCVINADGMRVREEMIPASTAALDMLLRPMRRGNIAVVAMEAGSTSIRLARGLAHLKYDVAVFETRQLGTYLGIRQNKTDRNDARCIAEVARTGRGIVSEVLVKSSECQRVRSLLAMRQNFVRMRVSGESGLRGLLHLYGGKLSHSSTAKMLRLHVSAEIARLKKEEKIDLREEADPMLCVCEAMRLYLEGLSKKLAAMAKANPVCRLFMEIPGVGPLTALSFYSAIDDPFRFARNEDVGPYLGLVPRVRQSGATVARLRISKMGNNLTRSHLTSAAKMHLGKKSKETRLKTWGLKIRERRGSGKANVAVARKLAVLMLAMWKRSASFDPDFGSPFSVERSALSL

SEQ ID NO: 417774 - protein, 413 aa, unidentified
MSVTPITAGARVCAGIDWASVDHAVCILDPDGNVLERFFVVHDAAGLKTLVRRLLTAGVDEVGIERGDGPVVDALLAVGLTVLVISPGQVKNLRSRYGSAGNKDDRFDAYVLADVVRTDRHRLRPLVRDSAATTAMRATVRARRDLVEHRVAAANQLRAHLQLVFPGATSLFAAIDSAVSLNFLERFTTQTQADWLSGKRLGTWLDSVGYSGRTDPEVLHARLLTAPRGTTGTDAEIHATTTSAYVAILRTLNTQIADLEDSLATQLAIHPDTHIFASLPRVQTLRVARLIGEIGDARGRFPTADSLAALSGVAPSTRQSGKVKAVTFRWGCNKQLRDAICDFAGDSRHANPWAADLYQRARARGHDHPHAVRILGRAWADIIWRCWQDNVAYDPNRHNALQRVLNEQTPKAA

SEQ ID NO: 417775 - protein, 408 aa, unidentified
MDGGRCIGLDVHRDFCEVACWQAGKVQAWPRVIARPQELAEFAGLLRQEDQVALEATGNALAIARMLRPHVKAVVIVNTRRLAAISESKQKTDRHDARLLAQLLAAGMLENSWLPDEDTRAARRRVTRRANLVVARAKCKNEVLAVLHRNLKNRPPMTDPFGVAGREWLAGQLLPADERDTIDAALRQIDFLTEEITIIERDLATLVLGSDDARRLLTVPGVGMITAAVFLAQVGLSSEDITRFASPRQLVGYLGLDPRVRQSGNNTPHTGRISKEGASLVRQMLVESALTAVRSPGPLRGFYERIRARRGHPTAIVAVARKMASLFWHLLTRQQDYAYTLPTAHAKKIRAIELKAGYERRRGKGVRPDHLNREQRRAMERQIAQHAQTAYERTIADWQRHATTPART

SEQ ID NO: 417776 - protein, 426 aa, unidentified
MNCTQNQKINQVTEQTLVVGIDIAKRTHYACFVDDRGRVLRKSFPIFQSKEGFRQLYEAIQEAMQAFGKPQVIVAVEPTGHYWLNLAYFLEEHGIPLVMVNPAHVCRSKELDDNLPTKHDAKDALVIARLAKDGRFLVPRLLHEIEADLRVGSTLKEKLRKEQTAVKNAIVRWTDRYFPEFWTVFRDLGKTALSVLEWTPLPADMAGRSAEELIEVYRQSEGLKCPQKAKIQALINAAKDSIGVTEGTTMARFEIAALVRRYRQLEAEIAALDAELKALVQTTMEYQWLKTVDGLGDATIIDLLAEIGSFAHYRDPRQLVKLAGLTLKENSSGQRKGQKHISKRGRKRLRSVLFRAMIPLIRHNEAFRELHDYYTTRPVNPLTGKQSIVALCRKLLNVLFAICTKKQAFDAERMKQDVLSQVQRAA

SEQ ID NO: 417777 - protein, 409 aa, unidentified
MDIVHTHFVGLDVHKKTVVAAIIVPGKKETRTFETMTSDLLVLSDWLTVEGVTYAAMESTGEYWKPVFNILENNFEVLLVNAQYIKSVPGRKTDIKDAEWIADLLRYGLLKASFIPPVGQRELRELTRYRTTFVQEKATLVNRIQKVLESANIKLASVASNVVGVSGRAMLAAIIEGKAAPAEMAELSKGRLREKRDQLIKALEGQVKAHHRFVLTELLCQIDSLDETIARFDQQIQEYSRPFEKVVNLLDTIPGVARQTAEIIVSEIGIDMSRFESANHLSAWAGLAPGNNESAGKRLSGKTGRGNKALGVALNQAAHAVSHMKNNYLAAQYHRLAGRRGQKKAIVAVAHSIFVITYHMIKRKESYRELGGDYFDKRRPEATAKRLVKRLEQLDFTVSLEQASASLTD

SEQ ID NO: 417778 - protein, 411 aa, unidentified
MTLTNFQLPIFDWILAGDQLAIANRQSVAVATLYMKGRPEGSSLELFEDFKWIPKESPMKTYYVGMDVHRASIVIVVLNGAGKVVMESVIETGAERVRGFLKQLGGKVYVTFEEGTQANWLYEIVRPLVTEVVVCDPRHNKLLQSGNKNDRVDAQKLAELLRNGALKAVYHGDNGVRTLKELVRTYDCLVSDTTRVMNRLKAIYRGRAIGCAGHDIYRQERREQWLEKLTERGAKERASFLYQQLAALKPLRHEAKRMMVAEARRQRAYPWLMSVPQFGSVSVAQLLAIVSTPHRFRSKRQFWTYVGLAVVTRTTADHEVVQGVLRRRKRAVSTRGLNRNHNHQLKRVFKNAANGACHGGPFKAAYELRVKQGMVPSLARLTVARQLAATTLAIWKRGEQFNPERMKQQAA

SEQ ID NO: 417779 - protein, 405 aa, unidentified
MQRKYWAGIDLGKAYHKVAVLDARLALAMVPFRIGRGQRGVEKLLGAVQRLGGRPVDLAVSIEATGDYWLELVGILQARGCEVYLIHPKKAHDLRKFYSVHTKTDVTDAESLARMPLVDEQLKPVWIGSSMQQTLLRLCRLRWKARCRIADLKRRISTLSEIVVPGIDRVMPVRYSKSARLFLRRYLAPQKARRLGRRRLMEILSKAAWGKFSEKKSEELWACIKNAPDLGWNADDLLLEMNVQLDELEALEHQVERLDERIAELYTEIDPEERLKEIPGVGEFLAAALTAHIGDVSRFPNSKALISYAGLAPRVKESAGHTKQGQTITKHGSPFLRAWAYLGAACARQNDRELKEYYERMRKRGKHYNVALCATAARLLERIYDVLTERREEEAESQDQMICTG

SEQ ID NO: 417780 - protein, 453 aa, unidentified
MAQRNRSVSLKPGKSRQALTLTHPNAAGIDIGSVSHFVAVPPDRDDEPVREFASFTVDLHRLADWLEACGIDTVAMESTGVYWIALFEVLDARGFNVLLVNARHVKNVSGRKSDVLDCQWLQQLMSYGLLRGAFRPADAVCVLRSYSRQREMLLCSQARHVQHMQKALVQMNIQLSTVISDVAGATGQRILRAILAGERNGRALAELRDARIQASADEIAKSLQGNWREEHLFALKQAVALFDFYATQLVECDEVIENQLIALAVHADTPMPGKKRSRARNEPRFDLRERLFQMCGVDLTRIDGINVTTALVVMSEIGMDMTRFETVKHFTSWLGLCPGTKITGGKLLSGKTKRSANRAAQALRLAAAALRTSKSALGAYFRRMCSRMDKPKAITAAAHKLARLIYTLLTKGQEYTDQGQDYFEERYRQRVLHNLTQRAAKMGLRVVPADAVT

SEQ ID NO: 417781 - protein, 412 aa, unidentified
MELLHRRCCGLDVHKETVVACLRLVSNGKVTTEVRTFQTTTADLLRLSEWLAANDCTHVAMEATGVYWKPVWHILDDGEFELVLANAAHVKNVPGRKTDVNDATWLAELLAHGLIRASFVPDTQTQEMRNLLRTRKQLVREQSSHVLRVQKTLEDANIKLDSVLSDLMGKSGRAMIEALIVGETNPAKLASLADRRVKASPEELREALRGRVTKHHRFLLRLHLNQIDALDAAMATLDAQVAANLGPFRTAVDLIMSVPGIKNLGAQAIVSEIGIEMSRFPSDAHLISWAGICPRNDESAGKRRSNRLRKGAPWLKTTLVQCAWAAVKKKNSYLQAQFYRIKARRGPNKAIMAVAASILTAIYHMLKDGTMYQDLGRDHFDRRSTDQQKKSLVKRLADLGYAVEIKPLVASA

SEQ ID NO: 417782 - protein, 358 aa, unidentified
MQIIGIDVSKDTLYVALAESKDARNDKVIASHKFANNETGFKLFVDWMKKKKADAGTVCLMEATGVYHEHLADWLHRHGVTVVIELPNKIKHYAKCLNVKTKNDKVDAGVIARYGLHNAWTPWHPMTESLYQMRALLRQVQSMTKERTRCKNQLHALMHSAHAPGTVVGNLMDIIANYDRLIESYHDEVVRLAKEDEAFYARVEMVCTIKGVRAITVLTVLCETDGFQLCQSARQAVSYAGLDVSEYQSGTILKDKRISKKGNARIRHALYLPAMVAGTTGGPVSLMNLYKRVKQKHPTAKKVAIVAVERKLLMLIYTLWKKQEPFDPEKDGKPPIHNAYKSTQAVGSQSSEGSIPRK

SEQ ID NO: 417783 - protein, 331 aa, unidentified
MSTQNYAGIDIAKRHFVIGIHGRDKTKTETNNPKGFTHTIDYLHKHNVGLVVMESTGGLEIPLAKTLHRAGFQVVIANPRCTKNYANGFSLAKTDHLDAKMLADYAQALEIKGLVANMLYIPPSEAEEKLEALVKRRSQLVDIRAAEKNRLEQIHESQQQSVKDLIAHLDKLIAELDKDIDSNADAFGDKGQVLTAIKGIGSTTSATLLSMLPELGTVPHKRIAMLAGVVPPPNQSGDTDKKTGCIGGRMAVRNMLYMAALTASRFEPKIKAFYERLRAKGKPFKVAINACMHKLLRILNARMRDYLASLQTKSERQSEQQSEQQPAPQCA

SEQ ID NO: 417784 - protein, 341 aa, unidentified
MATVAIGVDTHKDTLAACLVDGLGIARDEQAFHNDPAGHAAFAAWVREQEAPVRVGIEGSASFGSALARHLVAAGFDVVEVPPQLSRRERTRTRRPGKSDPGDAFAIARVTVAEADLPPVRLDDRTRDLQLLAAARDTVVVAQTQARNRLHAHLVVLVPGYTATAARLVSGPELAAARRLLRGRHGVEADLARAELDEVVRLGGRAAVLERRLRSLLGDDPLLAIPGCGHLSAAVIRGEAGDVTRFRSHDAFAMFAGIAPVPASSGKISRVRFNRRGNRRVNRAIWTIATWQAKFDPRGRAYLARKRAEGKRSKEAMRCLKRHLVRHVFAALVADYQLEAI

SEQ ID NO: 417785 - protein, 342 aa, unidentified
MDKVTIIGVDLAKRSFQVHGASADGRVLFRKKLSRAQVVPFFTQQPHCTVAMEACATAHDWGRQIGALGHEVKLIPPIYVKPFVKRHKNDAADAEAIAEAASRPTMRTVAVKTHEQQSQAVLFRTRDLFLRQRTQLINALRAHLAEFGKVAPKAATNIKRLKKVLEDPENGLPQIVTDIGSVYFGQIATLTEQIGKLDKRVRTEAVKDDAARRLQTMPGIGPITAMAVSAFAPPMEIFRRGRDFAAWVGLVPKQHSTGGKQKLGRTSKMGQRDIRRLLVIGAMSVVKVAVHKGAPEGSWLQRMLARKPRMVVAVALANKMARRLWAMSVKNEDYRDPAIAAA

SEQ ID NO: 417786 - protein, 358 aa, unidentified
MKYVGIDVHKKMCQAAILDEEGTLLDEIRFANTPEEIEEFAGKLTTFHDDVKAVVESTGNLWIQIHDRLEEHGFDVALSNPSKTRLIAEAKVKTDKVDARTLAALLRADMLPTCYVPGEELRSRRELLRHRLNMVKIRTGVKNRVHGLLDKHGLRMPGITPFSKENIAWLREQSFGFMDDAIVRSDLAVLEAVDGQVTLIEEKIATIAAEDKRVRLLMTMTGVGYFTAMLVMAEVGDVGRFRGDKEFASWMGLVPSVHQSGERIRMGGVSGPGNKRLRWALVESAQAAVRFDPRFGGMYERVSRRRGKGCAVVAVAHEMARIMYFMLSRGELYRGENRGLTERKLKSMSKKAFNGLRN

SEQ ID NO: 417787 - protein, 344 aa, unidentified
MDHFGGLDVSVKETSVCIVDDTGRIVKEVKVASEPEALRKVLRNPAYRFKRIGLEAGPLSQWLFSALAEAELPVVCVETRHMQAVLKAQINKTDRNDARGIAQMMRAGLYRPVHVKTLRSQKLRMLLTHRKLLQSKAIAIENDLRGTLRNFGLKVGMVGKVRFEVRIQELVENQPDLAVLVEPLLIVRRALREQIVILHRRLLAIVRDDEVCRRLMTTPGVGPVVALTYRATVDVPARFRKSKSVGAVFGLTCSRYQSGEIDWSGRISRCGDEMMRVMLYEAAQSMLRSKKWSWLKAWAMQIARRRGIKKAIVALARRLAVIMHRIWVDGTEFRWTREKVAAAA

SEQ ID NO: 417788 - protein, 346 aa, unidentified
MDTITTVGIDLAKNVFQVHAIDAGGAVIVSRAVRRAGLLQLLGKFPRCLIGMEACASSHHWARELIKLGQTVKLIPPAYVKAYVRRQKNDAADAAAICEAVSRPSMRFVPVKTEAQQAVLMLHRTRALLVAQRTALICALRSHMAEFGIVAPVGPRHVAPLLGILADGSDDRIPSLARQALRPLARRIAMLRLEVERLDRKLTDWHRSNAVSQRLATIPGVGPLTATALAATIADPSMFRSGREFAAFLGLVPRQTSSGGKEKLGRISKMGDRYLRTLLVVGATAVLRYAKTDGSTSKVWAQALLAKKPFKLVAVALANKTARIAWAVMARGEAFREGVEVRAQAA

SEQ ID NO: 417789 - protein, 361 aa, unidentified
MKKPTQHLIAEVPRSSSKVGMTIGIDLGDVWSHYCTLNEDGEVVGRGRFRTSPSGVEKWFTDLPPVRIAMEAGTHSIWISEQLQELGHEVIVANVRELRAISHSDRKSDQVDAEKLARYARLDPKILRPIAHRTVAQQEALTLIRARNLIVRLRTAAVNAVRGLAKPCGYRLPASSTLCFAKRCVAVLPPGLAQALGPVLEQIAEMTKKIKHYDRLIKRLTETEYPETQALIQVYGVGQLTALTYVLTLGNKERFQRSRDVGCYLGLRPKRSQSGDRDPQLGITKAGNIYLRTLLVECANHVLGPHGRDSTLRQWGLHLASRGGKQSRNRAIVAVARKLAVLLHRIWITQEPYIPFYGVAA

SEQ ID NO: 417790 - protein, 370 aa, unidentified
MQRKQISFKGQKIFVGIDVHKDSWRVAIAPEMGVVKGHSQNPSAKELFDFLKKHYPDGDYHAVYESGFSGFSTYYALTDIGIDCIVMHAADVPTTQYEEFMKTDRVDAAKLVKSLKAGLLTGIYIHERDNIDARSVVRLRKTTQKMLGGCKSRVKHLLHCNGVVLPERFSRPGTHWSKAFIRWLKEEVRLISSTRDSLDILIEQVESLRKTLLGATRKVRRLSQSDRFKPQYDLLASVPGIGISVAMSILTEIGDISRFRNEREFASYLGLIPTSHSSSGDKVSHGEKTFRGNKKLGPQLVEAAWISIYRDHGLGCAYMAYKKRMEPQKAIIRIARKLSNIIIAVLKTGEPYEPYQWIEKERHTDRKTTS

SEQ ID NO: 417791 - protein, 424 aa, unidentified
MNLTQNDRLKQVTSDTLIVGVDVGLKTHFCRAFDWRGFELSRRVFKFSNTGMGFLTFLRWTEELMNKTEMKKVIVGCEPTGCYWLTFQKFLQDHDIQLVTVNPFTVNRSMELDDNSPEKSDLKDPKTIALLVKDGRFSTSYLPSGVYAEIREASVCRDQIMKQHVRLSNQIQGWIQKFFPEYFECYADWDSTSGLMLLREAPLPQDILKIGAGGINQIWRNAKVRAAGIKRAQTLVEAAQNSVGLEAGEAARLEIWVLVNDYILKAEQLKRLDEYLEEKVKEVPNVEKLLAIKGVGMSTVIGFIAEVGDIGRFTDPKQIQKLAGLEIVKKSSGKKKGQPRISKRGRRKLRRTMYESVRALMTWSPAFQDVFLYYRNRTKNPLGGMQAKIAVACKAIRIFYVVLQTGCDFDEEKFRKDIIRPEAA

SEQ ID NO: 417792 - protein, 345 aa, unidentified
MEPMYYIGLDVHKQKISYCVKDSGGKLSAEGWIPATRHDLDCWMKNLPQPWSAAMEATMFTGWIYDHLKPHAAMLKVAHPLMLRAIAAAKKKNDRIDASKICDCLRCDFLPESYMAPTAIRERRRTLRYRNLLVRQMVQMKNKVGMLLMEAGVSYNKQKLHKAGYFRELLASNPDIDPGLRALLCQCREMVVRLGKMEAALIRSLQQDRLLAERVVRLMSIPAVGPITALTWALEVGEVQRFSSIKKAVSYCGLCGAEKSSGNTVQRTPLSKQRNKHLQTTLIEAAKMAPRYSPTLALLYDREKQRGNVNRATLTVARKLVAYLMAVDRGQTHFLVLDRDSSAAA

SEQ ID NO: 417793 - protein, 339 aa, unidentified
MESNKKTYYNQYLAIDWSIVDVEIARMSAQGAKILTRRFDPDIKQIKEYLSSIKGKKIMTIEETTSSHWLYVELLDCVDRIIICDPYRNSLLAEGPKNDKIDARKLCLLLRSGLLKEVYHSLEEDYKIRKLVSAYEALVKAGVRVKNQKSAIYRAEGLRYKKDKIKKQDEILSFIEQQQNASIKHYEQEKEKYENKFREIKKKNKIIKMLCGISGIGTISAVKIYSKVIDAGRFENKYKYWGMCGLVYYQRESGGRNYGRKKPRYSRTLKSVYKTAAMAAIGGKNDIREYYEVLLKQGYSISEARNQIARYIAKVSYGVMKNEISYRAYQWRELKKVAA

SEQ ID NO: 417794 - protein, 351 aa, unidentified
MIIIGVDYHPSVQQIAYVDTETGETCERRLNHSDGEAEHFYRALERRQVSVRVGIEATGHARWFERLLAELKFELWIGNAAEIKAARVRKQKTDRQDALLLLKLLVEDRFPRLWVPSPENRDLRQLIWHRHRLVQMRTRAMNQIQATAMNEGVRRKKALWSKSGRQQLESLLLAPWATRRRQDLLELVDRLNGTLAELTTAIEQEAHKRPEVLRLMTHPGVGPITALAFVLVIGSPDRFACGKQIGSYLGLIPCEDSSANRQRLGHITKQGSSLVRFLLAESAQAAVRWDSDWRRRYAHLSMRRDRRIAKVAMARRLAISLYWMWRKGYDYQQSLKFGSHAGEPGYRHGVK

SEQ ID NO: 417795 - protein, 347 aa, unidentified
MDHIGMDVHKKESQICILAEGGELIERRVRTEPERFAAVLGDQPRARILIEASTDSEWVARCLEGLGHEVVVADPNFAPMYATRTRKIKTDRRDARALAEACLLGAYRRAHRLSDPQRHVRGRLLVRDALVRTRTCYISLIRALLRQHGYRVPSGSAEAFLRRVLALSLPGRLLSQIAPLLAVMRHVNRQLSYSDQVIEDVTAQDERVQRLRTVPSVGPVTAAAFVATIDDVRRFRRAHEVEAYLGLVPRELSSGESQRRGRITKAGHARMRWLLIQAAVSILRRRPPQAEALHAWALHIAARRGKHVAVVALARRLAGILYALLRDGSVFAPERSRHPGAALALPA

SEQ ID NO: 417796 - protein, 338 aa, unidentified
MALYCGIDLHSTNCWTAVLDEDRRLIRERKVSNDLKELLDVLEPYRADLEGIAVESTFNWYWLVDGLMEAGYRVHLTNTWAAKQYEGLKYTDDRHDARWLAHLLSLGILPEGFIYPKEERAVRDLLRRRAFLVHKRTSFLLSMRGAFECRTGMRVKSDEIKKWEAGDVEQFIDDPVAALGITCLLGPIAALNDQIKVIEKEALQRGRLRDEFGRLQTVWGIGKILGLTIMYEVGDIGRFADVGNFASYCRCVKSDRLSNGKRKGSGNSRNGNPYLSWAFSEAAHFAVCHHEAARKFVHKKRSKTNAIIAIRALAHKLARASYHVMKDRVDFDPARTFA

SEQ ID NO: 417797 - protein, 338 aa, unidentified
MNLSRIGLDLAKQVFQVHGVDRHEHVVCRRQLKRAQVRDFFRQLPPCLVAMEACGSAHYWARELRELGHTVRLIAPQFVKPYVKGDKHDAHDAEAICEAASRPSMRYVPVKSAEQQAVQSVHRVRSRLVRARTALCNEVRGLLGEFGLIATRRGRAATMALLETVTATEPAPLPAPMGELLRELKDELQTLEARIARLERQIQAHVRGDARIQRLLAVEGIGPISASAVAASAGDARQFRTGRQFAAWLGLVPRQHSTGGQQRLGNISKRGDTYLRTLLIHGARAVMRCCANKTDARSRWLQGLLQRRPANVVAVALANKNARILWALLSRETCYRPG

SEQ ID NO: 417798 - protein, 351 aa, unidentified
MKTEPTAQPKLYIGIDIHKRSWKVHCATDLFAGKSFAMPPKPEVLQQYVSKHFPNHEVTTAYEAGCCGYYAHRSFRQYGWTSLVVNPADIHRKGKERFTKTDKIDAQLISRELKDGRLESIHVPEIEREQLRSLFRRRNDLVKDFRRIKSHIKMQLLYFGVAIPEEFDNDHWSHKFRGWIDDLSFVYPSARETLDSRMRSFRFIDQELRDVSSKIRAYCRNHYKKDYYLLKSIPGVGGIVASGIICELGDLRRFKSIKHLAGYVGLAPGIHQSGDNQKSTGITMRAHRLMRSYFIEAAWQAIRTDPIMQAYYRKHLGKDVKSIIIKVARKLLSRTLAVIKTETPYTIGVIE

SEQ ID NO: 417799 - protein, 442 aa, unidentified
MGFSQLIPKEVLPAMTAPSSSTSTTMWVAIDIAKTHHRVLLEHPDGRRRPFRIANTLEDFTKFSAFLSHRGCSCRMAFEPTGDYHRPLAHFLQAQGFTLALVSSVAVARTREALYNSWDKNDPKDAQVILHLLKTGTTQVYHDPLEHRYLDLQELANTYPQLSLQKTQLLHRLLTHYLPLYFPEAERYLHSSRAEWWTRLLLLVPCPAAVRKYSPEEFIAVARRLDAHKKDKTRWLADFYQTARTSIGLPVPEDSEAIRMFRLVLQEYLHLCRLRCELEEQVVERLSDHPDFRRLQTIPGIGPILALFIMAEAGDLRRFRHHRQFLKYCGLDLSTEQSGQFRGITKLSKRGNARLRYAFWVAGTVAVRAKQNSFSRKFYQYIRHDPADPDLRRKAYTAIAAKMARVAYAIVKAGTDYRRFPEATMPGGRIPSARAVEAIPTS

SEQ ID NO: 417800 - protein, 411 aa, unidentified
MRRVIGIDVHRTFGEVVIWEDGRLRHAGRIDMTRTALEGFGKTLLASDEVVVEATGNSMAVSRVLAPFVARVIIANPLQVKAIAQAHVKTDKIDAGTLASLQAAGYLPQIWTPDAETERKRRLVARRYQVVRHRTRLKNEVHSILHAHLIPKCPHADLFNGRGRAWLVAQPLPDDERAAIDRHVRELDRLAEDLALLDREIAQDAIDDSAVNRLMTITGVNLAVAAGIMAAIGDISRFNSPQKLVSYFGLNPRVRQSGLGAAHHGHISKIGRSHARAMLVEAAWAAAKAPGPLHAFFVRIRARRGHQIAAVAVARKLTVLCWHLLTKGEDYLWARPALVAIKTRAMQLQAGHPQQKGRRRGPAYAYNIKVLRDREMLIAAQAEQSYERLVTQWKPRRPKTGARAPQLGKTK

SEQ ID NO: 417801 - protein, 397 aa, unidentified
MYIVGIDIAKRKHEAAVIDGEGTVIIKPFSFTNNCSGYNRLLAMLAKAKLPLDEVSFAMEATGHYWLALFTRLQKEGFRVQVINPVQTNSIRSFYIRQAKTDPRDALLIAEVIRFGHFSESTLHPENIYELRELCRGRHAIVSMQADIKRKVVALLDQVFPEYETAFTNLFGDTSMAILQACPTPKELSEMPLEEFCHLIEVPSRKRFRTEKAQELQALARNSFGFAMAGDVFSTMIRLYAKHLDFLKQQVQEMDRKIAEIMDTLDTPITTITGIGPTLGAYILSEIGDISRFSSAAKLAAYAGIDPTMRQSGEYNGVRNRMSKRGSPYLRHAIWLAASSAVLHDPALKLYFQKKRDEGKPYMASVGHACRKMVSIIYAVMRDNKAYTPYIPNEISA

SEQ ID NO: 417802 - protein, 372 aa, unidentified
MTSIIYVGMDVHTTNYTLCCYSMEDDRFFAEVQVEPDAKNILKYLARIEKQQSRDCRIVCGYEAGCLGYSLYHQLHAHGIDCVILAPTTMMTKPGKRIKTDRRDARLISKCLAFHTYSPVYIPTEVDDAVKEYIRMRDDANSALARVKQQIIAFCIRHGKIHDGKSYWTNKHLEWLSSLDLGNKILSEVLQECLIRYYQLREQVDMYDMRINELAQAEPYRQKVEKLGCFRGIAAHTALSFCVEVGDFRRFATAQQFASYLGLVPGECSSGDKQQYTGITKAGNSHLRKLLVETAQVFGRSATKSGKSVALKERQAKCDSLTVAYADKANARLKKKYFKIAMRSKVNIAKTAVAREMACFIWGMMTDNISCA

SEQ ID NO: 417803 - protein, 337 aa, unidentified
MKVTLIGIDLAKSIFQVCGVNQAGKHVFNRQVRRAKLMEFLIQHPDASIAMEACSGSNYWGRELQQRGFRVMLIPPQHVKPFVKGNKNDRNDAFAITEAAKRPNMKCVEPRTLAQTDMIQIHRVLSRLIRQRTALINQIRGCLNEYGVVVARGKEKLLAAMPDLLEDADNGLTPSSRALYQELLEQWRQANEAIDRLEKNLKRQANSSEAARRLMTLNGVAVKISTAVIAHAGNGHGYKNGRHFSANLGLVPKEHSSGGVQKLGGITKRGNHYLRRLLVQGAWSVIRHAGKNDDRLSRWARQLIERRGKHKAVVAVANKMARIMWSMLYHQTEYRAN

SEQ ID NO: 417804 - protein, 321 aa, unidentified
MFMDTTSHTLVGIDVAKHSLDVYVTSEERCFSVKNSTAGFRQLLAELPAAGSCLVVIEATGGYQSRVVGALVAAAHRVAVVNPRQVRDFARSLGILAKTDRLDARVIARFGEHARPRTVEVGSEKQAELRELVTRRRQLVELRTAEQNRLETTLTKVVRKNVRHLVEQLEKQIRQLEEAIGQLMENEPELAAKAALLETVPGVGPMTVTSLLVDLPELGRLDRQQVAALVGVAPFNRDSGKFHGRRRIWGGRSTVRSVLYMAALTARRFNPFIREFAQRLEAAGKPFKVVLTACMRKLLVILNSMVKNNLPWNSKLHPHCG

SEQ ID NO: 417805 - protein, 385 aa, unidentified
MGSQAFIPRDYDVFAGLDVDKKSISATFSDHQGIQKSVRMPYSVEHLVNHARKHYGDKKIAFAYEAGPTGYGLYDGLVTQQYTCLIASPSMIPKAPGQRVKTNRLDSRTLSENLRGGQLKSIHVPTTLYRELRHLTQLRDALVSEAVAMKQRIKSLLLMEGLEFPPAPAGSQWSLIVKNKLRELPCSAAVRFKLDRLLDSLEFSEKQIVKTTAEIRRFCHNDPELSRCIGYLQSLPGIGWIVASQLMARIGDWRQIQNIRQLPAFLGLVPTENSTGERTERGSITRSGDPRLRSKLIQASWSAIRQDAELREFFRSVCQKHPRPVASRVAIVAVAHKLSVRASVVLMKQRPYEVRQTVQSAPLTQEETVSQGTTRRQAVPGDKNS

SEQ ID NO: 417806 - protein, 315 aa, unidentified
MSSPAVCVGIDVSKATLDLALRPTGERWTLANDEAAIQALVHDLRPRVPSLIVLEATGGFEHAVVAALAAAGLPVVVANPRQVRDFARATGQLAKTDAIDAQVLALFAERVRPEPRPLPDAAAQALDALLTRRRQLLDMLVAEKNRLGFARPVVRRGITQHIRWLERRLGDVDHELGQMIEQSPVWRAKDDLLQSVPGVGPVLSRTLLGELPELGQLNRKQIAALVGVAPLARDSGTLRGKRLVWGGRAPIRTVLYMSALVAARHNPVLRAFYLRLRAAGKPAKVALTACMRKLLTILNAMVRSNTHWQHVHAAG

SEQ ID NO: 417807 - protein, 365 aa, unidentified
MQPMYYIGLDVHKRKISYCVKDSGGKVYAEGSLPATRFDLDHWMKTLPQPWTAAMEATMFTGWIYDHLKPHAAALKVAHPLMLRAIVAAKKKNDRIDANKICDCLRCDFLPECYMASTAIRERRRTLRYRNLLVRQMVQMKNKTSMLLMEAGVSYNKQRLHKAGYFRELLATNPDIDEGLVPLLRLCRETVVRLQRTESALVRSLERDSLLMDRVERLMTIPAVGPITALTWALEVGDAQRFSSIKKAISYCGLCGAEKRSANTVQRTPLSKQRNKHLQTTLIEAAKMAPRNSPELAMLYDTEKQKGNANRATLAVARKLVAYLMAVDRRQRDFQVVETSSGIAAQSAAVNKEDFFGASPARSCR

SEQ ID NO: 417808 - protein, 428 aa, unidentified
MNEEDHTRLEEFRQFRREIRKSTEYLIVGIDVAKDKHHAFFGTAAGKTLCKRLVFENDIEGFSKLLVQAEALRVQEGLKKVVFGLEPTGNYHKPLGEHLIRCGRGVVLVSGVAAHENRKTLDGRWDSNDPRDAANVADLVSQGKCLFYEFPVGGLQDLRNLLSLKRRLKRQEHGYRVRIRNHIVAKYFPELDRYFEQSEKTSLAVVRWCLDPSVIAGLEYPRFVETVSSGQRRLAQENRLQAIWKMAVDSIGCEVGPAVAFEVKVMVEGLKQIRESIRQIDEKIQEVCSRFPEYGFLLSIPGFGPDVSSKVLGAVGDPFRFQSGKQVLKMGGLDLSAERSGKTSPAAIPVISKKGKADLRYALYQAALVASTKNHHFMVYYTNKLWGREREPGIKTKMRVKLAAKLLIIAWTLMKEKEPFNPDYLNLE

SEQ ID NO: 417809 - protein, 390 aa, unidentified
MDARTMNDLPPAATHDGVVRCPMAIELSKKSWIIAVNTPLSNKISNYTVKDWNGLRELIDKIRTRVGRELKQPVEIVSCYEAGYDGFWLHRLLEQAGVRNYVIDPASVQVDRRARRVKTDNVDVTKLLRSLMAYLRGEPKVWSVVRVPTVAEEDDRRLHRERDRLISERVRHVNRIKGLCAVHGVYHYEPLRSDRMKRLEQLRTGDGRQLPPRLKAEIWRELQRLELVLQMIKTIEKERNAMALGRAPSTYGNAKKVQQLVKIGSIGPEIATVLVGEVFFRQFNNRQEVGSYVGLTPSHFQSGPSSRDQGISKAGNHKARTIMLELAWFWIRYQPDSPLTIWFRERVGTAKGRIRRIAIVAVARKLLIALWRYVETGMVPTGAKLKTSNR

SEQ ID NO: 417810 - protein, 345 aa, unidentified
MPIVGGLDIHRKQITFDYLDTATGQVRRGQVSPADREHLRGWLARFAGRDDAAFAVEGCTGWRYVAEELAAAGVTVHLAEPADTAFARGRKRHAKTDKTDCRHLRQLLAEGRLPQCWIPPGHILECRALLELYNDLRREHTAWAQRIHAVLFHQGAPALGEGTLRSEQGLAALRAAAAAQLAPAGQLQVATALEVTAALEARMHAVRHQLLDAARHLTGAKVLAARLYGVGPVTALALTCWLGGAGRFSSSRKAVRFAGLDVTVWSSDRKGPPGRLSRQGPPVLRWAVYEAGKTHARSSAPDHAYYAQVKENNGGKRAALSEARKIIRQACHILTELGDDALAAV

SEQ ID NO: 417811 - protein, 311 aa, unidentified
MIEHTIGVDISKSHLDVFDAERSEAKRFENSASGFRAFEKWCGEFEVVRVVYEPTGPYHRNFEERFCEQLPLVKVNPLQARRFAEACGTRAKTDALDARGLARMGIALELEPDTPVAKTTRILKDLQVARTALVKERTRLNNRAYVQTNTVLKRQTKARLALVEKQLCELDREIDTLIKADKIAARRREIVQSIPGLGSVASAAILTYLPEIGTLERRQVGSLAGVVPYNRDSGQWKGKSFISGGRKPLRDALYMPALVAMRYNPNLKAKYEALRAAGKPAKVAIVAIMRKLIETANALVKADRIWVPKTA

SEQ ID NO: 417812 - protein, 394 aa, unidentified
MRISIGIDAAKEVHWVTAVTADGEALIDRKLANTAEDIGRLAAELAALGGERLIGIDLLGGIATLVSAMLLAAGERLVHVPGLAVNRARQGGVGGQAKSDPRDARVIADQLRLRAGDVRLVTLENDAVAELRLLVSRRDDLVTDQTRRISRMRSLINTIHPDLERALDLTDAGPLTLVARYVTAAEIRAAGPKAIARHLRAKGARAPDALAAAAVAAARAHPAGLRLPAEAVTADLVRELAGEAIDARRRIAVLDRRLAELVAAHPDGALIRSLPGMGVVLAAELIAEAGDLCRFRSAAALAAAAGLAPVLRQSGKSARLMRPGYANNRLKRVFYQSAFCSLSHPLSRAFYDRKRQEGKRHHQAIIALARRRIDVLWALIASRRPFDAEHRHAA

SEQ ID NO: 417813 - protein, 342 aa, unidentified
MAAIGVDTHKATLAACAVDPLGTPIAEATFANDPKGHLTFIAWARSKAPEATIGIEGSSSYGAPLARSAQRAGLCVREVPPHLSRAERRRTRRPGKSDPGDALAIARVTARERNLPPIRLPDQTTELRLLVEAREDLIGEATRVRNRLHAHLIILLPGYGGTVANLVAAHNRTAIGRRLRGNSTVQAELARSLLARLVHIGREVDGLTRRITAGVAGHPLLGLPGAGAITVARLIAEVGDVRRLRTADALAALAGVAPIPASSGQIQRMRLNRGGNRQLNRALHVIAVSQARFHPEAKAYVTRRIDVDGKTWREAIRALKRRLVRPVYRLLLEGSSVHLAAA

SEQ ID NO: 417814 - protein, 420 aa, unidentified
MKEESIEFAAYIGLDWADRTHVIRLRCAGSQAVEQREVTHTPEALAAWVSELQQRFGGRPVAVALEQSRGAVVHALMSYDFVVLYPVNPKSLAKYREAFRVGGAKDDPDDAQLLLELLTLHRDKLRAWVPDDELTRTLGLLVQYRRQLIDERTSLTNRLTSLLKLYYPQALRWAGGLATQQAGEFLRHWPTLADIQRAPATTLRKFYLAHGCRKAELIEQRLQEIKLAQPLTRDLAVITASVSMVQAIVNQLRALITAVAQMEKQITELFGQHPDHDLFDSFPGAGPVLAPRLLTAMGADRQRFSAAREVQQFSGIAPVTERSGQSCWVHWRRACPKFVRQSFHEYAARSIRWSPWAKAFYEQQRQKGNGHHAAVRSLAYRWIRIVYRCWQQRGLYSEVTYQQALIRRHSPLAKLLPAPH

SEQ ID NO: 417815 - protein, 384 aa, unidentified
MATEKERFQTTTVALDRLGGWLADRQVSLVAMEATGVYWKPVYYALESRFEVWLCNAHHVKNVPGRKTDMSDAEWLADVAAHGMIRPSFVPPPPIRELRELTRYRKTQTDARAAEIQRLEKVLQDAGVKLTSVASKVLTQSGRLMVEALVDGQRDPAELANLAKGKLRPKIPELTEALAGRFGAHHAVAARRILDHIDFLDATIAALTEQIDARTEPFQAAKQLLSSVPGFDRLVIDTVIAETGADMSRFPSPGHLAKWAGVCPGNHESAGKRRRVGITPGNSWLRRALIEAARAAARTRGSYFGAQYRQIAKRRGPNKAAVAVAHSLSDLIWHQLTTGECFHDLGDDYFQRRRDPERETRRLVAQLQQLGFQVALTPSRDPAA

SEQ ID NO: 417816 - protein, 411 aa, unidentified
MRLFVSDDWAEDHHDVEVMNESGKVLARRRLPEGVAGMTGLHGLIGRFLPGDADGAEVVIGIETDRGPWVAALVAAGYLVFPVNPLQASRYRERHGVSGAKSDGADAHMLADMVRTDSHQLRPAAGDSPEAEAVKVVTRTHKTLIWERTRAVQRLRHQLREYFPAALEAFEDLDAPDVLELLARAPDPARAAKLTRAQISAVLKRARRHNIKDKTDAILAALRGEHLGQPPALTAAYAATTRSLTAVITTLNEQVKILEEQVREHFGRHPDAEIYQSQPGLAAILGARVLGEFGDDPHRYASSKARKNYGGTSPITRASGKKKVVAARFIHNDRLIDALMSWAFSSLNASPGARAFYDQQRAKGLEHNDALRRLANRLTGILHGCLQTRTRYDEATAWSHRENLPQSSVAA

SEQ ID NO: 417817 - protein, 457 aa, unidentified
MPQPKRSRSRTGLSAVHPAAAAIDIGATMHVAAVGPDRDTEPVRTFQTFTDDLHRLADWFARCGVKTVAMESTGVYWIPVFEILEQRGFEVMVVNARDAKHVPGRKTDVSDAEWLQRLHEYGLLRPSFRPQAEIAGLRAYLRQRERLLDYAAAHIQHMQKALMQMNLQLHHVVSDITGVTGMNIIRAIVAGERDPNVLASHRERGCHASVETICQALVGNYREEHVFALSQAIELYDVYQTKVAACDRQIEVILKRLKKSATPPASKLLPPKHRSRQPNAPSFDARAALHAILGVDLTQIHGLGPYLALKLVGECGTNLTAWPTAKHFTSWLGLAPHNKISGGKVLSSKTRRTSNRAASLLRLAAVSVGRTDTALGAFYRRLAARAGKAKAITATARKIAVLFYNTLRHGMSYADPGATYYEERYRQRVLGNLQRRAKSLGYVLHQAERDPIQMVVS

SEQ ID NO: 417818 - protein, 347 aa, unidentified
MRFYTQQHRHYCGIDLHARSLYVCVLDQAGNTLLHRKLACDREALLTALKPYKKDLVVAVECLFCWYWVADLCEENGFTFVLGHALFMKAIHGGKTKNDRSDSAKIASLLRGGNLPQAYVYPRKMRPTRDLLRRRLFFSRKRGELFAHIQNTNTQYNLPPLEQRVRKTKDRGDVIEHFDEERLQMTVAVDVTLATAYDEVIRELELFLLHEVRQDHNAGFFLLRSIPGIGEILALTLLYEIHDIKRFPRVQEFLSYSRLVKGMHESAGKIKKAAGGKMGNVHLKWAFSEAAALFLRANAAGQKYFAGLEKKHGKGKALSVLAAKLGRAVYYMLLRGKPFDMKRFVAG

SEQ ID NO: 417819 - protein, 327 aa, unidentified
MTVSVSSDNPIFIGIDVGGASLEAAWHWGGCIQYQNRPDAIAALVERLRVEKQIARVCVEPTGGYEKPLVKALRGAGLPVEMVHTSRFAAYRKLVGAKAKSDTSDARLLAAYAAASEEVRGRKPDHVELPQDAVREQLSELATRRDQIKRMIHAETCRMATVRNQAIRQQIATHLETLRVADRELHATMMHLVRQRDDLRQAKRLLQTITGIGDKTALVSLAAVPELGLVSNKGAAALIGVAPYVHKSGTVKAPARIQGGRAAVRHVFYMAAVTASRHNPVLAPFYKRLIAAGKPPKVALVAVMRRLVVYANAVLRSGQPWKGAQFA

SEQ ID NO: 417820 - protein, 421 aa, unidentified
MGKLIERCAGIDIGKRFLVCCVMTGAAHEEPRSETRRFDTTVPGLKRLRNWFNEERVTDVVMESTGSYWIPVFNLLEGHVTVVLANPEEVKNRKGHKTDRKDAGHLADLLRHNHVKSSYIPAEPVRQLRDLTRRRVQLTQDATRERNRVQKLLEQVNVKIGSVLTDVFGVSGLHMLLALLDGRAAPEEIAGLARGSAKRKTPQLIEALEGNRMSDHVRFLIRGCLRHLACLEEEVEELDAEILRRMQLSTFQKAFTLLQTIPGVGQLSAATILAETGPDLDSFPTIEQMASWAGLCPGNRESAGIQKGPQTTHGNPYLCTALVQCAWAATRKRDSVFRSRFQRLAPRRGEKRAIIAVAHHMLIILYYMLKRGVPFLGAEHAPKQRRRERRAHHHLRCLRRLGFSVEIRLSSESTPPDTISR

SEQ ID NO: 417821 - protein, 348 aa, unidentified
MTLVGCDLHARDQQVAVLDTATGEIQERRLTHDGCSVEQFYAALPGPVTVGIESTGYALWFHALLHRLGHEVIVGDAAKIRAMVVRKTKTDRRDAAHLLDLLRHDRFPTVWLPDPAVRDQRTLLAHRMRLVRMRTMVKNGVHAIALNYRLALGPSLFTRAGVAQLQALSLPAHTACRRSESLELLSWLNTHIKGLDDQIEEAAHAHPEAQRLMTHPGVGPLSALATVLVLGSVTRFPTSKHVVSYVGLAPAIESSAGKHRLGRITKQGNALLRYVLGQASQAAIKRDPDLKRLYYAVLHRRGRSRAKIAVARKLLVRLYVMLRDQIDYQTFLHRAPAAARRKEMPPTS

SEQ ID NO: 417822 - protein, 343 aa, unidentified
MQTITTIGLDIAKSVFQVHGVDAEGKVIVRRQLKRRYVLTFFQKLPPCRVGIEACASSHYWSRELQALGHTVRLMPPAYVKPYVKRQKNDSADAEAICEAVTRANMRFVATKTTEQQSCLMLHRTRHLFIRQQTAVINAIRAHFAEFGIVAPVGRTGVEQLLKVASDGNDKRLPDVARACIAALGAQLQMLKTRILEFDRLIMAWHRSNQVSQRLDELPGVGPALATALVASVADPKAFRSGRDFSAWIGLVPKQHSSGGRERLGSISKQGDRYLRSLFVVGALAVIRYAKIHGTEHRPWLTALLARKPTKVAAIALANKLARMAWAMMAKGERYKQPVALAA

SEQ ID NO: 417823 - protein, 404 aa, unidentified
MKVTYQTCCGVDVHKSFLVATIVKTTGGIEPSYQKERFSTFNNSILEFKQWLLDNDCHDVCMESTGKYWVPVFNLLEDDINVVIANPKWVKAVKGNKDDTKDSKWIGDLFRLGLVKGSYIPCKKVRILREYTRYRYKLVSCRSSEKNRYQNALTVCNVALDSVVSDIFGKSSTSIIDYLLEQSGSSINHEEIASKLLRSLKSKEDAVIESVEGYQMTDAQKYRMRLVRAHMDYITAEINDVDKMIENMISSNTDFENAVQFLCTIPGVKRDSAITIISEIGTDMSQFSSSKRLCCWAGLTPGSNESAGKKKSVRITRAGVYLKPALVQCAHAAVKSDKSPYYKKKYESLVKRRGKKRAIIAIARMILTAIYQMLSTGEQWNPSDLYKIDMPVALVEKQKAKAIK

SEQ ID NO: 417824 - protein, 429 aa, unidentified
MKIIYPRVCGIDVHKQFIVAVICISESVEPIYLKKRFSTFHNDLIRFRNWLIQNDCQNVCMESTGKYYIPVYNVLESHISNIVVANPKWVRAVKGEKDDDKDAKWIADLFKFDIVRSSFIPQKDFRILRELTRYKYKLVNMRSSEKNRFQNALTSGNCKLDMVFTDVFGKSASNIIDLILSDNPYTDEDILSKVHKKCKASPDMILDSVNGTDLTPVQKSRIELVNDHIKQLSSNIQRLDKLIDLMIEPYEDYISFLCQIPGVSINSAITILSEIGVDMNQFTSTRRLTSWAGLTPSSNQSAGKKKSVRISRAGVYLKPCLVEVAHAAVKDKKHPYYANKFNKISKRRGKKRAFIAIARKILVAAYHMLLTGEIWNPADLAEVETPVEQRIKYVKNNLKSDIKQLLDIGLTVEELTIMIQQNANIIATQ

SEQ ID NO: 417825 - protein, 379 aa, unidentified
MTCKECGQVVKLTRTMNKCHSNTELSSLEETRCQFNGGTGAIKLGIDVHQDFYVVVEQAGGSNPKPPQRFPKAAFLHWAAKLKSQATEVYAVYEACGFGFSLQRKLSALSIKCYVVCPQKLDEQNRRVKTDGLDAKALCLKLDRFVQGNRDALAIVRVPSEEEEQARAIHRQREQLVKARKQLEAQGRSLMVNHGLEPVPNWWKPRTFTALPAPQWMKELLANSQPILVGLQQKIAALTVQLQSAASPEQPRGLGKMTSVVIDREIGDWNRFSNRRQIASYTGLCPGEYSSGNTRLQSCVTKHGNPRLRAALVELAWRLVRFQPNYHPVRKWRQILAKGALATGAARKKAIVAVARQLAVDLWRIKTGRLRAEELGLIN

SEQ ID NO: 417826 - protein, 465 aa, unidentified
MRTYKKLWQNRKARKELARRLQSENPGLEVVHPHAAGIDVGNGAHYVAVRPDRDAQPVRRFECFTADLYRLAEWLHSCGVKTVALQSTGVYWIPLYDILEERGFEVYLVNAQHTKNLPGRKSDVQESQWLLKLHTYGLLGNSFHPPSKIRTLRTYWRQRLQHVTGAATCVQRMQKALTQMNIQLANVISDLSGVTGQLIVRAIIAGERDSWRLAELSHPRIQASRTEIAKSLEGTWRPELVFVLQQELEMYDTYQRRIAECDQQLQKYLAAFADTGTPPAKQELPPKKKKKQNKNNPHFHLADELQRITGVDLTRIDGVDVFVAQTLISEVGLDMSRWKTEAHFASWLGLCPDNRISGDKVLARGTRHVLNRAATALRLGASTLLKSQTYLGAQYRRLRSKLGAPKAITAMAHRLARLVYRMLKYGQQYVDKGAEYYERRNRQQQIEFLRKRAARLGLQLAPTQP

SEQ ID NO: 417827 - protein, 350 aa, unidentified
MLYAGIDIDKSVFQAVVLDADSGELSERRFEPSRERLGEWAHEWRGKLAAVAIESTTGWRWVARELQRHGFDVHLVDPGRASALRGRRRRPKTDKLDARWLALVLARELLSECEAWMPPAGIQLLRDQTRLRKSLVDSRTGWAQRLHALLAHEGWPCSRGRLLTPEGRRWVTALELDPAVRAQVDVMLTLIIALDQQLALVQTELRRFARSDPRCKALETIFGVGPIYACHLLAEIGEAGRFKRSRQVVRASGLDPAVIESADSKRRGQLAKQGSPHLRWVLVEAATHSSRSTSPDHELYASAAQRCGRGRARLTVARKIARRAYHLLSAVEAQTEASKLETSTLETQVV

SEQ ID NO: 417828 - protein, 378 aa, unidentified
MAQPGWPPELGRRSIGSVPIEALRAVGRSKIAIGTSSGPEWLNELKVRITREGSTKMTKHITICAGIDTGKRKLDVAIEGRREQLQVENNPEGHAILLAWLRQHRVKRIGIEASGGYEQPIVTELRRKKFVVVVFQPAQVRAYAKFHLQLAKNDKIDAALIADCTAAVRKIHPAPDPRLLPFAEQLTMIDQIGEDIARLKNRIESCRNAQINTLWQEDIARLEKREKTELKALVASIRKHPDLAKRLDLIYSVDGIGLPTAVAILVRMPEIGQITREQAAALAGLAPYDHDSGNQTGDREIEGGRKRLRRALYTASLAASFRWNPQLIQLYRRLTAAGKEHKRALIACARKMLIFANTVVARGTPWCDEPPMRSSSVS

SEQ ID NO: 417829 - protein, 336 aa, unidentified
MVQIYGIDLGMSSFDVSFLSESGSVRHLSGVKNTVHGISKFLLSLPSSAVLCAEHTGVYGDLLLRLCTLNRTCLCFVPGYQIKHSLGLQRGKSDPLDACRIREYAERFYDLLRPCFYPGEEMSELQELYRTRSLLVDSRKRLDTLNIGDNCKSSVSLAADHARRAVLAELNTQISGLDHEIEALIQNSSEFSRNYQILTSIVGVGPVTSCELIIKTENFRKLDTAKKCAAYAGIAPYPKESGKMKCGHKISPMGDKQLKTLLFLCACSAKEHNKEIRLYFLKKHKVEKKHFFVAMNNIANKLLRLIYSLIQKQQTYDRDYIQRDPRCVVISDTNKC

SEQ ID NO: 417830 - protein, 415 aa, unidentified
MEEQRNKVCGADIHKKFLVATILSRDRTKSTGRFGMTLDEIMRFKEWVIENNCEQVAVESTGVYWVPIHTVLEDKIEIIVANAYKIKHIPGRKTDMRDSEWIAELCLNGMIEPSRIFPKADRELRTLTRNRESLVNNVTQMKNRIHQALESSCIKMSSVLSDIFGKSGRHILDGLLVGKNIDEILMGIRSKRVMKKEKELRDAIKNSLDPAKILLIRNFLELIEEIQKKIKKLDTEIMNRIERMKENIEITMSIPGISFVSASAILAEIGDYRDFANGEKLAAWCGLTPRVSQSADMLVTGSITKQGSKHVRRMLVQVAHAISRTKNSALKRFFLKIQLKKGAKKAAVALARKILCILHHLLVNKEKYQENGNIKSKPFKFDRTSSPIQMTEEDMINTLVNAGYIIKKKDARGCI

SEQ ID NO: 417831 - protein, 342 aa, unidentified
MKEVSIIGLDLAKNVFQAHGASADGSVVFRRKLSRAQLLKFFAEQPSCTVAMEACASAHHWARVIGSLGHTVKLIPPAYVKPFVKRQKNDVADAEAIAEAAGRPTMRFVAPKTEAQQAAAMAYRTRDLLVRQRTQTINALRAHLAEYGVVAPVGVAHIGRLAALVESDDGALPEAVAALGQMLLAHIKTLNASIETLNKELQQRAGSDDKARRLMTIPGVGPITAAALTTFAPPFETFTKGRDFAAWVGLTPRQHSSGGKERLGKTSKMGQRDIRRLLIIGAVAVVRWAARKGAPVGSWLARMMERKPRMLVAVALANRMARIAWALMRKGEDYRDSAMAAA

SEQ ID NO: 417832 - protein, 354 aa, unidentified
MCNKSTPIVATMGIDIGKNSFHVVGLDERGAIVVRQKLSRGQIEARLANMAPCLIGMEACVGAHHLSRKLQAQGHDARLMLAKYVRPYSKGQKNDFRDAEAIAEAVQRPTMKFVATKTVDQLDLQALHRVRERLVSQRTGIINQIRAFLLERGVAVRQGLRFLQRELPGILATRSDVLSPRMMHVIEDLAGDWHRLDERIEGLSTEIAALADQDPACERLMTVPGIGPIISSAMVAAIGNGSVFSKGRDFGAWLGLVPKQISTGDRTILGKVSKRGNRYLRVLFVQAAWVVLIWPQSWERYGLKSWIEAAKKRLHRNVLAIALANKLARIAWAVLNKERNFECLRTRAMSSQPA

SEQ ID NO: 417833 - protein, 419 aa, unidentified
MSFKILKFNCCGLDIHKTWIYACIGITDSNNRTEYKQARFSSFTKGLNELCDWLAKYNCKDVCMESTGKYWIPVFNILEQHNLWVTLSHPKYTKPMKGNKTDRKDAKWICDLYMCGMVKPSFIPPADIRELRDLVRYRFKLTCMITGEKNRAQNCLTVSNLKLDDVFSDVFGKSSRSITEQILKHPRETFDVTPFVDGRCKTPTEEIQAAVDGAISKEQAVKLRQCLDHIDELNKHISEVEQEILRLSDKYEIALNLIRTVPGFNKNPLTAIQVLSEIGGDMSVFPTAKHLVSWAGCCPRNDQSNQKIKSTRISRAGSYFKPVLVQVANALIKSKKHLEFTNRYKRIKARRGHKKAIIAICRMILTAIWHILSDLKPYTPEGFLESHPVKEGKVLSSSQALNFFKQRGYIIKDEPLSVS

SEQ ID NO: 417834 - protein, 344 aa, unidentified
MKHYAGLDVSVKETSICIVDEAGRICREMKVVSHPEDLLAVLCDPAWRLERVGLEAGPLSQWLFSGLAEAGVPAICIETRHAKAFLKAQVNKSDRNDARGIAQMMRVGLFQPVHVKTLASQKRRALLAARKILQEKALAIENDIRGLLRNFGLKVGIVGVVGFEQRIHDLVEGVPELADIMEPLLAARRVLREKFAKLHRKVLLLARDNEVCQRLMTIPGVGPVVSLAFISTVDVPARFRNSKAVGPSLGLTPVLNQSGESHRVGRISLCGDEAMRALLYEAAQVMLTRVQKWSWLKAWAMNIAKRRGQKKAIVALARRLAVIMHRMWSDGTEFRWTREMAPTT

SEQ ID NO: 417835 - protein, 288 aa, unidentified
MKVFYLGVDVSKKKLDLCLRSNGKDILYDVIPNDLSSIKSWLTRTFEKFFLSEDSLVVCAEHTGQYTYPLVCATKSIGVYLCLEDAAKIKYCHGIPRGKNDKIDACRIAMYAERYNDCLQPYTASELIIQKLKNLSTERSMLVADRAKYQSQLKDQVDYMEHSIYIAKCNRVEGIINTFTDYIAQIDLEIKELINQAPVIAHQMDLLMSVDGVGERVALKMIMETDAFTSFTDPRKFCCHAGVVPFVYVSGSSQRSKNRVSNRADKSIKHLLHMAALSVSPSESTYFL

SEQ ID NO: 417836 - protein, 408 aa, unidentified
MNTLYVGIDVSSKSNVVYLMLPNGDKHSNFSVANSHEGSTQLVKRIHSALTSHSLDTVLIGLEATSVYGDNLVYFLREDATLAPFNRKIHVLNPKQVKKFHNTYNDLPKNDYVDSFVIADCLRFGRINKEVYLGDYHYKALQNLTRARFFAVQNLVKEKQRFMNVLFKKYSTMTQEKVFSDTFSTTALAVYDEFESAEALANMDLHELTDFIIEKGKNRFPDPDAVAKAIQKAARSSYRLPKTVNDSVNQVLSISITSMKALESQIKEFDKAIKAQMELLPNVLISIPGIGPVYSAGIMAEIGDINRFNSQAALAKYAGLAWKQHQSGGFEAEVTRLIPSGNRFLKYYLCEAAFSLVRCDKEYSDFYHLKYKEVNRCQHKRALALTARKFVRLVFRLLKDNRLYCPAK

SEQ ID NO: 417837 - protein, 432 aa, unidentified
MSNSIKYDLFISIGIDVGADFSFMSISLPNQTFVGKPFKIIHSDFNSLSMAVSKIKEAEEMYSLESRIFLESTGIYHYPLFCYLSDKGFLVSIINPIISKNSTNINIRKVHNDKFDSKKLALIGLKPDLKVSLMPSKLALDLRNLSREYYDLVNNRSAYINKLQGELRIAFPQYLKIFSKVTVNTSLTLLEKFTSPDGFLEASKDQIITSIRSTARFGITYTEKKYKAIIQAAKTFSYSVNSNFKRIFLYIRFIRQYNDEIEAILSDMRELVESNEDTDFVKQIRLIESIKGAGFLSAVTLMCEIGDFSAFKSPKQLFAYFGLDPAVKQSGNFKSTDVNISKRGSQIARRVIYTIALVSIALNRNGTANNPVLREYYLKKCQSKPKMVALGAIMHKVCNIVFAILHDEKEFKIITPEEHQANYLKAKYGIAA

SEQ ID NO: 417838 - protein, 428 aa, unidentified
MNTPTSNPPVVAWVGLDWADQRHEIRLQAAGSPRLESFSVEQKPEVFQAWVAELRARFPQGRIALALEQSRGAVIYALMNYDFFLLYPIPPKTLARYREAFASSGAKSDRSDADLLLELVRTHGDRLRAWQPDDALTRQLRLLVEYRRKTVADRTRLTNRLTDLLKTYFPQALDWLGDLRSLAACEFLGAWPTLEAVQGANRPALRRFFHDHRRLSAEEREKLLDQIRHARPLTQDRAVLEASELMTQTLVEQLRAVITALARLDQALEELFGQHPDQQLFDRLPGAGEALGPRLAAAFGTDRDRYQSAEEIQQFSGIAPVTAASGKMRWVHWRWACPKFLRQTFHEFADASRKKSLWARAYYQQQRQHGVSHHAAVRALAYKWIRILYRCWKTRTPYDEALYLRALQRRHSPLWLAAASLSTQEAHP

SEQ ID NO: 417839 - protein, 346 aa, unidentified
MDHFIGLDVSLASTAICVLNAHGKVAKETTASSEPEDLVAALRALSGNVIAVGLEAGPLSQWLHKHLTEAGFDTVLMETRQVKGALKAMPIKTDRRDAEGIARLLQMGWFRPVHCKSVSAQEIRAVLTTRKSIQQATINLELSMRGVLRNFGLKMGRIPKGRFEERVRELTDGNPMLEAAAGPILTAREALRSELAKLEKLVRDHAKSDPVCRLMMTMPGVGAIVALTVKSAIDDPDRFRSSKDVGPWAGLTPRRAQSGERDIIGQITRAGDESLRTALYQAATVMLNRGRPSWLTAWALRVAQRRGKKRATVALARRIGVVLHRMWRDGAEFHFTRAEPMATSAA

SEQ ID NO: 417840 - protein, 330 aa, unidentified
MEKENVIMGIDVSKDKLDVSLNSTHYQYNNDDTGINSLLEFACEQKVNKLICEATGGYEINLICQSNQRNILIYRVNPRQVRDFAKASGKLAKTDKIDAKILVDFAKVFPTQTTDISSNISLMELIRHRQNMALAKADNLKRHQKTFSEHVKISLERMIEYFDEEISICEIKIKKMIDSDNNLKEKDNIIQSFCGIGYITAGVLLAEMPEIGTLNSREIAALAGVAPFNRDSGKKSAKRSINGGRKILRNAIYIAATVAIRHNMQIKQFYTRLIEQKKPFKVAITAVMRKILVILNAMVKNNQMWRCSPETTPQYFPAAIGTPACAAYKK

SEQ ID NO: 417841 - protein, 358 aa, unidentified
MAAISMAELEPVRVTVGVDTHKDLHVARAKDQLGRRLGEVTVPASVRGYGELLGWARSLGEIRTFGVEGTGCYGAGLTRYLRGKGVVVVEVIRPNRQARRRNGKSDPADADAAATAVLSGEASGLPKAGDATVEMIRALRVARTTAIRARTQAINALHALVITAPEELRGDLRELTGPKLMRSCAAFRPGSLTGPTEATKLAMRSLAKRSLALKEEARALDRELERLTVKAAPALVGIFGAGSDTAGALLLAAGDNPERLRSEAAFAKLCGVSPVEASSGKTTRHRLNRGGDRHANAALYRIVMVRLRQRHPPTMDYLARRTSEGKSKREIIRCLKRYVAREVYRALTEVHAKESSAA

SEQ ID NO: 417842 - protein, 397 aa, unidentified
MYIVGIDIAKRKHEAAVIDGEGTVIIKPFSFTNNCSGYNRLLAMLAKAKLPLDEVSFAMEATGHYWLALFTRLQKEGFRVQVINPVQTNSIRSFYIRQAKTDPRDALLIAEVIRFGHFSESTLHPENIYELRELCRGRHAIVSMQADVKRKVVALLDQVFPEYETAFTNMFSDTSMAILQTCPTPKELSEMPLEELCHLIEVSSRKRFRMAKAQELQALARGSFGFAMAGDVFSTMIRLYAKHLDFLKQQVREMDRKIAEIMETLDTPITTITGIGPTLGAYILSEIGDISRFSSAAKLAAYAGIDPTMRQSGEYNGVRNRMSKRGSPYLRHAIWLAASSAVLHDPALKLYFQKKRDEGKPYMASVGHACRKMVSIIYAVMRDNKAYTPCIPNEISA

SEQ ID NO: 417843 - protein, 408 aa, unidentified
MEVLYPRCAGLDLAKDTLVACVRIHGRPVQQETRTFGMTTRELLTLATWLAEHGVTHVAMEATGSYWKAVWYLLEETFTLTLANAAHIRNVPGRKSDVKDAAWIADLLAHGLIRGSFVPPAPIQEVRDLTRTRKQLVREIAQHTQRIQKTLDTANLKITGLVSNIIGVSGRAILRALIAGQTDPVQLVDLARGTLKNKRAALVDALTGHVRPHHLRLLKLHLDLIEQLERAVADIDTQLGEALAPFREAIARIDAVPGIDTVVAQAILGEIGLDMTRFPTHQHLIAWACLCRRLDESAGKRKSTRTRKGACWLKTVLVQAAWAAVRTKNSYYRAQFLRLRARRGPKKAIVAVAASMLTAIYYILRDSAEYRELGGQYFERLDRTKATQRLVKRLRDLGYRVQLEEVAA

SEQ ID NO: 417844 - protein, 341 aa, unidentified
MDKELYFGVDVSKKTLDLAYYDGEAIDWKNAHIKVSNDDSGFKKIGSWIAKVGKDFGTFLFCMEYTGLYNQNFRLWLESKKYIYGMVEPRKMHHFEPDLDDDQRSLDRIKTDELDAFRIAIYCEQNHKKILRNPSKLPSPVYFKLKRLLAERKQNTKQSTLYKQQLHDICAYDTDLSVERKKLQLKNMQENQKAIDREIDSYMNEDASISKNYDLLTSIPGIGRIIALETIVLTENFTAISNSRKYACYIGIAPFKKESGTSVRKRTSVSKKGFSEAKADLSIAVLSAIKNNPSIRDYWIRKRKEKCGGIVLNAVKFKLVLRMFAVIKRGTPYVETDAYKN

SEQ ID NO: 417845 - protein, 304 aa, unidentified
MAKATLDVHVRPEGSARRVPNTPAGVRRLVARLARLAPALVVADATGGLERALVDALHAAGLPVAVAGPDRVRHFARALGVRAKTDRVDAAVLAHYAERVRPAVRGAPTPDARALAALSARRRQLTAMLAAEKNRLQGAAAALRADVGAHVRWLRARIARLDAQIGAAIAADPERAAAAARLRTVPGVGAVVAHTLAAELPELGRLGRRQVAALVGVAPFPRDSGTLRGTRAIWGGRAVVRTALYLAAMSGARCNPTLRAFYRRLVAAGKPKKAALTAAAHKLLTILNTMARDGSTWSPPPSPA

SEQ ID NO: 417846 - protein, 334 aa, unidentified
MNTPVVGIDVSKRKLDVALLVDGKIKAKAVSNSQEGFAELEVWLIKQKISLPEAHICLESTGVYSEPVALYWFDKGIKVSLVNPNCIKSFGSSENIRNKNDQVDAGLIARYCAAMAPSAWEAPSREQRQLRAWGNRLTALQDMRQQELNRLEVHETAKQHDVISHVQAHITWLDAQIAQIAQDIDDHIDRHPGLKQDAELIESIPGLGRTTAAKVLGHLGDVRRFENAKALAAYVGVTPRQRQSGTSVRGRTMISRMGNKHLRAALFLPSLVAKRHNPILKQFGQRLEANGLSKMAVAGAIMRKLVHLIYGVVKSGKPFDPNYMGKGLAIQDGI

SEQ ID NO: 417847 - protein, 342 aa, unidentified
MTFVGCDLHTRMQQVAVLDTGSGEVSERQLAHDGSAIEEFYAALPRPVTIGLESTGYAVWFHTLMQRLGHTLLVGDAAKIRAMVVRKTKTDRRDALHLLDLLRHDRFPTIWVPDPATRDLRALLAHRMRLVRIRTMVKNGLHAIALNYRLARGSKLLRQAGLAQLHALALPPHTAQRRDQSLELLAGLTTQIRELDDAITTAALAHPDGPRLITHPGVGALTALATIVVLGPVARFHDSKHVVSYVGLAPALNASADKYHLGHITKQGSTLLRFTLGQAAAHAARMDADLKRTYFTLVHRRGRPKAKVAVARKLLVRLFIMLRDQIDYDEFRRRGRPKEVAA

SEQ ID NO: 417848 - protein, 347 aa, unidentified
MRFYTRQHKFYCGVDLHARSMYVCVLDREGDVLVSQNIASAPEPFLELIAPYREDLAVAAECMFTWYWLADLCAREGLVFVLGHALYMRAIHGGKAKNDRIDAHKIAGLLRGGMLPQAYVYPQAMRATRDLMRRRNYLMRQRAELLSHITNTNHQYNLPALGVRPARPAERAGLAEHFAEVAVRKSIEVDLSVIEHYDRELPRLERYLESNAQAHDPVALAIVRTIHGMGKVLGLSILYEIHDVGRFSRVQQFLSYGRLVKPTKESGGKILGHSGRKIGNAHLKWAFSEAAVCFLRANKPAQALRARLMAKHGKGKSLGIIAAKIARAVYFMLRRGEPFDAERFFAH

SEQ ID NO: 417849 - protein, 355 aa, unidentified
MNDIKYIGLDVHQASIVAVVLNGDGPRIMESVLETKAATVLDFLGGLSGTVHVTFEEGVLSHGLYHLIKGHVARVIVCDPRQNKRLEAGNKGDRPDARKRADRLRAGRVRPIGHDEHGMRTRKERARRYQSLVVDSTRVKNRLKAIFHSQAIACAGEAVYGAAQRAAWRARLSEPGPRPRAEALYRPLDFLLEQRRAAQQARRAESRRHKASRLWRTIPPLGPVRVALWLAIVGSPHRFRTKRTFWAYGGLAVVTRTSAEYPMIGGRLQKTKKPLATRGLNDNHNRTLKQVFKGAATRGRAYEPWKSYYEQRRARGLRPELARVTRARKIAAVTLAVWKKGEGFAAPRLKPTPTA

SEQ ID NO: 417850 - protein, 350 aa, unidentified
MPRKFDTAVVTIGIDPGKNTLHLVGLDARGEIVLREKVARTKIVSRLANVPPCLIGIEAGMGTHYVTRQLLALDHDVRQVPPVYAKPFRQTHKNDFRDAHAVAEAVQRPTTRCVPPKTDEQLDLQALHRVRYRLVGQRTAIINQIRCFLLEHGITVRQRLHWLRHALPDIVAQRTDVLSPRMVRILEDLAQDWRRLDDRIEAVSGEIDALSKNTELCLNLMTIPGIGPIISSAVVAAIGDGAAFARGRDFAAWLGLVPKQISTGDRTILGRITKRGNRYLRMLFLQAARVVLLRPKNWMQHSFGPWLAAAAQRLHHNVLATALANKLARIAWSVLVQHREYEARLSVATT

SEQ ID NO: 417851 - protein, 440 aa, unidentified
MRRCFGLDVHREFAQVALWQDGVVRDAGRIATTPEALRIFAESLAPSDEVALEATGNTHAIVKLLRRRVARVVVSNPHKTRAIAESRVKTDKVDAQILAQLLAADYLPEVWIADEATQARRRQVARRAHLVRQRTRLKNQVQSILHRNLVPRCPAADLFGLKGRRWLAEQELPADERQAVAALLRQLDFHGEELRLIDSELARTALACEDTKRLMTIPGVDVTVAMAITAAVGDFSRFSAPNKLVRYLGLNPRVRQSGEQPAAHGRIAKQGRAHARGMLVEAAWVAVKTPGPLRAFFVRVRARRGMQIAVVATARKLAVLCWHMITKGQDYAFARPSLTAKKLRALELKAGMPSRRGQKGSAAAYSLRQVRAREKALAEQAERAYAQLVADWQAKAPGAGVAAANGARLSRPANRATAARQDTAPDPALRSGIDHAQPAA

SEQ ID NO: 417852 - protein, 423 aa, unidentified
MPYRIAGIDVHKKKLAVVVADVEVEDEYQFERRWYGSNPEQLRVLSEWLIEQQIEEVVMESTAQYWKPVWGTLERYWKPKCQSREGAGRMSGTLHLAQALSNRGRRGRKKDFRDAERLVKRLVSQELVLSFVPDTEQRMWRTLTRTRYQRTRDKVRLQNQLEALLEEAHIKLSSLVSDLLGASARRMLKALAEGETDPAALAALADQRLRATPAQLQDALGACTELNPVYRRLVKMTLEGLQFVEQQIGQLDQEMASLLRQHQDAVERLAVVPGLGVDSAQQIIAEVGAKAATFPSAEKLSSWVGACPGEEESAGVNRSRHSPKGNRQMRRVLNQAANAAVKHKGSIFEIVYRRLVPRLGHNKTIGVIAHRLCHLIWIILHKGVRYEERGPAVSEKSRQRRTARMVRTLRILGYRVEPLANPT

SEQ ID NO: 417853 - protein, 342 aa, unidentified
MSHRIYVAMDVHLKFIVAVWQSGRGKRKVMTVEASAEGLAKLVLAVGAGEIWGVYEASSSGLEVHERLTGHGWKVWLLAPTHLPQSTDTRKNKSDERDAHRMLDVLLAHGELGTKLPSVWIPPRKTREDREVVRRRLKLAEKLGQIKNEITGLLRIQAVRPAEEIKTRWSQKHLSWLCGVSGTLSPRVGSVLRGLLEELGFYRQQIEAMDEVLRNVSEEPEYQHAAERMTELEGIGLLTAMTFLLELGDVGRFKNRRSLARYTGLTPNRYASSEVDHKGHISRMGPYRLRKVLNQAAWAHVRAGGHWASWYGETAKRRGTKIAIVGLMRKLAIDLWHLAKAA

SEQ ID NO: 417854 - protein, 387 aa, unidentified
MEIRIENTPSARTNNDPVHCFVAIELSKSSWVVGFQTPLSKQTSRYQVKACDAEPLLQLIERVRSRVTREVGRPVEVTSCYEAGYDGFWLHRVLEAHGIHNHVLDPASLQVNRRARRPKTDRIDADRMVRALIRHLRGEPEACSVVRVPSPEQEDARRLHRERGRLIAERVGHVNRIKGLCATQGIYNYEPLRDDRLERLDKLRTGDGRALPARFKTEIVREIKRLEVVLEMISTVEAERDAILKDKKSTHINADKIKMLAKLKAIGAEFSTTLVGEVFYREFANRRQLGSYVGLASSPFCSGSLDRDQGISKAGNSKARAMMIELAWTWLRYQPDSALSRWFQARVGNLKGRPRRIAIVAMARKLLVALWRYLQTGVIPTGAELKA

SEQ ID NO: 417855 - protein, 392 aa, unidentified
MEVQDETGRRLAKARLPEGISGIAKLHALVGRFRAEDSDAAEVKIGIETDRGPWVGALVASGYQVYAVNPLQSARARQGSGVSGAKSDAGDAHVLADLVRTHSHQLRTVAGDSEQAGAVKVLTRMHQTLIWDRTRLVLRLRSSLREFFPAALEAYEDLDSPDVLELLTKAPEPASAARLTRAQITAVLKRARRHDRDTKTTAIMAALRTEHLTQPPPIAAAYGATVRALAALISTSNEQITALEGPVEACFGQHPDAEIYLSQPGLGPILGARVLAEFGDDPTRYEGARSRKNYAGTSPITRASGKKKVVLARYVRNNRLTDALHQQAFCALSGSPGARAYYDELRGRDIGHNAALRQLGNRLVGILHGCLKTRTRYDESVAWSQHTQRLAA

SEQ ID NO: 417856 - protein, 348 aa, unidentified
MDIYIGFDISLQTTHVCAVDSEGNLVREGTAPSEVHALDDWLRKHSADWQVKRIVFETGQLSTHLYHGLRPSWPVICIDARHAHGTLKAQHIKTDKNDARGLAQISRTGWYKAVHVKSDDGQALRALVAGRKQLVTLRLAMENHIRGTLKTFGIKLGTVTTAAFDGKVRTAVAERDARLQAAMTALLDARAGLLAQQRSLDKRCIAIARSDAVCQRLMTVPGVGVITALSFQAEIDDPLRFRKSRDVGVHIGLTPRRYASGEIDRSGGISKCGNSALRTLLFEASVTMLTRHGTWSRVKAWGVRLAQRSGFKVASTAVARKLAIIMHRMWIDGTDFAYGEPPALAAAA

SEQ ID NO: 417857 - protein, 422 aa, unidentified
MRSIGIDIHRDFMEVAIAEGGEIRSGPRVAMDPESLELFAASLDRSDQVALEVSGNAWEVVRILRPHVGRLVAASPTDTGMRQARAKTDRLDARALARLLSAGQLETVWVPDEATQAMRRRLQRRSRLVRTRSAAKNEIHAALMRRLVPKPGFSDLFGKAGRVWLAELELPAAERESVDSAMRQVEFCESEIAAIEKVVASEALGSEEIRRLMSVPGVGAITAAAFMAAVGDIDRFPSAKKLVGYLGLDPIVRQSGSSEASYGRISKQGSAAGRYALVEASWSVVKAPGPLRAFYERTKGRRGASVAIVATARKLACLFWTLLVRGEDYAYTQPSLTTKKLRRLELSAGARKGRGGAGVWKANAAVRDAERKMAEQAESAYRRNVAEFKRVEALRAKQRKEAEKARAERHEEGAGATSGRAS

SEQ ID NO: 417858 - protein, 369 aa, unidentified
MSSTVKYVGLDVHKNTIAVAVAEDGKRAEVREHGEIANTPAALTKLLGKLGGPGVELHICYEAGPCGYGIQRQAAAAGHSCVVVAPSLIPSRPGDRIKTDRRDAVKLARLHRAGELTPVWIPDGAHEAMRDLVRARLAAVRSLRHARQQLSGFLLRHGHHYHRPAWTQMHRRWMSGLRFAEEAHHIVLEDCIATIDAAKERRDRLTVQIEKRLADWTLAPVVEALQALRGMALVAAATIVAELGDISRFSKAEQLMSYLGLVPSEDSSGKRRRQGGITKAGNGAARRMLIEAAWSYRFPARISREQLLRQEQLAPPIRAIAWKAQERLCLQYRKLSRAGKPITTVTTAIARQLAGFVWAIAHEVSTPRA

SEQ ID NO: 417859 - protein, 411 aa, unidentified
MRIVGLDVLRSLAEIAYLEDGTLHAGGRTGLRRDELERFAVKLRATDHVVLEATGNTTAIVNVLRPHVTRVAIANPLQVRLIAEARVKTDKIDAAVLAQLYASGFLPEVWMPDERTLALRRQIARRSQLVRQRTRLKNEIHAVLIAHLIERCPATDLFGKRGRAWLGVQPLPLDERLGVEQRLRELDRLGEDLREVEQALAQATIDDARLRVMLTITGVNTTVAIGLLSAIGDIKRFPNPEKLVSYFGLNPSVYQSGPTPARHGHITKRGRSYARAMLVEAAWGATQAPGPLRAFFLRVRDRRGQQIAAVATARKPAVIVWYVLTRDEPFAWDRPALTAHKLRALELQAGMPAQHGSRKGSAAAYSLKSVRQQERAVAEQSERTYQRLFNRWKQSRPKSDSAVIRWPEART

SEQ ID NO: 417860 - protein, 473 aa, unidentified
MLHLSRQLPAGYFRGFNADYARLHGVVVRDPALGFPSIKSKGGDTVKNRMKFDHLSTLCVGLDIGSRINFLTALNFDSDRLINMRPVPNASNGVEAMESMILAVLEANPQFRYLLIAMESTSFYGVHVANYLSTTDKLKPYGVKVFCLNPKTIANYRKSFTGLGKNDGIDSFIVADYVRAGRINIEPWRGAQYLALQRLTRQRRHINEAIAREKNYVLNNVFLKFSEFALLSGEESPVSDKFSATAEAILTEYKTTEDIANAPLKELIDFISASGHGRFSDPDQVASLLQKAARNSYRLDKALYEPITTSIACSFNCIRAFEKEQKALDKAIAATVAGLNPTEYQILKSIPGIGPVYAAGILAEIGSVRCFNSNNALAKYSGIIWRDNQSGEFDSEDTPMMKAGNRYLRYYLIQAAGSVVRYCPEYTDYYNKKFAEVPKHQHKRALALTARKLIRLIFGLLDKNQLYSPAKSR

SEQ ID NO: 417861 - protein, 372 aa, unidentified
MNHNTIYVGMDVHKENFSLCAYTLEAEKASYHQRTEADYKEVLKYLEFLRSIYGNDANFICGYEAGCLGYTLYHQLSANNVNCVILAPTTMLEQRSKKRIKTDKRDAEIIAKCLAQHNYSSVHIPTAKDEETKEFLRMRDDHKLALKKIKQQILAFCLRHSYRYDGKSHWTAAHLKWLRSLTPEALYKEILDEYLLTYQNLSDKLERMDKRIEELASLEEYREAVKKLCCFIGVRTHTALSVLVEVGDFKRFASAKNFASYLGLVPGENSSGENQTRLGITKAGNRHIRLLLTEASQCYARGKIGFKSKELKSRQSGNTPEIIAYADKANERLRRRYYKMVLGSCKKHNVAKTAIARELACFMWGMMTDCIA

SEQ ID NO: 417862 - protein, 354 aa, unidentified
MRRSTKYVALDVHQATTIASVREASGRVIARTILPTAEPTLVEFFRGMRGSIHVTFEEGTQAQWLHDLLVPLVDRVVVCDGRGQPRHGNKGDQVDADQLSELLRRGGLRAVYHGSTHRTVLKELTRTYQNLVEDSTRVMLRLKALFRARAIRTPGRGLYHPRSREQWLAQLADRGARFRAETLYAELDVLQALRPRAKAAMVAEARRDPAWSVLRTIPFFGPVRVALLLATMQTPWRFRTKRNLWAYAGLAVVTRSSADYTLVDGQPVRRRRAPLTRGLNRNHNRVLKDVFKGAATAATARPGPLQDFYHGMIARGMREELARVTLARKLAAITLRLWKKGERYDPTQLTRQAR

SEQ ID NO: 417863 - protein, 313 aa, unidentified
MTDLYVGVDVSKDYLDVATSDGTSLRVSNDEAGQQQLVARFSAAAPTLVLMEATGGLERAIAAQLSAAGIALRIINARHVRHFAKATGLLAKTDRLDAEALVRFAQTLKPEPRPIAPEQTVALQALIVRRRQLVEMLGMERNRLRTAHRGVRKSLQASIRWLEKRLAEVDGDIDGALRECGAWREKVELLESVPGIARVISMSLLAGLPELGELNRHQISALAGVAPFNRDSGNWRGRRSIYGGRPLVRSALYMAALVGARHNPVLKAFYQRLRQAGKPAKVALTACMRKLLVILNTMLKTGQPWRIQVVAEA

SEQ ID NO: 417864 - protein, 313 aa, unidentified
MHAFARCRNGRLSQVPRRGGALIRWLRKHKVGTAAMEASGGYERDWAKALREAGIEARVVDPKRVRSFAQSAGRLAKNDPIDALMIAWFAEVFIEAPGQTGDTARDKLVQIVNARQNLLDMQTSLRNRSEHATPDVVQKMQARLLKKIASEIVELEAAITAMVKATPHFAELAAIIESVPGLGKTTSAGLIAAMPELGQVRNEVAAALLGVAPYDNDSGQRRGDRHIKGGRRKLRNLFYMACLGAATRHNPVLKAFYDRLIAKGKEPKVALTACMRKLICIINTMIARRQKWDAARSNLCNPARHLPSACPAQ

SEQ ID NO: 417865 - protein, 408 aa, unidentified
MEKFLKLCVGADVSQVKLDVCLSGLKDDLSVKVIEEKTFSNNAEGISKLMKWAAQKTEGNTFQIVMEATGVYHEKLAFTLSKNGIEAVVVLPKLMSNYFRSHNIRQYNDEICAEHIAMFGLSRKLDIWKEPETVYMALRALCRHRYQLDKLKTQCNNQIHAQKHSETSLQEMIDMSEDMVKLAEKQMKEIDKKLQSILNENDWLKEKVAKVCTVIGLGWITVVKIISETSGFNLIRNSRQLVAYAGYDVLSKESGTSVHTKSKMSKKGNKYIRAAMYMPALSAIRSDPQMAAFYSRLFHRHFIPKKSNVAVQKKLLVLIYTLWKNDCPFDPDYRHPASQNHDQETSSGNNQQCEQENEQPSKIAEKTINKNREAIRRSLHRLDQVRLQGFNDTKIEKNPQNEHSQRIE

SEQ ID NO: 417866 - protein, 423 aa, unidentified
MDIVHSRCAGLDVHKETVVACVRLASGDKVSREVRTFGTTTSGLLALLAWLTEMGCTHVALEATGIYWRPVWNILSDGAFELVLANAAHIKNVPGRKTDVNDATWIADLLAYGLIRSSFVPEPAIQELRSLLRTRKQLVREQTSHIQRVQKTLEDANIKLDCVITDILGVSGRAMIEALVAGETDPGTLAELADRRLKASREQLREALRGRVTDHHRFLLRLHLGQIDALTAAAERVDRQVDAVISRMDAAVEAGQAPVKAMIGLLITIPGIGPLAARMILAEIGRDMSRFPSAAHLLSWAGLCPRNDESAGKRRSARLRKGAPWLKTVLVQCAWAATRKKGSYLQAQFYRLRSRRGPKKALCAVAASMLTAIYHMLTDGTGYQDLGADHFDHRSTEARARRLVSQLAKLGFDVEIKPLAAVA

SEQ ID NO: 417867 - protein, 428 aa, unidentified
MTVRNCTSAKDFLQFKKEIRGSRTHLIVGIDIAKDEHRAFFGTAYGKTLLRRFTFKNDIEGFGKLLESVRLVKETHRLSEVVFGMEPTANYHKPLGDYLIGCGHRVVLVSGVAVKRNRELLDGRWDKNDTKDAANVADLISQGKCLFYDYTPVLMRDLRNLLSLKRRLKKQEHGLRIRIRNCLLAQYFPELDRYYSKWEPEILSVVRWCLDPSVIAGLEYDQFVKLVCPGSNGVRKQGRLEWIWKKAVDSIGCAAGEASEFEAEVLVEELRHIREVIKETDAKIKDVCKRCPGYDYLLTIPGFGPDVSSKVLAAIGDPFRFNSASQVLKMAGMDLNAERSGKSSDTAVPIISKKGSGHLRYALYQAAFIASTRNKLFKKYYAHILTGREKEKGIKTKMRVKLAAKLLVIAWTLMKKREPFVLEYLQIV

SEQ ID NO: 417868 - protein, 314 aa, unidentified
MRNCIGIDVAKQYFDLHSLKTGQDRQMENSTDGIRQCVALCNKIRPELIAMEATGGYELTLAGTLQAEGFAVAVVNPRRIRDFARAAGQIAKTDKLDARIIAQFAATMEPMPNERINENTQKLKALVARRNQLVGLHTAESNRREHADSKEIRRSIAAVLKVIEAQLKTIDRQIKEHVENTPQLRKRSEILDSVPGIGPTTAHMLVTELPELGRLNRRQIAALIGVAPMARDSGSFRGKRMTGGGRKKIRRRLFMPTLVAVRHNPILRAYYNKLLGRGKCKMVALVAVMRKLICILNTMAKNNQEWNPNSIKIS

SEQ ID NO: 417869 - protein, 355 aa, unidentified
MNSVKYIGMDVHTATISVAVLDVAGKLIMESVIETKASTILQLIQGLRGDLHVTFEEGTWAAWLYDLLKLYVTKIVVCDPRRNPLLKEGNKSDRIDARKLAELLRANLLRSVYHGEKSLRTVKELVRSYLTFGKDLTRVMNRVKAIFRSWGIPCGGKSVYNPRHRDEWLSKIAEVGVRRRAELYYAQLDALASLRQQARRKLLAESRKHRAWKLLRSIPALGPIRVALLMGIVQTPHRFRSKRPLWRYSGFGVVTHTSADHRYVDGQLERSKKPVSVRGLDPNHNHHLKDLFKGAAIQAATREGPLWEFYEALVAKGMRPEMARLTLARKIAAITLTVWRKGVAFDAKYLKPQTA

SEQ ID NO: 417870 - protein, 345 aa, unidentified
METMYYIGLDVHKKTIDYCVKDGSGRIYADGSIPATRLTLDMWMKTLPQPWTAAMEATIFTAWIYDHLRPHAAAVKVAHPLMLRAIAVAKKKNDRIDAKKIADCLRCDFLPECYMASTEIRERRRTLRYRNLLVRQAVQMKNKIAVLLMEAGVSYNKQKLHKVGYFRELLATNQDIDEGLKPLLRLCRETVVRLGKTESALVRSLERDSLLMERVERLMTIPAVGPITALTWVLEVGDVQRFSSIKKAISYCGLCGAERSSADITKRTPLSKQRNKHLQTVLIEAAKMAPRNSPELAMVYEQEKQKGNANRATLAVARKMVAYLVAVDRRQKGFLVVENKNRTAA

SEQ ID NO: 417871 - protein, 412 aa, unidentified
MSNPLLVGIDVHRKTNTACLIDCQGQRAGPSFTVPNNLPGTETLAQKLTHQAQAGNHDRILVAAEATGLYWWHLFCTLSRDPFLNQWPLELYPLNPRATANFKKTFSNQDKTDPIDALVVADRLRLGRDLPAPFACHEPLLALRLLTRYRFHLIHALVQEKSYFLAYLYLKASEYTHLKPFTTTFGAASRAAIKQFASLEDIAAIPLQELTEFIDAKGKRRFADPQANARRLKQVAQDSYPLAPGLEEPLNLILDQSLQHIAFLERRIKRLDVAIDERLQHIPHTLDTIPGIGPVFSAGIMAEIGDLSRFQCDEAKVAKFAGLTWRQTQSGDFRAQETRISRCGNRYLRYYLCEAANSVRLCDPEYAAYYQRKHDEVPKHQHKRAIVLTARKLVRLVVRLLTTNQPYRPRRT

SEQ ID NO: 417872 - protein, 421 aa, unidentified
MRFYTKPHRYYCGIDLHARRMYICVLDAQGEIRVHRNGPATPEHFLTTVAAYREDLVVAVECIFTWYWLADLCAQEGIAFVLGHALYMKAIHGGKAKNDKIDAHKIAVLVRGGMLPMAYVYPRAMRAPRDLLRRRCHFTRKRAELLTHIQNTASQYLLPTLGKIAYHGNRVGVAEQFRDPEVRKSIETNLALIDEYDRLLTELELHLTETAKVHDVNAFYRLRSVPGIGKILALVLLYEIHDIHRFPRVQDFVSYCRLVKCAKESDGKHYGYSGTKIGNAHLKWAFSEAAVLCLRKNPVAQRYVARLAHKHGKGKALTILAHKLARAVYYMLHRGQAFEATRFFPVTARGAQPSRPEIDRVTGVDVHDAARSGPPGDDLEGGRYLDPPEIKRHTSRRRGHDRAGVTTKHAVGAAARVEEAS

SEQ ID NO: 417873 - protein, 277 aa, unidentified
MNIKRVGIDLAKDVFQVHGVDSQEKVILRKQFRRVQLLAYFEKIAPCLIGMEACGSAHYWARELQKLGHTFKLMAPQFVKPYVKSNKNDANDAEAICEAVARPTMRFVAVKTIAQQDIQAIHRVRSELVSHRTAKVNQIRGLLAEYGLAVGRRIEVLRTALPLLLEDAENGLTLDFRILLDELRQDLINLDERVQVMDKKIKTLANSHGEAKRLLAIPGIGPITATAIISAIGNGKQFKRGRDFAAWLGLTPRQHSSGGKERLLGISKRGDVIYAHC

SEQ ID NO: 417874 - protein, 350 aa, unidentified
MMIIGVDYHPSFQTIAFFVEETGECGEQELNHSDGQAERFYRDLKQRGICVRVGMEATGYSRWFERLLAELGFEVWMGDPAEIKAKRVKKQKFDREDARLLRRLMLENNFPQIWVPGPENRDLRQLLWHRHRLVQMRTRIMNQLQALAMNEGYRWKKKLFSEQGRAQLEKLTLAPWASRRRQELLELLDRMNPTIEELTAAVEREARKRPEALRLMTHPGVGPLTALAYVLIIGTPTRFQRGKQIGTYVGMIPCEASSARKQRLGHISKQGNSLLRFLLVEAAQAAARIQPDWRRRYLHLAMRRHKSIAKVAIGRKLGVRLYWMWRNGCEYSPSLEFGSYVGQLGTGHGV

SEQ ID NO: 417875 - protein, 449 aa, unidentified
MSKPILAVGIDPAKCAHRAVGVLFPDEVVFDSELPNVLDIIQSLDLRLAELAATHAAELVYGLEDHRRYGRLLCQVLTERGRDVRVVNPLWTNRQRAFYGQDKDDAIDGRSIAAVVLRRRDQLPLANDFGQLAQAIREAERAVEDLSKKRTELVNRLHLQLSDVYTSVYETYFGKLKSPIALRFFRRFPLPHDLGGQDAVRLSRVILDLANGKVGPHKGHDREKFLQAKAEKILKTSAAPGQMPRKLALELKAELIRQLCDELLINHDRVTRLERMLRKQMLPVTGQTITTMPGIGTILAATIVGETASVTRFRSRAAYAVYNGTAPARHSTGGRERHKARRACNHRLKRAFWLAARAAALHDPLANAYFDQCKSRGLNYNERIKRIARSTSDIVYSLLKSGRDYDRAIVEQAIQKRQEQVANAGDNRVKEALPIPDQETLSHQSHRRN

SEQ ID NO: 417876 - protein, 415 aa, unidentified
MALKIVYKICCGIDVHKTFVVACIASTNDKGVTSYESHRFSTYTSGLKTLLQWLLDRNCKDVCMESTGKYWIPVYNILEKDCSIVLAHPKYVKAIRGKKTDKKDAKWIADLFKHDLVAGSFMPPADIRQLRDLMRYRFKLTCFKSSEKNRLQNCLTVSNIQLGNVVSDTFGKSAQAILDKILEDPADTSFDLEPLVFKSLKKKLPELRDAIDGYITPEQAGKLKVIKAHYENLEARKAELEELILALATPYQQELAILQTAPGISSDFTAIGIISEIGTNMEAFPSAKHLCSWAGLTPTNNESAGKKKSVRVSKAGCYIKPLLVQCANAVVKSNKHPEIRNRYLRIKKRRGHKKAIIAIARMLLTALYNMLKNKEPYNAELYRKSDALPVNREITIEQAILMAQFQGYKIKSAAE

SEQ ID NO: 417877 - protein, 365 aa, unidentified
MEAEILSSILAPIPIKERQMDYFAGLDVSLETVNIYIVDGEGRILLEQKVSAEPDEIVELLRRFGRPLKRIGLEAGPTSSWLVSALRAAGYPALCLECRHVKAGLSAMRNKTDRNDARGIAQLVRLGWFRVVHVKSDEAQQIRMLLVNRTLLLSKLQDIENSVRGSLKVFGLKLGRVTKHAFEDCVMQLVEGQPALAAMTIPILRVRRVLMDQFALFDRMARDLARHDPICRRLMTVPGVGVIVALTYRTGVDIPERFRRSRDVGAHFGLTPRRYSSGQTDYDGHISRCGDEMVRTALYQAAHVLMHHGRWSALRGWAMRIAKRSGAKLAKVALARKLAVVLHRMWIDGTEFCWTAREQPAAQAA

SEQ ID NO: 417878 - protein, 337 aa, unidentified
MIAAGVDTHKDEHVAVALDGLGQVLGELAVPASQAGYQQLTTWLDGLGEDPRVGVEGAGSYGAALTEHLQSTGIPVFEVERPRRRDRRSGKSDSIDALLAAKRVLAGDGLSTPRRSGERRALQTLLSAYQSCVGERTRLYNQLHALHATAPAALRERIGRGGGAKLARRLIRMRNQPGANLQETTILAVLRDLARRTKATSETIDHYKSEITDLVRVLHPTLLEEPGVGPINAAKLLTCDAARFKNEAAFARTNGTAPIPASSGKTIRHRLNRGGDRQVNAAIHMIALSRSIHHPETQAYLARRTSEGKTKREAMRALKRHLSRTLYKQLVHQPLTS

SEQ ID NO: 417879 - protein, 362 aa, unidentified
MKQYIGCDVHKRYSVFVTVDESGQASRAVRVAHGNGELEGYLSSVPGGTPVAVETTGHWYWILDAMEKAGLEPHLAHALAAKRMMVSPNKTDKLDAKGLATLLRNGTLPEVWVPGGSLRDLRGLMRSRLALRRMGTGLKNRISSALARYGLPEQFRGDLFGKGEAATKCRQESVAALPEYSRFATEQELDLLESVETCVTAVTEEISNSVGKLGWVRRLRTMPGVGEILGPTIYLEIGLVSRFPSPAHLAAYAGLVPRVSSSGGHTRLGRTRRECNRFLKWAFVEAAEVVVAHQESMSAKHVVRLYRRVKNNKPDRHGQAVVAVARHLAESAWHILEHNQDYREPQPTPGMIQRFHTTGRPL

SEQ ID NO: 417880 - protein, 383 aa, unidentified
MKKTQETLKREDSTKEAIMYTGFELSDKKWKLAFSNGSKVRHISTDARDLNELQVQIFRAKKRFGLNEDTRVMSCYEAGREGFWLHRYLLSIGIENLVVDSSSIEVKRRKRRVKTDRIDAEKLLGMLMRYHGGEKKAWSVVRVPSEEAEDGMNLGRELEVLKKERTMHSNRIKGLLIQQGIVIKRLNVKRFLSELEGCRTWDGKELPVDFKSRIVREHQRLKIVDEQMRGVKKERKKRVESGDKACYRQVAQLMKLQGIGPENSWDFVMEFFSWRDFRNRKQVGALAGLTPTPYDSGGSLREQGISKAGSGRIRTRSVESAWCWLRFQPQSKLSKWFNKRFAQGGKRMRRIGIVAVARKLLIALWRYLKYGTVPEGACLMKGI

SEQ ID NO: 417881 - protein, 418 aa, unidentified
MEIIYERVAGIDVGKKIIAVAVRTPGERAGKRRQELRKFNTYYRTLTEMVAWLVAEGVTHVTMEATGVYWRPVFHALCAAERPLEVLLVNARHVKNVPGRKSDALDAVWLAELTECGLLRGSFIPPPQIAAIRELTRYRKKLIEQRTSELQRLAKVLEDGGIKIDSVASALTTLSARDMIEALINGERDPAVLAELARGKMRSKIPDLRLACAGRFGAQHALMCTLHLEHIDHLTDMIARLDTRIDEASLPFARPIELLATIPGISERAAQVIISEIGVDMARFPTAAHLASWAGLCPGNNESAGKHRSGRTRKGNKELRALLTECAWSAGRTSTYVGAQFRRFHRRFGNKGGQKAATATAHTMIVIIWHVLAETTAYRELGTDYFTTRIDSPDARKRRLIRELEALGHKVTIEPAAA

SEQ ID NO: 417882 - protein, 403 aa, unidentified
MVAAVSENFEREVYTLMYYVGIDIAKLNHFASVISSDGEVLIKPFKFTNDNDGFCKLLSALAPYECGSLIIGLESTAHYGDNLVEFLVSRRYQVCVINPIQTSTMRKNNIRKTKTDKVDTFIIAKTLMTQPHRFYTLEDIDMMHLKNLGRFRQKLVKDRTRIKIQLTAYVDRVFPELQYFFKAGLHQKGVYALLAEAPTPELISSMHLTHLTHLLEVASHGHFTKEQAKELRVLAQKSVGSSDKALSIQITQSVEQIVLLDSHVKQVESEMTEIMLGLDSVIMTIPGIGYINGGMILGEIGDIHRFAAPKQLLAFAGLDPTVYQSGNFNASHTRMSKRGSTALRYALINAAHNVVKNNATFKSYYDTKIAEGRTHYNALGHCAGKLVRVIHKMLSDDVAFNLG

SEQ ID NO: 417883 - protein, 407 aa, unidentified
MEVVYRRCCGVDVHKKLIVACFLDDEKKEIREFGTTTVEIKSLAKWLLDSNCQKIAMESTGVYWKPLYNLFELAGLEAIVVNAAHMKALPGRKTDIKDAEWIADLLRHGLLKASFIPDREQRELREIARYRKNLIEERSRELNRLQKILEGANIKLDSVVTNINGKSARRIIDLIVENEALSADEVSSLLHGKMRSKLDQIMQSIEGITTSLQRKLIAQVIDHIDDMTRRIASMDEIIKDYTKQYDDAISALDELPGIARHSAEVIIAEIGADMSRFPSASHLCSWAGVSPGNHQSAGKRGSGKTIKGNNTLKTTLVQCAKVASRCKDSYFSARYQRIAVRRGANRATLAVAHSMLIAIYHTLQKSIAFRDLGSDYYDNFNRERKINGYLKRLTALGWTPEPLAIPV

SEQ ID NO: 417884 - protein, 325 aa, unidentified
MSSPSPAINIGIDVAKATLDIAVHETHSHWTSKHEFTEFATLIKQLRSLTPTRIILEASGGLEHLLVSYLATAGLPVIVINPRQVRDFARATGQLAKTDRLDAFVLARLGATLQPAVRPLKSAETQELEALVNRRAQLVEMLTAERLRLQQAQQQRRQAIVADLKAHISWLKKRLKQCEDDLSQLLRSSPLWRETDRRLQSVPGVGPITSLVLIAELPELGQFPNKQLVALCGLAPHARDSGKWHGKRTTRGGRARVRTALYMAALVATKHNLVIKTFYQRLLRAGKEKKVALTACMRKLLVILNAMFRNQTSWELPRPVPGAEL

SEQ ID NO: 417885 - protein, 349 aa, unidentified
MGEVITIGVDIAKLVFQIHGVDADGTVVIRRRVGRARVLEFFADLPPCRVGLEACATAHQWARELAKLGHDTRLMPPTYVKAYVKRGKNDAADAAAICEAVTRPSMRFVPIKSVEQQSMLMLHRARDLLIRQRTQLTNALRAHLAELGLVAAKGREGLHRLATVVTECGNERLPSNARFACQAILTQLHAVQIEISGLDKRISQTHRANADSKRLETIPGFGVILSTAVAATMADPKAFRTGRDFAAWIGLVPRQNSTGGKERLGSISKQGDRYLRRLLVVGATSVINSARARPYRYPWVIELLGRRPTKVVAVALANKMARIAWAVLAKGETYRTPTRRWNAAVPVAA

SEQ ID NO: 417886 - protein, 395 aa, unidentified
MFIVGIDIAKRSHEAIIIAEDGQVVRKAFSFRNNCTGYNLLLEQVRKLTLVKSQIVFAMESTAHYWLALYARLLKDGYAVMVLNPIQSHSLRELYIRKAKTDARDSLIIADLVRFGRCKASNVPQDKILALRELCRSRAYLVDMAADLKRKLIALLDRIFPEYESLFDSVFSKASIAVLRKYSTPQKVKNAHLGKLTDLLMESSNGHFGEWKAHQLKEAACSSFGIDDSDGVYSMLLGMFLEQILSLTAQADSLEKQISVFFQEFNNPLTSIPGVGTVLAATILSEIGDITRFSSADKLLAYAGLDPSVKQSGEFKSNQNRMSKRGSPYLRRAIWLASTVAVHRDPMFQTYYEKKISEGLHYMNVIGHVSRKMTTVIFAVLRDGQPYQPILQSAG

SEQ ID NO: 417887 - protein, 414 aa, unidentified
MPCKIAGIDVHKKVLMVVVIDATTPEEKAERRRFATMPSELRRLSIWLREQGVEEAVMESTAQYWRSVWLELEPYMRLHLAQAFSNRAPRGRKHDFKDAERLVRRLIAKELILSFVPDGEQRIWRSLTRMKLQLTRDRVRLQNQMECLLEEMRIKLSIVVSDLLGASGLRMLRALATGETDPKKLAQLGDARLRCTEEQLVDALTGRVQPMHRAMLGLQLERLQLIDRQMAELNRLIAQAMKPHQEAVMRLAEVPGLGVDSAQQIIAEVGVQASTFPAAAELTSWVGTCPGKDECAEENHSSRSAKGNKYLRRVLNQAAQAAVKKKGSHFQVVFRRLLARLGYQSAIWAIAHRLCRVVWKILHEGVRFIEQGCEPDPKAKNKRARMLAHALRKLGYEVTITPINLAIAENGMQI

SEQ ID NO: 417888 - protein, 412 aa, unidentified
MKDLLEISCGLDVHKEKIVACILTGPLGKPTRSEIREFSTLIPDMIALRHWIVSKNCHHVAMESTGIYWMPIYEILEDAFSGDITLLVVNARHMKNVPGKKTDMRDSEWISTLLRAGLLNGSFIPEKRIREFRDLNRYRKSVIRDITSQKNRIEKFLQSSGFRLSSFISDIFGASGRNIILHLIEHGQIDKTALDSCLKTKTRNRIDEILMSVNGTLSEHQKAFLRILMTHYDSLKKHLAEIETSLEEDMAPFALQVEQLNSIYGISTTASCAIIAEIGIDMKPFKTAEHICSWAGLCPGNNESAGKRKSTSVTKGNPYIKSMLCEIAWVIAGKRNTYLSAWYWRIKQKKGAKKAIVALARKLLVIIYTMLKQGTLFDESCFETRRKHCEQKQLSRYIRELEKHGYHVEAQS

SEQ ID NO: 417889 - protein, 411 aa, unidentified
MDVVHERCAGIDIGKADVKVCVRVPGPGKRRRKEVRTFSTMTRDLLAMRDWLIAEGITVVGMEATGSYWKPVFYLLENDIGTWLLNARHMKNVPGRTDVADSEWICKMVEHGLVRPSFVPPPEIRQLRDLTRYRTEVIRERTREAQRLEKLLEDAGIKLSAVVSDLLGKSSRAMLEALIAGERDPLVLAEMAKASMRAKRAVLAQALTGRFTDHHAFLARTMLDRIGAVTATEARLSEEITRQLAPFRRQVELLTTIPGVNAKSAEVILAEIGVDMSRFPTAAHLASWAGMCPGNHESAGKHTSGKSRPGDPWLKGALGLAATAAARTKGTYLAARYKRIAVRRGKKRALVAIGHTILTPIWHMLTNDAEYAELGGDYFVQRTGRARQTRRLVSQLNMLGYQVSLQSAEAV

SEQ ID NO: 417890 - protein, 349 aa, unidentified
MTAAYDGPQVVGMDLHRRRSVLVRMTADGRKLETARITNSPAELRRVIARAGKRPQVVLEATYGWYWAADTLAAAGAQVHLAHPLGVKAFSYRRVKNDEKDAADLADLLRMGRLPEAWIAPAEIRELRELTRYRIKVVRLRTSCKDQVHAVLAKLGIEVTCSDIFGVAGSVWLDGLELPQPYAGKVASLRALAGGLTAEITLLEAAIGDLLEHHDGYHAVQALPGIGPVLAAVLAAEIGDITRFATPARLCSWAGLTPRHRESDVKVRRGHITKQGSPLVRWALVEAIQHVPAGHPLRQRKEDILARRGDQAKHIAKIAVARQLLTWVFYAMRDGQVRALAPATGQQAA

SEQ ID NO: 417891 - protein, 361 aa, unidentified
MNEKKLNHLGIDVGKRKCRAALKDDRGRILDEFFFGNSYQGILELIKRIQDHGTKKCNAVLESTGNMWMRVHDILEDNGIDTILANTFKTKIIAQAKIKSDKLDACILSDLLRTGLVYESYVPVKEFREKRSLVRHRIALSRTKTKLANKIHAILDKYEYRTELTDIFGKSGINWLKSLSVSPIDKIILNTTLSSIETIDNQIEIVSKEIARYAWQDCQDIKILLSITGIDIFSAMLISTEIVDITRFSTSWKLVSYAGLAPSTRESSGKIKTGRITKQGSPLLRWILVQCSLSAIRHDHHMRTFYERIKSRKGHGKAIVATAKEMLVIIWYMLTRHQLYRYMNKNRYEQKLESLKKIGSQ

SEQ ID NO: 417892 - protein, 420 aa, unidentified
MKRERDTRVWEEGKRYIGLDVHKHYITVGGMNAQQEIVLRPRDVEMERFQRWAESNLRKTDEVVLEATTNTWDVYDTIVPLAKRVVVAHPAEVKQIANSRVKTDNQDVIRLVRLLIADIVPEVWVPPVAVRELRAMISYRWRLVKMSTAIQNRMHSLLHRHNIQAPQGKVDTGENREWWERLKLSELETLRLKQEIKTLRLIRENIVEVERELGRLSNGERWGDQAVYLMQLPGVGIIVTMTILSAIGDIRRFESPKKLVGYAGLGAGVHDSGQKHQGKGITKFGRKELRWALVEAAWQAVRSNPKWRAEYDALCKPKHQNQAIVAIAHKLLVIIWYLLNRQEVYKKSTEEDLAYKMLTWAWHMDKSALNGMNNQQFAKYGLLRLGKGAELTRIVRGGVPRRIASKEEVLALKPELHLKQ

SEQ ID NO: 417893 - protein, 400 aa, unidentified
MNPLSIRVAVDVGSTRHRVAIGLPDGKLLDEFDIDHNAAGFGEFFSHIETIEHRHHLPVAVAMESYNGWARPLDGHILRHGYSLYSVNNLKLARYKEIFPAPAKTDAIDARRILELFRLSEHLPLARDALHEVAPTPVANDQLKRLTRRRKQLVWERVRVLNRMQSDLHAVCPGLLAITGEAGNLWFLNFLTCRDKLPKLAKLRQSSLLAIRGVGKLYASRIRAWQPQAQFAPEVEWAGEMIGQDARRILALGKDIKAMDQKIADVSVLSELAQSIGSIPGFGKTTLAEIAGEIGTLERFETESGLAIYTGMAPLDNSSGKKNSTKAPRQVNTRAKAAMMVAVARHVECVPASRAYYDRKRAEGKKHNQAIRSLGRQLVRVIWSLVKQGRKYEIREENSK

SEQ ID NO: 417894 - protein, 348 aa, unidentified
MSRESIPSTIGIDIGKNTFHLVGLDQRGAIVLQLKVSRAQLERRLVNISRCLIGMEACSGAHHIGRQLEALGHDVRLIPAQYVKPFLKGHKNDYRDAEAIAEAVQRPTMRFVAIKTPEQMDLLALHRVRSRLVRLRTGVINQIRGFLIERGITVRQGPAPLSKALSDILGSSSTALSPRLVRLIADLAEDWRRLNDRIATVSAEIEALAKQDGHCQRLMAVPGIGPIISSAVVAAIGNGNGFRQGRDFGAWLGLVPKQESTGDRTILGKISKRGNKYLRTLFVQAAHVILARRPSAAMRGLWPWIEQASKRLHRNMLAIALANKLARVVWAVLARGCPYQPRVITNVA

SEQ ID NO: 417895 - protein, 451 aa, unidentified
MWKVVPVNKSKAYRASDVKDVQIESVIRLASGREAVVGIDIGKFHKFAVIRWSDGEFERPWKVRSPEQIGLFVERLQRLSQYCRLKTAMESTGTYGDVLRWKLTQAGLPVLRVGGKAARDYAEVFDGVPSQHDGKDAAVIAELAAFGKGRDWAHRSAKEEEAELAYWIDWLDAQQRVRQFWQGRLEGLLARHWPELTRLLGLSHVTLLELLAHYGGPAALAADGEAARQLSSWARLAIHSPKIVNVLASARSTIGVAQQAQDVQRMRQTASLALAAHREVQRASGRLAELASNHETLQRLGEAVGMATACVLWATVGDPNDYPSGGAYRKAMGLNLKERSSGRWQGCLKISKRGPSLARRWMYFAALRLVQDEAVRPWYEAKKARDKGRGRGAVIAVARKLALALHAVARRNEPFDAARLFPGASPGGQRGSLNRGVEGQRVKIAESEIPY

SEQ ID NO: 417896 - protein, 367 aa, unidentified
MKKVSTAVTKQRRNFSQPKRTIGLDLGDRNSWYCVLDEGGQIRLEQRVRTNAKALREVFGEMPRSRIALETGTHSPWISRLLNDLGHEVIVANARKVRLIGESRKKDDRLDAQTLARLARIDSVLLCPVKHRSAQAQADLTVIRARAALVRARTGLVNSARSLAKSYGERLRGCNVRNMNPEKAESLSPELQVALEPLLHAIESLSERIVEYNDRIGALAEQRYPQVELLKQIKGVGTLIALTFLLTLEDPHRFRKSRDVGCYLGLQPGRRNSGQSEPQMHISKEGDPYLRTLLVQGAQHILGPFGVDCDLRRWGLKLAERGGKSCKKRAIVATARKLAVLLHHLWVSGEVYEPLHNSSRATVAAAA

SEQ ID NO: 417897 - protein, 571 aa, unidentified
MTIRKQNKRKPAKSVSVPDGVEATKGEIHAMLEQLTAANLEQLLRNKKVLGRSKLTKKVSMIKALEGLFTPEDFKPYDLGYHSSENMSKSQPMGTDHRSQVISMYREKEGRRKTQPVLGMDIHKNQITYATATPEGIQYEGIVENTPDGINSLIQLYRNIGACIGAMESTAEYWVPVYWQMQEAGLNILIANAQQTKAIMGKKTDKFDARRIALALRDGILRPSVTCTREQYALRKQMRDLVKRDQWCTSVRARIQQIFDKAQASKFVKSLLGNQRGQRLLLGLFHCTSTTDIFELVQEEMSHHRGKVADLKQLRIYATELEFFTKQVDRNLDRFRFQAWLSDYFDAQRKILQLQQEGLRYAQAHPEFRKSLLRLVEIPDVGLTTALAVLAEIIDIAYFPTAKALTKWAGLVPSVAQSGYRKAKMGRLCKAGNKYLRRACWTAANTAATHGNGEDHPIGRYIRHLKDTKNKFHKVAVTAGARKLLTIIHAILNSSEPFRIAAKSEIRGRYLKNLKRKQNEITHMLKRISPKIKWEFVYTEIKARYEEYHEESGKFEQLWKQIMGPDILVPI

SEQ ID NO: 417898 - protein, 351 aa, unidentified
MPEKLNAAVAVIGIDIGKNSFHVVGLDQRGAIVLRQKWSRGQVEARFANMPPCLVGMEACVGAHHLSRRLKALGHDARLMPAKYVRPYSKGQKNDFRDAEAIAEAVQRPTMKFVATKTAEQLDLQAMHRVRERLVSQRTGIINQIRAFLLERGIAVRQGQRFLRAERPRILAVPPDILSPRIMRIVEDLAGDWRQLDQRIDGLSEEIKVLAGEDSGCERLMTVPGIGPIISSAMVAAIGTGDAFSKGRDFAAWLGLVPKQISTGDRTILGKISKRGNRYLRVLFVQAAWVVLIRPKSWERHGLKPWIEAAKKRLHHNVLAIALANKLARIAWSVLAHGRNFETRTISHATT

SEQ ID NO: 417899 - protein, 340 aa, unidentified
MEQVSMIGIDLAKNSFQLHGARTDGSVAFRKKLSRGKVLEFLASQPRCAVAMEACGGAHYWGREIGRQGHSVQLIPPAYVKAYVKRQKNDAADAEAICEAASRPTMSFVAVKTAEQQARGMLFRTRDLLVRQRTQTINALRGHLAEFGIVAPQGPVHVARLASALEDSYRDLPDAVRDLAGLLLNQIAGLGEKIDGLDREIRAAARQDDEVRRLMTVPGIGPITAMAVQAFAPPMETFGRGRDFAAWLGLVPRQHTTGGKPRLGKISKMGQRDLRRLLITGAMAVVRWAVRRGTTNDPWLAGMLMRKPRMLVAVALANRMARIVWALMTKKESYRAPAAA

SEQ ID NO: 417900 - protein, 379 aa, unidentified
MNKRIIFIGLDVHKETISVAIAEHQKEPRSLGKITNKPEAIYKVMRKLGPFKRLKVCYEAGPCGYVIYRQLSKLGIECVVVAPSMIPKKPGVRVKTDRKDATMLARLLRSNDLAPIWVPDERHEALRDLSRAVEAAQGDLVRARHRVRKLLLRQGIRKPEGMSSWTYRHQRWLHSVKLPRANQQVVLREMMLTMEQAQERRQRLEAELEHSVEFSPLADLIRAWQCLRGIKVISATRLAAELGDIRRFTNPSQLMGYVGLVPSERSSGSRERRGSVTKTGNAHVRHVMVQAAWHSRHPPSLSGELRRRQRGQPERVKAIAWKAQDRLHRRFRRLVGRGKPRQKAVVAVAREMLGFVWAIAQEIPVQEYEQQPDSFSQAA

SEQ ID NO: 417901 - protein, 355 aa, unidentified
MAIVASSYSFVVGVDTHAKTHTYAILDTRTGEILGCEQFPTTTGGITRALAWVLRRTGGETVLWVIEGIGTYGARLGNAVGQSGYELAEAPRIDGRTRTGIGKSDPLDAKAIAAAALSIDDSRLRRPRQDDGMRAALRVLLAAREQLAAERTMNVNALTALLRVHDLGLDARKPLTKHQIQHVSRWRERHESLIAVTAREEAVRLATRILEIGEAVKSNQARMTELIRESPAAPLLEMTGVGAATAAVVITAWSHPGRVRNEAAFASLAGVSPIPASSGNTVRHRLNRGGDRRLNKALHVAAITRMTHHPETRAYVEKRLAEGRTKREIRRCIKRYFARHLYRTLNALHPPTPAT

SEQ ID NO: 417902 - protein, 343 aa, unidentified
MPAITTIGLDIAKSVFQVHAVDAKGNVVLRRQIKRRYVLAFFQKLPPCLVGIEACASAHHWSRQLQALGHTVRLMPPAYVTPYVKRHKNDAIDAEAICEAVTRPNMRFVATKTREQQSCLTLHRTRHLLIRQQTSVINAIRAHLAEFGIVAPVGRNGVDQLLGIVADASDKRLPELARACVAALGTQLGTLKAQILQFDRLIMAWHRSSEASRRLDDIPGVGPALATALVATVADPRAFRSGRNFSAWIGLVPKQHSSGGKDRLGSISKRGDRYLRFLFVAGALAVIRYAKIHGTKHRPWLTALLARRHTKVAAIALANKIARMTWAIMAKGEHYKEPVALAA

SEQ ID NO: 417903 - protein, 460 aa, unidentified
MKGKSRRRSAQRAQREQRLLEKIHLNAAGIDIGSESHWVAVPEDRDDQPVREFKSFTHELLALADWLEACGIETVAMESTGVYWIPLYEILEERGIEVLLVNARHVKGVPGRKTDILDCQWLQQLHTFGLLRGSFRPDAPIAALRSLVRHRDQLVSAAAAYVQRMQKALVLMNLQLHNVISDVTGTTGIAILRDIVAGQTDPTVLAHHRHPRCKATEAEIAASLTGHYRDEHLFVLRQALEIYDLYQEKLRACDTEIETRIHALEASCDPVKDRLPASQAKRSANEPGFDIRSPLFTLCGGVDLTQLPGIGAYGALKLISEIGLDMSRWPSEKHFASWLTVSPQNQISGGKLLRTRTQPSANRAAKILRMAAMSLGRSDHALAAFYRRLGARVGKAKAITATARKLALLVYRMLRYKIHYHEPSAADYDRQQRTRILRGLRKRAASLGFELVDTHTGLVT

SEQ ID NO: 417904 - protein, 360 aa, unidentified
MEECPKISGCMIIGGVDTHKDLHVAAVVDEQDRVLGSHCFATTRQGYRQMLAWMRSFGVVKRIGIESTGTYGAGLLRYLQGAGIEVLEVTTPDKFDRRRRGKDDDKDAQNAAHAAFAGKRTVTPKSRDGMIESLRVLKACRKTAVAARRIALQMIHNTIVCAPDELRDSLRKLTRMQLIRLLAAWRPDLSDYRNVVSAYRITLKSLGRRYLELHDEIADLDTMIGAIVDELAPELVARNSIGYESAAQLLLTAGDNSERIKSEASFAALCGVSPVPASSGKVVRHRLNRGGDRAANSALHITAIGRLRTDPRTKDYVARRIAEGHSKLEAIRCLKRYIAREVFALISQRRRDIRQTQIAP

SEQ ID NO: 417905 - protein, 355 aa, unidentified
MSSEKYIGMDVHQATISVAVMDSQGKTIMESILETKTSTILEFLAGLRGTLLVTFEEGTWAAWLYDLLKPHVARVLACNPRKNAALKHGNKSDKIDAHKPADRLRLNDLKPVYHGESGVRMLRELARSYLTIVKDLTRVMSRVKAVYRSWAIPCAGRDVYYRRHRNQWLDKIPEPGVRYRAEQLYQQLDMLQHLRQQARRELLAEGRKHTITAKLRQIPALGPIRSALAVALIQTPNRFRTKRQLWSYSGLGLETRDSGEYHYVRGQVRRRKKQVFIRGLNKDYNHDLKGLFKGAATRASVLPGPFQEFYQRSLAKGIKPTMVRLTLARKIAAVTLTLWKKGENLDAEKLKSQAA

SEQ ID NO: 417906 - protein, 356 aa, unidentified
MASIALERSDVIVGVDTHKDQHVAVALDGFGGDLDDRVIVATNDGYAELRAWALGLGRVVAFGVEGCGSYGIGLARFLRRHGHKVIEVSRPPRKGERRVAGKNDLIDARHAASEVLAGRVTATPKTASGSIESIRLVKVERDTAVKAHTTAMITLKATLVTATDELRGELEPLSDFKLITACAALASNGDLTDPGDAMRHALGALARRWLELHEEIKIHSRQLKTLTSQAAPELVEAFGIGPDIAGELLVAAGDNTDRIRSDAAFAKLCGSCPIPAGSGRTNGRHRLNRGGNRQANAALYRCVIVRMRWHAPTVAYVERRTAEGLSKKEIIRCLKRYVTREVYALLPAPTAIPVHQ

SEQ ID NO: 417907 - protein, 341 aa, unidentified
MKHYAGIDVSLEHSSVCVVDADGKIVREGKVASEPETLIRWFNAVGFAGERIGLEAGPQSQWLFAKLMQAGFAMELIETRHAHAAFTAMGVKTDRKDARNIAHLMRLGWFRPVHCKSLPAQETRALLTARKLVQAKLGDVEMSLRGTLRGFGLKVGRTTKKQFAGRVTELVEGHAMLEVIAQALLAVHAVLRRELDGLEKRVLMIARSNAVVQRLMTTPGVGAIVALTYASAIDDPARFTSSKAVGPHFGMTPRRYQSGETDYTGRITKVGDGTVRTALYEAAHVIMTRPVKGGALKSWALRLAKRAGMTKAKVALARKLAVILHRMWVDGTCFNFAAAAA

SEQ ID NO: 417908 - protein, 403 aa, unidentified
MNSVGIDISKGRSTIAVMRPFGEVVISPFEVRHTDSELSKLARQLKSLDGETRVVMEATGNYHAPVAKLLHDAGLYVSVVNAKLVHGYGNNELRRVKTDRKDAVKLANYGLDRWLTLPRYVPEENTRLLLKNCYRQYRQYSKVQTVLKNNLISLLDTVFPNVNRLFSSPVRGDGSEKWVDFVAEFWHCRCVSEKSQKAFTNKYQRWCRKHGYNFSEAKAHTIHAETCGHIDVIPKSETTKLLVEQAVSQLRATSTALAALKHEMQALASQLPEYPVVMDLFGVGPTLGPQLIAEIGDVRRFYSKKALVAYAGLDAPPNDSGDVTGRHKSMSKIGASSLRRTLFLVLSVYLQTAPLDEPVYQFMDRKRAEGKPYRVYMMASANKFLRIYYATVKAYLESLEHTA

SEQ ID NO: 417909 - protein, 370 aa, unidentified
MRIIGCDLHARQQTLAMLDTTTGEVVNLTLMHESDKVREFYSQLPRPVLVGIEATGSMHWFLNLMEELGIECRVGHPAQIRAAEPRKQKHDRRDADLILKLLAENRFPAIWLPSKELLDLRALLLHRHQWVRMRVRMQNALQAIALANGLRRGPSLWSYDGQAKIAFLPLLPHAACRRNRLQAMYKTMESEIESLNKQVAKQAGNRPGAQRLMTHPGVGPVTALATEVFLGDPQRFADGKALASYVGIIPREYSSGGQQRLGAVTKQGSPLLRFLWGEAGAHAARHDPELKRFYRRKLVHKGLGKARVAVARKLGIRLWIMLRDEIDYQEFCRRGQIQQKTVRPVAGIPETGNGAKSHRPSDEATRLPES

SEQ ID NO: 417910 - protein, 390 aa, unidentified
MIFVGIDIAKLNHFASAISSDGEILMQPFKFTNDDGGFHLLASKLESLSLVSDSIIIGLESTAHYGDNLIRYLVASNFQVCVLNPIKTSSMRKNNIRKTKTDKVDTYIIAKTLMMQDSYRFVTFYDLDLMELKTLGRFRQKTVKQRTRLKIQLTSYVDQVFPELQYFFKSGLHQKSVYALLKEAPTPKAIASMHMTHLAHLLEVSSHGHFTKEMAKELRVLAQKSVGTSDSAISIQITHCIAQIELLDSQLKQIEAEMADIMKFNDSVLMTIPGIGYVNGGMILGEIGDIHRFSTPGELLAFAGLDPSVYQSGNFQAKRTRMSKRGSRVLRYALMNAAHNVVKNNATFKAYYDAKMAEGRTHYNALGHCAGKLVRVIWKMLTDKAEFNLD

SEQ ID NO: 417911 - protein, 377 aa, unidentified
MNRILKIGMDVHSTNYTLCAMEPVFGADDRIYANIQVAPDYKNILMFIEKVKQKLDPYDTYDIECGYEAGCLGYSLYNQLTSAGVKCVILAPTTMLTQQGNRIKTDTRDALMIAQCLSYGGYQPVYIPTEDDDSVKEYLRMRDDHKIALKKVKQQINAFCLRHGYHYPQGKWTQMHLDWLTAIKLPTLYQETLDEYMATYFELIDKIEKYDTRIDEIAAQEKYADKVKKLGCFIGVKTHVALSLIVETGDFKRFAKGNAYAAYLGLAPGEHSSSDKINRLGITKAGNSNLRRLLVEAAWGICKGNIGYKSKDLKKRQQGNSVQVISYADRANSRMRSKYYRLIRHGKKKNVAIAAIARELACFVWGMMTDNIEAKAA

SEQ ID NO: 417912 - protein, 339 aa, unidentified
MKLYGGIDLHSNNSYIVLMDSRGTVVQRSRVGNDMGLILRSLAPYREQIDSLVVESTYNWYWLVDGLKEAGYPVKLANPSAMQQYQGLKYSDDRSDARWLAEMLRLGIVPTGYIYPEAQRPLRDLLRQRSFLVRQGTGQLLHTGNILCRNQGRKSSRQQIRQMTVADAQQLFPDRERTLAVESSLRVIEVLEQQIAAIEKQVLSRIKPEAGFQNLQTVYGIGPILAMTIWLETGDISRFHQVGDYASYCRCVASTRLSNAKKKGENNSHNGNPYLAWAYVEAATYAARFYRQASRFVERKTAQVNRTLAIKALAHKLARACYYVLRDGVVFEPTRLLGS

SEQ ID NO: 417913 - protein, 500 aa, unidentified
MCNGTKIPPQSVSSIKLSSGYNLAPDAVFFYKTERCLIFLLTHLKAAVMKKGFLGIDVSKGYADFLLLDEQKQTIEETFILEDNGQGRKQLKALIEKWLSQGIEQLYCGVESTGGYENNWYCFLRTLSATQQLQVARLNAKAVKAVSDAALKRTITDAVSAENIAVYLISFPEKIDYGRKQTKQVDQFKEGRQHNSYVRMQQKQKTQLSNQLEKLLYQYFSEILVYCRHGIPGWLLRMLSKYSCAAALTQAGAGKLSAIKGISKEKAEALLSKATGSTQIVSSQIQHVIAATAREILHKEEILQKEKKYLTEMYQHNEQVKLLTSIKCIGSETAVTVMLEIEDITRFASAKKIAAYFGVHPTFKQSGDGTWGSHMSKKGRGEIRAILYMAALSGIRCNSILKQVYAKCRAKGMKHYQAMGVVMHKLLRIIYGILKNQTAFDEAIDQKNQNKAADKQKQTKEQQKQNKKNEEQKKHRYQSLTIEAPISRRAAQKRKKQIAS

SEQ ID NO: 417914 - protein, 332 aa, unidentified
MISYIGIDIAYKTFDVVVRQDNKNSKVETYNQHKDDHKKLINKLKKLKPESVVMEATGIYYLDLAKALFKADLPVSVINPKSFKSFAETLLKRSKTDSIDASLLAEYGQRMTPVLWTAPDDTMMELRDISRQINRLVYINTQAKNILHAMTATQNTNKYVIEDEKEGICFNEKRIERMRDLALELISNHDALKRQLSNITSATGIGENSAICMMGELNILPKTLKAPQVCHYAGLSVRLKQSGTSVNGPGRLSKAGNTYLRSAFFMPAMSASIHDSNAAAFKEVLLSRGKKKIQAICAIMRKYLMGVWACIKTDTPFDSSKLFSEEHKITCA

SEQ ID NO: 417915 - protein, 349 aa, unidentified
MSMVGGLDLHRRQITYDVLDVDSGEIWRGRLWQPDRQRFRRWLGTEVAARSRGESVALAVEGCTGWRYVVEEISAAGFEPFLAEPADTQAARGKKRRAKTDRTDAQLLRELLSAGELPESWIPPPDVLEWRERVRLYKSLVDQRTLWCQRIHAVLYHHGVAVPEGAMRTEKTRALITSEKVQLSAAGRERIAAGYKMIDAADREALPLKADLQRFGARQPACRALADAQYGIGGLIAVVLWSELGDCRRFCRSEQVVRHSGLDVTVDASDRRRAGGHLSRQGPETLRWALYEAAKNSSHGRSPDHSYYAKVKDRHDGKIAAISVARQLARRSYHVLRAVDPELVYAIPA

SEQ ID NO: 417916 - protein, 363 aa, unidentified
MKDTALIVGMDVHKESISIAVLEGERGSGARPTVTVPNEPVKLRRFFGRLKKEGVVRACYEAGSCGYEVQRLLASIGISCDVVAPSLIPVRAGDRVKTDRRDAEKLARLFRAGELTSIRVPTEAEEALRDLVRCREDAREDALRERHRLLKFLLRHGHIFTESKHWTVAHWEWLRRQRFEQPIAQTVFLEYLARLESTIARIKTLDQELAAAAECEPYKEKVAHLRCLRGIDTLTALSLVAEICDFRRFEHPNELMAFLGLVPSEHSSGGKQRRGSITKTGNGHARRLMVEAAWHYRHPPRRSPTMRARWKDQPAKIVDHAFKAQERLHRRFFRLTSRGKPSQVAAVAVARELCGFVWAIANA

SEQ ID NO: 417917 - protein, 339 aa, unidentified
MQLYAGLDLHSRNTYIGIMDKDFNRVFHKRVSNQLDLVLKTLEPFGKQLKGLVVESTFNWYWLVDGLMDAGYQSLHLANPSAIRQYEGLKHIDDRHDAFFLAQLLILGILPQGYIYPKKDRPLRDLARKRLFLVKHKTAHILSLQSLFQRCCAIKITANQIRTLTKEDCRQLLKQEHLVLSAQTTLETISFLKQQIKTLEKAIIKKVKLHKSFEQLLTVPGIGNILAMTIMLEAGDIRRFAKVGNFVSYCRCASSQRLSDGKPKGHGNRKNGNRYLSWAFVEAAHLSCRYNEHLRAYYNRKAAQTNTCVATKALGNKLARICYYIIRDQVPFRPQLAAH

SEQ ID NO: 417918 - protein, 338 aa, unidentified
MIVIGVDVHKHSLTAVAVDEAGRMLEERTVAAADDELLVWAAELDGVRLWALEDCRQLTRWLERQLVDAGEELVRVPPKLMAPERRAGRARGKSDPIDALAVARAALREPGLSRPRPDEQPFRDLKLLVDHRDDLVDERRRAQQRLRWHLHQLDPSFVVPARRLDRPTHLERVARWLARREQDVQVRVARELVARCRSLTRTIAELERELEQRTAETAPALLELPGCAALTAAKLLAEVGPIDRFQTDAQLARHCGVAPLEASSGRVQRHRLDRGGNRQLNAAFYRIAITQARVHPAARAYLERKQAEGKSRRDAIRCLKRQLARVVFNTLKASPALT

SEQ ID NO: 417919 - protein, 369 aa, unidentified
MEKGTTYVGLDAHQESTNGSIILSSGEIVEDRFATTPEGIRRWVRRLKRRCKGRIVCCYEAGPLGYALQRTLVSLGVECIVIAPSLIPRKPGDRIKTDRRDARKLAELLSAGLLTVVRVPTPEQEAIRDLCRARSSVKGDQKRIQHRLSKFLLRRAIRWTSGRTMWTEAHRNWLRGLRLEHVADQDILNDHLLALEQNQGRLAALDEKLAHWSTQEPYAEVVAWLRCFRGIDTLTALSVAAEIHDWRRFPSPRALMAYLGLVPSESSSGGKSQRGSLTKTGNSRVRRLIIEAAWHYRHRPAIGQRLAQRRVGQPAEIIAIADRAQQRLHRRYTRMSARGKSHNLVIAAVGRELVGFLWAAMQRTEVRSH

SEQ ID NO: 417920 - protein, 305 aa, unidentified
MIDGILGIDVSKNTLDASMSSCNKVRAKSFANSPDGWRHLLDWLIGQKIRRVHACLESTGLYSLGIACKLNEAGHVVSIVNPAQIRDFARTKLGRNKTDAVDASHIREYCELFKPPPWSPPSHAHRQLGELQTIRAGIVAGLTEWKNRKNSGMIDVVAQSLADATISHFTSQLGAVEKAIAQAIDNDTDLRRKRDLLLSISGVGETLASVVLAELPGPAVLRSSAEAVAYTGLNPRRHQSGISIDRLTRISKIGNAVLRAALYMPAMSAMRYNPAIVALVTRLKARGRLNPKQIVVAAMLCASVF

SEQ ID NO: 417921 - protein, 507 aa, unidentified
METRTNLNEVGKKKLVLGIDVALKNHWAAIGDNKGQEMVKPFQFSNNAEGMSLLEGIIKQTGKAENKGDVIIGMEPTGIYWKPMGHYLREAGYRVVLINPSHTHKTKELEDNSQTKNDRKDSRVIQTLTREGKYLEPIILRGIYGELRRLGQAYKSALKRGNVISNKVKMIADEYFPEMRGIIKSINGKTAKGLLAEIPFPDDIIRLGKTKFYKKLKKWSNKRFGKKKSLKLWEAAKKSIGVKVGQEAAKIELRQLVEEMELVKRHREELVKGIEEKAKVTEEGKSLIKLPGLGYLSIGKLIGETGSIKSYKGARSLEKLAGLNLIESSSGERHSGKKISKRGRKLMRTTLYQMALASIKNNRAIKYEYQYRIKTKKQKKMKALTAVACKMLRVIYALVSANKEYDERKISRHYYESEIKREENICEWVTPIIPPSGPGYNSGDTVMKNTGHPLPMTLNEVMSGAPVQYRDDTGRNDRVRHRKSGGTNPLVNIEKSWAEENQEVVCK

SEQ ID NO: 417922 - protein, 394 aa, unidentified
MILVGIDIGKNQHTFSIVDMNTGEILSNPSLFNNNQEGFLFLIKKLNMYSKSDLLIGMEDTGHYHFALLKYLLDIRYTVALINPTTTDLTRKLQGGITKNDPLDSLTICDVIGSNQRKKPYRITKVNRFDLYEQKQLTRHHHNLKEELNVYKNRLQKCIDIVFPEFNSLFRSKYGIVYMNVLKTFASAQKIANSDIRTIRKCFEYDGRGKRITLSADQLKAAAKTSIGIPSVAEEIQIRHLVCQIEMIEEQLSEIDKKIEEFSLQNNSPILSIPGISHFSGTSILAELGNICNYTKASQIIKFAGVAPYHYESSQFTAQHTAITKKGSRYLRKTLYQIILPVINHNTVFTAYYNKKLAEGKGHRCAQGHCIRKLLRIIYHLLSTEQTFDPALLI

SEQ ID NO: 417923 - protein, 404 aa, unidentified
MQRCYIGVDWADQAHELWVVDERGEQVWSAQVEETEEGLSELGQWLYTHRSEGVELWASIEKPEGRIVDFLLDHGVEVYPINPKALDRARDRFRMSGAKSDPFDARVLAEFLRTDHPHLQPLLPSSEQAQELKLLTRDYERLLRNQTRLLNQLKATLKEYYSRPLKVFKNLSTASALDFLERYPTPESLTPQGWQEFAASHRWPRSRASQAWELLSQPPIPIPAHVARAKSRLLRALVAQLRVMGTTLGEYKAEIEGFFVSMPVADVARSLPGGKSGVTVPSLWAELGDAPGRWGSFQHLQGQAGAVPVTKRSGKSSVVHFRFACNKTLRHAVNQLAFLSLRYSTWAPAYYRQQRRKGHTHHQSLRALGAKWLKIIFVMWRDQTPYDEERHLANIARQTMYQAA

SEQ ID NO: 417924 - protein, 355 aa, unidentified
MHDITPDAVVSGIDTHKDVHVAVAVNALSARLATASFPVTSKGYRQVAAWATEHGTVHAFGIEGTGSYGASLTRALAAKGLRVIEVGRVNRQLRRRHGKTDTVDAESAARAVLAGDADGEPKCGDGTVEMIRHLKIARDTALKARTQAMVTLKTMLVNAPQALRERFIGITGKMTLIRAIAALRPGALVSTTASAKMALRALANRWLMLDAEIKEHEAVLEQLVRAHAPALMDAPGVSTGTIADMLIVLGDNPERIRSEAAFAKLCGVCPVPASSGKTNRHRLNRGGNRRANAALYRVALVRMRHHPPTREYIQRRTAEGKSSREIRRCLKRYIAREIYQHLCTEKPTPAAAKGS

SEQ ID NO: 417925 - protein, 338 aa, unidentified
MRLYCGIDLHSNNSMISLIDQEDRVVSEKRLDNNLEAIEHHLQPFQDDISGVVVESTYNWYWLVDGLIEKGYPVHLANTLAIQQYNGLKYTNDATDARFLAHLLRLNILPTGYIYPKAMRHIRDLLRRRLLLVKQRTAQLLSLQSLIGRHTGERLSCLKMKQLKQDELAHHFGSAPARFSAQQNHRLMQQLDTQIEEVETFVLARCRDSEQYSRLTSTPGIGKILGMTILLETGPIDRFPNVGNYSSYARCVPSEKISNGKSKGKGNTKNGNRYLAMAFVEAAHYASIWEPTIKRYYQRKCKKVPVMVAKKTVANKLTRACYHMLRNGTVFDVARAFG

SEQ ID NO: 417926 - protein, 377 aa, unidentified
MSKIRFVGMDVHADTIAVAVAEPGGDIHSLGIIPNRLESVRKMIGKLGPVGKLKCCYGAGPTGYVLYWQLAQLGVKCEVIAPSLVPVKSGDRVKTDRRDAEKLARCYRAGELTAVWVPDAAHEALRDLVRAREAAKKDQLRHRHRLGKFLLRHGKRPNGAGEPWTQKYLNWIRIHARFDEPALEATLTHYLGEVEHASERIIKLEKAIDEAVKQAAPEVRAVIEALQALRGVAQTTAATVVCELGSLSRFPGPSQLMGFSGLVPREYSSGNKTQRGGITKTGNAHLRRVLVESAWTYQHRPNVQGRVLRRQKALALSDESRRIAWKAQQRLHKRFTAMAARGKARGTIVTALARELLGFMWAIAVHTEAQFKQTKAA

SEQ ID NO: 417927 - protein, 406 aa, unidentified
MRVVHERCAGLDVHKSSLVACALLPEGKQLRTFGTMTSQLQQLGEWLRGLEVSVVAMESSGVYWKPVFNILELAGFELLVVNARHIKAVPGRKTDVKDAEWIADLLRHGLLKPSFIPNRQERELRELTRYRRTLIEERAHEVQRLQKVLEGANIKLEDVISNVVGLNGRRFLSALIEGDYDPETVAATANYGLQRKRELLAQSLHGTLGPHQRFLLDQLLSHIDFLEQRIAALDQEVHSRSRPFEPLIARLDQIPGLGIRAAEEILAEIGTDMSRFPSHRHLASWAKVCPGNNESGGKRRSGYAGKGNRWLRSILVECAWCATRKKDSYFKAQYHRLAVRRGQKRALLAVGHSLLVVIYHLLRDGVVYQDLGTNYFDQRDRSQIARHAVRRLERLGFHVSLTEGAA

SEQ ID NO: 417928 - protein, 312 aa, unidentified
MATLCYLGIDVSKATLEWATSLDSRGAHSVGNDETGWAELLTHCDEAQPTLIVLEATGGYEIGVATALTVAGWSVAVINPRQVRDFAKAAGLLAKTDALDAHVLALFAARMQPTPRPLVDDLQADLSALVTRRRQMVDMLTAERHRLAQARPAVRASVKAHIHWLEARLRDTEGDITTRIHQSPIWRVRDQVLRSVPGIGPNTSARLLASLPELGRLTPRQIAKLVGVAPLNDDSGMRHGYRAIWGGRAAVRQTLYMATLVAVRHNPVLATFYQRLRLAGKPPKVALIAAMHKLLIIVNAMVKTETAWVAPA

SEQ ID NO: 417929 - protein, 355 aa, unidentified
MTSTKYIGLDVHKESISIAVMNSVGKVVMECVIETKASTILQFIDGLRGDVRVTFEEGTWAAWLYDLLKPRVTEVVVCNPRKAALLKDGSKGDRIDAYKLAELLYMNGIKSVYHGEHGLRTMKELARSYLTISADLTRVMNRLKSLYRSWGIPCVGTEVYAPRYRAEWLGKIREAGVRRRAEYYYQQLDVMHLLRQKVRKDLLAESRKHKAWKLLCQIPGIGPIRAAVLIAVMQTPHRFRTKRQLWKYSGLGLETHDSAQYHAVEGELRRSKRPATVRGLNKDHNHDLKDIFKGAAMRASTAAGPLHDFYENLLAKGRKPTMARLTLARKIAAITLIVWKKEVRFDANYLKQQAA

SEQ ID NO: 417930 - protein, 352 aa, unidentified
MVVIGIDAHKRTHSLVAVDRVGRKLAERTVRATPDGHVDAVAWASQWPDVVFAIEDCRHVTRRLEDDLLRAGYRVVRVTTQLMAGQRRGGRERGKSDPIDALAVGRVALREPDLPIAHLDGPSREVKLLADYRDDLVVQRTRSCSQLRWHLHELDPELDIPSRGLRRRCLQDELCEHLADMPGVVAQIARELLERCRQLTVRINQLESQLRKLVRALAPQLLAIPGCGVLGAATIIGETAGVHRFRSKAAFARFTGTAPIPVWSGNSSRVRLNRGGNRRMNCALHMIAVTQARATGAGKSYVDKLMAEGKTRTEAHPAAPPTPIRRGLPHARNRGHLGPRHRPANRSRGLTT

SEQ ID NO: 417931 - protein, 373 aa, unidentified
MKKVTRWVGLDVHAETIAVAVAEKDGTLQSVGTIPNRPEAVRRAMKKLESGGKLHACYEAGPCGYGLYWQLAQMGIECDVVAPTLIPVKTGDRVKTDRRDAEKLARLLRSGDLTAVWVPDAEQQALRDLVRARHAAKRDQLRHRNRLGKFLLQLEVRRPEKVVAWGTKHMTWLDGQTMVHASHQEVFVDYLNEVKRAKERIERLEKSIDEGIARAPKHLQELIAALQTLRGVAKIGAATLVTEVGRFTRFESARQLMAYVGVVPSEHSSGGSTHRGSISKTGNARMRHVVGEAAWSYRHRPSNGPALKKRQEGQHEDVKAIAWKAQHRLHKRFQKLSTQGKHHHGRVVTAISRELLGFVWAIGRKIEAQLDAA

SEQ ID NO: 417932 - protein, 319 aa, unidentified
MSGMYVGVDVAKAELVVAARPSDERWSVANDERGARTLAERLKRDAPALVVLEATGGYELAAVAALAAAGLPVVVANPRQVRDFARATGQLAKTDRIDAGVLALFAERVRPEVRPLPNEEAQELDAVLTRRRQLLEMLTAERNRLGQVAGRGRRPVKKSLKAHIAFLERELRVADTDLGAMVRASPAWREKDDLLRSVPGVGPVLSLTLLAELPELGRLSRREVAKLAGVAPLARDSGTLRGHCYVRGGRASVRAVLYMAALVATRRNPVIRAFYERLLAAGKPKKLALVACMRKLLTILNAMARSGVRWEAPNALATT

SEQ ID NO: 417933 - protein, 340 aa, unidentified
MLHVGLDIHSTRITICALDERGQVVRRAQVRTIEEMLTTLKDLPDRFEVCYEASCGYGYYHDLLRPLAVRVLVAHPGQLRLIFRSKHKNDRNDAERLAKLLYLGETPAVHVPSPEVRAWRELINCRGQLVAKRTRAKNGARALLRSAGVVPPKKPGLWTKKGLAWLRRVELPTASQQLRRDLLLEEIEALTKQVRRVEHELNRQARKTPAVALLRTIPGVGARTAEAVVAFIDDPHRFRNAKAIGRYFGLVPSQDQSGDRNRLGHITREGPPVVRQLVAEAAWQAIRRSPTVRAFFERTHRDDPQRQKIALVATAHYLVRVMWAMLRHATTWHESRAKAA

SEQ ID NO: 417934 - protein, 372 aa, unidentified
MKQSSTLYVGMDVHKESIAVAYMAQDHGAEVVSLGTVGTRQCDIDKLIRQLQSKSPQLVFVYEAGPCGYWLYRYLMKKGYVCWVVAPSLIPKKAGDRVKTDRRDAMQLARLMRSGDLTPVYVPAVDDEAIRDLSRAREDTLRDLKAAKLRLKAFLLRHDIRYTGRANWSPAHLRWLSEVLCPTPAQQIVFQEYVQTVTEQTARLQRLEQELHEQVHTWRLAPVVEALQALRGVQFTVAVTTVAELGDLTRFDNPRQLMNYLGLTPSEYSSGGRRQQGGITKTGNTHARRALVEGAWAYRYPAKVSRHLQLRLEKLPAAIQAISWKAQVRLCKRYRHLMAKGKNANQVVVAIARELSAFMWAIAKQVAVRPKA

SEQ ID NO: 417935 - protein, 351 aa, unidentified
MDRYIGLDAHASSCTAAVLGPSGRKLQCQVLETNAKALISFLQTIPKNRRLIFEEGTHSSWLYEVLAPHVQEIVVVGVRRSRGPKDDERDAFGLAEDLRIGNVKVRVYKKQGEFATLSHLARAHGTLVTDTVRCQNRIKSLLRSRGIATGGKQVYSAGGRNQWLSKLPAQARSHADFLYCQYDALLELRKRAEKQMLAEARKHAVYRVIKTCPGLGKIRTAQLLSIVVTPYRFTNKRQFWSYCGLGIVMRSSSDWVRTQEGEWIKAPIQRARGLNRNFNRSLKHVFKGAATTIIGCAKKDDPLYRHYQQLLDGGTKPNLAKLTISRQIASIALSVWRSQEVYDPKKLSPKT

SEQ ID NO: 417936 - protein, 344 aa, unidentified
MHAVTLGIDIGKRVFHAVGLDGLGRIVLREKLTREQLHRLFATHPTCVLAMETCCGAQHLGRLAASHGHDVRLIPAQHVRPFVKSQKNDFNDATALAEVARMPSMRAVPLRSIEQIDVQAYHRARQRLIEQRNGMTSQIRGLLLDRGVPIAQGLYPLRTAVPSILEDAENGLTPVFRQLLASLLAMWRQTEAAIDELTEYLKSLSRDSDVCRRLQSVPGVGPLVATALVSAVGNASTFRSARHLSAWIGLVPRQHTTGGKSRLFGITKRGNTHLRRLFVQGARALWVWKDKRDDPLHIWIRSLASRMHHHVAVCALANKLVRICWALLRHEDQVFRHAAAARGV

SEQ ID NO: 417937 - protein, 345 aa, unidentified
MTIVETRAVTGGVDTHAGVHVAAALDPVGGLLGVREFPATAAGYASLLSWLAAFGTLALAGIEGTGSYGAGLARHMAAAGIQVVEVDRSDRQDRRRNGKSDPLDAVSAARAAQSGRARGAPKGRDGAVEAIRALMVAKRSARNERTQAINQARSLIVTGPDDLRTRFARHSAAQLVTGLAALRPRPGDVPGFATRIALRELGRRAQFLDTQIGRLDELIIPLVTARAPSLLALYGVGADTAALLLIAAGDHPERLRSEAAWAHMCAVAPIPASSGKVRRHRLNPGGNREANHALWRIVITRMSAHPATRAYVDRRTKEGLSKTEIIRCLKRYVAREVYHHLRAGG

SEQ ID NO: 417938 - protein, 351 aa, unidentified
MSLVVLGVDPHKQSHTATALAAGSQQALGSLRIPASPTGYEQLLGWARQFPQRRWAIENARGLGCHLTQWLLVHGETVQDVRTTATARVRELSRGRGRKTDALDAAAAAGIAAMQGDTEPVAPDDATVVLAVLEERRSNLVGQRTRSVNQLHAVLRELIAGGAPRRLSADRAAALLRAVRPLTAADRARKQVAWDLVAEVRSQDRQLAVINKRLHDRVTALGSRLPQTVGVGPVIAGRLLGRTGRASRFPTAAHFASYAGAAPLEVASGEHARHRLSRAGDRQLNHALHLIALVQARSPGSPGYHYFRRKLAEGKTRREALRCLKRRIANHVWRVMLADEQARDRRQLQAS

SEQ ID NO: 417939 - protein, 355 aa, unidentified
MYGLKHQKEKRSMEHFAGLDVSVKDTSVCIVDDTGKIIREVKAASEPAALLAVLTNPTYHFKRIGLEAGPLSQWLFSALAEAELPVICVETRHMRAVLKAQINKTDRNDARGIAQMMRVGLYRPVHVKTLRSQKLRMLLTHRKLLQSKAIAIENDLRATLRNFGLKVGIAGKVKFEARIKELVENQPDLAVLVEPLLIVRRVLREQIGILHRRLLAVVRDDEVCRRLMTVPGVGPVVALTYRATVDVPARFRKSKAVGAVFGLTCSKYQSGEIDRSGRISRCGDEMMRVMLYEAAQSMLFHSTKWSWLKAWAMKIARHRGMKKAIVALARRLAVIMHRIWVDGTEFRWTKEVVTA

SEQ ID NO: 417940 - protein, 343 aa, unidentified
MRILALDLGTTSTKTHGYLLDTQTGHVTRPAITTSVGAFLDLLRNTAPDLVVAEPTPITGVLVDTCRAQEIPVKILNVRDPAWQNRTNKTDRNDAELMANLVVTGHFRTVDIPSRDIREWRAQIAHRHNLVRERTRIKNRIKSTLNGELIPAKSLWSKRGLKFLHELTLSPERSASWRAILSIDLERYHQVQAHVTTATQLLDDRLLTHPHAEAILALPGVGPRLAESLLAHLVTAQRFHDRKAVAAYVGICPRVQQSGKFSHYGRITKAGNTQLRTLLIEVAQLGARRPGWMRDIYIKNQRGDKSRSNRAITAVARRLLVRCWAILRDREKAPEPTPATVAA

SEQ ID NO: 417941 - protein, 366 aa, unidentified
MKKISTVQVCGNEILKGQKLTIGLDLGDRWSFYCVLDEAGKILLEQKVATTPEAMKQTFGKIPRSLIALETGTHSPWVSRLLTELGHELIVAHAQKVELITKSNRKDDRHDARTLARLARIDPELLGPVRHRSAKAQIHLTVIRARAELVSARTALVNAARGLVKSYGQRLPKCGTQQVSRELGAGLPAELREVLEPLLKEVESLNERIQEYDERMEKIAKEEYPEVSLLKQVKGVGTQISLTYVLTIEDPYRFPKSRAVGCFLGLRPGRRNSGESEPQKGISKEGDRYLRTMMVQGAHYILGPFGEDSDLRRWGLKLAERGGKNAKKRAVVAVARKLAVLLHRLWVSGEVYEPLRNSQKAMRAVA

SEQ ID NO: 417942 - protein, 348 aa, unidentified
MTVTIVETRAITGGVDTHADMHLAAALDPIGGLLGVQEFPATPAGCARLLGWLGGFGTVCLVGIEGTGSYGAGLARYVTAAGVRVVEVDRSDRQDRHRQGKSDPLDAVSAARAAQSGRAAGAPKGRDGAVEAIRTLLVAKRTARSERTQTINQARALVLTGPDDLRVRFAGHAAAALVADLAALRPRPGDVVGYTTRIALRELGRRAEFLDAQLERLDELIVPLVTARAPSLLALYGVGPDTAALLLAAAGDHPERLRCEAAWAHLCGTAPIPASSGKVTRHRLNPGGDRQANHALWRIVITRMSSHPPTRAYVERRSKEGLSKKEIIRCLKRYVAREVYPCLRTPAG

SEQ ID NO: 417943 - protein, 386 aa, unidentified
MRDKAFIADDYDVFAGLDVSKKSIAATFTGRQGFIRSLQMPYNVEYLLNHVRKHFADQKIAFVYEAGPTGFGLYDGLLAQGYRCLVAAAAMIPKAPGKRVKTNRLDSRGLSEGLRSGQIKSIHVPSAIYRELRHLTQLRDTTVRQAAAHKQRIKALLLLEGIDFPPAPAGRQWTLRVKAQLRRLQCSHSVGFKLDQLLDNLEFCEKQVVSSTKEIRRFCKEDAELLQSIEYLMSIPGIGWIVASQLLARIGDWRQIDNVRQLGSFLGLVPTENSTGDTVDRGSITHAGDGRLRSKLIQAAWSAIRQDPELREFYRSVCHRNGPSKGPRIAIVAVARKLSMRVYAVLKNQRPYVVREQVHSAPLTQEETSPQGTTRRCAEPGETNDS

SEQ ID NO: 417944 - protein, 359 aa, unidentified
MGSMLAGVVDFVVGVDTHRDTHTAAVVDARTGGVIDRITVPTDALGYRRLRSFADQQAPERRVWAIEGTGSYGAGLTTSLLEHGEWVVEIDRPARPARRDGAKSDDLDAVRAAREALSREHLAAPRARGDREALRVLTAARQGAVVARTKAIGQLKALIVNAPQSLRDQLRRGTTDQQLQRCARLRTLPQHSIEHRATIRAIRGTARRALALEAEAAEYETELEQLVVAICPVLLAQPGVGTITAAQFLISWSHAGRIRSEAAFASLAGAAPIPASSGTVTRHRLNRSGDRQLNRALHTVALSRLRIHEPTKAYAARRQAEGKSPREIKRCLKRAIAREVFRLMNTHAAAVTGSLPMTA

SEQ ID NO: 417945 - protein, 321 aa, unidentified
MSNKKSRRSWIGIDVSKQLLEVAVHKSDYHFRCPNEPAKFPALLAELIALRPARLVLEATGGLEIPLLEALRAVNLPVVLVNPRQVRDFAKALGILAKTDRLDARVLAHFAASIKPPLRPLKTSEDTELDALVGRRNQLSDILVAEKNRRGSAATEAARTDIDAHIEWLEQRLKALDKQLKDQLKHSVAWQHKDQILQSVKGIGFVTSVALLADCPELGQLNRHQVAKLAGVAPLNRDSGKQRGTRHIFAGRAQVRAKLYMATLTAIRCNPVIKAFYQRLIARNKPKKVAIVACMRKLLTIINVMIRDNKLWNVKAQPVSA

SEQ ID NO: 417946 - protein, 342 aa, unidentified
MKDMMIGVDLAKNVFQVHGALRTGKVQFRKRLTRTQFSVFMAQQEPCLVIFEACGSAHYWAREMEAVGHEVKLIAPQYVSPFVKRQKNDAADAEAIVIAARQSEMRFVEPKTVEQQSRAALFRGRERLVHQRTADLNALRALLYEHGHVFPVGMHHLNRITALVEDETVDLHALIREECLDLLTQIAEKTARVIERTTKLKTLAAESDRARRLQTMPGVGPLTAVAVEAFGPDMEQFKTGRDFAAWLGLVPKQHSSGGKERLGRMTKAGQADIRRLLIIGAMSRLGWLGQRTILEGSWLSRMLERKPKMLVAIALANKMARQIWAMLTKNEDYRDPALVGSA

SEQ ID NO: 417947 - protein, 368 aa, unidentified
MNSEYYTTIGMDVSDRTTKVCVMAKERGARRILEETTIPTTKDGLRAYLSGKSAAWPVVFETGAHCRWMKRVVESLGMKAIVANPSKLRMVSESNTKNDRNDARELARFAIADIELLHPVRLRGERCQQALRLMKARDMLVKVRTMHVNALRGFAKSMGFRLPSCPANRVHALDKSGWPADFESVAWPLMDVLETVDLKIRAYEAQIRSLAESRELKDKVDRVREVYGIGLLSGVALVASIDADPGRFRKARDAGAYFGLVPKQRQSGKMDVQCHITHAGSDFVRRLMIEAAQIAMRDSARDTDVKLKGLRICARGGRIAKKRALVAVARCLVVTAVALLKKPGAEYVPLSESARREFEAMRSWTTVA

SEQ ID NO: 417948 - protein, 343 aa, unidentified
MKTLYYIGLDVHKKTIAYCIKSFNGKILDQGVIGADRISLQAWLETIPGPWVGAMEATMFTGWIYDFLLPHATELKVAHPEMLKAIVAAKKKNDRADAEMIADLLRVNLLPESYMMPTELRELRRMLRYRNMIVRNAVAMKNKTSGLLMEVGAQYNKRKLHGKRYFNELLDKIEYVPESVKDMLRMSRSSFELFDSIQKKLVKILQHDPVISERVNLLMSIPGVGEVTALTWVLEIGDIERFSNANKAVSYCGLCSAQRESAGKEKRGPLSKKRNKHLQTVLIEAANLAPRWNVGLAEVQAKVLSQGNRNQATIAVARRLVKYMLAVERRGTPFVVNEAVKAA

SEQ ID NO: 417949 - protein, 452 aa, unidentified
MEQDVISMEIINPQAAGIDVGSRSHWVAVGQSEQDVREYGVFNEDLFAMADWLDQHKIKTVAMESTGTYWQNLYAVLLSRGFQVILCNGKFTKNIKGKKTDIKDCQWIQKLHSLGLLTGSFLPDGQTEQLRTYCRQRANLIHSSASTSKKMQKNLCLLNLRLDVVVKDVCGLTGLAIIRAICEDEKNPQKLACLRHGNCRKSEEEIAKALHSNNREDYLFALKQELDTYEYLQKKIVECDMEIEKKLNEIIGGDDNKRQHYIDPKTHKRINKNTPKNIDLNLKSYQMFEGTDLLAIEGMSYSTVLALMSEVGIEGIRKFSTAKHFASWLRLAPNNKVSGGKVLSSRVPKGSNRLKIALRNAANAIGNLKESTPLRDFFHRINFRKGRVSAISATARKLAVIIWNMVVKGTPYINPEGYLFLDQKRKLGLVKRIKKQIDKFALTDEDLGFVNS

SEQ ID NO: 417950 - protein, 437 aa, unidentified
MRRKKKNANKSINLQVLPIVNPNAAGIDVGAKDHLVAVPCDRDPKPVRTFQAFTPDLHELAAWLKRCGIQTVALESTGIYWISLYEVLEQYGFEIRVVNAHHVKHVPGRTKTDVLDCQWIQKLHSFGLLNGSFRPDQQVRKLRTYMRLRDNLVVASTQAVHHMQKALFEMNVQLSNVISDIVGETGLNILEAIISGERDPQQLAALCSSRIKASRETVAKSLHGNWDVALLFALKVALETYRFIQIKIQDCDCCIQHHLAQFESRTEVTNSSQNLKTQLHRVCGVDLTKIPAIKEQSAQIIISEVGLDMANWKTEKQFCSFLGLCPNNSVSGGKILHRATRKVYNRAADTLRLCAQSLTYSKSALGAKYRRLKARLGAPKAIVAMAHHLARLVYRMLRYGQNYVEKGIHHYELKFRLQRIKWLKKEAQSLNLQLVSA

SEQ ID NO: 417951 - protein, 453 aa, unidentified
MEREEKRLEQFQQLRKEIRGSQDYLVVGIDISKDTHNALMRTIPGKILYRRLIFNNTREGFEALLLQVEAVRVKHGLKEVVFGMEPTANYHKPLGEFLINQEHQVVLVSPEAVKHNRPLLDGRWNKHDGKDCANIADLMCQGKCLFYEYPSSELRDLRNLLSLNRKLKKLEQGLRLRIRNHLVAQFFPEMDQYCHWRAQEGLALVRWCLDPALMGKLSDQELVKRLHTQGRTLAQRKRLSALKDKASSSIGCQFGWSAEFEGQSVVKLLKEVRHTLADTQEQIEQVCLKFKEYPCLLSIPGFGPSLSAMVLGAIGNPWRFHNGAQVIKMVGLDLSASQSGKSQGLPVVSKKGKAEIRYALYQAAMVASSRDKHFVGYFTEQLRGREKEKGIKTKKRVKLAAKMLMIAWTLMKKQESFDPRYLLACTQQSTSHKSAGFKKGAIPKVQPERDRGL

SEQ ID NO: 417952 - protein, 407 aa, unidentified
MEVLYPRCAGLDVHKDVVVACARCVSPPRHQEVRSFATTTTGLVALGDWLESHGCTHVAMEATGVYWKPVWHLLEDRFELVLANAQHIRNVPGRKTDVNDAMWIADLLAHGLIRGSFVPPAPIQELRDLTRTRKQLVREISQHTLRIQKVLEDANLKVASVLSSILGKSGRAMLDAIIAGEEDPERLAKLAVGTARKKNAALIEALRGRVTPHHRSMLQLHLGVIAALESALADVDAAVGKSLAPIRARAETLTTMPGVSDIVAQVIVAEIGVDMSRFPTAGHLISWAGLCPRNDESAGKRRSTRVRKSGTWLKTTLVTAAWAAARTKDSYLQAQFFRLRARRGAKKAILAVAASMLTAAYYMLRDGVDYRDLGPHHFDHREKTKTIKRLVQRLNDLGCEVVLTHAA

SEQ ID NO: 417953 - protein, 350 aa, unidentified
MNVNHYIGFDVHKKSVSYCVKTAGGRIVDEGKVRAAHDALRQWASERPEPWRGAMEATLFSGWIYDTLQPYAAELQMGHPALMKAIAASKKKNDKLDARKIADMVRCDLLPACYVAPVEIRELRRMLRYRNLVVAQATRMKNKVSGLLMEVGAEYNKERLHGKQYFTQLLDTVAEVPDSVKDLLRLSRGAMEMFETTQQQLLVRLKRDALLSRRVTLLESIRGVGEVTALTWALEVGDPHRFSSVAHAVSYCGLTSALVSSADKQQRGPLSKQRNAHLQTVLVEAAKLAPRWNPQLAALHERELARGNRNRATLAVARKVVAYLLAVDKSGRPFVVRSAPAAEAEVQAVA

SEQ ID NO: 417954 - protein, 326 aa, unidentified
MSNILGIDVSKDKLDLVLLNEKGKFHKVISNDPAGFKTLDQWLICRHIDRVHVCLEATGQYGDEVSEYLYGQGHDVSVVNPARIKRYGESKLHRNKTDKADADLIAEFCLKEKPALWEPLSPDLKHLRALVRRLIDLQANYQQEENRLSSGEKDAWVIQDLSGHAEYLKARIQATEEEIQNFINQTPGLKAKQDLLVSIPGVGKKSSARLLAELGEISGFENAPQLAAYAGLNPKGCSSGSSVHKKTRISKQGRSELRACLYMPAIVAMTHNPVVRALKERLQKKQLPTMAIVVACMRKLLHIVYGVLKSQMPFDPDYDRQFNYSA

SEQ ID NO: 417955 - protein, 429 aa, unidentified
MSEEKSLELRVSVDVGYRRHSVAMGLSSGEVLEEFEIDHRIEGFEEFFSRIEKQRQKKNCAVAVAMEGYNGYARPLDRMVRQRGYRLYNLNNLKFARFKEIFPGSAKSDRIDARKGLELFQLSDHLPLAKEVLQEVSGTPPENEVLKRLTRRRRRLVNERVRVVNSLQADLQAVCPGLLEITAEASNQWFLNFLLSADTLPQLARLRRSTLLKIPSVGVKSAAIIENWQKRAHFSQEVEWVGEMIQEDAKRCLDLDGKIKRLETKIAEVAKASKIAKILRSIPGFGAVCSSELAGEIGTIERFAYEASLSLYLGMSTLDNSSGKYQGTKTPKHVNTRAKAAMMIALDRHRKYVPESQRYYEKKRSEGKKHNQAIRSLGRHLSRIIYKMLKEERDYEIRPEKGNTKTKVSPRSSIKTQIRRPKISGKKTK

SEQ ID NO: 417956 - protein, 423 aa, unidentified
MQNTAARKRKQVPEGYMIIGVDPHKKRHATVAITQDFTTRDKFKFDNTREGLETMLCRARMEMVKSGCCGVMFAIETGGHYWRNVAYYLEGRGIPFRFINQFTLKRRREGKDLNRRKNDYRDSEVAAQLLCTGEFTESKLPQGVYAELRTAHNAYRRLVKERTRITNLVKGLLDGLFPEFTHVFKDPCALTALSVLSICPIPRVIAGMTEDEFVAVIEVSHHGRLMRRKLREIHYIARTSIGIEAGARSVATETSFLVEKLELIRQHIRIIEGTLAKLVDETEEGKYLLSIRGLNYIAVAGLLAELGCFKAYRSAKQMIKMAGSNPTESESAGKKRSRTPMSKQGRPVLRYCAWTSVIPMLRFNSDFSAWAKQRRERPAHANPLGGREVVGAALNRLLRLAFAMVKNQTYYQVSKPEQTLVAV

SEQ ID NO: 417957 - protein, 391 aa, unidentified
MDKAWVGVDAGKEFHWAHVLDASGRELLSRRVENDEAELRKLIDDALSLAKELIWALDQPGGGAALLLALLWERNQRVFYVPGLTVDRARDAYRGESKTDARDAHVIADQARMRPDLGELEPGEQELAELQLLLARRRDLVTDQGRTITRLREALLSLFPALERALDLNSKGPLTLLTHYQTPTHLKRAGHKRIASYLRNRGVKGSNKLAQKALSAARSQNVSLPAQNVASRIVAELAKDILGLKERIESIEEELQKRFFARPEARILISLPGMGPILGAEFLVCVGDVSAFESADRLAAYAGLVPAARDSGKRVGNNKRMRGGNKILKRVFYQSAFSSLRSTPESRAFYDRKRAEGKRHTQALIALARRRVNVLWAMLRDGTTFESRSAT

SEQ ID NO: 417958 - protein, 448 aa, unidentified
MKGYLGIDVSKGYSDFILLNEKKAVLEKVFQLDDNRAGHDLLKKILEGLIKEHGISMLYCAVESTGGFENNWYSSLIAFSKDMNLNVARLNPSGVKHNANADLKRNVTDALSAQYIAEYLIGHSEKVNYDKQSSYYTGFRSINKHIKLLLKQQTQTINEMKMLLYSSFPEMVCYCRNSVPGWVLEVLVKYPTASKLKNTTVAKLCKIAHVTEDKAEALINKAKTSVCSRADKADEFLITSLAEQLIQKLALIKKHKKYLEEHCKGPEVTLMQSITGIGAYSAAAIMAEIEDIKRFASAKKRISYFGLQPELKDSGDKKGVYRMSKKGRSSMRGILYMCAQSAVIHDEHFKKIYHNQRSKGMKHKQAIGVIMHKILRIIYGVLTTSTAYNSGIDKQNQERKVVVVEKLNEKMEIKNKRRHSALDIEAPISHRQRKKRKVHLESQADNAG

SEQ ID NO: 417959 - protein, 414 aa, unidentified
MFAVGVDVSNGRSTVAVLQSKSKVILKPFEVPHTPEALGRLVDQLNSLNGETRVIMEHTGRYYESIAMFLDSAGFFVSALNPLLFKNYEEGISVHPVKTDKADAVRIAKFGLDKWDLLRQYEPMDTIRYQLKTLNTQFQLASKSKTAFTNNLIALLEQNYPGIRKHFPSLARPDGSQKWVDYVGTFWHLDCVRKLSLNAFTERYFKFCRKHEYNFSEEKAAELYRHAQSTIALVPKSDVSKLMVKESVSQLNSVSRILETYRAEMNRLASQLPEYQTVMGMYGVGPSVGPQLMAEIGDIRRFPQKNSIIAFAGIDPKKDDSGDKVSTTGKSTKRGSPYLRKTLFVIMDILIQLKPVDDPVYQFLDKKRSEGKPYYVYMTAGGTKFLRIYYGKVRDCLIEKGLWDKPMIESGNSD

SEQ ID NO: 417960 - protein, 343 aa, unidentified
MMVIGIDAHKRTHTAVAADQAGRHLSTKTVGTTSKDHLTLLQWATGQADDRLWAIEDCRHLSRRLERDLLAAGERVVRVPPKLMANARDAARTYGKSDPIDALAVARAALREPDLPVARLDGTDREIRLLVDHREDLVAERTRIISRLRWHLHELDPAWRPPTKLDRTSAFDKIGMHVATFSGLVADLSLRLVGHLRRLTVEIDELAAEITSRTTMLAPSLLAIPGCAALTAAKIIGETAGIDRFRSKDAFARHNGTAPLPVWSSNHARHRLSRTGNRQLNAAIHRIALTQARCHEDARALLARRKAGGDGGMEALRVLKRRLSDVVFRAMVADQSSLMDVAA

SEQ ID NO: 417961 - protein, 311 aa, unidentified
MSQPTIGVDVSKDALDACRLPERRARRFANNQSGRAALLRWIGRDVACVVFEATGHYSKPLERALADSGLPAAKVNTKRARRFAEAVGKLAKTDRIDAETLAAMARQLDLEPSAPVGRVIEMLKELVLARRALVKDRTAALNRAKRLVLPVLVTQNQERLAQIGRDIEAIDGEIEALLEADPQLRRRAEILESIPGLGHASAVAILAEMPELGALEPKAAAALAGLAPQTRQSGTWNGRARIQGGRAEARRALYMPALVAARFNPDLKRVYDRLVDAGKPAKVAITALMRKLVVLANALLRQNRFWTPAVA

SEQ ID NO: 417962 - protein, 370 aa, unidentified
MLDTTTFVGLDVHARSIKAVSLDVMTGEVRCATFGYDAGAVAEWVRSVDPKARCVYESGVTGFDLQKRLSGLGVDCVVGAVSKMIKPSADRRRKNDRNDAEFLARMLSVGNVVEVWVPDDECEAARDLTRALEDARDDLSRAKQRLSKFLLRHGLAFDERTPTGRRKGNWTRAHWSWIESIRFAEGADNDVLAYYVDAVRRAAEEKARLEGLVEAEARKPRWRRRVDSLRCLKGVDTATAADLVFEAGEFSRFRNARSFAAWVGLTPSEHSSGESDRRGAITKAGNKHLRKALVEAAWHYLTCSGRPKDLAKGQAPDRVARRHAAKGVRRLVERREALLARGVHNNKANVATARELACWVWAVGLMAEEA

SEQ ID NO: 417963 - protein, 407 aa, unidentified
MRITCGIDWAEIHHDIALADETGHIVARARIDTGAAGFNDLLRLIAESGGTPEDTPIAIETDKNLIVVALAEAGFTVYPINPRAVARYRERHAQAGGKSDPGDAAILANILRTDPDVHRVLPAISEHGRAVKALARQHQEAIWALHRTISRLRSVLLEFYPQALQAFPNLKLRSALTVLTAVPTPATGQKLTSRRLVTLLHRCGRRNDPGLVEQILADLKTPALRQPPQVEAALGHAVTGLLGIIAAMHEAVDALEAELGRCFDSHPQAQLLRSVPGLGPILAARVLAEIGDDGERFPTPAALRAFAGTAPITRASGRSHYVKARKVRNKRLGDACHWWAFATLTKSPGARAHYDKRRAVGDHHNAALRNLANKLLGRLWWCLQHDEPWDEHAAWPDLDTEAQPAAA

SEQ ID NO: 417964 - protein, 393 aa, unidentified
MMVSVGIDVSKDKHDCFIVTSDGEVLSDVFTIPNTINGFHCLLRRIQDCTSTQDKIKVGLEATGHYSYNLLGFLLDNGLTTYVLNPLRTNLYRKSLSLRKTKTDRVDARTIAFMLLSDASLNPYTDTAYHTEELKSLTRYRFDKVKERAKLKSSIARLVCILFPELEKLVPSLHIASVYALLEEFPGAKQVAATHLARLKALLETASKGRYKRDMALEIRKAARNSIGSWMPAKSLELQHTIRLIRELDNEIAEIEEQIQSIMDELHSPITTIPGMGFRMAAMILAEVGDFSRFESPDKLLAYAGMSPSTYQSGQLKNCYPHMEKRGSRYLRYALYNATKYVCQWDLIFAAYLAKKRTEGKHYNVAISHAAKKLVRLIFAMEKSGRPYCTSAA

SEQ ID NO: 417965 - protein, 341 aa, unidentified
MEKISTIGLDIAKRVFQVHGADNRGAVLFRKRLRRGQVLSFFADIPSCTVAMEACASAHYWGRQLGELGHSVKLIAPAYVKPFVKRQKNDAADAEAICEAAQRPTMRFVAVKTEQAQAAAILFRTRDLLVRQRTQIINALRGHLAEFGMIVAQGPQNVPKLIAVVDDPTSGLPLMARQMLVLLVDNLRGLDNRVIELDREISRRAKADEVAQRLMTIPGIGPVTATALMALAPSAQTFRRGRDFAAWLGLTPLQRSTGGKERLGRTSRMGERTLRRLLIIGASSVARWATRKGAPAGSWLERMLGRKPPMLVRVALANKMARTVWALMAHGGIYRAPVATA

SEQ ID NO: 417966 - protein, 350 aa, unidentified
MRRPTEKLMAGIDLHGNNLVIGVINQDGKRITHRKLDCDLKQVTEFLEPLKPKLQSMAVESTFNWYWLVDGLNAQGYKIDLANPAKIEQYSGLKHADDKHDAFHLAELQRLNILPKAHIYDVQLRPVRDLLRRRTNLVHQRTALFLSFKSLYARTTGQVMPLKVLKITQPKEAKDLYAHPANQLIAQVQLEHIEALNKSIARMEKAVLHCAREIPLYEKLLTMPGVGRILGMTITMEVGDIKRFKTDGDFASYCRAVDSRRLSNGKQKGENNQKCGNKYLSWAFVEAANFAKRYDLNCRRWYDRKKARTSTVIAVKALACKLAKAAWHIMAKGTDYDATRMFPELALKRN

SEQ ID NO: 417967 - protein, 452 aa, unidentified
MATKRKKREQELPVLHPDAAGIDVGASELFVAVPADRDPEPVRSFPTFTQDLYELVDWLQGCGIRSVAMESTSVYWIPVYQIREARGIEVFLVNAHYLKNVPGRKSEVSDCQWIQYLLSVGLLRASFRPPGAICAIRSLWRHRGSLIEMAAEHIQHIQKALDQMNLQIHRVLSDITGLSGLRILDAILEGNRDPVALARLCHKGVKSSQETVAKALAGDYREEHLFALKQSLASFRYYQQLIAEVDTEIASRFQALEKSPEAEGKPPVRTKKSPYSRKHYEPTWFDLRSELYRIFGVDLTDVPGISAVTAHTILCEIGADLSPFRNASAFASWLGLCPERQISGGKVLFTKSRRVRSRLALALRLGAHSLHHAPNYLGEFFRRIARRLGKPSAITATAHKLARIVFHLLTTKEAYRESVFMRCEEEAQKRAELRLKKHAAQLGFQLIPATNA

SEQ ID NO: 417968 - protein, 307 aa, unidentified
MRFYTQQHQFYCGIDLHARTMYLCILNRDGEILVHRNMPAGPEPFLKAIAPYREDVVVCVECMFTWYWLADLCAREGLPFVLGHALYMKAIHGGKAKNDKIDAQKIAVLLRGGMLPQAYVYPAEMRATRDLLRRRLHLTRKRAELLAHIQNTNSQYTLPEIGKKIAYKANRGGVAERFPDPAVQKSVEVDLTLIDFYDQLLRDVELTIVQTAKQHDAQTLYRLQSVPGIGKILSLVLLYEIHDSTRFPRVQDFVSYCRLVKCAQESAGKRYGTAGTKIGNAYLKWAFSEAAVLFLRNHPAGQKYLAR

SEQ ID NO: 417969 - protein, 421 aa, unidentified
MDAVVERCAGLDVHRDNVVATVRVPSEDRRRFKLSTRTFRATIAGLTELREWLTGFAVTLVGMEATGVYWKPVFQVLEDPFECWLLNAQHLRNVPGRKTDVKDSEWICQLVAHGLVRPSFVPPPEIRRLRDLTRFRKAQINERTRAIQRIEKVLQDAGIKLTSVASAAWSKSARAMLEALLSGVSEPEQLAELAKGRMRQKIPQLREALESRFKVDHHGIMVAQLIAHIDTLDHAIGLLDEKVEAMLAPHTKIVELLCTIPGVALRTAQVLIAECGLDMSRFPTAGHLASWAGICPGHNESAGRRRSGRTRRGPKWLSEALTESAHAARRTKGTYFAAHFAQLRGRRGEPKAIGAIRHDILVAYYYIVRDQLPFRELGPDWLRRRYSPEHRARRLQQQLEALGYTVTIEQADPDQEAASPA

SEQ ID NO: 417970 - protein, 534 aa, unidentified
MKQFWGCDAHKKYSVFVAMDETGKKTKPTRVPHDLEAYRHFLTRLPEHSHIAIEATGHWYWIVDEMERARHIPHLTDALEAKKRVGKTHKSDPIDAGGLSLLLRCGTLPEVWIPPAPLRDQREMLRTRMALRDLRTALKHRIHAAIDRYNLYTTDFSDLFGLRGREYLNNCLAKLPPVTASMIVVQLDALDQLEIKIEALEKRIRAEIASTPAVRRLMTLPGVADTLGPVIAFEIGDVARFSRAECLASYAGLVPRLISSGDRIHHGRTPERKINPFLKWAFVEAAVCSLHHTGPCYAHVKTLFARLIPTKGFGRAVVAMARHLAEASFWMLSKNQDYRPPQPPRLAPQQQATVHGDFVAGLKRSEQSGGNGGHAGRGDDGGLRAFEGGNFLLGDGERGIAVAGVNVGFVFAFGPQLHFFGGRKGKSGRADNLGHNGAVDAAAVGFTAMNGLGLRSEFCGLAGFHVEECAPCGRPKTASKLAGAQTIWAGAARGATFSGDRTAIRLSQARNEEEKRQSQKPHTRTPRMGHPNSL

SEQ ID NO: 417971 - protein, 392 aa, unidentified
MIVVGIDVASQKHDYFMLQAETGMVFRSSSVTIQNNDEGYKKLHKDIQTFCGATGDFNVRIGLESTGIYSTNITTFLFEQDYKVMMINPILTNMTRKASKVHSPKNDNLDSQTICKYLVDNKDSFTPYTSTLYHNQVLKSLSRKRYFIVNDLRKAKLSVNNLVQLIFPEFKELFSNIYGESALAVLKKYGSPAKLSKARSDKVASLLHGRCRCTAAQLIDAAKHTIGLKSDHYEFELADAIEELEHIQRRIDSYDAQIKKYVDMICPNLLSIPGVGYVTAGLIAGEIGDIERFHSVGALISFSGTDITVFESGKYKAQHCMPSKKGSKYLRYATFQVARVIWQHDPVFNAFYHKKLDENKHYYVVLGHIQKKVIRVIYSLMKSGSHYVVNNI

SEQ ID NO: 417972 - protein, 411 aa, unidentified
MEVVFSRCCGLDIHKKTVVACVLVREGGGVEKEICTFRTVTAELLLLHDWLKAYGVTHVAMESTGIYWKPVFNLLEESFAVLLVNAAHIKTVPGRKTDVKDCEWIADLLSHGLLKGSFVPQKPIRDLRDLTRYRKSLIDERVREVNRLQKLLETANIKLASVATDVMGVSGKAMLKTLMEGNTDPEALADLAQGKLRKKLPLLREALEGYFRPHHRFLLGQILSHLDFLDEAIADVSKEVTHRIDPFVKKIEKLKTIPGVGQMVAETVIAEIGVDMDQFATHRHLASWAGICPGNNESAGKRKNGKTRKGDRWLRRVLIEASWAASRSKKNYLSAQYHRIARRRGKKKAVIAVGHSILVVMYHILKCDSSYQELGPDYFDRVNITYVKNHFVKRLEGIGYKVVLEPSVEAA

SEQ ID NO: 417973 - protein, 353 aa, unidentified
MEHFIGCDAHKKFSVFSSIDEKGEYGETIRVPHDVEVFREFLNELPTGSKIALETSGCYYWMVDEMERAGHLPQLAHALTAKRRMEGRHKTNDRDAKGLAMLLRNGTLPVVWIPPAELRDQREMLRWRMCLSQMRTQIKNRIHGVLQRYNIDIAVSDLFGDGGRVKLLARQGELAPHSRQSVLEQLKTIDSLETQIGECERILEEILYPSVERDLLDSLPCVGKILSAVMALEIGDVRRFSGPDHLVSYAGVVPAARESADWKRKDKCPRDCNVYLKWAYVEAANLISAHSKHWADRHVVQLYQRVKNSTKMHGKAAVAVARHLAEASYWMLSKQEVYREPQTRRQVLSSTHG

SEQ ID NO: 417974 - protein, 387 aa, unidentified
MPQPNDLSRSPAALDHDSTLIAVIEMSQSSWLVAGIVPGIERHPAKKLEPDEAALRGLLYRWRDEATKAGRTISRIAVAFEAGRDGFWLARWLQTHDIEAHVIHSSSIAVSREHRRAKTDRLDTALLKRAFLGWLRGEPDHCSMAAIPTIEAEDAKRPSRERESLVGERTRIGNRMKSTFARLGIRGFKPTLRKASERLEGLRTPEGTPLPMNTLAELRRDMARLRFINDQIREIEAGRLERLAQRAEEGAHPMVRLLARVIGVGIETADMLVQEVLSRNLRDRRAVARYGGLTGSPDESGARRREKGLARAGNARVRRGMIQLAWRFLMFQKDSALAQWYRARTADTRGATRKTMIIALARKLLVALWQLVTTGEVPHGVILRAAA

SEQ ID NO: 417975 - protein, 332 aa, unidentified
MDLAKKIMQIHFVTEDGEITDRQVKRAEFLDFFRNRSKCLIGMEACGASQDWARKLEAMGHEVHLMSPKAVKPFVSGQKNDHNDAIGIYKAMFNGVRRVPVKSTEIRDLQTLRRIRSQVAKDRIKEINHVRGLLAEYGIVMGRSVAAFNKGISSALVNLKERGGVSPLVAEELRTTVESIKTKTERQKRLDREIEQLARGCKNYENFLKTPGVGPFTAAMLCVLLCDPDIFANGCQFAAYIGLAPRSRGSGGKNVVIGIPSKFNCDSESRAVFVECAQALTRYKNKSPWIEGILRRKPKKVAVIAIANKLARQVWAMANKGESFKQMTILTA

SEQ ID NO: 417976 - protein, 416 aa, unidentified
MTDQKQFYAGVDWASESHHVFLTDGDGRKIGERVFRHGGEGLAELAAWLTATSGATEAGQIQVAIEVPHGPVVETLIERGCQVHAINPKQMDRFRDRFTLAGAKDDSRDAEVMASALRTDRRCFRLLAAADPVVIELREWSRMAEDLGAERNRLTNRMREQLWRYFPALLELENDLGAEWLLDLWEAVPTPAKAARIRAATIAKLLKRNRIRRVDATHVLAVLRTPPVKVAAGTTEAASAHIATLIARIRLVNRQLKQAHQRLDTLTARLVPTEETEPGQRKQHDVEILASLPGVGRIVLATLLAEAFDALQRRDHAALRSLTGVAPVTKRSGKSCIVIRRQACHDRLANAMYHWARVAIQHDSRSRLKYAALRSRGHSHGRALRSVADRLLNVACAMLKTGTTFNPSLAEQKLSC

SEQ ID NO: 417977 - protein, 336 aa, unidentified
MDSKNVFIGIDVSKEKLDLCVLKEGEILLEQELVNSSTEIKKFFLEILKEHTAESVIVCAEYTGIYTHILCSVCSEIKLDLWLENPYIVNRSLGLTRNKNDKLDAKRISFYAKRNIDKAQLFLLPDKVIASLQLLLKERDMYVVDKAKYQAQLTDQKRFISAEDYAGKKERLDYLMNDLKKIIEKIDVKIRELIDSDDTLKRQHKLLLSVEGVGKNIATKMLVETNRFKNFKNGNSFCCHIGVAPFEYTSGSSVRSKRKVSQKADKEMKKKLHLGALSVLRKKDSELKAYYDRKVAEGKNKMSVINAIRAKIILRMFSVIKNDRLYEKKFILKPSL

SEQ ID NO: 417978 - protein, 391 aa, unidentified
MIYVGIDVAKDKHDCFITNSDGEVLFKSFTISNNRDGFETLFQRIESVSDDLCKVKVGLEATGHYSYNLLGFLLDKGLTTFVINPLHTNLYRKSLSLRKTKTDKVDSRTIATMMMSDVNLKSYSDTSYHNEELKSLTRYRFDKVKERAKLKSSVSRLVCILFPELEKLVPTLHMASVYALLSEFPSADAVANAHLTRLSNLLSESSKGRYGRETAVMFRDAARSSIGSHMPAKSLELKHTIKLIRELDAEIEEIENEIKLIMDEINSPILTIPGISYRMGAMILSEIGDFSRFDSADKLLAYAGMSPSTYQSGQLDNCYSHMEKRGSRYLRYALYNATKYVCHWDESFGVYLEKKRSEGKHYNVAISHAAKKLVRLIFAMEKSRKAYLPKA

SEQ ID NO: 417979 - protein, 407 aa, unidentified
MICVGIDVSKRKSTVCFMAPGDKIIRRPFDVKYTKEELQPLVDEIRVQAKYDEIKVVMESTGVYHLSIAYFLQQNGIFVSVVNALKVANFNKAENFRHTKTDSIDSSNIARYGIAYWAKLPQFDLNGDKYFLLKRLCDAYLNFSEERSRILLQLQSQLEQTMPGIFDLFGGFDINSGKDKLLDFLERYCHIEDIIAKSEAEFVASYREWAKEKGYRSNESKAATIYAQAKNGIPSIPNNPIVRETIMWYVGLLRRADEALMASLTRMEDIAKDLPEYELVGEMGGVGRVTRVALIAQIGDVRRFKNKHSLICFAGLTPSIHESGKFRASQNHIVKKGPARLRKVLYQVMMSLVMHKIPKDDAVYRFIKKKEAEGKYKKVAKVAGMAKFLRIYYGRVMHLYRDLGLAA

SEQ ID NO: 417980 - protein, 320 aa, unidentified
MTYIGIDVSKDSFVAAYPAKSGYATKTFKNTSSGVHQFIQSLPAECHCVMEATGNYSMLLLYLLQQANIIVSMENPQKIKHFARAMLSTTKTDDIDAKLIAMYGEKMEPAPYKIPSESIMLLKQKRTVLRQLKKQLTMLLNLQHSLSVLPKQDPTAKVTTEKTIKFLRKQISKLEEEITHLSNKEFKRQMDLLTSIKGIGKTLASALIVATGGFAYFSNAKQISRFLGLCPTYQQSGTSVNFKGHINRNGDTYLRSQLYIAAVSSIKFNAACKETFKRLKDKGKSGKVAVIAVANKLIRQAFAVVTNNRPYVDGYVSALP

SEQ ID NO: 417981 - protein, 520 aa, unidentified
MAITRSRGRSSSRRTPTSVGKPRGVLHPRVQLIGPEHFGIVCFDCAKARSKFLLADFYGRLLIPPTVVAHTRPALDAAVAQIRHAFEQHQLRDGLVAIERTGRYHRVVQRTFAAAGFETRILHPFVTKQYRQPVDPGNKTDDTDLAAIHRATITGCALLEATRDEAWTTLQLLIRHRRDLVCKGAALNCQIRDHLEATLPGYAACFDKLWESPIPWHLLRHYPTAKQLHEAGVTALCHTLRQASIRFQRRTIETVVAWAEQAAPGDIAASQHLRIALALYDDRQRKSQEIQALERDIASRLVQTPYMLLLSFPGINVVSAADFAGEAGPIEHYATAKSITGRAGLRPSRYQSDTVDKANGPLVRHCNRALRAAILGIADNLIVCNHHFQVLATQWRAQGKDARHTRVKVGLRFCRIGFQMVAGRQVFRHPCLQGRHYILDKLTAFHREHDTGMVEVLRDLQAAIGQLPAREYAAEAKPLADEFEKIQGGRRRGPQVLGDILPIVLARLGVGVVQSPESGE

SEQ ID NO: 417982 - protein, 349 aa, unidentified
METIGLDLHKRESQLAIQAEDGTITERRIVTSQERFTAVLGHRPRARILLEASTESEWVACHLEALGHEVIVADPNYAPMYATRSRRVKTDKRDARTWMEDACGQGTYRRAHRLSAPRRHLRAELAVRDALVRTRTRYVALAKALVRRDGLRVPSSTAERVGDRVQGLALPAPLAAELAPLLTMLPPLNATIAAADHQLSALEQTDPIVALLMTAPGVGAVTASALVATLDDITRFPSAHQCEAYLGLVPGERSSGEQRRIGPITKAGNRRTRWLLVEAAWRILRAKDPESAALRAWTLRIAARRGKQIAVVALARRLAGIVYAMWRDGVPYDGRKIRAPHHARGAQAG

SEQ ID NO: 417983 - protein, 422 aa, unidentified
MFSPSLDDEQIIARVAALDVGKAEVVCCVRLPAPGGGKRRLQEVSTHSTMTRSLTQLAEHLVELGIERVVMESTSDYWRPAFYLFEAHGLDPWLVNSKDVKHLPGRPKTDVLDAVWLCKVAERQMLRPSFVPPVEIRVLRDLTRYRTDLVNARTAEKNRAEKLLEDACIKLSVVASDIFGVSGRAMMAALIGGERDPKVLADMARAALRRKLPALEEAFTGRFDDHHGFLLGRMLARVDAINADIAAVDVQIEAQLAPFADVVQRLDEIPGIAPVVAAAIIAEIGVDMTRFPTPAHLSSWAKFAPRVASSAGKSKGSGSTGHGNPYLARALGEVAVNAGRSPTFLGARYRRIAKRRGSRRAVVAVGRSVLVIIWHLLQHPDTHYRDLGRDHYDRQRDTEAVRRQHVRQLEALGYKVTLQPAA

SEQ ID NO: 417984 - protein, 362 aa, unidentified
MNEYSILDTVVVGVDTHKRSHTAVMVDPLHQEQGQYVIPNTDDGISTFLSQIVNQVPTKKIVFALEDTESNGSRLSRYLVEQNQTVYAVPSTLTERERKRSPHAEKTDYLDAKRVATIYMTQKDLVNEVLITESTEFAKEVKVLFADRKDMVSESAKIKNQLHTLVYQRFAEKSENVSKFSIFCKKGIRDWLVHLSKFDDYLSLRIASKFKRLQLIQEELKVVDARLDELTQTNEDMRLLRTIPGCGAVLSAMIYSEIKDIRRFRSASALARYCGIAPRRHASSSNSKHYTDRRGNRKLNYALYQLALSQISASGTPVGKAYYAKKRKEGKSKLHALRCLRRRMVNVIYYVLQNQSEFLHNI

SEQ ID NO: 417985 - protein, 318 aa, unidentified
MNSPSMTVGIDVSKQRLDFARFPQGDTFSVAYTDTGLAKLLKRLRSWSPHIILLEASGGYEYGVVAALVAASLTPVLINPRQVRDFARALGILAKTDKIDAKVLAEFAFRVQPEPRPLPAAQQQELNHLLSRRRQLLEMIQMECNRREVSPFLRVRQSIDHNLDSLRRQLTDLEREIDDFFNQSPLWVQQDALLRTVPGIGPQTVLSLQAWLPELGALNRHQIAALAGLAPFNRDSGVLRGRRMIRGGRHKVRQALYMATLSAVRYNPVIKALFERLAGQSGKPGKVALVACMRKLLTILNAMVKNQTTWRPMTPLTS

SEQ ID NO: 417986 - protein, 361 aa, unidentified
MPTIADAGPPVTGGVDTHAEVHVAGVADQTGRVLGVKEFPATAQGYAAALAWMRGHGDLVKVGVEGTGSYGAGLARYLAAQGIEVAEVMRPNRQARRRRGKSDAADAIAAALAALNGEASGQPKSGDGAVESIRALQVARRGAVKARTQAGNQLRDLIITAPQLLREKLAALPSPERVKLTARFRPGALTCPAEAAKAAMATVARRHQALTAEIAQLDTALEALLEHAAPPGFLARTGVGARVAAALLVTTGDNPGRLRTEASFAALCGASPVDASSGKQRRHRLNRGGDRQANSALWRIVFTRIACDPRTQAYVARHTAEGKTTREIIRCLKRYVAREVYKVLTARPATQPAPATPRQIQ

SEQ ID NO: 417987 - protein, 423 aa, unidentified
MRRKNTPMQSFEQLTHFAGFDWAKEHHDAVLLDRNGATLDRFTFAHTGPGWAQWCEKIKAYPALGVAIETNQGAAVDQLLQQSNVTVYPMQPKAAERYRDRHVPSGSKTDQSDAWCFADALRVDGQHWRPLAPEDPLSEELRLLCRDEVELITQRTALVNQLQAALYEYYPAALEAFEEWTAPYAWEFVIAYPTPEEVVKAGKRKWEKFLHTHKLWRPQTAQQRLEIFARANEFCGTAAVTRAKSRLALSTAKVLRSLQQQLEEYRAAIEKLFAQHPDHDLFGSLPGAGEKLAPRLMSEIGTNRQEYPTAQAMQCVAGTAPVSFESGQSRRAKIRWHCNRHLRLAVHLWSDCSRKFCAWAQAYYQAQREKGKSHACALRCLGQRWLKILWKMWQTGRPYDETLHALNQQKHGSWVLQLKPKTT

SEQ ID NO: 417988 - protein, 413 aa, unidentified
MALKIVYPICFGIDVHKTFVVACIASTNKGVTTYKRHRFSTYSKGLKELSQWLCENNCKDVCMESTGKYWIPVFNILEDSCNITLAHPKYVKAIRGKKTDKKDAKWIADLFKHDLIAGSFMPPLAIRQLRDLMRYRFKLTNFMSSEKNRLQNSLTVSNIQLGNVVSDTFGKSSMNIIEKLLDDPTDISFDIEPLIHGSMKDKLPELELAIDGFITHEQAEKIKVIKQHYEDLKSRKDDLERIILILSAPYSEEINLILTVPSFKNIFSAITVVSEIGVNMDVFPTAKHLCSWAGLTPTNNESAGKKKSVRISRAGCYIKPLLVQCATAVVKSEKHPEIRNRYLRIKTRRGHKKAIIAIARMLLTAIYNILKKKEPYNAELYRKSDVLPVNREITVEQAILLAKTQGYRIKTVV

SEQ ID NO: 417989 - protein, 346 aa, unidentified
MAMTIVESTRPVTGGVDTHADVHVAAAVDANGGVLGVESFATTPAGFAELHGWLTGFGAVARVGVEGTGAYGAGLARFLRTRDLEVIEVDRPNRQLRRRAGKSDTIDAVEAARAALSGRASGIAKTADGDVEAIRVLMVARRSARDVRIKYLNQIRHLGFTAPDELRERLRDVPADQLARTAASLRPGAGTVMRATKLAIRTLGRRVLDLEADAHDLDRQIDALVRRAAPGLLDVHGVGTHTAAILLVAAGDNPDRLKSEAAFAHLCGVAPLPASSGKIVRHRLNPGGNRQANHALWRIVFTRMSSDERTRKYVARRTNEGLTTREIMRVLKRYVAREIYPHLAHA

SEQ ID NO: 417990 - protein, 332 aa, unidentified
MHYAGIDLHKRTLVVAVENDQSAVGRPATLRCPDTEKIQSFFENLRPFRAVIEASGSYRWLYDLLSPLGEIVLAHPRRLKAIVEGRAKTDKLDAALLAKLLRVGMIPTAYVPPQRYLDLREICRSRSRWVQHMTQAKNELHAILARRNIHPPFKTAFCRGWIRFVSMTDLGFVGNMARDEVLRRMDHYQQEVEALDRALSEMAESYPEIQAIMDIPGIGLYSALLIVGEIGEPARFQNARQVGAYAGLTPRVDQSGGHCYYGSITHQGSSWLRWTLVQAAMKAARHDKPLANLHTRIRKRSGAKIARVAVARKLAGICWIRLRHYQPMKEAA

SEQ ID NO: 417991 - protein, 342 aa, unidentified
MGTQITGGVDTHLDVHVAAALDDCGGLLGTASFATTPDGYRELAVWLGSFGEVVLVGVEGTGSYGAGLTRYLQSIGIEVVEIDRPNRQRRRRAGKSDTHDAVSAAKAAFAGDALGAPKVRDGNVEAIRVLRLARTSAKRDRTRALNQMRSLVTTAPDELRSQLRGLTIARLVRTAAGFRPANRTDVANATRVALKTLARRVQELDEEIRTLDSLLTPLVVQTAPEMIERVGVGTDTAGALLVAAGENAGRIRNERAFARLCGAAPLDASSGKQQRHRLSRGGDRQANSALWRIVITRLSYDPATRQYLQRRCAEGKTKTEAIRCLKRYIARELYAHLPPTLA

SEQ ID NO: 417992 - protein, 423 aa, unidentified
MMKLKYSICCGLDVHKNVIVATIVTTNKDGISEYLQKSFSTINSDIQRFHNWLIENNCYHVCMESTGKYWIPIFNYLENDIDVCLTHPKYVKAIKGKKTDKKDSKWIADLYKFDLVRCSFIPPKDFRQLRELARYRFKLVCMKSSEKNRIQNCMTISNVGIASVLSDPFGKTATEIISYLLEHTADSMDEKAVRKLIKKGAKSKSDEIIEAIKGYTIETDQAKKLELARGHLEYLDDMITQTEVELYVRIKPYYEFVEFVSTMPGMTELSSTIVLAETGVDMDIFDDAKHLCSWCGLSPANNESAGKKKSVRIAKAGDYLKPMMVQCALAAIKSKKQPYFAIKYGRIKKRRGHKKAIIAIARMMMVCIYHMVSEKKPFTPTDYEELMNPQNHVERVVLNENNVFAYLESLGYDSSKLVKRNDN

SEQ ID NO: 417993 - protein, 363 aa, unidentified
MRFYKNQHQFYIGIDLHARTMYICVINNIGETVFHKNMECSRDNLELVTNTFGKDIVVGVECIFTWYWVADFCAENGIDFALGHAYYMKSIHGGKTKSDKIDSEKIANMLRGGMFPIAYAYPKAKRAVRDLLRRRLFFVRQRAELSVHLQNTNHQYNINDPLTSSRMRSEVYRNTIPLKFSDPATLKMVNADLAMFQSYHDIITKLEFQIEDSMEVQDPVSYSIINSVPGLGFILSLTILYEIDDIHRFSDVGKFISYCRLVKCSHESAGKKEKGGHNKIGNVHLKWAFSEGAVLFLRNNERGQRWHDKLVQRYGKAKAMSIIAQKLGRTVYYMLKRREAFNPDKFYGDKKIENKDSGGELLA

SEQ ID NO: 417994 - protein, 398 aa, unidentified
MYEQFLGIDISKDSFDLTLLGSSGEIKLQEKLTMDRDGFNTLLKYLSPYPNDKLLVSMEATGIYHLPLLSFLLENSFKSVVINPILIKSFIGSTTLRKTKNDKKDATSIALFSLKSYQSLHLATTDTVQSIRPLIRERESLSKDIARLKTEIKANLVQLFPELLNNSNIFTKSILNLLLQAPSRKAIRNLKKQKIQKILDTTSGNKVRITAEEILSLAKDSIAISDIYLEKVLTSKIRRLTTIQDELSILDEELQNSLEDTDINDDIDILQSIPGIGSVTSKNFMVEVSSVDKFNSVKQLCAFIGIDPSVRQSGTSVNYRGKISKRGNANLRRTIWQMAIGTIRTCDKFNDYFIKKREEGKKFKQAVIAVANKLLKTIFTLLKNKTKFDENLAYGVSK

SEQ ID NO: 417995 - protein, 392 aa, unidentified
MVISVGIDVSKDKHDCFIVNSEGEVLADVFTIQNTRDGFNFLLQKIQDCTTPQDKIKVGLEATGHYSYNLLGFLLDNGLPTYVLNPLRTNLYRKSLSLRKTKTDRVDARTIATMLLSDAGLKPYTDTAYHNEELKSLTRYRFDKVKERAKLKSSVSRLVCILFPELEKLVPSLHTASVYTLLEEFSGAKQIAAAHLTKLKALLETASKGRYKRDMALEIRDAARNSIGSWMPAKSLELQHTIRLIRELDVEIAEIEEQIQSIMDELCSPITTIPGLGFRMAAMILAEVGDFTRFDSPDKLLAYAGMSPSTYQSGQLKNCYPHMEKRGSRYLRYALYNATKYVCHWNPTFAAYLAKKRAEGKHYNVALSHAAKKLVRLIFAMEKSRQPYCSAA

SEQ ID NO: 417996 - protein, 390 aa, unidentified
MILVGIDVAKDKHDCCIINSDGEFPEEVFSILNNREGYETLYKRICSLAVDLAKVKVGLESTGHYSSNLLAFLLDKHLTAYVINPLRVNLFRKGQSLRRTKTDKIDSRNIAHLLMTDSSLKPYSLSSYHMEELKSLTRYRAFIVRERTKLKTSIARLVTILFPELEQLVSSIHIHSIYAMLEEFPGSAYIAAAHLTRLTALLLKASRGRFGRETAIRIRDTAKRSIGAVSPAKSMELQHTIAHLRVYDQEIGEIESEIEKIMDDVNSPITSVPGIGMQMGAVILAEIGSFRRFDSPDKILAYAGMSPSMYQSGKLTGSYSRMEKRGSRYLRYALFNVTRYVCHYDPGFTAYLSKKRKEGKHYYVAISHAVKRLVRVLYAMEISGNRYKTA

SEQ ID NO: 417997 - protein, 457 aa, unidentified
MSRKGKRTKGIEEAHPFAGMSRVNANAAGVDIGATEIVACVEGDENMQIVKGFGNYTVDLQAIGKWLQEHNVKTVAMESTGVYWIPLFEELERQGFECLLISSRSLRRVPGRKSDIQDSQWIQTLHSYGLLESSFRPQGDLVALRTLLRHRGQLVDHRSPHVQHIQKALLQMNIQLSQAVSDITGQTGQAILRAIAAGERDPQKLAALRDRNCKNSEEEIAKALTGRWQEEYLFILEQSLEIFDYYTRQIEGCDAEVERMYALTRPEWEGGELQPPSQSKRNSHSKNAPKNQKEIRQHLKRLAGVDISAVEGIGVSGAQTVIIECGTDLIQFPKEGNFSSWLGLAPKHEISGGKVLKNRTLKTKNRAGQAFRMAAQSVKRSDCVFGMMYRRFRSRMDNRQATVATAHAIARVVYRMLKYKVEYESIDVTEYEKQYEEQQIKYMKKKAAKLGYQLVPA

SEQ ID NO: 417998 - protein, 448 aa, unidentified
MHTEHYHKNYIMAKVINLHAAGIDIAANIHYVAVDSEKCKNPVRSFKAFTHDLHKLAKWLVSLGIETVAMESTGSYWFQLYVILLDYDIEVFLVNAAHVKNVPGRKTDVIDAQWLQELHASGYLNACFQPDNLTRELRTYVRLRKQIIREMAKETQHKQKAMINMNIKLHDVISDINGKTGTSIVNAILKGERDPKRLALFHNKRLKCSKKTLIKSLEGNWMNEQLFCLKMADNKYCELEKHLIDIDNQSEKIIRLLAQDNVKKKTVKKRITKKNQPKFNIEQHLYNVHGVDVMNIYGFKQTTALTVLSETSANLKEKFPTVKQFLSWTNLVPNNKISGGKILSSKLRKRKNHAGQAFREAANGLWNAKNPFGDYLRAKKAKSGAGQAIVATAKKIATIYYKMVTEKVEFDPYIIDGNKQAYLQKRARLLSKSLEKINTHLSLMYNVT

SEQ ID NO: 417999 - protein, 325 aa, unidentified
MQGKDRSEQETKTQSTVGIDVCKLWLDIHILPSEEAFRVPNTKAGSKEIVRRLGRYDVQLIAIEATGKWHRDLHRNLADHGYPVRVVNPLRARLFAEAMGLLAKTDQLDARMLAVFAASLTEARPPAPEIIEALKELVQARCSAVEEQTSLTNQFKSATTVFLRRQLKRRLTQIAKHIKALETESLKRINADPGLARRYDILVSIPGFGDVVAMTLLAWLSELGSCNDKQIATLCGLAPWPDDSSDRMGARHIRGGRQVIRNILYLAAITAKSFNQPMKAFFQRLTANGKAKKQALVAVARKLIVLANTLVRADRLWQKEAPKCA

SEQ ID NO: 418000 - protein, 406 aa, unidentified
MDVVYTHVCGLDVHKKNVVACVITPETKEIRTFSTMTDDLILLVDWIKSKGCTHVAMESTASFWKPIYNLLELEDIQTLVVNAKNIKNVPGRKTDVKDAEWIASLLRHGLLQGSFIPNRDQRELRELIRYRRSLIDERAREVNRIQKVLEGANIKLSSVASDVLGKSGRAMIEAMIAGEENPELLSELAQRRLKNKKAELQRALNGLIGNHQKLMLAAQLRHIDYLDEEIGRLDEEIKRRMLPFEEDLELLDTIPGVARRTAETIAAEIGTNMDQFPSAAHLCSWAGLCPGQNESAGKRKSGKTRKGNKKLRSALVEAARAAGRTKNTYLSSQYHRIAARRGANRAAVAVAHSILMIAYYILKRRQPYIELGPTSYEERKRDTIIRQSIKKLESLGLKVTVESVVS

SEQ ID NO: 418001 - protein, 430 aa, unidentified
MKSNTQNAKIEAITEKTLVLGIDVGSEMHYARAFDYRGIEYSKKPFKFSNTEAGFVTFKEWILNLKERHEKDKVVPGMEPTGHYWFNLGKFLQDNEMKPVLVNPHHVKKSKELDDNNPTKNDRKDPKVIAGLVKEGRYMIPYLPEGVYADLRTASNMRFQIQSELTRIQNRISRWVNIYFPEYKTVYGRPDAVSGMMILKQAHLPEDILTLGVEGVNQIWRDAKMRAVGKKRAQILIEAARHSIGAKEGSMAARMEIRMLLEDYESRNNHLQEVMTLIEELVKQIPMAEKLMDIKGVGIKTVSGFLAEVGDVSRFSNPKELQKLTGLALVENSSAKHEGQTTISRRGRKRLRYLLFEVAMSLVAKNPKFRELHNYYTTRRLNPLKKMQSLMAISAKLIRVFYAMLTKGVDYDPKKMVSDIKRPAVYLQAA

SEQ ID NO: 418002 - protein, 391 aa, unidentified
MTERKTETVNDLSRCLDPLDMDATLIAVIEMSQSSWLVGGIVPGVERQPLKKLAIDEHALLKLLSRWRAEAEKKGHRITRIAVAFEAGHDGFWLARWLAAQGIEAHVIHPSSVAVTREHRRAKTDRLDTGLLKRGFLGWLRGERGHCKMVAVPTLAEEDAKRPSRDRETLVGEASRIITRVKAAFVRLGIRRFNPKLKTAAAGLEALRTPEGEPIPPNTLAALKRDLERHRIVKQQIREIEQTRLERLGKAPAEGSHAMVRLLARVIGIGVETADMLVQEVLSRNMRDRRAVARYAGLTGSPDESGSKRREKGLARSGNARVRRGMIQLAWRFLMFQKDSALAQWYRQRTANAPSTRKTLVVALARKLLIALWRLARDGVVPEGVRLRPAA

SEQ ID NO: 418003 - protein, 344 aa, unidentified
MGEVSTIGLDIAKAVFQVHGVDGSGAVVIRKRISRAKVLEFFADVPACLIGIEACPSAHHWGRELAGLGHTVKLMPPSYVKAYLKRSKNDANDAAAICEAVTRPSMRFVPIKTKQQQTALMLHRTRQLLVRQRTMLSNALRGHLAELGIVSAKGRNGTAELLKIIADGADNRVAASARGILNVLARQYSALGAEIGSIDKGILTLHRSCEASRRLAEIPGIGPIVATALVAEIGDWRAFASGRNLAAWIGLVPKQHTTGGKDRLGSITKQGNRYLRWLLVVGAMAVVRYAKKHGTKNRPWLGQLMERRPTKVAAVALANKIARVAWAIMVHGDRYKEPKVLMAA

SEQ ID NO: 418004 - protein, 369 aa, unidentified
MVFWSVQYLLQHLLVQTQLSDQLLQPLILIFQLPQTPQFRHARPGKFFLPVNGMDYLLPLRLTVRNVLTKRITMNIVFLGIDLAKNVFQLCGLNQAGKPVYTKRTGRKELLQTLANIPACLIGIEASTGAFYWQREFEKLGHKVKVISPQYVKPFVRGQKNDGNDAQAIAVALMQPTMQFVPPKSPEQQDIQALHRARQRIVNHRTATVCQIRGLLLDRGIPIGSAVSRARRAIPLILEDAENGLSSRMRRTIAELYDLFNDLGRRIHFFDKEIETVFRQSEACQHIAKVKGIGPKTATAVAAAIGKGTEFKNGRHFAAWLGLVPRQHSSGDRQVLMNMTKKATSICGHFLFMVPALSSGLPRITMMVI

SEQ ID NO: 418005 - protein, 369 aa, unidentified
MKKNNTGKSQEGRGKARQACFTIGMDLGDKTSRYCELDDQGEVVREGGVLTTKKAMAQKFGAMSRCRIALEVGTHSPWVSRLLKSLGHEVIVANARQVKLISASSRKDDRLDAQTLARLARVDPRLLRPIQHRSEKAQEHLMVIRVRAALVETRTSLVNTARGLAKSIGERLPKCDADQMGVERMGSLPAQLQQVLQPLLEEVESLTKKIKESDVEIEQIARTEYPETALLKQVNGVGTLIALTFVLTIEDRDRFQKSRDVGCYVGLRPKRSESGQSQPQLRITKEGDIYLRKMLVQGAHCILGHRGPDTDLKRWGLKLASRGGKNAKKRAIVAVARKLGILLHRLWVTGEVYEPLRKSLAQASRRPAA

SEQ ID NO: 418006 - protein, 344 aa, unidentified
MDATTVGIDLAKNVFEIALADERGHILERHRLSRARFDRFFVNRAVCRIVMEACGSAHHHARRLSSQGHEVVLLPAQYARAYVRRNKTDAADAAALIEAARCPDIRPVPIKSMDQQALQQLHRLRSQWMAARTARINFLRGCLREFGVGIPVGSQRAIQAVRDALSNQHPVVPALLHSSLLELLAEIDSLEQRCKQIDRELARFNENDPIVERLLQIPGVGPLTATALRASVVDVQRFPSARHFASWLGLTSREHSSGERRRLGRISKQGDPYLRTLLVHGARAVLLAARSAQRRGSALDRLRSWALELQERRGHNKATVALANKLARIVWATWRFERDFSNNP

SEQ ID NO: 418007 - protein, 351 aa, unidentified
MMIIGVDYHPSFQQIAFLIEETGEYGERELDHGEGEAERFYRDLHERGIRVRVGMEATGFSRWFERLLAELGMELWIGDPAQIKAKRVKKQKYDREDARLLLRLMRENNFPKIWVPSPENRDLRQLLWHRHRLVQMRTRIMNQLQALAMNEGKRWKTKLWSERGRAELEKLPLAPWASRRRGELLELLDRLDPSIAELTATVEREARKRPDVSRLMTHPGVGALTALAYVLIIGTPTRFQRGKQIGTYVGVIPSEDSSAGKQRLGHISKQGNSLLRFLLVEAAQAAARINPHWRRRYMHLAMRRHKSIAKVAMGRRLGIRLYWMWRNGCEYSSSLEVGSYVGQLGTGHGVK

SEQ ID NO: 418008 - protein, 350 aa, unidentified
MMIIGCDYHPRYQQIAMMDTETGELVERRLEHENGEAQAFYASLPKPARVGMEATGYGQWFERMLAEQGHELWIGHASEIRAGMVRKQKTDARDAAHLLRLLLEKRFPRIWIPSPAERDTRQLLRHRYKLVCFRVSVKNQLHGLAMSQGVCRKKKLFTAKGREELEKLSLGPWASRRRQELLAMLDQLDPAIEELDRAVQREAESRSDAVRLMTHPGVGPVTALAYVLTLGPVARFQRSKQVVSYLGLNPKEHSSGDKQHTYSISKQGNPMMRWLLVEAAQTAVRFDPELLRVYRRLKFNKGASVAKVAIARKLAVKLYWTLRATASCAQMAPMQGSSRGTLVPQVGSSL

SEQ ID NO: 418009 - protein, 318 aa, unidentified
MLIHYIDIAKRNFVIAVSSLSKTKTETNNPKGIAHTVEYLKKHKVALVVTESTGGLEIPAAKAIRRAGIAVIIANPRQTHQFAQSQPLTKTDAKDAKMPAFFAQMTAQKEDSQTMPYQPPTEAEEVLEALVNRRNQSADMRTAEKNRLHQVHETQVGSVKQLIAHFDRLIDELDKQIDDHTHTHFDGKAQVAEQIKGIGSITTATLMAMLPELGRLSHKRIASLAGIAPHPRESEETKFKSRCFGGRSAVRKALYMATVAATRFEPLIRDFYQRLLSKGKPYKVAVTACMRKLLTISNTRMRDYFAENDTAENGIRTA

SEQ ID NO: 418010 - protein, 422 aa, unidentified
MSYRIAGIDVHKRMLTIVVSDVEVVGEFAFERRQFGSGPAQLRELAGWLVAQRVEEVVMESTAQYWKPVWASLERDWKPLAQQWAGAGRMAGTLHLAQAQSNRARPGRKRDFTDAERLVKRFVAHELTLSFVPDPAQRLWRTLTRTKYQLTRNRVQLQNRLEALLEEAHIKLSSLVSDLLGVSARRMLHALAEGATDPGALAALANVRLRATQEQLRDALGACQDLNPVYRRLVRMALEDLLLLERQIGQVDQELADLLGPYHDQVQRLAEVLGLGVDSAQQIMAEVGATAATFPSPGHLASWVGACPGDDESAGVSHSHRSPKGNRQMRRVLNQSANAAVKCTGSIFQALYRRYVPRLGHNQTISIIAHRLCRLIWKILHQGVRYEERGPAMNERSKQRRAKRMIRELRSLGYHVEFAPVQ

SEQ ID NO: 418011 - protein, 376 aa, unidentified
MSQVSKFVGLDVHKETIAVAVAKQGREPAESLGVIANDPDAVVRLVRRLGPVEEALWCYEAGPCGYGLQRQLTEMGAACAVVAPSLIPTKPGDRVKTDRRDAEKLARLLRSGDLTPVWVPDADHEALRDLTRARQAAQEELTRARHRLTKLLLRLGIAAPAAAWSKVYREWLQGLRLAQPLQQMVLEEERLAVAQAEQRSERLSATIEEVARTGPQAILIGALETLRGVAAVTATTLVAELGDLTRFRTPRELMAYAGVVPSEHSSGGSRRRGHITKTGNAHVRRVLVEAAWHARHAPHLSKVLKARQAGQPAQVLEIANKAQRRLYQRYWRLLRRNKTKGQVVIAVARELLGFIWAIAQETTVRVEPSMRFSDAA

SEQ ID NO: 418012 - protein, 357 aa, unidentified
MKIVGCDLHARQQSIAMMDSETGEFVEKTLLHKGSAVRDFYAALEGPVVVGIEATGSMQWFLELLEELGIECRVGHPAKIRAAETRKQKHDRRDARLVLDLLVRDRFPEIWMPSTEQRDLRTLLRDRHQWVKMRSRLQHTLQAIALNHGLRQGSRLWSQAGQTALQALPLPAYSSQRRAELLSLYIQLQKRIQKLDQEVEAQVQQRAQAHRLLTHPGVGPVTALASEVFLGDPTRFANGNKVGSYIGMIPCEHTSGKRQRLGKMTKQGNALLRYLWTEAAMHAVGKDPELKRFYRRKLIQKGMGKARIAAARKLGIRLWIMMRDQIDYQEFCRRGKLRQSGEAHAGMPDFNSGPALQ

SEQ ID NO: 418013 - protein, 482 aa, unidentified
MKPKQQEKTKNATCRLTQDTWQQMNRKQRREMTRKIQSEDISLEVIHPNAAGIDIGNESHYVAVPPTRASDPVHRFGCTTAELKEMAVWLKQCAIRTVAMQSTGVYWIAVYDILEQAGLEVYLVNARDTKNLPGRKSDVQESQWLMKLHTYGLLRNSFRPSQEIRTMRTYWRQRNDLVQSAGRHIQRMQKVLTQMNIQLANVLSDISGVTGQAIIKAILGGQRDPHKLAEFRNPRVKASEEEIARSLEGNWQEDLLFVLQQEQDGYEFCQKQMAECDQRLEQYLQQREDRSGGAKLPEEKRKERLKKKKGNKPRFDLRTGLFCMTGTDLTRIDSIDVMTAMTIFSEAGWDMSKWETEDHFVSWLRLCPDNRISGDRIIGKGRLPTNNRVSTALKMAASALRTSKTYLGAQFRRLRSRLDTPVAIKAMAAKLARLVYRILRYGMKYVDRGEAFYEAQHRQQQIKHLKSKAAKLGFQIIQVPAA

SEQ ID NO: 418014 - protein, 397 aa, unidentified
MYIVGIDIAKRKHEAAVIDGEGTVIIKPFSFTNNCSGYNRLLAMLTKAKLPLDEVSFAMEATGHYWLALFTRLQKEGFRVQVINPVQTNSIRSFYIRQAKTDPRDALLIAEVIRFGHFSESTLHPENIYELRELCRGRHAIVSMQADVKRKVVALLDQVFPEYETAFTNMFGDTSMAILQTCPTPKELSEMPLEELCHLIEVSSHKRFRMAKAQELQALARNSFGFAMAGDVFSTMIRLYAKHLDFLKQQVREMDRKIAEIMDTLDTPITTITGIGPTLGAYILSEIGDISRFSSAAKLAAYAGIDPTMRQSGEYNGVRNRMSKRGSPYLRHAIWLATSSAVLHDPALKLYFQKKRDEGKPYMASVGHACRKMVSIIYAVMRDNKAYTPCIPNEISA

SEQ ID NO: 418015 - protein, 423 aa, unidentified
MSKKRAYRSIAMKNVNLNGIIAELAEGETWVGLDIAKEEVVVVIRDNSGAFGRPWKVKLPLEARQLADLLLKVSSDRKMVVAMESTGTYGDALRQVMLDAKLDVHQVSGKACSDYSEVFDGVPSSHDGKDAAIIAELASIGKSWPWPLKEREEWEAAMGCQVAWMDTQQDIKQLWLGKLEALVARHWPEATRILALTSMTLLRVLAHYGGPRGLAKASGAEQQLRKWGGPFLAAAKIKRLVESGETTIGMRMDRATAEMIKRFAQEALQAEKEIAAVKRFLKELTEKDAHLKQQAEIVGTTTACVLHSIFGNPLRYHCGEAYRKAMGLNLKERSSGKYKGKLKITKRGPSMGRRWLYFAAMRLIQTPALKGWYEAKKHKNKEKALIVIVAMMRKLPLVLHAVARGEPFDINRVFPGRPLAQCR

SEQ ID NO: 418016 - protein, 389 aa, unidentified
MPTVADRPEAQTAIQTNLAAIFISLELSRSIWLITSLSPGGGEKMSKHSVPAGDIAALLARFSELKQKALARTGKSFPIVTIQEAGLDGFWLHRVLQSEGIESHVVDPASIATSRRRRRAKTDRIDGEALLRALLAFKRGEPRVCAMVRAPTPEEEDRRRLCRERKVLIAERVKHVNRVKGLLFSQGVSGYEPLRRDRRQRLDELTTGDGRPLPTHLKTQISRELDRLELLLDQIKAAEAERDALLAAQQAATPAPAGRMLLDLKGIGPEFAANLWLEGLFRHFDNRRQLASYAGLAPTPWQSGSVDREQGVSKAGNPRLRTTLIQLAWLWLRHQPQSALAQWFKERVSRNGGRLKKTTIVALARKLLVALWKYVTAGVVIEGAVMKAA

SEQ ID NO: 418017 - protein, 328 aa, unidentified
MERAYIGIDLHKAFFQVCVIDPTGERLWEQRWPTSEAGIGALLARCGPDSAVAVEASSPTWAFVDRVVPHVGRVVVVDTRKTRIKAGYAAKTDRLDARRLADALRRDSVVGIYHPPAAIRDLRELCRYRCHLARLQASVKQRLHALLLRQGVSIPVRGLFTKRGTQWLDTVHLDGWSHASLQGLRQILADVRTQLVPVVRAMQTHATTDPIARALATRPGFGPVFSVTLRAEIGTITRFPDGPHLASYAGLVPRVERSGGRQWSGRITKTGSPWLRWTLVEAAIHQFRRQDALGRWARQLAMRKGMLKARVAVARALCTEVVAVWPRA

SEQ ID NO: 418018 - protein, 366 aa, unidentified
MRMDVTGFTTFIGVDLHKCSVTLRAVRADGELHGHLTCNTKCVERIAEWITSLPGPKWLAVEACPFVEWFIDRFTPCVDRMDIADATELSLRRGKRRKNDPNDALDIALRLARGECPLGYIADPQLMQLRKFGRHWRQLSRSLGKAKQGMKSMLNAANIRGPQFDGPRAHRWFLTFGGLLLPAQRLAFGNYLDQIMLIERQREILRREMLTAARSPQFAATEQLLRSVPGIGPIWALVIASEIGPFDRFPNADALEFWAGMTADLKESAGRTQSGNITKAGSATLRWALCQAAVTLCQSDAKQEATRQRFIARMPKAKANVVMGRRLLRTLYAMVRDGKPYQCGERRDRTKAANKAKHRARVLQPA

SEQ ID NO: 418019 - protein, 364 aa, unidentified
MPERICFVGLDVHARKTAGAAVQLGSGEVFKAQIPGPPVEAIEWLKTLPGPVRAVYEAGPTGFGLVRAARAAGIEMIVCAPGAIPRQPGDKVKTDTRDALKLARLLAAGQLRPVVVPEPELEALRDLVRCREDLRGDLMACRHRITKLLLRRGLIYPGPGAAWTRRHASWLGSLTFSQPLVQLTFAEHLSCHEVLLTRRDRLDHLIAEQATTGPWAALIARLRCLRGIDTLTAIGLLTEVGDFTAFAHPRRLASFVGLTPSESSSGDRRRQGSITKCGSSHARRLLIEASWHYRRHPALSVDLRRRQANQPPAAIDAAWRAQLRLHRRWTHLDAARGKKRTTVAVAVARELACFVWEIANQPDT

SEQ ID NO: 418020 - protein, 356 aa, unidentified
MKDMQNKKLYLGFDVSSKTIEIYGRMADSDEGKSIQIKNTKASIKKFMEKLPDPGNTVIAMETGFDSPWMSDMISAYGCEVIVAHARELALIWGSAAKCDRRDAEMLARLACFDKKLLHPIKHADAESRNDLCVIKARDTLVRMKVTLINTIRDLLRSGGADVSGLTPENLTKKASKILPVELQPALNGLLTQLCHIREEVKRYDRIVIRLCKKYPATTKVRQIRGVGPITALSFVLVIGNPKRFSSAERLAAYLGLVPRRDQSGEVEKQLGITKQGNSFIRRYLIQGANYILGHFGKDCDLKTHGMKIAARGGKIAKRKATVAVARKLAGLMYTLWLNDEVYDPHYKQNHRRKIA

SEQ ID NO: 418021 - protein, 344 aa, unidentified
MKHYAGLDVSVKETSVCVIDETGKTIREVKVASEPQAILSVLVDEALTIGRIGLEAGPLSQWLYSGLAETGLPVICVETRHMKAALSAQLNKSDRNDARGIAHMMRVGLYRPVHVKTLASQKRRMLLTSRQLLQAKAVDIENDLRGTLRNFGLKVGVVGTAKFEARIHELVADHPDLAAITEPLLIARRALREQLGVLHRRLLAVVRKDEVCRRLMTVPGVGPVVALTFRATVDVPARFKNSKAVGAVFGLTPRRHQSGEIDRMSSISKCGDAMVRTMLFESAQVMLTRTIKWSWLKAWGMKIARHRGMRRAIVAVARRMAVIMHRMWADGTEFRWSNINAATA

SEQ ID NO: 418022 - protein, 325 aa, unidentified
MQAKKLCCGIDVSHTKLDVCYQNNLGELFHLQVGNNNAGYQKILDHTGTQYHFVMEATGVYYIRLAFFLHRRGCVVSVVNAIAIKRYIQMHLERNKTDKKDAGWICRYAIDQRPTYWQMPDSAYFESKQLYNTIRDYTEQIKRINNQLHSLRLLPVPSKDTIKSLEKIIVCMEKEIKQLEQKLQLLLVQWQPDQLKNVSSIKGIGKRAAAMLIVFTQGFKHTQNHRQLISFAGLAPTQYSSGSSIQGKPRIYKRGGKNLRDVLYMCSMNAMKTNTACKALYERLRANGKTGKQALIAVCNKLLKQVFAVVKNNTLYQHNYCSAKP

SEQ ID NO: 418023 - protein, 334 aa, unidentified
MWHVGIDLHRATVVLAAVNDIGEAMNPITIPCSDTAAIVSTVEALGSFRVVIEACGTYRWLYDLLRPHGTVLLAHPMRLRAMIQRRTKTDKLDAQLLANLLRINQIPLAYIPPEPYQQLRDLTRCRARLGRQLAEVKIQLRALLARQNRESPYRTPFGPRGLGWFRGQDFGPIESMVRDELLERFRHYAKQIILFDKRLEGMRQAFPQVEALLDIHGIGLYSALLVVAEIGEVERFHSAKQVGAYSGLTSRVHQSGGHCYQGSITRQGSPWLRWVLVQAAMKAVHKDIALKNFYSRIRKRSSAKIARVAAARKLAEICWKRLRQWQREYASRAA

SEQ ID NO: 418024 - protein, 346 aa, unidentified
MVTLGADAHKRSHSVVAVDEAGRQLGAHTVAATSSGHLDVLRWAQRWPERRWAVEDCRHVTRGLEKDLLGVGEVVVRVPPHMAAEGRRSMRERGKSDAIDALAVARAALREANLPEAHLEEHSREVRLLLDHREDLVGERTRMQNRLQWLLHELEPGFQVASGALSRRPAIKRVEALLNGRSGLVAELARELTARTMQLNLRVDELERQLATMMPTLAPSLLALPGCGVLTAAKLVGETADACRFRSRAAFAMHNGTAPIPASSGNQQRHRLNRGGNRQINAALHRIAVSQVRRPGRSHDYFLRRLAGGNTKREAYRALRRRLSDEVFRLMLIDQRQARSAKSAAA

SEQ ID NO: 418025 - protein, 338 aa, unidentified
MSLYCGIDLHSNNCYLAVLDEQLRPVLGRRVANSIETILAALEPYREHIAAVAVESTFNWYWLVDGLMEAGYHVELVNTSAVRQYEGLKYVDDRHDARWLARLLQLGILPTGYIYPKEQRALRDLLRRRSFLVRQRTSNLLSLKNLYSRETGAQVPTKDLKRLTAEQVADQFTNPLIVQSITCGVNISDALKTEIVSLEKTILAQARQCPEYVLLESIPGIGQTLAMTILYETGSLSRFPDAGHFCSYCRCVPSQHLSNGKVKGKGNTRNGNPYLSWAFMEAAHFAIRFEPLAKKYYERKKSRTNPLVALRAVAHKMARACFYVMRDQVPFQAAQAFG

SEQ ID NO: 418026 - protein, 326 aa, unidentified
MQGKEASEQETKVNSTVGIDVGKDWLDLHVLPTGEALRVANTAGGIRRAKRWLSQFDIALVVVEATGKWHRQVQRSLAASAVRVAVVDAFRVRMFAKAQGILAKTDRLDARLLAQFAAVMAPPVRAPAPQALDELRELVVARASAVEQQTALKNQLAAATVNFLRRQLQRRIERGDRDIAALDAAILKRIRLDHTLAKRYAILSSIAGIGFVAAATLLASLSELGSGTNKQIAMLAGLAPIADQSGRREGVRVVWGGRPSVRRILYLAALSAARVNADMRTCYQRMRAAGKPAKLALIAVARKLAVLANTLVKEDRTWLPQSPKHA

SEQ ID NO: 418027 - protein, 345 aa, unidentified
MEQISRIGMDTSKYIFQLHGVNTAEQPVLRKKLRRKEMFAFLEKLAPTVIAIEACGASHHCARLLQSFGHSVKLIAPQLVKPYIKRGKNDAADAEALCEAMSRPTMRFVPVKTAEQQAGLMLVGVRDRLIRNRTQLSNAIRGYAGEFGLTAAKGKAHLAPLLERIHADDNLPALARELFAAQAEEYAQLQAQIDEVDARLMAWHRADECSRRLSKIPGVGPIGAVLLTMKTPEPELFRSGRQFAAWIGLTPKDHSTAGKVRLGGITRAGDEGLRSVLVVGATTVIQHAQRGGRPSPWLTELLKRKSPKLAAVALANKTARIAWKLMVTGENYAAKAAPAALAAAA

SEQ ID NO: 418028 - protein, 342 aa, unidentified
MKIHTIGIDLGKTNFHLVGLNERGEVVVRKRFSRAQLLRFTANRRVHVIGMETCGGAHFLGRALQEQGHEVRLIPAQYVKPYVKTNKNDYIDAEAIAEAVGRPTMRFVPIKSDDQLDLQSLHRVRERWVTRRTAVINQIRGLLLERGITLRKGRRYIEEALPGILEDADAKLSGTVRLLLAQLKLELDQLALRLGEAEALIEQTVQESEACQRLMQIPGIGPVTATAVISAIGNGAAFHKGREFAAWTGLVPREHSTGGKQKLLGISKRGNRYLRKLFVQCARAVLQQKTKQAPGLKVWLEKMTSHTHRHVAAVALANKLARMAWAVLATGEAYRAPLLAAA

SEQ ID NO: 418029 - protein, 361 aa, unidentified
MTGTMTWVGLDVHARSTHGAAIDSLTGELSRARFGVGTEPVIEWLAALPGPVRAVYEAGPTGFGLARAAQRAGIEVMIAAPSKTPRARGDRVKSDRKDAELLARLLIAGSLKAVSVPPDWLESVRHLARVREAARRDLGRSRQRVSKLLLVEGRVYPGATAWTRAHRRWIASQQFEHPATELALIDLLAAVDGLCARREALDERLSRLAQDPRLWPTVARLRTFRGVDTLTALALHLELGGNWRRFLSPAKLASWLGLTPSLDQSGETASQGKITKSGSAIARRLLVEAAWHYLPEPRIGVTLQRRQADQPDHILQIAWRAQRRLHRTHHRLRDRHKPGNVANIAVARELAGFLWAAATAP

SEQ ID NO: 418030 - protein, 408 aa, unidentified
MGRSIGLDAHRDFCEVAVADGGRARSAGRVLTTPEDLRLFAESLAPDDRVVLEATGNALAIARILAPHVAEVVLAHAQQVRAISHARVKTDKIDARVLADLLAADLIPKVWVGDERTRTLRRLVSRRRGLVKRRTQVKNEISAVLQRNLKGRPPASDLFGRRGRAWLSAQELPADEHLTIDASLRQLDFLGEELAAIDRLVAEEVQGDEGLRRLLTIPGVDVTTAVTLLAVIGDVSRFPSSRQLVGYLGLHPRVRQSGNGPAHHGRLSKQGSAAARHVLVEAAWMAAAAPGPLHAFAARIAARRGRQVAAVAVARKLSVLCWCLLTRDEDYAFARPSMVRRKLRRLELAAGAPHRKSGPQPDPVWNRDNDAAERRLAEQAERAYERLVADRTASRAKVGAGATPGRAS

SEQ ID NO: 418031 - protein, 337 aa, unidentified
MRYIGVDLHKTQFSVCWMEEDGSNKFERYPMNVEGLRRFKEKLDGECEVGVEATGNSKYFYDQIVGTVKKVRVINPLQFKIISESVKKNDREDSRVIAEFLSKGLLPEVRVMDKGRREIKSLIQTRDKLVKLRSSLKNKIHGILLEHGIRSKREMFSSQKAFKKVLDMPVSETSRFELEVIVKQINSLNEGIKELESKIKDKGKKLKGQKNLQSITGIGELSSTIILSTIGDIGDFENKKKLAAYAGLVPRVHESNGKYKNGRITKRGDKIFRTTLVQVTLIAIRYNRYLRGFYERLKVKKGSGKAIIATTRKMLDIIYDTLKNDWEFKDFNNFVLV

SEQ ID NO: 418032 - protein, 425 aa, unidentified
MKHAPDNSNRTTLPPNPARGLTAGLDWVKDDHVVCVVDGAGRAVDRFTVTHTGSGLAELLQRLRKTGCQEIAIERPDGPVVAALLEADLTVVVISPNQLKNLRSRYGSAGNKDDRFDAYVLADTLRTDRARLRPLLPDSPATLTLRATCRARKDLIGHRVALANQLRAHLHTALPGAVGLFAELNSAISLKFVGRFDTQDKLDWLSAKRLAGWLRNAGYSGRVDPAVLHARLTAAPRGLTGPPGAAHAHTTRALLTVLASLVEQIRALSEQIGEQLDLHTDQHIFTSLPRSGTVRAARLLAEIGDCRARFPTPEALACLAGVAPSTRQSGKHRGVSFRWSADKQLRDAVCDFAGDSRRANPWADKLYRDAIARGHDHPHAVRILARAWLYIIWHCWQDRVAYQPARHGALQRHLATQNKITNQAA

SEQ ID NO: 418033 - protein, 370 aa, unidentified
MKKNNTCRQSSKRRGSTRTGRLTIGMDLGDKTSRYCALDRNGEVVRERCVGTTKKAMTQVFGAMPRCLVAMEVGTHSPWVSRLLGRLGHEVIVANARQVKLISASSRKDDRLDAQTLGRLARVDPQLLRPIRHRSEKAQGHLMTIRVRAGLVDARTSLVNAARGMAKAVGERLPACDTDQMGVEKMQSLPPELQETLQPLLQSVESLTEKIKACDVKIEQIARSEYPETELLQQVSGVGTLIALTFILTVEDRERFQKSRDVGCYVGLRPKRSESGKSQPQLRITKEGDIYLRKMLVQGAHYIMGYRGPDTDLKRWGVKLSERGGKNAKKRAIVAVARKLGILLHRLWVTGEVYEPLRNSKQGQPVGTAA

SEQ ID NO: 418034 - protein, 431 aa, unidentified
MTNRLQVGIDFSQKRADFCLLFPNGQPLERHQAFGNSCSGYSLAKQLLLDALDSYQFDGVDVSGEATGYYWLPFFLQLAADPDLEPHDLNLFLLNPRWVHWYKKCFAQDDKSDQKDPYYIADRTRTHRPDVIWSPQMDTLALRFYTRFRFHLVQTLAREKCYFSAFLFLKASAYRRFKPFSDVFGATSRLILTQYPSLDELAAIPVDDLADHLHELSGHYLRDPRDNAHKLQHVARESFTLHPDLTLPVQRILELTLDHIRFLEGQIQQVEAWIAAELASHPAIRQLATIPGLGPVFSSGIGAEIGDTRRFLQGTKWDKRRKRNRPPNLRDAEDAVAKLAGLWWPRSNSGGFEAEDRRMAKSGNRYLRYYLIQASDHMRHHIPDYADFYARKYREASKHHHKRALVLTARKSVGLVVGLLHRDEPYRSKEG

SEQ ID NO: 418035 - protein, 375 aa, unidentified
MGKHRLAFVAFDSAKNKHAAAIADDGRDGEVRYLGEIDNSPDAVRKLVAKLSRQYERLHFCYEAGPTGYGLHRQLTELGHVCDVVAPTMIPKRSGDRVKTNRRDSVTLVKLLRAGELRAIWVPDSVHEAVRDLTRARETAMLDLKTKRQQLLSFLLRHGRSFPDGRNWTKMYERWLAKQTFGHPAQQIVFQDQLEAITTAQARLAALEQQLREIVPTWTMASVVAAYQALRGVSFLVAATFVAEVGDVRRFATPQQLMAFLGLVPSERTTGDTVRRGSITKTGNYRARRVLIEGAWTYRFSARVSETLRTRLKDLPLSVRAIAWKAQVRLCARYRRLIARGKKPPVVTSAIARELAAFLWAIGQQVAPQTGVLRN

SEQ ID NO: 418036 - protein, 429 aa, unidentified
MTRISVGVDVSKNRSTVCIMDQDGKVIMRPFLVWHSTEELDFLADTLKRLNGEVRVIMESTSIYQYPIALHLKEKGIFISIVNAYKVKKFANTDFRGGKTDKKDSRTIASYGISYWNKLVEWQIPKDTYFNLDLLTRTYMNAKKHRQIILQELQHYIDCAMPGMDKELHSLNLSTKKDFMLDFVEKFWHRDEIVTMTEAEFTEVFTAWAKKNGYRPVEGKAAKIYAIAKSCIPYYPANPTVKTILQCIVDKLSGVNRTLVTIVTQMIEEAKKLSEYQIVREMPGVGDPLAARFFGSAGDIRRFKNSKALVAYAGIDSPPDESGDFSSTHRHITKKGSKVFRDTGYEIMMALRAQKRTWEKVRKNPEVYDYMLRKEAEEKPRKVAKIAALNKFLRIVYARIKELYDNMALAERAKTKTRSKTRAKTKVTA

SEQ ID NO: 418037 - protein, 317 aa, unidentified
MDVETKADRFVGIDVSKARVDVHVRPDGIAFGCATDPEGLGALGARLKPLLPCLVVLEASGGYEGAVAAALVEAGLPVAIVNPRQVRKFAGAIGRLAKTDAIDAAVIAHFAQAVRPPARPLPDDLSVRLAELMARRRQLVVMINAEKQRLAKARDPIAQSSFKAVLKRLQAERARIDKAIDRLIAVSPLWCAKQDLLKSVPGIGDVVARTLIAELPELGRVDRHQIAALAGVAPINRDSGRYRGKRKIQGGRVEVRAPLYMACLVAIQHNPVLKSFYRRLREAGKPARLALVAAMRKLLILLNAILRDQRPWAHAQT

SEQ ID NO: 418038 - protein, 406 aa, unidentified
MTYRVFVGIDWGSQEHAVAVLTRDGTGAQERKVAHTGTAIAALVDALITLADGAPESVAVALEVPRGSLVEACLERGFHVYALNPKQLDRFRDRYTVAGAKDDRRDARVLASALITDVGAFRRLDPEDDRLVQLRELTRLEEDLDTERRRLSNRLREQLYRVAPGLLTLCPGADEPWLWTLLTRASTPAGAAHLPRAAVARVLHQHRIRRLTPDDLLAVLRAPRVPAAPGVLRAVEDHLAVLLPRLRLAAEQQQTCATRLEQLLDELGQTQEHRDVAILRSLPGVGRKISATMLAEASRPLAARDYHALRTQAGSAPITKQSGQRRRVTMRRGCNPRLRNAVHYWAQVSAGHDAVSAALYARLRARGCSHGRALRGVADRLLAVLVAMLRHQTLYDPERRRISAAA

SEQ ID NO: 418039 - protein, 384 aa, unidentified
MSAINDHRDSPARQELVPIFVSLELSRVRWLVTWTFHGSSKMSRTSVAAGDGAGLLALLVQIKARAERSQRLAGKIIVVQEAGLDGFWVHRLLEGHGLESHIVDPASVAVPRRQRRPKSDAIDGETLLRVLMAWKRGEPRVCSMVVPHAPEDEERRRLVRERKMLVAERIRETNRIRGLLASQGIVDYDPLRRDCRARLEGMKTGDGRALPQRFRAEIMRALDRIELVERQIAELEAERKALVQATSEPGLSAACLLALRGIGPESAAVLSLECFFRHFDNRRQLAAYAGLAPSPWQSGHVDHTQGISKAGNGRLRTAMVELAWLWLRYQPGSALAAWFRQRVRAERGRPRRIAIVALARKLLVALWRYVTAGVIPEGAVLKEV

SEQ ID NO: 418040 - protein, 342 aa, unidentified
MEKVTIIGVDLAKNVFQLHGAAADGSVVFRKKLSRLQFCKFMASQPACVVAMEACGSSHYWARQMARLGHEPRLIAPAYVKPFVKRQKNDVADAEAIVEAAQRPTMRFVEPKTKEQQSRAIVFRTREQFVNQRTELVNALRAHLYEFGYVAPQGIGHLPRLAEIVEDESADLPDLVRDICSALLDQIDQLSSRLAALKKTMDTLSKQAATSRRLQTMPGVGPIAALAIETFAPPMEAFKCGRDFAAWLGLVPRQKSSGGKQRLGKVSKMGQRDIRRLLIIGAMAVVRWASRRRAPDGSWLARLMLKKPRMLVAIALANKMARGIWAMLTKQEDYRNPATLPA

SEQ ID NO: 418041 - protein, 358 aa, unidentified
MNSKAFIPRDYDVFAGLDVDKRSISVTFTNHQGFIRSLRVPYSAEHLVNHVRKHFPDQKVAFAYEAGPTGYGLYDGIVAQDYPCLIASPSMIPKAPGQRVKTNRLDSRGISENLRGGQLKSIHVPAVLYRELRHLTQLRDTFVSAMVAMKQRIKSLLLMEGLEFPPAPAGSQWSFMVKAKLRKLPCSSMVRFELDQLLDSLEFNEKQIVKTTQQIRRLCQNDAELSQCIKYVMSVSGIGQIVASQLLARIGDWRELRNVRQLGAFLGLVPTENSTGERTDRGSITHSGDPRLRSKLIQAAWSAIRKDGELKEFFRAVCQSHARPVASRVAIVAVARKLTVLISVVLMEQRPYVVRKKV

SEQ ID NO: 418042 - protein, 313 aa, unidentified
MAACFVGLDIAKDQIDVGVRPTDQRWQSAQTDEGIAQLVARVVALSPTLVVAEATGGYETAVVTALAVAHVPVAVVNPRQVRDFAKAIGQLAKTDALDAAVLALFADRVRPEVRPLPDEAHHELIALVTRRRQLLDMLTAERNRLATARRSVRASVQQHVQWLERRVRDTDRDLMTTIRRSPLWRAKTDLLRSAPAIGPITSTVLVALLPELGRLSRRQIASLVGIAPRNRDSGHQRGRRIVWGGRATVRAPLYMATLVATRRNPVIRAFYQRLRAAGKPPLVALVAAMRKLLTILNAMVKHDTPWQTLSTDN

SEQ ID NO: 418043 - protein, 389 aa, unidentified
MLHDHPSDGPTAIRTHIAAIFVSLELSRSTWLVTSLSPGKGERMSRHSVTAGDMAGLLALFAELRRKAEVRMGQSYPIITLQEAGLDGFWLHRVLQQNGIESHVVDPASIAMPRRRRRAKTDRIDGETLLRTLLAYKRGEPRVCALVVAPSPEEEDRRRLCRERATLIAERITHVNRIKGLLFAQGISDYAPLRRERRARLETLRTGDGRELPSHLRTQIGRELDRIELLLEQIEAVETERDGLLAAARKPASEEAAPDAVTMLLALKGMGANFAAVLWSEAFYRQFANRRQVAAYAGLAATPWQSGGIRHEQGVSKAGNPRLRTTMIQLAWLWIRHQPQSALTRWFKERSPQGRKRAIVALARKLLVALWKYVTQGVVIEGAVMKPAA

SEQ ID NO: 418044 - protein, 385 aa, unidentified
MAKVVIGVDPHKRINAVVVLNSRAKVLARAQFVNDAQGFRELRRFSRQWRPRTWAIEGCNGVGKHVAQRLVAAGERVVDVSTRRAALVRVFAGGNGRKNDDTDAHSIALVGLHTPDLPEVHADDRRTALRLLSNRRRELIGQRTQCVNRLHRDLVGLLAGGAPRALTAKKARALLASVKPRDEIGRLRRQLAAELLAELVTLDKKVAAIEAELRAMVKLTPTGLLKIYGVGPVITALTLGEVGDVARFADRNHFASYNGTAPDDKGSAGSPAHCVNIKGNRKLNHAIHMIAITQIRNRKSPGRAYYDRKLAQSKTKKEALRALKRRISDVIYRQLVADARLAVGPGGQAGTTLTASVTDPTPTAGTSDKPQPGPNPNFTPLASTA

SEQ ID NO: 418045 - protein, 315 aa, unidentified
MTNLIKSKSIINVGVDVGKYFLDVHIHEKDLHFQVENNPAGIAVLLKRLSYYQVERLVMEATGRYQLMLAEAAFLKDLPVCIVKPLSVRRYAGAIEQIAKTDRLDAAVISEFAAVVRPRVTAARSKNLILIKDLISRRRQIMQIRTQELNRLQIMGKSLETSCKRIVRCLDAELKRIEGKLDQCIDQQTEWAEKRDILKSAPGIGDAMVYTLLADLPELGSMTSKQTAALVGVAPMNRDSGKLRGKRRIRGGRHDVRTILYMATLSAARCNPVIKDFYQRLVAQGKHKKVALTACMRKFITILNAMVRDNLEWQS

SEQ ID NO: 418046 - protein, 343 aa, unidentified
MQTVTTIGLDIAKSVFQVHGVDAAGQLVVRRKLKRRYILAFFQKLPPCLVGIEACASSHYWARELQALGHRVRLMPPIYVKPYVKRQKNDMADAEAICEAVTRANMRFVPIKTPEQQSGLVLHRTRHLLIRQQTAVINAIRAHLAELGIVAPVGRKGVEELLRVVAEGNDKRVPDVVRACLGALGTQLLSFKKQILELDRMIMVWYRSNETSRRLHYIPGVGPLLATALVANVADPGAFRSGRNFSAWIGLVPKQHSSGGKDRLRSISKQGDRYLRSLFVAGALSVIRYAKAHGSNHRPWLTALLARRPAKVAAIALANKLARMAWAMMAKGERYRNPVALAA

SEQ ID NO: 418047 - protein, 342 aa, unidentified
MTVMIGIDPHKASHTAVVIDNTECVLDELRVRACSKQTDQLRSWAAPFPDRVWAIESARGLGYLLAQQLVAAGEIVVDVPAVMSTRTRLLGSGKAQKNDPNDARSVAIAALRHDALGRVVLDDHARVLKLLVKRHRDLGRSKSRAACRLHALLMELEPGGMAKEMTVTRANEILDRIEPATQVTEHRLAVARETLADIVHYETQMKASMKRLRTAVAASGTSLVDIRGVGVVVAAMIIGQTGDISRFASAGHFASYNATAPIEASSGEKKRHRLNQRGNRQLNWAIHTAAVSQLRYPCEGREYYDRKRAEGKNTKEAIRALKRQLSNVIYRTLVADSRRLEQ

SEQ ID NO: 418048 - protein, 327 aa, unidentified
MYVCILDQDGAKLVHKNLPTAPEAFLLVIAPYREDLVVGVECMFTWYWLADLCQKEGIAFVLGHALYMKAIHGGKAKNDKIDAHKIAVLLRGGMFPQAYVYPSEMRATRDLLRRRCHLARKRAELLAHIHNTNSQYNLPEIGKRLANKSNREDVADHFPDPSVRKAIEVDVALIDHYDQLLGELELYLTRSAKTDDVQTFARLQSVPGIGQILALVLLYEIHDIRRFPRVQEFVSYCRLVKCAKESNGKRLGTSGKKIGNVHLRWAFAEAAVLFIRQSQPGKEYFAKLEHKHGKAKALTVLAHKLGRAVYYMLAREQAFDLKRFVAA

SEQ ID NO: 418049 - protein, 354 aa, unidentified
MDIKYIGMDVHKEAIAIAVMNGDGKLVMESILETKAVTILEFIQGLRGDLHVTFEEGTWAAWLYDLLKPHVRELVVCDPRKNALMKEGNKSDKIDARKLADLLRGGYLSSVYHGENGLRTLKELARSYLTISKDLTRVMNRVKALYRSWGILCGGQQVYAPRHRAEWLNKIGEAGVRRRAEFFYQQLDALCALRQAVRRDLLAESRKQSATKLLRQIPSIGPIRAALLIALIQTPHRFRTQRQLWTYSGLAIETRDSAQYRYVAGQLQRSKKPQQLRGLNQNHNHDMKAIFKSAATMASSREGAFQAFYQGLLMKGMEPAMARLTLARKIAAITLILRKKGAHFDAEQLKPQAA

SEQ ID NO: 418050 - protein, 366 aa, unidentified
MKKTNTVRVNGNMIFKGHKLTIGLDLGDRWSNYCVLDEAGEVLLEQKLATTPEAMKQTFERIPRSLIALETGTHSPWLSRLLKELGHEVLVAHAQKVELISKSNRKDDRHDARTLARLARIDPELLGPVRHRSAKAQIHLTVIRARAELVSARTALVNGARGLAKSYGERLPKCGTEQVSRELAAKLSAELREVLEPLLNEIESLNERIKEYDARMEKLARESYPQVALLKQVKGVGTQIALTYILTLDDPHRFAKSREVGCFLGLKPGRRDSGESQPQMHISKEGDRYLRTMLVQGAHYILGPFGEDSDLRRWGLRLAERGGKNAKKRAVVAVARKLAVLLHRLWVGGEVYEPLRNSHNAMRAAA

SEQ ID NO: 418051 - protein, 340 aa, unidentified
MEHHTEAFIGLDTSKLRNAVAVAEGGRNGQVYFVGEIDNTEAGLRKLVRKLESKYQRLHFCYEAGPSGYGLFRLTEELGHNCSVVAPSLIPRKAGDRVKTNRRDALNLAKLLRAGQLVGVWVPDERHEAMRDLVRAREAAHLDYRRNRQQVSSFLLRIGRHFPGKNTWGKAHLNWLARQKLDHCEQRIAFEELMLAVQQARERVERLEQAIRDSVPEWSLVPVVEALQALRGMRLISAVVFMSEIGDLSRFESPRQLMAFLGIVPSERSTGESVVRGRITKAGNRRARRILVEAAWSYRHPPRVSKDKQEKLETVPRTVREIAWKDDPQLRLCQGLGTRC

SEQ ID NO: 418052 - protein, 419 aa, unidentified
MKSTKTKKVRFINKKTMITTLDIGKRFHYAYFRAPNGKDIEPFIVYNFRKDFNKFWTKLCQFKREHKLEDIVIGFESSGPYAEPLFHYLRKKPVRLVQINPMHSKRLKELTGNSPNKTDKKDPRVIADVISLGHALTLIVPEGAAAQLRRLSQARERAMKRRTAALNQIQDLMFIIFPEFLFIMKNISTKTASYLVERYPTPEEVVTLGIESLGTIIKKISRGKLGRQRAEELFTAARKSIGVNDGKRSIVMEIEYLISQIGADNKFIANLEKQMEDYLEKIPYSISILSIKGIGIVTVAGLIGEVGDFKKFNTISEVMKLAGLDLYEISSGKHKGQRRISKRGRSLMRKLLYFAAINAVKSNGIMYEPYQKMLDRGTPKMKALIAISRKLLGLIFALARDNAVYVENHRRIHHIKLAA

SEQ ID NO: 418053 - protein, 388 aa, unidentified
MQVIADRPEAPSAIRTNLGAIFASLELSHSTWLITSLSPGSGEKMSKHVVHGGDIAGLLQRFAQLREKAVAQTGRNFPIIVIHEAGLDGFWIDRVLKNEGIESHVVDPASVATSRRRRRAKTDKIDGEALVRTLLAYKRGEPRVCAMVKAPTPEEEDRRRLCRERKVLITERVRHVNRIKGLLFSQGVCGYEPLHRNRRRRLDELRTGDGRPLPKHLKAQISRELDRLELLLEQIKAVETERDALLAAQQIAAPPSAAMLLAIKGIGPDFAAILWSEGLFRHFDNRRQIASYAGLAPTPWKSGSIDREQGVSKAGNPRLRTTLIQLAWLWLRHQPQSALALWFKERVVRNGGRLKKAAIVALARKLLVALWKYVAAGVVIEGAIMKAS

SEQ ID NO: 418054 - protein, 322 aa, unidentified
MAMLSFGGIDVSKDRLDVMVLPEEQCSSVSNDAAGWDKLIEQLRGSSIAAIGIEASGGYERGVMRALLAADLPVRQVNPFKLRQFARASGVLAKNDPLDARMIASFVAIMPTRPAQRQAPAAERLTEMLAVRRQLSAEKVAAENASRLLEDAMLQRLSRRRIARLGADIDLLDERMVEIVATDVALDRRYRLLSSMPGVGPVLACTLIALLPELGRMNRKQVAALVGVAPYAFESGTLKGRRCIWGGRAPVRQVLYMAAMSASNWNPGLKAFHDRLKAAGKLPKVAIVAVMRKMITTLNAMVRDDVIWADRLTGRHSVPTAR

SEQ ID NO: 418055 - protein, 419 aa, unidentified
MAFKILRKNCCGLDIHKTWIFACIGITDSNGRTEYKQARFSSFTKGLNELCDWLAKYNCKDVCMESTGKYWIPVFNILEQHNLWVTLSHPKYTKPMKGNKTDRKDAKWICDLYMCGMVKPSFIPSADIRELRDLVRYRIKLTNMLTGEKNRAQNCLTVSNLKLDEVFSDVFGKSSRSITEQILQHPGEAFDVAHFVHGRCKTPIEEIQAAVDGAISKEQAVKLRQCLDHIDELNKHISEIEQEILRLSDKYETALNLIRTVPGFDKNPLTAVQVLSEIGGDMSVFPTAKHLVSWAGCCPRNDQSNQKIKSTRISRAGSYFKPILVQVANALIKSKKHPEFTTRYKRIKARRGHKKAIIAICRMILTAIWHILSDLEPYTPEGFLESRPVKEEKVLSTSQALNLLKQRGYIIKDEPLAVS

SEQ ID NO: 418056 - protein, 355 aa, unidentified
MDSKKYIGMDVQKESISIAVRNDVGKIVMECVIETKANIILDFIHGLRGELHVTFEEGTWAAWLYDLLKPHVTELVVCDPRKNASMREGNQSDKIDALRLAELLRLNHLSPVYHGEHGLRRLKELVRSYLTITKDLGRVMTRVKAIYRSWGIPCTGKQVYAPRHRAEWLGKIGEPGVRRRAEFYYQQLDALRTLRQEVRRDLLAESKKHQAWKRLCQIPSIGPIRAAVLLGVLQTPHRFRTKRQLWTYSGFGIETQSSADHRSVNGQLQRVKKPSSIRGLNRNCNHDLKNLFKGAAIVASSKPGPFQEFYTALLSKGIRPEMARLTLARKIATIALIVWKRGASFDAQYLKPQTA

SEQ ID NO: 418057 - protein, 396 aa, unidentified
MNEFTGQSVDVGMHTSAAALGGALGAERYALYVGLDVHKDTVAVALAWPGRGEPQYYAEIANTSKALKKLVSGLNELTGGAEILWCYEAGPCGYVIYRELLGMGQLCEVVAPPEQQRVKTDRRDALKLARKLRAGELTRVWVPGVEQEAMRDFSRCREDFKAQQLKARQQLNAFVLRHGHHWARGKSRWTRAHWAWLEGLEFAHVWQHRVRVEYIEAVRAATERVEALERALLDEALPQWSLAPVVDSLIALRGIDRVAAVTLLAELGDISRFTNPRQLMGYLGLVPTVKDSGPRRGRHGAITRAGNGHARRILVEAAWAYRFPARRTPHLMRKARNASPEARTIAWAAQRRLCGRYRSLIEAGKIKNVVCVAVARELTGFIWDIVRREMPKLARD

SEQ ID NO: 418058 - protein, 348 aa, unidentified
MRFYKQPHAFYAGVDLHARSMFTHILDHAGATVFERDLPASPEAFLNAIAPFRAGLVVGVECMFAWYWLADLCEDEAIPFTLGHALYMKAIHGGKSKNDRIDAAKIAGLLRGGMFPMAYVYPRAKRATRDLLRRRCFFVNQRSQLIAHVVNTNSQYNHPPLTARLCYPGKRTEDFADRFADPATQLSVRADLKLIDHFDEQIDDIESVVQKTAKIDDPVSLAFMRTIPGIGKILSLVMLYEIDRAERFPEVGNFLSYARLVRCEHESAGKKKGYGGKKIGNAHLKWAFGEAACLMLRAMPEAKKWLARQERKRGKKKALSVLEAKIGRTVYHLMRKQQAFDARRFFAS

SEQ ID NO: 418059 - protein, 343 aa, unidentified
MKLSRVGIDLAKNVYQLHGVDRSGKTMLKRRLKRHQWLKVLLDNTEPGCVIGMEACASAHHWGRELQSRGYTVKLIPPQFVKPYVKSNKNDARDAEAICEAMSRPNMRFVTVKTVEQQDIQATHRIRAELITQRTAKANQIRGLVAEYGLVAPKQLSSLRAAIPCWLEDAENGLTGDFRALLQGVWEDLHLLDDRVGEMDQKIKQLADNNEDCVRLQQLRGVGPMIATAMVASMGDARQYHKSRQMAAAIGITPKQHSSGDRDRMLGISKRGDVYLRTLMIHGARSAVAAAKHKDDRLSRWVTNIANKKHPNVAAVALANKTARMAWAMLRHETDYDPDFALR

SEQ ID NO: 418060 - protein, 343 aa, unidentified
MSITMIGLDTAKSVFQIHGVNETGKVELKRKVRRGDLIAFFEKQERCTVVMEACGAAHHWARILTGLGHTVKLIAPEAVKPFVKKGKKNDAADAAAICEAASRPDARFVPVKTVGQQGILAVHTARALLVKQQTMLANAIRGLATEFGHVVPKGLHNLEPLVALVDADEAMPEQARQAVAELHKRFDELANGIQSCEAEIVKHARTDPTARRLATIPGIGPITASLIAATVVDISLFKSARQFAAWLGLVPRQHSTGGKTRLGRITKAGNKEIRKLLVLGATAMLGHAEGWHSATGGWLRNILERRPARLATVALANKMARIAWAVMTRNEVYRPAGGVAAKA

SEQ ID NO: 418061 - protein, 345 aa, unidentified
MKLYGGIDLHSNNCVIAIINEQGETLSCKRLNNNISVILSFLAPYKDKLAGLVVESTFNWYWLVDALMDAEFKLHLANPAAIQQYSGLKYADDHSDARWLAEMLRLNILPEGYIYPRELRAVHDLMRKRMDIVQQSTKNLLSVQSCYMRHLGYKLSSNKIKQMAAIRKGVDTEQVHADFSSMNTALSVISNLSLIRCAQQQINVIEGAILKQTSLSPEFINLSSIDGIGNTLALTIMLETGTIKRFDSPGNFSSYCRCVKGARYSNGKKKGATNQKNGNRYLAWAFTEAANFAIRYNPTVKKYYQRKLAKTNKVVAIKTVAHKLARACYHVLKDNVPFDEHKAFA

SEQ ID NO: 418062 - protein, 400 aa, unidentified
MRAVFGIDVSKTSSEVAILVNGEKVHGYTILNDAIGFNRLLGDLKTVHNPEIIFEATGVYSRRLQAFLEEYSYAYTRLNPLEAKKQLDSLRVRKTDKIDAEKLAKSQLVHNRKPTYVQEEVYQHLRDLSRFYQNMTEDLVRTKNRLHKVLQVTFPELENLISTPTGEQYWNLVMAFPCKEAVLSLSQSNLCEIIHQSTSKRISEKRIAYLTDKLIKLAKQSFCAVKKTSPMLEEVRYYAQELLRLSERRQVVLNDMVALAQPLPEYDILRSIPGIAETTATSIIGELGDIRRFQSSNQINAFIGIDLRHYESGNFLAKEHITKRGNPYARKILFKCIHNIASASHTNPCHIADFYEKRKRQSTIASTKPHTIASIHRLIRTMYYLITHNKLYDYSLTQNQ

SEQ ID NO: 418063 - protein, 343 aa, unidentified
MEGYAGKQFVGIDLHRRRTVIVRTTQGGEVLESVRIVNDVERLASVMARAGECPEVVLEATYGWYWAVDALQAGGASVHLAHPLGVKAFEYRRVKNDVRDAADLADLLRMGRLPEAWIAPPATRELRELVRHRAKLVGLRSHCKAEVHAVLAKCGVQVLMSDLFGVAGTALLDGLDLPAPYAARIASLRRLMDDLDFEVDLFAGMVRGRMAREPGYAAVQNIPGIGPTLGAVFVAEIGDITRFASAPKLTCWAGLTPKHHESDTHVRRGRITKQGSRLVRWAAIESVKTISATTPAGVLRERVADRRGRNIGSVAAARRQLEFVFYALRDGHVRALEHPPRVA

SEQ ID NO: 418064 - protein, 455 aa, unidentified
MQGCLTFFLSGCSDSFCLKGCVPLSQFLNDFVVGIDVSSEFSIVAMLAPTGELIRKPFRINHNPAGFHKLLDILKKEEERLNRKPIYFVESTGIFHLPLFFFLKSNDLKGFVLNPLCVHSTKNFDLRKVKNDNKDSEAIARLAKYQDIKVSMMPEPQILALRMMTREYYAVSDMLTEMKNRLCTDLYLLFPGFLNVFSGPFGKTALAVLRSYPSPSALREADTDVLTLLISKTSRKSSEWASNKVALLLDCAQLASSMPSEFSLLDTKIKFHIDGIEHMQTSLNGLEVQIKKMIGSKEFPAKARRNVELLDEIPGIGFLTAATLIAEIGDFSLFNSPKALTAFFGLDPSVNQSGKFNGDRNKISKRGTRIGRRILFTIAMASIRTTRNGKEINPVLREFYKSKCVSKKKKVALVAVMHKLLHYIFAVLRDQESFVIKRPEDHQTWRATKPQPAVA

SEQ ID NO: 418065 - protein, 395 aa, unidentified
MYTTFVGIDISKKTFDVCILDQSKIKPVHFKFNMDSDDFSELGLKLAEYEKQKVLIVMESTGSYHYTLLSFLLSHDFHVSVVNPYLINNFIKADTLRKTKNDKKDALAIANFAARSFDRIKLIDGDFLDSLKIIMRERECISQDIAKLKTEIKAIINYLFPELENVTNIFTQSNLEVLKVFPSAKSVKKYNLTKLGKELNKITLNKSRISAELLFDIASKSIGVDARFAEIKLVSKVERLLALMKELRKLDRIIEEEMSKNDDDDFTILSSVDGIGKSTSSSFIAEVGDIEKFDSPKQLIAFAGTDPSVKQSGTSIHSNGKITKRGNAHLRRTVWLMAVCVIRCNPYFKTYFLKKRNEGMKYKKAVIATANKLLRVLFALLKNRTPFVYPATAQP

SEQ ID NO: 418066 - protein, 344 aa, unidentified
MANLNQFCDFMNLIGIDIAKSVFQIYSCDTQTGEITNEQVKRDKVLESFANCGKCLIGMEACGSSQYWVRKLQALGHTVRLMDPKLVKPFVRHNKSDKADAEGVYHALVSGVRAVAVKTETERDIQTLLTMRALLVKQRTARINHVRGLLAEYGHVMLKSVDQFDKKVDESINSLEGDAVQLVIDTLRDTVKSIRDDQDRIKTLQREISRLANQTRNAKHFLTVPGVGNTIMAYMCVLLADPTQFSSGRQFAAYLGLVPMHTGSGGKTVTTKIPGRCDKALRALLVQGAHAVARSKCRTDWVKNILAKKPKKVAMVAIANRMARQCWAVATKGQDWRRMPVTAA

SEQ ID NO: 418067 - protein, 403 aa, unidentified
MNMNAVGIDVSKGKSMVAILRSYGEIISKPFEVKHTVSGIRSLIEQIQSIDGESRIVMEHTGRYYEPLVRELSKADLFVSAINPKLIKDFGDNSLRKVKSDKADAVKIARYTLDSWTELRQYSLMDEIRNQLKTMNRQFSFYTKHKTAMKNNLIGLIDQTYPGANTYFNSPVREDGCQKWVDFVDTYWHVDCVRKLSLNAFIDHYQKWCKRRKYNFSRSKAVEIYEASKELVSILPKDDLTKLIIKQAVEQLNTASQTVEQLRTMMNEAASKLPEYPVVMAMKGVGKSLGPQLMAEIGDVSRFTHKGAITAFAGVDPGVNESGSYEQKSVPASKRGSSTLRKTLFQVMDVLIKTKPQDDPVYLFMDKKRAQGKPYYVYMTAGANKFLRIYYGRVKEYLSSLPE

SEQ ID NO: 418068 - protein, 318 aa, unidentified
MRIIGLDIHRAFAEAVAWEEGKLKRLGRVDMRRELLTAFAEKLSLEDVVVVEATGNAAAVAAVIKPHVKKVVIANPAQVRIIAHAKIKTDTIDAGVLAQLYASGFLPEVWIPDEPTQALRRQVTRRNQIVRQRSRLKNIIQSILHGHLIPSCPHQDLCGPRGREWLAAQIVPEDERLAIERHLREFDRLGEDLKVIERDLARSALADEAVKRLMTIPGVDMVVALAMAAAIGDVGRFDSPQKLVSYLGLNPSVRQSGPGPAHHGRITKQGRGMPAACSWRQPGRPHEHPGRYEPSSCASKLGGISTWQPLRRLASWLS

SEQ ID NO: 418069 - protein, 386 aa, unidentified
MTQHPHVTASNGLDYDRTLILAVEISNRSWVVAAQVPGLRQKGAKQQLAPRADALMAAVEGYKRRAAAAGMAVDRVIVAYESGGSGFWLARWLQQRGVEVHVMQPSSVPVDRRMRRAKSDRIDADMLLRTLLAWLRGEPRVCSMVPVPDEATEDARRPIREREELIRARVAIVNRIAAVLTVLGAGEYNPLRRDCRERLGQLRTALDQPLPLHARAQIERLLDRLDLIRQQVADLEAQRDQAVEGDAAGQAERMIQRLARVRGIGVQTATVLVHEAFVRQFRNARALGSYAGLTGTPYSSGGTHREQGISKDGNRRLRATLVELAWMWLRYQPGCALSRWFHDRLGGSRGRLRKVMIVALARKLLIALWRYLQDGAVPQGMELKPV

SEQ ID NO: 418070 - protein, 465 aa, unidentified
MAARKPKGKRMSAQVVEDEDYQLRYERVAAVDVAKASGMVCLRLPPPEGRTRRTSRTWEVPATVPDIEAVAAELKAAGVQLVAMESTSDYWRIWWVVLEAAGLGPRLVNSSQAKNLPGRPKTDRLDAQWLARLAEMGLLRWSFVPPPEIRALRLYTRQLVNLTADRTRYWQRMEKLLESALCKLSAVVSGLAGSKSCRAMITAMINGARDPQELADMALGPMRDKRAALVRAFTGMQFGPEHACSAASYLRMITGLDGEIAALETRISDHLQAIPAAWGVDAGGVAGPAGCGPDAAVLPAIARLDEIPGVSAQIAAGLIAEIGLDMSVFPTPEALVSWCGLAPVPHQSGPRNGRGKKGHGDSYARRLAGQAGNGAARTDSFLGERHKRIRSRPGGGGWKKASVAVGRSIMIIVWHLLKDPSARYADLGAGHYTAHTDRNRKTRNAKRQLEALGYDVILTPRGEAA

SEQ ID NO: 418071 - protein, 414 aa, unidentified
MLKIVYRVCCGMDVHKSFVVACIASTNEQGVTAYKSKRFSTFTGDLRRCAAWLSENNCKDVCMESTGKYWIPIYNILESTCNIVLAHPKYVKAIRGKKTDKRDAKWIADIFKHDLVAGSFIPPADIRQLRDLFRYRWKLTSFTTGEKNRAQNCLTVSNFKLDDVFSDVFGKAASAITSCILENPAEKITDVSGFRTKGMKATNEQVLAAVDGEMCKEQAEKLRIIRSHMDSLELCKLNLESLILATAEKYLPQLNLVVTAPGIQSFAAIGIISEIGVDMSVFPTSKHLCSWAGLTPQNNESAGKKKTTRISRAGAYIKPLLVQCALNATRAKKFPEVRNRYLALKKRRGHKKAIIAIARMLLTAIYNMLKKNEPYNPELYRKDDRPPAHREVSVEEAIFILQRQGYLVTAPPPT

SEQ ID NO: 418072 - protein, 412 aa, unidentified
MKDLLEISCGLDVHKEKIVACILTGPLGKPTRSEIREFTTLIPDMIALRDWIVSQNCHHVAMESTGIYWMPIYEILEDAFSGDITLLVVNARHMKNVPGKKTDMRDSEWISTLLRAGLLNGSFIPEKRIREFRDLNRYRKSVIRDITSQKNRIEKFLQSSGFRLSSFISDIFGASGRNIILHLIEHGQIDKTALDSCLKTKTRNRIDEILMSVNGTLSEHQKAFLRILMTHYDSLKKHLAEIETSLEEDMAPFAPQVEQLNSIYGISTIASCAIIAEIGIDMEPFKTAEHICSWAGLCPGNNESAGKRKSTSVTKGNPYIKSMLCEIAWVIAGKRNTYLSAWYWRIKQKKGAKKAIVALARKLLVIIYTMLKQGTLFDESCFETRRKNCEQKQLSRYIRELEKHGYHVEAQS

SEQ ID NO: 418073 - protein, 402 aa, unidentified
MNKTDNMTIRQQKERAGGIDIHKDKTVVCFYIAGTTEEVKEYGTFTQDLEQIRDDFLSHNIREVIIESTGIYWIALCTVLTLARIEVTVVNPKFIKNMPKEKTDRKDAKWLCKLLVNGMVRKSFVASEEQRAFRDLCRMRSKYTNHITQAGNRMVKTLERRNIKLKSVASNTKSKSIKEIIAALAHGETDVDKLVKLCRGKLKKKEPEMRKALHGVLTPHDRLMMQDLLNDTAHYEQQIEKLNQRIKQHTDKVNEELINNIRVVSGVGAQSVEVLLAEVGSNVDVFPSEDHLAAWVGLAPGNRETGGKALPTGRRDGNVYLRTIMIQVAWAAVRTKNSYWRAMYYHLSKRINKGKAIIAVARKLIRLIYKIIKGTKTYTEYGADYFVQQLQQRYAKRRTQQA

SEQ ID NO: 418074 - protein, 320 aa, unidentified
MSEQQSRVEVVRFIGVDVSKDKLDVCVMPGGELHDFQNDAQGIEKLVALFKQLQPAAVVLEATGGYERPVLFAMQDAGLPVTLVNPRQVRDFARGLGQLAKTDRLDAAVLAEFARLVAPAPTEKTSEKQRELEALVVRRRQLVTLLVAEENRTHQAKDKFILQTLRRTSKAISREIRAVENRIAKLLESDDQWKAKLDILLSTPGVGQATGMTLLGELPELGKLNRQQIAALAGVAPYPHDSGKRRGQRSIWGGRRSLRCVLYMAALTARRCNPIIRKFAARLNAAGKSFKAVQVACIRKLLVILNTMVKNNTPWKFAAA

SEQ ID NO: 418075 - protein, 433 aa, unidentified
MPTEFAAMIAIDWADQKHAWAMQTETSKVETGTIDHTPEAIDVWAAELRMRFAGQSIAVALEQSRGSLVFMLTKYDHLVIFPVHPTILVNYRKSFRPSGAKDDPSDARLLLDILRLHREKLRRFNPDTPETRTLQFLVEERRKFVHEKTRYSNRLTAHLKMYFPQVLNWFDEIGSHIAVEFLERWPSLEKLQRARLATIERFFIDHNSRDPERIKGRLEQIRKAVPATTDAAVITSSSAAIVAWAGLLKQVLVAITAYDYQIDELASAHPDYALVKSFPGAGPAMAPRLIAALGSQRERYQSAAEIQRYSGIAPVVASSGKQHWVHWRWACPKFLRQTFHEWALHSIPYSSWARKYYEQQRAKGKRRNTAIRSLAFKWIRILFRCWRDRKPYNEAVYRRAITARQPNQQPAATTLEIQWKNVAGFKKISAVQA

SEQ ID NO: 418076 - protein, 313 aa, unidentified
MSQNNTSIFYVGLDVAKASLQLDLAGHPHSLTNDPKGHAQLLKLLREHPAAQIVCEATGGYEKAAVRVLHAAQVPASVVEAGRVRHFARALGQRAKTDLIDAPVLSAYGRAIQPPATPAPTAQQTRLAELSTRRLQLIETRIAASNRAEHYLEKLCVRQARQLFELLEKQIEQCDQAIIELIAADEKLQAQAQRLDAIPGVGAVTAATVLAEMPELGRLSDEAAAALVGVAPYNQDSGNKTGVRHIAGGRAGVRCALYMATLSAVRYDAILKAFYLKLLAAGKKPKVARVACMRKLIILMNRLLKNPKFQLAN

SEQ ID NO: 418077 - protein, 436 aa, unidentified
MKYSTKINQAELNDQNKRIAFITDEFLVVGIDVGSEAHYARAFSNRSVELSGKKAFRFTNSQGGFNSFGRWVEDILAKADKKYVLVGMEPTGHYWINFGNYIKDNGMILAQVNPAAVKKSKELDDNDPTKNDRKDPKVIAGLVNTGRYTLPYMPEGIYAELRELSNQRLMTVEQLTRIKNRLARWFSIYFPEFKEVYRNADAKTGIMVLKEYPLPEDLVTLGVEGINQIWRNHKVRGVGMKKAQQIYDAARKSIGRKAAPISARMELKNLLQDYETYTARKAEIMVMIEERLPQVSNVDKLLAMNGVGTATVVTFIAEVGDISRFSNPKQIQKLAGLSIVENSSGKHQGQYSISYRGRKRLRLALYELATSLVCNDESFAAIHRYYTTREKNQLKGMQSLIAVACKVIRVFYAILTKGIDYDGQKMTSDIVRLQAA

SEQ ID NO: 418078 - protein, 327 aa, unidentified
MNLSVAVLGVDIAKLKFDVCLIKENGKAKHKVFTNTTHGFEQLVVWLASHQAGSLHICLEATGSYGEALALYLFDAGFIVSVVNPAQVKAFAASRLTRTKTDKVDAELIARFCLAHEPQTWQPPAPEVRGLQALVRRLESLIEMRVAEENRLSSGVSIETVRHSLEEHIAYLVAEIKQTETLIREHINNHPGLKEQSDLLNSIPGIGATTAALLLAEITDFTQYKSAGQVAAYAGLVPRERRSGSSVRGRTCLSKIGNARLRKALYFPAMTALRCSSFFQAWASGMRERGKSKMAVIGAAMRKLIHLAYGVLKTGKPFDPQWTTKTA

SEQ ID NO: 418079 - protein, 375 aa, unidentified
MTGVDSRHRPRRDRKPAVASESKPRMSLELRSLVPYPNSCLGTSPHQQERDTKMATVSFCGIDVAKDRLDVVVLPEQRCWSVCNDAAGWAELAKQLGSFSIAAIGLEASGGYERGVMRVLLAADMPVHQINPFKLRQFAKASGVLAKSDRLDARVIASFIAIMPTRRAQRPSPAIERLTEILSVRRQLTDQKIAAQNASAMLQDAMLLRLSRRRIGRLAADIEMLDRSLVEIVRTDAALAHRYRLLTSMPGVGPVLACTLIALLPELGSMSRKQVAALVGVAPYTFESGKLKGKRCIWGGRAPVRHVLYLAAMSASNWNPVLKAFHSRLKIAGKLHKVAIVAVMRKMITMLNAMVRDDVAWAGHLGGRQILPTAR

SEQ ID NO: 418080 - protein, 357 aa, unidentified
MSKSTTDFSSVIRVGLDLAKHVFQVHAIDAAGAVVVAKAVRRGKLLEFFTALPRCVVAMEACSTAHHWGRALNALGFDVRLIPPAHVKPYVRRNKNDAADAAAICEAAGRPGQRFVGVRSIDNQAQLMRHRTRELLVGQRTQLFNALRGHLAEIGVIAPQGPQHAYALKELLADGADGNGEIVVPESVRAALAPLGRLIDELDARIAAIDKELKKQVKADATARRLMSIPGVGPIIASAVLASVQEIGAFGSAREFAAFLGLTPRQNSSGGKERLGSITKMGDRYLRKLLVSGACSVLFRRKGHNDALRHWADQLLTRKSGSTKFKLVAVALANKLARIIFAILTRGEKYEPRPVAA

SEQ ID NO: 418081 - protein, 391 aa, unidentified
MKSSHRIDTPAAGAKDGRLYVAFELSKSKWLIGILLSGESKLSRHLVPGGDTAAVLQLISKKRVQGEKKLGGPVRVVSCYEAGFDGFWLDRWLGEQGIENRVLDPSSIEMPRRARQAKTDRLDLERLMRVLIRHDGGEPRVCSVVHPPSPEQEDARRLSRERERLIGERTAHGNRIKGLLHGQGVRDVEPRRKDFHERLARARTGDGRALPDRLVAEILREHVRLKLIAEQIAEVEGQMKAEREAAAPDSRAARVNQLIELKSVGEVGGEGLVNEAFWRDFHNRRQVGAYFGLAGTPFDSGQSTREQGISKSGNGRARTLAIQLSWLWLRHQPDSALSRWYKERVGDQKGRVKRIAIVALARKLMVALWRYLTQGLVPENAIVRAAAPAGR

SEQ ID NO: 418082 - protein, 337 aa, unidentified
MSQASSSPSPSSSTPRFVGIDVAKATLDLAVRTDGQAEGEPWQVANTSEGHAQVVSQVAVLAPALVVLEATGGYEVAVVAALAAAELPVVVVNPRQVRQFAQATGRLAKTDRLDAQMLAHFAEAVHPTPRPVPDAQSRELTALVARRRQLVQMRVAESNRLTPTTSGRVQQQITAHLDWLDAQLASLDDELREQVRTSPLWRERDDLLQSVPGVGPVLSCTLLAHLPELGTLSAKQLAALVGVAPLNDDSGRLRGRRLVWGGRAAVRAVLYMATVRATRCNPVVQTFYERLRAAGKAPKVAYVACMHKLLTILNAVLRHRTPWAPASPPAHRAPVLA

SEQ ID NO: 418083 - protein, 335 aa, unidentified
MKKIHVGIDISKEKCNLCYRSCLEIVREEECSNDVKALKKAFKAALKVLGASFEDVLVCAEYTGRYIYPLTVACQELDIFLWMDDPTRIKNSMGLTRGKNDAIDAARIAEYAFRYSDKAVRYAIPDAAMVSMKNLLADREFLLVDKKRYQSQLTDQKKYMAPGDFKHKNSRWKKVIKSIDEQIAAIDAEIESLIATDPVLARQKELLVSIDGIGDRIAINMIAITGGFTRFQNARQFCSFAGLTPYKYDSGTSVRSKAKISKRANQTMKALLHMSAVNVATRMKAGEYKDYYERKLKEGKHVMCILNVLRAKLVHRMFSVIKRDTEYTKEYKPAC

SEQ ID NO: 418084 - protein, 321 aa, unidentified
MNTTMPLGIDVSKAKLDCALWLGSKYRTKTFANTPEGFSRLSEWLHQHGADQVHACMEATGIYWEAAALYLADAGQRVSVINPALAKAHGQSLGLRSKTDAVDAKLLADFCREKQPPAWTPPSGAERRLRALVLRHQSLVEMQTQEKNRCESLREEVRTSVETHLAWLAAELERIEQAIAKLLDDDDHLRGQRELLASIPGLGERTIAVLLAYGVSGERFQSARQFVAFAGLSPRLHESGSSVRGKPRLSKIGHACLRRALYMPAMVTLYKTAWGQRFRQRLVTHGKPPKLIIGAMMRKLAQVAFGVIKSGRPFNPAFHGA

SEQ ID NO: 418085 - protein, 447 aa, unidentified
MNMSTTKHDTDKSSSAVAAPGPASEPHFAAFIAIDWGDEKHAVALRVAGQTQTEHTTLEQKPQALTEWIAGLRQRFAGGTVAVILEQKRGALLYALQPHEHLVIYPVNPQMSAKFRQAFYPSGAKDDPTDADLQLDILLHHRDRLTAWRPDDATTRQLSLLVEGRRRFVADQVRVTNRLRDALKSYFPQALELAGEDLTSLMACAFLQKWPSLAALQQVKPAALRKFYYAHHSRSEELIAQRLKLQAQAQPLTIDAAIIAAQSLLVQSLAQELATLNPVLARYEKQIAQLFATHTDFALWDSFPGAGPALGPRLAVAWGTQRDRFPDPQAMPCFSGIAPVKEASGKQLWIHVRWACPKFLRQTFHEMAKCSLKGCAWALCYYQMQIERGKGHHAAIRALAFKWQRIMWRCWQDHLPYDDAKYVASLKRSARDLYARLSAAPAKERCE

SEQ ID NO: 418086 - protein, 354 aa, unidentified
METTRQALMNDTSVVRILYMALELSGDKWKVAIADGQRAPSQRSIAAGDTSELLQVVEKAKTRCRLPGVVRVLSCYEAGRDGFWLHRWLLEQGIENVVVDSSSIEVNRRARRAKSDRLDAAKLYEMRIRHSVGEKRLWRVVRVPSVQQEDERRVHRELERLKRERNAHINRMRSLAVLHNVRLGKVGGRGWSERLPQLKEQLPAGLWAEIERESVREQLVCQQMHTLEKSRQEQVKHMSAGPLVALLKLRGIGLTSAWLLTRELFGWRGFGNRRQLAGCAGLNPSPYDSGDCQREQGISKAGNRRVRALLVELAWYWLRYQARSALSAWFTRRFAAGGKRACGASASWPWRGGC

SEQ ID NO: 418087 - protein, 334 aa, unidentified
MKKRYFMGIDVAKATFDFCLLSSAGACLWHGRFCNDARGIERFLAQLRARSWKLSQIHFALEATGVYGKALVAALHRADLAVSVLNPAQVKYFAFSVLRRTKNDTVDAEIIARFCRERKPLATRPLRPIEEQLKVLVHERESRVGEQTRERNRAKKDPFQIELPSLISRQRQQRLKQLAKEIAQLDAAIDSLIASDECLRTQSQLLCSIPGIAELTAAKLLSELAGKEFQSARQLAAYAGLTPAEFRSGYFLYGKTHLSKIGNAFLRKALYLPAAVARRWCKPLKPWIAILESRKLHDLAIRGAIMRKLLHIAFGILKHQKPFNPLLLSFPKTV

SEQ ID NO: 418088 - protein, 386 aa, unidentified
MHQATTLPAPQRTCSRGDCATLFVSLELSRSTWVATALAPGSNKMSKYTLVGGDGHKLLDLLARLKSRAEQRIAAPVKVVTIHEVGLDGFWIHRLLEANGVESHVVDPASIAVPRRHRRAKTDTIDGETLLRTLMAWQRGEPRVCAMTVPPSPSEEDRRRISRERAKLLQERVRHTNRIRGLLFGQGITNYNPLHKNRRKNLEQLRTGDGRSVPAHLKSAILREIDRLELVLRQISEVETERDEMLQLAQPSSPAALLMRLKGIGAEFATVLYLEGLFRRFDNRRQLAAYAGLTPSPWKSGSIDQEQGISKAGNPRLRTTMVELAWMWVRYQPASALSCWFRQRVGSKRGRIRRISIVALARKLLIALARYLSHGEIPAGAVMTAG

SEQ ID NO: 418089 - protein, 468 aa, unidentified
MSSAIGIDPDSTGFVCALVRDSKAQVITRRFSVSGHGLSEFLGWVSDQGKPIVGIEGTHGQSRPLEKALREAEVIFHSFKPADTERFRKAVLGQNKNNERDAESVARYALALEAQGKLEQYRRVWDADMELQLLTRRYESISMQLTGEVNRLWKLLREACPDLYLLLGGKNGEDEKRGKVLKNQGILTLLISKADIGEWKDLSQAQMLEAMGGGNYKGRGELIAELQEGAASFPSLSAGIALVIRGSAQQIQHFKGEQSELVRMLEGLTEGNLAVQCLKGHRGIATLTAAKMIAEIIDIRRFAHEDSLACYSGLAMREHTTGNTTMMVPTRLFNHRLKDAFMTAARNAVLYDGDSHLAGYHRNLVKAGMRPLEATKRVARALVRVIFRELSALNESKANDVAQEESKEGEGDMASGVTRGDQGRQSNMSPSSRRSTKSKKTKKVKKVKAQGTRKEGARNKQAATKKTA

SEQ ID NO: 418090 - protein, 335 aa, unidentified
MKKIHVGIDISKEKCNLCYRRGLEIVCEEECANDVKTLKKAFKATMKALDASMDDVLICAEYTGRYIYPLTVACQELDVFLWMDDPTRIKNSMGLTRGKNDAIDAARIAEYAFRYSDKAVRYAIPDAALVSMKNLLADREFLLVDKKRYQSQLNDQKKYMAPGDFKHKNSRWKKIIKSLDEQIAAIDAEIESLIAADPVLARQKELLVSIDGIGDRIAINMIAITGGFTRFQNARQFCSFAGLTPYRYDSGTSVRSKAKISKRANQTMKALLHMSAVNVATRMKAGEYKDYYERKLKEGKHVMCILNVLRAKLVHRMFSVIKRDTEYTKEYKPAC

SEQ ID NO: 418091 - protein, 408 aa, unidentified
MERMVERSCGLDVHKKTVTACVRAPGAGGGQGQEVRTFGTTTAELLLLRDWLEAHAVTAVAMESTGVYWKPVFYVLEDRFRCVLANAGQIAQVPGRKTDVQDCIWIAQLLEHGLIRSSFVPPRPIRELRDLTRYRKAIIEDRTREVNRLHKVLEDAGIKLAAVASNILGTSGRDMLQALGAGTTDPETLAQLARGALRKKLPALRQALTGRFRPHHAALLTHVLAHVEYLDEAIAQVSGGIDEALRPFAEAMTALDSIPGVSRRTAEVLLAETGGDMAVFPSARHLASWAGLCPGQHESAGKRRSGKPRQGNRWLRATLLEAAWAATRTDTALAARYRRVMRRRGHKKAIIAVAHAMLVIAYHVLHDRTTYRELGPTYDEQRQATRARRRAIHTLEAQGYRVVLEPAA

SEQ ID NO: 418092 - protein, 369 aa, unidentified
MLAAFATFVGVDLHKCTVSLAAVNARGELIDRLTVSTKCTDRIEAWLRALPGPVHLAVETNGFIEWFIDRFRPCVARLDIADARLLANLRGKRRKNDRNDALDFAQRLARGECPLGYIADEQVVRLRKLGRHWRRLSRTLSKAKHGMKSILNAANLRGPKLDGGSAQKWLLAHGQNLKAEDRQAFADLLDVVQLIERQRAVLRMKIIELNRHERFAGGMAILQSVPGIAEVWGCIIAAEVGDFKRFPHADALEFWAGITPDNKESAGRTTSGHITKAGSPTLRWALCNAALCLCRSDGRQEKTRQRLIQRIGKPRANVAMGRRLLRILYAMMRDGATYQIGEATHHTAKANKIRLDGKRRDVPPGRKAA

SEQ ID NO: 418093 - protein, 398 aa, unidentified
MSRIWAGIDSGKGHHHGLALDADGRTRLSRRVANDEPELLNLIAVVLALADGEPVTWAIDMTGGEPALLLSLLISHGQEVLYLPGRLVNRASDGYRGEGKTDARDAFVIADQARMRRDLRPIRPGDEAAIELKLLTGRRADLVEDRTRAVNRLRGTLLSMFPALERALDVTNVGPLKLLTEYQTPAAIRRAGVTRLTKWLANRKVRNARALAEAAVEAAQRQHTVIPGEKTIARLVHTLAEGVMALNEQIAEMDKLIEGRFREHKLAEIVESVPGIGTVLGAEFLAAVGGNLDDFATPDALAAFAGVAPAPKDSGKVHGNLHRPVAYHRRLQRVFYTSALVSIRCDPNSRAFYDRKRAEGKKHVQAVLALARRRVNVLWALIRDRRCYHVTPPVTETA

SEQ ID NO: 418094 - protein, 382 aa, unidentified
MQTIDAINPTILLAIELSASTWLVAARVPGLEKPHLHRIDGGDTAALLAWISSLQARAARGLDATIGVVCCFEAGRDGFWLHRLLTAHGVVCHVLEPTSILVNRRARRAKTDRLDAEGMLRVLAAYLRGDHQACSMVRVPTPEEEDAKRTHREREKLVQERLRIENRIEALLFTQGIRKRPSLSSWERDLAVLRTGDGREIPRHLRAELDRLRRRLVMTLELIREVEAERDQAAKTKPQDRACHKIAALSRIRGIGENFAAVLTREVFYRSFDNRRQIASYVGITPMPYQSGGMDRDRRISRAGNPRARTTMIQLAWLWLRYQPGSELAEWFRERVGTLAGRTRRIAIVAMARKLLIALWRYAETGVIPAGAEIRAEITVAA

SEQ ID NO: 418095 - protein, 337 aa, unidentified
MAIMRIGLDTAKHVFQVHGVDENEQPMLRRQLRRGEIAKFFSKLPATRIGLEACGASHHWARVLRGLGHEVVLIAPQYIKPYLKRGKNDALDAAAICEAMSRPSMRFVAIKSAERQAALMLLSTRELLVKQRTMLSNAMRGHAAEFGVVAAQGPVKLSELLQRVHATEAGVPGLAREILTLMARQRDALEAELKKLEARLKEWHKADPLSRCLATQPGIGPIGAVSFSLKVTDPQGFRSARHFAAWLGITPKEASTGGRHRPGRISRQGDEALRKLLVLGATARIRFTKASSASPWLLNLLARKPKKLAAVALANKMARILWAMMVSGQTYRNHSEA

SEQ ID NO: 418096 - protein, 332 aa, unidentified
MKYVGIDVSQDHLDFALLNSEGDHVESVQVRNEERAITRLVKNWIKKGKLDLSQSLFCLEPTGHYSHLLLTVLVGLQAPVWLAHPMNIKQGMGMARGKSDEIDAVRIAQYARRFRDQARMFTADHLRMGKLKQLLMKRRQLVEGKVKLKIQLGNVNRHMHKDLRSSFNRFDKAQMRTIDRLIKKVEVMIEAEIKADPKVKRQYDLISSVPGVGPVLASNLLALTDAFTRFATPRQLACHAGAAPFESTSGSSVRGRTRTSKKANSWLKSLLHMASIVAIRHDEQLGAYYRRKVAEGKPKLCVINAVRGKIIHRVCAVLRKDHPYETRPLLMS

SEQ ID NO: 418097 - protein, 346 aa, unidentified
MSHYVGLDVSVKSVSICVVDASGAVLARGETTSDPDEIAAFIEEHACDPDRVVHESGILAIWLTRELEKRGLPVICIDARLAHKALSGRINKSDPGDAEGLAHLARTGWFSRVHIRSEASERVRVLIGTRERLIRIRKDLEAHVRGVLKVFGICMGSVGRTNMRQRFRDQLAKAGQTDLAISVMADMFNPIHKAVCAATEAMDDELKAIARESGLARRLMTVPGVGPVVALSFIATLDDAGRFQRAKDVGAFLGLTPRRHQSGDMDWSGRISKCGDRDLRRLLYSAATTLITQVRKPSPLRTWATRLQERKGFKKAAVAASRKLAVVMMCIWRDGTVFEPTREAVA

SEQ ID NO: 418098 - protein, 577 aa, unidentified
MNPNHVASSLTPIGVGFDTARYGHHVTFLREDLQPATTPCEVTESREGYQLLEQKFQQLAQRIPNVLFCIRIDAAGQYASNLETFLRQLPFPKTISVGEPARNQKYRQAIFPKCKSDPAESHCAGRFALREDPKPAPEVPADLIALREIASRLDAQTRQSTRLANQLHNLMARVFPELATLASDFQAHWVLRLLDQYPTPLQLARARQSSLTDIPHLTADKAQKLQTAARSSVGGFRGTVAEELVRMLVGQLRRSGQEADDLRNLLVKVHQALPQSNQIDTIPGIGAGTAAVLTAKMISIDRFETPDQLVGYFGIFPEKDTSGLDKDGKPKPGCHHSHMCKKGSDLARKYLWNAAKVACQHNPAVRALYRRLRARGRRGDVALGHCMRKLLHLVWAVWKSGKAFDPNHYPWEPASAPLGNTEAAGHNQGTSPERKVVTAADSTVSSEAPALNAPNPTAPENALAAADNAWVDFALLREQVTIEQVLAHLGWLSCLRGSGPQRRGPCPVHGTSADRVRSFSVHLQKNAFQCFHPPCASHGNVIDLWAAVHRLPLLEAAHHLTATFNLRTTRQTEKRNP

SEQ ID NO: 418099 - protein, 402 aa, unidentified
MPNIEIGVDFMVKENFIYVGIDLHKETHTAVMIDCYNQKLGEITFPNRPADFPKLVTKVKKCNTDAKEVVYGLENAYGYGRPLAVWLIDKGYFVKDVNTAISHRQAKHRGAMYRKSDSDDAEASALATLNMLDKLPDACPNDAYWSLGQLVHRRDNIMKQRTRLVNQLHEQLCIAYPSYKSFFNDISRPTALYFWEHYPSKKYLKGKSVEDLRAELVPVSHNKCSTKTCEKILDAVASDKVKNNAYQDARDMVTLSIVSDLQHYDSQLTEVDKMLEQMYKMLGCTLTTIPGVNVITAVKILAEIGDIKRFANANKLAQFAGIAPLHLSSSGKGKDVATKQGNRRLQATIYFLAIQMVQLSSKGTPRNPVVRAYYEKRKAEGKTSQQALICISRRLISIIYGM

SEQ ID NO: 418100 - protein, 429 aa, unidentified
MTSDVSTTAPKVHVAIDVAKLTHQVLMELPNGKRRVIRVANTKADLDRLIAMLRALDHPCEVAFEPTGDYHRPLAYVLAQAGCRIRFVSSLAVARTREALYNTWDKNDPKDAQVILHLLKHGTTQPYVDPFLSGYQDLQELANTYQQVSLRKVRLQHSLVTHYLPLYFPEAERYLHSSRAEWFTDLLLFTPCPAAVRRYSKTAFIAAATAQVAGRKVDKARWLADFYETAGGSVGVPVAPDSEAMRMFRVVLEEFRALCQRRRELEAAIVTRLQDQRDFVRLQTVPGIGPILALIILAEARDLRRFGCVRQFLKYCGLDLCTEQSGQFRGTTHLSKRGNARLRYAFWMAGTVAIRMRQNSFRRKFESYIRPDPANPDRRRKAYTAVAAKMARVVYTLIKTGTDYRRFPEATRPGGRIPSLGAVEAQATS

SEQ ID NO: 418101 - protein, 376 aa, unidentified
MKIQKYVGLDVHKDKTTVAIAEGDRTGEIRAYGEISSDLVTTEKALRKIKGEHGVLHVAYEAGPTGFVLYRRLQQLGFECIVVAPSRTPQPKGGRQKTNRRDALQLARLHRAGELTGIHVPDAVDESVRDLTRARSDAARDLKRAKQQLKSFLLRQGLHYQGKANWSEAHQRYLRELTLPLPALKSVLEENLLAVTAATERVARHEELLAAQVPQWRMYPAVQALMCLRGFQLVAAAMLVSELNDVRRFAHPRGLMAFIGLVPREDSTGDTRHLGAITKAGNAQARWILVEAVQHALNPPKVSAALALRQKDQPTAYRAIAWKAQVRLHKRGWHLLRRGVMKPKVNVALARELAGFVWDLLRQVPLHKDSAPRPPQ

SEQ ID NO: 418102 - protein, 358 aa, unidentified
MKIIGCDLHARQQTIAMVDTETGEFTEKTLSHEGNAVREFYAALEGPVVVGIEATGAMQWFLELLEELSIECRVGHPAKIRAAETRKQKHDRRDAHLLLDLLVMKDRFPKIWMPSTEQRDLRTLLRDRHQWVKMRARLQHTLQSIALNHALRQGRALWSTAGQSALQALPLPPYSSQRRTALLRLYVQLQKRIQALDKEVEVQARQRPHACRLLTHPGVGAVTALATEVFLGDPNRFATGNQVASYIGMIPCEHSSGKRQRLGKLSKEGNSLLRYLWTEATMHAVGKDPELKRFYRRKLIQKGMGKARIAAARKLGIRLWIMMRDQIDYEEFCRRGILRQKGKAHAGMPDYNSGPALQ

SEQ ID NO: 418103 - protein, 338 aa, unidentified
MIAVGVDTHKEQHFAVAVDGLGQVLAELIITANLVGYRKLVGWLARLEGQVPVGIEGAGSYGAGLCEHLQSEGIEVFEVERPRRRERRSGKSDKLDALLAAKKVLSGDGLSTPRGSGTRVALQMLLVAYRSVIGERSRLYNQLQAIHVSAPGALRERIGPSRNGAKLAERLTGMRSRPTASLQENTTLQVLRDIANRIRALDTQAASYRHEIEELVRSLAPTLLDEPGVGPICAGKLIAFNPARFTSEAAFARANGTAPQPASSGKTVRHRLSRGGDRQINAAIYTIALSRSVHHAASRDYMQRRIDEGKTKREAMRSLKRYLSRHLYNQLTKTPLTT

SEQ ID NO: 418104 - protein, 349 aa, unidentified
MKIIGCDFHPGYQQIAVLDLATGETEEKALSHERKEEVRAFYAGLKGSVRVGIEASGQSQWFERMLAEFGHEVWIGDAAKIRASCERKQKTDRRDAELLLRLLAEDRFPRIWVPTAAERDGRQLLLHRHKLVQMRTQVKNQLQALALNQGVQRKWKLWSKAGRKQLESLPLLPWANRRRAELLQLFDQLEASLAELDRAVAEQAYARPEARRLMTHPGVGPVTALAFTLTMGPAERFQRGKQIASYLGLIPSEYSSGGGKQRLGHISKQGSPFLRGLLVEAAQSAVRHEPEMRRAYQRLAQRKCRALAKVAMARKLAVRLYWMLRLQVNYAQLIQGSHAGQPGTFRGRG

SEQ ID NO: 418105 - protein, 407 aa, unidentified
MLIIGLDIHRAFAEAVAWEEGRLRRLGRVDMRRDLLAAFAAKLSPNDVGVIEATGNATSAAAVVAPHVKKVGIANPKQVFIVAYAKIKTTIDADVLAQLYASGFLPEVWIADEPTQALRRQVTRRNQIVRQRSRLKSVIQSILHSHLIPSCPHADLCGAKGRTWLIEQVVPQDERLAIDGHLREFDRLGEDLQVIERDLVRSALEDEGVKRLMTIPGVDITVALAMKAAIGDVSRFDDPQKLVTYLGLNPSVRQSGQVRPTMGGSPSKAVVMRAACSSRRPGRPLVLPDRCEPSPCGVRARRGQHVAAVATARKLSVVIWHLLRRARVTRGLDPPCMPRSLRDVELKAGSKAVRGQKGAHAYNIKSHREEERRWVEQAEGAYARLVAGWNPRGPKRVGTDAANEARR

SEQ ID NO: 418106 - protein, 411 aa, unidentified
MNYKIAGIDIHKKVLMVVVTDAAAEEETWESRRFGTGANEREHLVAWLQDGGVQQVVMESTAQYWKPIWLDLEPHFEQLHLAQAHSNRAPKGRKHDFADAQRLTRRLIAGELILSFVPDSEQRGWRAITRAKVQLVRDRVRLQSQLEALLEETRIKLSSVISELLGLSGQRILRALAEGQNDPVELAKLGDRRLRCSQEELADALRGQWQPLHRQVLRLFLERLDVLDRQMQELDEMAAAAMQPYEDAVIRLAEVPGFGPDSAQQTIAEVGAQAKSFDSAAQFASWAGLCPGREESAEHNHSSRSPKGNKFLRRILTQAAQAAVKKKGSHFQIAFRRWIPKLGYPATIWAIAHKLARLVWKILHDQVHYIERGQESDPGVHRRRANKMVRALRQMGYKVEISSLNPQPAQP

SEQ ID NO: 418107 - protein, 415 aa, unidentified
MALKIVYKICCGIDVHKTFVVACIASTNDKGVTSYESHRFSTYTSGLKTLLQWLLDRNCKDVCMESTGKYWIPVYNILEKGCSIVLAHPKYVKAIRGKKTDKKDAKWIADLFKHNLVAGSFMPPSDIRQLRDLMRYRFKLTCFKSSEKNRLQNCLTVSNIQLGNVVSDTFGKSAQAILDKILENPADTSFDLEPLVFKSLKKKLPELRDAIDGYITPEQAGKLKVIKTHYEDLESRKAELEELILALAAPYQQELAILQTSPGISSDFTAIGIISEIGTNMEAFPSAKHLCSWAGLTPTNNESAGKKKSVRVSKAGCYIKPLLVQCANAVIKSTKHPEMRNRYLRLKKRRGHKKAIIAIARMLLTALYHMLKNGENYNPELYRKTDLPPAGREITIEQALMLIRNQGYKIKSATT

SEQ ID NO: 418108 - protein, 344 aa, unidentified
MIVIGIDAHKRTHTAVVADQNGSQLSTRTIRTTSKDHLALLRWGAEQCDDRMWAVEDCRHLSRRLERDLLAAGERVVRVPPKLMANVRDGARTYGKSDPIDALAVARAALREPNLPEARLDGMEREVRLLVDHRDDLVAERTRIIGRLRWHLHELDPGWTPPKRLDRASAYDKIEAFLSELSGLVSDLATRLVDHLRRLTVEIKELATEITTRITVLAPSLLAIPGCAPLTAAKLIGETAGVDRFRSKDAFARHNGTAPLPVWSSNRARHRLSRTGNRRLNAAIHIIALTQAHCHDDARALLSRRKANGDGGMEALRILKRRLSDVVYRAMLADRPLMGSATAA

SEQ ID NO: 418109 - protein, 331 aa, unidentified
MSCRFYLGIDVAKAKLDCLLLDMSNAKRKSKSIVNSPDGVAALLSWLNKQEVAIQDVQVIMEPTGVYHERALFALAQAGLAVSLVNPAQLRKFAQGIGVKTKTDAADSAVLARYGAANHPPAWQPPSASARELRALLARRDAVAEDLQRERNRTEKAATAIDTPERVKQSLNEAITFLQKELAELQRTIDQHIDNDPELRRIWTLLHSIPGVGERVAGHMTALLAARQFQTAEQLAAYLGLVPVEWQSGSSIHGRARMSKAGPAHLRALLYMPAVVAKTYNPHIRALYERLLAKGKPKMSAIGAAMRKLAHLCFGVVHSGQPYDANWAIKA

SEQ ID NO: 418110 - protein, 346 aa, unidentified
MSRMKKGDNTMQVVRIGLDIAKSSFQVHGVDAHGKVVLRKQLTRGKVLGYFAQLPPCLVGLEACGGAHYGARELGKLGHDVRLMAVALIQPYRTNQKNDQNDAEAICAAVSRPRTRFVPVKSEAQQAVLTVHRARELLVTERTALANQIRGLLLEYGVVIAQGIQRLRRELPELVTTETLPTLVRDVVAELRERRLELDRRITEYDRRIEQLAKQNEAASRLMQVEGVGPVTATALVALIGDVHAFQHVRQFAAWLGLVPKQHSTGGKTMLGRITKHGNVYLRTLLSHGARAVLQFSANRRDQKSRWVEAVRQRRGNNIAAVALAAKHARILWALLAHGQEYQLAA

SEQ ID NO: 418111 - protein, 418 aa, unidentified
MQMELSQFTAIIGIDWADKKHDICIQATDTGQRKTYQIQHKADKIDEWARSLHRQYGGPIAVALELSKGPLVSALQKYDFFVIFPIDPTTLANHRKTFTLSGAKDDPTDAEYALDLLLKHTEHFKALNPQSVEMRTLMTLVEQRRRLMNDRVRITNRLRNALKQYYPQALEWFDRIDTLLFCDFIKRWPSLVQVRRARKATLEKFFREHNMNRRALLESRIQAIKSAMPLTTDEAVIVPYRLQALTLVAQLEVVLKSIRIYDEEIAALAPQHPDYGLFNTLPGAGPSLAPRLLVAFGEQRERFASAAEVQKYGGIAPVTERSGQKSWIHWRWQCPTFLRQTFVEWAAQTINKSYWAGLYYYQQRAKGCSHQAAVRALAFKWIRILYRCWVTRTPYDEAKYLKALQERGSPLLKIAEAA

SEQ ID NO: 418112 - protein, 389 aa, unidentified
MTGQTDFTVKAEPEDFNNTLFLAMELSRATWLVATFAPRLGDKINVHAIPGGDTKRLLELIGRLQVKLRGKGVSRVRTVCCYEAGYDGFWLHRVLVNHGVENHVLDAASLPIDRRAKHIKTDNIDAKRLLRAIVGFVQGDPQSCRVVRAPTPEEEDARRLHRERQRLVRERTGHLNRIKALLITHGIRALRITDAKWCERLDKMQTGDGRPIPVRLKIEIEREWKRLKMVAEQVREVEAERDRLVKGSESSGDACTEKMRRLVKLHGIGAEFATVLTREVFYRPFQNRRQVASYVGLTPAPYDSGDTKHDQGINKAGNTRARVIAVQMAWLWLRYQSKSELSLWYYSRVGDLKGRVRRIMIIALARKLVIALWRYVETGKVPNGAIVAA

SEQ ID NO: 418113 - protein, 415 aa, unidentified
MDIIYTHCAGLDVHKKTVVAAIIVPNGQGGLHKEQRTFGTMTADLLALSDWLLVHQVTQVAMESTGEYWKPVFNILEDGFGVILVNAQHISKVPGRKTDVTDAEWIADLLRHGLLSASFIPPVGQRELRALTRERSNLVRERATLVNRVQKTLESANIKLASVASDVMGVSGRAMLEAIIAGQATPEQMAELAKGRLRDKREALSKALDGRVKTYHRFILAELLCLIDGVEESIARFDQQIRTCCEPYEEAIALLDTIPGVGRETAEVIVSEIGVDMSRFPDADHLASWAGVSPGNYESAGKRRSGKTRKGNKALGVALNHAAHGASRTKNTYLSAQYHRLAGRRGKKRAIMALAHSILVMAYHMIQRKQPYCELGGDYFDKRRPEVTAKRLVKRLEQLGYLVSLQASPALEMAA

SEQ ID NO: 418114 - protein, 350 aa, unidentified
MNEISIIGLDLAKQVFQVHGADDAGRRLLRKQLKRREVLRFFAGLKPCLVAMEACGSAHFWAREIAKLGHEVRLVPPAYVKPYVKRGKTDRIDAEAICEAASRPAMRFVPAKTIDQQSLAALIRCRDLLIKGRTMLVNALRAHLAEFGFVAAKGIGKLPDLIKIVSEAPAEALPEMARAPLSGFLDAIALINRRLDDIEKRLRAWHKGNAQSKRLETVPGVGLIGATALCALVPDAKLFRNGRHFAAWIGITPRLDGTGGKIRLGRISKAGDGALRRLFVLGATSLLRSLANKTTPLALWVQGLAARRSGRAAAVALANKLARIAWAVMARAEAYRPLFAARLPTPAGRP

SEQ ID NO: 418115 - protein, 417 aa, unidentified
MEPIYRCVAGIDVHKKMLAVVVRRERDGKTEYEKRKFGTTREEIAHLAAWLQHLQAGEVAMESTAQYWRPVWYGLEGLFKQHLCHPLKTRAPRGRKRDFRDAQRLADRWWAGDLEDSFIPDAEQRNWRWLTRTRVQLRRKLGVIHSHVEGLLEQGGIKLSSVVSDLFGVSAWDMLTDMARGVTDAEALAARARGILRRKDKQLRESLTGRLDAVCRLLLRQHMEQVTLIRRQIEEINSALADSMKEQIAVLHRLSRIPGVDVYSAQELIAEIGPKAAAFPTPEHLASWVGVCPGSQESAGVNYSRRSPKGNRYLRRLLCQIAWAAIHTKDTFFAGLFGRLKPRIEGKGAAWAVAHRIAKVVWLVLNREVEYQEKGSAPPNERTLMRKFRRLLKDFGSLGLDVRALLNHQLAQPPAVS

SEQ ID NO: 418116 - protein, 260 aa, unidentified
MDTETGELGEQRLIHPKEAEQFYGELKERNIAVRVGMEASGHARWFERLLRQLQFELWIGDAAEIRTKRVRKQKTDRQDAQLLLRLIMEDRFPRIWVADAENRDLRQLLWHRHRLVQMRTRVMNQLHVVALNEGLRRRKALWRPRGRKELELIALAPWAGRRRQDLLDLFDQLTPKIQELTRALEQEVEKRPVTRRLMTHPGVGPLTALAYELVIGTPERFHNGKQIASYVGWFPKKSPAAIDADWDTSANKATHYFAFC

SEQ ID NO: 418117 - protein, 347 aa, unidentified
MRKIAYLAMDVHARNTVMGDMNGDGKFLGNRCFPTSDDNIANALKMVKAKKKLLVMEAGPLANWVAQTATPFVTEAFISDPRENALIYNSSVKKDKIDTQKLCRLLRLNEFKAVYRPENDQRAIFKAAVQHYNDLRDQLKAIKQKTKAMYRQWGVIDVFTDSVYSTSGRDKFLVQVNQRPILLQLKRLYALMDFTAEMKQDAEKSIKSLGRHYPEIKEFKKIPGIGNAGAHTFDAYIQTPYRFARTSRLWKYCRIGVTDRSSDGKPLGFKRLDKAGIGELKAVSYRAFISTMKSDNEVKRFYLKSLQTTHNHTHARLNTQRKILAVMLSIWKKGQPYRAELFLDSRI

SEQ ID NO: 418118 - protein, 346 aa, unidentified
MMIIGCDFHPSWQQVSWLDTGTGECGERKLVHATGEAKMFYQQLAEPVLIGMEATGNSQWFIEWVEDLGHEIWIGDAAQIRASYVRKQKTDKRDAAHILQLVVQGRFPRLWTPDREQRDLRQLVLHRHKLVEIRSRVKNELQHLSLNKGVQKKRTLWSQAGQKMLRELPLKPWAACRREDLLGLLAMLNQQIGKLDDAVQRAAEENPQAKLLMTQPGVGPNTALAYVLTIGDVSRFPRGKQVASYLGLIPREESSGGRQKLGAISKQGNRMLRSLLVEAAQIAVRFDPEFRKQYLHRCHQKPKGVAKVAAARRLAVRLYWMLRTDRPYPEIVRIESSPRVPLVGAS

SEQ ID NO: 418119 - protein, 343 aa, unidentified
MDHFAGLDVSVKETSICIVDDAGKIVREVKVASEPEALLAVLKNLAYHFKRIGLEAGPLSQWLFSALAEAGLPVICVETRHMRAVLKAQINKTDRNDARGIAQMMRVGLYRPVHVKTLRSQKLRVLLTHRKLLQSKAIAIENDLRATLRNFGLKVGMVGTVKFEARIKELVESLPDLAVLVEPLLIVRQVVREQLGILHRRLLAIVRDDDVCRRLMTIPGVGPVVALTYRVTVDVPARFRNSKAVGAVFGLTPCKYQSGQNDRTGGISRCGDEMMRMMLYEAAQSMLVRSAKWSWLKAWAMKIARHRGIKKAIVALARRLAVIMHRMWVGGTEFRWTREVAVA

SEQ ID NO: 418120 - protein, 341 aa, unidentified
MKTSRTVVGVDTAKRVFQLHWVDMETGEIVDLKLTRAKFLDHFADLPPCVVAMEACGGSQHWARRLRELGHEPLLLPAKMVRPFVAGNKNDAHDARAIWTAVQLPGVKTVAIKSEEQQAVLALHRMRQQLVKFRTAQINGLRGLLTEYGEVMPQGRAGMRRDMAGILERVSERLPAMVIDTLREQWARIGRLDEEIGEIERRIGVWHRGNADSKRIAGIPGVGVLTATALVAAMGDPAAFRSGREFAAWLGLVPRHDGTGGRVRMLGISKRGDRYLRTLLIHGARSVLTHSKAPPAWAVRLAERRPLNVATVALANKTARTIWALLAHDRAYQANFVSQPA

SEQ ID NO: 418121 - protein, 323 aa, unidentified
MAPTIAQSVGVDIAKDTLEVHLYPEGRRRQFANEAAGWKSLIGWLGGLAVARVVFEPTGRYHHGFERCLAAAGFAMVKLNPRQARRFAEAIGQPAKTDAVDAAMLARFGALIEPPSRAVLSDTLDEMRELHVARRGLIKDRVATLNRAQAYRSWLLRGQVAARLKQINHQLQAIDATLRRLLGSDVTLKSRFAILLSIPGLGEATALALLIEMPELGHLANGSAASLAGLAPVARDSGQHRGKRYIRGGRASLRQALYMPALVAARFNADLKAKYQALLAAGKPPKLALTAIMRKLLVLANSLLRDGRTWSARPPGPRQLQSS

SEQ ID NO: 418122 - protein, 328 aa, unidentified
MFYLGMDVAKAKLDCRLLLDEASGKQKSKVVNNAKSGVVDLLAWTAKHDISPEELHVIMEATGVYHEQVALALTDAGVRVSIVNPAQVKDFGRGLAVRTKTDGVDSFVLARYGALLKPAAWIPPAPEARMLQALLVRREAIAQDLQRERNRQEKAEATDTPALIQKSLEDSIGFLVKQLAQLQQDIDDHINRHPNLEKNMNLLQSIPGVGPQVGGNMLSVLSCHHFESAEQLAAYLGLVPVERQSGSSVQGRAKLSKAGPARIRAVLYMAAVVAKRCNPHVKAVYNRLLARGKTKMSALGAAMRKLVHLCFGVIKTQMPYQPDYAKVA

SEQ ID NO: 418123 - protein, 313 aa, unidentified
MSQNNTNILHVGLDVAKSSLQLDLAKTQHALTNDAKGHAQLLKLLTAHPGAHVICEATGGYEKPVVRILHAARSPVTVVEAGRVRHFAKAKGLRAKTDPIDAVVLSEYGRTFNPDATPAPSAQQSRLAELSTRRLQLVDTLTAETNRAEHYTEPACVKQSRQLVKLLEKQIAACDAELQTLIAADDVLKIKAERLDAIPGVGKVTAATVLAELPELGKISDEAAAALVGVAPYNRDSGNQTGVRSIAGGRMTVRCALYMAALSAVRCDAILKDFYTRLRAAGKKPKVALVAAMRKLVILMNRLLKNPKFQLAN

SEQ ID NO: 418124 - protein, 311 aa, unidentified
MSLHLDYIGIDIAKAHLDVFDPQAGHLRLANTPAAIAGWTATLAGRSVFVVLEATGHYDSALRQGLHAADLAHARINPMQARRFAEATGRLAKTDRIDAAMLAELGRCLTPAARPVRSQARDTLAGLHKRRDQLVQQRAAETVRLGETAGLPDAVRANLIAHLDWLKAAIKALQDEIDAFIQSETELAGQARLMTSAPGIGPVTATTLLALMPELGQRSSGSIAALAGLAPFNCDSGHFKGVRRIRGGRPRVRRALYMAALAAARANTRYRALFNRLVEAGKPKKLALIAVARKLLVTLNAMLRDQKPYAP

SEQ ID NO: 418125 - protein, 339 aa, unidentified
MSVQFKHTDQKSNTFFAGIDVGAEELFLVIRKNGTPYKAQKFSNSSADRARLVKKLNMLEGIIVCLEATGVYHFDLSIALHDAGVALMVVNPKASHNFAKALMKNSKTDVVDAETLALYAERMDFVVWTRPSNEKIALRGFARRIDTLTRQKAASKNHLHALSASQENPTAVLRDVKLSITQLEKRINSLTKDALALVNEHPEIERVFKLLVTVKGIAQTSAIALMGEILLLPPGLSHRQWVKSAGLDPRVFESGKSVHKQARLAKAGNYHIRSALYMPALSAKQHDPHVKAYALHLVDNGKKPLQVVCAVMRKLLHAIHGMLKYDKPFDSSRFYAIPI

SEQ ID NO: 418126 - protein, 368 aa, unidentified
MHLQCPVLQLGNINWRMVMNINDPKNQLILGVDTHLDLHVAVLVNMIGQVVSTEAFETDEKGYNRLLKWCQSFGQLLKAGIEGTGTYGAGLSRFMVSNNISVYEVNRPNRARRRLRGKSDPTDAENAARAVLADEAKAVPKTQNGSVEAMRFLLIARRSAIKSRTQAINQIRAILVTAPDSIRKQYLVASTRACIEACNNIEKLGNSTLLDMLTVSLKLLAKRWLDLTGELKILDRNLKRLTLSTAPLLTQELGIGPYVAATLLVTAGDNPERLKKESSFAALCGVSPIEASSGKVVRHRLNRSGSRVANNALWTITLIRMRSDPRTRQYVDRRTKEGRSNKEIQRCLKRYIARELYPKILYDLSFAA

SEQ ID NO: 418127 - protein, 342 aa, unidentified
MKISKKVVRMGIDLGKNTFHVFGVDESGSTVVKKKLRRKQLLEYFANRPPCLVGMEACGGSHHWARELVKLGHEVRLISPQFVKPYIKGNKNDYNDAEGICEAVGRPNMRFVTVKSIEQQDLQGLHRIRQSVVKQRTALANQIRGLLGEYGIVVAQGISRVRARIPEILEDGENGLTDRFRGWLAELLAAFHALDERIKKYDQEIQREHAAKEVCQRLSAIEGVGPQSATAVVATYGDGKQFRNGRPFSASIGLVPRQHTTGDKPILLGISKRGDKYVRTLLIHGARSVINRIERKDDRRSRWLQSLVARRGKNKAAVALANKNARIIWALLSRGECYRAAA

SEQ ID NO: 418128 - protein, 419 aa, unidentified
MEYLHYIGFDVHKKSIQYCTKLADGEILKEGRIAATRTDLLAWAAQQSHPWKGALEATMFSAWIYDTLQPHARELKVAHPAMLKAIAASKHASDRLDARKIADLVRMDWIPGVWMAPPEIRSLRLVLRYRNLVVRQATQTKNRMASVLMEHGVEYSKQKLHQRGYFQELLGRLTEVPETVQQLLRTSRGGLELFASTQRMLLRRLKTDRTLAHRVALLDTVPGVGEVTALTWALEVGDPHRFPSVGRALSYCGLVAPLQESAGKSYRQPLSKKRNAHLQTTLIEAAHLAPRHSAELAALYERHKARRHAGAAAIAVARKLVAYLLAVDKSGQPFQPRPAADPPSSPTGKTAFPPEPPLGGRPVARRSSPSRVRSAAAGPPASPPPAETPPAAPWTAPGRRAGKTSATGGSGGKATRRPG

SEQ ID NO: 418129 - protein, 320 aa, unidentified
MRNAVGLDISKLTFDATAIVGNAEYSAKFDNDSKGLNQFSDRLKSLGCQNLHICMEATGNYYEEVADYFAQYYSVYVVNPLKISKYAESRFKRTKTDKQDAKLIAQYCRSAQESELVKRQKPTDEQYRLSRMIAAYAQIKSECAAMKNRHHAAKDEEAAKAYAQIIKAMNEQLEVLKEKIKEQTEKPNCKEGVKRLETIPAIGRMTAAVLFHHLTSSKFETSNKFAAFAGLSPQQKESGTSVRGKGKLTKFGNRKLRAVLFMPAMVAYRIRAFPDFIKRLEEKKKPKKVIIAALMRKLAVIAYHVHKKGGDYDPSRYKSA

SEQ ID NO: 418130 - protein, 402 aa, unidentified
MTDGSTRFFGLDIHKEYFVAVAVNRERETVFGPQRVSNYQLDDWAGRVLTPQDAIVLEMTTNTYLFHDTLLPLVHSVIAVHPPNVPLVTNVHVKTDKKAAETLAQLLAAGMLTGVWIPPHEVRDLRSLISRREKMVHLSTMAKNRLHALEHRNHLVLPDNPFSPDQRTWWENLELSTTEKLLVRSDLDTLQFAQKQVEKIEECLKQKSIQDERIPLLIQLPGVAMLTATTILAAIGDITRFPTAKKLVGYAGLGTRVHDSGMTHSSGRITKAGRKDLRRAMVNAANHAVLDNSHWKAEMKRLEPHLGRSKAIVAIARRLLVAVWHVLTKQVADRFADPQNVARSFLSHAYQVRVRNLPKGQSAPAFTRQQLDRLGLGKDLQKISFGSKLIKLPPSKLLIEKK

SEQ ID NO: 418131 - protein, 377 aa, unidentified
MSEHGITFVGMDAHKKAINVAMLLPGKREPVEWQVANEPAAIRRLAKRLSREAPGEVRCCYEAGPCGYVLQRELEAAGGVICEVIAPALIPIKPGERIKTDRRDARKLAVSLRADDLTAVHPPTPADEAVRDLCRCREDAREDLMRARHRLGKFLLRRGRVYTIGKRAWGLLHRQWLKGLKLEHAADQVTFEDYLAAIEQLEERLRGLDQRLAALAEQHPYREPVGWLRCFRGIDTVTAIALVAELHDFRRFQTARALMAYLGLVPSENSSGERHRRGAITKAGNVHVRRLLIEAAWHYRHRPGVGAGLRRRRQGQPSAILTIADRAQHRLCRRFRHLTERSKPFNKAVVAVARELIGFVWAALYPATLGQATRGRS

SEQ ID NO: 418132 - protein, 328 aa, unidentified
MTSMGQEKMAYAVAQTPDQITLGIDISKDRLDAHLHPLAVVKQFDNDRKGIAKLIAWITPLRPTRIIFEATGAYHRALEMALGKAALPAVKMNPLQVRRFAQATGKRAKTDPIDAIMLARFGYTMQPDIPPARNETIDGLAELLAARRALVKDRTAALNRSKTLTLALLKRQSQQHLTQINTQIDAIDLARALIVAANERLEARSDILVSIPGFGDATAYTLLIDMPELGSMDAKQTGSLSGLAPVTRQSGNWQGKSFIQGGRANLRQALYMPALVAIRFNPPLKAKYLALRAAGKPAKVAIVVIMRKLLIIANALLRDNRKWTLKAA

SEQ ID NO: 418133 - protein, 323 aa, unidentified
MNAPIYCGIDVAKRNFVIGFSHQKKTKTETNNAKGIQHTLDYLSQFNVALITLEATGGLEIPVAKALARAGYRVFIANPLKASEFAKSQTRAKTDAKDAVNLAFYGLTCELKGEVEHQLYVPLSEQEEQLEALVVRRRQLVDMRVAELNRLQQSHETQLDNIQQHIEILDKLIAELDKDIDDQSKHFSDKADLISDIKGVGKNCVAVMMSSLPELGKLSSKRIASLVGVIPHPQESGQWKGKSFCYGGRAIVRNALYMAALSAIRFEPVFKAFYTRLVAKGKAKKVAIMACMRKLLTIINALVKRNEKWDATCYLSTESVGQN

SEQ ID NO: 418134 - protein, 380 aa, unidentified
MERAAAIMGKGTAGRFCEQVREDRRKAWSPCPRPKEPEQLLGPHEPESKLERVTLIIQLAEDKMNREDQSQYVGIDVAKARLDVAVGQDGEYWQAGNDERGIRRSVERLLALQPCLVVLESTGGLEMPLMVELDAAHIPFALVHPGRVKEFARSVGQLAKTDKLDARLLARFGEAVKPPVTHLPGEAEQYVNALTVRRRQVLDMLVDERNRLAATRLSMRAKIEEHLAWLQAELAELDRQIEEQIQQVPHFQEKGAILRSAKGVGPVLCAKLLSGLPELGHLDRKKVAALVGVAPFNQDSGRRRGKRKTKGGRADVRAVLYMATVSAVRSNPVLKPFYQHLVKQGKLKKVALVACMRKFVTILNAMIRDMHPFSFPYQPA

SEQ ID NO: 418135 - protein, 335 aa, unidentified
MKSNMGTPVSVGIDVAKATLSVSICDHDGHEQALAIRNTDTDITTKVLPYLRHYSGKVVMESTGHYHWTPALVLREAGIDIRIVNPLLAKQYTSGTIRKVKTDPADARGLARMATVCDNLPETFTVSRARLIIRKKLATISTMGRHLQALKANLASLREGQVLLDEVDTPVVAELAESIRQLGISLKHLEVECVQLTESDEDSLEIMKRLETIPGVSLFCAALATNWFDINTATSAKSFIGYAGLDISSRESGTWKGHCRLTKRGNPFLRKRLYCAAWGAVMNYPEYRAYYDKLKAGGRGHKEAVVIIARKLVRTMYCLLRDGVSYDSAKVSFPN

SEQ ID NO: 418136 - protein, 349 aa, unidentified
MLLIGCDFHTRFQQIAMGALATGEIVERRLEHPEEARVFYSALPGPARVGMEATSPAPWFERMLSEQGHELWVGDAAAIRAGVVRKQKTDVRDALHLLDLLWTDRFPRIWVPSPAERDARQLLRHRVKLVRFRTSVQNQLHALAMGEGVCRRKKLWSRSGRRELEGLALGPWASRRRRELIEMLDRLQAGIEELDQAVRNAAESRPEARRLMQQPGVGPVTALAFVLTIGPVSRFRKSKQGVSYLGLNPRERSSGGQQRLGSISKQGNSMLRWLLNEAAQTASKFDPELRRDYLRLQFRRGRGVAQIAIARKLAVRLYWRLREAAQPAPPARMQGSPARALVEETLSRK

SEQ ID NO: 418137 - protein, 455 aa, unidentified
MSKGSGTTRGDRKRNARRERLRELLPRGGAVVGIDLAEDKQAIAVVDHDVRVLARKTVRVKAFRLGEALDWAVGQARGKGFAHVAVACEPTGPRWLQVQRLCGERGLPLVCIQPLVSHIAREQQDYTTHKSDESDCVMIARLATELHCYLPEELDETWAHLRHLGRRRAQLITAASASAHRIRDFLSVAWPVVTETCAHPLLSRTWLAALQVVTGRCGGDPARLAVMGEEAFTALVRAAVHDWGGKRAWGTISRRIFAALTDTEGVIVSSRRGLLRRCADELGDLQRARAQLRAVEADMVAVLDELGLSRLGRIPALTAVGAAAILAEAGDPRRYDSSSSLVKHAGLSPSDNASGAFAGQAHISRRGRPGLRLTVWRAVWPMLQFNPVMAAKYQALTSAAEDEAAAARARRAKARVACAASLLRWIYSMVVHDTSWDPAVASGCQHDPRGQAEAA

SEQ ID NO: 418138 - protein, 435 aa, unidentified
MDEVTDEPLYRDRVCGIDIGKAGLAATIRVPSDQNPARRAAETRSFGTTKREVLALADWLRSWQVPAVVMEATGDYWKGPFYRLEAEGFDCVLADARQVKHLPGRPKHDPGDSRWLAACFERGAVTSCFVATPEFRVIRLHTRYRRDLTDERTREKQRAEKLLESAAIKLSSVVTDLHGVTGRDIMDHLIAGERSPKVLAQLARARARRKISELEAALEGAEFFTPAHAALLAAMLERFDRVNAEIARLTEVIETLLAPYEEQLAQAESMPGWGRRAAQDALAETGADMTRFPTGAHLASWAGRTPLDNSSGKRKGKAKSKKGNRYLGGLLGETAVAAGKTQTREGARYRRLARRRGKAKAQVALGNTQLKVYHALLSSPGTRYTDLGPDYYDNQASTRRQIAHHVGKLGALGFEVTLCRIPEPEPGGPDSTQAA

SEQ ID NO: 418139 - protein, 406 aa, unidentified
MLFVGDDWAEDHHDVEVQDESGRRLGRARLAEGVAGIARFHELVGEHLAEDAGPEQVTVGIETDRGPWVQALLAAGYLVYAVNPRQAARYRERHGTSGAKSDAGDAHALADMVRTDAHQLRAVAGDSEQAQAVKLVARAHQTLVWERARQVLRLRSTLREYFPAALEAFGDLAAPDTLELLAKAPDPASAARLSKAQVTAALRRARRRSPEAKAAETVAALRSPQLGQPPAVTAAYAAITRSLVRMITAASEEITVMEEQVSECFGRARDAEVLLSQPGLGKILAARVLGEFGDDPHRYASAKARKNYAGTSPVTRASGKKKAVLARYARNTRLADALHQQAFCALTASPGARAYYDQLRTRGQGHNAALRQLSNRLVGILHGCLRTGTLYNEQTAWAHHAQQPTA

SEQ ID NO: 418140 - protein, 486 aa, unidentified
MNSIVLTANVQPNLDVNYIGMDVHSDNVVVCVRRNTINSSGQLVGKTIKTKKVVIKNSQEPLVELLSKYADGQQHIMTAESTFNWYWLADIAEDHGWNFRLADPCTVSQANIKAANDETDAEYLADRLRTGSLKSTSVLPRQLRGVRDLMRHRLRVMQEVSDKKVRLSNLYHNHCAHPMLGKLLAALQDAYDEINIDAVLESGICNNGSELIIGDLLTGLREAETRLAKIEAAVYGRIDEIDSYKAERMLLKTSMKGCGDVLSAIIVTEIGDISRFRTMGDFVSYCRLAPTSKLSNGKSKGQGNAKNGNAYLSWALTELATLMARFNEPIRRYLERKQEKTGLRVVAVRALAAKLARCVYQVLRKKESFDLGLAFGSKPTHGQMTAAAEAAQTPPEPALPPVPAVAGEHHCPAEESDAPIVVKEPVPVKSKRSTRKKAVSAASSEPAVAAEGRQTARKADRVKARCALTATPPSCAGTSCVKSRRE

SEQ ID NO: 418141 - protein, 384 aa, unidentified
MKKFSKYVGLDTHKKTIAVSVADASGGKARYFGEVSTRPASIKKLLKQLSPEGQVVSYCYEAGPCGYTLYRQITQLGHECIVVAPSLIPRRPGDRVKTDRRDSEALARLHRAGELTAVWVPDEEQEAMRDLTRAREDMKLLERQSKQRLNAFLLRHGRHYEPGKSRWTQAHWRWLERIKFTQPVQQIVMQEYIDSIRHLQSRVLELEEEMARVVQEWRWAPVVEGLMALRGCRLITAMTVVAELGDISRFDSPRQLMAFLGLVPSESSSGPNRRRGGITKTGNGHVRRLLIESAWSYRFPARKTALLQRRAEHTSDAVQAIAWKAQKRLCARFRYLNDRGLRRVKISTAIARELSGFMWAIACEVMSQQPNPVASASIAATNSN

SEQ ID NO: 418142 - protein, 386 aa, unidentified
MPKSNDLSKSLVTLDQGSTLIAVIEMSQSNWLVGAMVPGLGRDPRKKLPADEAALFGLLQRWRGEAEKAGAGITRIAVAYEAGRDGFWLARWLRARSVEAYVIHPTSVAVSREHRRAKTDRLDLALLKRAFLGWLRGEEKHCTMAAIPSLAEEDAKRPNRERETLVGESTRLVNRMKGALARLGVRGFNPKLKKAPARLASLRTPEGVPLPANTLAELRRDMERLALVKQQIKAIEAARLARLQEAPDERTHAMVRLLGRVVGIGIETADTLVHEVLSRDLRDRRAVARYAGLTGAPDESGKRRREKGLARAGNARVRRIMVQLAWRFLLFQKDSALVQWYRARTEATGKSRKTFIVALARKLLIALWRLVTSGDTPEGLVLRPVA

SEQ ID NO: 418143 - protein, 343 aa, unidentified
MKLMRFGVGLAKNVFQIHGVDRHEQPVWQQRLPRDRWLQTVLEKIEPGCEIGMERCGGAHYWAPQLQARGFRVRLIAPQFVKPYVQSNRNDTNDAEAICEAMSRRSMRFVTIKTIEQQDIQATHRIRAGLIEQRTAKANQIRGLIAEYDLVAPKELLMLRRAIPCWLEDADNSLTARFRRLLNGLWDDLRALDERVSELDGEISAIAASEPSAVRLQQLRGVGPMIATALVAAIGDTSQFANGRQLAASLRLTPKQHSSGGKDRLLGISKRGDAYLRTLMIHGARSVLRTAKSKDDRLSRWVVRLAERSHPNVAAIALANKTARMAWAMLRNGTDYQPDRTAA

SEQ ID NO: 418144 - protein, 307 aa, unidentified
MYVGIDVAKATLDVAIGSDGELVQVENNEAGIAQLIQRLGEVAPRLVVLEATGGYESLVAGAIAGREIAVAVVNPRQVRDFAKATGVLAKTDRIDARVLARFAEAVRPEPRPLPTAEAKELEAFLSRRRQLVDMLTMEKNRLSIATTERMKKSLKKHIDWLEEALRRANDDIDKTIRNSPAWREQEDLLRSMPGIGPVSARTMLADLPELGQLNRKKIAALVGVAPLNRDSGTLQGTRTCWGGRASVRQVLYMATVSAVRCNPVIRRTYVSLRDRGKKHKVALVACMRKLLTILTAMVRDQRRWSPS

SEQ ID NO: 418145 - protein, 456 aa, unidentified
MVESTTVTVGLDVHARSIRFAAVRADELLEERTLPYDEEAVERLLRRWPGARCCYEAGPTGFGLYRHLVGRGIDCAVVAPGLVPRRPGDRVKTDPRDARKLARLLAGGLLEPIHVPSPTLEAVRDLVRAREDARLDRMRDRHRLSKFCLRHGRLLPTSAWTVTRRKWLGEQRFEHAAEQITFDTYLHTVDLVDRRIGALERSIRETAEQEPWRELVARLRCLRGIDTLTALGLVAEIGDFDRFTCAQQFMAFVGLVPSELPPASTADRALSPRSAQPGAPAARRSRLARPSATEGRLRARPPSPRPRRRRDRARLALPATPPRPLAANGRPRQTPPKDRRRLRPRARRLRLGDRHRATTPKHLTVNPLDLQQRMRPTTRRTLESSMRRPPRVTRDLRPRQLPTVTSHAVPTGECQPDPPSLLRTLRCSRPRGQPIHRASPLDLSLHVRAPFTMRCS

SEQ ID NO: 418146 - protein, 389 aa, unidentified
MEARTVNNLPPAASHDETVRCLLAIELSKKSWIVAVNAPLSDKVGRHTLQACDWKGLLELIARIRTRVIQALNRPVEVISCYEAGYDGFWLHRVLEAHGVRNYVIDPASVQVDRRARRVKTDNIDVGRLLRSLMAYLRGEPKVWSVVRVPSVAEEDDRRLHRERNRLINERVQHVNRIKGLCAVHGIYDYEPLRPNRLARLEQLRAADGCELPPRFKAEIVRELQRLELVLNMIKTLEAERDAIASAGKSSTHANAKKIQDLIRLKSVGPEIGTTLVGEVFYRQFNNRQQLGSYVGLTPSHFQSGPMSRDQGISKAGNPKARTIMIELAWLWLRHQPNSPLSLWFRERVGTGKGRIRRIAIVAVARKLLISLWRYLETGVAPTGAVLKG

SEQ ID NO: 418147 - protein, 460 aa, unidentified
MNRNRSKSRVDRTMPMVHPNAAAIDIGATMHMAAVRADRAPEPVRSFGTFTADLHRLVDWFTECGVETVVMESTSVYWIPIFELLDARGFAVFLVNARDAKHVPGRKTDVSDAQWLQRLHSFGLLRASFRPKGQIAELRAYVRQRERLLEYAASHIQHMQKALTEMNLQLHHVVADITGATGLRIIRAILAGERDPEALAGLRHYSCHSSAETIAKALTGSYRTEHLLRSRQALSLYDAYHEKASACDVRIESVLKELIIHRGHDHGSAPPVSRRRNRTDQANALAFDVRAALFGLLGKDVTTIDGLGPYLSLKLIAECGDDLTSWPSAKHFTSWLGLAPSNKVSGGKMLSSRTRRSGGRAAALLRLAAVTVGRTDTALGAFYRRLSSRIGKAKAVTATARKIAVLFYNAVRHGMDYVDPGASSYETRYRTRVINNLHRRAKTFGFVLQPLEPKAGAAVS

SEQ ID NO: 418148 - protein, 340 aa, unidentified
MNSTQVAVDLAKSVFEVAVSRSPGKVHESHRLSRGRFQKYFAVREPVEVLMEACGTAHHWGRTLEAMGHRVRLLPPGDVSRYRDGNKTDRADAKALLEAARNDAIDAVPVKSLDQQAIAALHRIRSGYQQTRTARINAVRGHLREFGIMIPMGASRVVPMARVALEGDEVPAYLREVLEEVLDEIETLSLKAKAVHRRLERLSKQMPEAQALMTVPGIGVLTATALVSFVGDPRRFRSGRQLAAYLGLTPREFSSGSVRRLGRITKRGNTYVRMLLIHGARSALQAGKRSHEPDDLRTWALDVERRRGHNVATVALANKLARVAWRVWRDQRPFEQRRPA

SEQ ID NO: 418149 - protein, 462 aa, unidentified
MLKDHCMTTKLKKSKRKSTKKVLHEARGNAAGIDVGAYEIFVAVPEDRDEENIRSFSTFTEDLQEMARWLKQCRIDTVAMESTGVYWIPVFQILEAYEIEVYLVNARHVKNAPGRKTDVLDCQWLQYLHSVGLLSASFRPSANVVAIRTLLRHRENLIKSAASHIQHIQKSLTQMNLYLHNVISHITGTTGMAIIDAILSGEHDPKVLAKLRDYRIKADEETIAKSLVGDYKEEHLFTLKHSVDLYRYYGALIQECDREIESRLVTFETKREDEPKLNPVKKKTAGTNELTFDVQSHLYKIYGVDLTEIPGISGLGAHTIFTEIGLDIHKFKTVHHFTSWLGLSPNNKVSGGKVLSSKTSFSSNRVAKALRLAANALYNSKSYLGNYFRKMRSRLGAPKAITATAHKLARIVYSMLTNQTPYDESVFAVEELKSQEKLMKKLKNQASALGFTLVEAKTPESA

SEQ ID NO: 418150 - protein, 382 aa, unidentified
MSDGIRWVGLDVHARESTFAVFDQATGEVSTRRVVGRPHELLAWLRGIERPARMVYEAGPTGYGLVRRALAEGIEMSVCAPGKTERPPQDRIKTDKRDAVRLARLLAAGELVLITIPSLEREQLRDLVRCREDIRHDLARARHRIGGLLLRREIYYEGPAGAWTRKHRAWLTSVRFTDHASQATLADYLHAHDVLIARRDQVETDLGKLAITAPCADTVARLRCLRGVDTLTALGLCTEIGEWERFDHPDQLSAYLGIVPSEHTTGRQRRLGAITKAGSTHARRLLVEGAYHYRRGAVVGPALERRQRGQPPEIINISWKAQRRLNARWRQLRDARRKPAGVVAVAIARELAAYCWEIATYPTTTPAPPPTPTTRKRLTNSR

SEQ ID NO: 418151 - protein, 341 aa, unidentified
MGQVSTIGLDLAKSIFQAHGADASGAVVFRKRLRRSQVRPFLAAQPPCTVAMEACGSAHYWAREIGMLGHAVRLIPPAYVKPFVKRQKNNATDAEAICEAAQRPTMRFVAPKSEQTQAAALVFRARDLLVRQRTQVINALRGHLFEFGIVVAKGPAHVPQLVQAVANPDEPLPEIARPVLQILIDTLHRLDEQIADLDREIVQRAKADETAHRLMTIPGIGPVTAVALTALAPPAQTFRRGRDFAAWVGLTPLQHSTGGKQKLGATSKMGERTLRRLLIIGASAVLRWAARHGAPAGSWIARMLACKPPMLVRVALANKMARIVWALMAKGGTYQAPAARA

SEQ ID NO: 418152 - protein, 347 aa, unidentified
MSFIGVDLHTNSFTACRREADGSESFETFTLAPADLARFCLRLDAEDEVAFEATGNSAWFRDQILPCVGRVVVVNPAQFKVIRQSVKKTDRNDARALALFLAKDMLPETRAKTQAQSELGSLTQTRDLLVKQRTRLLNKVHALHNRHGLKLKRESLASRKRLLAIAPDPFTRLEWIELAIIRDQALSLSEAIAKLDEAIEAAAGALDGYPGLTSIKGIGPRAAAVFLSTIGNVHDFASADKLAAYFGIVPRVSQSNETDNRGRITKRGSRLARTALVQCTLIATRYSPYLKAYYERIRQRRGSGKAIIATARKLLAIIYDTLKNGWVFKDFTAFQFQPGHIPAGQSS

SEQ ID NO: 418153 - protein, 332 aa, unidentified
MDIVYLSIIHQNKNAMSTVSFEQVILRGCGLDVHKDVVVATISGEGLSTETRSYKTFSSSLTELKEWLLSNGITHAAMESTGVYWKPVYKVLECPRMKVWVVNARHIKYVPGHKTDKKDSAWICKLLLAGLLKPSYIPEREQRELRDLTRYRNKLIQHVSSNKNRIVRILEDCNIKLSSVMSHLDGVVATKLIDILIDKGHVTMDDIACVYHKRLEASPELLYQACEGFIEPHHTYMLQTIRKDIEQTESILSDLTSRIKEVLSPYENVIDLLRKIPGLDRKTVEDLIAEIGVDMEVFPTEKHLASWAGICPGNNESAGKKKVEEPLMATNS

SEQ ID NO: 418154 - protein, 351 aa, unidentified
MLIIGVDYHPSFQQISFLDQETGECGDRQLNHSEGDAERFYRELKQRGANVRVGMEATGHSRWFERLLAELGFELWIGDPAEIKRQRGRKQKTDREDGRLLLRLLLENRFPRIWTPNAENRDLRQLLWHRHRLVQMRTRIMNQLQAVAMNEGYRWKKKLFSEKGRALLEKLPLAPWASRRRKELLELLDQLDPKIAELTAALEREAQQRPEVVRLMTHPGVGPVTGLAYFLVIGTPDRFPCGKKIGSYTGLIPEEDSSAGHQRLGHITKQGNSLLRYLLGEAAQAAARCNPDWRRRYVHLMMRRQKRIAKVAMARKLAVRLYWMWRNKWQYAQLVEFGSNAGKLGTVHGVK

SEQ ID NO: 418155 - protein, 344 aa, unidentified
MSYDVKYIGMDVHKEAIVITVLNESGKQVMESVIETKASSILQFLHGLRGELHVTWEEGTWAAWLYDLLQPQVQHIVVCNPRRNALLKEGSKSDKVDAGKLADLLRTGMLRPVYHGENGLRTLRELGRSYQTISKDLTRVMNRLKALYRGWGIPCGGTQVYAARSREEWLSKIPQAGVRRRAELLYQQLDGLQGLRRNLRPEFLAESRKHKASKLLRQIPCIGPIRAARLIALMQTPHRFRSKRQLWTYSGLGIETHDSAQYRFVSGQLQRSKKPQQLRGLNRNHNHEMKEIFKSAATRASCGRGPFHDFYAGLLAKGMKPEMARLTLARKIAAITLTQHWRNP

SEQ ID NO: 418156 - protein, 347 aa, unidentified
MRYVGIDIGKWKCNAAVVDPEGVIVEEFAFANDHAGLEELASRLTPEDRVVMESTGSVWSTLYNLLDERHVPVVLANPLKTRAIASARIKTDKVDARILAHLLRSNLVAECYVPPRSLRELRALVRHRASLVRVRTTVKNRVHALIDQRGIRCEYSDLFGKRGSEWLRRLDLGPLDGLMLSNHLEHLESLNRQVDETDEMIRGRASVDEDVRLLLSLTGVDVYTALLIRSEIGGIDRFPDYKRLVSWAGLAPSLHQSGSVEYSGRITKQGSKMLRWAMVESARTAVRHDERMRGFYERVKRRRGDGKAVVAVACKMLKIIWFMLTRREAYQSRNEGRYGVKLKSFRT

SEQ ID NO: 418157 - protein, 318 aa, unidentified
MSKRSIVALGTTVAGVDVSKARLDVVLWPQGESFALGNDASGWRALRKRLRAAGVKRLGLEASGGYERGVVEAVRDDGLEVVLLRPLQVRAFARFRGQRAKTDRIDAALIAECAAQAEERAHERPRECKEAADLLTLYEQTAGDLARLRNRLERFRDGELAALLTEPIAYLKAFRQTLLIRLRRLVRTHDQLAHRVALLQSIPGVGFLNAISLAARVPELGGMTRQQAAALLGLAPFNHDSGNWQGARHIAGGRARPRRLLYMAAVAAARCDPSMIAFYQRLIGKGKPHNVAIVAVMRKLVAAANAVIKRDTPWIPTS

SEQ ID NO: 418158 - protein, 402 aa, unidentified
MEADQLWAGADVGKEHHWVCVVDDKGTAVLSRKLTNDEQPIRELIDEIDALGCDVSWTVDLTTVYASLLLTVLADAGKSVRYLTGRAVWQASVTYRGGEAKTDAKDARVIADQSRMRGADLPVLHPDDDLITELRMLTAHRAHLVADRTRTINRLRHQLIAVCPALERVAQLTQDRGWVVLLTRYQRPKAIRHSGVSRLTKMLGDAGVRNAAPIAAAAVTAAKSQTVRLPGEDVAAGLVADLAGEVVALDDRIKSTDADIEDRFRRHPAAEVITSLPGMGFRLGAEFLAAVGDPTLIGSADQLAAWAGLAPVSRDSGKRTGRLHTPKRYSRRLRRVMYMSALTAIRCDPHSKAYYQRKRDEGKRPIPATLCLARRRTNVLYALIRDNRTWQPESPPITKSAA

SEQ ID NO: 418159 - protein, 339 aa, unidentified
MLYVGIDVAKAKHDCCIIDSDAVIHCLNYTFINSRQGFNNFIAKVKKYNNGNLNNVKVGLESTGHYSHNLIAFLKQSKLYVTVFNPLQVDLYHKAVTLRKTKTDKCDAKFICEMLFSDRNKSYQEQSYDISELKLLSRHRFRLVGYRSKLKISVTRLFDLIFPGLSSVVWSVNQNSVYALALELPNTEAISQCNITRLTNLLIKASYGKYRKEKVLEIKQLTISSIGSNSPSLAFELQQTIRLVQNVSSEIELLEQQIKSFMLEINSPIMTIPGISFILGAIIISEIGDISNFQNPSKLLAFAGCEPSTHQSGKYLATLHPWLSEALNICVTLYLLRQD

SEQ ID NO: 418160 - protein, 412 aa, unidentified
MEVLYPHCAGLDVHKETVVACVRHMVSGTVKREVRTFKTTTKELLALSEWLAAEGCTHIAMEATGVYWKPVWHILSDGDFTLVLANAAHVKNVPGRKTDVNDATWLADLLAHGLIRGSFVPDQQTQEMRDLLRTRKQLVREASRHVQRLQKTLEDANIKLDSVISDVMGLSGRKMIEALIAGENDPEQLAQLAHRRIKASPEELCEALRGRVTRHHRFLLSLHLQQIDAIDKVIGEIDQEVDAQIEPFRTTVHLLTTIPGVDELSACVILAEIGRDMSRFPTAGHLISWAGLCPRNDESAGKRRSTRMRKAAAWLKTTLVQCAWGAARKKASYLQAQFHRLRARRGAKKAIGAVAASILTAVYEMLKTGALYDDLGSHHFDKRGKGKQIHRLVSRLQNLGFAVQITPVPAVA

SEQ ID NO: 418161 - protein, 358 aa, unidentified
MSKPTRMSQLDKVFERCSCRQAFVGLDVHKQTIHAAVWLDGAIGLTWVMPATVQVVVATLAAHAAKIALVVYEAGPTGFGLARALRRAGLPVDVVAPGRTPRAAARQNKADRLDAMTLAEYAAKGLLKPVAVPSETQEDDRQVQRLRDQLVQKRRCVKQQIKSLLLQHGVDEPSGLKRWTLAARAALRACRLGAELRLCLDTLLDLLEQIEGHVRAVERALRQLAATERHAEAAAIARTHPGVGPIVAMGFLVEVYRGGRFKTPGEVASYVGLAPRVRQSGQTRRDGPIMRTGRPALRALLVEAAWRWRMHDAAARRLFARLVHNTGSAKKAIVALARHLAINLWTMLTRREPYRAAA

SEQ ID NO: 418162 - protein, 361 aa, unidentified
MAGMVTYAGLDVHARSTHAAAIDVSTGELVRARFGPGIEETVAWLQALPGPVRACYEAGPTGFGLYRAATAAGVAVEVIAPGKTPRGPSDRVKTDRKDAELLARLLLAGSLTSVVVPPVEVEAARELMRAHDACRRDLMTARHRVSKMLLRHGRVYPEASTWTVAHRRWLARQQFDEAASELVFADLIAAVDGLTGRKTAIAERLSRLAQDEQWWPTVARLRCFRGVDTLTAFALHLELGGDWQRFARANALSAWLGLVPSLHQSGESSRQGSITKTGSTLARRLLVESAWHYGRQPHIGATLQNRQAGQPDHVLQIANRAQQRLHRVYRRMRERGKPHNVIVVACARELSCFLWAAATAD

SEQ ID NO: 418163 - protein, 309 aa, unidentified
METTVGIDVSKDRLDVHVLPSGEAFSVSNDHAGMEELAGRLAALSPTAIGLEATGGYEQLAVATLADAGLAVVVVNPAQVRAYANALGKRAKTDAIDAAVIAAFIAATKPELRPLRDAEARTLADLVTRRRQIVQMIVAEENRARTIGARQAQKSIKRLLAALRRELESLDADLDDHIRKSPLWRVREKLLSSVPGIGATIARAMIAEMPELGSLDRRQIAALAGLAPWTRQSGTWRGKSFIGGGRSRVRAVLFMAALVAIRHNPTLKAFRDRLVEAGKPKIVAVVAVMRKLLTILNAIIRDQKPWQTA

SEQ ID NO: 418164 - protein, 346 aa, unidentified
MEHYVGLDVSLKLTSICIVDRTGKVEREGVVASDPEAITTFIKLHAPHVVRIGLETGATSTWLWTELNKMGLPVICIDARHAKAALKMQINKSDRNDAVGIARIMQCGWYKEVCVKDLDSHATKALLVSRALLVKIKRDIENQIRGLLKNLGLVIGRAKMNMFAVRAAQLAEDRSELLAAVDPLLKAREAVEQQILDLDRKVLRLARNNAQVRRFMTAPGIGPVTALCFLATIDDPARFKRSRSVGAYAGLTTRRYASGEIDWTGRISKCGDKMLRSYLYEAANVLLTRVAKWSALKAWGVRLAKRSGLRKAKVAVARKLAVILHRMWIEGTEFKWSSKEAADQPA

SEQ ID NO: 418165 - protein, 368 aa, unidentified
MKKKLRFVGLDVHKDSIAVAVAESGREPARLLETIPADELLLLKLLDRLGPKARLRVCYEAGPTGYRLARRLNEQGICCVVVAPSLVPIQKNRRIKTDRRDAVKLAHFLRSGDLVEVTVPEAQTEAMRDLERAREDAVHAERAARQQLDKFLLRHGRRWTEGCKWTLKHWRWIKVQEFPEDASRRVLSDYINAVQQALARIERLTADISELVEQWTLGSLVRALQALRGVDLVTAVVLAAEIGDFKRFRTPKQLMAYLGLVPSEHSSGGARRQGGITRTGNRHARWVLVEAAWNYRFGPCASKRINARRQRVADGVRVIAERAEQRLPRRFRRLIDRGKSSQKAVIALARELAGFVWAIAHEEKLLAA

SEQ ID NO: 418166 - protein, 398 aa, unidentified
MTESSDYESVQVFIGVDVGKDTHHAVAVNRSGKRLFDKALPNDENKLRSLISDLKQHGQILLVVDQPATIGALPVAVARSEGVLVGYLPGLAMRRIADLHAGEAKTDARDAAIIAEAARTLPHALRTLKVADEQIAELSMLCGFDDDLAAQTTQVSNRIRGLLTQIHPALERVPGPRLEHPAVLDLLQRYPSPDKLASLGEKKLATQLCKLAPRLGKRLAADITRALTEQTVVVPGTNAAVVVLPRLAHQLITLRKQRDEVALEVEQRVLAHPLYPVLTSMPGVGVRTAARLLTEVACRAFASAAHLAAYAGLAPVTRRSGSSIRGEHPSRRGNKTLKRALFLSAFAALRDPISRAYYTRKMSQGKRHNQALIALARRRCDVLFAMMRDGTFYTPVAS

SEQ ID NO: 418167 - protein, 408 aa, unidentified
MEVVYRCCCGIDVHKKIIVACLDQGGEQSLREFGTTTSEIKSLATWLTESGCEMIAMESTGVFWKPLYNLFELMDLDAMVVNAAHMKALPGRKTDVKDAEWIADLLRHGLLKASYIPSREQRELREITRYRKSLTEERCRETNRLQKILEGANIKLDSVVKDINGKSARKLLEKIIEDDVPTSEEEVSKMVHGRMRSKLGQLVTAIEGITTPLQRKLLAQVIDHIDDLNRRIADLDRLVQDYMDEYAAAIAALCDIPGIARRSAEVILAEIGLDMSRFPSAAHLCSWAGVCPGNCQSAGRRKHGKTTKGNKPLKTILTQCAKSARSVKGSYFSAQYQRIAARRGKNRATLAVAHSMLIAIYHMLKNSVPFRDLGSDYYDSFNRDRKIHSYLKRLKALGWEPDVLPGSA

SEQ ID NO: 418168 - protein, 411 aa, unidentified
MNSISNKKINQVTDQTLVVGIDIAKKKHYACFVDERGRVLKKSFPVPQSREGLEWLYQCIVKAMEEFEKTEVIVGIEPTGHYWLNLAYFLDEKGIPLVMTNPMHVKRSKELDDNLPTKHDAKDALVIARLVKDGRFSYPRILKGMEAELRTGATFRSKLVEEQGVVRNQMIRWLDRYFPEFTQVFPSFGKMALAALEQTPFPSDFAGKEIEEVLTLYRQSEGLQSPQKPKAKKLMELAQHSIGVTEGQQMARIEIATLVRRYRQLEKEIEALNEQLTELVQTSVEYEWLKTVPGLGDATIVELLSEIGSFSHYQDPRQLLKLAGLTLRENSSGQHKGQKRISKRGRRRLRALLFRVMMPIIRHNEAFRQLHEYYTTRPDHPLRKKQSIVVLCGKLLKVLLLFNKCGYLSFF

SEQ ID NO: 418169 - protein, 347 aa, unidentified
MVIIGCDFHPGFQQIAMVETDTGEVRELQLSHKQEAEQFYGSLRGREVLVGIEACGYTQWFEQLLDQMGHRFQIGDASAIRASYVRKQKTDRRDAGHILRLLVEGRFPALWVPTAADRDVRQLIVHRHKRVELRTRVKNQLHALALNQGLRLRWKLWTRAGLEQLKALELLPYGSARRADLLRQLEEMDAEIARLDERVGKEAAARPAAVRLMSHPGVGPVTALAFVLTIGDVERFSRSRQVASYLGLIPSERSSGGKQRLGHISKQGNPLLRFLLVEAGHIAVRGDAELRRVYTRVQHRHSTGVAKVAVARKLAVRLYWMLRKQIDYAQLRVGPYAGKPVSFCGRK

SEQ ID NO: 418170 - protein, 411 aa, unidentified
MEEILCGIDWASDHHDVALFDAEGARLGRRRISDDAAGLGELAALFAAHGGGPGTVKIAIETGRGLLVASLRAAGHEICAINPKAVDRYRDRHHLARGKSGAADAMVLAHILRTGAHLHRPLAAGSVQAQAIEVLARAHQDLIWSRQHEVNRLRSLLAGYYPAALAAFGDLTTRTAMTVLAAAPTPAQAARLTTGDLLDLLAAAGRGRRRSEARRLAAVFAAPQMRQPTEVEQAMGDAAAAIITTITAMNTAVTALQQRIDANFEQPPDAAIYHSMPALGSILSARVPGEFGDDRTRWPDPASRRAYAGSAPITRASGKKRLVLARSIRNKRLCDATRWWAFAALSVSPGARAHYDQRRAAGDGHEAALRRLASKLTGQLHHCLQHRVPYDEATAWLQPANQPSPASPAAA

SEQ ID NO: 418171 - protein, 357 aa, unidentified
MLSSNVKYIGLDVHKEAIAIAVLNGAGKLVMESIVETKSSTVLDFLHGLRGELHVTLEEGTWAAWLYDVLKPHVREIVVCNPRRNALLKEGSKSDKIDARKLAELLRAGLLRAVYHGENGLQTLRELARCYLTISKDLKRVKNRLKALYHSWGICCAGKQVYAARHREQWLSKIAQVGVHRRADLFYEQLDGLLVLRNTVRGELLAESRKHQAVKILRQVPSIGPLRAALLLALMQTPHRFRGKRQLWTYSGLAVVTHDSAQHRYVDGQLQRSRKPQQIRGLNQNHNHAMKEIFKSTALNASRCTGPLQDFYARLLARGMKPDMARLTLARKIAAITLALWKKGGSFDAEHLKSQAA

SEQ ID NO: 418172 - protein, 414 aa, unidentified
MNSWNEITHYAGFDWAKDHHDIVIVDRLGQIVADFQIEHNAQGWKRWREQLAALGSGVAACVETSQGVVVECLLESEVAVYPVSPVSAKRYRERKVPSGNKTDHVDAWSLADALRVDGHGWKALAKEDPLVAELRLLCRDEVALIEERTALVNQLQSALHEYYPAALEAFEDWGLPSPWAFVETFPTPQALAAAGKRKWEKFLHSHKLARPETYQKRMEIFARAGEFVSGQALTRAKSRLAVARARMLRVLQNQIDAYRAEIEKLFTRHPDHDLFGSLPGAGPKLAPRLLGEIGSDRSRFEDPTGLQCLAGTAPVSYQSGQIHKVNIRRHCNKPLRHAVHLWANLSRQSCPWAAVYYDALRKRGKSHACALRCLGQRWLKILWKMWQSGTRYDPDLHTKDQIKHGSWVLKIQPA

SEQ ID NO: 418173 - protein, 320 aa, unidentified
MQTIVGIDISKKYFDADINGKVCRYDNDHKSFKKIIKHLPANSHCIMESTSTYGNKLAYALHEAGHIVYIVNPLQVSSYAKMRLSKVKTDKSDAKLITEFAKVNLQDLRPYDFPDKSILSAKQIETVLSQLKTQRTALSNQLEALKQNNFVSEASEKVLTETMQYFDVQIAKLEKHEKDQIDKQHKEMREKITSISGIGNSTACMMISMTNGFSNFSSAKQLSSYFGCCPRVRQSGSSIRNRGTISKIGMSQARTRLYMCAMSAKKYNRTCKELFDRLRAKGKPFKSALLAVVNKLIRQIYAVISKNEVFDNNYVKKFAY

SEQ ID NO: 418174 - protein, 386 aa, unidentified
MNSVGIDVSKGKSMIAVMRPFGEVVVSSFEIHHTDSELCELTKLLSGLSGETRVVMESTGNYHLPVAWLLNDSGFYVSVVNAMLVHDYGNNSLRRAKTDKKDAIKLANYGLDHWLTLPRYVPEEDTRLMLKNCYRQYQQYSKVRTMLKNNLISLLDTAFPGANRLFSSPPRADGSEKWVDFVAAFWHCECVCGLSEKAFISKYQKWCKKCSYNFSEDKALDIYASACGHFSVMPKTDTAKLLVEQAVSQLRATSAALAALKLEMQSLASSLPEYPMVMRMFGVDPALGPQLMAEIGDVRRFHSKKALVAFAGIDAPPYQSGQMDIYSRSISKRGSASLRRTLFLLMGVYLQNAPVNEPVYQFMDKKRSEGKPYKVYMMASAFTMPL

SEQ ID NO: 418175 - protein, 363 aa, unidentified
MTSIALDRGDVVVGVDTHKDQHVAVALDGVGGRLGEPLVIDATNDGYAELLAWACGLGSVHTFAVEGCGSYGIGLARFLRRHGHPPVEVARPPRAGERRASGKSDAIDAEHAARLALTGTGLVTPKVADGQIEAIRLVKIARDTAVKAHSTAIITLKAVLVTADQSLRDELESLSDFKLLTACAALDVAGDLADPEVAMRHTLVSLAARWFDLHEEIKIHSKHLKALTQAAAPQLLEAFGVGLDIAAQILITAGDNNERVRNEAAFAKLCGVCPFPAGSGKTNGRHRLNKGGNRQANAALYRAVIVRMRWHAPTIAYVERRTAQGLSKKDIIRCLKRYVARELFQLLPPVNSRPATPELRVAA

SEQ ID NO: 418176 - protein, 352 aa, unidentified
MLIIGCDFHPGFQQVAIFDNLSGEIQEKRLQHRAEAEQFYGSLAGQEVRVGMEACGHYPWFERLLEGLGIELWMGDAAQVRASVVRKQKTDRRDAEHLLQLLLEGRFPRIWVPSLEVRDVRQLLVHRHKQVQARTRTKNQLQAMALSCGVQKKYKLWTKAGRVELEQLPLLRYAAERRKRLLEALDGLEAEIGELDRRVEEEARRRPEAELLMTHPGVGPVTGLAMVLTLGPAERFGSAKQVGSYFGLIPSEDSSGGKQRLGKISKQGSSFLRFLLVEAGQTAARYDPQLKRFYRRLAARKNRSVAKVAVARKLATRLYLMLREDWTYAQLCQAVMQVSPSHSVAGESEPSA

SEQ ID NO: 418177 - protein, 345 aa, unidentified
MNKRMSCPQATVFCGVDVSARSLTVAVIAPEEPLARREFSNSASGHKELIVWLNKRQAKVRVSMEATGIYSLDVALALDGAAGIEVAVLNPKLVNRFSQTLRRSKTDAADAAVLAEYSQRMPFTAWRRPAVNVLRLRAMGRHLESLVVEQASGKNRLSVARSSTATPRAVIADLQRAQATLLRRVRKMRREAMKLIEAEAVLADRFQLLVSIPGIAAVSALHILSELMALAPEMTVRQWVAYCGLDPVHQVSGTSLHKPSHISRAGNRHLRRALFMPTLSAARFDPHMHAFYRALRERHKTGLQALLAVARKLLHAIFGMFKTGKPYDGARLFPHSQPALQSVTG

SEQ ID NO: 418178 - protein, 350 aa, unidentified
MNVNHYIGLDVHKKSVSYCVKLADGQIVEESRLRATHDALRQWAGKRPEPWHGAMEATLFSGWIYDTLKPFAAQLQMGHPALMKAIGASKKKNDKLDARKIADLVRCNLLPACYVAPAEIRELRRMLRYRNLVVAQATRMKNKVSGLLMEVGAEYNKQQLHGKQYFTELLDTLEEVPESVKDLLRLSRGALETFETTQEQLVVRLQKEPLLAQRVLLLKSIRGVGPVTSLTWILEVGDPQRFSSVAHAVSYCGLTSALDSSADKQQRGPISKQRNAHLQTVLIEAAKLAPRWNPQLAAVHAREVERGNRNRATLAVARKLVAYLLAVDKSGQPFQPRTPLAAETEVEKVA

SEQ ID NO: 418179 - protein, 390 aa, unidentified
MIYVGIDVAKTSHYVAVADSDGVVLVEPFAFDNDAPGFAKFISKITSFKKEQLIIGLESTGIYSESLICFHFDSGYKLAVINPIQTAALRKTNIRKTKTDKVDTLLIIKSLMVNSYRLYTEQDACSLKLKSLCRFRQSLKKSKSRLKIQLSGYVNLLFPELLSFFKSGILISTCYTLLKRCSSPAEIAALRLDSLSRLLSNASRGRFSRSTAEALKSPAKSSVGVKNSYISIQIAQTIQQIELLEQQIDEIEKVIKDTMCELHSVIMSIPEIGAIDGAMILGEIRNIDRFASPAKLLAYAGLDPTVCQSGKFKARSTKMSKRGSKILRFALINSAWQLTLKNDTFFNYYQLKLSQGLSHYGALGHVAHKLVRVIFTLLKHNVLFDPTRLV

SEQ ID NO: 418180 - protein, 360 aa, unidentified
MQPEASQEVKDGMARFVGIDIGKAKCRTAIMDPEGVILEEFTFTNNHEGIEDLALRLTLDDRVVMESTGSVWTNLYNHLDERHIPVALANPLKTKAIASAKIKSDKVDARILAHLLRSNLVAESYVPPKHLREIRALVRHRVGIIKIRTMVKNEIHALIDKHGLGHEFSDLFGKGGLEWLRSLELPPLDRLILDNHLTHLESLNQQTERVDEEIHSKACEDSDVRLLLSMTGIDVYSALLIRSEIGSIDRFPDYKKLVSWAGLAPSLHQSGNIEYHGSITKQGSRMLRWIIVEAARVAVNHDARMRSFHERVKHRRGDQKAIIAVANKMLKIIWFMLTRREPYQSRNEKRYQQKLNSIAS

SEQ ID NO: 418181 - protein, 346 aa, unidentified
MQYTAFDAHKHYTWARVERPDGTVVREKKILHERGAFRQFLASSEPGSLVAVETVGNWYWIVDEVEAAGCMPQLVHARKAKLMFGSVNKTDRLDARGLVRLQRAGTLPVVWIPPRALRDARELPRTRMVLVAQRTRLKNRIHAALSKYGISLTDASDLFGKRGRQELQACLGELPPHTSFVVTRLLEQVDQLDREVEALEQRMGELFEVDEAIQLLMTLPGVGFILATVLRTEIGEVSRFSRGEQLAAYAGTVPRVHESGGRRHYGPVRSDVNQYLKWAFVEAANVICRHRRKHPQRHTSRLYDRVAKRKGHQKAIGAVARHLAEATYWMLAKGEAYRDPGSSTGA

SEQ ID NO: 418182 - protein, 523 aa, unidentified
MATTRTRKPRRARRADVLHKPSGVIHPRVQQVGPEHFGIVSVDCAKARSKWMLCDFFGNVLVPPTLVEHHRDALDAAITQVRQALHTHDLRDCLVAVERTGRYHRVVQGAFTAAGFETRIVHPFATKQFRQPADPGNKTDDTDLAAIHRAAVTGFALCEAPRDEFWTGLQLLIRQRRDLVWKTSTLCCQIREHLEAALPGFAACFDDLWDSATAWHLVQHFASAAAVHTAGLAGLSHSLRQAQVRFQHRSLQPVLDWAAHAAAGDVAAEQRRQIALALNDDRQRKTLEIQALERDSASRLVHTPYVLLLSFPGINVVTAADFAGEMGPIAHYANARAITGRAGLRPSRYQSDQVDRANGPLVRCCNRKLRAAILGIADNLVCCNRHFNVLTHHWRAQGKDPRHTRVKVGSRFCRIAFQMVAGRQVFRHPCLQGPHYTLDKLTAFHRLHHTPAADLLRDLEAAIGQLPRKEYQAEARPLHEELQRIQDGRRRGPQLLADILPIVLARLGVGEVQSRTSGDHDPA

SEQ ID NO: 418183 - protein, 369 aa, unidentified
MAETTEAFVGIDVAKLRNAVAVADAGRDGEVRFYGEVDASPESMRRLAAKLAGKHERLHFCYEAGPTGYGLHRLLTGLGHSCVVVAPSLVPRKPGDRVKTNRRDALSLARLLRAGELTPIWVPDTAHEAVRNLVRARAAAVKDVGLKKRQVGAFLLRHSRLFPRKKNWGARYRSWLETQSFEHPADQIVLQEGIESVRLAEERLARLDRAIGEFLPTWSLAPLVEALQALRGVDLVTAVTFVVEVGDIRRFESPRQLMGYLGLVPGERSTGETVRRGSITEMGNARVRHLLVESAWTYRHPPRVGKAKLPKLERVSPKVREIAWKAQSRLTARYRALTARGKKTTVTCTAIARELAAFMWAVAREARPA

SEQ ID NO: 418184 - protein, 402 aa, unidentified
MAAGQLWAGVDVGKEHHWVCVVDDMGTVVLSRKLVNDEQPIRALVAEVNGLAKRVSWTVDLTTVYAALLLTVLADAGKPVRYLAGRAVWQASAVYRGGEAKTDAKDARIIADQSRMRGQDLPVLHPDDDLIAELRMLTAHRADLVADRTRTINRLRQQLVAVCPALERAAQLTQDRGWVVLLARYQRPKASRQSGVSRLTRILADAGVRNAAPIATAAVAAAKTQTVRLPGEEVAAGLVADLARGVIALDDRIKTTDADIEDRFRRHPLAEVITSLPGMGFRLGAEFLAAVGDPTLIGSADQLAAWAGLAPVSRDSGKRTGRLHTPMRYSRRLRRVMYMSALTAVRCDPTSRAYYQRKRDQGKRAIPATICLARRRTNVLYALIRDNRTWQPDSPPITKSAA

SEQ ID NO: 418185 - protein, 416 aa, unidentified
MKVVYPICCGVDVHKKFLVATIITTEGITPHYQKKRFSTFNNSILAFKQWLIDNQCFDVCMESTGKYWVPVYNLLEDQISVTVANPKWVKAVKGNKDDNKDSKWIGDLFRLGLVPGSFIPDKFFRVLREYTRYRFKLVAQRSSEKNRFQNVFTVCNVALDAVVSDMFGVSASSITNYILTSDIFDPSICATFLKRSLKNKEDEVIESIEGFMMEPAQKSRALMVRDHLEYLNQRIAELDRMVDVLVAPYEGLITLLCTIPGVERRSAITIISEIGTDMSKFVSSKRICSWAGLTPGNNESAGKKKSVRISRAGVYLKPALVQVAHAAVKSNEFPYYRFKYERISKRRGKKRAIIAIARMILTAVYSMLSTGETWNPCDLYKIDMPQDLQNSLREKAIRKAKQFLISQGVTDLRIPA

SEQ ID NO: 418186 - protein, 429 aa, unidentified
MNYNTQNAKIASITEKTLIIGIDVGSETHYARAFSWRNYEYSKKPFAFSNDEAGFAAFKEWMDDIAEKHGMEVIIPEMEPTGHYWLNLGAYLQEQGMKPVHVNPHHVKKSKELDDNNPSKNDRKDPKTIAGLVNEGRFSYPYIPTGIYAEIRNLSNLRIQTQEEITRIKNRMARWFSIYFPEIKDVYRNPDAVSGLMVIKQAPMPCDIRELGVEGVNKIWRDARLKGAGIKRATTLVTAAEHSIGNTEAPRSARKEIRNLLEDYEGYKKRMDELMEEIEKTLSEIPYIDKLMKINGIRIKTVSCFIAEVGDIGRFDNPKQVQKLAGYAIVADSSGKHNGESRISHRGRKRLRYALYESAISVIGKNKEFKEIHSYYRTREKNPLKKMQSVIAVACKLIRIFYTILTKGVDYDGQKMLNDIVRPEIQPAA

SEQ ID NO: 418187 - protein, 456 aa, unidentified
MSNYAGVDWAADKHDVRVCDETGEELLAATFAHDEKGLRALCRTLLRLKVQLVAIERPDGLLVERLLDAGLRVLPMHPKQVAAARARFRAAGGKSDRFDAFVLCELARTDSHRFRVLEPDSDATKALRALTRAREDLVHARVALSSQLRAELERFWPGPIGLFTKLDSPISLAFLERYPSPADVRGLGEQRLGAFLARQRYSGGQQPAELLAKLRRAPEGRVGEAELAARRALVLALVTAIKPLVEQIKQLTDRIAAALREHPDGEIFLSLFRDPRSVVTAAELLAEIGDCRARYPTRDTLAADAGQAAVAVESGKRKTASFRWGCNKRLRGAFCTLADSTRHWHPWAQDRYADARARGHEHPRAIRTLGRAWCRVVWRCWQDRTPYDPVRHRGLQQHIAVTTPTSSGPVPDLAGTQRMAGEAVTELAARRAEREALDGKPTSANRAARPAKRHRG

SEQ ID NO: 418188 - protein, 449 aa, unidentified
MGPVMHPLGADVSHVPHNTVCSPGLHPKNQPNMNTTEYAAFVAMDWGDKEHALALQRRGALVEEQKLAATPEALHGWLEALGESCAHQPVALAIEGGRSAVLHALVGYPWLTIYPVHPATSERFRTAFTPSGAKDDVPDALVLLQILRQHREQLRPLQLDTAATRELAALTEIRRGAVDRRTTFACELQSTLKTMYPQALGLCGDDLWTPLALDFLTRWPELAELKRARPETLRAFYTTHRSRRPGVIAARLEQVAQARALTTDRAVLDPAILQIQLLVAVLRPLQAHIEQIEARIAACLAVHPEAPLFTALPGAGPALAARLVAAFGTDRSRYPTAASIQKYGGVAPVRVKSGRQVWTHWRWNAPKFLRQTFVEWAGQTIPKCAWARAYYFQQKQAGKRRQTILRSLAFKWLRIIWRCWYDRVPYDDARYLAALSRNNSPLAQRLAAA

SEQ ID NO: 418189 - protein, 368 aa, unidentified
MNTVKFIGMDVHKKTITIAIADQDRQSQPRIYGAIANNLDALDKFCRKMVSTTRRLYFVYEAGPCGYGIYRHLSTKGFECLVAAPSLIPKKSGDRIKNDQRDAAMLARLHRAGELTAVYVPEAPDEAMRDLTRAREDAVMAAKKAKQRLKAFLLRNSIVFTGRSQWSQAYFRWLADIAMDYPAQQVALQEYIDAVHESLGRIERLTDQIRQLVAGWRLAAVVSALQAARGVSLIVAVTMLAELGDLSRFARPSQLMGHLGLIPSEHSSGDSTKRGAITKTGNAHARKVLVEAAWAYRMPARVSRLLLKRQQDLPEQLCRIAWKAQLRLCARFRRLIARGKAKQKVVTAIARELSAFLWAMAKQVQPVA

SEQ ID NO: 418190 - protein, 360 aa, unidentified
MEVGQTGADRGVVGGVDTHKDLHVAAVVDELDRVLGSRCFATTRHGYKQMLTWMRSFGQLRRVGVEATGTYGAGLLRYMQNAGVEVLEVTTPDTHDRRKRGKNDDLDAQNAAHAAFAGRRIITPKSRDGMVESLRVLKACRKTAVAARRVALQMIHNTIVCAPDDLRETLRKMTRMQLIRTLAAWRPDLTDYRSVGSAYRITLKSLGRRYLELHDEIVDLDTMIVAIVDELAPALVARNSIGHGSAAQLLLTAGDNAERLQSEASFAALCGVSPVPASSGKTIRHRLNRGGDRAANSALHIIAIGRLRTDLRTKAYIAKRVAEGHSKLEAIRCLKRYIAREVFSLINQRKREINQGRNAA

SEQ ID NO: 418191 - protein, 337 aa, unidentified
MAKQKALRRAGVDVSARWMDVSRDAADEAVAVRQCANTAAGQRELARWLTRGGRRAQVVLEATGLYSLDVALTLQRTAGIEVMVINPRASKEFAGAWGQRARSDASAAAVLREYAARMPFTPWTLPPPAALALRAIMRRVVALIEMRVQERNRLHALSATEALPPSVRADVRQHLGALGRQIARLECEARALVEPAPALRAGYRHLCSVKGIGRRSALLILSEVAVLPAELSVRQWVAHAGLDPRPMRSGSSVHPPVHISKRGNVYLRRALFMPALVAVRRNVAVQRFATALTTRGKAPLAILVAVMRKLLHAIYGMLKTDTDFDGEKFRRSVLTAA

SEQ ID NO: 418192 - protein, 343 aa, unidentified
MSNDTRIAVDVAKAVFEIAISDRAGRVSRRERPKRHQFLPFLAQQPPATVVMEACGSAHYWAREIQKLGHQVVLLPPHHVRPYIRRNKTDRTDAKGILEASRNDDIRPVPIKSVNQQVLTSLHRLRSGWMLERTARLNALRGLLRELGVFIPVGSRKVVPATWALIEDADSNLPDALRPIFAEACREIREIEARVRLAEQQLASIAEQLPAVEHLQTIPGVGLLTSTALVGFIGDIQRFPSGRHFASYLGLTPREYSSGLKRNLGRISKRGDGYLRTLLIHGARSVLVHARKQQPDRLREWANQLAKTHVHNKAAVAVANKLARIVWAVWKHERPFALMARVA

SEQ ID NO: 418193 - protein, 414 aa, unidentified
MALVRWVGRAIGLDVHREFCVVAICEDGQVRSGGRVPSTPEGLGLLAESLLATDRVALEVTASCWEVARILEPFVERVVVVSPEDTGISSARAKTDKLDARTLALLLWKGEIDPVWMPDERCRILRRRLARREQLVHARSRAKNEISAVLARRLIERPPFADLFGVTGRRWLAEVQLPVEERESVDAGLRQIAFLDTEIKAVEQLIAQQALAWPEIRRLMTVPGVNLICAATFLGATGRADRFLTSRKLVAYLGLDPKVRQSGETPARSGRISKRGSASARWALVEAAWSVVKQPGPLRAFYERIRARRGHGKAIVATARKLAVLFWCMLSRGEDYAHQRPALTKKKLRELELTAGAKPRTKAAVGIWSTNRAIRDAERALTLQAEVSYKRMVTDQQAGRPARKVGASATPERA

SEQ ID NO: 418194 - protein, 341 aa, unidentified
MNVTTVGIDLAKSVFQIHGVNKNGKAVLRKQLRRQQMAEFFVNLPPCLIGMEACGSAHHWARKLQAMGHTVRLMAPQFVKPYVKTNKNDAADAEAICEAVARPNMRFVPIKNVEQQAVLALHRARQGFVTARTAQANQVRGLLAEFGLVIPQGFATLVLRVPEMLEDATNELPGSFRLLVQRLLDHLKELDRQVQEIEAQIVAWHRESTLSRKLAAVPGVGPITASALVATVGDAKSFASGRQMAAWLGLVPRQNSSGGKNVLLGISKRGDTYLRTLLIHGGRAVIRAAQRKREQIDGWLGELLQRRHKNVAAVAMANKNARILWALLAHGREFEAEYKAA

SEQ ID NO: 418195 - protein, 305 aa, unidentified
MISWVGIDISKSNLVVWVQPQKDGFEVPNTVEGFDVLVARLGQYTVGRVLLEATGGYERKVMAALQQASFSVLRINPRRARAFAVAMGKNAKTDPIDAAVLADFAEALHASREKPISPEREALRELIQLREHFVQQRDDNKRRLQQAQLPAAIEAIKDHIRYLQTQIKQFGKAIDQSMRELDAEKADRLISVKGIGTVATASLLVYLPELGELDRREIAALAGIAPYNDDSGNHSGKRQIYGGRARVRRALYMSCWVVIRCQADFKARYESLRERGKSAKVALIACMRILLIRLNAMLRDGTEWR

SEQ ID NO: 418196 - protein, 358 aa, unidentified
MAGKVTETAVVGGVDTHKDLHVAAVVDQNNKVLGTQFFSTTRQGYRQMLAWMTSFGALKRIGVECTGTYGSGLLRYLQNAGLEVLEVTAPDRMERRKRGKSDTIDAECAAHAAFSGIRTVTPKTRNGMIESLRVLKTCRKTAISARRVALQIIHSNIISAPDELREQLRNMTRMQLIRTLGSWRPDASEYRNVTNVYRISLKSLARRYPELHDEIADLDVMIAAIVDELAPELIKRNAIGYESASQLLITAGDNPQRLRSESGFAALCGVSPVPVSSGKTNRYRLNRGGDRAANSALHIIAIGRLRTDDKTKEYVARRVAEGHTKMEAIRCLKRYISREVYTLLRNQNRQINSITITA

SEQ ID NO: 418197 - protein, 362 aa, unidentified
MTILTIVAHFHSFVVGVDTHARNHVFAILDAANGALLDTQTFPTSPAGINRSIAWVARRTNADADTLWVIEGAASYGAILAGTVSAAGYPVSEAPRMDVKRNHGVGKSDALDAHRLAMAVLPLEVEKLRRPRLNDGVRQGLRILIAARNSMAQDRTRSVNALNALVRSNNLGIDARSKLTALQIGEISRWRERDEELSLQIARAEAVRLGNSILILDKQLKDNEKQLQSLVVVSTAAPLLDEKGFGPVTAATCYIAWSHEGRVRNEAAFASLAGVNPIPASSGNTTRHRLNRGGDRTLNSALYIVALTRMIHHETTREYVEKRRAQGLNDREIRRCIKRYLARTVFRILTTSAKQETLQNAA

SEQ ID NO: 418198 - protein, 411 aa, unidentified
MEAIIERAAGLDVHQGSVVACVILGVAGRRPSKEVRSFGTMRQDLAALRAWLLERGVTHVGMEGTGVYWQPVHAALEGAFTLIVGNAAHMRNVPGRKTDVKDAEWIAELVRHGLVRASFVPPPEVRVLRELVRHRKALVGTMAAERNRTLKLLESAGIKLAGVMSSVFGVSGMLMLRALAEGSTDAASMADLAKRRLRRKIDRLALALDGSLAEHQRLLLRMHIRRLEEIGRDVAEVEAAISVAMRPFAAQQALLVTIPGVDALTAAAIIAEIGVDMAAFGTAQRLAAWAGICPANHESAGKQKRRGTRKGNPYLKATLVTAAVCGARTQGSYLRDKFHRLRARMGAKKAAVAVGHKILVAVFHILRRSVAFTDLGADHLDRVDKYRTAKRLVRRLDALGYAVMLRPKPAD

SEQ ID NO: 418199 - protein, 338 aa, unidentified
MKLYGGIDLHSNNSVVVIQDEADRKLFEKRLRNDLSTILRALAPFASELEGIVVESTYNWYWLVDGLMEAGYRVHLAHTRAIQTYAGLKYGDDLTDAGWLAHLLRLGLLAEGYIYPKAERGLRDLLRKRGQLVRQRTTQLLSIQNQVLRTTAQRLSGNRIKQLTVEEVEGLLPEADVALAVTSNLAVMDCLIEQIRHLEGVVRRRMRPKPGFDHLCTVDGIGPILAWTILLEVGDIGRFGRVGQFASYCRCVEANRFSNGKKKGENNGKNGNRYLAWAFVEAAHFAVRYNPKIQRYYQRKKAKKNGAVATKAVAHKLARACYYILRENVPFDVDRAFA

SEQ ID NO: 418200 - protein, 344 aa, unidentified
MNITTFGLDIAKNVMQVHWVDAQTGEVGRRALKRSQLAAFFARQTQCRIVLEACGSGHFWGRTLSALGHEVRLIHARHVKPFVRGNKNDAADAQAIWSAAQQPDMRWVPLKSEQQQAVLSLHRVRAQWIKVRTQTVNGLRGLLYEFGVLLPGGRQAGVKGITANRAEIDAKVPALLHGLIDGQLQMLRQIDERIAAIEAELQGLEIQLESARRVRQIPGVGLLGATALAAVLGEDAKGYRNGREFAACLGLVPCHRGTGGKVAVGHLSKRGDPYLRTLLMHGARAVIFHAKTKSAWLQQLLARRPFNVVVAALANKMARTAWALVAHGREYQAGRFAQASLSKI

SEQ ID NO: 418201 - protein, 350 aa, unidentified
MLYAGLDLSRKRLDFRLLDQAGETVEVGAAPPDADGLRGLASRVARFGEPVRAAIESMNGARFVHDQLEQAGWQVEIADALKVKGLAPLACKTDRIDAWVLAELCRRELVPAIWLPDPEVRAERERARFRLHLVRHRSSLKHRIHAVLLAHGTPCPVSDLFGVSGRALLERLALPEPWAGTVAASLRLVDELEREIAACEAELRPLGAEHRYVPLLLTVPGIAWVLADTIAAEIGDISRFPSPRKLAGYSGLCPRVYQSGTSDRRGPLSKQGPKYLRWALVEASTHACRHPLYRERYERTRARLGKQRGPRIAQVDLARKLAEAIWQMPTRNRPFAPAGAAKPVAAPTAL

SEQ ID NO: 418202 - protein, 411 aa, unidentified
MEKVYDKCCGIDVHKKLIVACFRQGNKQEVRDFGATTRELLELADWLKDGECEMVAMESTASYWKPLYNILESSELNAMVVNARHMKAVPGQKTDVKDAEWIADLLQHGLLQASYIPAKDQRELRELVRYRKSLVGERGRELNRLQKMLEGANIKLSGTVRDINGKSARNILEYVLTGESFDEAKYDEMYENKVIAHNLKASKEQIIDDLNGVMTPLQRRMMKELLAHLDELNVHIKNLDDEIDNFMKPEEKQATSAIEDVTGIGHTSAQAVISVIGTDMNRFPTDAHIASWAGLCPGDNESAGKRKSGKTRKGNALLRSTLVTCAHSAVRNKSSYFYAQFMRLSAHRGKKRAYVAVAHSMLVAIYHILKDGVVFKDLGADYYNQFNKERKINAYLKKLKALGWEVPVVAA

SEQ ID NO: 418203 - protein, 252 aa, unidentified
MSLPNPLCVGIDVSKATLDIAASTDITPFTVSNDSDGFDAIIAELREHSVALILMEATGGLEAAVACQLQAEGFDVAVINPRQARDFARAMGHLAKTDRIDARVLAQMAEVINRHPDRVRFIRSLPDVERQVLAAMVIRRRQLIAMLVAERNRLHPVHPQSRKSINIIIKALEDELARIDEEINSHIRNHFKEQAARLSSIKGVGAMTVASLLAEVPELGSLSRRAISALVGVAPVNRDSGSMRGRRTYRYW

SEQ ID NO: 418204 - protein, 353 aa, unidentified
MKYVGVDWAYRRAQWCALAPGGEFAGEGGIAADRDGLARLVLELGDEVKACLEMMSGALWVRDELVACGWQVEVADARKVKTVAPLAAKTDKVDARLLAELCRRELVPGLWLPSLNERALRERLRRRMHLVRLRTSAKGRIFGLQTQWGVRVSLARLRRADGLSLLERAGVPEVWRRSVGECLALIDFLDARIAPLEAELRPFAQADPRAVLLDTIPGVAELLALTIAVEIGEIDRFTRPEKLVSYSRLAPRVHQSGDGRARSGPLSKSGSRLLGWAAVEAAQQAWREPNPWHELYLDVARRSRHTNAAKAAVARKILIAAWHMLSRNEPFNPAPRSTGGASVPASSRLALAA

SEQ ID NO: 418205 - protein, 466 aa, unidentified
MKKMPLTVVNPHAAGIDVGSRTHFVAIGQEQKDVKSFGVYAEDLSSLVKWLIDSQVTTVAMESTGAYWQNLFVELINSGIEVVLTNGKFTKNINRKKTDVLDCQWIQKMHSLGLLPSSFLPDHTTERLRTLCRHRTNMIQQRADSIHKMAKFLKYLNFRLDVVVRDIAGQTGLKIIEDICNGNLDPKALAAHRHHNCRRSEEEIAKALVSNKREDYLFGLKQEFARHQFYTSMVIDCDKEISQFLEQTIQQKGDVVDDIPDGKYFKRQNKNAITGIDLNIASYQYFNGVDLLAIPGVSHSTILSLMSEIGPDGFNQFPTAQHFASWLKLAPNNKISGGRVLSNRIPQGSNRLKIALRNAANAVGNLKDSDLTKFFKKIAFKKGRQTAINATARKIAVILWNMTTKRQPYMPKNNYLFLDQKRRIVSRMRKQIADLGINPDDLGFSRANRDKIAAQMPSDYQSFSLR

SEQ ID NO: 418206 - protein, 402 aa, unidentified
MNAVGIDVSKGKSMVAIMRPFGEIVSAPFEIKHTASDIHSLVELINSVEGESRIVMEHTGRYYEVLAHQLSKANLFVSAINPKLIKDFDNDSLRKVKSDKADSVKIARYALDKWQNLKQYNVMDELRNQLKTMNRQFGFYMKHKTAMKNNLIGILDQTYPGVNTYFDSPARSDGSQKWVDFASTYWHVDCVRKMSLNAFIDHYQNWCKRKKYNFSQSKAEEIYGKAKELVPVLPKDAITKLIIKQAVDQLNSASTTVESLRTLMNETASKLPEYPVVMAMKGVGTSLGPQLMAEIGNVSRFTHKSAITAFAGVDPGVNESGTYEQKSVPTSKRGSADLRKTLFQVMDVLIKTHPQDDPVYQFLDKKRAQGKPYYVYMTAGANKFLRIYYGRVKEYLASLPES

SEQ ID NO: 418207 - protein, 334 aa, unidentified
MSVYVGIDVHRKRSQIAVVEDGGAVRVNRNVPNGVEPVLSVIGDLPIGAPVAFEAAYGWGWLVELLEDYGFEPHLVHPLRCKAIASARLKNDKVDAATLAQLLRADLLPEAWIAPLDVRQQRVLVRHRCQLVRLRTLLRNRVHAVLADHGCDRPGGYFTAPGRAWLQALDLPEASRRVVDDLLVLMDALKEPIDALDAQLLAQARGDPRVKALTQLPGVGTLTALVMVAEIGDVTRFPSARKLTAWAGLTPTVRGSDLTVRHGHISKQGSDWLRWILCEAAQTAKRSPDFSVAYQRLAHRRGKKIATTAVARRLLARAYHVLREIGSTQLQRRR

SEQ ID NO: 418208 - protein, 312 aa, unidentified
MKAILGVDVSSTSLDACVLKEDREYDKSFDYDKAGCRKLIRWAKKHQVTRAAVEATGGYEQRIGKLMTLEGMNVHVVNPAQVRHFARGIGKIAKTDRIDARVIARFAQVVDLPEPMKVSKAQMELKKLILRRNDLKKMIQAERNRTRFAEGDVMENIQTTIDFLTLQLQKIELKINSLRLSNPEISTKAEVICSQKGVGIMTAMTLVGLLPELGCLDRRKITALVGLAPYSRESGKFKGKRFIYGGRAAVRHALYMPAWVATQHDNDFTTFYNRLRKNGKKPKVAITATMRKLLVRINAKMRNHMKENQQKA

SEQ ID NO: 418209 - protein, 347 aa, unidentified
MRSIGIDLHKRSMTVCVIDKTAGKTFVRKFSCGNEEQLRTFFLSQQPFEAVIEASASYEWLWLLLEPLAERLVLAHPGKIRIIAESKKKNDRFDATVLAQILAQDEVPEAHRPTPRQREYQHLVRHRTSLIRERSRFRTQIRSILASRNLDQPALFTKLNLETLKALKLPEAERFRVGELLLLLESLKDRILAAEKQLKRFREEAPEAEKKNHEILRSVPGIGNVVADVVLSTLGDVHRFKNIRKVSSYVGLAPGFRESDRKRHDLGITKQGPKILRWVIIEAAWRAIRESKRWKQTFEEIAGRRGRKKAVVAVGRRLLGVAYTLLKKGEVYSETFPVRTSPLVRTA

SEQ ID NO: 418210 - protein, 406 aa, unidentified
MADDYDFYIGLDWGTDQHQACVLDAAGRRVGEHTITHSGAGLAAWLAALARYGPAARLAVAIEVPRGAVVDALLAHGCHVYALNPKQLDRFRDRQTVAGAKDDRRDAGVLADALRTDRGVFRARQPDDPRLGPLRELTRLARELGTESTRLTNRLREQLVRSFPQVLTLCPAADEPWLWTLLDHAPTATQAARLRPQTLRALLAKHRVRRFTAADLSACLQAPPLPAAAGTIAAAGEHIAFLLPRLRLASQQRRQCDRRLEQLLDVRATGEPPLEHRDVTILRSLPGVGRLVAATMLAEAWPALAARDYQMLRTHSGVAPVTRQSGKTRLVTMRRSCNGHLREAVFHWASNSLRLDPRCRAHYDRLRRRHGHARALRGVADRLLSLLIALLRAGTLYDPARRQVAA

SEQ ID NO: 418211 - protein, 357 aa, unidentified
MKIVGCDLHARQQTIAMVDTETGEFTEKTLFHEGNAVREFYATLEGPVVVGIEATGAMQWFLELLEELGIECRVGHPAKIRAKETRKQKHDRRDARLILELLVEGGFPEIWMPSTEQRDLRTLLRDRHQWVKMRARLQHTLQAIALNHALRQGHALWSAAGRGALQALALPPYTSQRRTELLSLYVQLQKRIQELDQVVEAQARQRPQARRLLTHPGVGAVTALATEVFLGDPSRFATAKQVASYIGRIPCEHSSGKRQRLGKLTKEGNSLLRYLWTEATMHAVGKDPELKRFYRRKLIQKGMGKARIAAARKLGIRLWIMMRDRIDYEEFCRRGKLRQTGEAHAGMPGFNSGPARQ

SEQ ID NO: 418212 - protein, 367 aa, unidentified
MKKNNTSQQSRKGAKGGITMGMDLGDKTSRYCVLDGNGEVVEEGSVATTKKELAQVLGAMGRCRIAMEVGTHSPWVSRLLKSLGHEVIVANARQVKLISASSRKDDRLDAQTLARLARVDPELLRPIRHRREKAQQHLMKIRVRARLVDARTSLVNAARGMTKAVGERLPACDAGSMGTAQMVDLPTGLQETLKPLLEQVESLTQKIKECEKEIEQIAGTEYAETYVRRQVSGVGNLIALTFVLTVEDRERFQKSRDVGCYVGLRPRRSDSGQSQPQLRITKEGDNYLRKMLVQGAHYILGWRGRDTDLRRWGLKLAERGGKNAKKRAIVAVAIGNKSVILKLFFVSTRSPTGREVAPPASAPLPFG

SEQ ID NO: 418213 - protein, 315 aa, unidentified
MEIRTIGIDLGKTVFHFVGVNARGEVVVRKKGSRTQLLRFTSNLRECLIGMEACGGSHFLGRALREQGHDVRLMPAQYVKPYVKTNKNDYIDAEACAEAVTRPTMRFVPIKTDDQLDLQSLHRVRERWVGRRTAVINQIRGMLLERGITIRKGRHHIEESLPGILEDPDNKLSGALRVLLTQLRSEMQYLHGQVEESDKLIVRICGELEQCRRLVAIPGIGPITATATVAAIGNGAAFKKGRGFSAWLGVVPGEHSTGGKQKLTGTSRRGNKYLRKLFVQGAHTVLLQKTKQSSGLSTWLVNLTSRKRPQVQPWR

SEQ ID NO: 418214 - protein, 401 aa, unidentified
MRAADWFFVTIAAFDNSGDRTTMASIGDSVRSNTTIYAAIELSKKSWVVAIAHPDRDRPSMHRIAGGNLADLIGRLRKAAGERRIVVCYEAGYDGFWLARSLLKIGIDCRVLDPASIQVNRRARRVKTDRIDSLALLRSLIAVDRGERHVCAVVRVPTVEEEDARRSHRERQRLVRERTGHINRIKGLLFAQGIRGIEPKRRRTRIDFGKLTTAEGRPLGERLRRELEREYQRLELVQNQLRIVEKERDTADAQDPAVERKRELLCALQGVGSTSAAILAREVFARPFASRRHLASYLGLTPSAYDSGSMTRCQGISKAGNSWARRVLVEVAWLWRKYQPASDLSEWYVRKTAGQSPRIRRIMLIALARKLAISLWRYVETGLVPDGAVMAKTALHQGAAT

SEQ ID NO: 418215 - protein, 334 aa, unidentified
MKSGIVHIGVDVSKEKLDVFVPAQKEGMRPTTKGVDNCVAGFREIRDIARKARATVCVEPTGGYELELIAFLHKFEVPVAYADALRVRQFARAEGSLSKNDTIDAALISRFADKIGVRVLAPQEVEAVELKRKAKFRQTMMDSRTAMANRLETETDPEMKALLKEQIKHMDKVIGKAERLCLDTVKKDERMNALLERFAKVGGVGDMTAMSILAGLPEIGNLTDAKLNRLVGIAPEEKQSGTKEWQRRIWGGRKDVRNALYMACLASIQWNAVLGGYYRKKRAEGHPHKWAIVPTMRKLLSLLNRIARDPDFIPSPEPESTKRNATAGRKRNAA

SEQ ID NO: 418216 - protein, 346 aa, unidentified
MNHYAGIDVSLECSSVCVVDASGKILREAKVPSEPEALIAWFRGLGFGLERIGLEAGPLSQWLFAAMKAAGLAVELLETRHVRKAFEAMPVKSDRNDARGIAQLMRLGWFRPVHCKSMGAQETRTVLTARKLVQSKLRDVENSLRGILRGFGLKVGPTTERSFCGRIRELVAGHPNLETVAEALLAVHAVLLREFNGFEKQVRRMARSDAKAKLLMSTPSVGPVVSLTYASAIDDPARFKSSKQVGAHFGITPKKYQSGETDYAGRISKIGDASVRTALYEAAHIMLTKPVKGCTELKSWAMRIARRAGMSKAKVALARRLAVIMHRMLVDGTPFNQAHKQIAAAA

SEQ ID NO: 418217 - protein, 340 aa, unidentified
MDKELYFGVDVSKKTLDLAYYDGETIDWKNAHIKVSDDAGFKKIGSWVAKVGKDFDTFLFCMEYTGLYNQNFRLWLESKEYIYGMVEPRKMHHFEPDLDDDQRSLDRIKTDELDAFRIAIYCEQNHKKILRNPSKLPSPVYFKLKRLLAERKQNTKQSTLYKQQLHDICAYDTDLSVERKKLLLKNMMENQKAIDKEIDSYMNEDASISKNYDLLTSIPGIGRIIALETIVLTENFTAISNPRKYACYIGIAPFKKESGTSVRKRTAVSKKGFSEAKADLSIAVLSAIKNNPSIRDYWIRKRKEKCGGIVLNAVKFKLVLRMFAVIKRGTPYVETDAYKN

SEQ ID NO: 418218 - protein, 451 aa, unidentified
MNKREPPVKIKLRHKIHKNRRFSKEMFKNQDEKLKLIQPGTIIIGVDVAKRSHWMQPIHFNGVTIGKAFQIKNTREGFESLVIKIERLKLENGCQQVLVGLEPTGHYWKALAWFLKQQGITVVLVNPYHVKKSKELDDNAPSKNDPKDAKTVAQLVKEGRFMAVYIPEGVYGELRTLSNLRGQLGAKLNSLKNIVTAILDEYFPEFETVFKSFYGKAALHILYQGLFPAELKQLGESGIINEFKKVIKKGVGKKRAEALYQAACNTIGLPATDGIKLKLRLCLDDFKSLTERMATVEQAMAEQLKATGISEYLLSIKGIGVVLAAGLLGEIGDPLRFDTWKQIRKLAGFNLVADSSGEKKGQLKISKRGRHLLRSYLYQAVLVMVSKNKEFKSLYQYLLHRKQNPLKNKKALIAIATKLIRIIVTLINQKENYDPAKVLGPVRESQLKEAA

SEQ ID NO: 418219 - protein, 411 aa, unidentified
MAQERRLVIGGVDTHKDVHVGAVIDVRGKILDTAEFGTTAKGYRLLVEWMVGFGELQRVGVEGTGAYGAGLARYLAEAGVAVVEVNRPNRQMRRRRGKCDTVDAEAAARAALNGEATVTPKAEDGIVESIRILRVAFTSARNSRTRVALQIRDLIITAPDQLREVLGSLTTAQRVARCARFRLGGDTAEPTAATKLALRTLARRYEALSAELAELNATLDELTARANPALRGSKGVGADVAAILLVAAGDNPDRLRGEASFAAMCGVNPIEASSGKTVRHRLNRSGNRQANHALWRIVMNRLTTDPTTKAYAARRTAEGKTKREIVRCLKRYVAREIYRLIVNPGAVPAGADLRVVRVGAGLRLHHAATALGTTVVSISRLELGHAHDTGLAQRYERWLGEITTSADFQAA

SEQ ID NO: 418220 - protein, 482 aa, unidentified
MKKRNIYSNRSQELLGLFEQAGNNSKVMCVPIDYAKKDHVVMFCNGYGDILRKPFAVKNSPVGMKYLLEQVNRACRHRGIKNEHVFFGGEDVNSYAENFVNALRSKGWLVANVNAHDAKKQRENLQASTDRLDLMGIATMLLNRRANCMPAQSGVYRNLRTLVRHRKKLVKMKTEVRNRTHTIVDRLLPGFLNEKKSGINPFSKSSLSLMQDRFSAPQIQRRKRSTLVAQLKRLGTPNAEQIAAKLQTYAAQVLTPPDEHTATLQVSLSSHAKHYHCLLDSAEQLQREMALLLCQTQGAYLTSIKGIGIVLAAGVTAEIGNPYEQKPLNNLVSYAGIVPRVKQSGGPEGQPHAGRVSKRNNHILKDYVVQSAFHIGRYGPADLLADYKRREANGQHADFGIARRFLRMAVCLMRTSQIYLPPHLRNVKTKSQERAGYYLAVWPYLKDKWNKLGALKAAFAKDRPLGQWRYIIQELYDIKLNL

SEQ ID NO: 418221 - protein, 351 aa, unidentified
MMIIGVDYHPSFQTIAFLMEETGECGEQELKHSNGQAEKFYRDLKQRGICVRVGMEATGYSRWFERLLAELGFELWIGDPAEIKAKRIKKQKTDRNDARLLRRLMLENNFPQIWVPSPENRDLRQLLWHRHRLVQMRTRIMNQLQALAMNEGYRWKKKLFREQGRAQLEKLTLAPWASRRRRELLELLDRMNPTIEELTAAVEREARKRPEVQRLMTHPGVGPLTALAFVLIIGTWERFPRGKQIGTYVGMIPSEDSSAGKQRLGHISKQGNSLLRFLLVEAAQAAARVHPDWRRRYIHLAMRRHKSIAKVAMGRRLAIRLYWMWRNGCEYSRSLEFGSYAGQLETGHGVK

SEQ ID NO: 418222 - protein, 433 aa, unidentified
MPTEFAALVAIDWADQKHVWALQKAGSSERETGTIDHTPEALEVWASELRLRFGGQPVAVALEQSRGPLVFTLTKYDHLVIFPVHPTTLANYRKSFRPSGAKDDPSDARLLLDILTLHRDQLRRLNPDTPETRTLQFLVEERRKLVQEKTRYSNRITAHLKMYFPQVLHWFDVGSTMAADFLERWPSLEQLQRARPASIERFFLDHHSRDHERIAQRLEQIRKAVPMTLDAAVLTACRTAIVAWAALLKQVLTAIALYDEKIDELARVHPDYALMNSFPGAGSALAPRLIAAMGSQRERYRTAQEVQCYSGIAPVVASSGQQRWVHWRWACSKFLRQTFHEWALHSIAYCPWAREYYEQQRAKGKRHNTVIRALAFKWIRVLFRCWKERKPYDEAIYQRALDARRPQTQFAAPAVELQWKNVAGFLKIAIKEA

SEQ ID NO: 418223 - protein, 356 aa, unidentified
MQLQDALIKPKIFIGLDIHKKSWTVSIQTDLFFHRTYSMPSVAEDLFQYVEQTFPNHEVDLVYEAGCCGFSAARYFLNLGWHVLVVNPSDVKTSDKERYQKTDALDSRNLSNQLKAGVLRGVYIPTEEHEQFTTLARHRTQVTKKLRQSKLHIKSMLLFHGIKVPDEFDTPNWSKDFIVWLENIKFSSNCGELALQGKIRMYKFIRSEYLEIANQMRAHCRKTYKKDYNLLRSIPGIGGYLASVILAECGDLRRFHNEGQFSSYIGLVPGVYNSGGSEKCLGITPRSRSQLRSYLVEAAWVAIRKDAEMQNYYRKHQGKNVKSVIIKIAHKMARRILSVIKTETPYQINRNLVLGK

SEQ ID NO: 418224 - protein, 304 aa, unidentified
MFGIGIDVSKDRLDVAVHEQQFRHFSNSKRGFEALVRWLQKWPAKQVVLEASGGYEQAALDALHEAGLPMVRINPGRARSFAKATGQLAKTDRIDAMVLAQMAHLLKHTRYTPAAPWQRKLAEFSLRRRHLVQMRSSEKQRMRAFSEPALQAMMSSQLDYLDEQIRVLNKAIAEQLRNQPSWNSLVEMKGVSTVVMTTLACELPELGKLSGKAISALVGVAPMNRESGSWQGRRRITGGRAVVRQALYMAALSACRYEPQLRNFFKSLKAKGKPGKVALVAVMRKMLVILNARKRDAEATMASA

SEQ ID NO: 418225 - protein, 356 aa, unidentified
MNEITRVGVDLAKSVIQVNAVDAGGKLVTNRQLSRDKFLPWCAQLPPGCLVAMEACGGAHHWARQIIALGLNAKIIAAHLVTPYRLQGKGGKNDANDAAAVCEAASRPNMRFVPVKTTVQQGILSVHSLREGLKEERTASINRIRGMLAEFGLVASKSPVKLREKLPDMLEDGSNELSGMARLVIQEAYDQWKDLDERIDWCNERIKAHVKDDAQAKAAKELVGIGPVTASAVVATVGNFNQFKNGAQFGAWLGLTPKQNSSGGKSSLGGVTKRGDMYLRTLLIQGAKSAVMTAHKRDDPISKWLCQLREKSGWQKAAVAMANKNARILWAMMTKGCRFDPRHVSIKPTATVATMV

SEQ ID NO: 418226 - protein, 420 aa, unidentified
MRNAGIHANSLLEVRRMYNAVGIDVSKGKSTVAVLQPGGTVIRKPFDVSHTSQNLNELADYLSSLDGTTKIVMECTGRYHEPMVKALSEAGLFVSIVNPHLIKNFGNNSLRKVKSDPADARKIARYTLDNWTELRQYSGMDNTRTQLKTLNSQFSFFMKQKVAAKANLIALLDNTYPGVNKLFDSPTREDGSEKWVDYAYSFWHADCVRKIGLKAFTERYKSFCKKHHYIFQQDKPEKLFNASKELVAVFPKEKTYKLLIQQSIQQLNLASGHVERLRREMNELASTLPEYSTVMGIYGVGKTYGPQLIAEIGDVSRFTHREALTAFAGVDPGVDESGQHKSKSNRASKVGSARLRKTLFQIMTTLLQNAPEADPVYRFLDKKRSQGKPYYVYMTAGANKFLRIYYGKVKECLRNLEQTE

SEQ ID NO: 418227 - protein, 404 aa, unidentified
MSVHVAPVTSSTIVVAVDVGKTSAMLSATDSARQRVFGPVEFAMTRSGLVGVVHRVGAVVPSCAQVKVGIEAAGHYHRPVLDYRWPAGWEVLEFNPAHVAEQRRVAGRRRVKTDAIDLEAITELVLAGRGQPLGDREVRIGELAAWAAHRSRRVAVRTATKNQLLGQLDRAFPGLTRALPDVLGTKIGRLVAAEFTDPARLSALGVSRLIRFAAARDIQLRRPVAERLVTAAREVLPTRDAAVARRVLATDMGLLADLDTHIAAAEAELATLVPLSVFATLTSVPGWGVVRVSNYAAALRDPGRWPGPRQIYRASGLSPMQYESAGKRRDGKISREGSVALRRALIDLGIGLWLCEPAAKTYAAELKSRGKHGGIIGCALAHRANRIAYALVRDHSGYDPSRWA

SEQ ID NO: 418228 - protein, 332 aa, unidentified
MKKIIHFIGIDVSKETLDIALIRNNDKSNIYSSKVTNNKTGFKKMKQWLKAEKVSLHEAVFCIEHTGMYSKPIGQFILSLQGNLWMEMSLKIIRSMGVQRGKNDKIDAIRIALYAQRCQDEMKLYDPPRPIVEKLRTLLQLRKRLINSRTSLQVPCNELTTIDEKAGKEATRLIRSSVSALEKNIDMINEEIDELIASDEQLAHEFEIGTSVPGIARITLAYIICFTNEFKNYSGGKQLACYCGVVPFEYTSGKSVRGKPHVHNMANKFLKKLLHMGAIAAVTYYDEFKCYYKRKVEEGKPKMLVLNNVRNKMVLRLAAVIKNNKPYQKIAA

SEQ ID NO: 418229 - protein, 363 aa, unidentified
MNESRTVTVGLDVHARSIRLAAVRADELLEERTLPYDEEAVERVLRRWPAVRCCYEAGPTGFGLYRHLVEQGFDCRVVAPGLVPQRPGDRVKTDPRDARKLARLLAGGLLEPIHVPSPEQEAARDLVRAREDARLDRMRDRHRLSKFCLRHGRTLPTSSWTVVRRKWLSEQRFPFAAQQITFDSYVHAVDLVDARIEQLERAIRETAEQEPWRELVASLRCLRGVDTLTALALVAEIGDFSRFRTAEEFMAFVGLVPSEHSSGERRQQGSITKVGNSHIRRLLVESAWHARRRPKVGYELARRQRGQHAEVIERAWRCQQRLYQRWQRMAGRGKPQQKIVVACARELAGFVWAIATEQPLRST

SEQ ID NO: 418230 - protein, 325 aa, unidentified
MYASHRDDEDMKPFRVVGIDVSKNELENHFLPTSGGWVEPNTEAGIEALIARLRELKPELVVLEATGGYETAVAAGLVLAGFAVAVVNPRQVRNFAKAMGKLAKTDKIDAEVIALFGERMRPEARGIPEQDVRELDALVTRRRQLQAMITAEKNREQTAAPAVRPRIVEHLRWLAKELEDINQEIGGVIEQSPAWRMQEELLMSVPGVGPTTAHTLIAELPELGTLGPKRIASLVGVAPWPRDSGVFRGQRKISGGRASVRCCVYMATFVAIRCNPVIRAHYKALKARGKLFKVAMVACMRKLLGILNAMVRDNRPWTVAPAMAA

SEQ ID NO: 418231 - protein, 348 aa, unidentified
MLADQLDYVVGVDPHRDSRALAVVDVVSGAVVFEATVAASSNGYAHALKLADQHAAGRRAFAVEGTGSFGAGLTRFLTGQGERVLEVGRLRRERRSGGKTDALDAIRAARAVLAQGRPATPRASGEREAVRALMAAREGAVNARRAGLCQLQDLLVTTPEPLRSELRPLTRARLLRRLAATRPQQRGHDPELRGALLALRSVARRVLQLTAEERELAREIETLTRKLAPQLLDQPGVGPLAAAQLLLSWSHPGRITSEAAFARLAGAAPIPASSGQTIRYRLDRSGDRRLNRALHMILVTRRRTHRPTIAYITRRTEEGKSRREANRCLKRYLARNLYRLLENPPMPT

SEQ ID NO: 418232 - protein, 313 aa, unidentified
MFYTGIDLHKHSSYLTTVDSTGNIIKQADIKNVYHNFVQYFSDLGNDNITTVESTMTWYWLNDLLSSLNIPLVLAHAKYVKAIAYAKVKTDKVDSHTLAQLLRMDYIPYAHKISNSMQLLLAKYNLVSSEQLEEIPRYQYEQLSEVESLLKEQMLDLEKQLYPFLIPNEDIQRLLWIPGIGKMNAFTILLEVDDINRFPDVKNFFSYCRLTPSARNSAGKSKQRSSKDGNKYLKVVFSDAAVHACHYYPPIRKYHNSKLRKKNKSVAKTIIAKEIARIVYYVLKNKSDFNNTFKGHEIEMKSFQWPRITNPYA

SEQ ID NO: 418233 - protein, 321 aa, unidentified
MNKDKEIYGIDISKSAFDVYSESTGHVQLNNDEKGFKSLLKTLPKKALVVMEATGYYHYRLAQFLYKKGVAVSVVNPLSVKRFIQMKLAKVKTDKSDAKAICEYGTKNELPMYNALTDVQSECLQLFRLLDNYLKKRTQTKNKKHGEEVLGIPSNYVYRSLKRDLTHLDKEIKGIEERLLELVKQDQQHQLTLLKSIPGMGVKTALFLIVVTDGFKKFETASQLCSYVGITPTIRESGSSVRGRSRISKVGNKKLRNLLFLCAFSACKHNKACREIYERIVAKGKSKKLALIAVSNKLLKQAFAIAKSGLPYDEDFVSKLA

SEQ ID NO: 418234 - protein, 338 aa, unidentified
MTIFAGLDVSDKMTHICVVDGEGAIVWRGVCATDPEVLAKTLRRRAGRLVRVVLETGALSAFLYHGLIERDVPVTCICARHAKGVLSTRVNKSDPHDAEGLAQLARTGWFKAVRIKQETTHIDRAQLKIREQLCRSHRSMANQLRGLLKLFGLRMGQVTTPNKRTERLAVLFAQKPELKAVMQPLVESLEALEVQIRRSTKLLAASAAADPVASRLMTVPGVGPMTALTFKSSIEDPDRFDRGEDVGAFAGLVPRRNQSGVRDYKGRISKAGDRMLRSALYEAANSLLVRVKRPSPLQTWGKALAETKGPNRARIAVARKLAILLHRLWQSETEFCWN

SEQ ID NO: 418235 - protein, 332 aa, unidentified
MSDTPASSTPPPAGAAEPLFLGIDIAKASFDAHLLPGGQQWHLPRTAAALAAWLRELQALDAPITLVVMEASGGYENLVAATLAEAGLPVAIINPGQARQFAGALGQRAKNDPLDAALLARFGRDLRPPVRPLPDAQHQALAELLTRYTQLVDLQTAERNRLQTALSKRVRKSIEAHLKWIAAQLNAIDTDLDDLIKSSPLWRDQEQLLTSVPGIGKTTARMLLGLVPELGLYPGRQIAALSGVAPFDRQSGAWRGRRFIGGGRADVRRALYMPTLAAMRCNPPLRALHERLKAAHKPGKLIVIACMRRLLVMLNAILRDHRPWSPQPITNP

SEQ ID NO: 418236 - protein, 353 aa, unidentified
MNNIKYVGMDVHKSITVIVVLNELGHFESRSQIKTKGENICDFFRGISGKVEVVFEEGTHSAWLYKLLKPLVASVTVCDPRHNKLIEDGNKSDDEDAETLAQLLRLGAVKAIYKGDDQHQQLKEICRAYDNLIEDSTRVQNRLKAIYRGRGISCSGHDLYRADQRSDWLAKLSEDAARFRAESLLEQLESLSQLRKQAKQRLLAQARAHADYRILIKLPGFGPVRVAQLIAVVGTPHRFRTKRQFWPYCGYAVVTRSSADYQIVEGKIVKQRKKVSTRGLNHNHNPQLKQVFKGAALTALRHEAIRTYYQRLIDHGTRPELARVSIARKLASIALTVWQRREEFDIKKAFAQD

SEQ ID NO: 418237 - protein, 278 aa, unidentified
MARYLGVDLHRNNFTVCTIAENGRRYFREYDIRSLKYFAARLRASDQAAVEASTTTRLFYDAVAPHVDRLVVVNSSEFDVIRKSVKKTDRNDAETLALFLSKGLLPEVRMKDKLHAELASLTRTRDTLVKQRTSLKNKINNIMAARGLTPRREQLSSEKGLQEVEALPLSPIVMVEVRALVAQIRSLSRTILELEKTIKEEGEKLPGHQNLKSIKGIGDTSATILLSVIGDINDFPSEGKLASYFGIVPRVRNSNETQHSGRITKRGTKLGRTTLAAR

SEQ ID NO: 418238 - protein, 332 aa, unidentified
MMYVGLDYHKRYSVATKMGEDGEVLEQVKLLNDAPCLLEFLSGLPPDTKIALEATGSWYWFYELLEDRGTELHLAHPLRTRAIAEARIKTDRVDSRILAHLLRTDLLPAAYIPPRAVRDVRETLRYRASLISLRTQVKNKVHAILSKNGIRPRYKDLFGKGSLRQLRALELRPAYAEELRGYLRLAEALQRLIAEVDARVEEIAKDDPRAMLLTTIPGIGYYSALLITSEIGDIGRFPSARKLCSYAGLVPRVRSSGGRTHYGPITKQGSKYLRWIMVELSPHFVRGSSRMERLYRRVCLRHGKNTARVAVAREMLKVIYYMLRDERPFYED

SEQ ID NO: 418239 - protein, 342 aa, unidentified
MIKIGLDVHARVYVAVVQYDQLLPKPARRFFPTELVPWVESLLRQGHRVHVVYEACGFGFTLYRQLIALGAHCYVIAPRKLDEQYTRVKTDPRDATTLCQRLSRYLEGNTRELAVIRVPTEEEEQARHVTRQREQLVHHPQKLEAQGRSLLINHALPAPAHWWKEQTWTRLSKHLPQWITTRLQIARPALLSLQEQIETLTIQLEATAPPHLPAGLGKLTSVMLTREICDWHRFNNRRAISSYTGLCPGERSSGSKRVPGSVTKRGNPRVRAALVECAWRMVRFQPQYPPVQKRLALLGKGSPAPGAVRKKAIVAVARRLAVDLWRLHTGRCTVAQLGFTIK

SEQ ID NO: 418240 - protein, 350 aa, unidentified
MRTIDFTNEPIYIGIDTHKNSWNISIMLKGITHKTFTQPPKPDVLSKYLHTNFPGGDYICAYEAGFCGYWIQQELEQKGIKCIIVNPADVPTKHKEKDNKTDKVDSRKIARSLRNNELEPIYIPSQQSLEDRSLTRLRYGIVTDLTRCKNRIKSLLFFYGIEIPSGLSKRSKGYFNWLESVELTQETGTITIKYLLQEYLSLRTIQFDVTKNIRHLSRTEKYAKHIALLTSVPGIGIITAMIILTEIDTIHRFNNLDKLCSFIGLVPRVNSSGEKEVIGEITSRGNMHIKKCLVESSWMAIRRDPALMMNYKEYCKRMEPNKAIIKITRKLVNRIRFVMKNQKKYQLNNI

SEQ ID NO: 418241 - protein, 319 aa, unidentified
MMMTREDCWVGVDVSKATLDVYLSHPEQALRLAYDPTGITTLITTLREANPTLVVLEATGGLERVLVAELLVAQLPVAVVNPRQVRRFAEAIGYLAKTDRLDARVLAHFAAAIQPPARPLPDVETRALADQLTRRRQLVDMLTMEKNRLQQAQNAAVRHDIQAHIDWLQQRVKTTERGLRQAVEASPAWQAKADLLRAVQGLGEVSILTLLASLPELGTLNRKQIAALVGVAPLNRDSGTLRGRRCVWGGRAEVRQTLYMATLSAVRYNPILKAFYTRLRDVGKTAKVALVACMRKLLTIINAMLRDQTHWDDHHGKTA

SEQ ID NO: 418242 - protein, 376 aa, unidentified
MQDSMFIGLDVHKATISVAVAQGERGGEVRHFGTVPHRPDHVRKLVEKLATGGARLHFCYEAGPCGYGLYRQLVEMGHDCIVVAPSLIPVKAGDRVKTDRRDAVMLAKLHRAGELTAVWVPDAAHEAMRDLVRARATAMRVAGKARQHLQGFLLRHGRIYPGKKGWTGAYRRWLAMVRFTHPAQQIVLQDYIDAVVDAEARVERLTGQIAGLLPTWSLAPVVDAIQAMRGVGFIVAVTVVAEVGDFQRFDTPRQLMAYLGLTPSEHSSGTSVRRGGITKAGSGLARRALIEGAWSYRMQARVSPKLLARLEVLPQVARDIAWKGQLRMCQRYRHLVAAGKAKVVVITAIAREMAGFIWAIAKAVTAPPAGGVTASA

SEQ ID NO: 418243 - protein, 317 aa, unidentified
MEQRQFNTNTAGIDVGKLALDVAVHGLEDELRTENSPAGFSELIGWLKAREVGRVGLEASGGYERAARLALEAAGFEVVVHQPLEVRRFAQFKRRRAKNDRLDAQLIAAVTAQTDTFRAAQDPRLAELAERLTAYEQVTDQIAKLKTFLESVTLKDLARTMLVQIRSLERLKAKLSLDILSRIKAEADLHARLRLLTSLPGIGPIVAASLVIRMPELGQMRKGQASSLIGVAPFDRESGQWKGQRFISGGRARPRRMLYLAALAAKRCDPGFKAFAQRLLDHGKAPKVILVAIMRKLIEAANLVLARDQPWLRQPAG

SEQ ID NO: 418244 - protein, 449 aa, unidentified
MSKQRKELGLPIINAHAAGVDVGARIQVAAVPPDLCKTPVQTFQAFTADIERMADWLVSLGIKTVAMESTGVYWIPVYEILEDRGLIVVLANARECKAVPGRKSDVNDAQWLQRLHACGLLRASFRPARDIAALRAYMRVRDRHLEYAAAHIQHMQKALTHMNLQLHHVVSDVTGVTGMKIIRAIVAGERDPDVLACMRDVRCRESVETIRAALVGNYQPEHVFALAQALSLYDSYQARIADCDAQIEQALLLLNADKTPPTEPLPAPRSRTRQTNSLSFDTRPLLYQLTGVDLTQIHGIGPSVAMELVAECGTDLSRWPTEKHFTSWLTLSPGCKISGGKVLSSHTRKSSNRIAARLRLVATSVGRTDTALGAFYRRLAARIGKAKALTATARKIAILFYRAMRFGMRYEDPGADQYERRYRERVVKQLHRRAAHFGFTLQPAEQSVS

SEQ ID NO: 418245 - protein, 316 aa, unidentified
MPRKRILVKSIDTSISYQVIGIDLAKHLVSACLITGAGEIFGIDRLTYDDLLKSAERMSPTLFCMEPCPEVHYLAEKLQGYGHHTKVIDGAAVKEYIKTHFDGQKTDLNDAQAIAFLSLDTNLPEITPKNTSNSVLSSIQAVREQFRKEYIQSFVSLKGICQRWGLPISKGVMNKNKVEELVSESKKIPQEVKDWLLELLQSCRELQKRLNKISKYLKEYADNDEICQKIMSVPGIGPITATRLKATIGDIQRFEKPKSIVAYYGLVPKSKATGHNEKKRRHNSSRRSSCPFSSDRGCGSSFEFGSKRIPKIKASQ

SEQ ID NO: 418246 - protein, 346 aa, unidentified
MRFYTHSFAYTCGIDLHGRSIYACILDREGEKRFHRRLPCDGEKLLRVLEPFRGDLVVGVESTFNWYWLADFCEEAEIPFALGHAQYMKAVHGAKVGNDRVDSYRIAALLRGGTFPRAYVYPKEMRATRDLLRRRSFFVRKRAELYAHVQNSNLQYNLAPIGKVAKAATREELGGHFPDPDLQLSVDADLELITAYDAVISKLEKSLKRRAKVHDRATFELLKTLPGVGDILGLTVLYEIHDIDRFPRVQEFVSYARLIRPVNTSAGKAKGSGKAKIGNPHLRWAFAEAAALFLRGNDEGKKLLARLERRYGKGKALSVLSAKIGRATYHMMRRRTVFDPKRFLAA

SEQ ID NO: 418247 - protein, 350 aa, unidentified
MEYIAFDAHKHYTLASVVTHDGQLVREERIEHDRGALRGFLERCERGSPVAVETIGNWYWIVDEIEAAGCRPRLVHARKAKLMMGEINKTDKLDARGLNRLQRNGTLPTVWIPPGELRDQRDLPRTRMVFVRQRTQLKNRIHATLAKYALHELEVSDLFGVRGRALLRERFELLPPHTAYASQQLLRQVEELGRQVRAFEQRIEATFKPTPAIQRLLTLPGVGLTLAVVITLEVGDVARFASAEKLAAYAGTTPRVHASGGKTRFGPSRPDVNRYLKWAFVEAANAICLHRGRAGHRHVSRLYERVARRKGHAKAIGAVARHLAEATYWMLSKQEAYREPKGAGRFVHGG

SEQ ID NO: 418248 - protein, 432 aa, unidentified
MIKINYMSTLFVGIDVSSKSNVVYAMDFDENKYISSSFSNNQPGADELAEMISECMNKHSNLNTIIIALESTSVYSIHIANFLSTCELLMPYKPYVYCVNPKATANYRKSYVSMDKTDPMDAFLIADFARVGRTKKCEPWRGGQYLALKRLTRHRLHLAECITREKTYMVSNLYLKFSELQLLEGDEQPFSNTYGATASAVLTEFMSPQEIIDSSEEELLEFLAKKSRNRISDISKTSDLLKKAARDSYRLDKCMYEPINVSLASSFNCIQTYQKEIKLIDQAIEKCINGMNPNAFIILKSIPGIGPVWAAGILSEIGDITAFHSSDALAKYAGLTWLKNDSGDFVSEDNRISKAGNTYLRYYLGEAANSVRRHVPEYAEFYSRKYAEVTKHQHKRALALTSRKFIRLVFGLLVKNQLYTGEKLDAKLNTES

SEQ ID NO: 418249 - protein, 338 aa, unidentified
MAPRRPCPRNPNGHQGQQARIQRNRVMDKAPIFVGIDVSKRRLDIHSRPSGESFTIDHDDDGVAALVERLAALAPALVVLEATGGMEVAPAAALAAAGLPVAVVNPRQVRAFARATGRLAKTDRLDAEVIARFAEAVRPPARPLPDEETRRLGALVARRRQLLEMLVAERDRRRMADPALHEGIDAHLRWLGEALDGIERDLDAAVRASPLWRAKEELLRSVPGVGPVSARTLLAELPELGSLTRRQAAALVGVAPFNHDSGRMRGKRAVGGGRAALRACLYMAAVAAVRAGNPAVAGFYGRLRTAGKPAKLALTACVRKLVVILNAMLRTGTAWKQA

SEQ ID NO: 418250 - protein, 345 aa, unidentified
MVMIGIDPHKGTHTAVAIDPREQVLGERLVRATNRQVPELLAWAKHLDGGDRIWAIESAGGLGYLLAQQLLAAGETVVDIPATLASRVRLLGTGRSAKNDPNDARSVAIAALRASELVPVRVEDHASVLRLLSRRHTQLGWSYNKTACRLHALLAELVPGGIRKEVVVSQARSLLEDHQPIGAVAIERHLLAVDLVDELDRLNGHRRAIRKRITVAVAASGTTLTEIFGVGDVSAAIILGQVGDIIRFPTADRFAAYNGTAPIEWSSGNPARPIHRLSRRGNRTLNHVIHIAAVTQLRHRHSPGRAYYDRKRTDGRTTRAALRSLKRRISDAIYRRLLADAARSS

SEQ ID NO: 418251 - protein, 351 aa, unidentified
MDTTTVGVDLAKNVFVACVADCAGRIVARQEFNREGFMTWLGTLPAGTVIGMEACGSAHHWGRTAQRLGLAPRLMAAEFVRPYRKRQSVKNDRADAEAILVALLSPGMRFIPVKTEAQQQRLAWHSLRVGWVEERTALLNRVRGLLAEFGMIVDPGPKHLRALLAEREFDTALSPALRGLIQSVRDQLDALDARIGECDRQITAQQANDPLAKRARDLPGVGLITADAVTASVGDASMFRNGRQFAAWLGLTPSQSGSGGKTKLGRITRRGDDYLRTLLVQGARSVLAATLRKQRRESPEKLTRLQQWIVVLNGRIGYHKTLVAIANKHARQLWAVLAKGESYNPQAWQRG

SEQ ID NO: 418252 - protein, 424 aa, unidentified
MGKRKNRVCGADVHKDIIVATILNSDNTEFQGKFGTTSMELGRFRDWLIAHNCEQVAFEATGVYWFPVYDALSPSIDTIVANPWMIKGIPRNKSDTLDSKWIADNCLDGKIKRSRVLPKDDRDLRTLTRARSAYTKTRTQLRNRIHKYLALCGITLSSYISDIFGKSGRHILDGLIESKDIDTILDSIPSGKVKKKRELIKASLGKGLDDVSRMLVKDTLELLHHLEEKVNDTSLEILGRLQERAKDLAIVMSVPGIGFVSASIILAEIGDYHDFQTSEQLVKWCGLAPGLNESAGKKRPCRITKQGSKSLRTILVEIAQVVAKMSNNKLSRFFHRLRARKNYNLAITALARKLISIIFHLLINQELYQENNCTTVKTKPIKKDLLCLSKEEQLKDGVAAIVDAFYHLKKKSSLEGGWIESHIL

SEQ ID NO: 418253 - protein, 317 aa, unidentified
MNNPDSFLGIDIAKDWLDVAWLSGQTLRIDYTDEAVAGLVERLLAAPPSLVVMEATGGLETAVASALAAAGLPVAVVNPRQVRDYAKACGRLAKTDRIDALILAAFAAAIRPQVRELPDEHTRALGEVLARRRQLVEMRVQEKLRIQRASALQRASLREHIAWLDERISRLDIDLTHALRTSEAWRDKDDLLKAIPGVGSLTRATLLALLPELGTLTRRQIAALVGVAPFSRDSGKHQGERVIWGGRAQVRRTLYMAAVSAMRCNPVIRTFYAHLRSQGKPAKVALTACMRKLLVIMNAMLKHHSPWSPELDLQHSC

SEQ ID NO: 418254 - protein, 358 aa, unidentified
MADKVTEAAVVGGVDTHKDLHVAAVVDQNNKVLGIQYFATTRQGYRQMLAWMTSFGALKRIGVECKGTYGSGLLRYLQNAGLEVLEVTAPDRMERRKRGKSDTIDAECAAHAAFSGMRTVTPKTRNGMIESLRVLKTCRKTAISARRVALQIIHSNIISAPDELREQLRNMTRMQLIRTLGSWRPDASEYRNVTNVYRISLKSLARRYLELHDEIADLDVMVAATVDELAPELIKRNAIGYESASQLLITAGDNPQRLRSEPGFAALCGVSPVPVSSGKTNRYRLNRGGDRAVNSALHIIAIGRLRTDDKTKEHVARRVAEGHTKMEAIRCLKRYISREVYTLLRNQNKRVNSIPIMA

SEQ ID NO: 418255 - protein, 355 aa, unidentified
MGEGSWVGLDVHARSVVAGVIDQGSGEVRSLRLPPGQATVAWLQGLPAPVRVVYEAGPTGYGLARACAEAGINCVVAVPSRLRAAADRVKTDKRDAERLARLLRLGEITPVRIPTVEEEAARDLVRAREDARSDLMRARHRLSKLLLRHGLVYEATAWTRSHDAWLRRQRFDGGPLAIVFDECYGRMLDAKSRRDTLDKAISELAATSPYVEVVERLVCLRGVSTLTAFALTVELGDWHRFRPQSLGPFLGLTPSEHSSGERRRQGAITKAGNSHVRRLLIEAAWHQRPPSRRSITLERRRAGKPLAVQAQAERSGRRLHGRWHALESRGKPRTIVVVAVARELAGHCWALATMQ

SEQ ID NO: 418256 - protein, 367 aa, unidentified
MKKVSTVAAQPSRKISQPKLTVGLDLGDRNSWYCVLDEAGQIQLEQRVRTNAKALREVFATMPRSRIALEIGTHSPWISRLLSELGHEVMVANARKVRLIGESRKKDDRLDAQTLARLARIDPALLYPVKHRSVQAQADLTLIRARAGLVRARTALVNTARGLAKSYGERLRGCNVRNMNPEKAEGLSPELQSALEPLLACIESVSAQIREYNERIEKLAQESYPQVALLKQVKGVGTLIALTYMLTLEDPRRFGKSRDVGCYLGLQPGRRNSGKSEPQLHISKEGDPYLRTLLVQGAQHILGPFGIDCDLRRWGLKLAERGGKSGKKRAIVATARKLAVLLHHLWVSGEAYEPLHNSSRTTVAAAA

SEQ ID NO: 418257 - protein, 313 aa, unidentified
MAMPAKQFIIGIDVAKVELVSYCEQTGQHQSFRNTQPEIRKWLALQPANTAICVEATNIYHLDLVEMAYEKGFAVYVVDGYQLSNYRKGIGGRVKTDASDACLLARFLDREGSALRPWVPPPPVYRKLQSLLRRRAALVSARTSLVQSWSNEAFLNEAFNSFIKHFESLDLLIQKQLKTVVREAGLTEQVVRCQKVEGIGFLTAVALVTAFIRGEFRSSDAYIAFLGMDLKVADSGQKSGRRRLTKRGCSEVRRLLHNAAMAASKSAAWKELYEYYRSKGKAATQVLVILARKLARVAFALMKTQGEYVSRRA

SEQ ID NO: 418258 - protein, 350 aa, unidentified
MQYLGIDWGTRRAAWCAVDDHGDMLEGAISADEGGLAKLVHRLGAEVRGCVEMMSGAVWVRDQLAACGWEIQIAEPRKVKALAPLACKTDRVDARVLAELVRRDLVPDLWVPSLSDRELRERLRRRTHLVRLRTSATNRTFGLLTQWGLRVSLTTLRKPGSLELLVERGVPAVWLQSITTLLSVIDDLDRQIAPIERELRALAHDNEQVRLLMTIPGIAELLGLTLLAEIGDISRFPSARRLVGYSGLAPTIKQSGQSSRTGPLSKAGPSTLRWAAIEAAQGAWRPTNPWHRLYSETKQRHGKSNPAKAAVARKVLIASWHVLARNEPFKRSASSAANDVPASSSIRLAD

SEQ ID NO: 418259 - protein, 412 aa, unidentified
MDAILERCCGIDVHKSSLTACLLTGSLASKPTTTIKTFSTMTNSLFELKYWLESEGCTHVAIESTGVYWKPVFNILEDSLTVILANARDIKTLPGRKTDVKDSQWIAQLLRCGLIKASFIPPNPIRELRDLTRYRKQLSNDLTSEKNRVQKILQDANIKLSSVATDIFGASGTAMIEALLGGCEDAVVMADLAKGALRNKIGELEQALVGKVTGHHRFMLRASLDHIHYLKGAISSVDQEVDDCMKPFAEERELLMQIPGVKKRAAETLIAEIGVDMSVFPSHSHLASWAGMSPGNNESAGKRHSGKTTHGNCWLRSSLLESAWAASRTKGCFYKARYCRLAAKRGAKRASVAIAHSILVAVYHILKDGCAYHELGEDYFDRLNEQAVKNRLVKRLEKMGHKVILEPKPQAA

SEQ ID NO: 418260 - protein, 394 aa, unidentified
MFFIGIDVAKRSHQAAVTDISGNVIVKPFNFKNSSDGFTKFLSAVESNAIKKNDCIIGLESTGHYWYPLYFFLIENGFDVKVFNPIQTAAFREITIRKVKNDNLDSLLIADFTRFGRYSETYIPDENMLALKNLTRFRLSISDICGSLKKKVIAILDQVFPEYTGVFSDVFGKTSKQLLEQFSTPDEFMDISTTKLTNLLLKVSRGRNGREKAELIKTAAQSSIGISYALDAFSFELKQLLAQIEFMENQLSDVDAEMEKLLSQSEYGVITTISGIGPMLGSVIVSEIGDINRFENSSKLVAYAGLDASVKQSGEFNSSKNKISKRGSPYLRRALWMAAFMSLQCDPALYDYYSKLRARGKTHRCATTAVARKLCIIVWAIMKSKKPYSPVLKN

SEQ ID NO: 418261 - protein, 466 aa, unidentified
MTTGNKLWRNRKERKDWARRLRSEDPGLEVVHPHAAGIDVGNSAHYVAVRPDRDPEPVRRFECFTADLYRLAEWLASCGVKTVALQSTGVYWIPLYEILEDRGFEVYLVNARHTKNLPGRKSDVQESQWLLKLHTYGLLNNSFQPPAEIRVLRTYWRQRAEHVSGAATCIQRMQKALTQMNLQLANVISDLSGLTGQAIVRAIIAGERNPRKLAELSHPRIEASREEIAKSLEGNWRPELLFVLRQEVEMYDTYQRRIAECDQQLQKHLTRFADTALPQSPEAEPRQKKAKPTKNAPRFDLGSELKRITGVDLTRIDGIDVMVAQTLLSEVGMDMSRWNTEAHFSSWLGLCPDNRISGDKLLGKGTRHVVNRAATALRLAARNLIRSRSYLGAQYRRLRTKLGAPKAITAMAHRLARLIYRMLKYGQRYVDKGTEYYENRYRQQQIHLLQKKAAKLGLQITVAVQS

SEQ ID NO: 418262 - protein, 420 aa, unidentified
MKTWTELTHYAGFDWAGDHHDVAVVDQGGKLVLEFRFEHNAEGWSEFRSKIQPYAALGVAVETSSGAAVEELLRSDCTVFPVQPMAAARYRERKSPGGVKNDRLDAWALADALRMDGRMWRTLATEDPLIQELRLLCRDEVALIEQRTALINQLRAALREYYAAALAAFDEWTLPAAWALVVQFPTPQALATAGKRPWEKFLHRHKLWRPETAQRRLDLFAHALDWPRSEAVTRAKSRLAVSLARMLQTLEQQLDDYRAAIVERFQRHPDHNLFGSLPGTGPKLAPRLLGELGEDRARFHSAQALQGLAGTAPVSFQSGQIHRVKMRRACNTHLRHAVHLWADRSRTSCGWAQAYYQTHRAKGKSHACALRCLGHRWLDVLWKMWQDRTLYDGDLHARNQQKHGSWVFKILTPSATSTGE

SEQ ID NO: 418263 - protein, 318 aa, unidentified
MNTNTLQNINVGVDTGKSQLDIYIRPLDIYFTVPNTEKGISHAIKTIKKHKPQRVIIEATGRLEMPFILACDKAKLPYVIANPLRIKRFAGAIGLRAKNDRLDAALIAHYAERVQPELTKIKSENIRLMSDLVTRRNQLLTMQTMEKNRLQILPKNISSTITPILTALKNQIEKVEAKIAKLIDSCPEYQAKNTLLQSMPGVGKVLAASLISNVPELGYITNKQASSLIGVAPITRESGCFKGKRMIQGGRAQVRTVMYMAMMSAIQCNPVFKAAYERLLAAGKPKKVAIVACMRKMVVILNSMLRDGVMWDKDSVKN

SEQ ID NO: 418264 - protein, 333 aa, unidentified
MKDVAAFCGIDIAKHLISVHLENEDRKVISQKNMRRDSVLTFLSNMPPCLIGIESCGGSQHWARELRKFGHDVRLMNAKYIIPYRRKGKNDLNDAEAICEAVSRPSMKFVAVKTEQQQSILMVHRLRQQCISHRTSLSNQVHAYLLEFGISLPKGAKAIHKNLSAIFENCELNPLVVEMLHELLAAIAREEEREAYFNKRIADWVKHDERAKALLKLDGIGPLSASAIVATAGDPSFFENGRQFAAWLGLVPRQYSSGGKSKLGGITKAGDRYLRTLLIHGARSVLLMASRGKGQQREWVNQLRTRRPENVVAVAMAAKQARMTWAIMAGKVV

SEQ ID NO: 418265 - protein, 362 aa, unidentified
MRIIGCDLHARQQAVAMLDTETGEVVSMTLKHEGNNVREFYSSLPRPVRVGIEATGSMQWFVNLMEELGIECLVGHPAEIRAAEPRKQKHDRRDADLILKVLVENRFPAIWLPSKELQDLRSLLRHRHQWVRMRTRIQNALQSIALANGLRRGHSLWSHDGQNTIASLPLAPHTAYRRSELQALYAKFEAEIEKLNQRVEEQACGRAGARLLMTHPGVGPVTALATEVFLGDPARFADSKALASYVGIIPREYSSGGRQRLGGLTKQGNPLLRFLWGEAGAHAVRRDPELQRFYRRKLIQKGFGKASVAVARKLGIRLWIMLRDQIEYNEFCRRGQKQQKSSDACAGMPETRNGAKSHRPVD

SEQ ID NO: 418266 - protein, 314 aa, unidentified
MEQVFVGVDVSKDRLDIHVRPSGESFDVSRNGEGLAMLVDRLKHLSPALIVLEATGGFETAVAAAVASSGLPLAVVNPRQIRDFARATGRLAKTDALDAAAIAHFAEAVHPQPRPLPDAQAQELGELVSRRRQVIEMMVAERNRARLLQSARLRKRLERHIAALQKELTEIERDLDESIRGTPVWRENEDLLKSVPGIGDATARTLLADLPELGTLGRKQIAALVGVAPFNRDSGAWRGRRTIWGGRAAVRSALYMAALVASRWNPVIAAFYRHLRDLGKPAKVALAACMRKLLVMLNAILRDRKPWQAAGVPV

SEQ ID NO: 418267 - protein, 366 aa, unidentified
MNYTQNQKIEQVTESTLVLGVDIGSSEHYVRAFDYRGRELTRKVFRFSTDINGFNSFYDWVTQICIKHGKNEAMIGCEPTGHYWYTFYQFVKDHGMKLAFVNPASVKKAKELDDNSPKKTDLKDPKTIAKLVIDGRYSFPYVPEGIYAEIREVTSSRDRIMKELNAASNRIQRWLKIYFPEYLTVYKKFDTTTGMMILEEVPLPTMVTALGVDNIIKIWREHKVRGKGASFNRAKTLVDAAHDSVGKSGGQGAVMEIQMLLEDYKVKKQQLEMVTSVMEELIMQIPNAEKMLSVDGVGLVTVAGFISEVGDISRFKNPKQIQKYAGFELVENSSGKTQRSYNDQQAWSEETAKNHISGSITIDTEQ

SEQ ID NO: 418268 - protein, 413 aa, unidentified
MTEENFAWFAGIDWGSERHQACLVDAQGRIVGEREFPHGGKGLADLCDWLLSMCGAADTVAVGIEVPHGPVVDTLIDRGFVVHAINPKQLDRLRDRHSVAGAKDDRRDAYVVGDGVRTDRRLFRRVHVTDPRLVELRAWSRLAEELTEERVRLSNRVHHELWRYYPQMLKIADGDVAATWVLDLWDLAPTPARAHRLRAAPVEKLLKHHHIRRIDADTVLRNLQEPAIKVGKGVAEAASVHLRSLFTRLRVVNRELRQADAKLDALCAAIGETDADSGEGLQRQDVMILKSMPGIGRINLATLLCEGSGPLSRRDYPALRTLCGAAPVTKRSGKSHIVIMRYASHVRLRNVVYHWARVATQHDPKSRERYAALRRRGKSHGRALRGVADRLLGLACVLLQRQTPFDPNFAQAK

SEQ ID NO: 418269 - protein, 351 aa, unidentified
MPRATSNANVIATIGIDIGKNTFHVIGLDDKGAIILRHKLSRGQVYARLANIPPCLIGMEACVGAHHLGRQLSALGHDTRLMPARYVRPYSKGQKNDFRDAEAIAEAVQRPTMKFVAIKTVEQLDLQGLHRIRERLVCQRTSVINQIRAFLLERGIAVRQGLRTLRTEMPIVLAKTDKLSQRMIHMIEDLCTDWRHLDRRIATVSKEIETLSEQDDGAKRLMTVPGIGPIISTATVAAIGTGEVFSKGRDFGAWLGLVPKQMSTGGRTILGPISKRGNRYLRMLFVQAARAVLLRPQSWEKHGLKLWIEAAARRLNRFKLAIALANKIARIAWGVLHGGRNFEVRPTNQAA

SEQ ID NO: 418270 - protein, 337 aa, unidentified
MKYSGIDLHSNNCVVTVTDEEDRVVTEKRLPNDLGKVLDLLLAWRDELAGVVVESTFNWYWLVDGLQAAGFKVHLANTTAIKKYDGLKHSGDEADARYLAHLLRLGILPTGTILPPEQRAVRDLARKRMQLVRSRSTHILAVENITARQRGARISCNQVKQLTADLVDKMSIPEDVALAIKSNVAVITTLSAQIDILEKRLQEKVKTRAEYELLTSVPGIGQVLATIILLETGPIDRFAAAGNFASYARCVDSVRTSNGKKKGEGNTRNGNKYLAWAFVEAANYALRYCAEAKRFYEHKKAKTNNVVAIKALSHKLARACFHILKERKPFDVRRCFA

SEQ ID NO: 418271 - protein, 348 aa, unidentified
MSQICRIGIDTSKAVFTLHGVDAAGQAVLRVNLRRAQMIPFFKKLPPTEIALEACASSHHWARLLAAFGHTMRLIPPQYVKPFVKRGKNDRNDAEAICEAAGRPGMHFVPVKSRTQQAQGMVLKVRDTLIGQRTVLGNTIRGHAAEFGIVAGKGISTIAPLLSAIEQEATVPPEAKEMFVLLGQQIEEIGARIKEIDAKLNAAHKASEVSTRLATIPGVGRVIALTLSTEIDPSAFQSGRHLAAWVGLTPKEHSTGGKQRMGKISRAGNERLRALFVSGATSIINAAMKPGSRQMTEWLRALLLRKPRKLAAVALANKNARTAWAMMTSGETYRRPTPPPGAAGALAA

SEQ ID NO: 418272 - protein, 460 aa, unidentified
MKRVRKTRPVPPVSKPTAEVDELTVINPNAAGIDIAADELWVSVRADRDPQPVRCFGMCTPDLIAVADWLKACGVETAAMESTGVYWIPLYELLEERGFKVYLVNARHAKNLPGRKTDEADCQWLRRLHALGLLNNSFRPAGEMCAVRAYMRHRADLIEHRAAHIQHMQKALRQMNVVLSPTVTDITGATGLAIIRAIVAGERDPVELARLRNPKCAKPETEFVKALTGNYRDEHVFALKQAVALYDAYTQQILECDQELERKFSALKPIQDDDLPPLDTRDKRNTHSKNAPAYDGRSLLYQLLGVDLVAVDGLNEVTAQIIISEIGTDMSRWKDDKHFCSWLGLAPHNDISGGKVLRSRTLKTHNRAGQAFRLAAQAVSKTQTALGAYFRRMRAIHGPQKAIVATAHKIARIVFFILRDHVAFHNTSADDYNQREREREIARLKKKAAKLGFTLAQASV

SEQ ID NO: 418273 - protein, 361 aa, unidentified
MPHESVGIIGGFDCHSAVHVGAALDSLGRLLSTASFPATPAGYRRALAWIRACGPVVAVGAESTGSYGAALARVLSDAGERVVEINQPHRHTRARRGKSDTIDAEAAARKVLSGEATGTAKDTGGIVESIRLLSVARDGAVKARKAALCQLGDLLVTAPAAIRGQLTRRKSLEGKATVCASFRIRRMEAVGLFIAAKLALRSAARRVLELTREAKALATQLDDLVTRAAPTTRGQLGLGTQNTATLLVAAGENIDRLRSEAAFAHLCAAAPIPASSGRTTRHRLNPNGNRQANRALHMVVIVRLRYCARTRAYLERRVQEGRSKRDAIRCLKRYLAREVYRTLREDLRALANPPMTAPLTL

SEQ ID NO: 418274 - protein, 335 aa, unidentified
MQIKHFIGIDVSKDTLDLSVVVNGNVLTHYCIGNNSKEIKSTVNKIMKTLGGSLEDTIFCMEHTGLYNRPIVKWLHNNQGKMWLESGVHIRKTLGLVRGKNDKIDSSRIAMFAYTNQHKIKLWTLPRQVIEKIAALLSQRARFVKVRKQLTTANKEQKKFLEKDVMQSLNIYTDRTVSVIDKQIEAIESEIRVLIKEDEKLNRMYQIITSINGIGFVTASYILVTTNEFININDPKKFACYSGVVPFEHTSGTSIRGKNRVSHIANKTIKALLHLSAMSTLNTPGEIQDYYIRKIAEGKNKMSIINAIRNKLILRVFACIKQNREYEKNYCYKFV

SEQ ID NO: 418275 - protein, 346 aa, unidentified
MNDLKKEMTMTLYCGIDLHANNNLISVIDDHDVVHYEKRHPNDLQIIREVLEPFQSELLACVVESTYNWYWLVDGLMDAGLDVRLAHTSAITQYAGIKHSNDQTDARHLAHLLRLGILPEGYIFPRELRAVRDLLRRRLLLVRQKTLHHLSLQSLIARHTGERLSANQIKALDRDAIAEKLEGAARLGGEITHLARRWHEQAIERLEKEVFKHLKPRQEYSLLTSIPGVGEILAPTIALETGPIERFAGPGHYASYARCVNTEKISNGKLKGRGNKKNGNRYLAWAFMEAAHHAAIWSPEIKRFYHKRKAKKHILVAKKTLANKLAKACYYMLRRQEPFDVNRAFR

SEQ ID NO: 418276 - protein, 328 aa, unidentified
MEPTILGIDVGKMNFHASMLFADGKTASKSFPNNATGFEQLAKWISNRKVDFVHACLEATGGWSEALALYLHERGNVVSVVNPHRIKAFGQSEGLRTKTDGVDAALIARFCRSQSPSPWTPPKPAVRALQALVRRRQSLVEMRTQELNRAQGPEVDSAVVQSINELLAHLDRQIEAIDAQIERTIDDDPTLREHRELLESIPGIARRTATTIIGEMPDLAKFRDVKAVAAQAGLSPRHQQSGTNPGRSHLSKAGNAHLRQALYFPAIVAIKCNPTIRSFAGRLRARGKQPMVIVAACMRKLLTIAYGVLKSGRSFTNLASALDNANGI

SEQ ID NO: 418277 - protein, 386 aa, unidentified
MQAPTVSTPITGHISTIFVAIELSQKTWLVTLHSPDRDKISRHKVQGGDHASLLALINRVRDRAVQRLGSVPAVVSCYEAGYDGFWLHRLLIAAGITNYVFDPSSIAVDQRARSVKTDRIDGEKMLRTLMAYLRGEPRVVRIVRVPAPEQEDARRDTRERGRLTKEQTAHTNRIKALLRLHGFAVGQPRRRDWLTWLAGQRDWQGQGVPPRVLSEIENEHARLMLVRKQLDALERTPAAADPAPAVAEVVRRSELLQRLKSLGPAFAKTLTQEVFYKDFRNRREVASYFGLAPSPWQSGGTDRDQGISKAGNPRARCSAVELSWLWLRHQPDSELSRWFRQRTLNAGKRTKRIAIIALARKLVVALWRYLTTGLVPAGAVLKSAKP

SEQ ID NO: 418278 - protein, 342 aa, unidentified
MENVSIIGLDLAKNVFQAHGARADGSTVFRKKISRAKLLSFFASVPVCVVAMEACASAHYWARQIGALGHQVRLIAPIYVKPFVKRNKNDAADAEAIAEAACRPTMRFVAMKSVEKQASGMAFKTRDLLVRQRTQTINALRGHMAEYGVVAPQGPVHVERLAEALRDPRGGLPAPVISLCQLLLANIAALAEQIGLLDQELRERARRDQTAKRLMTIPGVGVICAVAMEALAPPLEGFAKGRDFAAWLGLTPRQNSSGGKTRLGGTSKMGQRDLRRLLVSGAMTVVRWASRKGAPEGSWLGRMLKKKPRLVVAVALANRTARIAWALMTKGGVYQAPDAVRA

SEQ ID NO: 418279 - protein, 344 aa, unidentified
MDHFARLDVSVKETSVCIVDDTGKIVREVKVASEPEALLAVLKNPAYRFKRIGLEAGPLSQWLFSALAEAGLPVICVETRHMRAVLKAQINKTDRNDARGMAQMMRVGLYRPVHVKTLRSQKLRMLLTHRQLLLSKAIALENDLRGTLRNFGLKVGMVGKVKFEARIRELVENLPDLAVLVEPMLIVRRVLREQIVILHRRLLAIVRDDEVCQRLMTTPGVGPVVSLTYRATVDIPARFRKSKSVGAVFGLTCAKYQSGEVDWDGRISRCGDEMMRTMLYEAAQAMMRSKKWSWLKAWAMQIARRRGMKKAIVALARRLAVIMHRIWVDGTEFRWTREQATATA

SEQ ID NO: 418280 - protein, 335 aa, unidentified
MAKNVIQVHGVDERGKTVLKRQLKRDQVASFFANMPACLVGMEACGSAHHWARKLQSLGHEVKLMAPQFVKPYVKTNKNDVADAEAICEAVARPNMRFVPIKTAEQQSVLSLHRARQAFVKARTAQGNQIRGLLNEYGIVIPQGIGHVTRRLAEIVEDGENELPGRFRRLLQRLADNLKEMDRQVGELEREIKTWHRESEASRKLEKIPGIGALTASALTASIGDASCFTSGRQMAAWLGLVPRQRSTGGKATLLGISKRGDTYLRMLLIHGARAVIRVCERKPDPDRWLKGLMGRRNKNVAAVALANKNARIAWALLRYDKEYASDYAPAFAAE

SEQ ID NO: 418281 - protein, 345 aa, unidentified
MDHFAGMDVSVKETNVCIVDDTGKTVREVKVASEPEALLAVLANPAYRFKRIGLEAGPLSQWLFSGIAEAGLPVICVETRHMRAVLKAQINKTDRNDARGIAQMMRVGLYRPVHVKTLRSQKLRMLLTHRKLLQSKAIAIENDLRATLRNFGLKVGVVGTVKFEMRIKELVENVPDLAMLVEPLLVVRRALREQIGILHRRLLVIVRDDDVCRRLMTVPGVGPVVALTYRATVDVPARFRNSKAVGAVFGLTPSKYQSGEVDRTGGISRCGDEMMRAMLYEAAHIMLVRSTKWSWLKAWAMQIARRRGLKKAIVALARRLAVILHRIWVDGTEFRWTREQAAAAA

SEQ ID NO: 418282 - protein, 336 aa, unidentified
MDTVRAVVGVDVSKAKLDIALLLNEKVRSKVVENSPAGFKELVEWIGKSKAAMAELHFCMEATGVYYEALAFAMHEAGHRVSVVNPACIKGFGHSENIRNKNDVIDAGLIARYCARMAPALWTPPPLEQRQLRAWGLRAQALKDIRQQEENRLEAHAISGMEEVAKHVQEHISWLDSEIKKLEKEIDDHIDRHPDLKRDAELIGSIPGIGATTVARLLGQLGDIRRFENAKAFAAFLGVTPKQRTSGSSIKGRTMISRSGNSALRAALFMPSLVARRHNPILNRFAERLLATGMAKKAVICAVMHKLTHLIYGVIQTGKPFDANYVSKRLAIQDGI

SEQ ID NO: 418283 - protein, 317 aa, unidentified
MTAMRTFVGIDIAKADFVVSSRPEGGTWTAANDSAGIRTTCARLQEMAPALIVLEATGGYETAVVAALAAAALPVVVVNPRQVRDFAKATGQLAKTDRLDAALLALFAERVQPTPRPWSDEAHGHLEALITRRRQLLDMLTAERQRLEQATATIRRDLMRHIRWLERRIAAVDRDLDDTIQQSPVWRAHEDLLRTVPGVGPVVSRTLLADLPELGQLNRRQVAALAGIAPLAWDSGSRRGTRRVWGGRAPLRAVLYMGTLVATRHNPVIRAFYRRLIQAGKPKKVALVACMRKLLTILNAMMRTQTTWQQLPHPEGA

SEQ ID NO: 418284 - protein, 459 aa, unidentified
MKIRVGVDVACRSPHHAACADETGTLLWSGHRFRTDVAELEALWARLPAEVDEVMVVMEPTRNAWVPLAAWFRRQGAVVVLVPSEQSSDLRDYFSKHTKTDRLDAELLARLPVLHPEGLHLAETLGPGDPLKRSVKIRAGLVHRRSTAMARLDSLLEILGPGWIDALGTRMTRTTFKFLAAYANPHQVKRLGTARLARWFQHHSRKAWGPERAAAIIAAAEATLALWGNDGLDFEALAADIATEASIALEVSEQIALLDRRIHDLYSEMDPDGIVLSAPGVGDVLAGQILGRLGDATRFTSLAAARAFSGLVPKRNASGLTDHAGGPTKRGDACLRAALFQAADRARKVDPQLAARYRRLMCDTGRHHTSATCTIATVLLTRIVACLRHGTHYELRDIDGTPITADQGRAIIAERYQIPAEIRAARRSISKARGPTRRDERVKKGVAERSETPLVPARA

SEQ ID NO: 418285 - protein, 369 aa, unidentified
MPHVTSIGLDVHARSVAAAAFNPFTGEVVHRDFGTDAAEIAEWALGFEEPRACYESGPTGFHMARELRALGLDCAVAAVSKMQRPAADARRKNDRRDAEFIARMLATHNIVEVPLPDAAVEAARDLDRALDDATVEYRRARQRLNMFLIRLGYVWDERNADGTRKKAWTRAHWRWISEIRLEGPQRDALEYYVTAARCAESDRRQLERRVVALAGADRWRPAVEALSCIKGIDTLTAFRLAAEAGSFSRFRSAPAFASWCGLTPSEHSSGESERRGGITKAGNALARTALIESAWHYSTCSPRPKAPAPGTDVPPVIRSRADDCTARLHRRREALAAAGKSACKANAAVARELACWVWEIGCRSEGTVL

SEQ ID NO: 418286 - protein, 445 aa, unidentified
MSKGSGLSRGDKRRNAKLAELRRLVPADHVIVGIDLADKKQAVVVCDHDSQVLARKTVKARAWELGPVLEWAQRVAHKHGFCGVTVGCEPTGHRWMVLNQLATQRDMTLMCVNPMLVGRAREAEDYTRDKSDDKDAMLIARLVAQLHCYRPERAEETWARLRQLGARRERLVTEATACVQQLRDLLECVWPGVLEAAADPFGSSNWCAAVAVVLDRCDGRPERLKGRGLARFEAAVVRELGRWGGQRRRRAIIEAVFVALVDPAGVMVQRRGVLERARWVLSDWRAASIRLAEVEARMVEVLDELELTELVTSIPGVSAVGAAAMLAETGDPTRFDSPRALVKHAGLCPRDNASGTFNGRARISRRGRPRLRLAAWRATWGALQHNPVMLARYRYLTTRDDNKLTDGQARAAIAAALLRWLHVVVTQRVRWDGAIAAAQVMPVAA

SEQ ID NO: 418287 - protein, 400 aa, unidentified
MFCGWDWGSTQHGVCLIDDKGQVVKTWMIEHTERSLSTLFTELARLGDPGSIPVAIERGEGLIVGLIAGAGHPVVMIEPAAFKAARPRWGSAGAKSDAADAFMLADFARTDAHRLRRVEPVAQATRELAALVRARSALVQARTAASNQLWAILAEHWPGAAILFQKLTSQVALAFLTDYPTPQSAALLAEGRMRQFCHRHSYRGGKLPAELVRRLRAAPASVNPIAPQVLEAIVRGSVGHIGLLNTEITNLELHLEAALAAHPKTVLLKALPRVAVVSLAALIAEIGPLIERCENPEQVAALCGAAPVTKASGKSRTVAFRHTANKPARVAITSFADNSRHSSAWAQDCYQRARSRGARHPHAIRILARGWVRVIWACWTTDIAYDPTRHHAEQQLATRT

SEQ ID NO: 418288 - protein, 384 aa, unidentified
MSTGKDIILVVDYHAENIAYRWFDESSGHERTGKYPTDREGILRHVEEARLAASSTGGEVVWIMESTTGWARVKELLADKVRFVLANVLQMPLPPKANRKKTDHIDTGRMLREYLSDRLPRSFTPDRWWREVRRLVDFRQDLVERSTALKNQITSLLSHETWDSRENLWSGKGRKRLMSSELSPGDLSLVSLKLEQLEQLKRQRETIEQKMEEVYQQWPEAQRVDEIRGIGMITAVSILAHIGPIERFPSAESLIGYAGLAPGVSQSDQTLRHGRIGGGGTDSLLRYMLIESATWLCQIPRYRETYERIVQRRGRRIGRIVLARLVLRSIYKMLVSKIRFNPGRRSTCEVSIANEETVSERVVGKRLVDKRVVGKRTVSEGVCR

SEQ ID NO: 418289 - protein, 408 aa, unidentified
MKRYYMGVDWGDRLHQVYVGDQEGKKVREMKVQESPQGLAEIGRWLDEKRAEGFELWAAIEKPQGRIVDFLLDHGVEVYPVNPKAVDRVRDRYRMSGSKSDAFDAYVLAEFLRTDQAHLRALRPSSEKAQELKMLSRDQRRVVRHKTRFLNQLTTTLKEYYARPLEAFEDLETEIALDFLQRYPTPAHLSALTRKQFNRFATKQHHLSKQRCEELWEKLNKPQLAVPEHVVRAKAQLVEVLIEQLRASIKAVKIYNHRVESFFASSPAAQFAKTLPGGKSGTLVAAVWAELGDAQGRWESSRHLQAEAGAVPVTKASGKSRVVHFRFACNKHLRYTMYWFSFVSLNHSEWAKLYYRGQRDNGHSHHQALRALGAKWLKIIFVMWRDHKPYDENYHLANIARQKMRQAA

SEQ ID NO: 418290 - protein, 452 aa, unidentified
MVAVMEPQEIDDEEHEQILERVAAVDVAKASGMVCTRVPHEVRPGKRRTRVWPVDATTNAILELGEHLAREGIEKVTLESTSDYWRIWFYLLEAAGLDVQLVRARDVKQAPGRPKSDKLDAVWLAKLTERGMLRPSFVPPAEIRQLRDYTRLRADLTRERTRHYSRLEKLLEDALIKVSAVASKLDAKSVRDMLEALIGGERDPQVLASLARGRMRAKHDRLVQALTGRFDGHHAELARMLLDQIDALTGQIGKLTTRIEELIAGIPAAQGVDPDGTTGPAAGRGDGAPVLPVVDRLDEVTGIGREAAQAIIAEVGLHMSVFPTAGHLVSWAKVSPQTIQSGARSRAGRTGKGNPYLKGILGEAAAAAGKTDTFLGERYRRLARRRGKLKALVATARSILVIVWHLLADRTARYQDLGPGYYASRIDKNRKTRTHIRQLEALGYTVTLTQAA

SEQ ID NO: 418291 - protein, 348 aa, unidentified
MKIIGCDFHPSYQQFAMVDTETSELVEGRLEHEQGQARRFYEALAGQHVRVGVEATGNMQWFEQMLAEMGHELWVGDAAQIRQLVVRQQKTDRRDARHILTLLQDGRFPRLWVPSVEMRDVRQLLRHRQKLVEFRTQVKNQLQHLALNQGVRRKRRLWSRQGRAVLEGLPLRGWTAQRRQDLLTMLDQMDAQVAELDKAVRREAEQRPAVRLLMTHPGVGPVVGLAYVLTVGPVERFPRGKQVASYLGLIPREHSSGGRQKFGAISKQGNTLMRTLLVEAAQTASRFDEELRREYCRLKARRHSALAKVMVARKLAVRMYWMLRENKAYSPRLVARTQGSPSHPVVAG

SEQ ID NO: 418292 - protein, 364 aa, unidentified
MNKCHLNTELSSLEGTRSEFNRSTAAIKLGIDVHQDFYVVVKQEGGTNPKPAQRFQKEAFLHWVAKLVKEGAEIHAVYEACGFGFGLQRQLAALGIHCYVVCPQKLDERNKRVKTDGVDAKALCLKLDRFVEGNRDALALVRVPTQAEEQKRAIHRQREQLVKARKRLEAQGRSLIVNHGIEPVNKWWKRRTFAALQVPAWMKELLQNTQPILLALEEKIRALTAQLQEAAISRQPRGLGLLSSVVIDREIGNWDRFKNRRRVSSYTGLCPGEYSSGKTRVQSCVTKHGNPRLRAALVETAWRLVRFQPEYRAVKKWRHLLAKGALATGAARKKAIVAVARQLAVDLWRIRTGRVAIETLGLIN

SEQ ID NO: 418293 - protein, 440 aa, unidentified
MTGYLEAAAAAAHHPPAEDATPASWVAIDIAKDMHVVLAESAHGRRQLRLANRLEDVQTFVQFLRELPAPVRIGFEPTGVYHRPLAFQLVSAGFDVVLIASLACARYREAMFTSWDKNDPKDAQVLLELLKQGVTMRYVDPLIAGWHDIQEVSKTYWHVTLARTRVQHSLLTHYLPLYWPEFARYWHTSRSEAFCQMLHAYPTPPSITATDCDTFVHAATLPAGRKVNKRAWLTELYELARRSIALPIVLDSPAVATFRLRIDRFLALSDERMRLERWAGELLADHPDYRLLQTIPGIGPVFALTILAEAGDLRRFAHHRQFLKFCGLDLAKSQSGTSRGREQLSKRGNARLRCAFWFAGRTAVRLRESSIRDEYERYMAANPQNADQRRKAYTAIAAKMARIAYAVIKTARPYRNYFEHELPGGSIPLSGAVEATRGRR

SEQ ID NO: 418294 - protein, 350 aa, unidentified
MIIIGCDYHPGFQQIAFVDIETGELQERRLQHREEAEKFYRDLAAQGMKVRVGMEASGHARWFERLLSELQIELWIGDAAEISTRRVRKQKTDRQDAQLILRLMLKDDFPQIWVASWENRDLRQLLWHRHRLVQARTRIMNQLQAVALNEGLRCKKRLWREAGREQLEAFRLAPWASQRRRDLLELLDRLDPTIAQLTRAIEQEVEKCPAAQRLRTHPGVGSLTALAFVLIIGRADRFQCGKQIASYLGLVPLEKSSGNQRRLGHITKQGNALLRFLLVEAAQVTVRSLPEWRSKYFHLAMRRGRKIAKVAMARRLAVQMYWMMRKEWDYEQLKKFGSHAGQPGHRYGVQ

SEQ ID NO: 418295 - protein, 358 aa, unidentified
MVIIGCDYHPSWQQISWVDTLTGETEERKLDHASGEAEKFYRQLPAPAVIGMESTGNCQWFVEMATAAGHEVWIGDAAKIRASEVRQQKHDRRDAALILRLLLEGRFPRIWTPSGEEKDLRQLLIHRHKLVRIRAQVKNELQHLAMNQGVTKKGKLWSQAGERVLRELPLRPWASRRREDLLKVREMLNGQVGLLDQSVVEVAQKNEKARLLMTQPGVGPITSLAFVLTMGDVTRFPRGKQVASYLGLIPREYSSGGKQRLGSISKQGNGFMRMLLVEAAQVAVRCDPQMRSEYLHRCHKKAKGVAKVAAGAEVGDSTLLDATHEYGVSRGRWCREQLAGAPGQRKLDRSIDWALSSR

SEQ ID NO: 418296 - protein, 438 aa, unidentified
MSNKVIFNFDELFISVGIDVGADFSWMSIALPNQQFVGKPYKILHNSMNSLTTAVSKIKEAEELYSLESRIFLESTGIYHYPLFCYLRDKGFNCSVINPIITKNSTNMNIRKVHNDRFDSKKAALIGLKPNLKVSLMPSDLALNCRNLCREYYDLMDNRSAYVNKLQAELRMAFPQYLGIFSKVTINTSLTLLEKYTSPNAFLEADKQEVIDTIKSTARFGLTYAHNKYNAIIQAAKDANEFGYIIDSNIKRIRLYISFIRKYDEEINGILDSMHELVNANEDTDFVKQIHLIETFKGAGFLSAISLMGEIGDFSAFSKPKQLFAYFGLDPAVKQSGKFEGTKIQMSKRGSAIARRVIHTLTLQSISTSRTGDAKNPVLRYYYLKKCESKPKLVAMGAVSHKVCNMIFAILRDNKPFEIISPEEHIKQYNAVKCDIAA

SEQ ID NO: 418297 - protein, 338 aa, unidentified
MKLYAGIDLHSSNNYISIIDEEDQRLFQKRLPNNLEIILPALEPFKESLEGVVVESTFNWYWLVDALQDHGYKVHLANPAAIKQYEGMKVIDDKYDAFWLAHLKRLDLLPEGYIYPKEERQVRDLLRRRLLFVRHRTSHILSLKSSISRNLGVSMSVGEIKKLECKDTEKLFDDAYLALSAKNSISLIRFLTGRVKEVEKEVLFHVKVRPEFRSLLTMPGIGKILALTIMLEVGDIKRFSTVGDYSSYCRCVKSERSSNKKKKGEGNRKNGNKYLAWAYVEAANFAVRSYPDFQSFYNRKKSKRNGIVAIKALSNKLARGSYYVMRDKVPYEASKMFR

SEQ ID NO: 418298 - protein, 312 aa, unidentified
MDATVVGIDVAKDRLDVCIRPSGERFVVNRTGAGIEALSERLKEVAPRVIAVEATGGFETIVAAGLAAAELPVVVVNPAQVRHFAQAVGKRAKTDPIDAAVIAHFVEATKAEPRSLPDEMTRLLADLVARRRQIVEMMAAEGQRERRMTDKRLKKSIARLRKAMEKELAELDGEIDNHVRGSPVWAAKEDLLASVPGIGPVIARTLIAELPELGSLDRRKIAALVGLAPWTRQSGQWRGKSFIGGGRKSVRNALFVAAMVASRCNPVLKPFRDKLVSAGKPKLVALIAVARKLLIILNAILRDQRPWQPQNA

SEQ ID NO: 418299 - protein, 340 aa, unidentified
MKDTVIGVDLAKNIFQVHGASRAGEVMFRKKLRRQQFMQFMATQPPALVVLEACGSAHYWARELAGAGHEVRLIAPQYVKPFVKRQKNDAADAEAIVIAARQPEMRFVEPRTEAQQAHGVLFRARQRLVHQRTELVNALRAVLYEFGLVVPQGIAHIRHIEAMLDEAVLPEAVKQECLDLLRQISEQSVRIDVRTKKIRMLAQESENTCRLQSMPGVGPLTALAIEAFAPDLQSFRRGRDFAAWLGLVPRQFSSGGKERLGKISKAGQADIRRLLIMGAMTQVNWASRKAPAPGSWLARMLTRKPRMLVAIALANRMARAIWAMATKQEDYRDPALSVAA

SEQ ID NO: 418300 - protein, 355 aa, unidentified
MSDINYIGLDVHKETISIAVLNGRGKLIMESIIETEAATILRFIQSLRGQLHLTFEEGTWAAWLYDLLKHHVHKLVVCNPRRNALLKEGSKSDKVDARKLAELLRAGLLRPVYHGEDSLRTLRELARSYYTLGKDTTRVMNRLKALYRGLGVRCGGVQVYDPRYRQQWLEKISEAGVRRRAEIFYEHLDAVRPVRQKARRELLNESRKHQAATLLRNIPCIGPIRAALLVALIQTPHRFRSKRQLWGYSGLGIKTHDSAQYRYIDGQLRRSKKPQQLRGLNSNHNHQMKELFKSTATNAIRCAGPFQDFYANLLAKGMEPEMARLTLARKIATITLTIWKKGARFDPDQLKAQAA

SEQ ID NO: 418301 - protein, 468 aa, unidentified
MVKNTTKKSNLSKNKKPINMAALPKHLQHINTMAAGIDIGSKAHFVAVPESCADVYVREFQSFTTDLYELADWLEACGIVTVAMESTGVYWIPLFELLESRGFEVLLVDARHVKNVSGRKTDVLDCQWLQQLHTYGLLSGAFRPSEQICALRAYMRQRNVLIKQMSLHVQHMQKALSQMNIQLHNVISDITGETGMMIIRAIVSGERDPKVLTRHRNYRCKSPLAIIEKSLTGNYRDEHIFALSQALELFDIYQNKITACDEQIEKKLSLFEDAKTDENEKNTDETKPNKKTVKKSKNAPSFDLSSHLIRMVGVDLTTIPGLEAYSVLKIISEIGLDLNRWKSSKQFASWLGLCPGNKVSGGKILNGKSKRTGNYAASALRMAASTLHHSDSALGAFFRRLKARIGAPKAITATAHKLAIIMFNMIRKQLEFVETGADYYEKQYRDRLIKNLSNRAKMLGFELMEIAC

SEQ ID NO: 418302 - protein, 402 aa, unidentified
MNAVGIDVSKGKSMVAIMRPFGEIVSAPFEIKHTASDIHSLVELINSVEGESRIVMEHTGRYYEVLAHQLSKANLFVSAINPKLIKDFDNDSLRKVKSDKADAVKIARYALDKWQNLKQYNVMDELRNQLKTMNRQFGFYMKHKTAMKNNLIGILDQTYPGVNTYFDSPARSDGSQKWVDFASTYWHVDCVRKMSLNAFIDHYQNWCKRKKYNFSQSKAEEIYGKAKELVPVLPKDAITKLIIKQAVGQLNSASTTVESLRTLMNETASKLPEYPVVMAMKGVGISLGPQLMAEIGDVSRFTHKSAITAFAGVDPGVNESGSYEQKSVPTSKRGSSDLRKTLFQVMDVLIKTHPQDDPVYQFLDKKRAQGKPYYVYMTAGANKFLRIYYGRVKEYLSSLPES

SEQ ID NO: 418303 - protein, 309 aa, unidentified
MKKISTVQTFGNEIFKEQKLTIGVDLGDRWSFYCVLDEAGQVLLEQKVSTTPDAMKQTFSRIPQSLIALETGTHSPWVSRLLTELEHEVIVAHAQKVQLITKSNRKDDRHDARTLARLARIDPELLGPVRHRSVQAQIHLTVIRARAELVSARTALVNAARGLVKSYGERLPQCGTYQVSRELAAELSTELQDVLEPLLKEIESLNERIKEYDERMEKIAKEVYPEVSLLKQVKGVGTQIALTYVLTIEDPHRFLKSREVGCFLGLRPGRRNSGESEPQKGISKEGDRYLRTMMVQGAHLHSGAFWRRQ

SEQ ID NO: 418304 - protein, 476 aa, unidentified
MNIKGTKKKNQVVTVNIFEQQELLKKAEVIRENLTASTWRELETNGKFGKNEKLSFVSDDMLILGCDVGSDTHYVRAIDTRGRELSKSAFPFSNTLEGFQSLMDWATKIAASNDKKQIILGLEPTGHYWFCLATWLIGNGISVVQVNPYAVKQTKEVEDNSQLKDDRKDPKLIANLVKDGNFGMPYLPEKLYADIRRLSMLRDQINEDRIRDLNRLHREMKIYFPEYKDAFGKIDGAFTLEVLKVSAIPSDITALGAEGIKNIWHNEKLRGRGYSRANEIVSYAEKSVGLTDGTDAGREAVKWYAEQILKLDEQLAVIESTLHEKCREIPYAENILEIRGVGENILAGILAEMGDISRFDDVKEIQKLSGMGLVACSSGKHKGQTKISHRGRKRLRYWLFQAAKSAVSHADEFKQLHEYYTTRTNNPLKKMQSLVVIACKILRVSYTILKTGTTYDPQKLLKDIKRPTASQAPMAA

SEQ ID NO: 418305 - protein, 343 aa, unidentified
MKYIGLDLHKKSIFATVLGEDGKILSRTKIGPNTRDICYYLKNQGKREELSVAMEASYNWPYYYRAVEEAADTIVLAHPLKTRIIGEAKIKTDKIDSKVLAYMLKADMLPRAYVPSRDTMEDKMLLRARISLVRIRTQIKNKIHAIVDRNRDSYIGLENITDLFGKTGKKILRDTTICPTDHKIITGYLDLMDEINKKIKDIESQIDKRSLKDRDIELLKTIPGIGTFTAFLVKSEIDDISRFSSKGKLSSYAGLIPSTHGSGQRLYHGRIVKQGNKFLRWALTEATQTSIRCSEYFRYHYSRIKSRKNANSATIAVARRMLEIIYVMLKEGREYIEKPVDIK

SEQ ID NO: 418306 - protein, 347 aa, unidentified
MRGAIHMQITTIGLDIAKNVFQVHGIGAAQKVIVRKQLRRGQVMAFFEALAPCLIGMEACATSHHWARELTKLGHMVRLMPAKDVRAYVKRNKNDAADAEAICEAVRRPTMRFVRIKSAEQQGQLMLHRARDLLMRQRTQVINALRAHLAEFGITAAQGREGIKELLAVVVQDEGSRLPVDAHASLTVLAAQLQSVQTMIGTLEKRIIAQHRSNEASKRLETIPGIGVIGATTIAAVVPDPRVFRSGRDFAAWIGIVPRQDSTGGKQKLGPISKQGDQYLRRILIVGAHAVLRRARQQPDKYPWLTQLLARRPFKVVAVALANKMARIAWALLAKGGTYRAPQLAAA

SEQ ID NO: 418307 - protein, 302 aa, unidentified
MFQLGIDVSKKTLDLCLLREGVKGRVKTRKLKNDFNAVGTVVSWLRKQHCEPGDVHIIMEATGVYHESLAYGLHDAVAKVSLANPHRSREFARGMDILTKNDKVDAYMLACYGALKEPEPWEPPPENVRYLSALLRRRDALVTDSSREKNRLEKCRATDTPAAVAESIENVLRNLSAELLRLDTLIQGHLDQHPELKKDFDLLTSIKSVGFQLGLNMLVILRSHRFDTAGQAAAFLGVVPLEKSSGTSVRGLSRLSKIGSPELRAKLYLAALCGLRFNPAMKAMYERLCQRGKAKMCVLLAH

SEQ ID NO: 418308 - protein, 372 aa, unidentified
MYESYSQYIQSGEKMKKGYHLPKPDKMKVSLKQTVGIDVAQNELVVSLGRMDEQMSIEIYDYKVFPNHKKGFSSLVSWVNKQTSTTTDVRYIMEATGVYHESLAYYLCSIKKQVSIVLPNKISNYVRTLDIKTITDKSASQAISRFGLERQLEVWQPPLKIFNDLKQLCREREQLVHERTMLKNQLHAERTSATSSESSVKRTKRRIAFIDLQEKEIREEIAVLIKTDKALVEKMKIVSSIPGIGSLTAVTIIAETNGFELIKNKRQLVSYAGLDLREKTSGTSVKSKPRISKRGNRNLRKVMHFPALAAIRTDERFRNIFLRIVSKHGIKMKAIVAIQRKLLELTYILWKNNAYYDPCFDYCLGPSVAITV

SEQ ID NO: 418309 - protein, 400 aa, unidentified
MGGQGGIDVYLGLDVGKGEHHATALTPEGKKTFDKRLPNTESKLREVFAKLQAKHGTVLVVVDQPASIGALPLAVARDAGCRVAYLPGLTMRRIADLYPGEAKTDARDAYVIADAARSMPHTLRAIEAADETVAELEMLTGFDDDLATEVTRTKNRLRGLLTQIHPPLEKILGPRLDHPAVLTLLERFGSPAQLRKAGRRRLVTLLRPKAPRMAERLVEDIFIALDEQTVVVPGTDAAALIIPNLVSSLGSVLDQRRLLAARIEELLEAHPLSPVLISMPGIGVRTAARILIDVGDGSAFASAGHLAAYAGLAPVTRASGSSIRGEHPARRGNKQLKRAFYLAAFASLSQPESRTYYDRKRREGKHHVAALIALARRRIDVLFAMLRDGTFYEPPTPIAA

SEQ ID NO: 418310 - protein, 391 aa, unidentified
MILVGIDVAKDKHDCYIMTSEGEILFKSFTISNSMEGFNQLYEKILSVTNNLDKVKIGLEATGHYSYNILGYLLDKGLTPFVINPLHTNLYRKSLSLRKTKTDKVDSRTIASMLMSDVSLKPYSDTLYHNEELKSLTRYRFDKVQQRAKLKTSISRLVTILFPELEKLVPTLHMKSIYSLLYEFPSAKAISKAHLTRLTNLLYASSKGHYGKEKAVSIREAAINSIGSYMSVKSLELKHTIKLLEELTSEIDEIEKEIKSIIDKLNSPILTIPGIGYSLGAQIIAEIGDFKNFDSPDKILAFAGMSPSTYQSGKLYSSNAKMEKRGSKYLRSAFFTAAVCVCRIEPTFALYLAKKRAEGKHYYVAISHVVKKLVRLIFHLEKTGEDYVTLT

SEQ ID NO: 418311 - protein, 361 aa, unidentified
MSFKIFKFNCCGLDVHKTWIYACIGITDSNNRTEYKQARFSSFSKGLHQLCVWLAKYNCNDVCMESTGKYWIPVFNILEQHKIRVTLSHPKYTKPMKGNKTDRKDAKWIGDLYMCGMVKPSFIPPADIRELRDLVRYRFKLTCMITGEKNRAQNCLTVSNLKLDDVFSDVFGKSSRSITEQILQHPGEKFDVSPFVDSRCKTPIEEIQAAVDGNISKEQAVKLRQCLDHIDELQKHISEVEQEILRFSDKYEAALNLIRTVPGFDKNPMTAIQVLSEIGGDMPVFPTAKHLVSCAGCCSRNDKSDRKIKSTRISCAGSYFKPVLVQIANALIKSKKHPEFTDRYRRIKARRGHKKAVIAAV

SEQ ID NO: 418312 - protein, 339 aa, unidentified
MRLYAGIDLHSNNHYLGIVNEENQVLFKQKLVNNLKETLTVLEAFRKEIEGVAVESTFNWYWLVDGLMENGYRVHLANPAAIQQYKGLKRVDDQRSALWLANLLRLKILPEGYIYPKEERPVRDLLRKRLQLVRRRTAHILSIQNILSRSLGVKMRSNEVKQLDEERVKDLLKEEHLILAVNASVGVMRYLGGKIKQIEGVVKSRVKLRKEFEGVLSLPGVGDILGLTIMLEVGDIGRFPEVGNYASYCRCVKSTRISNDKSKGQGNRKNGNKYLSWAYVEAAHFAIRSYPVVQRYYQRKTAKTNGIVAIKAISHKLARASYYIMRDQVLYDPQKLFQE

SEQ ID NO: 418313 - protein, 351 aa, unidentified
MDATTVAVDLAKDVFEVATANRAGRILERKRLTRRQFAAFIDAQPAGTRVVMEACGTAHYWGRRCQAHGHDVRLLPVQYVKPYVRRNKTDRMDTEALLEAARCAGIQPVPVKTPEQQALQALHRVRAQWQRTRTARINTLRGMLREHGMPIALGARTVLTKLPRILEDADNGLPAQLCLALALVYDEVRALERDIKEVDRRLARVAAADPVAQRLLTIPGIGVITATALLGTVPHIHAFHRARHFASWLGLTPSERSSGFRRHLGRISKRGDVYLRCLLTHGARAVLLTAQRTLRRKGQGTRFQHWAVAVVGRRGHNKAAIAVANKLARVVWAVWRGERDFSDGPQLPVAA

SEQ ID NO: 418314 - protein, 344 aa, unidentified
MDYFAGLDVSVKDTSVCIVDDTGKIIREVKVASEPDALLAVLTNRAYHFKRIGLEAGPLSQWLFSALGEANLPVICVETRHMRAVLQAQINKTDRNDARGIAQMMRVGLYRPVHVKTLRSQKLRMLLTHRKLLQSKAIAIENDLRGTLRNFGLKVGMAGATKFEGRIKELIENLPDLAVLVEPLLVVRRVLREQIGILHRRLLAVVRDDDVCRRLMTTPGVGPVVALTYRATVDVPARFRKSKSVGAVFGLTCSKYQSGEIDRNGRISRCGDEMMRVMLYEAAQSMLRSKKWSWLKAWAMQIARRRGMKKAIVALARRLAVIMHRIWVDGTEFRWTREPAAAAA

SEQ ID NO: 418315 - protein, 311 aa, unidentified
MEHSRFVGIDISKDHLDVHVRPTGDSFRVRDDDAGLVTLVAHLRPLASVVLVLEATGGYEVTVAATLASAALPVAVVNPRQVRDFARATGQLAKTDTLDARVLALFAEAVRPAARPVPDAQAAALGELIARRRQLVDMLGAEHNRRRLLRDRRLQRHLEAHIAWLEEALRRLDHDLTTLIRSTPVWRETDDLLRSVPGIGPVTAGTLIADLPERGRLDRRRIAALAGLAPIARDSGAFRGRRMIMGGRAHIRRVLYMATLTAITHNPVIRAFHQRRVAAGRPGKVALTAAMRKLLTILNAMLRDRRPWHPA

SEQ ID NO: 418316 - protein, 307 aa, unidentified
MYVGIDVAKDRLDVHVRPSGEAFAVARDGEGLAQLTARLDALAPRLVVLEATGGFEVTVAAALAAARLPLAVVNPRQIRDFARATGKLAKTDALDAAVIAHFAEAVRPEPRPVADQQARALGELVARRRQVVEMIIAENHRRRQLTQRRLLRRLDRHLTVLQQELTEIERELDDSIRGTPAWRESDDLLKSVPGIGDATARTLLAELPELGTLDRKRIAALVGVAPLNRDSGKMRGRRTTWGGRATVRAALYMAALVASRHNPVIARFYARLRQAGKPAKVALTACMRKLLIILNAILRDRRPWQNA

SEQ ID NO: 418317 - protein, 320 aa, unidentified
MSDRFAVGIDADSRTLMVAYHGTKGSFRIANSASAINKWLSSLPVKCCIGVEATNRYHELVVQAAQKADHAVFVLNPRDIKHYAKGVACRGKTDSGDAQVIARYIAKEADNLHEHVARSTAQERMHVLLQQRDSLVRNKATLHLSLGADAADSAIFGRIFRGLKEAIAMLDREIQRLCRSGEQSDLYRRIMTIPGIGPTVAAFVTHHITRWPLASSDAWVACTGLDPRPNESGARIGRRRLSKRGNAGLRQILYMAAMGLTRSKGGKPLYQAIRERGHSSTASFNILARKLARIAWGVFKSGRDFDPAMLKVGQACFQQA

SEQ ID NO: 418318 - protein, 332 aa, unidentified
MNLVSTLGIDLAKSTFSLHGVNSNGEVVLRRSLCRAKLVELVAQLPPCLIGMEACSGAHEWARRFSASGHTVRLMAAKFVTPYRKSGKNDGNDAEAICEAVARPNMRFVPVKSLEQQSDLTLHRVRQGFVEERTATLNRLRGLLAEFGHVLPVRAVEVHRRVPLLLDKLPTRVAVCARDLLEHAAQLAAKTQEYEHEIRAHVRSNALAARTQTRMGIGPITASALVATVGNGRDFKNGRQFAAWLGLVPRQYSTGGKTRLGHITKRGDAYLRTLLVMGARAVLQRAASLTDPLSLWALALRERRGYHRACVAIAAKNARVAWALLSKEPAVA

SEQ ID NO: 418319 - protein, 395 aa, unidentified
MFAGIDIASERHVLARLDEQGVPIGKPTSFSEDRDGYDTLLRLLGAAPVLVVMEATGHYWKNVFAVLTAAGHDVALLNPLVSRRFQDAKLERTKTDAIDATALARFGFERRPAPSHLHDEAVENLRELVRHRDRLQQDFEARILQLHRLVDLTFPEFTRYIHGLDTRLATSLLADYPTARAFAAATPRRVARLRYARTRLVGAELAEQLVNAAKRSIGQHHGATYEMQARHICQDLDLWRERLAEIDRDIARIIDGHELGKLLLTVNSIGPQTAARIIAAVGDPARFKSASAFAAYVGVVPGLKQSGKQNARRAKLAPLGNARLRRALWMPVLGAVRRDPWLRNFFDRLKASGKPHKVALIAAMRKMLMAIYSVAKNRRPFVSITEQGRAAEPSK

SEQ ID NO: 418320 - protein, 357 aa, unidentified
MGKATGNLARVTRIGLDLAKTVFQVHGVDAKGEVVIARKLRRGTMLEFFGRLAPCMVAMEACGSAHHWGRQLVALGHAVNLIPPAHVKPYVRRNKTDAADAAAICEAAMRPGQRFVALRSIDNQAAVMRHRIREQLVGQRTALLNALRGHLSEIGLVAAQGAQHAYRLKRVLADGADDNGEIVVPECVRVALAPLAAQIDALDQAIATIDDKLIETVKADEKARRLMTIPGVGPVIATAVVATVGEVASFASGREFAAFLGLTPRQRSSGGKERLGRITKMGDRYLRKLLVVGATTVLHHAIGHNDSLRRWARQMLKRKGGRAGFKLAAVALANKLARIVFAVLRSGEVYDDRAVAA

SEQ ID NO: 418321 - protein, 341 aa, unidentified
MSIVGAFDVHRRQLTFDYLDTVTGEVKRGRVVPADREHLRAWLARFAGQDDVHFALEGCTGWRYVTEELAAKGIIPHLAEPADTAALRGRKRHAKTDKTDSRHLRVHLAAGDLPECWLPPGHVLETRATVRLYKDLLDERGAWHQRIAATLFHQGVPVTASMSTVQGRAAVAEMELSPAGRQAVGTALRQIGRLTGELDPLHRQLDMISRRQPGCRALRATQFGIGPVTSVAIWAELGDVRRFGNSGDVIRHTGLDITVYSSDGKRSAGHLSRQGPQLLRWALYEAAKCAARPAAPDYGYYTAARDRRTGGLATLSVARKLARRCYHTLRELGEEALAPAA

SEQ ID NO: 418322 - protein, 479 aa, unidentified
MEQEEAGQPPARRLVGIDLGIASRHSVRVLEADGRMVCRASCVPTVESLAAVERAALAGAPEGTTLAVVFEPTGPAWMPIAVFFAQRGHAVYRVSSAKAADLRRFLRRHAKSNGIDAETLARIPLADPGGLQPLELPGEAAAALDRRVRACARLTQAAAEHKTRIKDLVRQLMPVTPLTGDIGQADLTLLERYGDPRAVLAASLAELTQIITAASHHQQGHDRARQWRDAAAAAVELYDGHPAVPYAELAAEVATEVRLLRAIQAELAAHATAREQHYRHADPDQLARSLPGFAEISAPVLIAAMGRPGRFRDGTKFKSYVGLAPRASETGETDRKGQPMSKAGPSLLRATFFRAADTARRQDPQLARIYYTQMTERGATHLKACCVVAGHLAERAWAVLHRGTPYVICDNNGNPVTPAEAKKIIADKWTVPEDVRKRRRSRKIAGKAPQPALTRPDTRGDLPRPRSSRPRPKAVNPTT

SEQ ID NO: 418323 - protein, 469 aa, unidentified
MEVSFKPLAVCLSDWTTILQCGFASVHLKLDSYMRGCRCSMIMGFTKPIEHFNLQRKKVITMNTLYVGIDVSSKSNVVYLMLPNGDKHSNFSVANSHEGSTLLVKKIYSALTSHSLDTVLIGLEATSVYGVNLVYFLREDATLAPFNRKIHVLNPKQVKKFHDTYNDLPKNDYVDSFVIADCLRFGRINKEVYMGEYRYKALQNLTRARFFAVQNLVKEKQRFMNVLFKKYSTMTQEKVFSDAFSTTALAVYDEFESAEALANMDLHELTDFIIEKGKNRFPDPDAVAKAIQKAARSSYRLPKTVNDSVNQVLSISITSMKALESQIKEFDKAIKALMELLPNVLISIPGIGPVYSAGIMAEIGDINRFDNQASLAKYAGLAWKQHQSGGFEAEVTRLIPSGNRFLKYYLCEAAFSLVRCDKKYSDFYHLKYKEVNRCQHKRALALTARKFVRLVFRLLKDNRLYCPAK

SEQ ID NO: 418324 - protein, 369 aa, unidentified
MTVYIGVDLHKTQFTVHVRVGDRIESLSEIKQYPTTAAGYTKFLERIAGYKTADFAVKIGVESTGNTRFFKNQVEKAGAEVTVINTLKFKVINESTKKTDKHDASTISWFLSKDMLPESHICSKETENLRRLLKSRERLVRSIVGQKNEVHALLVSMGLDDELRSLQSKKGRQKVLDTLLSHSDLVLEAQSVKLIFQIIEQMIESVKMIEKHLSELTEDDAMVNRLMTIRGCGKITAWIIRAYTEDIGRFTNAKKYAAFCGLVPWVQDSNESVRHGKITKRGPQELRTAYVQLVLGIRRCKDTWGWRIMQRLDYMKKNKGSGKSIVAAARKMAEIVWALLTEGQDFDSKKMMGTYKPLTLTEQALAAMN

SEQ ID NO: 418325 - protein, 361 aa, unidentified
MFIERTSVGLDVHARSVVACGLDTATGQVMRRRLAPSAGAVLDWLRELSGPVAVAYEAGPTGFGLARQLTAAGVRCVVAAPSKLQRPAGDRIKTDARDALLLARLLRMDEIVEVRVPSVEQEAARDLVRAREDTRADLMRCRHRVSKLLLRHGIVYSGGHPWNGVHETWLRGQRFDQRGIQLAFDADLEAMLLTLDRRDRLDKAITEMAATGEYAAVVRRLGCLRGVSTLTAFGLAVEIGDWHRFTGATIGAYLGLVPTESSSGQQRCQGSITKAGNTHARRLLVEAAWHHRRDYRTPGATMRARWRLASPAATARGNAGNHRLHQRWQTFIARRKKPVVANVAVARELAGWCWSLAILDD

SEQ ID NO: 418326 - protein, 317 aa, unidentified
MSRSETVMGIDVSKVLLQVAVVPEETTWSVNNDETGIGVLVERAKALEPRLIVLEATGGLEAPVVAALATGGLPVVVVNPRQVRDFAKASGKLAKTDTIDAFMLARFGGAVNPPVRPLKDHHAQQLSALVVRRRQLVAILTAEKNRLSSAPPAIHENIKSHIAWLENCLDGINRHLQQAIKDSPVWCEKDALLRTARGVGPVLSVSLLAGLPELGSLNRKQIAALVGVAPFNRDSGAFRGRKSVWGGRSHIRAVLYMGTLSAIRYNPAIRTFYQRLCMAGKEHKVALTACMRKLLTILNAMVKNHTTWELRVEQKNA

SEQ ID NO: 418327 - protein, 417 aa, unidentified
MAECIMVGCDLHDKSMLLKIAVDREAPVLRNCGTDASARVAMIADLKRRAQQRGAGRIIFAYEACGFGWNLHDELAAAGIECHVLAPSKMERSVKHRKRKTDERDAQAILDHVRSHVLAGVEMPSVWVPDLQTRDDRELLRQRLAVAEDGSALQVRIRWLLKRQGIQTAPAQAWTEAYWRWLEQLTTSGELAAGASATLASLVRQLQSLDQEKERLDAQVLAMSRQERFAPVVAVLRRHKGVGILTAMVYLTEMGDLSRFANRQQVGSFLGLTPSSYETGQDADHKGHITHQGPTRVRKVLCQAVWSRLRSVESERLAYDRIVRRNPKHKKIAVVARMRVLGIVLWHEGLAAQEALRAGTGGREGPREFDGTPRRQSPPCAVPAATTTARRDPIAAVPIESPRWAKPDKKPNNTRRE

SEQ ID NO: 418328 - protein, 343 aa, unidentified
MPHYVGLDVSQKTTSICVVDEQGRRLWRGVCTTHPDPIATRVLRHAGEDAKIGIETGSMTPWLVHGLRAAGLDVVCLDARRVKAALQMRLNKTDQNDAEGLAQVMRTGWYRAVHVKSLDAHRARALLGARAQLVGMTTRLSNMIRGVLKTFGLLPGAGRGLRFDRKVEALLEGTPDLEQIVRPLLATWRQLREQIAVFDKAVLQQVKADPVCRLLMSVPGIGALSSLAYVTTVEEPSRFARSRAVGAHLGLTPRRYQSGEIDRSGHISRCGDGLARTLMYEAAIVILHRVKRPLHLKTWAKAIEQRSGPGKARVALARKLAVLLHSMWRSGQPFRWPSQPISA

SEQ ID NO: 418329 - protein, 448 aa, unidentified
MTIIEGSAVVAVGIDAAVVANHHIVVRRPEAGRPGTMVDDFVVPPTLAGMERLTKRLVSWPGAVAVAEPTSMTWLPLSIALRNAGVELSLVGNRHSARLRSALAGKNKSDPIDAALLSRAGEFFELTPARIPTTIELALRRAAQRRGKTIVDANRCLRRVVSQARWAFPDVWNAFAGSRPTALAVLDRWPHLDALARARVSSITEVVAAHTRGVANVERRAQQIRSAARDWVEFWDGHLDLDALAWETAELLADLTAADARVERATETTRRYWEQLWGDDPVLLSVPGMGLLTAPTVRAFLADGTHLADAKAAQSFVGLNPSNWSSGQMESPSREITKEGPPVLRLAFYQAANVARTHDPQLADFYRRLMVERGHCHTKANCAVARKLVARTWATIVSGTPYQLRDLDGTPITRRQATKLAAALAVPDDIRRRTRAHSAATHRARLTR

SEQ ID NO: 418330 - protein, 310 aa, unidentified
MNTNTLQNINVGVDTGKSQLDIYIRPLNIYFTVPNNEKGINDAIKTIKKHKPQRVVIEATDRLEMPFILACDKAKLPYVVANPLRIKKFAGAIGQRAKNDRLDAALIAYYAERVQPELTQLKSENIRLMSDLVTRRNQLLTMQTMERNRLQILPKNIASTISPILTALKNQIEKVEAKITKLIDSCPEYQSKNTILQSMPGVGKVLAASLISNVPELEFITNKQASSLIGVAPITRESGRFKGKRVIQGGRAQVRTVMYMAMMSAMQCNPVFKTTYERLLAAGKPKKVAIVACMRKMVVILNSMLRDGVM

SEQ ID NO: 418331 - protein, 506 aa, unidentified
MKAKQRKAKGNDHSSSMASKQRAKIAKAMQAPEQMEIVNRHAGGIDCGSEEHYAAVSPESVEEGEPFVRCFSAFTEGLDALVEWLKDCGVTTVAMESTGVYWVALYQKLEAAGIEVFLVNARHLRHVPGRKTDVKDCQWIQRLHSFGLLSASFRPEDMICRLRSLQRHRLNLVSAGAAEIQHMQKALQQMNLHLHHVVSDISGLSGLRIIEAILAGQRDPSQLAKLRDPRVRKSTVAQMEAALVGDYRPEHLFVLDQSLQAYRFYQARIEECDHEIEPLLQQLAERFECSSSPLAAESSQPEVIQDQAAQSQTARPIKPKRKRKPKANQPKIDLAGYLQRICGVDLTQVVGLDVLSVLLIVSEIGVDMSKWRNAKAFCSWLGLCPGNKISGGKVLDRRTCKVINRVATTLRLAAQAVGRSNTCLGIFYRRKKAHLGPAKATTATARKLACLVYHLLKYKDQYRDLPTQSPKNHPQQTSETSCRSRLSVTTNRPGPGLIPPAHRSSS

SEQ ID NO: 418332 - protein, 404 aa, unidentified
MWYVGLDWADTHHDVVVLDEAGRRVGSRRFAHTHDGLNELKQFLLGIAASPEDLACIVETSHGLLIAFLLEAGIPVYPVNPKTANQLRKAAGAKTDQIDAYLLAKTGRFDLAELRRLVPDSATVQALKTLTRDQDALIQTQTRLVNQLTACLKEYYPAALHLFAKVQQRSTLVFLQAYPTPQAAQAASLEEITATLRMGKHTNPTGVAPKIFEELHRPQLVASPVIVRAKSRLMLSLVKQLLVVIQEIAGYDAAIRPLFLRHPDQEIWSSLPRAGKRLAPRLLAEWGEDRNRYADATSVQTLAGTAPVPFQSGNYAKAHKRFACVKPLRNVLHQFAWQSTRQEAWALAYYQRKRAEGKTHSMAVRALANVWVRIIYRMWVNKTSYQTATFEAAKRAHASRPHAA

SEQ ID NO: 418333 - protein, 337 aa, unidentified
MRYIGVDLHTNSLTVCYLSEDGQEALATYALSELPAFVASLQSDDQVAVEATGNTRYFVGQIKAQVAQVVIVNPSQFEVIRKSVKKTDKNDARQLAFFLSKEMLPTARLKDERSAQMNSLAQTRDKFVKLRTTLINKIHAIHNGHGIKSQKSAFKSEKGLQTALAREWDEIVRIELEVLVGQMRSLNEGIKKLEAQMSKSGKEMPGHENLTSIKGIGTKSAAILLSVIGDVQDFESEKKLESYFGVVPKVANSNETVNHGRITKRGSKLGRTTLVQCTLIAIKYSPYLRKFYDRKKAAKGAGKAIIATARKFLGIIYNTLKNNWVFEDFPNFVLAES

SEQ ID NO: 418334 - protein, 338 aa, unidentified
MEILKQNVGIDVAKDSFVATFTILLKDLIVKNKATKEFKNNSNGFENLYQWCKKLQEDNLEVNYTMEATGVYYESLAYYLYEKDVTVHVLLPNKAKKFGESLNVKSKTDKIDSKVLGQMGVERNLEKWVLSSKIYRHLRSLHREKQQIVKERTAIKNQLHAEEYSGDPVKTILRRMKNRIKYLNKQIESIEKELEDLVSKDNYISERVKKITKTPGLGFRTVIAVIAETNGFANITSIKQLSSYAGYDVRIRESGKWKGKSKISKKGNSHIREIMYMPSLSSIQYAETYKKFYKKLNEKKQNGLISGTAVQRKLLGLIYTLWKNNTEYIENYEMKKAI

SEQ ID NO: 418335 - protein, 341 aa, unidentified
MQVATIGLDLAKHVFQIHGIDAAENVVVRKQLRRSQVMGFFEALPPCLIGMEACATAHYWARELTKLGHEVRLMPAKDVKAYVKRNKNDAADAEAICEAVRRPTMRFVGVKSAEQQGQLMQHRTRDLLMRQRTQVINALRAHMAELGIVAAQGREGTKALLAIIADDGDERLPVDARASLIVLAAQLQALQTLIGSIEKRIIAQHRASEASKRLATVPGIGILGASAITTMVTDPKAFRSGRDFAAWVGLVPRQDSTGGKHKLGPISKQGDRYLRRILVVGAHAVLRRARQHPEKYPWLTRLLARRPFKVVAVALANKMARVAWALLAKGGSYRVPRLAAA

SEQ ID NO: 418336 - protein, 342 aa, unidentified
MPIVGGLDIHRKQITFDYLDTATGEVRRGQIAPADREHLAAWLAGRFTGQDAHFAVEGCTGWRYVVEELAAAGVTAHVAEPADTAALRGRKRHAKTDKTDSRHLRQLLADGRLPECWIPPSHILECRALLETYHDLRVEHTAWTQRIHAALFHQGAPRLGHLGTAEGEARLRALAAGLSPAGQAQVAVALQVTAVLEERLEELRRRLVSEARHLKGARELQARLYGVGPVTALALTCWLGGAGRFSSSRKAVRFTGLDVTACSSAGKRSPGHLSRQGPAVLRWCAYEAGKAHARASAPDHAYYAQVRDRIDGKRAALSEARKIVRQAAHVLAGLGDGALAAC

SEQ ID NO: 418337 - protein, 349 aa, unidentified
MKKIIIGIDVSKEKIDASAIDVRNSQLGVLKLDYQAFENRPMGFRRMLVWARRLLKGITLEEILFCCETTGGYDRSLCDYIYAKGLDIWRESSLQIKKSSGLRKGKDDKADSLTIAEYAMRHIDKAVSYISPSETVRELKALLLYRRKLEQEKTSKKVRVAELKSTAAKSRSVSFILRDAQKSIRVLEKSIKDCEKQILALYDSDEELKKSYDHLISIRGIGIVNATAMIAYSNNFKNITSSRKLASYYGIAPFRERSGTTIDKKAMVKCYSSSMLRAYLTQAAENTIREHGIYHDYYTRLSARGKCHGIALNNVKNKLLHLSLSLITNDMDYEENHEVLRAIRKVQAG

SEQ ID NO: 418338 - protein, 406 aa, unidentified
MKKKVIEFEQVVERGSGMDVHKDVIVATIQGKDIKTQTKSFKTFTSSLIKLKKWLLKNNITHVAMESTGVYWKPVFNVLGDDFKILLVNARHVKNVPGHKTDKKDSRWLAKLLLSGLLKGSFIPERRIRELRDLTRYNTKLIHQISAERNRFQKILEDANIKLSSVLSDIFGATGTKIMNHILACESYRPEQLLQYVHGRVKASRADIKEALTGYITAHHRFMLKTIKRNIERIETTVAEVEQQIEICIEPYKFERELLETIPGVGQDGATKIIAEIGADMSPFPDQNHLASWAGVCPGSNESAGKNKSGRITYGNKYLRSLLVECGWAASRTKNTYMNAKYKSLVGRRGKKRAVIALGHKILIATYFIIKDKVAYNDLGADHLNNFRRDRLVAYYKQQLEKLEAA

SEQ ID NO: 418339 - protein, 344 aa, unidentified
MEHFAGLDVSVKETSVCIVDEAGRITREVKIASTPEALMQVLRAPAYHLKRVGLEAGPLSQWLFGALAEANVPVICVETRHMRAVLKAQINKTDRNDARGIAQMMRAGLYRPVHVKTLRSQKLRMLLTHRKLLQSKAIAIENDLRATLRNFGLKVGVVGTAKFEARIKELVGDDSDLVLMVEPMLIVRRVLREQLAILHRHLLALARDDGVCRRLMTVPGVGPVVALTFRATVDVPARFQNSRAVGAVFGLTPCKHQSGESDYTGGISKCGDEMMRMMLYEAAQIVLIRATKWSWLKSWAMQIAKRRGVKKAIVALARRLAVIMHRIWIDGTEFCWIRQKAVAA

SEQ ID NO: 418340 - protein, 417 aa, unidentified
MEHEYKFFVGIDWATEAHQVCVLDRNRKVVGERVVQHTGTAISELATWLEKLGDPATIAVSIETPRGAVIEMLMERRFVVFHLNPKQLDRFRDRHTVAGAKDDRRDAFVLADSLRTDTHLFRRVRADEADIILLREYVRADDDLAQEHNRLTNRLREQLHRFFPQVLELSPSADDAWVWELVTLIPTPAHAAEISAKRVGKLLADHRIRRVDAAHVLEVLRQPALRVTAGTVSAARAHVGLLVPRLKLVAEQRKSVQKEVHALLEVLAEKEPSPGQETEHRDVTILLSLPGVGWKVTATMLVEASQALAERDYPALRSLAGVAPITKQSGKRGKVEMRRAANNRLRNAHYHWARVSAQADPHAKAQYAALRAKGHSHGRALRSVADRNLRLLMGMLRSGTLYDPDRPVKEPRVVAAV

SEQ ID NO: 418341 - protein, 413 aa, unidentified
MLFIGDDWAEGHHDIEVEDDVGRRLARIRLPEGVEGLARLHEVVAEHLDSDSTGSSDLPEGAVVVGIETDRGVWVSTLLACGYQVYAINPMSAARYRERHGTSGAKSDAGDAHVLAEIVRLDRGHHRQIAGDSPQVEALKLLARAHQGLIWDRTRHLQRMRSALREYFPAALTAFDNLAAPDTLALLRKAPDPDRAARLTTGQITAELARAHRRGDRTATATRIRDALRAPALRQPAAIEHAYAVVVAGQARMLEHLAEQIEELEQEVKRSFRRHPAAEIVRSCPGLGDVLGARVLAEFGDDPHRYRNAKARKNYAGTSPITRASGKRKTVSARYARNKHLADACHQWAFCSMNTSPGARAYYDALRAREVGHHAALRQLGNRLVGILHGCLKTGTIYDESTAWPQVPTQAAA

SEQ ID NO: 418342 - protein, 362 aa, unidentified
MNRNTGMSAGQIIGTMNGLQVMGLDIAKHVFQLHTVDMGTGEIANVQIKRAKVLEYFVNKPKSLIAIEACGGAHHWARELTALGHSVRLLHAKIVRPFVSGNKTDATDARAIWLAVQQPGVKFVGIKTAAQQATLTLHRQRELLMKMRTMQTNALRGLLYEFGATFAQGRKALFKDIERALEELSTQLPQMVRDSLREQVGRIKEMGDAMLEIEKRLALQLKADPHMQRIAQIPGVGLLTATAAIATMGEASAFKSGREFCAWLGLVPSQTGTGGKVRLGGISKRGDTYVRTLLIHGARSVLSHAKEPSPWLQQIKQRRPANVVIVAQAAKMARTIWAVTAKEQSYQRGFQSVRPSAAMHAA

SEQ ID NO: 418343 - protein, 418 aa, unidentified
MKEDLYARLSRRYLALDIHKHYSIVAGVDFDGDVVLEPRRIEHGDLEAWALKHIEPSDYVVIESTTNAWHIYDLLEPLAEKVLVANPIKVKQIAQARVKTDIRDTLILARLLAANLIPSIWVPPAHVRELRYLLSQRRHLIGMHTATVNRMHSVAHRHHLSHPRGKRFKEKNIGWQQSEELSGSEQFQLELDMNTKQHLHAQTELITEKLRVMSHEAPWSKDMMYLMQLPGFGIITGMTVLAAIGDISRFPSFKKLSGYSGLVPGVEQSGTKKRGKRITKEGRRDLRWAMVEVAQRAVKSDPLWERRFQELSHRMHRNQAIVAIARRMLELVWIVLTRKESYRHFSDERIAYKYLTWSWQLDEIARGGLTRQQFARYYLMRLGIGHDLEKIMLNPKYPRRLASEADVLALRPELSQIE

SEQ ID NO: 418344 - protein, 321 aa, unidentified
MAIPVQPLLIGVDVSKATLAICLGPDQPVQSLDNDRKSITRWLATLPAGPACIAAEATNTFHLDLVDLAHHAGHAVYLVDGYRLSRYRDSIGTRAKTDASDAQLLQRYLAHERDSLRPWSPPPQGYRTLQQLLQRRATLVRARVALQQSLADLPGLKQAAATLFRQLKRIDQKIQQGLIDTLAQLDWDTDFKRCQGIEGVGPLTAAALTMSFHRGAFRSSDAFVAFLGLDVRVRDSGQLRGRRRLTKKGNPELRRLLFLAAMQAARSRSWKDFYQRHLDRGFSRIQALVVLARKLARVAFALLKNQSEYQPRYLKETCMET

SEQ ID NO: 418345 - protein, 417 aa, unidentified
MAEEIEWFVGIDWASQSHQVCLVDARGECLGERAVAHGGLGIEELCDWLIARTGATPEVIGVAIEMTQGPVVEALLERGFCVYGINPKQLDRFRDRFTVAGAKDDRRDAHVLADSLRTDRHAFRRLSNDEPVIVLLREWSRMADELQQERARLASRMREQLWRYYPQMLELADDFAADWFLDLWNQAPTPAKAVRLRQTTIERFVKAHRLRRWPAPEVLRILKQKPLSVAPGVVEAASDHIRTLTIRIRLVNQQLKAAHRKLDELCAQLIPSEENEPGQQCEQRDVVILRSMPGLGRIILAVLLAEVWQPLRRRDYHALRSLSGVAPVTRRSGKTCVVVRRYACNKRLANALYHWARLATQHDALSRRRYAALRQRGHSHGRALRTVADRLLAVACTLLEQQTLFDPSYEVRDAAGA

SEQ ID NO: 418346 - protein, 485 aa, unidentified
MNVWQASSSLPSRPALASEEEESVDQMTLGIDVACRAAHQASLADERGGFAWTGRRFRTTAADLERLWAQVPAGAKLTVVMEPTRNAWVPLAAWFRRRGAVVILVPPEQSADLRDYYSKHAKSDHLDSRMLARLPLLHPEGLRPSPGLGPADGLRRATKLRASLVKRRSTILARLDAYLELLGPAWHAALGGDLALNTPLRFLAAGYADPHALRRLGKTRLTRFIWRYSHGAWGEQHATRLLAAAAETLQLWDGELSYPDLAEDIATEARLALQITTEIRDLEQKIAALLHDRDPAGIMTSAPGVGVINAAQILARLGDPARFRSLAGARSFTGLIPSLSASGTSGHHGPPTKSGDAPLREALFMAADQARRTDPTLAARYHRLMVHQGKHHNSALCHISTVLLTRIIACWRAGTPYQLRDTDGTPITPTQGRQIISQRYQISAELRAQRRTSHTSTRRRTGEERSRQALRHQPASPHATTRPPA

SEQ ID NO: 418347 - protein, 377 aa, unidentified
MTVTRTLSGSVSEPTLYVAFELGKKEWKVAMTSGFGMKPLLRTVAAGDLGAVERVIRATGERVGLPPTARVISCYEAGRDGFWIHRALEQRGIANRVVDSASIEVNRRARRTKTDRIDAIKLVLMLVRVCAGDETAWSEVHVPTLDTEAARHVSRERTALTHEQTRLRNQIGSWLTTCGCRVTASMRQRPAWWTQVRDWAGAPLPAALQARIARADARLALLAAHMADIEGQQAAATRAADSSSPLARLVQLKGVATTSASVLLDEGVVWRAFRNRREIGGLLGFAPARYDSGDSSRDQGITRAGNKRLQSVMVQLAWSWVHWQPQSALTRWYQARFSRGKRTRKVGIVALARKLLIALWRYATQGVLPAGAVLKAV

SEQ ID NO: 418348 - protein, 355 aa, unidentified
MNDAKYIGLDVHQATISEAVRDSDGKLVMEAILETKAETILQFVRGLRGSLHVTFEEGTCAAWLYALLKPHVTQVLVCDPRKNALLKVGNKNDRIDSRKLAELLRANLLSSVFHEDTGLRAVKELARSYLTMTKDLTRVMVRLKALYRSWAIPCATKQVYAPRHRAEWLAKIREASVHRRAELYYQQLDALRSLQQQVKKELLIEGRKHSATKLLRQIPSIGPIRAVLLLALIQTPHRFRTKRQLWSYCGLALETRTSAEYRVVHGQLQRSKKPVAIRGLNKNHNHDLKNLFKGAALRAAAVEKPFQEFYAALVAKGIKPELARLTLARKLAAITLIVWKKGARFDAEQLKQQAA

SEQ ID NO: 418349 - protein, 469 aa, unidentified
MNLARPHSDVPGQGRVADWPHHRVSHSAPRGRIGVYLAPGSPHPGHVGGGDVINVLDVHKGSVFVVQADDTGNETNRLRLRANHEVMNRFLDGLPAGSTVIMESCYAWEYIYDLAVEKGMNAVVVNTGELYPKGKPEKKNDLEDCRRILRLYKIGELPMIQPIGAETRDLRDLLRLRIFVTRKITAFRNRTHFTVDRLGLRFPSAELFGAKKFEPQDLPISRPNMVQLASNQKILEVLEAQEKALEAEITARILNTTEMQTILTIKGIGPITAMTMLLEMGSVSRFATKEKLTAYAGLVPAQDSSDEEEKTTRIRHRCNHYLKWAAIEAARHCIQCEPSMKARYLRLLHCPEEMTTKSRKGKAVVAVARHLLEVVWCMLTRNEPFRGAPDAAIEKKMEIVARKAKAYDLPEPKAIFESVSNTLDKPTDLCYSPDGEWEGCWEERDDLQPSPAVKRAKISTAITPASIFL

SEQ ID NO: 418350 - protein, 317 aa, unidentified
MSETVSHAAGIDISKATLDVAFSELALIKQFDNSPKGCADALAFIKKQGADRVCFEATGAYHRDLEYALSRSGMSFVKANPRRVRRFADVIGVGAKTDKVDAKVLAKFISLIAPSQTLVKSVTLLSLGELLGAKEALIKDHTAILNRSKIQRLPLLQRHNAARLKQIEGQLVAIDAQAKALVDADPMLKKRFDILQSIPAIGAATALVLLVEMPELGTLDQRQVASLAGLAPLARESGKWAGKRFIQGGRAKIRRALYMPILVAIRYNPNLKEKYQALIKAGKPPKIALVAVMRKLLILANALIRDDRMWAETRACA

SEQ ID NO: 418351 - protein, 353 aa, unidentified
MPRKTTKTNEPVATIGIDIGKNTFHLIGLSKEGAIVMQAKLSRSQLGRRLCNMPRSLIGMEACSGAHFIGRMLKEMGHDVRLIPAQYVKPFLKGHKNDYRDAEAIAEAVQRPTMRLVRIKTPEQMDLLALHRVRARLVSRRTAVINQVRGFLIERGIAVAKGPNALRKVLPEILGTCDDVLSPMIVRLIEELSEDWRRLDIWIADLTEEIEFLAREDSCCQRLMTVPGIGPTISSAIVAAVGDASGFASGRDLSAWLGLVPRQMSTGDRTILGRISKRGNRYIRTLLVQAAHIILVRRPQTAQQGLWPWIEEASRRLHRNVLIIALANKLARIAWAVLARGTDYQSKHLGRAG

SEQ ID NO: 418352 - protein, 339 aa, unidentified
MSVKTVGLDLAKDVFQVHGISENGRVIFNKAIKRAKLLAFFETLPPCVIGMEACGSSHHWARTLRKLGHDVRLMPANYVKPYVKRGKTDAVDAEAICEAVRRPTMRFVKIKTEDQQAVLSIHRTRDLTVRQRTQMANMIRSLLREFGHILPLGVEAVTAFAKRHLNGDQPDIPDIANGMLGMQCYQFIGLSERITGYTKMIEQHALLSTDARRLMGMPGIGPITASAIVATIGDAHQFRTGRDLAAWLGLTPLNKSSGGKERLGKITKKGDRYIRKLLVVGMTSRAVMAKRSPEKVDLWTAKIIAEKPFRLATTAMANKAARAIWAMLTKKQEYRQPAF

SEQ ID NO: 418353 - protein, 350 aa, unidentified
MKNISENNVIHTLGIDLGKSSFQIHGISDKGRVLLDKKISRRQLKTLMAQTPKCLVGMEACGSSHYWARLVRSYSHEVKLIAPQFVKPYVKSNKNDRADAEAICEAVQRPNMRFVAIKGIEHQDIQCLHRIRSQVIGHRTAQVNQVRGFLMEYGIDIPQGRANVRKRLPQILEDADNGLTMRFRELLSELYEELIRLDERVESLNERIDKIAHSDERSQRLMSIPGVGPLSATALVAAIGDVHAFNSSREMAAWLGLVPRQHSTGGKPRLLGISKRGDVYLRQLLVHGARSVLRYVDRKQDPRSRWANELKKRRNSNVASVAMANKMVRTAYALLKHGGVYNPRATVMNS

SEQ ID NO: 418354 - protein, 353 aa, unidentified
MHTHVKSSNPVTTIGLDIGKNTFHLVGLDKRGAIAMRIKVSRNQLVRRLVNLPPCLVGLEAGSGSHHIARQIEPLGHDVRLIPAQYVKPFLKGHKNDFRDAEAIAEAVQRPTMHFVAIKTPEQSDLLSLHRVRSRLVRQRTAIINQIRGFLIERGITVRQGPAPLRKALPDVLSSPPEALSPRMLRLIAELDEDWRRLDDRIEALSAEILNLSEKDPACHRLMTVPGIGPIISSAVVAAIGTGSGFKQGRDFAAWLGLVPKQESTGDRTKLGRISKRGNKYLRTLFVQAAHVVLERRPAAAGRVLLPWIDRASKRLAHRNLLAIALANKLARVAWAVLARGRDYEPRITPNAA

SEQ ID NO: 418355 - protein, 514 aa, unidentified
MSEGTAVPPFSRLSPRLLRKHSAWHIRHIPLTQNFHPQPLAPARKADWVHAHCARFRSPYAAQDKPFASGFTNPHRNGGDIMLKINYMSTLFVGIDVSSKTNAVYAMDFEENKYISSSFGNNQPGADKLVNMIAECMQKHQNLDTVLIVLESTSVYSVHISNFLSTSEVLMPYKPYVFCVNPKATSNYRKSYIGMEKTDPMDAYLIADFGRVGRTKKLEPWRGGQFIALKRLTRHRMHLSECITREKTYMVSNLYLKFSELQLLEGDDKPFGSLYGATSSAVLTEFLSPQEIIDMPEEGLLTFLAEKSRNRISDISKTSELLRKAARDSYRLDKCMYEPLNISLASSFNCIHAYQKEIRLIEQAIEKCINGMNPNALIILRSIPGIGPVWASGILSEIGDITAFHSSDALAKYAGLYWPKGDSGDFTSEDNQMSKAGNPYLRYYLGEAANSVRKHIPEYADFYARKYAEVTKHQHKRALALTSRKFVRLVFGLLVKNQLYTGEKLDTEYNTESN

SEQ ID NO: 418356 - protein, 350 aa, unidentified
MVVIGGDSHKRTHTFVAVDEVGRRVAEKTVPATTDGHLAALAWAGQWSDRRWALEDCRHLTRRLEGDLLRAGEAIVRVPPKMMAAERRGTRSPGKSDPIDAEAVARAALRDDDLPVARLEGEARKVKLLVDHREDLVAERTRMQARLRWHLHELMPELDLAPKALNKFCHLDRVAVALAGFDGAVASIAGELVERIRDLTVRCNQLEREITAIVKVLVPTLLELPGCGPLTAAKIVGEVAGADRFKTKAAFARWNGTAPIPVWTGSEKFRLSRGGNRQVNAALHRIAITQWRGVGPGRAFIEARMAAGKTKTAAIRLLRRRLSDEVLRRLLIDHAATSCGGQESALPIAA

SEQ ID NO: 418357 - protein, 347 aa, unidentified
MTTIEDARVITGGVDTRAGMHVAAALDSIGGLLGVQEFPATAAGYASLLGWLRGFGTLAVAGVEGTGSYGAGLARHLAAAGVRVVEVDRPDRQDRARQGKSDPLDAVSAARAALSGRASGAPRGRDGAVEAIRALMVAKRSARQERIQAINQARALIMTGPEELRARFVRRSPAQLIEAIAALRPRPGDVPGYATRVALRELGRRAQFLDAQLDRLDELIGPLVTARAPGLLALHGVGPDTAAMLLVAAGDHPERLRSESSWAHLCGVAPIPASSGKTAGRYRLNRGGDRQANSALWRIVIVRMNSHPATRAYADRRSEEGLSKKEIIRCLKRYVAREVYRQLRNGA

SEQ ID NO: 418358 - protein, 371 aa, unidentified
MSKYTTFVGMDIHKKTISIAIADDKGVRKFGTINNDWDAIGAFLRKIPAYEELSMCYEAGPCGYTLYRYLRARKIKCIVVAPSLIPRKPGDRVKTDSRDAVMLVKLLKAGELTPCWVPDEEDEALRDLVRTREDAVECQRVCRQQLRGFLDRNKLVPRDNSTAWSTPFMSWLNSLKLLNATQQAALSDYIMAVVQAVDRVNRLSQQVNERAKSHPKWEVIHALTGLKGVDILTATTLVTEVGEFSRFPSPTGLMSYAGVVPSESSSGSKTCRGRITKAGNAHIRRVLGQAAWQYAALPKIGPALSQRRKELAPEVIAIADKALRRLNQRYFRLMSRSKMKNVIATALARELLGFIWAIAVVTEKRMGSCAA

SEQ ID NO: 418359 - protein, 338 aa, unidentified
MKLYGGIDLHSNNSVICLLDEQDKVAYSKRLPNDLPTILSELSPYQLQIDALAVESTFNWYWLVDGLIEQGYRIQLVNTTAVQTYSGLKYTNDAHDARWLAHLLRLGILPTGYIYPKEERAVRDLLRKRTQMVRLRTTNLLSIQNLIARNLGESISGDELKRMKVEDVALLIPHEDHALALSCNLSVLQQCHQQIKILERAVLKRVRLRSEYQTLLTVPGIGRILALTIMLETGDIGRFEKAGNFASYARCVQSKRLSNNKKKGENNRKNGNKYLAWAFVEAAHFSIRYSDIIKGFYQSKAAKTKKVVAIKAVAHKLARACYYVMRDNVAFDVKKAFM

SEQ ID NO: 418360 - protein, 342 aa, unidentified
MGIDPHKQTHTAVAVDAVTAEVKGERTVRARSGGYEQLVAWARSLDDERIFAVEDCRHVSGGLERHLIARGERAVRVAPKLMAAHRRTDRTFGKSDPIDAAAAALAALRHPDLPEARLSGPERTIGLLATHREGLVTERTRACNRLRWLLHDLDPDLVPPKGVLDRDVAIERLRGELQDRPSRIELELCFELLGRIAQINARERELARQIEELVRAVSPALLEIPGCAALTAAKLVAEVANVDRFATEARFAMHAGVAPLQASSGASHRHRLNRRGNRQLNAALHRIAITQLRVHDPAKTFVARKRSEGMSNREALRCLKRQLARVVYNTMRTAQRSTAEAA

SEQ ID NO: 418361 - protein, 349 aa, unidentified
MKFYAGLDVGGKKTAVCVVDETGRIVWQGMVDTHPEMIAAALKRWRGKLAHVGLESGPFTPHLHRSLAAMDFPMVCMDARRTADAIKSRRIKTDKGDAQALAEMLRTGWFTAVHVKTVDTHRLKSLLGARDQLVKIKRSLGNQVRGLLRPFGIKLPSRVGTKLYAEAAHQATQNDPILNASIAALLEALVSIDAQLGKLDAELKELARRNEVAWRLMSIPGVGPLTAMAFIAAIEDVRRFSNTRDIGAYLGLTPKRYQSGDTDVRLGISKQGDDMARHYLYEAANSMLTTVKKRFGLRSWGLQLMKTHGAKKARVAVARKLAVIMGRMWKDGTHFEATPGTALAKVLPT

SEQ ID NO: 418362 - protein, 422 aa, unidentified
MTTSNNTNNPSSPETTPPAAWIGFDWGDAEHAFVLQDQAGDRESDKIQHSAENLHGWLKKIGKRYGGRPVALAIEASRGAVIHALLQYPWLTIYPINPVTSARYRKAFRPSGAKDDLPDAEVLLDLVRHHADKLRPLEPQDPLTLKLACLVEARRKIVNRRTAVLNELTSLLKGYYPQALKLVGSLDSELAVALLRRWPDLISLKAARPATIKRLFYQHQVRSKTLVEERLAFIAQALALTTEDARVSVAILQLEQLLDQVEVFQKHVALFDAQIKTVFASDPEAAFFRELPGAGPQLAPRLCVAFSASYADPASMQKFTGVAPVREKSGNQIWTHWRWGAPVFLRQTFVEWAGQTVRYSQWAKIYYEHMLKKGKKHPAIIRSLAFKWIRVLWKCRQAGTPYNEACYLKQLIHRKSPHAVKP

SEQ ID NO: 418363 - protein, 401 aa, unidentified
MTTFFAGLDWASQTHAVCIIDTQGTVHERFDIDHTASGLAELRRHLIAAGSPPVAIERPSGLVVDTLVEAGFTVFPIHPNAVKATRPRYRSHGAKSDASDAYLLADLLRTDGHRFKPLAPQGDEIRALRALVRGRDDLVATRVQLANQLRSLLDSFWPGAAAIFADVDSPIALAFVERYPTPESAARLGPKRMAAFCAQHAYCGRRTAEELLARLHQAPIAGTGELEADAKGELARSLARTLTRLVEQIRLLTSRIEHHVASLDDGQIVMSFPRAGRICAAQILAELGSVRERFDTDAQLAAEAGVAPVTYQSGKSKSVTFRWACNHRLRAALTCLADNSRHASAWAAQIYAQARGRGCDHPHAVRILARAWLRVLWRAWIDRKPYDPARHGGASRLLKTA

SEQ ID NO: 418364 - protein, 324 aa, unidentified
MTEPVLGIDIAKLKFNVCLINREGKLRHKLFSNTAAGFEQLRDWLSKQRVESVHACLEATGTYREALSLSLYEGGHRVSVINPAATKAFAASRLSRTKTDGVDAELIARFTVAQEPVAWTPLPAEVRELQALVRRLESLIEMRVMEENRLSSGVTLEMVRESVEELLSHLNAQIKRTEELIRQHIANHPTLKQQSQLLDSIPGIAETTAALLLSEITDITQYRSARQVAAYAGLVPRERQSGSSLRGRTRLSKIGNARLRRALYFPAITALRCSPFFQTWAEGLRERGKSKMSVICAVMRKLLHLAYGVLKNGKPFDPEWAKTA

SEQ ID NO: 418365 - protein, 340 aa, unidentified
MGVFVGIDVSLESSAVCAVDEHGKLLKETKVASEPGALAACIAGIPGVVEAIGIEAGPLSQWLHKSLTDLGLPVVLMETRQVKAALKAAPVKTDRRDAAGLARLLQMGWFRPVHCKSLSAQELRVLLGARRSVQDAAINIEMSIRGMLRNFGLRLGQIGKVSFEDRVRELTEGNKLIQLAIEPMLRARAALRSELVRLERMARDITRDDPVCRLMMTMPGVGPIVALTVRTTIDDPGRFRRSKDIGPSIGLTPRRYQSGETDIVGGVTKAGDLDMRTALYQAATVVIHRSKKQTWLRAWAERVVRRRGAKRAAVALARRMGVILHRMWVDNTEFQAARQI

SEQ ID NO: 418366 - protein, 427 aa, unidentified
MMNEQNDSEFAALIGLDWADQSHDICLQVCGSNDVEFETLEHRPEKINEWIHRLSERFPEAKIAVCLEQSRGALIHSLMKHDNLVLFPINPKSLACFREALYPSGAKDDPTDAHLLQLLLRLHRDKLNRFNPDEESVRKLALAVESRRKLVNLRTDLTNRLKSNLKGYYPQALELTGANLHDPLSMAFLTKWPTFQDLIKARPQSVRSFYYAHNSRGESVIKRRLEIIHASTALTYDQPVLQVGSMMTRALVGQVRVLQKDILKHDQLIAQTFQALPDAKIFSSFPGAGAALAPRLLAAFGSDRSRYRNAGQIQQYSGIAPVIQRSGKKIWVHFRWACPKFMRQSFHEFAGQSILFCNWAKAYYENARFRGKDHHSAVRALAFKWQRIIWRCWQDRVPYDNDKYVNNLKKQGLEIYKNLNEKTIKTV

SEQ ID NO: 418367 - protein, 384 aa, unidentified
MNKHNILFIGLDTHKEFVEVAYIEDQRGAQAVHFGRVSSAKASITKLARQFQSKYPEATLHFVYEAGPCGYWIYRLLTSLGHCCYVIAPSLIPKKPGEKIKTDKRDALKLAKLLKSEDLTAIYVPEPEDEAIRDLSRARETAMKDLKDAKYQLKALQLRNNINYRGTANWSLKHLRWLTELILPHPSQQIVLQEYLQTISERIARLKRLDNELEHHVKKWRYYPVIKAIQALRGVRLLVAAGVIAELGDLTRFDHPRKLMSYVGLVPSEHSSGGKRHVGAITKCGNGRARRLLVEGAQSYRYPAKISTEMQIRQEGLPKEIIDIAWQAQLRLCRRYQKLTYKGKHNNVVVTAIAREIIAYIWAISREVVLTNVNPKLRLSRVPA

SEQ ID NO: 418368 - protein, 350 aa, unidentified
MMIIGCDLHTRYQQIAMLDTETGELVERRLEHESGAARAFYTALSGAVRVGIEATGHTHWFEAMLAELGHELWMGDAAKIRASVVRKQKTDQRDAEHLLNLLREGRFPQIWRPSPAERDLRQLVWHRQKLVWMRGAVKNQLHALAMGEGVCRKKKLFTAKGRKELEGLALGPWASYRRRELLRMFDELAAATAQLDQAVEQAAKSQPLAVRLMTHPGVGPVTSLAFVLIIGPVERFERSKQVVSYLGLNPQEHSSGGKQRLGAISKQGNPMMRSLLVEAGHTAARFDPALKRMYQRLKFRRGASVAKVAVARKLAVRMYWMLRSTADYAQLVRMQGSPWATLVENSPSLG

SEQ ID NO: 418369 - protein, 402 aa, unidentified
MRFVGIDVGAERHTIAIVDESGVVTLKATAFTEDSAGYGRLLELLGTATDCLVAMEATGHYWRNLYAALVTAGFAVALINPLRTSRFAEEELQRTKTDAIDALGIARFAAQKRPTITQLPEAALQELRELVRLKGQVLQQLGDRVRQLHRAVDLVFPEFTRHVRTLDSELATAILARYPTAAALRTVSARKLARLCYDGSHHVGEARARALIVAARQSVGAHHGEPYQLQVRYACEDIDLLRRRLRALEKDIEQRLEQIEVGKLLTTIDGIGPQTAACIIAEVGDPARFHSSRALASYVGVVPRLHHSGKRRFSTSAKVPLGNARLRRALWMPALTAVQHNPWLRAYYYRLREAGKRPRVALIAVIRKLMSAVYSIAKHRRPFVLAPIFSPVAGGAVVPTAR

SEQ ID NO: 418370 - protein, 354 aa, unidentified
MPRKTTSLEAVATIGIDIGKNTFHLIGLDKVGAIVLRQKLSRSQVDTRLANMPPCLIGMEACVGAHHLSRQLKALGHDARLMPAQYVRPYSKGQKNDFRDAEAIAEAVLRPTMKFVAIKTVEQLDLQGLHRVRERLVCQRTSVINQIRAFLLERGIAVRQGLRALRTAMPNVLATTDKLSPRMIHMIEDLCTDWRYLDARIATVSNEIETLSEQDDGAKRLMTVPGIGPIISTATVAAIGSGDVFSKGRDFGAWLGLVPRQMSTGGRTVLGPISKRGNRYLRMLFVQAARSVLLRPQSWEKHGLKSWIEAAARRLNRFKLAIALANKIARTAWGVLHGGRNFEVRSMRTTPQAG

SEQ ID NO: 418371 - protein, 334 aa, unidentified
MSSIAHTRQVTVTRTICGVDISSQSLDARIGHEGAFAQFPNTTEGIAALLSFCQAHQVGLIAMEATGGYEQQAFAQLSEQGLPVAILNPRAVRQFAQSMGSLEKTDRIDAGMIAWYAEVKKSRPVCPAPERQQHLRALVTRLRQLTEMRVAQVNQQRLVTDRAVQSSFKKLLAVLARQIRELEQRIAALLDQEPLWRELNQAFRTIKGVADRTVARLMAEMPEIGVLSNKTISKLAGVAPLARDSGQHQGRRAVRGGRATVREILFIVASVVGRYEPDFIAFQQRLRAAGKPSRVIRIALAHKLLVRLNAKAREVRQRLQLSNPLPPAVPAGSL

SEQ ID NO: 418372 - protein, 377 aa, unidentified
MKRILKIGMDVHSTNYTLCAMEPVIGAEDRVFANIQVTPDYKNIILFIENLKQKLGTNDTYDIECGYEAGCLGYSLYNQLTEAGVKCVILAPTTMLTEQGQRVKTDTRDAHLIAQCLSYGGYHPVYIPTEQDDSIKEYLRMRDDHKKALKKIKQQIGMFCIRHGYYFEGTKWTIAHLKWLKKLELAPMYQETLNEYLATYEELTAKIERFDARIEEIAAQAEYAGTVQKLGCFLGIKTHTALSLIVETGDFTRFAKGNVYAAYLGLAPGEHSSAVKVNRLGITKAGNSHLRLLLVEAAGGICKGAIGHKSKALKQRQQGNSAEVIAYADKANARLRSKYYRLIRHGKKRNVAVAAVARELACFVWGMMTDNINVTTA

SEQ ID NO: 418373 - protein, 338 aa, unidentified
MNKVTLLSVDLAKDVFQVAGFTDHLSEVFNRQIKRNNLSAFMAQQSPCEVVMEACYSSHYWARCFEESGHRSRLLPAQHVAPFVRGNKSDHNDAIAIAEASKRPNIIDVPVKTIAQQDLQTLHRLRELCVRRRTSLMNQTRGLLSEYGIIAPQGHKAFIELLGRVAQPECQAISHSLKYQFDCVREEYHQLSERISGIQAELAVISSQQPLCQLLSSIPGIGVINATGIYSAIGNGSQFKNAREFAVWLGLTPRQRSSGNTFSSGGITKRGDRYLRKQLVHGARAVLGRSRNKTDKLSRWVNALVARRGHNKACVAMAARMARLCWILLQKNETYRAQ

SEQ ID NO: 418374 - protein, 408 aa, unidentified
MDVVYPVCCGIDVHQVRLTACLRRVQEDGHVTKDVREFDTTYPALLVLLDWLVAQHCPVVALESTGVYWKPVYHVLAGPLEVLVGNAQDMQQRPGRKTDKADARWIAELLAHGLIRPSFVPPPAISALRDLTRTRVALVQTRAQAKNRVHKVLEDTNVKLASVVTDLFGVSGRRMLAALIAGERDPQALAGLALGRLRRKLPQLEVALTGQFTVHHATIIQASLELIDLLTRQIADLDRQIGELVAPLEPQITQLDSIPGVDKTAARDILAEIGAEMSRFGSAARLASWAGVCPGNNESAGKRRRGKSRQGNRYIRRVMVQCAWAARKTPTYLGRTFRRLEVRLGGQKAAVAVAHKILVIVYHLLAEGTLYDEERYDRLQPRQEAQQRQRAIKVLERLGYHVNLERVA

SEQ ID NO: 418375 - protein, 367 aa, unidentified
MENHNIVWVGMDTDAKKNHVALYRGWEKEPAAEWEAGMDGKGIKQLIERLKKEEGEVRCVYEAGPSGYPLCRKLRQAGIGCDVIAPSLIPRKAGDRVKTNRRDARNLGRLYRAGELTAIEVPHEAQEAVRDLTRAREDVREDLTRRQHRLSRFLLRHGYIYQDGNKWTLKHWVWIGKIRFEDSNLQAVLEESMRAVQQSQEQLKTYDARIEETAQKPEYEKKVGRFKTLRGIQTITAMTIVAEGADLRRYSTAPQFMGSVGLVPSERSTGDQERRGKITKTGNAHLRRVLVEAAWHYRHRSIPGAGVKKRRSGQPAAVVTIAERADQRLCRKFRKLVDRYNKKPAIAAVAVARELAGFVWAIGQQEL

SEQ ID NO: 418376 - protein, 370 aa, unidentified
MSQSRTLYIGMDVHKDSIAVAYVAQDHGAEVTYLGTIGTRQCDIDNLTRKLQSKATQLVFVYEAGPCGYWLYRYLTKKGHRCWVVAPSLIPKKAGDRVKTDRRDAVQLARLMRSGDLTPVYVPAVEDEAIRDLSRAREDAIRDRKTAKFRLKAFLLRHDIRYTGRATWSPAHLRWLSEVVCATPAQQIVFQEYVRAVHEHTERLPRLDQELQEQVKSWRLQPVVAALEGLRGVPCTVAVTIVAELGDLTRFENPRQVMKYLGLIPSEYSSGERRRQGSITKAGNTHARHALVEGAWAYRYPAKVSRHLQLRLEKQPKVIQDISWKAQVRLCKRYRRLIARGKHANQVVVAMARELAGFLWAIAQQVSVTP

SEQ ID NO: 418377 - protein, 364 aa, unidentified
MKEEDKRRYVGIDLGKREYTMAIIGRNGKMTIHQGKTSIQGRQALYGKLEKGDKVALEAGNMAFILAREIMEGIGSEVRVVNAAKLPFIWDAPTKTDKEDAMKLAHLVEERRDEKLPIVPVPSVKELERRKILASYGREMRNRTRHINTLHALFVHQGHTTVVKKNLSTTAHRQEAVKVLTGLEREEAEWLLKYLDLHEQRIKELKGKIQKEAKADEDMKLLQNIAGIGPLIAYAFVSHVGDGSRFSKGAQVSNYIGFVPRLDYSGDTQRNGHITKRGNAYLRGLLVQAAWSTVRSKYGGALRERYNYITTFQGASKKKTIVSIARRLTELMYTILRNKAEYQSRVWTGTQEKTAILAEKAMSA

SEQ ID NO: 418378 - protein, 374 aa, unidentified
MENIITYVGMDTHKKQHKIALHHPRQEEILEFTINNTIRDIKKMVNKIKKQAPGQVEFCYEAGVCGFTLKRRIEDMGCKCDVIAPSLVPRKPGERVKTDRRDAKKLLMLFKAGLLTKVHAPDEQAEAARELTRLRETAKENLKRIRHQVLKFLTRHGYVYREGSHWTQKHITWMRTVKFTESMLTKVFEHYFDEMIYCTTRLENLDKEVELLAESEEYKEIVGLLSCFHGIKTLTAITIVTEIFEFGRFESPRHLMSYLGLTPSEDSSGEKQRKGSITKAGNKRVRRLLNEAAWHYRHRYVPSTVLKKRREGQPKWAIEIADAAGRRLTKRHRHLINNGKMPCKSNIAIARELAGFIWFTVTQYQARKNAKGAA

SEQ ID NO: 418379 - protein, 438 aa, unidentified
MSNNVIFNLDELFISVGIDVGADFSWMSIALPNQQFVGKPYKILHNSIDSLTTAVSKIKEAEELYSLESRIFLESTGIYHYPLFCYLRDKGFNCSVINPIITKNSTNINIRKVHNDRFDSKKAALVGLKPDLKVSLMPSDLALNCRNLCREYYDLMDNRSAYVNKLQGELRMAFPQYLGIFSKVTINTSLTLLETYTSPSAFLKADKQEIIDIIKSTARFGLTYAQNKYNAIIQAATDANQFGYIIDSNIKRIRLYIRFIRKYDEEINSILESLHELVDANEDSDFVKQIHLIETFKGAGFLSAVSIMGEIGDFSAFSKPKQLFAYFGLDPAVKQSGKFEGTKVQMSKRGSAIARRVIHTLTLQSISISRNREAKNPVLREYYLKKCDSKPKLVAMGAVSHKVCNMIFAILRDNKPFKIIAPQEHIKQYNSAKCDIAA

SEQ ID NO: 418380 - protein, 388 aa, unidentified
MYYVGIDIAKYKHDCYICTSEGVTVLESFSFDNSNTGFKELQSALDHLDHSQQIKIGLEATGIYGKNLKLFLSSIGYDFHEFNPLLVKRFHDSLSNRKTKTDKIDARIIALYLSTGASRTYLYSSYHTQALKQLSRTRNKLIRSRSDQYVIITNVLDVEFPEFKAFFHNKLSDTALFLLNKYKTVDRMKRLTHQDCVLLHNKSRRIPTSSFEELRDLAKHTIGHHFNYNDLILSSALQIVNTLERQIESIEKEILAIMEELHSPIDTIPGISTLSAATILGEFGDFSKFSNPKQLCAFCGVEPAIYQSGTSFHNGRMVKHGSSELRYVLFNAVPYLVIHNITFREFFYKKLHEGKNYRVAQSHVVKKLLRMIYHLELTGESFDPTLLY

SEQ ID NO: 418381 - protein, 342 aa, unidentified
MEKSLFIGIDFSKKTFDVSIIHQNNLQAVDYQQFENSKEGCISLLKWIKPLTKEPCSNWLFCGEHTGLYSVCLSEFLVKKDLFIWLENPLQIKQSCGIRRDKNDKTDSREIAFYAYRFQDKAKAYCSPDKALKSLELLLSFRERLLSNKQTLLVSSVEIRRVMKHDATARFIYEQSKKDIERINKEIKEVEKRMLKHIESDESLQENYELVSSIKGVALINTVAILVATQNFTRFENSRQFACYTGMAPFGKQSGTSINSKPRVSRLADKKIKVLLTQAAKSAIRHDMNIRQYYQRKLAEGKDKWLVTNNIRNKLIHRIFAMVRNKQLYQINYINFLDKAIA

SEQ ID NO: 418382 - protein, 364 aa, unidentified
MKIVGCDLHARQQSIAMVDTETGELTEKRLLHEGNAVRDFYASLEGPVVVGIEATGAMQWFLELLEELGIDCRVGHPAKIRAAETRKQKHDRRDAEVILDLLVMKDRFPDIWMPSTEQRDLRTLLRDRHQWVKMRARLQHTLQAIALNHALREGRALWTAAGRRALQDLSLPPYTDQRRDELLALYTQLEKRIHQLDKQVETEAQQRPRARRLLTHPGVGPVTALATEVFLGDPTRFATANQVASYVGMIPCEHSSGKKQRLGKLTKEGNSLLRYLWVEATLHAVIKDAELKRFYRRKLIQKGMGKARVAAARKLGIRLWIMLRDEIDYQEFCRRGKLPQKGKAHAGMPDFNSGPARAVTGSTE

SEQ ID NO: 418383 - protein, 343 aa, unidentified
MKLSYVGVDLAKNVYQLHGVDRHGKTVWKRRLRRGQWLQALIDNVEPGCEIGMEACTGAHHWVRELQSRGYMVRLIAPQFVKPYVKSNKNDANDAEAICEAMSRPHMRFVTVKSIEQQDIQATHRVRTEIKDHRNAKANQIRGLVAEYGLVAPQTLLALRRAIPEWLEDAENGLTDYFRSLLHGLWDDLLTLEDRLKELDKEIEKLARSNEVAKRLQQLRGVGPIVATALVATVGDGAQYSKARQMAAALGLTPRQNSSGDKNRLFGISKRGDVYLRTQMIHGARAVVSQAKHRDDPLSRWVTDIAKRRHPNVAAVALANKTARMAWAMLRNDTDYDPGISAS

SEQ ID NO: 418384 - protein, 370 aa, unidentified
MSVRRILAKTIDTDLEYEAIGIDLAKNCVSAALLTTDGELVCIDRLDYSELEKSAQALSPTTFAMEPCTEMNYLVQKLEAWGHRCLVIGGKNVQNYVENHYSGQKTDLNDAQALAFLAQDTQLRTIKAKDIEQQKYASLTTLREQYIKQYRQTIVSLKGICQAWGLNISKGISGKAQLKDLIENHAAFPEELRESLVDMVTHAQTTQKVLNKITKTLEVLAKNDKVCQLIQTIPGLGTICSCRLRATIGDIKRFKNPKDFPAYYGLVPRSIATGHNEKKGKITHRGDRTMRSLMVQGAGCVIRLATCGKLKSKQLTKWILKKQKEKMPWGKLVCAVAAKLLRIVRAILISSKPYNPKIAGVAKCSLSKGS

SEQ ID NO: 418385 - protein, 339 aa, unidentified
MELYAGLDLHSRNTYIGIMDETFNRVFKKRVSNDLDQILQTLKPFKKRLKGFVVESTYNWYWLVDGLMDAGYGSAHLANPAAIKQYEGLKYSDDQHDAFFLAKLLILGILPEGYIYPKQHRPVRDLARKRMFLVQHKTAHILSLQSFIQRCCCVKISTGDIRNLTVEALQEWLKEEYLLLSAQASLDTINFLKQKIKRLEKAIIQRVKLKKEFGQLLTIPGVGNILAMTIMLEVGDIERFPKVGNFTSYCRCVPSKRLSDGKSKGYGNRKNGNRYLSWALTEAAQLGRRYNEQFRRYYNRKVAQANTSLATKALSNKLARICYYIIRDQVPFREELIVH

SEQ ID NO: 418386 - protein, 402 aa, unidentified
MHYLGIDVSKASHQCVILDAEGEALGKSFTVQSSKDDFAKLVKKLSDLNIPKTDLIAGLEATGNLWENIYTYLKEQGFNIILLNPYQTSKFHQAMLKKAKTDSIDALVIAGLLRSGCAASSYIPDEEIQSLRDLIRLKDGYLKDMKNYKRKAYSLLNLVFPEFLNLIKDPFNIVCTEILSKYQTASDFKNIRPKDLLKIARGHQGNTYDESWADKVIKAAKDSIYSGKASKARGIVLKSLVLNIKNLKEQTNELDNEIQNILKPDDGSSNNDVDNLLTIPGVGPKTIAVFLAEVGDIMRFASCKDFIGFVGLYPKIEQSGSSLNRAKLTTKGSRILKHALYMASVASLIHNPYLKSVYNNKLSQGKSAKQALIVVARKIACIMYSMLKNNAVYNPGRVAIAV

SEQ ID NO: 418387 - protein, 345 aa, unidentified
MNIIRVGVDIAKSVFHVHGVDRHSQIQWHGQYSRSKWLDAMCRKVPAGAEIGMEACASSHHWARELQKRGYHVLLIAAQFVKPYVKSNKNDRVDAEAICEAMSRPNMRFVTPKTVVQQDIQAAHRIREELVGQRTAKANQIRGLVGEYGIVAPVGIQQLRRAVPDWLEDAENGLTDSFRVLLSGLAEDLRYLDTRIKALDERITESVNEDPVAKRLMTLRGVGPLTASALSGALGDGKAFRRGRDFAASLGLTPKQHSTGGRDRLLGISKRGDSYLRKLLVHGARAVLRHVEGKDDGLSHWLRGLAARKHVNVAVVALANKTARIAWALTHNKAAYDERIAAAGA

SEQ ID NO: 418388 - protein, 358 aa, unidentified
MNRNTGMNVGQIIGTMNGLQVMGLDIAKHVFQLHTVDMGTGEIVNMQLKRARVLTHFVNKPACLIAIEACGGAHHWARELQALGHTVRLLHAKAVRPFVSGNKTDATDARAIWLAVQQPGVKFVGIKSTTQQATLTLHRQRELLMKMRTMQVNALRGLLYEFGATFAKGHKALFAEVEQAFVDLSAQLPQMVVDSLREQISRIRALSQDMAIIEKRLALQLKGDQDMRRVAQIPGVGLLTATAAIATMGQASAFKSGREFCAWLGLVPRQTGTGGKVRLGPISKRGDTYLRTLLIHGARSVLSHSKQPGPWLEGIKSRRPANVVIVAQAAKTARTIWAVTAKQQDYQRGHQSIRPQAA

SEQ ID NO: 418389 - protein, 408 aa, unidentified
MAVSGLPFILECGCGLDVHKDTVVATIKGSDFETETRTFLTFTEDLHLLVGWLQEHHITDVAMESTGVYWRPVYAVLEDYFRILLVNARHIKNVPGQKTDKKDSEWIAKLLLSGLLRGSFIPAQHVRELRELFRHRRKLVAMRTSEKNRLQNILESANIKLRSVVSDVFGVSGQAMVRAIAAGQTDPLYLSAMAKGSLVKKHAELIKALNGRVTAHHRFMLNLILQSIDYINLQIAQLEAQVDNYRNLMKNDVTLLETIPGVSRQIATGILSEIGNNMEYFPAHQNLCSWAGVCPGNNQSAGKKYSTKITKGNRYLKTTLVEAAWAASRSKTSPTFAIRHRQIASRRGNKKATIAIAHKILIAAYHVLRDKEPYIMHTKDKKILENRRLKMIERLEKQLSNLKHTSYK

SEQ ID NO: 418390 - protein, 367 aa, unidentified
MDEVSTIGIDIAKHVFQLHGVDGAGEVVLCRRLRRGQVMRFFAALPPCIVGIEACGTAYFWAREIASCGHDVRLMPPSYVKPYVKRNKHDAADAEAVCEAVRRPSMRFVPIRTAEQQAALVAHTVRDLLVRQRTMLVNALRGHLAEFGIVAPRGLHKADELAAVVADENDGRIPASARKALRILVAEFAALDLRITRLEIEIVAQAKTDAVARRLATIPGIGPIIASRLSAMVPDPAIFRSGRDFAAWIGLVPRQSSTGGKPRLGGISKRGNGSLRRLLVGGAMAAMFRAKALQNDPWLCQLRARKPVMVAAVALANKIARTIWAVMRRNAVWRPAALRSSSRPHQSGAVLAAVKTMPPAAVAFGQS

SEQ ID NO: 418391 - protein, 319 aa, unidentified
MAQNNVVVVGIDVAKDKVDACIRSASEQQMFPNTAQGRRKLIAWLRKHKAGQAVMEASGGYERDWAEALREAGLAVRIVDPKRVRNFARSTGQFAKNDTIDAQMIAWFAEVFGEVTTRAHDPEREKLAQIVHARQALIDVQTELQNRGEHSVPDVVGRVQARLLKKIGAELAILEAAMVALVKATPRFAELAEIIESVPGLAEITSASLIAAMPELGQVSNKAISALLGVAPFDDDSGKRRGERHVHGGRRKVRNLFYMACMGAATRHNPMLKTFYRRLIAKGKKPKVALVACMRKLIVILNVMIARRERWDVSRHAAA

SEQ ID NO: 418392 - protein, 402 aa, unidentified
MNAVGIDVSKSKSVVAIMRPFGEIVSTPFEIKHTASDIHSLIELINSVEGESRIVMEHTGRYYEVLAHQLLEANLFVSAINPKLIKDFDNDSLRKVKSDKADAVKIARYALDKWQNLKQYNVMDELRNQLKTMNRQFGFYMKHKTAMKNNLIGILDQTYPGVNTYFDSPARSDGSQKWVDFASTYWHVDCVRKMSLNAFIDHYQNWCKRKKYNFSQSKAEEIYGKAKELVPVLPKDDITKLIIKQAVNQLNSASTTVESLRTLMNETASKLPEYPVVMAMKGVGTSLRPQLMAEIGDVSRFTHKGVITAFAGVDPGVNKSGSYEQKSVPTSKRGSSVLRKTLFQVMDVLIKTHPQDNPVYQFIDKKRAPGKPYYVYMTAGANKFLRIYYGRVKEYLSSLPES

SEQ ID NO: 418393 - protein, 408 aa, unidentified
MNTLYVGIDVSSKSNVVYLMLPNGDKHSNFSVANSHEGSTLLVKKIYSALTSHSLDTVLIGLEATSVYGDNLVYFLREDATLAPFNRKIHVLNPKQVKKFHDTYNDLPKNDYVDSFVIADCLRFGRINKEVYMGEYRYKALQNLTRARFFAVQNLVKEKQRFMNVLFKKYSTMTQEKVFSDAFSTTALAVYDEFESAEALANMDLHELTDFIIEKGKNRFPDPDAVAKAIQKAARSSYRLPKTVNDSVNQVLSISITSMKALESQIKEFDKAIIALMELLPNVLISIPSIGPVYSAGIMAEIGDINRFDNQASLAKYAGLAWKQHQSGGFEAEVTRLIPSGNRFLKYYLCEAAFSLVRCDKEYSDFYHLKYKEVNRYQHKRALALTARKFVRLVFRLLKDNRLYTSAE

SEQ ID NO: 418394 - protein, 331 aa, unidentified
MKINETIGIDVSKSVIDVCIHTLGILNQFENSKSGFKKMLIWIFKNTGYKKRELLFVFEHTGMYSDNLGIFLDSGHYHFCIVPGLEIKRSIGIARGKDDQVDAKRIALYAYRSRDELTPSKLPSKDIGTLKSLNSLRLKLVKQRAGYKSTLKEQKGIYSKKDFKTIFEVQEKMIAALTKEIQKLEAKMQQIVQANEALGRNYNLTISVKGIGPQTALTILIYTANFTKFKTWRKFASYCGVAPFPYQSGSSIKGRTKVSHLANKKLKSILNMCAVTSIRHSPEMKLFYERRIKSGKNKMSTINIIRNKLISRVFAAVKRQTPYVDIMKFAA

SEQ ID NO: 418395 - protein, 359 aa, unidentified
MKTRLSNKQRWLKEINLTADDELYIGIDVHKKSYHIAFWLNNAPAINFVTPADNKKVLQMFQRFSPSIKLVVYEAGPTGYSLARLLQENKIPVKIAAPSMTPRQAAPQSKTDSLDCKKLAKYAAKSMLKYVTIPTRSQEADRQLARMRQLLIEKQRRVKQQIKSFLLQHGIQQPKGLNSWSNQAVEKLSRIIISKQLRYCLDMLLEQLKFIKLQIAKLEKEINEYFEKNYLGKKIKLLQTHPGVGPTIARQFATEIFSPKRFKNSTHISKYLGLAPTVKQSGQTLRDGPVSKTGRPAFRSNLIEASWIWIRKDPLALKTYHRIIANTGQKNKAITAIARKLTIHLWKMLCDNKPFIAGY

SEQ ID NO: 418396 - protein, 357 aa, unidentified
MKRITIGLDIAKSVFQVHGEDSSGKIVLQKRLRRSQVLAFFAGLEPALIGIEACGSAHYWGRELRALGHDVRLIPAAGACPRAGQRPDPWVKPFVRRNKNDARDAAAICAAVGRADMRFVAIKSVESQASRGIERSRELLVRQHTQLMNSVRRQLAELGIVAAPGRRGFAELSQLVAVGDERIPAMLLSVVSLMLQQIDQLRAASAAIEAKIMAVAKADPAMPRLATIPGIGGLTAHPILTAIGDGKQLASSRDFAAWCGLTPRGASSGLRRREGGISRQGDIRLRKLLALGASTIIRSARSRADRATQWQRGILARRPVKVAVLAQAAKPARIAWAVLTAGTTYRQPAAAAQPQPV

SEQ ID NO: 418397 - protein, 414 aa, unidentified
MPDGEVETQSRPHVRLRTGRPVSQYAGIEGCTGWPVPSLMHRRRVLGDRIRYVGLDVHKEGIVVAVAEGGLRGEVRDYGRIANTPAALRRLAHQLGQDGLTLRFCYEAGPCGYGIQRQLSALGHECVVVAPSLIPKRAGDRVKTDRRDAASLARLHRAGELTAVWVPDPGHEAMRDLVRARLDAVRALRRARQQLSGFLLRQGCHYGRPAWTKLHRRWLAGLKFDQAVHHIVLEDYIAAVEAGEARRDRLTAQIEAMLPDWTLAPVVAALQTMRGMALVNAATLIAELGDLSRFANPRQLMAYLGLVPSEYSSGASIKRGSLTKAGNSAARRLLIEAAWCYRFPARISRELRLRQEEQPRPIREIAWKAQLRLCARYRKLARNGKPAKVITAAIARELAGFIWAIARHVSPAAG

SEQ ID NO: 418398 - protein, 365 aa, unidentified
MKKSSTAKTASNKNFERKLTVGLDLGDRSSWYCVLDEAGEVVGEKKLGTTPKAMKEVFAAMPRSRIALETGMHSPWVSRLLSELGHEVIVAHARNVRLIGESRRKDDRLDARMLARLARIDPQLLSPVKHRSSQAQADLTVIRARASLVRARTALVNTARGLTKSYGERMRGCNPRNMDTEKAQALSPELQAALGPLLQALESLSERITEYNQRIEAVAQQSYPQTAVLKQIKGVGTLIALTYMLTLEDPHRFRKSRDAGCYLGLQPGRRNSGQSEPQMHISKEGDPYLRTLLVQGAHHILGPFGADSDLRRWGLKLAERGGKNGKKRAIIATARKLAVLLHRLWVSGEVYEPLRNTKRTSLVAA

SEQ ID NO: 418399 - protein, 349 aa, unidentified
MRCFLPPAGTRFYAGVDLHARSLFLCVLDRDGHERCARNLTAAPATFLNAVHPFRDGLVVGRECMHCWYWLADTCRDHQLPFVLGHARAMKAVHGQKTKCDRHDAQAIARLLRGGNFPLAYAYPRERRGLRDLLRARLRLVRQRAELYGHVHTARRQANLPPVSSDVKYKSKRAAITADIADPLVRRRVETDLALLEPLDTTIRRLEAEIEAAANAHYPTELAVLQTTPGVGAVLSLTILLEIDTITRFDTRQQFCSYARLCGAARESDGKRVGVGNRRAGNAWLKWAFSEAAVLAAQKDERIGALLGRLASKLGKAKALSALAHKLGRAFYHMLHTKGVFDVNRFVRH

SEQ ID NO: 418400 - protein, 356 aa, unidentified
MKKYIGCDMHKKYSVFVTMDEHGRLSEPQRVANDSLELDSYLKTLEEATPVAVEASGSWYWFVDRLEQAGLDVRLVNPLEAKKRMAGRHKTDPHDAAGLAMLLRNGTLPEVWIPPAELRDLRGLLRTRLALRRHTTILKNRVHGAVRRYGQWEPGEAKNLFVGKGRVQLSVYVGALPPETRIATRHEWQLIDEVEQHIQELEKRIRLGIGQLGYVRLLRSLPGVGEILSATLYLEIGDVRRFGCAAQLASYAGLTPTVHSSGGKTRMGPTSSIANHYLKWALVEAANCIVMQKHRFAGRHVVQLYERLRATKNHGKAAVAVARHLAEASWWMLQKKQAYREPAPASRSSSENGSAR

SEQ ID NO: 418401 - protein, 429 aa, unidentified
MDRVVDRCAGIDVHKRSVVVCRLTRDAQGMRLAETQTFGTTTSDLLRLADWLAAGDCTPVGLGSTGAFWKPVFNLLEGAFAVWLLNAQQRKAVPGRKTDGNDAQWIAALLAHGLVRPSVIPPQAQRELRDLTRYRTTCVRERGNRVNRVHKLLEGANRTLASVASDIMGLAGRAILAALLAGETHPALLAELAKGPLRTQRPHLEQALRGHLRPHPRFVLTELRAQIDCLDERSARLTGQMQAAGATNPGEPAEVVALRDRLPRLSQATAQVIVAELGTDRCRFPSAAALAAWAGLAPGNAASAGRQRRGRTRKGNTWRRTLLVQAAQAAAHTKHTALAARSRRIAARRGHKKALVALAHALLVILYHVMARRQPYHELGEDSFQRLDPAAQAKRLLHQLTHLGFDVQIQPAHPTLLPTGAAASLAGSS

SEQ ID NO: 418402 - protein, 341 aa, unidentified
MEKYVGLDVSMEETSVCVVDGGGNIVFEGKTSSQPDALSKLLRAKASGAARIVLETGSLACWLWHELRGRNFPVICLDARHARAALSMRVNKTDRNDARGLAELARMGWYREANVKSMESRYTHSLLAARAKLVDLRRDVENQMRGLLKGFGLPPGKGGIKALLEKIVVIMREAPHLHMLFKPMMLAHSALVTQVEFYDVQILKLAKGDETTRRLMTAPGVGPATALAFRSTIDDPNRFKSSNDVGAYLGLTPRRYQSGELDRTGRISKRGDRLTRLYLFEAASVLLSVVKRWSVLKAWGVRLAKRVGIKKAKTAVARKLAVILHCIWVDGTEFQWGKEKA

SEQ ID NO: 418403 - protein, 343 aa, unidentified
MQTVSTIGLDIAKSVFQVHGVDADGLVVIRRQLKRRYVLAFFEKLPPCLVGIEACASSHHWSRELQALGHTVRLMPPAYVKPYVKRQKNDMADAEAICEAVTRANMRFVPTKTPEQQSGLVLHRTRHLFIRQQTSVINAIRAHLAEFGVTAPVGRNGVEELLNVVGNPNDKRVPEIARRCLLALGAQLRRLKEQILEFDRLIRAWHRSSEMSMRLDDCPGVGPALATALVATVADAKAFRSGRNFSAWIGIVPKQHSSGGKDRLGSISKQGDRYLRSLFVAGALAVIRYAKIHGTEHRPWLAALLARRPTKVAAIALANKIARMAWAIMAKGERYKEPGALAA

SEQ ID NO: 418404 - protein, 387 aa, unidentified
MTVRTVSNLPAAMHVETARCLFAIELSKQSWVIGFISPLSTKINRRILSGCDWKGLLDLIEEVRARVSRETGRAVDVISCYEAGYDGFWLHRLLEAHGIRNYIIDPASLQVDRRARRVKTDRIDTERLLRSLMAYLRGEPKVWSVVRVPSVAEEDARRLHRERDRLVSERVQHVNRIKGLCALHGIYDYQPLRPQAMARLEQLRTVQGISLPPRLKSEIKRELQRLELVVEMIATLEAERDAIVEDEASTHVNAKKIQNLHQLKAIGPEFAAVLVGEIFHRDFNNRRQLASYVGYAPSPFQSGNVAHDQGISKAGNRKGRTTGIELAWLWLRYQPDSDLSVWFRARVGTTKGRIRRIAIVALARKLLVALWRYLETGLVPRGAVLKG

SEQ ID NO: 418405 - protein, 317 aa, unidentified
MTELNSPLFIGADVAQDAIVVAHHGQNTSCSIANTPTALKAWLKTLPSGARIGLESTGRYHEPLALLAHRAGFIVYVLNPKDVRHYAQAVGKRAKTDHVDALLLARFIAHELTGLHPWQPPTRRERQIDSLLKRRAAVIKAQGMLRQTLAQLTSLKTDSQAALASLAKLIATIDRKLEQAVAADAVMQAKAECVQSVPGIGLLTGTALVNLFGRLPTARADALVAFTGLDPRPCDSGKKRGTRRLSKRGPSELRRLLFNAAMAAAKTRVWKPFYDRERAKGLPTTAALVCLARRLLRVAFALYRKNVHFNPDAINCA

SEQ ID NO: 418406 - protein, 342 aa, unidentified
MNEYDGKQFVGIDLHRQRSVIVRQTDTGERLAAVRIVNDPVALGLELEGAGQNPEVVLEATYGWYWAVDTLQAAGATVHLAHPLGVKGFRYRRVKNDVRDASDLADLLRMNRLPEAWIAPPPVRELRELIRYRAKLVALRSGLKAQVHAVLAKAGVLIPVSDLFGVTGRQRLAKVGLGNAYAQRVISLLEIIDVLDTHETRFTVTIADQLNTHAGYRAIQELPGVGPTLGAIFVAEIGDVHRFAGPDRLCSWAGLTPRHYESDTVVRRGHISKQGSKLVRWAAVEAVQRHPTTAKIAADKKRIEDRRGKSIAKVAAARKLLTLVYYGLRDEHIRALARGHTA

SEQ ID NO: 418407 - protein, 411 aa, unidentified
MNAVGIDISKGKSMVSVMRPLGEVVAKPFSVRHTGSELKELADYLKSLKGETRVIMEHTGRYYEPVAQFLHDAGLYVSAVNPKLIKDYGNNSLRKVKTDKADSRKIAKYGLDNWVELRQYASMDKIRYQLKTLNRQCNLYTKTKTMMKNNLIALLDQTYPGVNALFGSPVREDGTQKWVDFAASFWHVDCVRNMSPAAFTERYRKWCKRHGYNFSSDRAAGIHAGAKDQIAVMPKDDLTKMLIRQAIVSLNAVSKTVEQMKAEMLQLAAQLPEYPVVMGMHSVGDSLGPQLMAEIGDVTRFARRSSITSFAGVDPGADQSGGHEAKSVPTSKSGPPELRKALFLVMDNLLKSMPQDDPVYRFMDKKRAEGKPYLVYMTAGANKFLRIYYGKVKEYLAKLEQPSEPVSNERI

SEQ ID NO: 418408 - protein, 379 aa, unidentified
MEAKRKDPPSTRHRCARVEMSINHSQDRGSDMQVTTYGVDLAKSVFQLHWVEPDSGEVKRKMLKRAELQAFFARREPGLIAMEGCGSAHHWGRALRGLGHQVRLISAQFVRPFVKSNKTDAADAQAIWEAAQRPEMRFVALKSQQQQALIGLHRIRALLVKQRTMQANQVRGLLYEFGVVMPKSWRALLAQAAPILADASGGEIPDLIRGELQQQLQGLRDLTGRIEQLERSIGAYRARDEQCRRIEAIPGVGPLSSTAIVASVGDGRTFRSGREFAAFLGLVPRQSGTGGRVKLLGISKRGDPYLRTLLIHGARAVVNHSARAGRTMPRWLRELLSRRPKNVAIVALANKIARTIWALLAHERAFDDRWGQAMSAPVR

SEQ ID NO: 418409 - protein, 360 aa, unidentified
MTTIADPPTAAQPVLGDHPVFGGVDTHADTHTAAVIDGAGRLLGHRQFPATEAGYGALAAWLAAHGQVQRVGVEGTGVYGAGLARHLTALGMELVEVDRPDRKTRRFAGKSDPIDAEAAARAALAARSTGIPKARTGPVEAVRALRVARRSAITARAEAQTQLKALLVTAPEPLRAQLRELTTRQLVIACAALRPDTDRIADPVHATKTALRTLARRHQQLTAEIADLDADLAPLVARINPALTAATGIGTDVAGQLLVTAGDNPDRLRSEAAFAALCGVSPIPASSGRTHRHRLNRGGDRQANCALYRVVLCRMRWDPRTRAYVQRRTEEGLSKKDIIRCLKRYIARELFYLLTSPQTA

SEQ ID NO: 418410 - protein, 424 aa, unidentified
MKNTQNEKILQIKNDTLVVGVDIAKRFHFARAFDYRGIELGNLLRFENSAQGFEAFDAWLEKIKQENRMTEAIVGFEPTGHYWFNLGDHLITCGHKLAIVNPFHVKCARELDDNSPSKSDRKDPKTIAMLVKDGRYRDVYIPEGFYQELRELVCERERLQAQLSSLKNQIVRWLDIYFPEFTTVFKDWSKQSSWLALRHFSTPQRVVDAGAQEILQTWREEMKRPSLKRAEKLYQVAKDSVGRKEGTMAATSSLQFMLTQYELITMRLEQLRGEMEACLHQIPNASHLLEIKGMGVVAAAIIVSEIGDISRFTDPRQLIKYAGLNLRENSSGMHKGKTTISKRGRRRLRHGLFQAMIPILATNLEFRALHKRNITRLENPLSKMESLTALCGKLLRVTFALLTKDLPYDPEKLAINKSHLAQAA

SEQ ID NO: 418411 - protein, 350 aa, unidentified
MHATTAAVDLAKDVFEIGVAGTPGRVVDRQRLGRRAFESWLRTLPLGTTVVMEACGTAHHWGRWCYAHGLQPVLLPPQYVRPYVRRDKTDRSDVTALLEAARAADIHPVPVKSPEQQALHVLHGLRRQWQTTRTARINTLRGWLREYGIGLPLGARTVARQVPALLDDPATPVPGLLQETVRGLLAEIRDLETRIKALDQRLACVAAADPVAQRLQTIPGVGVIIATSLISNVTHIHAFKRARHFASWLGLTPRIRASGRRQYLGRISKRGDVYLRTLLTHGARSILVNSQRRARTRQPALTALHQWGTELAARRGQNKAASALANKLARIIWAVWRHDRDFQIRRPLAV

SEQ ID NO: 418412 - protein, 366 aa, unidentified
MKKTITVQAFQNEIFKKQKLTIGLDLGDRWSFYCVLDEAGQVILEQKLPTTPEAMKQSFGKIPRSLMALETGTHSPWVSRLLSELGHEVIVAHAQKVQWITKSSRKDDRHDARTLARLARIDPTLLGPVRHRSVQAQLHLTVIRARAELVSARTALVNAARGLVKSYGQRLPKCGTYQVNEKLAEGLSEELREVLVPLFKEIESLNERVKEYDERMEKLAQEMYREVSLLKQVKGVGTQIALTYVLTIEDPYRFPKSREVGCFLGLRPGRRNSGESEPQKGISKEGDRYLRTMMVQAAHYILGPFGEDSDLRRWGQKLAERGGKNAKKRAVVAVARKLAVLLHRLWVGGEVYEPLRNSQKAMRKVA

SEQ ID NO: 418413 - protein, 312 aa, unidentified
MSAFGLGVGIDVSKATLDVALGSEGEIFQVSNDEVGLNALADKLSKANPTLVVLEASGGYERLAAATLVGRGLAVAVVNPRQVRDFAKATGVLAKTDRIDARVLARFAEAVRPEPRPLPTPEATELQELLVRRRQIVEMLTMEKNRLQGALVDRTKRAIAKHIKWLEQALERSDDDIDKAIRNSPAWREKEDLLRSVPGIGPVTARTILAELPELGSVTHKEIAKLVGVAPLNNDSGTMHGKRSCWGGRATVRQPLYMASLAAIRINPVLRRMYAAFRARGKEHKVALVACMHKLLTILTAMVRDNRRWKPS

SEQ ID NO: 418414 - protein, 411 aa, unidentified
MDTLYPRCAGIDVHKGNVVVCVRCCDRPGKVSEEVRTFSTMTADLLALADWLAERGVTHAAMESTGVYWKPVFNILGDRFAVILVNAEHIKQVPGRKTDVKDCQWIAQLLQHGLLKASFVPPLPIRELRDLTRQRTQLIQERTAAANRIQKVLEDANVKLAGVATDVLGASGRDMLEALIAGETDPAKLADLARKRLREKIPALRLALQGRVTAPHRFLLRMHLDHITHLEELIGRLGARIEEALVPFAEAEEWLQTIPGISQRVAETVVAEIGTRMEQFPSADHLASWAGMCSGNNESAGKRRSGRTTKGNRWLKRILVQAAWAASHTKGTYLAAQYRRLAKRRGCKRALVAVGHTLLVIIYHVLKRGTPYTELGADFLERLEPARLTRQLVKRLEALGHKVTLEPCPAV

SEQ ID NO: 418415 - protein, 341 aa, unidentified
MSIVGAFDVHRRQLTFEYLDTGTGELKRGRVVPADRQHLREWLARFAGQDDVHFALEGCTGWRYIAEELAAAGVTPHLAEPADTAALRGKKRHAKTDKTDTRHLRVHLMAGDLPECWIPPEHVLEARGVARLYKDLLDERGAWHQRIAATLFHQGVPVIGSMAKPEGRAAVGQVDLSPAGRQAVEAGLRQIDRLTGELDVLRGQLGMLSRRQPGCRALRNTWFGIGPVTAVAIWAELGDVRRFGSSDDVVRHTGLDITVWSSDGKGPPGRLSRQGPPLLRWALYEAAKCAARPAAPDHGYYTEVRDQRTAGLATLSVARKLARRCYHTLRELGEEALAPAA

SEQ ID NO: 418416 - protein, 346 aa, unidentified
MTSLADPARAVTVGVDTHRDFHVAGVIDERGGELAAKSFPTGKAGYAALESWSLEHGPVEKFGIEGTGSWGAGLARHLTDRHPVVEVNRPDRAERRRVGKDDTTDAFAAARAAQAGRARAVPKAGNGPVEAIRALRVARNGAVKARTQAANQIHALIATAPDALRSDLRNLTVAAAAKRCARFRPGEPATPTAATRQALRSVARRWLNLDTEADELYTQIETLTAAAAPRLMAMTGIGADTAAQLLITAGDNPDRLHSEAAFARLCGVAPIPASSGQTNRHRLHRGGDRQANAALYRAVVVRLRCDPETKAYMQRRLAEGKTKQDVIRCLKRALARRVYHQLTAPS

SEQ ID NO: 418417 - protein, 316 aa, unidentified
MNSKTNQNINIGVDTGKFQLDIYIRPLDIFFNVKNDEKGIKEAVNLIKKHHPERIVIEATGRLEMPFIMACAEANLPFVIANPIHIKRFAGAIGQKAKTDRLDAQLIAHYGDAIKPKLSTLKPDIMQAMSDLVSRRNQIMAMQTMEKNRLQILPKEVAMTIKPILTVFRNQIEKIEAKIVKLIESNPDYQAKNIILQSMKGIGKIAAASIISNLPELGYINNKEASSLVGVAPMNKESGRFKGQRKIQGGRHQVRTVLYMAMMSAIQSNPVFKETYQRLVEAGKPKKVAIIACIRKMVVTLNSMLRDGVMWEAPKA

SEQ ID NO: 418418 - protein, 486 aa, unidentified
MRSDHRSKKNSRSKPSSRRTKIKPEEEWQVVYPNSAGIDVGSQRHYVAVPASFDPEPVRSFGCFTEDLIALADWLKSCGVTHVVLESTGVYWVPVHQVLSDQGLLVHLVDARQAKNMQGRKTDVSDCQWLLRLYVHGLLNPCFLTPQVVSPLRAYVRHRGGLVEACSQQIQLMQKPLEMMNVQLHKVLSDISGLSGMKIIRKIVAGERSPKQLAMLAHKSVKADEKTILQALTGYYQAEHVFALSQALAAYDFYQAQLRECDYQIQAALKEITPSGSSAEPTGGKDNEPPSNASGSSDPKEPSSNSSRRKNQSYFELRPELERLAGVDLTQITGISALTAQTILSELGPDLSAFKTGAHFASWLGLCPNHQITGDKIKRRRSRHVQSRVSQALRLCAQSLMRSKSALGAFLRRIRSRSGMPKAITATAHKLARLVYRALTEKLPYIDPGADYYEQSNHERACNKLRQQALKLGFRLVPDAEAQTAS

SEQ ID NO: 418419 - protein, 389 aa, unidentified
MTESSDYESVQVFIGVDVGKDIHHAVAVNRSGKRLFDKALPNDESKLRSLISDLKQHGQILLVVDQPATISALPVAVARSEGVLVGYLPGLAMRRIADLHAGEAKTDARDAAIIAKVARTLPHALRTLKLADEQIAELSMLCGFDDDLAAQTTQVSNRIRGPLTQIHPALEHVIGPRLDHPAVLDLLQRYPSPEKLTSLGEKKLATQLSKLAPRLGKRLAADITRALTEQTVVVLPRLALQLITLRKQRDEVALEVKQRVLAHPLYQVLTSMPGVGVRTAARLLTEVACRAFASAAHLAAYAGLAPVTRRSGSSIRGEHPSRQGNKTLKRALFLSAFVALRDPISRAYYTRKMNQGKRHNQALIALARRRCDVLFAMMRDGTFYTLTAS

SEQ ID NO: 418420 - protein, 412 aa, unidentified
MQAIIERCCGLDVHQGTVVACLLVGAPGAQPTKEVRTFRTVTRDLEALRDWLRAAGVTHVGMESTGVYWRPVYTVLEGHFELIVGNARHIRNVPGRKTDVKDSEWIADLVRHGLIAKSFVPPRPLRELRELLRYRRKLVESQAAERNRLLKLLETANIKLASVASDVFGVSGRAMLRALIEGEASAEAMADLAKGQLRRKRADLILALDGRIDEHHRFLLAMQLRRLEAIEADIAALDLRIGERLEPYCTQHALLMQIPGVDWLVAAVLIAEIGVDMSVFLSVYHLAAWAGVCPGNHESAGRQKSGRARKGNIHLRTILVGAAISAARTKGSYLKDKFHRLKARRGALRAALAIAHKILVSAYHMLAKSLPYRELGEAYLDQIGQTRTVANLKRRLERLGYRVTLEPTVQAT

SEQ ID NO: 418421 - protein, 404 aa, unidentified
MAEAVDAAWIGIDVGKLHHHAVAVDAHGMVLWSKQIRNDQAAIEQLITTASDMARQVRWAVDLTSAYATLLLAVLVAADQQVLFVPGTMVNRMSGAFAGEGKTDARDAQVIAETARLRRDLTSLSTPSELVVELGLLTGHRTDLMADWVRGVNRLRDLLSRVFPALERAFDYSTRSPLILVSGYCTPEAIRSAGAGELTEHLRTAGAHRPSIRGIVTKAVAAVNTQTITLPGEATAAGLIADQARRLLDLDRQIKDLDKQITNRFRTHPQARILESMPGMGPILGAEFLAITAGDLAAFGSAARLATYAGLAPVPNDSGRRTGVLHRPLRYHRRLRHVFYMTAFSSLKTDGPSRQFYRRKRTERQRHTKAMIALARRLVDVVWALLRDNRLWQPDGPPIPATAA

SEQ ID NO: 418422 - protein, 310 aa, unidentified
MTIICGVDVSKAWLDTWIEPAGHRRFANTGEGVAELGAYCRTHNAALVVMEASGGIEQPAYLALWQDGQPCAIANARSVRKFAEAMGYLEKTDRIDAMMIARFADAKRMVAMPPPSADQQRLTALATRLRQVTTDLGIQKQRLHSARDPFARQSIQEAITFFTAQADTLVAEIASLIDVDPLWVALDRTFRTIKGVANRTIAYVLAELPEIGTISNRAVTKLVGLAPLPDDSGQRQGRRSIRGGRAGLRSILYLVADVARRYDPSLTDFRERLLAKGLSKMEVRVALARKLLVRLNAKARDVRAELAHAL

SEQ ID NO: 418423 - protein, 395 aa, unidentified
MYFLGIDIGKRTHVASLMSEEGKVILKGFSFPNTTEGADSLIERLSKYSETPADFIVGMEATGHYWLSIFSYLHESDFLIHVVNPLQTDGWRKGTEIRKRKNDIIDSVLIADLMRYGSFVETVLSDENVFSLKQLSRYRTYLVGTVSDFKRKIIAVLDQVFPEYASIFSKQGIFGKASKELLLEFSSPIELEEISAETLAQYLAELSRNRIKPEKADQLKQAASNSFGVKFAQEAFTFQLRSMIEQLKFIESQVKETEKEIKRIMSNLDSVILTIPGIGPINGATILGEIGDIRKFSNPKKLVAYAGIDASVSQSGQYEATHNVMSKRGSPYLRKGLFSAALVASRCDPFFRAFYQKKISEGKHHLTALGAVSRKLCYVIHAILTKNEPYKIVSD

SEQ ID NO: 418424 - protein, 393 aa, unidentified
MAALTIVAQTRPFVIGVDCHARTHTFAVIEASTKRQVASEQFPTTAAGIARALAWAGRRTGGDMGCLWAIEGVGTYGARLARAVVDAGYDVAEAPRMNARARRGLGKSDPLDAAAIGTAVLGLEESQLRAPRRDAGTRAGLRILSAARDQLTRDRTLNVNALIALLRAHDLGIDAREPLVPAQIATITRWRERQEPIELSIAREEAVRLARRVLEVTTQLAANQKRMTELIQQSPAAPLLEMVVAGAVTVATVLTAWSHPGRVRSEAAFASLAGVNPLPASSGNTVRHRLNRGGDRRLNRALHTITMTRMVHDPGTRDYVAKRTQEGRSYREIRRSLKRYLARTLYRQLNSLYSIAEPTRSQPGREDPRTDVLSGSQRKLTDKDTICRSRRVG

SEQ ID NO: 418425 - protein, 332 aa, unidentified
MYLGIDVHKRYAQVAVMNEAGEIVEEVRVENANLDDLAQRYAGAQAALEATSNHYHIYDTLSEHLDVTVAHPRELTQIADTDKKTDRVDAKELARMVRLNAVPESYVPTDEIRQARALVRGRQSLVENRTEYANKIHGLLSDHGITEDVKPLSVEGREFLRELSLPTPWETILESYLEVIETLTEEIERLDATIEERAGSLEETQLLMTIPGVSYYTALTIYAELGEISRFDGHKSVVSYVGLNPVIRESGDSRIEGSISKRGSGRVRWLLVQAALTAVHTCNDEYLSRFYDRLASRKNSQKAIVATARKMLVSMFYMLDRREVYDPPGVNT

SEQ ID NO: 418426 - protein, 399 aa, unidentified
MISVGIDVSKGKSTICILKPYGEIIKGPFEVQHTNSGLENLVQIFDGLDEEFRVAMEATGAYHYPILYYLKEKGYFVTLVNPLEMKRYRCQGLRNPKTDRIDARIIATYVLDYWNSIKDYTVSDESYAELRFLTRQYRKYMDFRVGAMTTLTDILDMTMPGIRTVLTDWNKYSNKDPLSDFTYDFWHYDNVKKYSKEEFVEEYVKWAKEKGFRRSETKAIAIYELAHEEIPTLPSSTPSTKMLVQEAVKFVREINASLYKILTRMQELAKEFPEYQTVRNMSGVGDTLAPRLIGEIGDVRRFPNASALIAYAGIDAPPYQSGRFTGTERHISKRGSSNLRKIGFETMTCANVAKKPDDPVYLYMQKKKAEGKPGKVAKIAGMNKFLRIYYARVKELYQK

SEQ ID NO: 418427 - protein, 341 aa, unidentified
MKVMAGIDLHSNNAMCGLMDMQGKRLAHRKVACKLEEVLKVFAPYQKQIDTVAVESTYNWYWLVDGLTEHGYKVALANPAQIDQYDGLKHTDDKSDVFFLTELLRLGILPTGHIYDRQTRPVRDLLRRRLSLVRQRTALILSFKNLHVRNTGVDLGLARVKSLGVSEGKNLFEHPCDRLIAEEQLTLMRQLDQSIDRIEKAVLKVVKALPCYRRLQTIPGIGMILGLTITLETGEVSRFATAGDYASYCRCVKSQRLSNQKSKGKNNRKCGNKYLAWVFVEAANCALRSDPQCRKFYERKKVQRNGIVGIKALACKLSKAAWHIMSREVDFESERVFGGRT

SEQ ID NO: 418428 - protein, 347 aa, unidentified
MRFYPKQHPFYCGIDLHARTMYVCILSQEGEIVVHRNMPTSPDALLKTIAPYRAQIVIAVECIFTWYWLADLCAREGIPFVLGHALDMKAIHGGKAKNDKIDAQKIAVLLRGGMLPQAYVYPAAMRATRDLLRRRMHLTRKRAELLTHVQQTNCQYNLPEIGKKIAYKANRAGVAERFPDPAVQKSIEVDLALIDYYDQLLRELELTSVQTAKQHDANTLYLLQTVPGIGKILSLVLLYEMHDIARFPRVQDFVSYCRLVQCAKESAGKRYGTAGTKIGNAYLKWAFSEAAVLFLRNNPAGQKYLARLEKKHGKGKAFTVLAHKLARAVYYMLKRGVAFDLSTLLQS

SEQ ID NO: 418429 - protein, 394 aa, unidentified
MILVGIDIGKNKHTFSIIDKNSGEILLSPSDFSNNLKGFLFLIQKLSSYTKSELLIGMEDTGHYHFALLKYLLDRRYTVALINPTTTDLTRKLQGGITKNDPLDSLTICDVISSNHRNKPYRVTTLNRFDLYEQKQLTRHHHNLKEELNTYKNRLQKCIDIVFPEFNSLFHSKYGIVYMNILKAFSSAKAIANADIRSIRKCFEFKGQGKRISLSAEQLKLTAKSSIGIPSVAEEIQIRHIVRQIELLEKQLSEIDKRIEEFSLKNNSPILTIPGISHFSGTSIISELGDICNYTKASQIIKFAGVAPYHYESSQFTAQHTAITKKGSKYLRKTLYQIILPVISNNEVFYAYYTKKLNEGKGHRCAQGHCIRKLLRVIYHLLSTRQPFNPKLLV

SEQ ID NO: 418430 - protein, 370 aa, unidentified
MDPAFTFQDGLCVGQDGNEPSKRRAREGPKVDIRTLGIDLAKNLFRVHGVDARGKTILQRQLRRRQLLPFLAQVPSCLVGMEACGGAHYWAREIVKLGHEVRLISPHFVRPYVKSSKNDARDAEAICEAVARPSMRFVAVKNQVQQDMLALHRVRALLIRERTALMNQMRGLLAEYGVVVAMGAAHLRQALAEIVGDHDERVSALFREALVEMSERLRSFEERLERYDKQIGDLARNDPKAGRLMTVPGVGPLIATALIATVGDARQFKSGRELSAWLGLVPREHSSGERTILLGISKRGDRYLRTLLIHGARAALRHARRKCDRRSLWIGALSNRRGPNIAAVALANKNARVAWALLTRAEEYRMPAAA

SEQ ID NO: 418431 - protein, 480 aa, unidentified
MNVKATRTKKQVNVENQAIKLLSKEELGIKIEVIKKELRSYTWRDLETNGKFAKNDKLSFITDDMLIAGCDIGSETHYIRAIDVRGRELSSRAFEFSNTSEGFANAKAWMLALAAKNDKKQIALGLEPTGHYWFALAAWMVSNGISVVQVNPYAVKQSKEIEDNSQLKDDRKDPKLIANLVKDGNYGMPYLPEKVYADMRRLSMFRDQLTEDRIRNINRLHRELKIYFPEYMDAFGKIDGAFTLEVLKVSAIPSDITALGAEGIKNIWHNEKLRGRGYSRANEIVSYAEKSVGLTDGTDAGREAVKWYAEQILKLDEQLAVIESTLHEKCREIPYAENILEIRGVGENILAGILAEMGDISRFDDVKEIQKLSGMGLVACSSGKHKGQTKISHRGRKRLRYWLFQVAKSAVSHADEFKQLHEYYTTRTNNPLKKMQSLVVIACKILRVSYTILKTGTTYDPQKLLKDIKRPTASQAPMAA

SEQ ID NO: 418432 - protein, 401 aa, unidentified
MQVTFGIDVSKSNSTVCELIGESKNELTITNDRPGFIQLLHELAAFSKHPQIIFEATGVYSRRLQSFLEDYGYDYVIINPLKAKKEMDMGLRHNKTDKTDAYHLALIQRLYHHPINQLQSQTYKQLNSLSRFYNQLTADLVMAKNRLHQALQSTFPEIENLFSAAKGKNYWQIVNHYPHCDLVRKDDKKQIINWLMKLKGIAFNHAQRTTDKLIELAHLAYPVVSCSDIEVQQAQYYARRLLNLSNQRQRIITKMVKLAKTLPNHDLENLESIPGFAQTTAVRVLAELGDLRRFSNPNKINAFIGIDPGRYQSGEMDSNLSITKHGNAVARKLLYRAIGQIDNAAKTNPCHIADYYESKKLSSQTKGFKKIAIASIHKLIRTIYALIINDQLYDYNVATHN

SEQ ID NO: 418433 - protein, 429 aa, unidentified
MEEVDEIELVVHRVAALDLGKAGLEACVRVPHSSKPGRRMQEIRGYGTTTAQLLELAFWLRHWQVERVVMESTSDYWKGVYYLLEAEGFECWLVNAREVKNVPGRAKTDRADAVWLAKVAERGMCRPSLVHPLEIRRLRDLTRYRRALVQDRTREQQRVEKLLEDAQIKISSVLTDIHGVSGRAMMEALIAGKRDPRALAKLAKGTARNKTGRLEEALRGFFTDHHAAILQMMLDNIDRISTQINALNTQIEAAITPFADQAAQLCDLPGVDTVAAAELIAEVGVDMTRFPTPAHLVSWAKFCPQTHQSAGKSRSKGRGKGNPWLAGTLGRIAFVDSRTDTFLGARYRRLARRRGKQKAIVAIGNSALVAIWHLLSEPGARFVDLGPNHYDSRINKHRRARDLATQLQALTGQRIVIRDGKAVISESAA

SEQ ID NO: 418434 - protein, 425 aa, unidentified
MDIKYPICCGVDVHKSFLVAVIIKDAQPKPQYIKKRFSTFNNDLIEFKKWLISNDCLFLCMESTGKYWIPVYNILEDKINVTIANPKWVRAIKGEKDDNKDAKWIAELFRLGMVRGSYIPSKEIRILREFTRYKYKLTCLRSGEKNRYQNCLTVGNLAVDHVFSDVFGVGSQAIIEYILATNETDFDDAYCLSLLSKKGRRKATDQEILNAVKNSNFTSAQKIRISIVKEHLDYITKSISKIDLTINSLVEPYEMYINLLSTIPGMDRNSAIITISEISTEMNHFDSSRRLCSWAGLTPTNNESAGKKKSVKISRAGIYLKPCLVQVAHAAIKDLKNPYYAKKFDRISKRRGNKRAIIAIARMILTAAYHIISTGEEWNPTDLQSIEMPKEIKIKLAKSDLQKSIKTLIANGITLEEITKAYLPT

SEQ ID NO: 418435 - protein, 408 aa, unidentified
MTVVGIDVSKGKSMVAAMKPGGELVAAPYEVRHSDIELSHLALDVLCMEPDTRVVMEATGRYHEPVAALLHSEGIFVSILNPLLIKQSGAGSLRKVKSDPKDALKIAKYGLDNWSTLREYTPMEAIRQQLKLCARQCDLYNKNIVMLTNNLISLSDKTFPRVNELFSSPEKADGHLKWVDFYRSFWHCDCINRMSPDAFEERYKKWCKRKGYHFSTDAADALYAASCGSYTTLPRDNNAKLLVTVAADQLIALRENQSKLEAEMLNLCKQLPEYETVMAMYGVGKSTGPHLMAELGDVRRFPHRSSIVAFAGVDPGVVGSGKMQLSSVATSKRGSPQLRKALFQVVSAYVKRKPENEAVYQFYAKKRDEGKPYYVCTTAAANKFLRIYYARVKECLNAAESATQAEEG

SEQ ID NO: 418436 - protein, 410 aa, unidentified
MPHTIAGIDVHKRVLMVVVADMATPDAERHGERRRLGTTTSELQSLAAWLQQRQVQEVVMESTAQYWKPVWLALEPDFELHLAQAQSNRAPGGRKSDYRDAERLLRRYVADELFLSFVPAPEQRLWRTLTRNKLQLVRDRVRLQNQIEALLEEGRIKLSSVISELLGDSGRRILQALAAGESDPQRLAALGDRRLHASRDTLADALDGTLAPAQRAVLQLALERLELLDRQIAQLDQLTAAQLRPYQDAITRLSGVPGLGLNAAQQIVAEVGPAAQDFPTSQQLCSWVGVSPGSQESAEQNRSGRCPKGNRYLRRILCQAAQAAVKKNGSFLQSLFRRLLTRLGYPKAIWAIAHRLCQIIWKILHQGTQFIAYGQLGTPQQQQRRARRLLTQLRQLGYSAQLIPTQPATT

SEQ ID NO: 418437 - protein, 350 aa, unidentified
MHATTVAIDLAKDVFELAFADAEHRIVQRRRLSRRAFAQALSNTGPLRVVMEACSSAHYWARRFTAQGHAVRLLPARDVRPYVRRNKTDRTDAAGLLEADRCAQIDSVPIKSVEQQGVQALHRIREQLKSQRTATINLTRGVLREFGFLIPLGAAKVRPAVLAVLENGDSELPMPLRHTLAELLEQFARLAQGMAAIEQRLQSIAQSDPVCLRHQQVPGIGLLTATALRASTGPLDRFRSGRHFAAWIGLVPREHSSGSQRRLGRISKRGDGYLRLLLIHGARAALRAAHLRQQRAQLLTHLQVWAIDLQQRVGHNKAAVALANKMARRLWAMEHHRTSFDPDHVSVRTP

SEQ ID NO: 418438 - protein, 376 aa, unidentified
MNRVVYVGMDVHKDTYSLCAFDAQNQCFLTETTISSEVILVLNYVKSIEKRFKDDDLTVVCGYEAGPTGFSLCRDLQKAHVSCVVMAPSSLPKSPDNKRRKTDKIDARDLALHLAHHTYKAVNVLSPEMESIKELTRVRASATKAKKRAKQNLLSFMLRKGMVYPFGGRAKYWTQQFFAWLRTLEFANLLDRYSFEEYLTEVNHQVARVVLLDAKITEIAGNQLIEEDVKKLCCFSGISTYTAVSLISEVGDFRRFEKASHFANYLGLCPGVHSSGLSSQNLGITKAGNGNLRRLLIEASQSLGHSLKCGKKPSRVLARQKGMDPSIVAYADRAVARVKRKRTAMIIRGVNVNKATTAAAREMACFIWGMMTNNVA

SEQ ID NO: 418439 - protein, 371 aa, unidentified
MNEFSKYIGLDVHKETIAVSVAEANGGEVRYVGEIANTEESLDKLVKQLRKGGANLSFCYEAGPCGYGIHRQLTDLGWDCQVVAPSLIPKKAGDRVKTDRRDSLMLARLHRAGELTAVWVPDGAQEALRDLTRAREDIKHLQLQARQRLLAFLLRHGRRYDGKSKWTLTYYRWMETVKFDQPVQQIVFQEYIDTVKAMTKRIEALDKQIESAATESVLWPVIEGLMALRGVSMLTATTIVAEIGDLRRFASAPQLMAYLGLVPSEHSSGGTKSRGGITKTGNGHVRRLLVEAAWTYRHPARKTAFLQRRAEQTSEAVQEIAWKAQTRLCGRYRKLDARGKLSVQTCTAIARELTGFIWAIGQALPKPVAKA

SEQ ID NO: 418440 - protein, 353 aa, unidentified
MTSLTDLREVVDVVIGVDTHVHTHSAAAVDAATGGVLGEITVEATGEGYAQLVEFAGEYATLRAWAIEGTGGHGAGLTRHLSDREEIVVELDRPKRAKRRNGAKSDPLDAIRAAREALARTRLGTPRSGGERQALSVLLAARRSAVHAATEAQQQVFSLVIAAPEPIRARFRGQKLPGMLATAAGLRVHPSWDVETTTTVLALRALARRARTLTKEAAEHQKAILAIVHSWRPDLLEQLGVGPIVAATVLCAWSHPGRIHSEAAFAMLAGVAPIPANSGQVTNRYRLNRYGDRQLNRALHTVVQSRIRYHDPTRDYVARRTTEGKTGREIKRCLSRYIARDLYRLLESGSSTT

SEQ ID NO: 418441 - protein, 397 aa, unidentified
MYIVGIDIAKRKHEAAVIDGEGTVIIKPFSFTNNCSGYNRLLAMLAKAKLPLDEVSFAMEATGHYWLALFTRLQKEGFRVQVINPVQTNSIRSFYIRQAKTDPRDALLIAEVIRFGHFSGSTLHPENIYELRELCRGRHAIVSMQADVKRKVVALLDQVFPEYETAFTNMFSDTSMAILQTCPTPKELSEMPLEELCHLIEVSSHKRFRMAKARELQELARNSFGFAMAGDVFSTMIRLYAKHLDFLKQQVREMDRKIAEIMETLDTPITTITGIGPTLGAYILSEIGDISRFSSAAKLAAYAGIDPTMRQSGEYNGVRNRMSKRGSPYLRHAIWLATSSAVLHDPALKLYFQKKRDEGKPYMASVGHACRKMVSIIYAVMRDNKAYTPCIPNEISA

SEQ ID NO: 418442 - protein, 352 aa, unidentified
MNIKYIGMDVHKETISIAVMNGEGKVVMESIIETKASTILQCIQGVHGDLHVTLEEGTWAAWLYDLLKPHVTELVVCDPRRNALMKEGNKSDKIDACKLADLLRGGYLRSVYHGENGLRTLKELARSYLTISKDLTRVMNRVKALYRSWGILCGGQQVYAPRHRTEWLNKIGEAGVRRRAEFFYQQLDALRELRQAVRKDLLAESRKQSATKLLRQVPSIGPIRAALLIALIQTPHRFRTKRQLWTYSGLAIETRDSAQYHYVGGRLQRSKKPLRGLNQNHNHDMKTIFKSAASMASSREGAFHDFYQGLLTKGMQPAMARLTLARKIAAITLILWKKGAHFDAKQLKLQAA

SEQ ID NO: 418443 - protein, 360 aa, unidentified
MTKVNQLDFTGTTIYCGLDVHKISWRVNLRDTELELKDFTQPADASLLHKHLTKNYPGANYKAGYEAGFCGFGIQRQLSALGIECILLNAADIPKGDKERKQKNDKRDARSISQLLSNKKDLKSLYVPTLSWEHARTLVRNRQQQISDSTRCKCRIWHFLHFSSLPSPDKAETGQYWSRKFVKKLEEMDCGGSAELKAALQIKLQDYLHKRNLLMQSTRAIRSMYRQQNYWPSMQLILSIPGIGEINGAIILFELQDISRFKTFDNLCSYVGLIPDTDDSGDTKRTKGLTHRRNTYLREALIESSWVLIKKDPAMLMKYKDYCKRMHKNKAIIKIARHLLARINFVMRKQTVYVSGLLNG

SEQ ID NO: 418444 - protein, 438 aa, unidentified
MEEAGDEPLFCERAAGIDIGKQVVSVTIRVPSDTRRGGRQQETREFGTTRRQLLEMADWLRCWQVERAGMEATSDYWKPVYFLLEREGLDCLLYQASQVKALPGRPKTDRLDSVWLARITEQGSLAGSFVPPEDIRRLRTHTRYRRRLIQARTAEKARCEKLLEDAHLKLSSVISDIHGVSGRDMLRAIIAGERDPETLAQKARTRMRRKIAQLREALDCSFFTPDHAFVLQMMLDNIDHYTAQIGVLDERIAVLCQPYERQVAQLDGIPGFGVTSAQDLIGEIGVDMAAFPTAGHLCSWARLAPRVRESAGRRKGKNATGRGNPYIGGTLGEAAAGAGRTQTFLGAKYRRLCTRMPKKKAQGAIMRDQLVITHALLSDPGAEYRDLGTGYYEQRERTRRRASSHVRSLERLGYKVTIEPLAPDADPETGELITRTAS

SEQ ID NO: 418445 - protein, 333 aa, unidentified
MSNIKTVVGIDVAKDTLAISIYDGKIHQITEFDYTKKSINKELISKFKKEKDSVVFVLESTGVYHTKLAYQLYQNGFSVSVLNPFIIKKYAEMKLMRVKTDSVDSKLIAEYGYEYKNKVTLFKPKDDAVLHVDNLIKAIDDLLSQKNTSSNQRHALKRQAQHSKEAVKSYDRHIKFINNEIEILEIKLKEILKTAFQTEHELLTSIPGVGLKVSSMIIAVFNSFENFDNAKQACSFVGICPSPYESGTSVKGRGSISKRGNTFARKILFMGALSAIQYNPPIRQQYLRLLENGKCKMQALVAALNKLLRQAFGVLRSRIPFKADYLEISKVIG

SEQ ID NO: 418446 - protein, 477 aa, unidentified
MVAARRTGLNRKQRKELARRLRVEDPGLEVMHPDAAGIDVGNSAHYVAVRPDRDPDSVRRFECFTADLHRLADWLQQCGVTTVAMQSTGVYWIPVYEILDARGLEVYLVNARHTKNLPGRKTDVQESQWLLKLHTYGLLRNSFHPSADIRVVRTYWRQRGDHVHAVSTSIQRMQKVMTQMNIQLANVISDLSGWTGQRIVRAILAGERDPDKLAALSHPGIHATRDTIAKSLEGTWQPDLLFVLQQEVTMYDAYLQRIAECDQALERHLKSFTDRVIDTPSATEESSPATHRETRVKHRRKAGSHTPQFDLGRELHRITGVDLTRIDGIDVGVAQTVISEVGFDMTRWKTEAHFASWLGLCPDNRITGGKVIRKGTRHVVNRAATALRLAATTLLRSQSYLGAQYRRLRGELGAPKAITAMAHKLARLVYRMLKWGHEYVDKGLKYYEDRHREQQVRLLQKKAAKLGLLIVEPYAAD

SEQ ID NO: 418447 - protein, 413 aa, unidentified
MLLFIGDDWAEDHHDIEIEDETGRRLAKARVPEGLEGITRLHELLAEHAPADWSDLPSEEVAGRVFVGIETDRGPWVTALRAAGFQVFAINPLSSARYRERYSTSGAKSDAGDAHVLAEIVRLDRDHHRKIAGDTDLVDAVKLLARAHQTAIWERTRQVLRLRSTLREYFPAAVEAFSDLAAKDSLLLLGRAPSPVRAAKLTRSQVVSALRAARRHHAEAKADALLAVLRTPGLRQPATTDAAYAAVVIGQVGIITALNEQIAQLQEVVAEHFGRHPDADIYLSQPGFGVVLAARALGEFGDDKKRFSDSRARKNYSGQSPITRASGKKTVVLARYATNRRLGDALHLQAFSALVASPGARAYYDALRARKIGHHAALRQLANRLVGILHGCLKTGTKYDETTAWQHQIVTAA

SEQ ID NO: 418448 - protein, 318 aa, unidentified
MEKINVGIDISKKKFDVCILLPNSKALTKIFNNDNKGFADLFEWLELKKVGLCRVAIEATGCYGEDLARVLYNKGHTVFIINPAQIKYFGKSKLSRAKTDKKDARLIAEFASTYPQLKPWIPLAASQEKLKNLYRHLDRLKADHAQLLNRLESIRDEDVKKLSTAQLDFVKNQIEDLQKQIRLHIKSDSDLKEKEALLLTIPGVGEALCWAVLSEVPDLENFRDAKQLAAFAGLNPTVCESGTSVRGRGGISKTGSSFFRKMLYLPSMNAMRFNPIIKPFADTLRAKGKKGKVIVIACMRKLLHIIYGVLIKKQPFAG

SEQ ID NO: 418449 - protein, 344 aa, unidentified
MNITTLGIDLAKNVFQLHGTDRDGEVVLKKTLRRNKLLEFMANLSPCRIVMEACGGANFWARQFSASGHEVRLISPQFVKPFVKGNKNDYRDAEAIVEAASRPNMRYVSPKTVAQQDMQSLLRIREGCIKMRTQMSNQLRGLLAEYGIVMSCGLSQIRKALPALFDKEQSNGLTDSMKDLLAMQYALLSALDQQISRYDKEIERIAKSREDCQRVQAVPGIGPITAVALSASIGNPRDFKNGRHFAAFLGLVPKQHSSGGRERLLGISKRGDSYLRQLLIHGARSVLQRIDKKLDTRSVWLKNLKLRAGMNRTTVALANKNARIVLALLLKDEPYRKSCDVVAV

SEQ ID NO: 418450 - protein, 354 aa, unidentified
MIIIGADYHPGFQQIAFVDTDTGEFQERRLQQREQAEKFYRDLAAQGMPVRVGMEASGQARWFERLLSELHFELWIGDAAKIRTKRVRKQKTDRQDAQLILQLLLEDRFPKIWVPSWENRDLRQLLWHRHRMVQARTRIMNQLQAVALNEGLRCKKRLWREAGREQLESFRLAPWASRRRLDLLELIDRLNPTITELSQAIEQEVEKCPEARRLMTHPGVGALTALAFVLIIGRADRFQCGKQIASYLGLVPLEDSSGSRRRLGHITKQGNSLLRFLLVEAAQVTVRSDPEWRSKYFHLAMRRGRKIAKVAMARKLAVRMYWMWRKGWDYEQLKKFGSHAGQPGHRDGVQSNTE

SEQ ID NO: 418451 - protein, 353 aa, unidentified
MDSKKYIGMDVHKESISIAVRNAAGKIVMECVIETKASVILDFIHGLRGELQVTFEEGTWATWLYDLLKPHVTKLVVCDPRKNSRQGNKNDQIDARELADRLYMNKLSSVYHGEAGVRTLKELARSYLTISKDLARVMTRVKAIYRSWGIPCVGKQVYALRHRAEWLAKITEVGVLRRAEFYYQQLDALRLLRHEVRRDLLAESKKHQATKLLCQIPSIGPIRAALLIALMQTPHRFRTKRPLWKYSGLAIETHSSADYRSVKGQLQKVKKQVSVRGLNRDGNHDLKNLFKSAATIASVKPGPFQEFYAALLAKGMRPEMARLTLARKIATIVLIVWKKGVCFDAQYLKPQTA

SEQ ID NO: 418452 - protein, 355 aa, unidentified
MDGIRYIGLDVHRDTISAAVLNGEGKLMMQSVLVTRAAAILDFLQGVRGTLHVTFEEGTHSAWLYDLLVRRVACVVVCNPRKNKLLKSGNKSDLIDARKLAELLRNNALSPVYHGEISALEVQHRTRSYTMLTQDTTRVMSRLKAVFRSQAISCPGKKVFRPDNRQFFLEQLGSPGLRQRAECLYRELDALHPLRLRAKREMLAECRKHPATKRLRSVPFLGKVRSAVLIGRVQTPHRFRTKRQFWAYCGLALETHDSAEYRVVDGQIQRRSKPAQVRGLNWNHNHDLKGLFKSAATMASVREGVFRDFYLSLLAKGIRPEMARLTLARKIAAITLKIWKEGEVFNAEHVKPQAA

SEQ ID NO: 418453 - protein, 457 aa, unidentified
MAKLIKQTQVSVPAAQLAVINQHTAAIDVGSTLMMVSYNDAQGNYCLAQTDGFTESIKELAKVLQSAGVTHVAMEATGVYWMALYEVLEQHGLIVTLINPRHFKNVDAQKTDVKDCQWLHQLHAHGLLKASHIAPDIYRELKTYLHQREINQKQKSDTLNRIHRQLTLMNLKVQHLVSDIEGVSAMKMIRAIAAGQQDPVTLLSLADVKKFKASEEQLLESLKGMYKKQHVTVLNRLLAAYDFYREEMKQYEQLIEEVLERMLPEDEQGQKPEVASKKGYVRKNQYSINLKGYLEQILGTDATLIEGLDEITILTIIAVTGVDMSKWRTAEHFVSWLNLSARPKISGGKQLGHQKRFTNNAATQAFRVAAQGMWNNKGPLGHFYRRLSAQKGSKKAIKALAKKLAVIFYHIVKNKSTYDRSRLQTNEQARTNRHISKLKKMAATYGFALQPIAPTSL

SEQ ID NO: 418454 - protein, 334 aa, unidentified
MDNIALIGIDLGKNTFHVHCQDRHGKAIYRKKFTRQKLYEFMATCPATTIVMEACGGAHFMVRKLSELGHTPKLISPQFVRPFVKTNKNDFVDAEAIYEAASRPSMRFVKPRTESQQAMHALHRVRESLVSDRVKTTNQIQAFLLEFGVSAPKGPTLLKRLTEIMETSNLPPYMTGLLQTLREHYDYLVAQIKDLEIQLQRALDEDEAGQHLLSIPCVGPLTASLLSTQLGDGKQYGSSRDFAASTGLVPRQYSTGGRTTLQGISKRGNKRLRALLVQCARVYLRTLEHRTGKLADWVRGLLLRKNTFVVTCALANKLARIAWAMTTRQQSFEA

SEQ ID NO: 418455 - protein, 349 aa, unidentified
MDHYAGIDVSLKDASVCVVDATGKIVREGKVSSEPAALIAWFGEHGVAMERIGLEAGPLSQWLHAGMARAGLAVELIETRHVRAAFKTMPVKTDKKDARGIAQLMRLGWFRPVHCKSLAAQEVRALLTARKLIQGKLHDIEMSIRGILRGFGLKVGPTTRRTYAARICELIEGHPTLEAIAASLLKAREALADEFACFERKLRVIARQDDKARRLMTTPGVGVLVALTFAAAVDAPERFRTSRAVGPHFGLTPKKYQSGETDYSGRISKIGDVGVRTALYEAANVILTRPVKGSDLKTWALAVARRAGPRKARVALARKLAVVLHRMLRDGTNFLPRKAAPAMAGGGRM

SEQ ID NO: 418456 - protein, 324 aa, unidentified
MSMNPSASRFNHIVAFEVSKAELVVHTLPADHQERIGNTAAAVRRLLKREQRSNLRQGLGEMLVLCEATGGYERHVLDQAAALGIKLHRAHGSRTRLFARFNGRRAKTDKIDARLLALYAISTAELPLYEPPSPEQQALRALRRRHDEIAKMLRMETNRTQHARLARLRTSLSRHRKWLQAELQAIEEEIELLIAQTPELNRKAGLMRSVKGVGPKTVAAILAYLPELGTLSKAQVASLTGLAPHAKDSGAQHNPRHIVAGRAALRTSLYMPALVARSRNPKLRAFAQSLRARGKPNKVILVALMRRLIVILNAVIASGQPARA

SEQ ID NO: 418457 - protein, 314 aa, unidentified
MSTEYFVGIDVSKDTLDVCVYPTQDTFRVPNSPDGLDELIKRLKPIEPRLIVCEATGGYETLAVSSLAAAGLPVVVVNPRQIRDFAKSIGRLAKTDAIDAGVIARFASAVRPELRPVKDSPSQELTGLVTRRRQIVDMIVAETNRLQAATRRNRRDIQTHIGWLQKRLNQIDDEIKRDIQNGPLWRTTDQILRSTPGVGPATSAMLISCVPELGQLDRKKIACLIGVAPLNRDSGRYKGRRTIWGGRAQVRAVLYMSALSAIQYNPVIRQFYQRLREAGKCFKVAIVACMRKLLIILNAMVRNQTKWRHGDINP

SEQ ID NO: 418458 - protein, 336 aa, unidentified
MLYIGMDISSKSFVVHAINSKKTVVYKGAIKPTRSGLRQMLSKLGRQTKLVVFEAGNQLKWVALTLKQIPNVHVHVVHPNQIKWINQSSTKTDKVDARKLAELARGDMLPRKVHIVEGKTRQLRELTSARHRLQSKRVALINAIRGLLKQEGYRLPAKIFNNPNWREALKRMRVADTQKIILASYMNSIESLQQSEHELTTRILEIESEDINLLQTIPGIGGLTARVIVSAIDDVNRFDNEKSVAKYGAMTPRVYQSGNVTRLGRISRDGRLEVRRMLLQCAHTVTRMRSYESWPLREFFERIQRRRSKKIAVVALARKLLTIAYGVLELVSKPIK

SEQ ID NO: 418459 - protein, 412 aa, unidentified
MQDILTCAMGLDVHRDIIVACLVKGAVDAEPEAEIRTFSTLIPEMQKLRDWVIEADCRHVAMESTGIYWQPIYEMLEFCFDSEISILVVNARHMKNVPGRKTDMKDAQWIATLLRAGLLKGSFIPDKAFRELRHLTRYRKSVVHDITAQKNRIDKFLQSSGFRFAAFLSDTFGASGRNIIRHLIEHGSIDREALDKCLKTKTRNRIDEILVALNGALSVHQRRFLNMVFQHLEDLEAHKHAVEDEITEEVLKHTDALNLLCSIPGIDVTAAAAIIAEIGTDMSSFPDSQHICSWAGLSPGNNESAGKRKSVHINKGNSYLKSMLCEVAWIMASHRKLYLSGWYWKVKQRKGAKRATIALARKILSIIYTLLKTGTPYNEECFEQRRLRCERKRANRLVNELQKLGYVVVAPD

SEQ ID NO: 418460 - protein, 356 aa, unidentified
MSYDVKYIGMDVHKEATVIAVLNESGKLVMESVIETKASSLLQFLHGLRGELHVTWEEGTWAAWLYDVLQPQVQHIVVCNPRRNAFLKEGSKSDKVDARKLADLLRTGMLRPVYHGENGLRTLRELGRSYQTISKDLTRVMNRLKALYRGWGIPCAGTQVYAVRCREEWLGKIPQAGVRRRAELLYQQLDGLQALRRNVRPEFLAESRKHKAAKLLRQIPCIGPIRAARLIALMQTPHRFRSKRQLWTYSGLGIETHDSAQFRFVSGQLQRSKKPQQIRGLNRNHNHEMKEIFKSAATRASCGRGPFHDFYAGLLAKGMKPEMARLTLARKIAAITLTLWKKEERFDVEQLKTQAA

SEQ ID NO: 418461 - protein, 342 aa, unidentified
MNGDYDGRQYVGIDLHRRRSVIVRMTEQGEQLGWVRIDNDPVALGLELAKAGPDPEVVLEATYGWYWAVDALQTAGAHVHLAHPLGVKGFAYRRVKNDVRDAADLADLLRMHRLPEAYIATPQERELRELVRHRAKLVALRSGLKAQVHATLAKQGRLPAASDVFGRAGMAWLRSAPLELVYRQRIDSLLELIDAYDGEIETFRTMIANRFTGHRGYRAIQQISGIGPTFAAVFVAEIGEVNRFSRPEKLCCWAGLTPRHRESDTTVHRGPITKQGSKLVRWAAIEACQHTRAGTKLSADRSRIIAARGRNVGIVAAARRLLTLVFYGLRDGEIRALAARAG

SEQ ID NO: 418462 - protein, 424 aa, unidentified
MFRAIGMDVHRDFCEVAIVAAGAVRSAGQIETTPAALELFASSLAPTDRVALEVTGNAAEIARILTPHVARVVVVSPHDTGISRARAKTVRLDARTLAKLLAAGELDAVWMPDEWTRAMRRRLSRRSQLVRARTRAKNEIHAVLIRRLKGRPPVTDVFGVRGRRWLAELELPEDERDTIAGCLRHVDFLDAEVTALDQAIAREALHSREVLRLMTVPGVSVITASTFIAAIGDIHRFRGARQLVGYLGLDPRVRQSGPSPARHGRITKQGSAPVRHVLVEAAWVAVRAPGPLRAFYERVRARRGAQVAAVATARKLASLFWCLLTREQDYAFGQPSLTRRKIRQLELATGAPSRKGQVRAGAGARTNDLRDAERALALQAESAYRRTIIDWQATGPPNAGASVTPGRASQRPSKGKAARQTTSP

SEQ ID NO: 418463 - protein, 386 aa, unidentified
MIYVGIDISKYKHDCFICSDTGEVIVENLSFENNQKGFQCFLDLLKSYDNSNVHIGLEATGHYGLNLKLFLEKNNYSFMEFNPLLVKEFSKSLSLRRTKTDKADAIVICQKLMSVPYKPNSKLFYHKYSLKSLSRLRETLVKQRSKYIVQMTNTLDILFPEFKPFFYNRFSSTSLYILKKYKTIDKISNMKDFDTLNRLSRGKFTYPKFVRLKELAKNTIGESNELFEFQLQTLISLYEEIDSKIDSIDKLLSTIIKDLNPPTLSIPGIGVISCASIISEFGDISKFNNAGQMLSFAGLEPGVIESGTMSSKGKMVKRGSGYLRQSLMNVCMVIIANNHTFYDYFHKKMNEGKCYRVALSHVCRKLIRVIFILEKKNILFDPSLLK

SEQ ID NO: 418464 - protein, 404 aa, unidentified
MWYAGIDWANDHHDALVIDEKGSQVGSLRVDHTPQGMSRLNTFLEQIVGAESKEQMACIIETTHGLLIAHLLETGWPVYPVNPRTVDRRRAASGAKTDTIDAYLLAKTGRADLADLHRLTPDSEKIAELKLLTRDQDALIQMQTRLVNQLTACLKAYYPVALELFAKLQQKSTLLFLQTYPTPQAAMAASAEQIQEVLRRAKHSNPTIVAAKIVERLQQPHLQADVVTTRTKSRLMGALVSQLLPLIAQIAQYNKEIKTLFLTHEDHEIFASLPRAGKRLAPRLLAEIGDDRTRYQDASSLQALGGTSPVLFQSGMYSKAHRRLGCIKPLRNALHQFAWQTTQSEPWAMQYYQRKRAEGKSHTVAVRALANVWVRIIFAMWLHHQCYETATFEHAQQQHARPAA

SEQ ID NO: 418465 - protein, 320 aa, unidentified
MLSFGGIDVSKDRLDVVVLPEEECSSVPNDAAGWAELVERLRGFSITAIGIEPSGGYERGAMRALLAAGMPVRQVNPFKLRQFARASGVLAKNDPLDARMIASFVTIMPTRPVQRQTPAAERLAEMLAIRRQLSAEKVAAENASRLLEDAMLQRLSRRRIVRLAADIDLLDKRMVEIVATDDALVHRYRLLTSMPGVGAVLACTLIALLPELGRMSRKQVAALVGVAPYAFESGTLKGRRCIWGGRAHIRQVLYMAAMSASNWNPVLKAFHDRLTAAGKLPKVVIVAVMRKMITMLNAMVRDDVVWADRLSGRHVLPTAR

SEQ ID NO: 418466 - protein, 422 aa, unidentified
MLTKTQDNEEIIARVAALDIGKAELVCCVRVPDEDRRGRRLQEVQRYSTMTRPLLGLADHLRCLGVSRVVMEATSDYWKPVFYLLEAAGFETWLVNARDVKHLPGRPKTDKLDAVWLCKVAERQMIRPSFVPPPQFRRLRDVTRYRADLVAVRTAEKQRAEKLLEDAQIKLSVVASDIFGVSGRQMLAALIAGERDPAVLAQMARAAMRGKITALREAFTGYFTDHHAFLLAKMLARVDAIDADIAALDGKIEQMIAPFAAAAQRLDEIPGINAIAACVVLAEIGIDMSRFPTAGHLVSWAKFAPGVKESAGKKKGKNTTGHGNSYLARVLGNAAVSAGRTDTFLGERYRRIARRRGKKKAVVAIGRSILVIIWHLLADPAARYTDLGSDFYDTRINPERRKRNHIRQLEALGYKVTLEPTA

SEQ ID NO: 418467 - protein, 408 aa, unidentified
MDTTHPICCGLDVHQASIAACLRRVEADGKVSLERREFGTTVSELKALLQWLDEAECPICVMESTGVYWKPVYNVLAVHLEVLIANAYEVRQRKGKKTDRNDAQWLSELLAHDLIRPSFIPPPEISALRDLMRMRTTLVETRTQSKNRVLAVLETTNVKMASLLSDPFGVSGRLMMDALLEGENTPQEMAQLAKGVLRRKIPQLEIALEGSFTQHHALLIRINLETVDLMNQQIAELEQQVAQAVEPVRPQLDLLVSIPGVDETTARTVIAEIGTDMSRFVTPGRLASWAGMCPGNNESAGKRKSGKTLRGNKYLRRVLAQCAWASRKTNTHVGRTFTRLQARIGGKKAAVAVGHKILRIVFHLLNQGTQYDDGRYDRLHPQEEKKRRRRAVAALERLGYEVTIQKTA

SEQ ID NO: 418468 - protein, 405 aa, unidentified
MDIIVDKGCGLDVHKGTVVACIMGTGIRKEVKTYTTMTNDLLRLKEWLQESGITHVAMESTGVYWKPVFNILEDRFEVILVNARHVKNVPGRKTDVQDSEWLCKLLRSGLVKGSFIPPRDIRELRDLTRYKRKLIQAITAEKQRVEKVLEDANIKLSSIASDTFGASGKRIIEELIKGKLRAEEMAELSKGRLRQKREDLKEALVGEVREHHKFMIKASLRHIGAMEKILSEIERRIQQKINRHYKEEYELLQTIPGVKGEASILIAEMGVDMDRFPNEMHLSSWAGMSPGNNESGGKKKPGSTTYGNKCLKTMLTEFAWVASKTKDTYLRSKYHSLVGRRGKKKALVALGHKILIMCYHILKYRCAYKELGVDYLDQRRKDKIARSYIKRLNHLGYEVILQEAA

SEQ ID NO: 418469 - protein, 313 aa, unidentified
MERSLFVGIDVAKEHLDVHAVPTDEAFRVAHDAAGLATLRERLVAWAPTLIVLEATGGHEVTVVAALASAGLPVVVVNPRQVRDYARATGQLAKTDALDARILAKFAAAVRPEVRPLPDTQTRALDEAVTRRRQLVEMLGAEENRRRLVRDRTVQGQIEAHITWLNRAIKELDRELQATIRASPLWRDAEAVLRSTPGVGPVMTTTLLAELPELGRLSRHKIAALVGVAPLNRDSGQFRGRRMISGGRASVRRVLYMATLSAIQHNPAIKAFYDRLCASGHPKKVACIAAMRKLLTILNAMLRDGCRWQAKIA

SEQ ID NO: 418470 - protein, 353 aa, unidentified
MYSKRIAVDLAKDVFQLAECDHSGKVVSRKRLNRTAFYKLLTQLIEPTEIIFETCGTAHYWGRVIQRLGHKATLLHARHVSPFRRGSKTDRNDCDAILNASRSIDIKPIPVKTELQQHIQHLHCMRELWKQNRLQRINLLRGIFREQGFDCPLGRAAFLKIAPVIADEPVMQLIAILINQLLAEIHQCTTLLDDCEKTIATLLSDNTVISRIDEVSGIGLLSASALVTAVGTPERFKNGRALSAWLGMTPKEYSSGNSRKLGSISRAGNTYVRTLLIHCARSALQSAKRCASRTPEKLTHLQQWAIQLSDRIGYNKATVALANKLVRICWSVWKHERRFDGNFIPTSKIQTAG

SEQ ID NO: 418471 - protein, 346 aa, unidentified
MTIVGCDFHPGWQQVAVFDPETGEVQERKLANGNGEAEGFYRRLPVPALVGIEACGNTQWFEDLLARLGHELWIGDAAKIRASFVRKQKTDRRDAAHILTLLLENRFPRLWRPSAEERDLRQLLIHRHKLVSIRARVKNGLQHLMLNRGVQLKQKLWNEAGQKALQELPLEGWAARRREDLLKLLAGLNPPIRELDEAVEQAAKANQQARLLMTQPGVGPITALAFVVTLGDVSRFPRGKHVASYLGLIPSEHSSSNRRRLGSISKQGNTFMRMLLVESAQTVNRLDEGFRKQYQHRCHRMKRSVAKVAAARKLAVRLFWMLKTNTAYPEIARIEGSPRYGVVGES

SEQ ID NO: 418472 - protein, 344 aa, unidentified
MSTIRVVGIDIAKSVFQVCVWMVDGSVAWNKKISRSKLLDTIRQFEPGTLVAMEACATSHFWGRTFASMGYCVRLIPAQHVKAFVRSQKNDANDALAICETAFRPGIHFVSVKTTEQQDIKALRNTRQLMVEQRTALANQLRSLLAEYGFTIPVGILRLQQQLPELIEDASNSLTFTLRRLLSSLREDMQALNERITSLDSEIAALSSQQIAYRHLLTIPGVGPLIAAAFISEVDATPFSSGRELSAWCGLVPRQHSSGGKQRLSSVTKNGNRSLRTLIIHGARSVMRCVKKRDDSLSIWLQRLEARRGFLKTTVALANKLTRIIWRVLTDGIDFNMQKAVAMN

SEQ ID NO: 418473 - protein, 357 aa, unidentified
MGKSIQKLSSVTRVGLDLAKRVFQVHAVDSNGEVVVTRKLARGRLVGFFSELPRCVVAMEACPSAHHWGRQLLALGFEVRLIPPAHVKPYVRRNKNDAVDAAAICEAAGRPNQRFVPVRSIDNQAELMRHRARELLAGQRTAALNALRGHLAEIGVIAPQGAQHAYDLKRLAVDGFDEYGEVVVPDCVRAALRPLVSQIDALDEAIGAIDKEIAMSVKADETAKRLMTIPGVGPVTASAIMATIQDMGDFASGREFAAFLGLTPRQSSTGGKPRLGRITKMGDRYLRKLLVVGACATLRHRKGHNDALRLWASGMLERKTVKYKFKLTAVALANKVARIVFVLMTRGGRYDDRPVTV

SEQ ID NO: 418474 - protein, 453 aa, unidentified
MFPKRDLRKTSELGVVHPGAAGIDVHSEFHFVAVPAGRDAEPVRRFGAFTEDLERLADWLQTCGVRSVAMESTGVYWIPLFELLERRGFQVILVDPRKLKSVPGRKSDVQDCQWLQQLHTFGLLAAAFRPDEPICVLRAYLRQRALLVEQGAQHIQHMQKSLTQMNLKLDRVLSDITGVTGMLIIDAILNGERNPLKLAALRNERCHHDEATIAKALVGTWRVEHLFTLKQARELYRTMQRLIVECDARIEEHLQSLADRPAPPTGPDLPPARKKPHRKGRVAFDAQPLLEHKAGVDLTRIDGIDTNTALTVLGEIGLDMSRWPTEKHFASWLALCPDNRESAGRRQSGRTRPSANRAATALRMAAQGLHRSQTALGAYLRRMKAALGAPKAITATARKLALMIYRALKHGLQYVDPGQDWYERQYQDRLLKSLTRKALKLGYQLTPNPPTPT

SEQ ID NO: 418475 - protein, 340 aa, unidentified
MPLCGGIDLHANNSVVVLLNEQDQVVYQKRLPNDLPTILEVLAPHHAEIKGLVVESTYNWYWLVDGLMEAGYRVHLANPAAMQQYSGLKYSDDHSDARWLAHMLRLGVLPEGYIYPKAARAVRDLLRKRAHWVRQHTANVLSVQNIMVRNTGARLSVKRIRELPKKELEGLLPEADQVLAITSSLAILDCLSQQIKALEKIVHQRLHHTPSYEQLLTVNGIGTILAQTITLETGDINRFPTVGNYASSCRCVDSNKISNGKRKGQGNVKNGNPYLGWAYMEAAQFALRFHPSAQRFYQRKLAKSNNNTTLARKAVAHKLSRACYYVMRDLVPFEATKAFG

SEQ ID NO: 418476 - protein, 338 aa, unidentified
MKLYGAIDLHSNNNMTVVTDEQDRVVYEKRLPNDLELIVKQLASYRDGLQGIVVESTYNWYWLVDGLMEEGHKVHLANTSAIQQYEGLKYTDDQDDARWLAHLLRLGVLPQGHIYPKQHRAVRDLLRKRGQMVRQRTMNLLSIQNLFSRNTGGSISANRVKRLHSQEVDSLFADADLALAIKANLAMLECADEQIERLENTVLERVKLKPEYKLLKTVPGIGEILALTIMLETGDITRFPSVGDYASYCRCVGSQKISNGKKKGSGNTKNGNKSLGWAYVEAANFAIRFNGKIKSFYQRKQSKTKRVVALKAVAHKLCRACYYIIRDQVAFDVSKAFV

SEQ ID NO: 418477 - protein, 339 aa, unidentified
MTVKTVGLDLAKDVFQVHGISENGRVIFNKAIKRAKLLAFFEALPPCRIGMEACGSSHHWGRQLRKLGHEVKLMPAGYVKPYVKRGKNDAVDAEAICEAVRRPTMRFVEIKTEEQQAILSIHRTRDLAVRQRTQMANMIRSLLREFGHILPIGIEAVTAFAKRHLGGDHPDMPEIANGLLGIQCYQFIGLNERIEGYSKMIEQHALVNADARRLMRMPGIGPITASAIVATIGDAKQFQTGRDLAAWLGLTPLNKSSGGKERLGKITKQGDRYIRKLLVVGMTSRAVMAKRSPEKVDLWTAKIIADKPFRLATTAMANKAARSIWAMLTKKQEYRQPAF

SEQ ID NO: 418478 - protein, 440 aa, unidentified
MDAYQKGFIKMSNNFYLSVGIDVGADFSFMSIALPNQTFVGKPFKITHENPASLEKAVLTIKEAEESNSLKARIFLESTGIYHYPLFCYLRDKGFSVSVINPIITKSSTNINIRKVHNDKFDSKKLALVALKPDLKTSVIPPDLVLDLRNLTREYYNLMDQRSAYVNKLQGELRVAFPQYIGIFSKLTVETSLALLEKYAIPAAFLAAKKKDIVGIISSTARFGMTYAEKQYHRIIAAAQAALVFGHALPSNEKLIKLYVSFIGKYNEEVGGVLAAMHELVDAHPNELFIKQIRLIETFKGAGFLSAATLMCEIGDFSVFKSPKQLFAYFGLDPAVKQSGKFTGTNVKMSKRGSPLARRVIHTMALISIGRTRKGTPNNSVLWDYYLSKCQSKPKMVALGAVMHKVCNIVFAILRDEKPFAVITPSQHKLGYFASRSSAA

SEQ ID NO: 418479 - protein, 319 aa, unidentified
MNKSTLFFGIDISKDCFDVYSDQMGYNSHSNTKDGFKIFLKVLGKTSHCVMEATGCYHHKLAMFLYEKGIAISVINPLIIKRFIQMKLRRVKTDKSDAFMIYNYAYEQSLEQWEPEEAYIVKAKELLSLIQTYLRQSTALKNKLHALENRGHSKGIMMTSIKRQLRQLKKEHELLEKELETLIKSNEPNLFSRLNTIPGIGKKTAVLMMVSTSNFNSFNSYKQVSSYLGLAPNERSSGSSIRGKSRISKTGDGLLRNHLFMCSFTASVHNPQCKALFDRIVAKGKSKKLALIAVCNKLIKQAFAIAKSGLPYDSNYAVK

SEQ ID NO: 418480 - protein, 342 aa, unidentified
MKITTVGIDLAKNVIQVHGINEQGKKVFNKQLQRKHVLTHFAQLPPCLIGMEACSSAHFWARKLQSQGHTVKLMAPHFVKPYVKTNKNDAADAEAICEAVTRPTMRFVPIKNGEQQAVLSLHRARQGFVKARTAQANQIRGLLMEYGITIPQGISHITKRIPELLEDGENELPGVFRQLLQRLGNHLKALDRQATELEEQIQTWHRESEASKTLARIPGIGPLTASALVASIGDASSFKNGRQLAAWLGLVPRQHSSGGKPRLQGISKRGDTYLRTLLIHGARSVIRVATGKTTPMHCWAANLVERRNKNVAAVALANKNARIVWALMTQNREYQSDFVQTV

SEQ ID NO: 418481 - protein, 339 aa, unidentified
MTEEKGFIWAGIDVSKRTFFAAIDIEIEAKKLPVAKLPAKEFKRSKDGVASFIKWADELLEDHEFAVVMEATGSYSLELISLLKNQRTDLRISMQNPRMVSDFIRSLNQPHKTDKTDAQAIARFGTERKPEEVSLPEPHWAELRELERLRSAMVRVRVELENRAESLFTAFARRTNQRTIGSLNMEISELEREIKHIVIEHEDIHSEVRILTSMPGVSFVSACAILAELGSLKQYDQKQISAVSGLAPRRMSSGSSLNKSFMGRNGSKRLRQILYLDSIYAVAKVPLLNSMYDRLIAKGKSKMTARCACMRKLLLILRAMVVNNKPYEENYSKTFPKSA

SEQ ID NO: 418482 - protein, 449 aa, unidentified
MSQASRLSRGDKRRNDRLTRFRGIVRRDHAVVAIDLASNKQVVAVVDHDSRIVARRTFHCAPPQLATAIEWSRTAAAAAGFAGIVIACEPTGHRWKTVRDLTAAVGVDMVCVQPIAVARARETEDFTHDKSDDKDALLIARLTTQLHLYLPEHADEQWSRLRHLGVRRSQQLTRRSAAQQQARDLLESSWPEALDCAGQPFKSVTWLAAMAVIGADPTPLTAQSSRDQAVAWLREQVRAELPRWGGRRVTTRILVALVDAAFATETTITGEAGALERARYALDDFGHARTACEQVEHLMIEVLTGLGLRALAESIPGVSVVSVAAILAETGDLTRFDSARAVVKHAGLCPRENSSGNYRGTTRISGRGRPLLRVAAWRAAFAALTHNEVYAARYRHLTSREANQLNPNQARVAIAAALLRQLFVVITTATPWNPDIAAGRTRPAERTAA

SEQ ID NO: 418483 - protein, 323 aa, unidentified
MSQPNLQCMGIDVAKLSLDIATTDTIEPFTVGNDEDGFAVITDKLKHTKINLILMEATGGLEAAIACKLQSEGYDVVVINPRQARDFARSMGYLAKTDKLDAAMLAQLALVIDRHPDRSRYIRHLPDEARAVLAAMVVRRRQLNHMLVAERNRLYPSHPQSRKSIDNIIDALQNELDRINEQMKQHMTAFFQEQARLIGSVKGVGDITVASLIAELPEQGKLNRREISALTGVAPLNRDSGKMRGKRTTFGGRAGVRATLNMAALVAPQFNPAIKLFYQRLLAAGKPKKLALVACMRKLITILNTMLRKGEEWNASFQSQVIS

SEQ ID NO: 418484 - protein, 355 aa, unidentified
MTTVPHDEVRVTVGVDTHEDVHVAVAVDQLGRWLAETWIATNTGGFARLVGWASEFGVIDRFGVEGTGSWGAGLARWLRAEGLVVIEVDRPKRKHRRHGKSDAIDAEAAARAVLSGEATAVPKTGDGPVEMIRVLRLTRRSAVKNRTMTANQINALVITAPDALSQDLRPMSTRRRVAVAAKFRTGDEPTTVLDATRYALRELARRYQHLTEQITRLDTQLDRLVAETAPELVAKVGVGTHTAAALLVTAGDNPERLVREGSFAHLTGTAPLDASSGKQQRHRLNRGGDRDANCALYQIALTRSSVDEDTKLYLKRRIAAGKTKKEAFRCLKRYIAREVHQILVRTPALQVAPDT

SEQ ID NO: 418485 - protein, 348 aa, unidentified
MAHFVGLDVSVKETSVCVVDDAGKVILEQKVPTEPSDIIALLTSLGVTYGRIGIEAGPLSQWLFNALTAAELPVICVETRHMKALLTAQQVNKTDRNDARGIAQMMRVGLFKPVHVKTLVAQEQRMLLTSRKLLQRKLLDLESDLRGTLRNFGLKVGTVSGSRYEARVRELVAGFPRLAAIAEPLLNVRRVMRQQFAVLHKMLLDTVRDDPVCRRLMTAPGVGAVVALTYRATVDQPQRFVHSRAVGAHVGLTPKRYQSGEVDYDGRVSKCGDALLHTMLYEAAHSLLIQSRKWSWLKAWGLRVAQRRGIRRAIVAVARRLAVVLHRMWVDGSEFRWSKDSAAAPAAA

SEQ ID NO: 418486 - protein, 409 aa, unidentified
MLVHAAPVTSSTVVVAVDVGKACVALSVTDAVRRRLLGPVEFAMTAPAMSAVVERIVKVLPDSVGLVKVGVEAAGHYHRPMLNASWPPGWEVLELNPAHVAEQRRAQGRRRFKTDAIDLDAITELVLAGRGIPVTARDEVIGALQAWSAYRTRRVLTRTATKNQLLGQLDRSFPGLTLALPDVLGTKVGRLVAAHFADPKRLAALGSVRFVRFADARGVQVRHPVAERLVIAARDALPTADAEVARRVLTADLALLADLDAQVQAAETAIADLLPVSAFATLLSVPGWGTVRVGNYSAAVGDPYRWPGPPQIYRASGLSPMQYESAGKRRDGAISREGSVSLRRALVGLGLGLWGSDPAAQTYAATLRARGKKGDIIVCAMAHRANKIAFAMTRDHSAYDPTRWTPKEG

SEQ ID NO: 418487 - protein, 353 aa, unidentified
MEQFIGCDAHKKFSVFVAVNEKGHAGEALRVAHDRQIYREFLARLPAHSAIAVEASGTYSWLIDEMERLGHRPRLCNPLEAKRRMGLTNKTDKLDARGLAILLRNGTLPEVWIPPSELRDQRELLRLRIFLVRLRTRVKNRIHGTLARFNVQIPGADLFGVAARRELGTRLPELPEHSREAVEQELATLDFLETQIESAEERLEAIMQVSVETDLLKTLPCVGPILSMVLMLEIGKVERFPTAAHLASYAGLVPRVHSSGGHTRMGQVCGNVNRNLKWAFVETGNLIVISQRRLAGTHVVRLYQRIKRAKNHQKAVVAVARHLAEAAWWVLTKQEVYREPRGPRQQALSSTHG

SEQ ID NO: 418488 - protein, 429 aa, unidentified
MKIIYPRVCGIDVHKQFIVAVICISESVEPIYLKKRFSTFHNDLIRFRDWLIQNDCQNVCMESTGKYYIPVYNVLESHISNIVVANPKWVCAVKGEKDDDKDAKWIADLFKFGIVRSSFIPQKDFRILRELTRYKYKLVNMRSSEKNRYQNALTSGNCKLDMVFTDVFGKSASNIIDLILSDNPYTDEDILSKVHKNCKASPDMILNSINGTDLTPVQKSRIELVNDHIKQLSSNIQRLDKLIDLMIEPYEDYISFLCQIPGVSRNSAIIILSEIGVDMNQFTSTRRLTSWAGLTPSSNQSAGKKKSVRISRAGVYLKPCLVEVAHAAVKDKNHPYYANKFNKISKRRGKKRAYIAIARKILVAAYHMLLTGEIWNPADLAEVETPVEQRIKYVKNNLKSDIKQLLDIGLTVEELTLMIQQNANIIATQ

SEQ ID NO: 418489 - protein, 347 aa, unidentified
MKVTTVGLDLAKTLFQVHGVDSQGHVVVRKQLRRADVLAFFAKLEPCVVGMEACGSSHYWGRELAKLGHTVRLIAPQFVRPYVKSNKTDAADAEAICEAVQRPHMRFVPVKTPVQQTILSLHRARAGLVKSRTALANQIRGLLGEFGIALPQGIRLLGQRAMEALSTRDREHSEPFRALIQMLVEHLRELGNKVAELEGRIRAIHRTDAPGRLLESIPGIGPLTASALAASIGDARAFRSGRELAAWLGLVPRQHSSGGTPRLLGISKRGDTALRTLLIHGARAVIRMAAVKPEMADSWLMKLCQRRHKNIAAVALAAKNARTAWAMLIRNQAYQAGHVPARSSVTD

SEQ ID NO: 418490 - protein, 406 aa, unidentified
MADIFALDVSMGKSYCVWYRGKHCLKEFSLVHTKAEFNALRDMINKAQKPIIYFEATGIYSRVIEHFFETNGLRFCRLNPLELHLKSESLRRVKTDQKDAHRITLTVQENTFRLTVPWKKDYLQLHELSRFYNQLNADWNYRLNHLHTALEQVFPELKQLFVNKTSKLALNIVELFPHPALVRPYSRVKLKNILMASTDKRISKMKAYKYADRLIDLAQQSYPAVSSDAIQVDEVRYYTRQLIALARKKEEVIKRIESIAQLLPKYGLYYSFPGIGKQTAAQLVGELGDISRFDNSNQLNAYVGIDIRRHHSGTYAGQDHINKRGNPIARKLLYFTIGNMIRQQHVNPNHIVEYYYRLKEKRPYPKLNKVAMVACMNKTLKCLLSMIKHHEKYHYRYTDSMVPVRA

SEQ ID NO: 418491 - protein, 334 aa, unidentified
MEKITTVGIDLAKSVFSLHGVDGAGRVVLRRTVRRDQLLGVVASLSPCLIGMEACSGAHEWGRRFQEHGHTVRLMAPKFVAPYRKSGKNDGNDAEAICEAVTRPNMRFVPVKSIEQQALLALHRVRQGFVVERTATINRLRGLMSEFGVVLPLRSVTVRRQAAAAAEGLPDLARRVIGDLLEQLRVLDERIGGYDREIEAQARLCEPAQRLMKIRGIGPTTALAIVASVGNAREFKNGRQFAAWIGLTPSQYSTGGKPRLGHISKRGDSYLRNLLVQGARSVLNSAGMHQDRMSRWILELQPRRGYYRTLVAIANKNARIAWALLAKNETLRSA

SEQ ID NO: 418492 - protein, 359 aa, unidentified
MRIIGCDLHSRQQTLAMLDTTTGEVEKTTLKHEENLVREFYSNLPRPVRVGIEATGSMQWFVNLMEELGIECLVGHPAEIRAAEPRKQKHDRRDADLLLSLLVEERFPTIWLPGKELLDVRALLRHRHQWVGLRVKIQNALQAIALANGLRRGPSLWTQAGQRAIAALPLSPHAAYRRNELQAMYVKFEAEIEKLNQRVEQQAGERCGARLLMTHPGVGPITALATDVFLGDPTRFAGSKELASYVGMIPGEYSSGKRQRLGGLTKQGNPLLRFLWGEAAIHAVRRDPELKHFYHRKLIQKGLGKARAAVARKLGIRMWIMLRDRIEYHEFCRRGQKQQTSGDACAGMPAVRYGAKVTG

SEQ ID NO: 418493 - protein, 343 aa, unidentified
MQIRTIGVDLAKNVFQVHGVDSAGKVVITRQLRRKQVIEFFSKIPPCLVGMEACGTAHHWAREVSKLGHTVRLMPPSYVKGYVKRSKNDAADAAAICEAVTRPSMRFVAVKSTDQQASLMLHRTRDLLIRQRTQLINALRAHLAEFGLVAETGREGVAQLAALITDESDREALPFAMKQALQAIVDQLAALELQVGTLDRAIHAHHRANDMSSRLETVPGIGVIGATAIASAVTDPSNFKSGRDFAAWIGLVPRQHSTGGKERLGGISKQGDRYLRRLLVVGATAVVRHARQHPQKHPWVMRLLAKKPAKLVAVAVANKMARIAWAIMAKGGYYRTPELAAAA

SEQ ID NO: 418494 - protein, 342 aa, unidentified
MSVYVGIDVHRKRSQVAVIDQAGQVLANRNVPNGVEPILKVIGGLPPGTAAAFEACYGTSWLVELLEDYGFTPHLVHPSRCKAIASARLKNDKVDAAILAQLLRADLLPEAWIAPPPVRQLRALLRHRVALVRLRTRLRNRIHAIVADYGHDRPAGGYWTGPGRAWLAALPLPAVSRELIGDDLGLIDALQERIDRLDGEICQRARSDPRVKILTQLPGVGPFTALMILAEVGDIRRFASARQLASWAGLTPTVRGSDRVAHYGHISKEGSAWLRWVLCEAAQTAKRSPQFAATFQRIAQRRGKKIATTAIARKLATRAWHLLADTGPGAAPQPAAPQTAAR

SEQ ID NO: 418495 - protein, 355 aa, unidentified
MTQINVANRYSTFIGIDVDKHSYSFTVKERNTMNRSKKIPADPKQLYNYIKNSFDHKKVLCAYEAGGSGFGLYDYLKKKRISCLVIPPSAIPVARNEKVKNNRIDSQRIADYLKADNKIKPIRVPEGSYRELRHLTKIRENYVQSRTIAKQRIKALLLSANLYSVYKDADNNWSYSYIENLKQISCSEAVRLRLNMLLLDLEYARNQTLAIHRQLKKFCQDQPEIDKYRSYLQSIPGIGFISAVSLLARIGDPSLLKNERELGAFLGLVPREHSTGDAVNQGSITHLGNQRLRGLLIEAAWTAIRIDTQLGKFFERIKSRHHPKIASRKAIVAVARKLTLIIYRILKEQRNYVRH

SEQ ID NO: 418496 - protein, 354 aa, unidentified
MSTKKVKIDELMSIGVDIGKDVFHLVGFNPAGERVLRKKIKRHQLEQTFEDFPRCIVGMEACLSAHFVSRFLRKMGFEPRIIPAIYVKPFNKGQKNDYNDAEAIAEAALRPNLKTVSEKTQDQLDLQALHRVRARLVSRRTATVNQIRAFLIEQGITVRRGLSALRNSLLIILKNRVDEISPRMHKLILNLHQDWIGLDERVKMTSSEIEAVSKAEVGCQHLMTIPGIGPLISTAMVAAIGKGEAFDRGRDFAAWLGLVPRQHSTGGRTILGRITKRGSRYLRMLFVQAAQVIMMRPKNWPKFSFGAWLEAASTRMQHNKLGVALANKLARIAWSVLNSERDFDWKENEIAAAI

SEQ ID NO: 418497 - protein, 427 aa, unidentified
MQYALPQVLPDVPAGGVCAGIDWATADHAVCVVDMAGRVIDRFSAAHDKTGIAAIITRLRKNKVTEVAIERGDGPLVDALLAAGITVVVITSRQVKNLRSRFGAAGAKDDRFDAFVLADTLRTDRARLRPLIPDTPATISLRMAVRARRHLVAHRVAAGNQLRAHLAVAFPAGLRLFHDLDSPISLAFLARFGSQDAAAELDEQSIGAWLATIAVRGRPAPASELHARLHAAPPGATGADDAAQAGVTAALTATLTALSAQIKALETQIAGQLAAHPDGHIFTSLPRPGTVRAARLLAEIGDCRSRFPDPESLAGLAGVAPVTRRSGTRIAHGFRWAVNRQLRDAICDFAADSRHASPWAAAIYDDARARGKDHPHAVRITARAWSYVIWRCWRDGVAYDPAKHNALQAILARQGAQAAGPGPQEDR

SEQ ID NO: 418498 - protein, 376 aa, unidentified
MSQDSTLYVGLDVHKDSITVAYAMGLDEVELFGKIGTTHMEVDRLCKRLQSKARHVHVVYEAGPCGYGLNRRLVEKGFDCMVCAPSLIPRKPGDRVKTDRRDACKLVRSLRAGDLSAVHVPTVEDEAFRDLARAWSSGRDDLKQARQRLKSFLLSHGVRYCGLANWGPAHRRWLSTLSFDSAWQQLAFNEHRRTIEDRLAQCGRLEAALHEAVVSWRFYPVVLALQAMRGIQFTSAVGLVSELGDLSRFEHPRQLMAWLGVTPSEHSSGSKRRQGSITKAGNSYARKLLVESAWSYQHPARVSKDIQSRQEGIPKPIIDRAWDAQLRLCGRYRRLVARGKSRQVAIIAVARELAAFIWDIGRMGMTLAVPQSEQPA

SEQ ID NO: 418499 - protein, 353 aa, unidentified
MLIIGCDFHPAFQQVAIFDKETGEIVVRRLAHTEEALAFYRSVAGGALIGLESTGYSGWFERAVEKMGHQLWVGDATQIRASMTRKQKTDKRDAEHIVKLLLEDRFPKIWVPTEAERDTRQLLLHRDKLVRMRTLIKNQLQYLAMNQGLQLKWKLWTAAGQRDFTELEMNPHAADRRASLLRLLEQLEPEIQQLDRAVEQEAERRPEAVRLMSHPGVGPVTSLAFVLTLGPPERFPGARQVASYFGLIPSERSSGGKQRLGHISKQGNAFMRFLLVEAGHTACRQDPELKRFYGHCKHTHQHAGVAKVAVARKLAVRLYWMLRDRLDYPALLRRRSHAGQPESFRGRKFRPTA

SEQ ID NO: 418500 - protein, 388 aa, unidentified
MEAQIVDTMPPVAADHDPVRCLLAIELSKKSWIVAITTALSDKISRYTLDGCDWKGLLELMERIRTRVAREVGRPVEMISCYEAGYDGFWLHRLLEHHGVRSHVIDPASVQVDRRARRAKTDHIDAKRLLRSLMAYLRGEPKVWSVLRVPSVAEEDDRRLHRERDRLIAERGQHVNRIKGLCAIHGIYDYEPMRRDRMLRLEQLHTGDGRELPPRLKAEIARELQRLELILGMLKEIEAERDAIALTEKVSAHTNAKKIQNLVKLKAIGAEIATVLTGEVFYRPFNNRLQVASYVGLTPSPFQSGSKCRDQGISKAGNPKARSTMIELAWLWLRHQPDSPLSIWFRERVGTRKGRIRRITIVAVARKLLIALWRYLETGVVPTGAVLN

SEQ ID NO: 418501 - protein, 377 aa, unidentified
MGTTRQALINDTSVVLMLYMALELSASKWKVALADGQRAASQHTLEAGDVGGLLKLIEFTLKRCGLQGRLKVKSCYEAGRDGFWLHRWLLEQGIENVVVDSSSIEVNRRARRAKSDGLDAVKLYEMLVRHVGGDKRMWRVVRVPSVQQEDERRVHRELERLKRERTAHVNRMRSLAVLHNVRLQRVGGRGWSERLEQLKGQLPGALWAEIERESVREKLVCEQIVALEQERKEQLQAMLEQGGPLVALLKLRAIGLQTAWVLVRELFGWRHFNNRRELAACVGLNPSPYDSGASQREQGISKAGNRRVRALVVEIGWYWLRYQPHSALSEWFNRRFGAGGKRMRRIGVVALARRLLIALWRYVEHGIVPAGAQLKKA

SEQ ID NO: 418502 - protein, 404 aa, unidentified
MEWHRKQLSTKMKEVMLMKYVGIDIAKENHYAAIVSADGEVLKKPFRFKNTADGFALLKDAMSVYDKAEILIGMESTAHYGLNLLSWLFGQGYQVCVINPIQTAALRKTEIRKTKTDKTDSLLVAKSLMVNKHRLYTAKDSTMTELKTLCRFYRNVIQSKSRLKTQLVAYVDVLFPEFATFFAGGVHLKTSYALLKLHSLPNDISALHLTTLTNLLKKASKGRFSKPEAVALKALAKSSVGVKLPSMCIQISQTIEHIELLERQLDELKSRIESIMLKVDSPILTVPGIGYLIGGAILGEIGDISRFSSSAKLLAYAGLDPVVSQSGKFNAANTRMSKRGSSLLRYALMEAAWELTSHSSTFAHYYAKKRAQGLSHFAAIGHSAHKLVRVLFKILTTNTPFNLA

SEQ ID NO: 418503 - protein, 346 aa, unidentified
MTVYIGVDFHPHQQTVCYCDATNGIIQWKTMQRDKRAELREFYRQFEGEVIIGLDAGGPSQWFEELIEELSYKLLYGDSSEIRKRARSRHKNDKRDAELLLDLLVRQEFPSLWRRSAENEQVLCQIRFRDRLVRQRTRVCNQLQALGHRAGLPRQRMQTSIARKRLCEVEMYEPQSIQRKHWFEILDDLTGRIAEVERWLSRKVVECPQARLLITQPGVGVLTALSIAHTLGDVSRFSGSRKVVAYVGLDPLEDSSGDRKRFGRISKAGSRMLRFLLGQAGQASLKRDSEMKEFYQQLSQRRGKSSAKVAVARKVLVRSFIMMRDRIDYEEFLRRRRRSQFVRGAQ

SEQ ID NO: 418504 - protein, 410 aa, unidentified
MEVLHPRCCGLDVHKDTVVACVRLVIDGKTVKEVRTFSTTTADLMALSQWLAENKCTHIAMESTGVYWKPVWHILADGQFELVLANAAHIKGVPGRKSDVKDADWVSDLLAHGLIRASFVPDSPTQEMRTLIRTRKQLSREQARHILRVQKTLEDANIKLDSVISDLMGVSGRKMIEALIAGQRDPVKLARLADPRVKASQETLRQALRGRVTKQHRFLLRLHLDQIDGIDAAIAKIDREVEAAIAPFRTAVEQISSVPGVKNLAALQIISEIGTDMKRFPSDANLVSWACICPRSDESAGKRRSTRIRKGSPWLKTALVQSAHSAVRMKGTYFHALFHRIRSRRGVKKAIVAVAASILTAIYHMLKDGTMFHDLGPDHFNRRTKEQQKDRLVKRLAELGYAVELAPLPN

SEQ ID NO: 418505 - protein, 308 aa, unidentified
MLADELDYVVGVDTHLDEHVLAVVAAPSGAVVARRAVRASGPGYAAALRFAREAANGARVWAIEGTGSYGAGLARYLAGRGETVLEISRTPRAERRLRGKDDSLDAARTARAALASETLAVPRSGERREALRLLLVARRSAVDVRREALGQLRGVIVTAPDQLRQELRGLPIGRLLERCSRLRRSSSASADELATRLVLRSLARRIDAATREAAELERELLGHVRALAPRLLDEPGVGPIVAAQLIVVWSHHGRLRSEAAFARLAGVAPVPASSGQTIRHRLSRGGPTTQPSAAHRHPPPTPARPRNT

SEQ ID NO: 418506 - protein, 322 aa, unidentified
MTPPAELIHVGIDVSKAKLDVCLLPSGHAAVFDNDSAGIAQLVDLLRSQQPQPIARCLLEATGRYGRRCAADLMEAGFSVAVVNPRQARDFARCLGRLAKTDTIDARTLAEFAQLGLMRLSEKTPENRVVLDDLITRRRQLTQMLAAEKTRREGLEYKLALASVDKVVRLLAQQREDLDRAIAKLIESDDDWTNRRELLASVPGIGNVTASQLVVDLPELGKLNRQQIAALVGVAPLNRDSGTMRGRRSIFGGRADVRTGLYMATVTAMRCNPIIRAFAQRLIVAGKAFKVAMIACMRKLVTILNVMVKRNEHWRAPVLQNP

SEQ ID NO: 418507 - protein, 459 aa, unidentified
MNSRRRANNKREEGVPLPVIQPKVAGIDVGSREHWVCGPARRDGEPNVRVFGTTTDQLNALTDWLVEQGVESAAMESTSVYWIPLYELLESRKIQVVLVNARQLHHVPGRKTDFSDCQWLQLLHSCGLLRGSFRPGDAIVRLRALQRQLGNLVAERTRCVQWMQKALDQMNVQLHRAVSDLTGTTGMAIVRAIVAGERNPVTLAVHRDRRCHKSVDEIARYLTGNWREEHLFNLACALKLYDAVEQMIASYDARILQEMEALQAPQRRNQPVPRHPNPAKESALKSRGEQEARTQLWRFAGVDLTRIDGISATTAQIVLTEVGVNLSAFPSENHFVSWLRLCPRTPISGGKPIKKRRNAFGASRITASLRMAAVAMQRSKTALGAAFRRIARHKGAAVAVFAIARKLAQLIYRLLRFGQDYIDIGAAAYEERFRVRRLSSMAQAAKQLGYALVLAPATA

SEQ ID NO: 418508 - protein, 401 aa, unidentified
MNPVIGLDVSKGQSQGQVFLDKGQPYGKSFSFLHTQEGLHYFLNLINDVTKLTGHSPTIILESTGHYQAAVVQFLEEHSIIFIVVNPLISNQAKKSSSLRKVKTDAVDAYQLCELYYKEEFEAYKQRGVHFLNLRHLTRQFESLTGMYVQAKLQFHAVLDQVFPEYNGVFGDLFSRISLLLLREFPTAESILAAGENTIWERVACICTSRSERWAKEKAELIMAAATRNPFQKTAYPSHLISLELYISLILQHQEHLSNLQDQIDALAEEVEEYEIIQSIPGIGKKIAATILSEIGEIDRFTHAKKLVAYAGVDPSVYSSGKFTATANRITKRGSKRLRHALYLAVLCGLRRSCNKKLKEFYDKKREEGKPYRVAVIACVNKLLHWIFAVLTSKQSFLDLA

SEQ ID NO: 418509 - protein, 461 aa, unidentified
MSKKNVPAEQKQSGGKKVDWRALEVMHPDAAGIDVGGSEHWVAISPERDPEPVRRFGCFTADLHEMARWLLEKGVRSVAMQSTGVYWMPVFEILEEHGLNVILVNARDTKNMPGRKSDIQECQCLLKLHAFGLMNNSFQPTDKIRTARTLWRQRGNLVAEASSTIQRMQKTLIEMNIQLSSVLSDLSGVSGMAIVGAILKGERDPWKLAALADRGVKATAREIALSLEGNWRKELLFVLGQEVDLYRVYQKKIADCDRQLRKHLESFGSKVDVKAQPIGPKPKGKGSSKNAPQFDLRTELYRITGIDWTQVNGLDVITAQTVMAEAGVDLSEFPTERQFSSWLGLCPTNERSGGKILNRRTRKVVNRATVAFRNAASTLLRSQSYLGAQYRRLRTRLGAPKAITAMARKLACLYYRLIKHGHQYVDKGNEYYEARYREQQIRSLTKKAQKLGIKLVMPDAA

SEQ ID NO: 418510 - protein, 339 aa, unidentified
MQVTTIGLDLAKNVFQVHGIAEDDTVVFNRPLRRAQVLPFFAKLEPCLIGMESCSTAHHWARELSALGHDVRLIPPMYVKPYVKRGKSDAIDAAAICEAVTRPTMRFVAIKTVEQQSLLSLHRARNLLVRQRTQLINGLRGLVAEFGIYIARGLARVIGFAEDITLGEVLDLPDIANEVIRNLSEQLMALHKRIRWYEERLKQVAKEDQRVRLLRTIPGVGAVTASAIIASIGDGHQFKNGREFAAWLGLTPANKSTGGKEKPGRITKMGDQYIRQLLVVGMTSLVRQTRSHPERASKWLTSLLERIPARVATVAMANKTARIVWAVLTRNEPYTPHTT

SEQ ID NO: 418511 - protein, 400 aa, unidentified
MESLLVGIDVGCRRHRVAIGMPDGTLIDQFDLDHQPASFNKFFLRVEKQATKFGFPVSVGMEGYGGWARPLDEMVLGKGWKLLNVNNLKLARFKEIFPSPAKTDAIDARKVVELMRLRPLLPQAKDILNEVIPSPQVNHDMKLLTRRRRQLVNERMMVTNRLHSDLQAIAPGLLEITGNVDNLWFLHLLTAKDSFDQLSRMHQSSIMKIKGVGKKYAKLIRDWQKTALLPSDVLIVGDMVIEDAGRVLALTEKIKHIEARLKDLIPQSPLATSIESITGFGLVCASELAGEIGTMERFSSESALARYIGMAPLDNSSGVYTGTKGGKQVNRRAKAAMMTAVARHYWHTPQSKEYYEKKRIEGKRHNQAVRSLGRHITRVIWSLVKKNRLYEHKEETPQIA

SEQ ID NO: 418512 - protein, 345 aa, unidentified
MENMYYIGLDVHKKTISYCVKDGSGRIYAEAEIPATRLDLDRWMKTLPQPWTAAMEATIFTAWIYDHLKPHAAAVKVAHPLMLRAIAAAKKKNDRIDAHKIADCLRCDFLPECYMASTEIRERRRTLRYRNLLVRQAVQMKNKIAVLLMEAGVSYNKQKLHKVGYFRELLATNQDIDEGLKPLLRLCRETVVRLGKTESALVRSLQRDSLLMERVERLMTIPAVGPITALTWALEVGDVQRFSSIKKAISYCGLCGAENSSANIIKRTPLSKQRNKHLQTILIEAAKMAPRNSPDLAMIYDREKQRGNANRATLAVARKLVAYLVAVDRRQKEFLTVERENRTAA

SEQ ID NO: 418513 - protein, 310 aa, unidentified
MSISPVCVGIDVSKAHLDIFDPLEGSSRIDNTTSAVTVFAATQLVRGRFVVFEATGGYDRALRRGLEAAGVPHARVNPEQARDFARALGRRAKTDAIDARMLADFGRALTPNPRPPSDLARESLALRHKRRDQLVAMRQQEVVRRSECPDAAMADSLARHIAWLDREIEALNADIRAAIAADDALRAADRRLRSVPGVGPVAAATMLALMPELGQRSPKAIAALVGLAPFNNDSGKRHGQRMIRGGRARVRRALYMAALSAANSKTRLGDFARKLRAAGKPPKLVLIALARKIIVILNAVCRDNASFARQ

SEQ ID NO: 418514 - protein, 418 aa, unidentified
MNKHNNSGKKSELTSKRAKPRGPMRRDTKEVLTELVGKLKEKLDPKKPAATSAGEKHKRGELRPNLDRLTVGVDLGDRWSNYCILGLEGETLAEGQLRTTQEDLAEFFQALNAARVVFEVGTHSPWVQEVIGGCGHEVLVANPRMMDGSKRRKRKNDRIDANKLARLGRVDPQSLHPIQHRSREVRQDLVILRARDALVAARTELINATRGLVKSMGTRLPKCSSPSFAEKVEGTVPAELRDALLPLMRMATALSDCIQEYDEKIEKLGREKYGHTELLRQVKGVGPITALAYVLTLENPDRFVKSRDVGPYLGLVPKQEDSGESQPQLGISKTGDTMLRKLLVGSAHYILGPFGPDTDLRRYGLRLCERGGKNAKKRAAVAVARKLAVLLHCLWVSGEVYEPLRQGTSATIAPAVAA

SEQ ID NO: 418515 - protein, 339 aa, unidentified
MNRIVVGVDIAKRVFQLHWVEPQTGEIVALQLKRERFLEHFANRSNCLIGMEACGGSQHWARSLQQLGHEVKLLSARMVKPFVGGNKNDAADARGIWTAVQQPGIKAVAVKSEEQQAVLALHRMREQLVKFRTAQINGLRGLLTEYGEVMPQGRPGIRRDIPGVLGRLSNRLAPIVIETLREQYARLGELDEQINQIERRLRQWQREDSASQRIAAIPGVGLLSATAAVATMGDAKAFKSGREFAAWLGLVPRQCGTGGRVRLLGISKRGDRYLRTLLIHGARAVLTRSKSLPEWLTELVKRRPTNVVVVALANKMARTIWALTAHERAYQSGYVSRPT

SEQ ID NO: 418516 - protein, 362 aa, unidentified
MGYFCGLDVSIDTTAVCVVDDKGTVVLQTSVATDPETLWRTLKPYLPKLKRVGHEAGALSPWLQPELVARGLPAVCLETHHVRSALKAQRNKTDATDALGLAHIVRTGWYKTAYIKSEACYRVRLLLIQRRNLKRKFLDLENTIRHSLKAFGIRLGDTSRGRFDAAVREAVKADEMTSELMDSMLTARAALWKEYTRLHTLVVRFTAQQEVCRRFMEIPGVGPVAALTVLTAIDDPERFRRSRDVAAYFGLTSKRWQSGTSIDVHGRISKAGDPDARRALYEAANVLLTRYRGQDKVKTWGQAIAKRRCHQKACVAVARKLAVIMHALWCDGTFYNGNPAEPASERAEKALAKRRKHLGAHA

SEQ ID NO: 418517 - protein, 417 aa, unidentified
MQVVRPICCGADIHKDIIVATIATSNQNGIAEYIQRKFCTQNYDLINLKSWLKEHNCFEFAMESTGKYWIPIFNVLEDEIKVYVVHPKYTKSIKGKKTDKKDSKWIADLFRHGILTFSFIPPREIRELREISRYRIKLVAMRTSERNRYQNAMTVSNIGLASILSDPFGKSSKAIMEEVLKSSSLSEGKIRSLLNKSAKKKAKEVFASLEGSRIEPDQRLKMTVSSEHMNQIDSHIDTLELDLVQRCLPYANLINLLIDIPGISYISAIAVIAEIGIDMSVFKSSKQLTCWAGLAPANNESANKKKSVRISRAGTYLKPLLIQCALSAIKSTSNPYYRIKYNTIKKRRGHKKAIVAIARMILVNIYAILSTGEVYNPCDFKEVTSPKPAKKEMTIENALFFLQAQGIDTSALVLNVS

SEQ ID NO: 418518 - protein, 336 aa, unidentified
MYSGIDLHSNNSVVAIIDDADRVAAQKRLPNDVTKIVGFLARWQDELAGVVVESTYNWYWLVDGLQDAGFQVHLANTAAIKQYEGLKHSGDETDAQHLAHLLRLGILPTGTILPREHRAVRDLARKRMQLVQSCTAHVLAVENIMARQLGGRMTSNQIKRLTDDTIDSLPLAADVGLAIKANVAVIATLQSQIEVLVKRLQERVKPRPQYGLLTSVPGIGQTLATVILLETGPIDRFADVGNFASYARCVDSVHTSNRKKKGEGNVKNGNKYLAWAFVEAANFARRFCPEAKRFHERKKARTNNIVATKALAHKLARASYHILKEGKPFDVTRCFA

SEQ ID NO: 418519 - protein, 399 aa, unidentified
MTTARTAQSSTEAQVLYMALELGWDDWTVGFTIGLGQAPRQVSVRARDLAGLLAQIAQAKRRFGLPAEALVHSVYEAGRDGFWLHRFLQAHGVHNIVVDAASIEVNRRYRRSKTDKLDVQKLLTMLVRFVLGETRLWKVVRVPSTEDEGLRQPQRELLALKKERTQHINRMKGLLAGLGLGAVIAPTFPERLPALRQWDGHPVPALLQERLLREFARWSLVQRQIQDLENAEARMVRNDQQRHVEQVRTLISIRGIGAQSAWLLVHEVFGWREIGNRRELAALAGLTPTPYHSGQSQREQGISKAGSKRLRWLMVALAWGWLHWQPESALSRWYQARFGHGSARLRKLGIVALARKLLIACWRLVAHGEVPPGAVVADWDRKVTGRCAKRRPVGTAVAV

SEQ ID NO: 418520 - protein, 399 aa, unidentified
MLAVGIDISKSKSVAAILNQDGSMHTSPFEFHHTQPELDAFIKYILNSNQSATILMENTGHYHYPVLKAFREAGLPVCMVNAYQIKKFGDMDLRKAKTDKKDAVRIARYALEKSYSLVPYTSMEQKYEDLKFLARQYNQRMLTLKTNKVFLLNLLDETMPGITNILPLTTRTPETSLSVLFINRFKSYDHIKKMGKSRFLDAFEKIARKSRNRQTKTYGLAIYEAALRNITTRGENEYTLAAQDQCLELVCESQKAADSIILKMQTLAETLPEYAVLRSMAGVGDRLGPLILAEIGDIRRFHSGKALNAYAGNDAPPYQSGTFESHNRHISKRGNAALRKYCFEVMQALKLTQPQDDPVYLFLLKKEQEGKPYNVAKMAGVNKFLRIYYARAMETLKQQ

SEQ ID NO: 418521 - protein, 323 aa, unidentified
MVKNNNFFGIDISKDVFDVVKNGKKHNQFTNDLAGFKQFLNLLDANSHCIMEATGVYHQALAIYLYQNKIAVSVVNPLVIKRFMQMHLRTIKTDKADAKQISLYGMQTQLVPWKPAESYITESKDIFELISLYIKQRTMLKNRLHSFNSKNTQKMVKTELSKSIRHLDKAIDKLETKLEMIIKTYHQKMYSNLKSIPGLGPKTVLYMILITEGFVKFESAKQIISYSGLSPTQRTSGSSIRGKSRISKQGNSKLRNLLFMCSFNACKVNKPCKALYERIVAKGKSKKLALIAVENKLIKQAYSIAKSGLKYDENFVSVKPSYS

SEQ ID NO: 418522 - protein, 343 aa, unidentified
MKLTYPICCGVDVHKTFLVATIITSEYVMPHYHQKRFSTFYNGLVAFKKWLLEYDCKDVCMESTGKYWVPIWNVLEDSCHVVIANPKWVSAVKGNKDDKKDSKWIGDLFRMDLVPSSYIPSKDIRILREFTRYRSKLVSMRSSEKNRFQNAFTVCNLTLDAVVSDMFGKSATDIENYLLDTDTVAPEHCVSLLRCSLKKKASDVVEAVSGFNMTPEQKERVRIVQEHFADIDHRIAQLDEIIGDLVAEYEGQISLLCTIPGIDRRTAITIVSEIGTDMSQFGSSKRLCNWAGLAPASNQSAGKKKSVRISRAGVYLKPALVEAAHAAVKSTENSLITASSSSV

SEQ ID NO: 418523 - protein, 353 aa, unidentified
MKNHKYVALDVHKASVTMGVRDGAGKCVGHAVVQTKAETIKELIAGLSGTIHVTFEEGTQSAWLYDLLKGRVAECVVCDPRRNKLLESGSKSDHIDVDKLSELLYLGGLRSVYHGDHGTRALKELVHNYESLVKDQTRVKNRLKAIFRGRAISYEGAELYELKERQQWVSKLNERGVRQRTEQLYEQLAALEPLVVAARQKMLRESRQQKASKNLQYISTLGEISVAELIGTVDTPYRFRSKRQFWTYCGLAVVRHTSSDYRFEQGELQRRRKPGPTRGLNQNYNRRLKKIFKTAALTGSHTGPFKPYYERLVQRGLSAELAQVTLARKIAAVTLNLWKKGERFDPKKLQKLT

SEQ ID NO: 418524 - protein, 418 aa, unidentified
MATVDIVYPICCGMDIHKNFLVACIATTDERSNTTHQIRRFSTFTGDLRKLADWLATNACKDVCMESTGKYWIPVFNVLEKTCNVFLTHPKYVKAIKGKKTDKRDAKWISELFKCDLIRASFIPPADIRQLRDLCRYYVKLTYMNTSEKNRAQNCLTMCNLKLDAVFSDVFGASATRVREAFFEHNSTDFDVAPLLHKGCKASVEEVKAALEGELSGVQVEKLKFIQQHQECIHTLQDALESLILRLAAKYRPQIDLLLTVPGISSPLTAIRIMAEIGVDMSVFETAKRLCSWAGLTPQNNESAGKKKTTRIGRAGVYLKPLLVQIALAVATSNKHPELRDKYQALKKRRGGKKAVIAISRKLLTAIWHILSKNEPYNAELYRKADAPPVNRVLNHEQAFALLRSRGYLICDAEGVVT

SEQ ID NO: 418525 - protein, 343 aa, unidentified
MDYFAGLDVSVKDTSVCIVDDTGKITREVRVASEPDALLAVLTNRSYRFKRIGLEAGPLSQWLFSALAEAGLSVICVETRHMRAVLKAQINKTDRNDARGIAQMMRVGLYRPVHVKTLRSQKLRMLLTHRKLLQSKAIAVENDLRATLRNFGLKVGMVGTARFEARIKELVENVADLVVLVEPLLVVRRVVREQIGILHRRLLAIVRDDEVCRRLMTVPGVGPVVALTYRATVDVPARFRKSKSVGAVFGLTCSRDQSGERDRPGAISRCGDEMMRAMLYEAAQAMLLRSAKWSWLKAWAMQIARRRGMKRAIVALARRLAVIMHRIWTDGTEFRWTREAAAA

SEQ ID NO: 418526 - protein, 346 aa, unidentified
MKRTTKYVAFDVHQATTVASVREESGRVIARSVLPTDRGALTEFVRGMRGARHVTFEEGTQAQWLYELLAPLVDRVIVCDRRGAPRQGNKGDQVDADQLSELLRRGALRAVYHGSADRATLKELTRTYRNLVEDATRVMLRLKALFRARGIPTAGTAVYHPRHRTRWVAQLLEDGARFRAEALYAELDVLRTLRPKAKAVMVTEARRDPAWRVLRTIPFLGPVRVALLLATMQTPWRFRTKRHLWAYAGLAVVTRSSADYTLVAGAPMRRRRAPLTRGLNRNHNRVLKDVFKGAGPLQDFYHGVMARGTREELARLTLTRKLAALTLRLWKKGERYDPTQLTTPAR

SEQ ID NO: 418527 - protein, 360 aa, unidentified
MAKAKTLVGLDVHATRIVAAVLDAETGQLQTFGMSGESTTAAAFCAGLPKPVRVAYEAGPTGYGLARELAKRGIECIVAAPSKIPRASGDRVKTDRRDAEHLVRLLLAGKLHPVRVPGDEEEALRDLVRAREAVRVDLMRSRHRLSKLLLRHGIRFDDGQAWTDRHRDWLASVTLDWPAAQATLLDAQGAIDALAHRRGVLEREIVAMLPACPWTVQVGRLRCLRGVDTLTAVGLCSEIGDFERFARAEQLMSYIGLVPSESTTGQQRRLGSITKTGSGHARRLLVEAAWHYRKRPTIGKALTDRQHDQPPEAIAVAWSAQRRLHRTWTRLEKRAKRRTIIAVAAARELAGFAWAITQIE

SEQ ID NO: 418528 - protein, 343 aa, unidentified
MKLIRVGVDLAKNVFQVHGVERNEKAVWRRKLRRESWLKVLLETVEPGCEIGMESCGGAHHWARKLQAHGFRVRLIAPQFVKAYVKSNKNDANDAEAICEAMSRPHMRFVPVKTVEQQDIQAVHRVRAELTKQRTAKANQIRGLVAEYGLVAPKELVHLRRALPCWLEDAENGLSDRFRRLLNGLWGDLRALDTRTAELDREITVIAQSDPAAKRLQQLRGVGPIIATALVAAVGNGEQFANGRHMSAAFGLTPRQHSSGGKERLLGISKRGDTYLRVLLIHGARSVIRTSKDKDDRLSQWVTRLAARSHPNVAVVAMANKTTRMAWAMLKKGADYQPAMAAS

SEQ ID NO: 418529 - protein, 318 aa, unidentified
MSKIVIGVDIAKKKFDVASLNDGKYKHKTFTNDEQGYADFIIWIVHLFANDKPLICMEATGAYSIPLADFMVSQGYPVSVINPAKINAFAKSELSRAKTDKADAKLIARYASIIQPPLWTPPPHNIRVLQALVRRVEHLLEMIQMERNRLETSDITVVDSINSVLATLETELESTRKAIREHIDNDPELKCRRNLLITIPGIADASIAHLLVVLSEHHGFINAKQVVAFAGLAPALRQSGQWSGKTHIAKSGDSALRKALYMPALSAWQHNPTIREFCIRLKTNGKNGKAIVCAAMRKLIHLSFAILKSGQPFNPNFA

SEQ ID NO: 418530 - protein, 399 aa, unidentified
MTPLPRVVIGVDTHLDTVHLAVITDTGKPLADAEFPTCPAGYDAALTWARSFGTIQIAGVEGTSSYGSGLTRVLQAAEIEVAEVSRPDRAARRRKGKSDPLDAYAAARAALAGDGLAVPKDEHTTALRALLTARRSAVKARTAAINQIHALLVTAPGELRERYRRHSVAALVKALARCRPATHSDLTAVAVLMAAKSLAQRVEFLTHQERDLTAQLDARVGQFNPALRAAYGVGPDVAAQLLVTAGTNPHRLRNEAAFAALCGAAPVPASSGKTTRHRLSRGGDRAANSALHRIALVRMSSHPHTRGYVERQGTKGRTKKEILRLLKRAIAREIFRLLTRACPIDDYTDLRPARQAKNITLAVVANHFGVPIITVSRLERGHQRNDDLATNYRQWLTAA

SEQ ID NO: 418531 - protein, 366 aa, unidentified
MKKVSTIATKASRKIAEQKLTVGLDLGDRNSWYCVLDESGALLLEQKVSTTAKVLSEVFGGMPRSRVGLETGMHSPWVSRLLSGLGHEVIVGHARNVRLIGESRKKDDRLDAQTLARLARIDPQLLSPVKHRSAKAQADLTLIRARAGLVRARTALVNTARGLAKSYGERLRGCNVRNMNPEKAEKLSPELRAALEPLLVASAALSEQIAEYNQRIEQLAEQSYPQVKLLKQVKGVGTLIGLTFLLTMEDPHRFQKSRDVGCYLGLQPGRRNSGQSEPQMHISKEGDPYLRTLLVQGAQHILGPFGVDCDLRRWGLKLAERGGKSGKKRAIIATARKLAVLLHHLWVSGEVYEPLHNSNRMTRAAA

SEQ ID NO: 418532 - protein, 426 aa, unidentified
MNYKQNDKINQVNEFTLVVGVDIAKQKHYARAVDFRGIELGKPLVFTNFQEGFQGLLQWVEQLRKEHQKLHVILGVEPTGHYWLSLAEFLRNQGIGLVIVNPMHVKKSKELDDNNPTKHDLKDALVIAKLVKDGRYSVPHLPEGIYAELRNGMNLRERLSQDLIRVQGRIQNWLDRFFPEFTQVFKDWEGKAALLTLREFPLPQDIVTLGEEKILETWKKEVKRAVGSKRVQQLIQAANKSVGLTAGIRMARQELQALLHQYDVLMEEMTLCMEQIERILSEIPGVPEMLTIPGVGLITVAGFLAEVGDLSHYRHPRQIQKLAGLNLKENSSGKHKGQTRITKRGRPRLRALLFRCILPLVAKNEDFKALHQEYTTRSVNPLKKKQSLVALCCKLIRILFALGRKNESYDSSKWRQPQTQSLKNAA

SEQ ID NO: 418533 - protein, 426 aa, unidentified
MKNINVLTTLFVGIDVSARTNVCLAMDFNSNVLLRLDVTNNQIGADTLKAKLLDLIHRNDFKTTIVALESTSFYGLHISNFLSADEELIPHNVYVHPLNPKMISNYRKSFIGLGKTDPIDAYIIADFARVGRITTEPWKGPQYLALRRLTRHRLHLVECITREKAYMVSNVFLKFSELAVLKEGDHPFSSNHTATAEAILTEMLSLEDLIRLSSEELIEFVCSHSKNRYSHPEEVCKLLKKAARDSYRLDKTLHEPLTVSIASSFNCIETYEREIKSINKAIEKTMKGLCPDAFTVLQSIPGIGQVFASGILSEIGDIHAFHSADALANDAGIYWNRHQSGDYEADDTSMSKAGNKYLRYYLIEATNSIRCHEDSFAAYYRKKFDESKTHHHKRAFALTSRKTIRLIYSLLDKNQLYSANRVQITP

SEQ ID NO: 418534 - protein, 390 aa, unidentified
MIYVGIDVAKDKHDCCILDSNGQRMYPIFTISNDKAGFDELFSKIRSVTMFKKKTKVGLEATGHYSNNLLAALVDKGFPTYVINPLHTNLFRKGQSLRKTKTDKADASSIAMMLLTDRTLKPYSDTSYHNEELKSLTRYRFDKVHERSKLKTSLSRLVTILFPELEKLVPTLHMASVYALLIEFPGASFIASSHLTHLKNVLCNASRGRYGRDKAIEIRNAAITSIGTVMDAKSMELKHTIQLIQVLDEEIKEIEASIKKIMDASHTPIMTIPGISYRMGAMILSEIGDFSRFDNADKILAYAGLSPSTYQSGQLDSSHSRMEKRGSRYLRYALFNAAKFVCKWDESFGSYLGKKLSEGKHYNVAVSHATKKLVRTIYRMEINKEAYTPH

SEQ ID NO: 418535 - protein, 405 aa, unidentified
MDVIYERCCGLDIHKASITACVLVGKKKEICTFGTMTDDLLRMTAFLKERNVQMIAMESTGSFWKPIFNILEVEGIPAILVNAAHIKAVPGRKTDVKDAEWIADCLKHGLLRASFVKPRDQRELCELIRYRGSLIEERAREYNRMGKVLEGANIKLTSVASKMDTVSGTNMIRALSEGVVDPALLASMAKGSLRNKTDELKRALNGLVQPHQQMILKAMLRHIDQLSVLIDTLDREIESRMSHDIELVEALDEITGVGKASAQTILAEIGTDMTRFPSANHLASWACICPGNNESAGKKKSGKTKKVNSTLKKTLVQCGRGAANSKDTYLNSLYHRIASRRGAKRATVAVGHAILVICYHMIRNRSRYNDLGSDYFRKRNKDALVRQSVKRLEALGFNVSLEAAA

SEQ ID NO: 418536 - protein, 444 aa, unidentified
MKKAILISIPVTVSWLVIWNQKRSIAMRHNKTEKIGTINKKTLIASLDIGKKIHYGYFRAPSGNDIQSFAFHNTRNGFDKFWERLCNFKKKQMLAEIVIGFESTGPYAEPICHYLRHKSVKLVQVNPMHTKRIKELTGNSPNKTDKKDPRVIADVMSLGHSLTVIVPEGAAAHLRRLTQARERAIERRTAMSNQLQHLVFLIFPELVHIIKPSTKTGMYLIKHYSDPKKLLFAGIDKLNAIIKKVSRGRLGTDRAEQLHNAAKKSVGITEGKESILFEITHLVSKIESENHYVEDLEKQMGDYLEKIPYSHSILSITGIGYVTAAGLIGEVGDFRKFKTISEVLKLAGLDLYEVSSGAHQGCRRISKRGRALMRKLLYFAAINTTRKNGILHGPYQRHLAKGMPRIKALMAIARKLIGIIFALVRDHSNFIDDYSSQLVFKKAA

SEQ ID NO: 418537 - protein, 310 aa, unidentified
MDVFIGIDVSKDRLDVCIRPSGETFTVTRDGEGLERLGERLCALAPVLIVMEATGGYETVAASALAAAHLPLAVVNPRQIRDFARSTGKLAKTDRLDAAAIAHFAEAIRPPAQPVADDEAQALGELVARRRQVIEMIVAEKNRRRLAGQPRALKAIDRHVDLLQAELSDLDRDIDGAIRKSPAWQADADLLASVPGVGKATLRTLIAELPELGRLDRRKIAALVGVAPINRDSGVWRGRRTIAGGRTTVRTALYMAALVASRANPVIAPYYQKLRASGKSGKQALVACIRKLLVILNAIMRDRKPWTLSA

SEQ ID NO: 418538 - protein, 315 aa, unidentified
MSEIIVEKFVGIDVSKDTLDIYIEPTAEALHVAYDDKGVAQVVNRLLKVAPTLIVMEATGGLEMRLASELAAKGLPVAVINPRQARDFAKATGQLAKTDRVDAVVLAAFARAIRPAVRPIKDADTRELDDLVTRRRQLIDMRVQETLRLGTASKVQRKSLAAHIAWLEKRIAKLDDDLTKRLRSSDAWRTKDDLLQGIPGVAAVTTLTLLAKCPELGTMNRRQIAALVGVAPLANDSGQHRGKRRIWGGRADVRSVLYMATISAMTWNSDIKAFAARLRQAGKLPKVVIVACMRKLLTIMNAMVKNNTQWTPKTA

SEQ ID NO: 418539 - protein, 414 aa, unidentified
MERVYERCCGLDVHKRQVTVCVHVPDQQGKRAELRAEFETMTADLLGLRDWLKGLGITHVAMEATGVYWKPVYYLLEDDFELLLVNAQHVKNVPGRKTDVQDAQWLCQLLEHGLLKGSFVPPKPQRELRDLTRYRKSLVWERAREANRLQKVLEDANIKLASVASRPLGASGKAMLKELCEGNNDPAALADLAKGKLRAKLPLLRRALEGRFRGHHALLVSHLLAHIEYLDETINSLSEEIEERMRPLEDQRELLCTIPGVAERTAEVILAELGPDMSRFPTHRHAASWAAVCPGHNESAGKRRSGKTRKGDSWLRTALIEAAQSAAGRTTDTYLHSQYLRVKRRRGHRKAIVAVAHSILVASYYILSEEKPYEDLGGDYFIRREDPERVTLRLVRQLEHLGQSVTLEPALEAR

SEQ ID NO: 418540 - protein, 340 aa, unidentified
MKVTTVGLDLAKNVFQIHAVDERGKVVLRKQLKREQVAPFFAKLAPCLVGMEACASAHHWARKLQGFGHTVRLIAPQFVKPYVKANKNDAADAEAICEAVSRPSMRFVAVKTVAQQALLAMHRVRQGFIKARTAQANQIRGLLGEYGLIIPQGIGHIAKRVPSLIEDATNELPGAFRVLIERLLEHLKALDHQVAELEAQITAWHRENEASRRLEQIPGIGPITATALVATMGEARNFSNGRQVAAWLGLVPRQHSSGGKSTLLGMSKRGDAYLRTLLIHGARSMILALRRKAKPEGWLHELLKRRNPNVAAVALANKNARIAWALLAHERTYRADYAAA

SEQ ID NO: 418541 - protein, 332 aa, unidentified
MELKLFIGIDISKLTLDIAVFDSENSIQHYCIKNAAKDFIRFFKKLNNKENVFIGMENTGRYNWPVYEGLEKINATVFVISPLHLKKSLGLVRGKNDKVDAIRITHFIKNHHLNLNKWRVPIKKIVQLEILLTERNNRVKKIKELKSRASGFNLLQEYNLVELFTEDVDQLIRLHKKQIKDYEKRIEEIIKSDVELNKKADLMRSVSGVGKVLCWTLLSKFNLADIFENPRKLACYAGVVPFDYQSGSSVRGKSRISVFADKKLKTVLHMAALRAIRIDGELKQYYLRKVDEGKNKMLVINAVRNKIIHRICAVLRNMEPYQQNYNNHLVLS

SEQ ID NO: 418542 - protein, 341 aa, unidentified
MKQFIRIGVDLAKNYFQVHALAHEGGSAVTRKLKRSKMHEFFAQIEPCLIGMEACGSAHYWARELKTMGHEVLLMPPAYTKPYVKRGKNDAVDAEAICEAVSRPGMRFVPIKDAEQQATLMLHKTRELLIKQQTMSVNALRGHLSEFGIVVAKGIGRVDELLELAESDTTLPEAAKAAVKVLAQHLEGLDKSIDDLEKQIGRAHARSEMSRLLDKVPGVGKILASVIAASVPDPSVFKSGRDFAAWLGLVPRQNSSGGKQTLGGITKQGNRYIRKLLVLGATSLLNVVGKRKGALRDWIVALLAKKPARLVTVALANKLARTIWAMMKTGECFRWETFAKA

SEQ ID NO: 418543 - protein, 387 aa, unidentified
MAAGSIQQDVQTFGTTTKELLALSDWLTARAVTHVAMEATGVYWKPVWHVLDGHFELILANASHIKNVPGRKTDVNDAMWIADLLAHGLIRASFVPETPIQNLRDLTRTRKQLVRERASHVQRIDKILQDANLKLGSVIADIMGTGGRSVLSAIVKGELDPEKLASEIKTRVKAPREKLVEALRGKVTKHHRFLLKLHLDQADALEAAIDSIDEEVGERLETFRGAAQRLTQIPGVSDVVATAIISEIGIDMSRFKTVGHLISWAGLCPRNDESAGRRRSTRLRQGAPWLKTLLVQSGWCASRAKNTYLQAQFLRLKARRGAKKAVMAVAASILTATYYMLRDGKDYIDLGADHFVKNDRVKVANRLLKRLGDLGFEVREVQDRMAA

SEQ ID NO: 418544 - protein, 359 aa, unidentified
MRRPKAKSNDKLIAGIDLHSDNVMIGVTNLEGRRLLHRKLECNLQQVVAFLEPLKPQLQSMAVESTFNWYWLVDGLRAQGYPIDLANPAKIEQYNGLKHVDDKDDAFHLADLQRLKILPKAHVYDPDLRPMRDLLRRRTNLVHQRSALLLSFKSLYARTTGQRFASYEIKKLEPKEAPKLYQHPANQLIAQVQAEHIQALEKSIQRIEKAVLGCAQEIPLYERLLTIPGVGRILGMTITMEVGDIKRFKTDGDFASYCRMVGAKHLSNGKCKADNNQKCGNRYLAWTFVEAANFSRRYDPQCRRWYDRKAARTSKVIATKALGCKLSKAAWHVMAKQCDYDSKRMFPGPAADAAQEKED

SEQ ID NO: 418545 - protein, 347 aa, unidentified
MEKASQAEVQVFVGIDVSARELSVAVQCGIKEGIAITTFRNQAAGHKALLAYLLRAKGRARVCLEASGNYSLDLAFTLQAHPQVEISVVNPRRARRFAESLGERSKTDPVDARVLCEYALRMPWVPWVPPSLAALRLRSITRAIEDLVAMQVQEKNRQHALLASDALPALLIRELEQHLRYLKLRITRLRREALRLIARNPELNRRFHLMLTTPGLGETSSLQILGELAVLPETLDARQWVAFSGLDPKQFSSGTSVEKKPRISRGGNRHLRRALYMPALVATRHEPFLRDFYQRLLRRGKAPLQGVVAVMRKLLHALFAMFRRDEAYDGSKLCPVEFARHTAVVCV

SEQ ID NO: 418546 - protein, 348 aa, unidentified
MNQRYEKSRQYVGIDLHRRRSVIVRMDGEGEVLECVRIENSVPALIEEVGKAGVGAPVAIEATYGWYWAVDALRAAGFAVTLAHPRGVASMQGRRAKTDKLDAKELADLLRLDRLATAWIAPPEIRELRELVRYRHRLVGERSATKASIHAVLGKCGVIPEIADIFGPVGTKMLDALVLPEPYGSRVASQRRIMAVLSAEIAGVEVETARRLKDNAEYRALLTIGGVGPVMAAIFVAEIGDVHRFATADQLACWAGLTTRVDSSDRHTRYGHVSKQGSRLLRWAAVEGCQRAREPYLAGKRRQIIDRRGRNAQHIATVATARQMMKVVYYTMRDGHARCLDAPTPVAS

SEQ ID NO: 418547 - protein, 344 aa, unidentified
MTKVSMIGLDLGKNAFQVHGIDAHGAVVVRKQLRRGQIEKFFAGLAPVIVGMEACGGAHHWGRVLGKLGHEVRMMPPAYVKAYRKRNKTDGRDAEAICDAMDRPTMRFIPVKSPESQAIQVLHSTRRLLVRQRTGLGNGLRSGLAEFGVVAAQGLKGLQALMQLLNDPATPIPDNARLPLQLLAQQWELQNAQICKLDAEIVRAAKGDAQARRLMQIPGVGPISATAIQAMVPDARVFKSARDFAAWLGFTPRQFGTGGKQRSGSISKQGNRTLRTLLILGATAYLRHERTHPRDPWLQALLGRRPVKVVAVALAAKIARIVWAMLVSGENYRPRRHDAAVQAA

SEQ ID NO: 418548 - protein, 458 aa, unidentified
MGKSLHIQGRKGTKFSQQLRGVNLEQVLIVAIDAAKLHQKALICNYFGDIIEKPFFFSVSDSGMKLLCNKIEQAVASAEAVRLFLGVEATGHYYEDIVRDMAKRGYHIQIFNPYTTFEERASALSWCKTDDLDLVAIAHAIKNNKATENKLLDGVQRELLVLTRARRSEIRKRASLRIEIRVLMDLIWREFQGFADYSTGKARKVKVFSDLWGKASLFFMEHYPHPTAVLQLGKAGLRKLSIQHNLKLRDTVIQKLLFIAEQALSRNSLELRPELMLLQMKLCDLRAFDVKIETLEQEIERLLLQTDGRLLLTVPGLGVTTAADLYAEIGDVSQFSNANQLIKKAGTNPIVKQTGGGAGSYRKISKQGNDQLRYVVYLAGRNLCMHNRDLKPFHERLKGRGKHERAIFIAMGNKMLKIAFAMLRNRSPFQSQCPEYCILDEINKKLKFNNGMPTSAAS

SEQ ID NO: 418549 - protein, 409 aa, unidentified
MEVIYPRCCGLDVHKREVVACLVRTDPDGTVRKEVRAFGTMTPDILALADWLGAQEVSHVAMESTGVYWKPIWNLLEDSFALLLVNARHVKAVPGRKSDVRDCEWLADLLRHGLLRGSFVPDRPQRELRELTRYRTSLVRERTAEANRLQKTLEGANIKLAAVATDILGKSGREILAALVAGETEGTALAQLAHGRLREKMPQLERALVGCVGEHQRFLVAEQVAHIDFLDEAIARVSAEIAERVRPEEEAIARLDTIPGIGPAVAETLLAEIGVDLARFPSAKHLASWAGLCPGNHESAGKRHRGTTRKGSPWLRACLVQAAHAAARTKGTYLAAQYRRLAARRGRAKAAVAVAHSILVIAYHLLTEGTIYRDLGGNYFDDRNRQAVERRLVHRLQGLGYRVSLEPVA

SEQ ID NO: 418550 - protein, 325 aa, unidentified
MILGADVAKEKVDVALFDDKQLIASGQFNNKRAGFKKLSKWLIHKGAGRVWACMESTGRYGDVLATYLYNHKHQVSMVNPARIKKYAESQLQRNKTDKVDARTIADFCRTQEPALWSPPSLEKRHLQEMVRRLNALVKERSRERNRLKSGLKSEVVKSSIADNLDFLTQQIARLETQIQDHIDQHPDLKRDQELLTSIKGIGLKTAYKILGELPDVDHFDTVGQVVAYASLSPQQHTSGSSVRKKTRLTKTGNQNLKTALYFPALSAIRFNPIVKALASRLKERGKEKMVIVGAAMRKLLHLVYGVLKSGQPFDPNYSANIQDAT

SEQ ID NO: 418551 - protein, 365 aa, unidentified
MCQKVIVADESHEGAVHMQISTLGIDIAKNVFQVHGVDAAEQVVLKKQLRRGQVLEFVGKLPPCLIGMEACATSHHWAREFRRLGHDVQLMPPGYVKAYVKRSKNDAADAAAICEAVRRPSMRFVPIKNAEQQAALMLHRTRDLLIRQRTQLINAMRAHLAELGLVAPKGREGLQQLLRTVAQAEEEQLPSDARLACETLAAQLQAVQHRIDTLEKRIHQAHRANPASKRLDAIPGFGVIVSSAVAATMTDPKAFKTGREFAAWIGLVPRQNSTGGKERLGSISKQGDRYLRRLLIVGALAVIKSARTRPDRYPWVVALLGRRPAKVVAVALANKMARIAWAVLVRGETYRAATHASSRALAAGV

SEQ ID NO: 418552 - protein, 570 aa, unidentified
MIKNKNPYRGVWGDAGRHLRVFFIRAILYLATTLVAWEKSIMGNRRTRRKRKQHINKVQGQRLAAEFKGQDLSRVLVVAIDGAKKSHKALLADGFGEIITDTFGFPNDLAGAKMFAGSVRKAAVDINAFKIIVGLEPTGHYAENLVAYLLEQGFDVRQVNSFAVSREREAGLTWSKTDEIDLCAIGQLIINGKSSPLGHTEAIYDNMKYAARARRSTIQRTVLLESQIHAYMDRLFPGFLDRDLFSDPFGLTSMAFMARYSSANAACRAGATRIERWLSSRRGVSNPHEITQAVVELAQGALRRPADHEEALIEALRFRLREHDLLEEQIGNLNIRLAEYLVETPGIWLLAIDRVSVVSAAEYLGELGQIRRYDGANQIIARAGMVPRKTQSGMIAYSGGITKLGHPKLRYILGVIGHNLLTSNRYFQAFYNRLVDRGGKNERLAKTAVAGKFVRVSWAMMNLKGAFEAPTWCEDDLKKDIRTKMERFLKQFGASQIYRNSIGPRLDKVLVSGGQPSTSNSITGSHQLPSASGTHEEHDRASTKPIHIGSLIPVVLGQMAAEQDVEAHMA

SEQ ID NO: 418553 - protein, 422 aa, unidentified
MLEETEDREAIIERVAALDIGKAEVMCCVRVPAQSGRGRRLQEVQAYPAMTRSLRRMAGQLRGLGVTRVVMEATSDYWKPVFYLLEAAGLETWLVNAKDVKHLPGRPKTDKLDCIWLCKVAERQMIRPSFVPPPQIRRLRDVTRYRADLVGARTAEKQRAEKLLEDACIKLSVVASDIFGVSGRAMMAALIAGQRDPKALAQLARGRMRAKISALEEAFTGHFTDHHAFLLAKMLTRVDAIDADIAVLDAKIEELIAPFAAAVDQLDEVDGVGRTAAACVIAEIGTDMTRFPTPGHLASWAKYAPGVKESAGKKKGKSTTGHGNRYLARVLGEAAIGAARTDSFLGERYRRIARRRGKNKANVAAGRSLLVIFWHLLSDPQARYHDLGPDFYDTHISNSRKMRNHVRQLQALGYKVILEPAA

SEQ ID NO: 418554 - protein, 338 aa, unidentified
MNLSRIGLDLAKQVFQVHGVDRHEHVVCRRQLKRAQVRDFFRQLPPCLVAMEACGSAHYWARELRELGHTVRLIAPQFVKPYVKGDKHDAHDAEAICEAASRPSMRYVPVKSAEQQAVQSMHRVRSRLVRARTALCNEVRGLLGEFGLIATRRGRAATMALLETVMATEPAPLPAPMGKLLRELKDELQTLEARIARLERQIQAHVRGDARIQRLLAVEGIGPISASAVAASAGDARQFRTGRQFAAWLGLVPRQHSTGGQQRLGNISKRGDTYLRTLLIHGARAVVRCCANKTDARSHWLQGLLQRRPANVVAVALANKNARILWALLSRETCYRPG

SEQ ID NO: 418555 - protein, 399 aa, unidentified
MQYCLAIDVAESKSMFCVLSQVGELVLPPTEYGHSISGFQAVLDVLLALDETDIHIIMESTSIYHLPVERFFREYTGYEIIILNPIISKENKRNLRKTKTDREDCLNLANIFFHNDYNQQNSHEQLYHELQAISRHLNHVQEGQNRTKNRFKQLLSLTCPEYIRIFKDNSIYSPTALHFIGCYPHCDMVKQKRVDALASCLGSVHKRHPNYYRRKAELIKLTLQDSFPAVTEDSETVRCLTDITKQLAEQEAYIDQLKARLIDLAQATEAFTIYISVPGIGPLTAALLIAEMKDIRRFSNVKKLTAACGLDPTIIQSGKSINYHGPISKRGNRLSRKILFNAIMSILMVTKRTYPDNPIRLYYEKKRGEGKHHHACVAACSTKLLRILFAMCNQNSLFQ

SEQ ID NO: 418556 - protein, 384 aa, unidentified
MQKPNDLNQSRIVLKQDSTLIAVIEMSLSSWLVAGIVPGVERQPLKKLAVDESALLKLLNRWREEAEKAGHRIERITVAFEAGRDGFWLARWLRARGIEAHVIHASSVAVSREHRRAKTDRLDTGLLKRAFIGWLRGERDHCKMVAIPTTKDEDAKRPHRERQSLVGEQTRIVNRMKAALIRLGIRGFNPKLKKAAGRLEDLRTPEGEPIPPNTLAELRRDIERRRLVSDQIRQIEEARLERMEQAPGDGPHAMVRLIARVIGVGIETADMLVHEVLSRKLRDRRAVARYAGLTGAPDESGSKRREKGLAKAGNARVRGGMIQLAWRFLLFQKDSALAQWYRTRTEGGRNRKTIIVALARKLLIALWRLVTTGEVPAGVVLRAA

SEQ ID NO: 418557 - protein, 381 aa, unidentified
MNKVSTKARRFVGLDVHADTIAVAIAEEGAVRSVGTIANREESIRRLVKKLNEGGAWVACYEAGPTGYTLYWQLSKLGIACEVIAPALVPTKPGDRVKTDRRDAQRLASSFRAGELTAVWVPDAAHEALRDLVRAREAAKQDQLRARHRLGKYLLRHGKRPPQTLRAWTAKYLDWIKREVSFDQRAQQLTLEDYLAEVDHVGLRIARLDQALDEAIEQAPEEMRELIQALQALRGIAKVGAVTIVAEVGRLSRFEHPRKLMGYSGAVSSEESSGRKTRRGGITKTGNAHLRRVIVEAAWSQRYKPVLSSLMRKRQEGLSAEVQEIASKARLRLHSRYMRLLGRGKLKQEVVTAVAREMLGFIWAIGVSVERAQAQRTRGVA

SEQ ID NO: 418558 - protein, 394 aa, unidentified
MEAVTSQPHTPAAIRTDLAAIFVSLELSRSTWLITSLSPGNGEKMSKHSVAGGDVAALLHRFAQLQEKVRSRTGNQVPIVSIQEAGLDGFWIDRVLKANGIESYVVDPASIAISRRRRRAKTDKLDGEALVRALLAFKRGEPRVCAMVNPPSPEEEDRRRICRERKVLIAERVKHVNRIKGLLFGQGISGYEPLRKNRRKQLDELHTGDGRPLPTHLKTQISRELDRLELLLEQITAVENERDTLLAAQKDSVAATATLIPAGAMLCDVKGIGLELAAVLWTEGLFRHFDNRRQVAAYAGLAPTPWQSGTIDHEQGVSKAGNPRLRTTMIQLSWLWLRHQPQSALSLWFTARVQSSGGRTKKSAIVALARKLLVALWKYVTAGVVIEGAVLKTA

SEQ ID NO: 418559 - protein, 346 aa, unidentified
MTIVEARAITGGVDTHADVHVAAALDPIGGLLGVQEFPATAGGYARLLGWLGGFGTVALVGIEGTGSYGAGLARHMATAGVRVVEVDRSDRQDRRRQGKSDPLDAVSAARAAQSGRARGAPKGRDGAVEAIRALMVARRSAAGERTRTINQARALILTGPDDLRARFARHTAAALIAGLASLRPRPGDVAGHATRVAVRELGRRAVFLDGQLERLDELIIPLVSARAPGLLALYGIGPHTAALLLIAAGDHPGRLRSEAAWAHLCGAAPISASSGKVTRYRLNSGGDRQANHALWRIVFTRLGSDAPTRAYAERRTAEGKSKAEIIRCLKRYVAREVYRQLPPAVG

SEQ ID NO: 418560 - protein, 406 aa, unidentified
MNMNAVGIDVSKRKSTVAILRPGGKVVVKPFDVPHLSADFQSLEKLIRELDGETRIVMECTGRYYEPVARELSQAGFFVSAVNPQIIRNFQGQDNPLRKVKTDKADSVKIARYTLDSWANLKQYSPMDELRSQLKTMNRQFDFYMKHKTAMKNNLIGLIDQTYPSANTYFDSPAREDGSQKWVDFIDTYWHVDCVRKMSLSAFTDHYQKWCSRRKYNFSKSKAEEIYRKAKELIPILPKDNFTKRIIKQAIDQLNTASQTVEQLRTLMNETASKLPEYPVVMAMKGVGPSLGPQLMAEIGDVTRFTHKGAVTAFAGVDPGVNDSGDYSQKSVHASKHGSPVLRKTLFQIMDVLIKTKPDDAVYLFMDKKRSEGKPYYVYMTAGANKFLRIYYGRVKEYLSSLPKSE

SEQ ID NO: 418561 - protein, 344 aa, unidentified
MSVYVGIDVHRKRSQVAVIDAKGEVLANRNVPNGVEPILKVIGGLPPGTPAALEAAFGTGWLVELLEDYGFDPHLVHPLRCKAIASARLKNDKVDAAILGQLLRADLLPEAWIAPPPVRQLRALLRHRVQLVRLRTLLRNRIHAVLADHGHDRPAGCWSGPGRAWMASLQLPAVSREVVDDDLALIDALETVTGRLDWEIHQRARSDPRVKVLTQLPGVGPFTALVILAEVGDVSRFGSARKLASWAGLTPTVRGSDRVAHYGHISKQGSVWLRWVLCEAAQTAKRSPQFAAGYQAIATRRGKKIATTAVARKLLTRAWHLLTDAEHAAATQPAAASAPQAGTR

SEQ ID NO: 418562 - protein, 348 aa, unidentified
MKSCFENKDIYVGIDVHKKRWVVTVRTYDLELKTFSMQPVAEDLEKFLLENYKEALLHIVYECCFSGFWIYDYFHRRSYDIIVTPTNRIYRDGSVVKTDKIDSRKLAFQHSRGLLREVKVPAIKIREYRSLFRIYDKEKMRQGQILRQVRSILEAKNHPLKWEKWNKAFIENLKKVRFADDIFNKKFAQLIKEYEYVKEQIKDSEKRIAEISEEEELGRRIKRIEKINGIAVISATRLVVYLFDKPGRFESGEKLVHYVGLTPGEHSSGEEIIRSRTGLVGNKQLRSIIIQLAWVAVRKDGSLLDKFERVYRKSGSKQKAIVAVARKLMMKVYTITEKEEEYEINRAA

SEQ ID NO: 418563 - protein, 352 aa, unidentified
MAKTEFDELKSIGIDIGKDTFHLVGFDHDGQRVLRKQIKRLALIATFEKLPRCVVGMEACLSAHFVSRTLRKMGFEPRIIPAIYVKPFNKGQKNDYNDAEAIAEAALRPNLKAVSEKTQDQLDLQALHRVRSRLVSRRTATINQIRAFLIEQGITVRRGLRALKNSFETILEERKEEISPRMRSILIGLYGDWMWMDDRIDKVSQEIEEISRTEENCVNVMTIPGIGPMISTAMVAAIGEGEAFDRGRDFAAWVGLVPRQYSTGGRTVLGRISKRGSRYLRMLFVQAAKVIMMRPHRWPDFSFGDWLVRASERMHRNKAAVALANKLARMAWSILRHKTTFDTPRDEVAIGV

SEQ ID NO: 418564 - protein, 402 aa, unidentified
MAIIGMDIHRSFAQAAFLHDGQVKREQRVDLFHDRLVRFGKSLSVEDEVVIEATGNSAAVERILRPFVKRVVVANPRMVRAIAYARVKTDKIDAVILARLHAGGFLPEVWVADDNTQRQRRQTVERMGVLEQVVRTKGRIQAILHANLIPKYSGGKAGKKWLAGLPLPEEEKAIVGRLVDELERNSDQLAKLDMTIIREALENPRVVRLMTIPGIGPVVASTVLASIGDISRFETPEKLSCYFGLTPKVRQSGDRPARHGRISKQGNTHARKMLVEAAWSAKTAPGPLRAFFERVQRNRGAPAAAVATARKLAVMIWHVLTDGTEYAYARPAFTAMKLRKAALKAGAPREYGKAGPGRDYWIKEIREREANYVRRAEQAYERMVAAWKEKPPTAPAMTATPG

SEQ ID NO: 418565 - protein, 360 aa, unidentified
MSAASAPAPETSTRPDVVVGVDTHKHTHMAVALSANGGWLGSLKLDAQRSGYQELIRWAAEFGSSPVFAVEGTGCYGAGLCRALQTAGLEMVEVNRPDRSTRRRLGKDDTIDAEAAARAFIAGKATVIPKAGDDLVEMIRMLKVVKDSATDNRTAALNQLHAIVVTAPAALRERLQRLKGKELVECCSGLRSGEISTPLAAAKMALRTLARRIQQLDQELKETVAQLDRLTRLHCPELRNTYGIGVDISATLVVAVGDNQERLKSEASFAALCGVNPLPASSGKVVRHRLNRSGNRQANCALHRIVICRLKWHQQTKEYVERRTAEGRTIKEIIRCLKRFIAREVFGILRGGPAVRTAAV

SEQ ID NO: 418566 - protein, 369 aa, unidentified
MKTNHTPSVVSTSTSAAVSGFTLGLDLGDRQHHVCVLDVSGQIVREASFPNTRPALAQLLADFPRATVAIEAGTHSPWISRYLTDLGARVLVANPRKLHAISRNERKCDRRDAQMLARLARVDAALLHPIQHGSAQAQHDLLGLKLRDALVRTRVSLINAVRFTLKSLGHPVRNPSSESFHKNVLADIPADCLPVVQPLLTVLVHVTEQIKTMERDLVQRSKQDYPVTQRLQQIAGVGPLTALCFVLKIGDPERFSRGRDVGAYLGLCPRRDQSGGTDKQLRISKCGDGLLRRLLVSAAHYVLGPFGPACALREHGQRLTGTGSAREKKRAVVAVARKLAVLLLSLWKHGTDYEPRVTTARPALVMTPA

SEQ ID NO: 418567 - protein, 346 aa, unidentified
MLYAGLDLSRKRLDFHLLDGEGATVEVGAAPPDADGLLALTRRLDRHREPIHAAIESMNGARFVHDRLELQGWQVEIADAQKVKGLAPLACKTDRIDAWVLAELTRRDLVPAIWLPDPLVRAERERARWRLHLVRHRSSLKQRVHAVLLTHGKPCPVSDLFGVRGRQLLAQLGLPEPWQATIEASLRLIDELDNEISNCERELRRLGADHRYVPLLLTVPGIGWVLAYTIAAEIGDISRFPNPRKLAGYTGLCPRVYQSGERDLRGPLAKQGPKYLRWALVEAATHACTHPSYRDRYQHTKARIGKQRGAKVAQIDLARRLAEAIWHMLSREQPFAPKSATDPLAA

SEQ ID NO: 418568 - protein, 310 aa, unidentified
MEQVFIGIDVAKDRLDVHVRPSGEAFAVARDGEGLASLVDRLRAVAPRLIVSEATGGFEQVVAGALGAAGLPIVVVNPRQIRDFARALGRLAKTDRIDAETIALFAERVQPELRPLPDAEARLLGELVARRRQVIEMIVAEGNRARLLESRRLKKRIERHRSALQDELSKIDSEIDDAIRGTPIWRENDDLLKSVPGVGNGVARTLLAELPELGSLGRKQIAALVGVAPFNRDSGTLRGKRTVWGGRATIRASLYMAALVASRYNPVIARFYRRLLAAGKPKKLALTACMRKLLIILNAIIREQRPWQSA

SEQ ID NO: 418569 - protein, 385 aa, unidentified
MQKPNDLNQSRIVLKQDSTLIAVIEMSLRSWLVAGIVPGVERQPLKKLAVDESALLKLLNRWHEEAEKAGRRIERITVAFEAGRDGFWLARWLRARGIEAHVIHASSVAVSREHRRAKTDRLDTELLKRAFLGWLRGERDHCKMVAIPTTKDEDAKRPNRERESLVGEQTRIVNRMKAALIRLGIRGFNPKLKKAAGRLEDLRTPEGEPIPPNTLAELRRDMERRRLLSDQIRQIEEARLERMEQAPGDGLHAMVRLLARVIGVGIETADMLVHEVLSRRLRDRRAVARYAGLTGAPDESGSKRREKGLAKAGNARVRRGMIQLAWRFLLFQKDSALAQWYRTRTEGAGKNRKTMIVALARKLLIDFWRLVTTGEVPAGVVLRAA

SEQ ID NO: 418570 - protein, 348 aa, unidentified
MKNHQIGIDISKEKVNICLRKERKSVWEHECPNTVTSIKKAIRKGMKDHGVATDEVVVCAEFTGRYIYPLVCACDELGLFLWMEDPTRIKNSFGIARGKDDKIDARRIAEYADRFSDKAVAYGMPDRTLASIKSKLADRDMLLEDRKRYETQLHDQKGFMDPKDYAQKSRLWNAVIKTLDKQLALLDKQLAELVASDKKISRQVELLKSVDGIGDRVALYMVAVTMGFKRFQNPRQFFCYAGLAPFRYTSGKSIHSKSKVSQRANKRIKALLHLAALSAATHMKDGEYRRYYERKTAEGKHPLSVLNVVRAKLVSRMFAVIRRDSIYQKNYAFSNSLEKNSALPIANS

SEQ ID NO: 418571 - protein, 338 aa, unidentified
MNIVFLGIDLAKNVFQICGLNQAGKPVYTKRTGRKELLQMLANIPACLIGIEASTGAFYWQREFEKLGHNVKVISPQYVKPFVRGQKNDGNDAQAIAVALMQPTMHFVPPKSPEQQDIQALHRARQRIVNHRTATVCQIRGLLLDRGITIGAAVSRVRRAVPLILEDAENGLSVRMRSTIAELYDLFNDLERRIHFFDKEIETVFRQSEACQRIAKVKGIGPKTATAVVAAIGKGTEFKNGRHFAAWLGLVLRQHSSGDRQVLMNMTKKGDKHLRTLFIHGARAVVRVAANNNDSHMNQWVNQLKERRGFNKTTVAVANKNARIIWSMLRNETEYQVV

SEQ ID NO: 418572 - protein, 389 aa, unidentified
MTKLFCGIDVAKFEHVASIYDPSSGEIILDSLHFDNNDKGFQSLLSHLSKLNKDNELFVAFESTSHYHQALFNYLTARKYKCYLINPYMTSKFRSISLRDVKTDDIDSKSIAQFLSFDYCNLVNEEFLINELKDLAVQRHSLMTDSSRMKIKLKSYLDRVFPELESLVDIDVLAVRAILKKYPTARSISSARIDRLKNLAREASKGKYSPSKVESIKEAAKASIGIHSPSIALNIVQCIETLELKERQIDTVDKEIKKHPTVLNSPLHQLTGINDIEIAYIMSAIISITRFSSPGKLVAFAGLDPKIRQSGTWKASTARMSKRGNKLLRYALIWTAYNMTRKSGPMKDYYDSKKSQGKSHYNALGHCASKLCRYIFWILNHPDKEFKYQ

SEQ ID NO: 418573 - protein, 400 aa, unidentified
MYYCGIDIAKKKHDAVILDYEGKSLGKPMTITNTASGFEELTSKLQSLDQDVFIGLEATGHYWLALYDKLSSADFNVVILNPLQIAAYRRSGIRKVKNDRKDAWWIADYLRIANLPPTDMQLPVLLRLRELTRFRYAIMEQVGDLKRKILSILDRVFPEYETIFSDVFIKSSRALLKVAVSAQEIADFDLSELTSILKKNSMGRFGREKASYIQDLARESVGVGFLAEAVFIEMQCLLEQLDLLLNQIAMLDKSIQEIMDKIPQFITTIPGVGKVTGSAILAEIGDINRFESSEKLVAFAGIDLTVYETGQFVAKRSRMSKRGSPILRFALWQASSMAIQYDPELKAYYQAKRAEGKHHGTALGAVCNKLLSRIFFILKEQRPYIVYIENSSNVPSKESF

SEQ ID NO: 418574 - protein, 299 aa, unidentified
MITIGIDPHKRSLTAAAFDPHSRLLGQQRVPTAGQAAQQLLAWAAGWPQRRWAVEGATGLDRGIAQLLVAAGEQVVDVPAKLAARARLLGTSSARKTDLADAASVATAAIHHRRLRPVVLEDQTVILRLLSDRRDDLVAERTRTLSRLHVLLADLHPGGAKRELSAAQAAAMLRQVRPVTVVAVERKRIARELLADVRRLDRQVKTASQTIRIAVREHGTTLTEVFGVGAVLAAKLLGHAGDITRFPDRDHFASYSGTAPVEASSGDVRRHRLNRGGNRQLNTALHLIAVCQIRDSSPG

SEQ ID NO: 418575 - protein, 349 aa, unidentified
MNVSHYIGLDVHKKSVSYCIKTADGIIVAEGKVRATRQCLCQWAQQHAEPWRGAMEATLFSGWIYDTLKPYAVELQMGHPAQMKAIGASKKKSDRLDARKIADLVRCNLLPACYVAPTEIRDLRRLLRYRNLVVEQATRMKNKMSGLLMEVGAEYNKQQLHGKKYFTALLDHLEAVPDSVKQMLRLSRSALETFEATQQQLLSQLRREPRLAERVTRLQSIRGVGEVTALTWALEVGDPQRLGSVARAVSYCGLTSALVSSADKQQRGPLSKQRNAHLQTALVEAAKLAPRWNPELAAVHARELARGNRNRATLAVARKLVAYLLAVDKSGQAFQPRGQTAIAKTEEAA

SEQ ID NO: 418576 - protein, 334 aa, unidentified
MDKVTTVGIDLAKRVFALHGVDGAGRVGLRKTVRREQLMQTVVALPACLIGMEACSGAHEWARRFQELGHTVRLMAPVFVAPYRKSGKNDGNDAEAICEAVARPNMRFVPIKSAEQQAVLSLHRVRQGWIEERTATINRLRAVLTEFGVVLPNRAQYVRRGAQAAAEALPALARRAVEDLRAHLGVLDERIAGYDQELQAQARQSEAAQRLMQIRGIGPLTAVAMVATVGCARDFRSGRQFAAWLGLTPRQHSSGGKQRLGHISRRGDAYLRCLLVQGARSVLLTAMRHSDRMSRWAVSLQARCGYHKALVAIAAKNARVAWALLSKNQTLRAA

SEQ ID NO: 418577 - protein, 355 aa, unidentified
MNQEKYIGMDVHQATISVAVMDSSGKLIMECILETKAATILEFIAGLRGTLAVTFEEGTSAAWLHDLLKPHVARVVVCDPRKNALLKDGSKSDRIDARKLAELLRGNQLHPVYHGEHGVRTLKELGRSYLTLTQDVSRVMTRIKALYRGWAIPCSGVTVYAPRYREEWLAKIPHPGVRLRAERLYQQLDLLQPVRQEARRDLLSESRKHPAVKLLRQIPAIGPIRAALLVALLQTPHRFRTKRQLWAYSGFAVQTHDSGEYRYVRGKLQRNRERITVRGLNHNHNHDLKNLFKGAALSASTRPGPLCDFYAALVEKGMRPTMARLTLARKMAAITLTIWKKGVEFDAKQLNRQAA

SEQ ID NO: 418578 - protein, 354 aa, unidentified
MEDYDGRQVVGMDLHRRRSVLVRMTEDGRRLGTVRITNSPAELRREIARAGKGPRVVLEATYGWYWAADVLAAAGAEVHLAHPLGVKAFTYRGVKHDVRDSADLADLLRMGRLPEAWIAPHEVRELRELTRYRAKLVRLRTSCKDQVHGVLAKLGIPVTCSDIFGAAGSAWLDGLRLPQPYAGKVTSLRHLAGEFTAEIDMLGEVIADLLAGHRGYQVIQQLPGVGPVLAAVIAAEIGDITRFKNPAQLCSWAGLTPRHRESDTKVARGHVSKQGSRLLRWALIEAIQRIPKDSVIGAVKDGIITRRGKEARNIAKVAAARRLLTLVFYGMRDHQIRCLARPAGPAAAAPAKAA

SEQ ID NO: 418579 - protein, 318 aa, unidentified
MTASASALWVGIDVSKDCLDVHVRPTGLTFRVANDEAGIDDLVTRLRQSPPAGLVLEATGGYEIPVVAALAAAGLAPAVVNPRQARRFAEGVGRLAKTDPIDAAVLAHFAEAVRPEPRPVPDADARALGDWLARRRQLVQMRVSEQHRLPTASGAIRKGIQRHIDYLDRQIKGIEDDLNTAVQASPAWRARDELLQSVPGVGPQVSRTLLAELPELGTTSGRQLSALCGLAPFNRDSGRRQGPRRIYGGRSHVRAALYQAALVAMRWNVPLKGVYEGLLARGKAKKVALIAVARRLLVILNALVRTGSPWQENLAVGT

SEQ ID NO: 418580 - protein, 322 aa, unidentified
MAMLSFGGIDVSKDRLDITVLPDEQCSSVSNDAAGWAELVEQLRGSSITAIGVEASGGYERGVVRALLAANLSVRKINPFKLRQFAKASGTLAKNDRLDARMIASFVAIMPTRPAQRQAPMIEQLAAMLTVRRQLSDHKVATENASKLLEDSMLRRLSRRRVARLTADIELLDQRLVEIVTADAALAYRFRLLTSMPGVGAVLACTLIALLPELGQMSRKQVAALVGLAPYDFDSGKLKGRRCIWGGRARVRHVLYMAALSASNWNPELKAFHDRLEATGKKPKVVIVAVMRKMITMLNAMLRDGTTWVDRYNGRRSVPTAR

SEQ ID NO: 418581 - protein, 382 aa, unidentified
MKEAITGVRRFVGLDVHAHTISAAMAEEGAAVRDLGTIPNREESVRKLAKKLTEGGAWAVCYEAGPTGYALYWQLVKLGIPCVVVAPTLVPTKAGDRVKTDRRDAARLASSFRAGELTSVWVPDAAHEALRDLVRAREAAKEDQLRARHRLGKYLLRHGKRPPQTMRAWSQNYLDWIKHKVSFGRVPQQVTLEDYLSEVDHAAVRVARLEKAIDEAVAQAPETMRELIQALQALRGVAKIGAVTIVAEVGRLSRFEHPRQLMGYSGAVSSEHSSGARTRRGGITKTGNAHLRRVIVEAAWSQRCKPTLSRVLRKRQEGLSAEVQEIAAKARVRLHRRYAHLLGKGKTKQEVVTAVGREMLGFIWAIGVSVERAHTQRVPGAA

SEQ ID NO: 418582 - protein, 344 aa, unidentified
MLHAGLDLSRRRVDVCLIDDRGELIAETTVPSGGDGLRRLTEGLAGERVRAVIESMNGARFVHDTLEECGWEVLVADAQKVKGLAPLAGKTDRIDARVLATLSHRDLVPAIWLPDPSIRRERELARYRLHLVRHRTTLKNRIHATLITFGHPCPVSDLFGYAGRRLLDRLAIPDPWRRNVDVSLELIDDLELQIARLTVELRRQGADHRYIPLLVTAPGFGWINAFTVASEIGDIERFASPSKLCGYTGLCPRVVQSGASDRRGPISKHGPRYLRWGLFEAAMNACKHPVYAERYQRTKRRLGRQRGPKVAQIELSRKLTEAIWHMLTRNQPFAPAGAGFRLAA

SEQ ID NO: 418583 - protein, 369 aa, unidentified
MDHSTEFFIGIDVAKTRNAFAIADGERGGEIRYLGEVDASEESMRRLVKRIAAKHGRAHFCYEAGPTGYGLYRLITELGHPCMVVAPSLIPRKPGDRVKTNRRDAVALAKLLRAGELTPVWVPDECHEAMRDLIRARAAGVETLRVHRQQVSAFMLKHGRIFPRKTAWGASHLRWLQEQGFDHPAHQIALQEMVEAVRISKERVERLEEAIEEFVSTWSLAPVVGALQALRGVDLIVAVTFAAEIGDMRRFDNPRQLMSYLGLVPSERSSGDTIRRGGLTKAGNGRVRHMLVESAWTYRHPPRIGKAKLYRLQAAPTKVREIAWKAQTRLTARYRTLTGRGKKTTVVCAAIARELVGFMWAVAREVQPA

SEQ ID NO: 418584 - protein, 342 aa, unidentified
MTQPASARITVGVDTHAEVHVAVAKDNLGRRLDATSVPTTPAGYAELLGWAQRLGPINAWGIEGTGSFGAGLTRFLHRHGQVVVEVNRPDRQTRRRRGKSDPLDAEAAARAVQAREGVIPKAGDGQVEMIRSLRVARATAMKARTQAINALKGLLVTAPDELREQLRALSAVRLVQTAAELEPGPVTTPAAAARLGLRSLARRYQALSAELTILDTELDRLTVTAAPKLLALFGVGSDSAGALLVAAGDNPDRLRSNACFSMLCGASPIPASSGKTQRHRLNRGGDRQANAALYRIVIARLRHDQQTKDYLDRRIREGKSKKEAIRCLKRYVAREVFAVLRP

SEQ ID NO: 418585 - protein, 429 aa, unidentified
MNYNRKQKINQITEDTLVVGIDVAKNRHVARAQNFRGIEYGNPIYFYNREDGFERLKHWISKLAQEKNKEEIMIGLEPTGHYWLPLYRYLILSGFKVVTVDPHHVEQSKELDDHNPTKCDKKDAIVIAQLVSNGRYSEPNLPEDEYAELRVAMNHRERLNKDLNGIKNRIVRWLDMYFPEFTEVFKNWEGKAALSTLKNIAFPNKISNKKPQEIVDIWRKEGIKRGVGKKKARALINHAKVSIGMDTGNDMAKKELHDLLESYDLKKSQLSDLESKIEDLLFDIPGAKKMLTIPGIGEMTVAGFFAECGYLGDYNHPKQIIKLAGLNLMEHSSGEHKGETKITKRGRAKLRALLFRVSLPLVRHNDEFRQIHEYYTTRPKNPLEKKQSLIAICCKLIKILYTLGTREIEYDGEKMLNDIERPEEYKKAA

SEQ ID NO: 418586 - protein, 402 aa, unidentified
MNAVGIDVSKGKSMVAIMRPFGEIVSTPFEIKHTASDIHSLVELINSVEGESRIVMEHTGRYYEVLAHQLSEANLFVSAINPKLIKDFDNDSLRKVKSDKADAVKIARYALDKWQNLKQYNVMDELRNQLKTMNRQFGFYMKHKTAMKNNLIGILDQTYPGVNTYFDSPARSDGSQKWVDFASTYWHVDCVRKMSLNAFIDHYQNWCKRKKYNFSQSKAEEIYGKAKELVPVLPKDAITKLIIKQAVDQLNSASTTVESLRTLMNETASKLPEYPVVMAMKGVGTSLGPQLMAEIGDVSRFTRKSAITAFAGVDPGVNESGTYEQKSVPTSKRGSADLRKTLFQVMDVLIKTHPQDDPVYQFLDKKRAQGKPYYVYMTAGANKFLRIYYGRVKEYLSSLPES

SEQ ID NO: 418587 - protein, 416 aa, unidentified
MLRIVYPICCGLDVHKSIVFACIAATDENGVTTYQSRKFSTFTNELRELSEWLASHKCKDVCMESSGKYWIPVWNILEPTCNLVIAHPKYVKAIRGKKTDKKDAKWIADIFKHDLVSGSFIPPADIRQLRDLTRYYRKLVGFNTGEKNRAQNCLTISNIKLDDVFTNVFGKSATAITDRLLENPGEVFDVSPYVHGRCKTPISEIQAAVDGSICSEQADKLKIIRSHMDNLKLCKAELESVVLGIASKYLPQLELVLTVPGISDPFMAISVISEIGVDMSVFPTENHLCSWAGLTPQNNESAGKKKTTRISRAGAYLKPLLVQFAVAVSRSEKHPEIRNRYLSLKKRRGHKKAVIAISRMLLTAIYNMLKKNEPYNAELYRKADKPPAHREVSVDEAVYILQRQGYFITAPQAVTE

SEQ ID NO: 418588 - protein, 408 aa, unidentified
MSIVFGIDVSSRDSSVCVLQSGVTREYKVTNDTIGFKTLLIDLKEYAEHPQIILEATGIYSRRITRFLDEYDYDYVLLNPLKAKKEINQGLRRNKTDRNDAYHLALAQDRNQHQPNRKEPEAYHQLQSLSRAYEELTHDIVSSKNRLHKYLQLTFPELETIFNNSRGVNYWYLVELFPHCQDVRNLDVSTIAKQIKDFKGYGINRAQKLAIKLKHLADLAYPAVDQDDPERDEVVYYANRLLRLTADRERRSEAMIKLAKTLPNRDLEILMSIPGIAEITAVRILAELGDIRRFSNPNKINAFVGIDPGRYQSGEKDSSLRISKHGNAVARKILYRAIGQIDLAAKTSPCHIADYYERKKQFSQTKGFKKIAIASIHKLLRTVYILIITDQMYDYNVANNNQKDFCPN

SEQ ID NO: 418589 - protein, 414 aa, unidentified
MFAVGVDVSNGRSMVAVLGARRSVVVQPHEVPHTADGFAELAARLHALDGEVRIVMEHTGRYYESFAMSMYRAGFFVSAVNPLAIKGYQEGISVRKVKTDKADALKIAQFAIDKWEIPPHYTPMDTIRYDLKTLHRQFQLSSKTKTALNNNLIALLEQSYPGANRYFDSPVRPDGSQKWVDFVDTFWHVDCVARVSRKAFVERYQKWCKRHGYNFSEAKAVEIHEDARQRFPLVPKSDTCKLMVREAVAQLNAVSRTVETYRAEMDRLASQLPEYETVMAMTGVGKSMGPQLIAEIGDLRRFAHQKSLVGFAGTDPIKDDSGDKVSDSKPSSKRGSPYLRRTLFVIMTILLQLQPPDDPVYQFLDKKRSEGKPYYVYMTAGMTKFLRIYYGKVRDCLKEKGLWEQPNVDEVNPV

SEQ ID NO: 418590 - protein, 413 aa, unidentified
MEVLYRCCCGLEVHKKSITACVLWAEAKGRRKEKRTFGTFTQDLLRLLEWLKQCGVTHVAMESAGVYWKPVWNILEGQLDQVLLVNAQHIKAVPGRKTDQKDSEWIADLLQHGLLRGSFVPPRSTRELRDLTRYRVSLAEECNRISNRIQKVLEDANVKLASVATDALGASGGAMIEAMVAGEEDNEKLAEMSKGLLRNKRELLKQALEGRITEHHRFMLRQRLEDLRHAEGKMAKIEAEIDRRMGPFGEAVTRLKTIPGVERVTAWGLLAEIGFDLKQFPTSAHLASWAGLCPGNHESAGKRLSGKTRKRSHTLRRCLCQAAWAITRQKNHYLAAVYRRLAARRGGKRAVIAVAHALLVMAYHMWLRKLDYRELGPDYFDRLNQRHITNVLVRRLERLGHNVILQPAAGVFS

SEQ ID NO: 418591 - protein, 333 aa, unidentified
MSSPATSAPLPRLGIDISKLTFDVHLCTLDGRALSAQFANNEDGFTRLDAWLASHQATCTCAGLEATGPYGVLLLWHLHTQGHRVHQLNPRRVKDYARSQGRRVKTDATDAALIAAYLKASEDLHPWQPPTRALQDLQALVRPVPRFSTALQAERNRKEKSSSGVVAASLQRQIDALKTEVTKLTKAINSHVLEHASLQKSVRLLRSIDGVGLMVAVTILAEVPQICAFGRAREVAAFAGLTPSLNQSGTSVNRRGHMTKEGSAMLRKMLYMAALQAVKRTTNAFHECYESFVARGKPKMCALGAIMHKIIRVAFGVLKHDTPFVKNFAKLEA

SEQ ID NO: 418592 - protein, 400 aa, unidentified
MNEYEEIGVFLGLDVGKSAHHGHGLTPAGKKVFDKQLPNTEPKLRQVFDKLREKFGTVLVVVDQPASIGALPLTVARDTGCQVAYLPGLSMRRIADLYPGEAKTDARDAAVIADAARTMPHTLRSLQLTDEITAELTVLVGFDQDLAAEATRTSNRIRGLLTQFHPSLERVLGPRLDHQAVTWLLERYGSPAALRKAGRRRLVEVIRPKAPRMAKRLIDDVFEALDEQTVVVPGTGTLDIVIPSLARSLGAVHEQRRAAEAQIAALLEDHPLSKVLTSLPGVGVRTAAALLVTVGDGTSFPTAAHLASYAGLAPTTKSSGTSIHGEHAPRGGNRQLKRAMFLSAFAALHDPASRTYYDRCRTRGKTHTQALLRLARQRINVLFAMLRDGTFYEPRTPRLA

SEQ ID NO: 418593 - protein, 340 aa, unidentified
MPPINKFYLGIDVSKPWFDVSLLPVVNHQKLPMITERFGNSAEGIKLFKAWLKKNAVTCDENTLLVIENTGIYHRLIWSFCSKHNLPLHIGNAAQIKWSLGITRGKSDVIDSKRLCTYCYKQAEELKATPALNPVFMKLKDLMSSRSRLVTQLHSTKNYIREIKCTGDKELLAVLDKAHKAAIEGIKKSIEQIEILIEKIIREDTAIYANYQLVKSVPGIGHLTAVYIICCTGNFASKISGKQLASYAGVVPFEHSSGISIKGKNRVHKMANKELKKMLHLCALTAIKYYPEFKQYFDRKKAEGKNGMLVLNAIRNKLVLRIAAVVNNQQPYVDNTKMAA

SEQ ID NO: 418594 - protein, 319 aa, unidentified
MSKSLGQVESFVGVDISERWLDVQLLPQDERARFSRDRRGIARLVAWLASKGRLLVVVEATGGLERGLRAALAQAGIALALVNPRQVRDFARAAGLLAKTDRLDAYALALYGERLRPGPRAPRSAADDALAALVLRRRQLAQLLEAERNRARRAEEPTVLASIEAHLGWLRQAVDELERAIEQRLEANPLWRERAVLLASVPGVGEVTVATLLGLLPELGQLDRRAIAALVGVAPFARDSGLLKGRRTIWGGRAQVRAVLYMAALVAVRHNPWLRAFYQRLVAAGKAKKLALVAAMRKLVVILNAMLRDATPWRAPQSA

SEQ ID NO: 418595 - protein, 353 aa, unidentified
MMVVGVDPHKQSHTAVAADELGRKKAQKTVRARRDGHRELIAWAREIAAAGRLWAVEDVRHVAGGLIRELLAAGEQVVFVPPKLMAGERRGGRERGKSDPIDALAIARLALREGAGLPAARLDEQVLEVRRLTDYRDDLVAERTRVVNRLRWLVHDLDPELAPPPRSLGSGRARAKLEAGLRALPASAGQRVALSQLARVTALSAEITGLEKDLAGLVTALVPELLAIPGVAVITAAKIIGEAGDIRRFRSPAAFARHNGTAPVPASSGTGTGGPQRLNRGGNRQLNAALHRIAVVQARCHPGAAALLERRGQDKHETRKASLRVLKRHLSDVIYRALNADAWRLDQPAPHAA

SEQ ID NO: 418596 - protein, 433 aa, unidentified
MNTACPYDLVIGLDRSDQRADLCLLDTHTGTRRATSSSTTPEALWEWLRELRQQYPQARVGLCLEQPAVQLIPFLEAYAWITLHPINPITLQKYREAFVTSRAKDDTKDADYLADLLLNHHAKLPVWAPEDSATRAVQQLVFHRRAVVNERTGLSNRLIALLKTYFPQALTLCGDDLWRPLATAFLLKWPSLSAVQKAKPATVKQFYHLHGSRSQKLIDERLELLTKAVPVTDERAVIDSFALRVQLVCRQLQLVQQSVTEFDRQIAAAYATHPDRLIFASLPGAGAVLGPRLLATLGAQRERFETAATLQHYTGIAPVTKRSGGSCYIHRRYLCPKFHRQSFHEYAKESILWSRWAAAYYLQQRNKGAHHHTAVRALAFKWQRIIWRCWQDRQPYEEAKYETALKENGSELVKLFDRVELGKSPFKNPAKKN

SEQ ID NO: 418597 - protein, 351 aa, unidentified
MVTVGIDPHKHVHVAVAVGKDGTPAGKPLTAKNDALLIITLLKWVRSITDDTVTWAIEDGRGFARQLADGLLLAGQEVVWVPAKLAAAHRRLHEATGAKSDPIDAAAVARAAIATPGLDRHRIDERVRELRVLVDYRADLVKRRTMVINQLKAQLHVWLDQTPGDLTRARNVNALATLISAAQLSPHVRQALADMTAEIAALSRHVGDLDTTIRNLVSPLAASLLQVTGISYNSAAVLIAEIGDITRFPSSARLARYAGCAPIPVYSADKPRHRLHRGGNRRLNSVLYTAAIVQKRRTPQAQQLLARHESGKGSRGARRILQRHLIDVIYRAMTTDQATWQHQIIRHELAV

SEQ ID NO: 418598 - protein, 427 aa, unidentified
MNEPKYKPTLCVGADVHLDEIVLRAVDKAQGHEVLERFRVTNNQPGAQSAAATIAQLAAEHGYTRIEIGWEATGMLWIPFHRYLSTEPLLHPFELELICFNPKLVAKFKDGLVLRCPKNDDRDAFDVAARIRFGELPVTYVPGDFWQGLRRLTRYRYRLSKALSQEKMRFQSYAFLKASDWKRVKPFSNVLGATSAALLTEFTVAELQDMTHDQLVDLITRRGRGRFTDPTATARDVRQALRTSYTIDPRMDQMVTDSLAAIWDHIRYLDRSMKRLDKTIARYIDPIPNPIITIKGLGAVITAGILAEIVVVLRFKEQKHLAQYMGLTWRKSSSGGFVSQNTRMTKVGNVYLRYYFIQGANLLRQHNLEYKAYYWRKYQEVSKYQHKRALVLTARKLVRLVHALLTKNVPYVRPRMTDPGQEDDGLQ

SEQ ID NO: 418599 - protein, 412 aa, unidentified
MTQSSEYLVRVGIDWASESHQICILDQDGHRTEHTVPHTSAGLAALATELVALSPEDPGRVAVAIEVPRGAVVDTLLERGLHVFALNPKQLDRFRDRHTVAGAKDDRRDAFVLADSLRTDRPAFRRVHLDDPVIVELRELSRLDDDLREELSRLSNRLRDQLHRFCPDTLALCPAADEPWFWALLDRALTPPRPKPLSIKAVTAVLKVHRIRRLTVDTVHAALQVPPLRVAPGTLEAACAHIALLLPRLRLVHDQRTRTVGARIETLLAALAKEDVTGEHRDVTILRSLPGVGRLVAATVLAEASRPLAERDYQTLRAHAGAAPVTRQSGKKAIVSMRLACNARLRNAVYHWARVSAQVDPRCRAHYDRLRQAGHEHARALRGVADRSLDVLMAMLTSRTLYDPERRCPKAA

SEQ ID NO: 418600 - protein, 385 aa, unidentified
MGNQTFIPRDYDVFAGLDVDKRSISVTFTDHQGFVKSLHMPYNVEHLVSHVRKHFPNQKVAFAYEAGPTGYGLYDGLVAKDYQCLIASPSMIPKAPGQRVKTNRLDSQGLSQNLRGGQLKSIHVPSPVYRELRHLTQLRDTFVSEMVGMKQRIKSLLLMEGMEFPPAPAGSQWSFIVKNKLRKLPCSSTVRFKLDQWLDSLEFNEKQVLKTTRAIRRFCQNDPELSQCIKYVMSVSGIGWIVASQLLARIGNWRELTNIRQLAGFLGLVPTEHSTGERTDRGSITHTGDKRLRSKLIQASWSAIRKDAELREFFGSICRRHPRRQGPRVAIVAVARKLSVRISVVLMKQRPYVVREKVHSAPLTQEETSPQGTTRRRREPGEKNS

SEQ ID NO: 418601 - protein, 418 aa, unidentified
MNTWQQITHFAGFDWAKDHHDILVLDGNAKVVARLRFDHSAEGWQRCREQLAAFPKVAVAVEGGNTMAIEQLLASGCLVFNIHPRSSKSYRQRRQPTGNKTDDIDCLALATALRMEGQDWKPVAATDPHIKKLRLLCRDEVLLIEQRTALVNQLQQALYEYYPTALAAFDDWTIPPAWAFVITFPTPQTLVKAGKRKWENFLHANRLWQPEKSQKRLTAFAKAMELRVPDAISEAKSVLAVALATLLRTLEKQIQKHRVLITECFQQHPDHALFETLPGAGAKIAPRLLAELSMDASLIDDPNRLQSYAGMTPVSYQSGQVSAVYLRRQCNRFLRATVHLWVDLSRRYCDWAQIYYRAHRRKGQSHACALRCLGVRWLKILCAMLRNKTPYNGELHARNQLLHGSWVLQLQPVKTHAS

SEQ ID NO: 418602 - protein, 356 aa, unidentified
MSRISQLEPIRVTVGVDRHRDVRVAVALDQLGRRLDQIELATTRAGYERLLAWAERLGVVEAFGVEGTGCYGAALARHLRAREMLVVEVMRPNRQTRRRKGKSDPTDAEAAARAVLSAEAAGSPKAGDDLVEMIRVLRVARGTAIKARTQAINALRSLLVTAPPELRDQLRALSTTRLVRKTAQLRPGALGSPLAASKLALRHLARRCQTLEVEIRSLDGQLARLTTTASPQLIEAFGVGADTAGALLVAAGDNPDRLRSEAAFSMLCGSSPIKACSGKTNRHRLNRGGNRQANAALHPIVLVRLRYHQATKDYIQRRTSEGKSKRETIRCLKRYLAREVYAALTQNNEGKLARAA

SEQ ID NO: 418603 - protein, 344 aa, unidentified
MIIHPDFIGIDVSKDFLDIFDGGVRKNERLANTLETARLMAERLAGREHGFAVFEATGHYDRHLRQAFDEAGAAYARVNPSRARDFAKAAGILAKSDAVDAKMLAAMGQCLKPDRDEPRNKPLIELGFLNKRRDQLVTMRAMEKTRAAEVPSAIRQSIEEHIAYLDAMIVDFDTRIKASLASNEALASQARLLRSAPGIGPVACATLLALLPELGTKPAKTVAALAGLAPFNNESGKFRGTRTIKGGRKRVRDALFMAAFAAIKSKSRFKDFYQALRKNGKAHKLALIAVARKLLITLNVMVKKNLAYDPNYAEAEERYLSGAALASRRRAGSGRYLSGEPEHP

SEQ ID NO: 418604 - protein, 335 aa, unidentified
MKSWSVTVLSENSVLKRFVQDPDPDALHKFLTRNYPDADYHSVYEAGFCGFWIHERLTALGIENIVINPSDVPTTAGERIQKTDAVDSAKLARSLRARELKGIYIPDSTSLEVRSLIRLRSTITKDVTRQKNRIKSHLRFLGYEIPTEYCNRYWPKRFITWLRELDMKTQSGRQSLDFMLDLLDNLRKEKLDMTRALRALSRTEQYEEPLELVMSVPGIGQQVGMALLAEIVDIKRFKDAEHLAKFVGLVPMCHGSGENEGVGDITIRKHAFLRTLIVEAGWQAIRQDPAMTLAFETYCKRMKPSKAIIKIARKLVNRIYFVMKWQTPYVTSVVS

SEQ ID NO: 418605 - protein, 391 aa, unidentified
MSTYFVGIDISKYKHDCCIINAADQTIVAKFTIQNDKDGFNELLTSLQSLSTPDDIKIGFESTAHYALNLELFLEKAHHSFMEVNPVLISEYKKSTSLRRTKTDSVDCESIARWLMTVEYKPHSKGFYHAYSLKSLTRLRDRLIRQRSFYLVKITNVLDHAFPEFKPFFQERFSKTALYLLENYGSAEKMARMNSASYDNLRRISRGKFTPQKFIQLKSIAANTVGVNNSIFDTELNCLLTLFNEAAKQVSVLEAQITELIKEVHPHYMSIPGIGPLSAAVIYAEYGDISNFSSPAQMLAFAGLEPGISESGTESHKGRMVKRGSSQLRYTLMNCALPLIRFDVTFAAYYAKKRSEGKPHRVAISHVTKKLVRVIFALERQNTDFAAIHLR

SEQ ID NO: 418606 - protein, 391 aa, unidentified
MFYIGVDIAKNNHEASIIDSNGKLVSESFSFSNSIRGLEKFQKFISSFSIDSNNCIIGMEATGHYWLSLYSFLIDLDFSCVVINPIQSDAFRKMYIRQTKNDSVDSFVIAQILRFGEFSVSHFSDEDTFALRNLSRFRFALVDEASDWKRKLVAILDQVFPEYSSLFSNIYGVASRELLSKYPLPEDMISISADELAKMLSKCSRGRFGLDKAKEIQEKASNSFGVKFALKSFSFQIKQIIAQISFLEDQIFEIEDEISSMINSLCPVITSITGIGDVLGAAIFSEIGDISRFERANQLVAYAGLDVAVKQSGNFNATDTKISKRGSPYLRRAIWLAACVAAFKDPALSVYYQKLRQRGKAHGTAIGAVARKLTNIIFAVLRDNKAYIPNI

SEQ ID NO: 418607 - protein, 340 aa, unidentified
MFTNFVGIDVSKSKFDLALIKGQDKDHAIQGVFDNTRNGIKSMSKFLEKEHHVQLSETIFCMEFTGVYCYPLTDFFVKQDCHVWIEMPVNIIRSLGLQRGKNDRVDAHRIALYAYKNRDDVKLWKPQRDAILKLRDLLALRERLIVAQKSLQMPINEKISMGDKKGAEMLRKGCQKSMSSLENEIGQIDKNLDDIIKDDPQLKELFQLATSVPGIGKLTALFMICFTNEFSMYTNPKQLACYCGVAPFEHSSGSSIRGRTRVSHMANKVLKRMLHMGAMSVVSRDPEMRDYYQRKVAQGKNKMLVINAVRNKIIHRLCAVIKRGYGYQSEKIFKERLVLS

SEQ ID NO: 418608 - protein, 339 aa, unidentified
MPLYVGLDLHSNNNFMAVMNKQGKRVDHKKLPNDPELILQALRSHRAKIGGVVVESTYNWYWLVDALMEAGYPVHLANPSAIQQYSGLKHADDQHDAFWLAEMLRLGILPEGFIYPKEERPIRDLLRKRRHLVKLRTSLIISLQNIISRNCGVQFKVSEVKRLKEDRVSPLLESNEDLALAGKASKETIDYLTRQIRRIEATIVKRIELRESYRYLLTLWGVGKILALTIMLETGPIGRFAKVGNYVSYCRKVPSQWTSNEKAKGKGNKKNGNKYLAWAFSEAAEFARRHHAEARAYYNRKMQKTNFMVAHSALAHKLARAAYYIMKDQVPFMPEKLFG

SEQ ID NO: 418609 - protein, 370 aa, unidentified
MKKNNTVKQSSKRAMDPKTGPITIGLDLGDKTSCYCVLDSEGGVQSEGSVGTTRKAMAQKFSGIKRCRIAMEVGTHSPWLSRWLSGLGFEVIVANARQVQLISASSRKNDRMDASLLARLARVDPQLLRPIRHRSEQAQADLMAIRIRATLVEARTGLVNAARGFTKAMGERLPACDTDSMGVEKLEALPAELQQSLRPLLEQIEALTAQIKKLEGNLEQIARTRYPETQLLTQVSGVGTLIALTFVLTVEDRERFQKSRDVGCYVGLRPKQSESGESQPQLRITKEGDRYLRTLLVQGAHLILNRRGPDTDLKRWGLKLAERGGKNAKKRAIVAVARKLAVLLHRLWVCGEVYEPLRNSQPSKSSKQAA

SEQ ID NO: 418610 - protein, 421 aa, unidentified
MNAWNEVTHFAGFDWAKDHHDVLVLDNTGKIAAELRFEHTAAGWSLCQQKLAAFPHLAIAVESGHGAAIERLMVLGYRVYPVHPRSSKSYRTRKLPSGTKTDHIDCWALADALRLEGESWHVLNTPEPLVQRLRLLCRDEVALIEQRTALINQLQQALYEYYPAALAAFDDWTSLSAWAFVARFPTPQALVKAGKRQWEKFLHTQKLYHPEWYQKRLAIFAKADEFCGPEAVTAAKSVLATALVKLLQTLELQLASYRLLITECFKQHPDYHVFASLPGAGPKLAPRLLAELVALQPLADQPQVLQCLAGMAPVSYQSGKVSVVYLRRQCNRFLRATLHLWVDLSRHYCDWARIYYEAHKKKGQSHACALRCLGMRWLKILAAMIRSHTPYDAALHARSQLQHGSWVLQLQPKLSITKDAS

SEQ ID NO: 418611 - protein, 436 aa, unidentified
MSTAEYITTRIAYFVLDIGKNVHWLAAYAGPRLAVVLAPEKVRANQAGFDQTARRLQDLLTGGQFDTVVLGHEPTGIYHEAFSRALQARFRAYTTAQTAPWLEYRFVNPYQVKQARQRRLGRNRKTDRLDLPAIAHCLADGAGVPPYLPTAADLPFRLWGARLRQLSRAQRQLTHRLLTALDQLWPGALVDVRRFRRAHPELEPPVPLVLSEPLERQLIQALLTHTPDPHQIRGMTRAQLISLLRQQVGRGGPKTADRILACARDALLPPPEITAVLARQVQADFAFYQHLAERLNQLKAEAEQLLPGSSAAVLTSVPGVTPYLAARYLAGIGQATRFDSAGQVWALAGFDPLSADSGDTQRVGHISKKGDPAFRDTLYLLGFQTSQACPAIALAKARALERGLGFTGAVLHAAHKANRLCWHLLIHQEPYQPPRR

SEQ ID NO: 418612 - protein, 322 aa, unidentified
MQGKVITEDAMAAVYAGIDVCKERLDVYLHPLGEQFSVMNDAGGWRRLLRCLGRHAIERVVMEPTSKYHRAAHRHLVAAGIAVALIPPHRARLFAGAFGQLAKTDRIDARILALAGERLDPAVTAPPTPEEEALEELAGARGAAVADRTAIGNRLRTTSSAFLRRELTSRLKGIERHIDRLEARIASMIAADARLSRQAEIIRSIPGMGPVNVLAILTGLKEIGRLNGKEAAALAGLAPVADDSGPRHGPRRIKGGRAALRRALYMAALSAIRCNAELKAFYRRLRDKGKPAKAALIAVARKLIVLANTLVSQNRTWTLERP

SEQ ID NO: 418613 - protein, 373 aa, unidentified
MKKTTRWVGLDVHAETIAIAVAEKDGTVHSVGTITNRADAVRRAVKKLESGGKLQVCYEAGPCGYGIYWQLAEMGIECDVVAPTLIPVKTGDRVKTDRRDAEKLARLLRGGDLTAVWVPDPEQQALRDLVRARHAAKRDQLRHRNRLGKFLLQLDVRRPDMIVAWGTKHMVWLEGQQLKHPSHQEVLVDYLNEVKRAKERIERLERSIDAGIERAPKHLQELIAALQTLRGVAKIGAATLATEVGRFSRFESASQLMAYVGVVPSEHSSGGSTHRGSISKTGNARMRHVVGEAAWSYRHRPSNGPALKKRQQGQSEDVIAIAWKAQHRLHQRFQKLSAKGKHHGRVVTAISRELLGFVWAIGRKIESELDAAA

SEQ ID NO: 418614 - protein, 315 aa, unidentified
MTQTNITTAGIDTSKAKLDVAVHSRTERWQVANALPGWRALAANLAKIGVTRIGIEATGGYERGVVEHLRAAGFTVQVLQPIQVKAFGRAHLRRAKNDALDAALIAACTAAIDQPRIAPDPRLAELAANLTFLEQLEEDIARFKTRLEHIDDPGLRRLVNSDITRLKARKAAQIRYLAKHLRDHDDLAKRLALVLSIPGIGERTALALIIRMPELGQISREEAASLAGLAPFDDDSGLHRGQRHIAGGRGRLRKSLFAAALPAAFRWNQALIALYARLTAKGKVHNAALIACARKLLIYANTVVQRGTPWTEKAA

SEQ ID NO: 418615 - protein, 413 aa, unidentified
MDVLHPRCCGLDVHKSSISACILLREARRVQKHQRRFGAMTQDLRELAEWLRQFGVTQVAMESSGVYWKPVWNILERQFTIVLANAQHIKNVPGRKTDQKDAEWIAQLLQYGLLRASYIPCEIIRDLRDLTRMRASLSQEASRISSRIQKVLEDANVKLASVATNALGKSGRAMLEDIIAGEDDPEHLASLALGHLRVKIPQLRLALEGKIRSHHRFLLRRLLDQIQFVEHEIALLDERLEDIGRQRPDLAQAVARWDTIPGIDRVAAWALLAEIGDNMAQFPTAEHLASWAALCPGNHESAGKRLRGTTRQGSPWLCRMACQCAWAAARTKNTYLSSQFRRLAARRGKKRAIIAVAHTLIVIGYHLQKNQSNYEDLGGNYFDRIHSDGLKRYLVKRLQQLGHKVTLEPMEAA

SEQ ID NO: 418616 - protein, 427 aa, unidentified
MSYRIAAIDVHKKMLAVVVADVAGEGEYQVERRKFGATPDQLHLLAHWLCQQEVEEVVMESTAQYWKPVWGALEQYWQPERQKREGARKMSGKLHLCQAKSNRGRRGRKNDFADGERLIKRLVAQELVLSFVPDAEQRLWRTVTRRKYQLTRDKVRFQNQLESLLEQAHIKLSSLVSDLLGVSARRMLKAIAEGETDPAALAALADYRLRATPEQLRDALGACGQLHGVYRRLLKMALEELKLMEEQIEQLEQEASKLLQQHQNAVQRVAAVPGFGVDSAIQAIAEVGPEAAAFETYKNLSSWVGACPGEEESAGESKSTHSPKGNRTMRRLLNQAAHAAIKVKGSIFEMTFRRLLPRLKYQQAIWAIAHRLCRLIWKILHEGVRYEERGPAVSAKSKRTRTARMIKELKALGYRVEGGPLPAGTPA

SEQ ID NO: 418617 - protein, 346 aa, unidentified
MDHYAGIDVSLECSSVCVVDTNGKIVREAKVASEPEALIGWFRSLGFDLARIGLEAGPLSQWLYAAMKQAGLAVELLETRHVSDAFKAMPVKSDRNDARNIAQLMRLGWFRPVHCKSMSAQEIRAMLTARKLLQSKLQDIENSLRGTLRGFGLKVGKTTKRSFASRISELVAGHPALETIAAAMLAVHMALLREFNGLEKRVRAMSLLDAKAKLLMSTPAVGPVISLTYASAIDDPCRFTSSKRAGPLFGLTPKKYQSGETDYSGRISKLGDASVREALYEAAHIILTKPIKRCSALKSWAMRIARRAGMNKAKVALARKLAVIMLRMLKDNMPFDPAAKAAAAAP

SEQ ID NO: 418618 - protein, 357 aa, unidentified
MISKKISVKSKKNNSCSLTENESYGHYIALDWSEKNMAIARLGKKDTVPKIIDVPSDLKELKLYLSKLQGKKILTIEETTTSQWLYVELYEYADRIFICDPYRNRLLTDGPKTDRIDAGKLCKLLKNGMMKEVYHSTNQMYELRKLVSYYDDEVRAGVRLLNQKSALYRAENKSWKKKQELEASRVNKFIVAQLDEKIESYREKKKKYEEEFEKISKKSKVLRSLKSIPGLGPISSVTILSIVIDGRRFKSSNHYLSYCGLVKHEKQSGGRSYGRRSPRYSRRLKAVYVSAAVRVASTENPLRQYYEYLLNEKKLPVYNAKNALARYIAKISLGIIKSGEKYKPYKWRESKKGKEAA

SEQ ID NO: 418619 - protein, 378 aa, unidentified
MDRYNPEPYPVALDYVSMRRGRHLSTGSSLADFNCKGLLMKTYELFVGPDIAAETVSVAWHHPQTQQSGQMEIAQKQVDYNRLCRQLIKLADPARTLVVMEATGNYWLGLALFLHHAGFVVSVINPIQSRHFARMQLQRTKTDAIDAQLLADFAQMIQPEPWTPPPAICEQLQQRLAQRDAFLHMRTQERNRLHALRHNPNADKSILRRLQRHIRYLDKEITALQREIEALLLGDHAWGDSARRLLTVNGFGTIVTAWILVATHNFARCDTPEQAASFAGLAPHAKDSGSSRRGRRTVGGSGHAALRKALYMAAGSATRYNPPIKTFYERLVQNGKRKKVARCAAARKLLHIAWAVVVKEQDFDPNYQSRSEIQKIAA

SEQ ID NO: 418620 - protein, 361 aa, unidentified
MAKARTLVGLDVHAAKVVAAILDAETGEIRFQRLGGESAPVIELCSSCPGPVRATYEAGPTGYGLARGLLEAGVDCLVAAPGKIPRGATERVKTDRRDAEHLVRLLLAGKLSPVRIPGPPEEAMRDLVRAREDLRMDLMRARHRLSKLLLRHEIRFEGPGKNWTERHRAWLAKLEFSDPAAQATFEDYRGGVETLLHRRRELDRRLEALIPSSPWATEVGRLRCLRGIDTLTAVGLCAEIGDFRRFGKAGQLMSYLGLVPSEHSSGESRRLGSITKSGSRHGRRLLVEAAWHYRNQPRVGREIERRQAGQPPAAISISWSAQRRLHRTFTAMRRRNKRSTVTTVAVARELAGFCWAIAQIE

SEQ ID NO: 418621 - protein, 343 aa, unidentified
MELYVGMDVSLKETSICVVDGKGEIVSEGTVISEPSAIAAFIKAKAGNAVRVGLETGPTTTWLWHELRALGLPVICIDARHAKAALSMQINKSDRNDAVGLARIMQCGWYKEVQVKSVSCHEIRAVLNARAQLVKIKRDLENQIRGLLKNLGFVIGKAGGTVFRRRVEELLGRHDLLWEAVRPLLEVREKVRREIAALYRKLLGLARNDADSRRSMTVPSIGPITALAFRSAIDEPARFRRSRSVGAYVGLTPRRFASGEVDWSGRISKCGDRMLRTYLFEAAGVLLTRVAQWCKLKAWGHRLWKRIGFKKAKVAVARKLAVMLHRMWRDGTDFIWSTKEAAA

SEQ ID NO: 418622 - protein, 341 aa, unidentified
MKKFIRVGVDLAKNYFQIHALASEGAPAVTRKLKRSKMHEFFSQIEPCLVAMEACGTAHYWARELKAMGHEVLLMPPAYTKPYVKRGKNDAVDADAICEAVSRPGMRFVPIKGAEQQATLMLHKTRELLVKQRTMSVNALRGHLSEFGIVAAKGIGRVDELLDLAESDATLPNAARASVKVLAQALEGLDKAIDDLEKEITGAHAQNEMSRLLDKVPGIGKLIASVIAASVPDPSVFKSGRDFAAFLGLTPRQNSSGGKQTLGGITKQGNRYIRKMLVLGATSLLNVVGKRKGALRDWIVGLLAKKPARLVTVALANKLARILWAMMKTGECFRTEMFAKA

SEQ ID NO: 418623 - protein, 340 aa, unidentified
MTITTVGIDLAKNVFAVHCVDQHGKTVLVKPKVSRAALPELIASLPPCVIGMEACSGAHYWARLFRQYGHEPRLMAAKFVSPYRMAGKSGKNDAADAQAICEAVRRPHMRFVPVKDESQQAMQCLHRIRQGFIEEKTATYNRLRGLISEFGVIAPQSTDALRHMVSEQKSSLPLQVQQCVNDLLEHIDRIEDNITEYDRILSRMAKTDHRSQRLMELKGIGPTTACALVSSIGNAHDFKNGRQLAAWLGLTPSQYSSGGKSKLGRITKAGDSYLRTLLVQGARSVLIGAEKRTDLFSRWVCSLVDRRGYWRAVVAIAAKNARLCWASLHYGDDFRLYSAS

SEQ ID NO: 418624 - protein, 311 aa, unidentified
MTYVGINVSKKTLDCCVLDADNEVYLKVQNSQGGYDELMSLLVLYDDVHVCLEATGSYWQSLVEFLAANDVRVSVENPAKIHYFAKASMLRMKSDKRDALLIADYCKVMTPRLYSPVAAAVAELKLLVGMYQRLKKQKISERVKLLEAPALVKPLINSNIEHFNNQLLETKEMLKAFFRSNADLAHKHEILQTIPGIGFSSGAVLLSILASGYTFESANQFVAYLGLNPRKMESGTALKGKERISKIGKPEYRAALYMPAVVAYSKNLYPDIVTRLQSNGKTPKVIIVALMRKLAIYAYTVYKTNSAYVAK

SEQ ID NO: 418625 - protein, 438 aa, unidentified
MSNKVIFNLDELFISVGIDVGADFSWMSIALPNQQFVGKPYKILHSSIDSLTTAVSKIKEAEELYSLESRIFLESTGIYHYPLFCYLRDKGFNCSVINPIITKNSTNINIRKVHNNRFDSKKAALVGLKPDLKVSLMPSDLALNCRNLCREYYDLMDNRSAYVNKLQGELRMAFPQYLGIFSKVTINTSLTLLETYTSPSAFLEADKQEIIDIIKSTARFGLTYAQNKYNAIIQAATDANQFGYIIDSNIKRIRLYISFIRKYDEEINSILESLHELVDANEDADFVKQIHLIETFKGAGFLSAVSIMGEIGDFSAFSKPKQLFAYFGLDPAVKQSGKFEGTKVQMSKRGSAIARRVIHTLTLQSISISRNGEAKNPVLREYYLKKCDSKPKLVAMGAVSHKVCNMIFAILRDNKPFKIIAPQEHIKQYNAAKCDMTA

SEQ ID NO: 418626 - protein, 419 aa, unidentified
MSRSLGRAIGLDVHRDFCEVAIAEDGAVRSAGRVETTPERLELFARSLGADDRVALEMSGGAWEIARILEPHVERVVVVSPDDTGIRQARAKTDRLDARTLAKLLAAGELDAVWMPDEACRVLRRRLARREQLVRSRTRAKNEIHAILMRRLKGRPPVSDLFGVKGRKWLRELELPLEEAETLESSLRHVEFLDQEIAAVERLIARDALRSAEVRRLMTVPGVNVICAATFLAAIGDIRRFRSPRRLVAYLGLDPRVRQSGTEPARSGRISKRGSASARWALVEAAWSVVHQPGPLRAFYERIRARRGHGKAVVASARKLTVLFWCLLARGQDYAHQQPSLTAKKLRLLEIRAGAPTLKGERTGLFATRQRMRKAERELAQQAEASYKRMVSDWQAARPEKAKQAGPAEVGASVTAGRA

SEQ ID NO: 418627 - protein, 312 aa, unidentified
MEKLSYGGIDVSRDRLDVVVLPEGWFFSVSNDTAGWTELVARLRPLAVCAIGLEPSGGYERGIIRALLAAGLSVRRINPNKLRQFARARGVLAKNDRLDARLIAEYVAIMPTRVVQRDGAVERLAEVVTMRRQLCDEHVAVENQAAHLQDAMLRRLSKRRLVRLEADIRLLDKRLAEMVATNAAFAQLYELLTSMPGVGPVLAFTLIALLPELGKMSRKQIAALVGLAPYDFDSGKLRGHRSIYGGRMPIRNVLYMAALSASRYNPALKTFSNRLAHANKKSKVIIVAVMRKMITTLNAMLRDNAAWQPQSA

SEQ ID NO: 418628 - protein, 403 aa, unidentified
MNMNAVGIDVSKGKSMVAILRPFGEIVSTPFEVKHTVSGIRSLIEHIKAIDGESRIVMEHTGCYYEPLVRELSQADLFVSAVNPKLIKDFGDNSLRKVKSDKADAVKIARYTLDSWTELRQYSLMDEIRNQLKTMNRQFDFYMKHKTAMKNNLIGVLDQTYPGANTYFDSPAREDGSQKWVDFATTYWHVDCVRKLSLNAFINHYQKWCKRRKYNFSQSKAVEIYEASKEIVSVLPKDDLTKLIIKQAVEQLNMASQTVEQLRTMMNDTASKLPEYPVVMAMKGVGKSLGPQLMAEIGDVSRFTHKGAITAFAGVDPGVNESGSYEQKSVPASKRGSGTLRKTLFQVMDALIKTKPQDDPVYLFMDKKRSQGKPYYVYMTAGANKFLRIYYGRVKEYLSSLPK

SEQ ID NO: 418629 - protein, 377 aa, unidentified
MSKLRFVGLDVHAETIVVAVAETAGEVRSLGGIPNRLESIRKLVHKLGPVQHLRACYEAGPTGYVLYWQLTQLGVECAVIAPSLVPTKASDRVKTDRRDAEKLARCHRAGELTAVWVPDAAHEALRDLVRAREAAKKDQLRARHRLGKFLLRHGQQRPEGVKVWTKKHREWIKSHVRFEQPALEATLADYLEEVDHVGNRITKLETAIDEAIQQAPPAIKVVVEALQALRGVAQTVAVSIVAEVGSLSRFPNPRALMGYSGLVPSEHSSGNRVQRGGVTKTGNGHLRRVIGEAAWAYQHRPNVIGFLAQRQKRLAIGEESKKIAWKAQQRLHKRYKALSARGKNKNQIITAVGRELLGFIWAIGVSVEKQHPVTTAA

SEQ ID NO: 418630 - protein, 442 aa, unidentified
MKPLPILDPKAAAIDVGSEQLHVSIAGDSPKVFGTFTGDLHKLIEWLKSNGVKTVAMEATGVYWLYLYELLEEAKFQPVVVNGKHVQNVPGRKTDMSDCQWQATLHAHGLLRGGFVPPAEIRRLQDYQRLRADHIILAASQVQKMQQALERMNIKLHDVISDLTGVSGLKMVRAILNGSRDPDHLLSLCDEQIQKKKASAVRESLRGCWKAEHVFGLRQALELWETFQSKIRDCDAEIQKLLQEMAGPEPPPEAGGQSLVLGPVKAVSKNGPVIEGLQRILARICGGCDATRIPGFSTYMVLQIISEVGTDMRRWPTEKHFVSWLGLAGGCKQSGKRKKAVKAQRNRPGRMFCRAAASLAESVDKALGGFYRRLRGRIGGLAANVALARKLALLFYRLLRYGAQYVEAGLKAYEAKVLETEARLLRKLARKQGFILIPQTKK

SEQ ID NO: 418631 - protein, 430 aa, unidentified
MKSNTQNAKIEAITEKTLVLGIDVGSEMHYARAFDYRVIEYSKKPFKFSNTEAGFATFKEWVLDLKERHEKDKVVPGMEPTGHYWFNLGKFLQDNEMKPVLVNPHHVKKSKELDDNNPTKNDRKDPKVIAGLVREGRYMIPYLPDGVYADLRTASNIRFQLQAELTRIQNRISRWFNIYFPEYKTVYGKPDAKSGMLILKAAPLPEDILTLGIDGVNQIWRDAKLRAVGKARAKTLIEAAEHSVGSKEGAVSARMEIRMLLEDYESRNTRLQEVMVLIEELVRKIPMAEKLLEIKGVGIRTVSGFLAEVGDISRFNNPKELQKLAGLALVENSSGKHKGETTISRRGRKRLRYLLFEVAMSLVSKNQEFRELHNYYTTRRLNPLKKMQSLMAIAAKLIRVFYAMLTKGVDYDPKKMVSDIKRPAVYLQAA

SEQ ID NO: 418632 - protein, 345 aa, unidentified
MASIVGGLDIHRKQITFGYADAVTGEVCRGRIAPADREHFRAWLAGRFGDPGQVVFAVEACTGWRYVTEELAAAGIGACLAEPAGTATLRGRKRRAKTDRADARLMRDLTADGRLPQCWVPPAHVLECRALLECYHDLRAEHTAWVQRAHAVLFHQGAPEFYDLSRPDAPAELAAAAQRYLSPAGQVQIGTCLRMLAGTEAELAAVRQLLLAAARRMRGAKVLAESIYGVGPVTALALTCWLGGAGRFSSARKAVRFTGLDITVHSSDAKRSPGHLSRQGPAVLRWALYEAGKTHARPAAPDHRYYASVKERKDGKRAALAEARKIVRRACHILAELGDDALAMA

SEQ ID NO: 418633 - protein, 411 aa, unidentified
MDMVDERGAGLDVHKQTVVACVMVPGPTGMPHKEVRSFGTMTDALLELADWLAAQDVTHVAMESTGVYWKPVWNLLEDRFHLLLANAQHIKAVPGRKTDVRDAEWIADLLRHGLIAGSFIPDRPHRELRELTRYRTSLVQERSREVNRLQKILEGANSKLASVVKDLTGKSAREMLAGLVAGTSDPSTLAEVARGRMREKLPLLEQALRGRFADHQRFMVAQQFAHLDFLDEAIAQVSAQIAERMRPFEQEAIERLDTIPGVGRRTAEIIIAEVGADLSHFPSAAHLASWAGMCPGNTESAGKRLSGKTRKGSKWLRTALVEAGQAAGRSKKTYLGAQFRRLLTRRGKKKAAVAVGHSILVIAYYLITRQRTYDDLGPEYFEERERTAIERRLVRRLEALGNKVSLEPIAA

SEQ ID NO: 418634 - protein, 347 aa, unidentified
MNYNQQHRFYCGVDLHARSMYVHIVDHKGKSVFDRDLTADPDEFLDAIKPFRKNIVVGCECMFAWYWLADLCEDKKIPFVLGHALAMKHIHGGKSKSDKIDAGKLANMLRGGLFPLAYAYPRAKRQTRDLLRRRSFFVRQRGQLIAHIVNTNSQFNLPPLPKKLAYAGNRSDEIAARFRDPSTQLMIRSDLALIDNYDEQIKKLELHLTQTAKIDDPVTFQFLRTVPGIGPILGLILLYEIDQIGRFPEVGNFLSYSRLVRCEHSSAGKVKGSGGKKIGNAHLKWAFSEAACLMKRCCPGVRSWCQRQEKKRGKRKTLSVLEAKIGRAVYHLWRKQVAFDLKRFLQG

SEQ ID NO: 418635 - protein, 388 aa, unidentified
MNTNTNTTTASTTILAIDLGKYKSVACVHDQATGEFAFTTFDTSRAELRKLIGKTQPAVVIIEACLLAGWVHDLCAAMGVRCLVANTASEAWKFKYLKRKTDKDDALRLAQLYLLDQLPTVTLPPTAVRQWRSLIACRQALVGRRVAVPNRLRALFVAQGLPTPRGAKAWAATGLAGMATWAKPLAECMADELWRGLLELSLTEYRQLCELINQAETKLDAIGKQHADVVLLETAPGLGPRTAETVAAYLHDAPRFNTGKHVSAYSGLVPRQHQSGEMDRRGRITKRGPALLRQMLVECAWCMIRYNAWARGIYQRLTGGGQRRKKQAIVALARKILVRCWAMLRDRKPWHDPQTGPKPTRPPSKQRRQAEARQRRQDKQAALTVATT

SEQ ID NO: 418636 - protein, 338 aa, unidentified
MIQRFHGLDRHKKHSTISVLNREGQEVEFVSKCPDLRSYIEQLSPEDAVVMEAATGAFFWADLVESTGAACHILHPYKFKIIRDSWNKTDKQDARNMAKALWVYLVTGEFGIPTVYKPSVAIRELRRLFSQYQLLNRQVTILKNTIQEILADNGISLAYHQKTMLSSDTEAKEMMDEFDLSPASLLSIQTNLEVLWKVEEQKNGLKKEILLAGDPFADEVKLLITVRGITPLTALAFLADVADIKRFKTLRKMNAYLGLVPRVNESGGKSKTGHINRESRRLPRTLFTQSVVHFAGASSYLRLYYSNLIALIGHVRVCWGPGRATTRVYLAKTCISNF

SEQ ID NO: 418637 - protein, 392 aa, unidentified
MVVSVGIDVAKDKHDCFIQSSEGEVLADVFTISNNMDGFHTLLEKIQACTASQDKIKVGLEATGHYSYNLLGFLLDNGLATYVLNPLRTNLYRKSLSLRKTKTDHVDARTIAAMLLSDVGLKPYTNTAYHNEELKSLTRYRFDKVKERAKLKSSISRLVCILFPELEKLVSSLHLATVYALLEEFPGAKQIAKAHLTRLKSLLENASKGRYKRDMAVAVRDAARNSIGSKMPAKSLALQHTIRLIQELDTEIDEIEAEIEAMMEEIHSPITTIPGIGCRMGAMILAEVGDLSRFDSSDKLLAYAGMSPSTYQSGQLKNCYPHMEKRGSRYLRYALYNTTKYVCLWNPTFAAYLAKKRAEGKHYNVAISHAAKKLVRLIFAMEKSKQPYRSAA

SEQ ID NO: 418638 - protein, 349 aa, unidentified
MLADELDYVVGVDTHRDRHALAVVAAPSGGVVAQRSVRASAPGYAEAVRFAEEFAPGARAWAVEGAGHYGAGLVRHLSRRGETVLEGGRGPRNERRLRGKDDPLDAIRAARATLASEKLVLPRTGPRREALRWLLIARRGAVEVRRRALVQLRSVIVTAPDRLRGELRTLPERRLLERCSHFRRSSSCSLDELAAKLVLRTLARRIEAATMEAEQLEREILAHVRALAPRLLEQPGVGAIVAADVLVAWSHPGRVRSEAAFARLAGVAPVPASSGQTIRHRLSRGGDRQLNRAVHTIVLHRRQHDAATRAYVERRVAEGKSRREATRLLKRYLARHLFRLLQQTEPLMT

SEQ ID NO: 418639 - protein, 325 aa, unidentified
MIDGMLGIDVSKNTLDASMSSCNDKVRAKSFANSPDGWRHLLDWLIGQKIRRVHACLESTGRYSLGIACKLNEAGHVVSIVNPAQIRDFARTKLGRNKTDAVDASHIREYCELFKPPPWAPPSHAHRQLGELQTIRAGIVAGLTEWKNRKNSGMVDAVTQSLVDATISHFTSQLGAVEKTIAQAIDNDSDLRRKRDLLLSISGVGETLASVVLAELPGPDVLHSSAEAVAYTGLNPRRHRSGTSIDRQTRISKIGNAVLRAALYMPAMSAMRHNPAIVALVTRLKARGRLNPKQIVVAAMRKLLVLCFGVLKTGKPFDPALAMGC

SEQ ID NO: 418640 - protein, 317 aa, unidentified
MNNNNTLYVGLDVHKESITVAYAINSEPVELMGKIGTSPTDIQNLCKRLRSKSSQVSIVYEAGPCGYGLYRRLVKSGFDCMVCAPSLIPKKPGERVKTDRRDAIRLVRSLRAGDLSAVYVPGIEDEAFRDLARAWASARDDLRHARQRLKSFLLVHGVHYVGRADWGPAHRRWLSKYSFESPWRQLAFDEHRRTIEDRQAQCERLESALKEAVTEWRLYPVVEALQAMRGIQFITAVGLISELGDLTRFEHPRQLMSWFGITPSEYSSGGSRHQGSITKAGNSYARKLLVEAAWSYRHPARISPAIQKSRKIYPPRH

SEQ ID NO: 418641 - protein, 371 aa, unidentified
MDESSKTLYVGLDVHKDSIAVAYAPEDRGAEVLSLGAIGPRQCDIDKLIRKLESKGATLVFGYEAGPCGYGLYRYLTGKGLTCQVVAPSLIPRKAGDRVKTDRRDAITLARLMRSGDLSPIYVPGIEDEALRDLSRGRDDAMQDLKRSKRRLKSFLLRQDIRYEGRASWNAAHLRWLSEVVCPTPPQQVVFQEYVRAVSEQQERVQRVERELHEAVKGWRLYPVVEAIQALRGVQLTGAVILMAELGDITRFENPRQLMSYLGLTPSEYSSGARRHQGGITKAGNSHARRALVEGAWAYRYPAKVSRHLQLRLEKLPTEVQAISWKAQVRLCKRYRQLTARGKHVNQVVVAIAREMAAFAWAIARLVPLAA

SEQ ID NO: 418642 - protein, 376 aa, unidentified
MEHDSTLYVGLDVHKESITAAYALGMGEVELLGKVGTTKTDIDRLCKRLQSKASRIRIVYEAGPCGYGLYRQLQQKGIDCMVCAPSLIPRKPGERVKTDRRDAIKLARSLRADDLSEVYVPTVEDEAFRDLARAWVGAKDDLKRARQRLKSFLLSHGVSYTGRADWRAAHRRWLSTFAFDSAWQQLAFEEHRRTIEDRLAQCDRLEAALREAVVAWRFYPAVLGLQTMRGMQFTTAVGMLAELGDLSRFTHPRQLMAWLGVTPSEHSSGEKRRQGSITKNGNSYARKLLVESAWSYQHPARVSPEIQRRHEGIPKPIVDRAWDAQVRLCRRYRTLVARGKQKNIAVVAVARELSGFIWDISQLAMSLASQPQRRAA

SEQ ID NO: 418643 - protein, 402 aa, unidentified
MSPKLNNEIAVIGIDLGNSSFCLVGPGSALHRCQRSTLAGTPKTKEHAMSQKLDSEIAVIGIDIGKNSFHLVGQDRRGSIVLRQKWSRGQVEARLANLQPCLIGMEACVGAHHLSRKLQALGHDARLMPAKYVRPYSKGEKNDYRDAEAIAEAVQRPTMKFVATKSADQLDLQALHRVRERLVGQRTSIINQIRAFLLERGIAVRQGLHFLRAELPTILAKRTDVLSPRMLRVIEDLAGDWRRLDERIEALSDEIMTLGRQDKGCERLMTVPGIGPIISSAIVAAIGTGDAFAKGRDFGAWLGLVPKQMSTGDRTILGSISRRGNRYLRKLFVQAAWVVLAKITPEGWERYGLKSWIEAAKQRLHRNVLAIALANKLARIAWAVLHKGRAFQCVKTNAPRVA

SEQ ID NO: 418644 - protein, 366 aa, unidentified
MKKISTVQVFGNEIFKEQKLTIGVDLGDRWSFYCVLDEAGQVILEQKLPTTPEAMKQTFGKIPRSLIALETGTHSPWVSRLLTELEHEVIVAHAQKVELITKSNRKDDRHDARTLARLARIDPELLGPVRHRSAKAQIHLTVIRARAELVSARTALVNAARGLAKSFGERLPKCGTQQVSGKLAEGLSAELREVLEPLLREVESLNERIQEYDERMEKIAKEVYPEVSLLKQVKGVGTQIALTYVLTIEDPYRFPKSRAVGCFLGLRPGRRNSGENEPQKKISKEGDRYLRTMMVQGAHYILGPFGEDSDLRRWGLKLAERGGKNAKKRAVVAVARKLAVLLHRLWVSGEVYEPLRNSQKAMRAVA

SEQ ID NO: 418645 - protein, 420 aa, unidentified
MKEPVINDFAALVGIDWADKKHDVCEHVIGTEKYHYSIISSKPESLHDWAMLLKKRYPNQSIAVACELTKGPLIYALSKYDHLTLFSINPSTVAKYRKAFTHSGAKNDPSDAFIQTEILEQHMDKLSVIRPESVNVRALTQLLEYRRKVVQDRVDLTNRITATLKNYYPQVLDWFKEKDTTVFCDFLIKWPSLAAVKKTRKQTLMTFFNAHHSRYAAVNEKRIQEIKSAFSLTDDLGVIEPNQIMIEVLIPQLKCLLESIERLDKEIKQRYKNQSDRKIFDSLPGAGPQLAPRILVAFGSDRSRYKCANDLQKYAGIAPVIEQSGQKKWTHWLYSCPKFLRQTFVEWAGQSVRYSFWARAYYEQQLSKGKPHNTIIRSLAFKWIRIVYKCWQTNMPYDESKYLKALKKQGSPLLNFAVNG

SEQ ID NO: 418646 - protein, 400 aa, unidentified
MTASLLDTEVIGGIDSHADTLHVAVIDTRGVRLADQEFPTTTLGYVAVLAFLKRHGALVAIGIEGTSSYGAGIARAARTEGIRVLEVNRPDRAERRRVGKSDRIDAYQAADAVLAGRADSTPKDSSIESIRALHNARRSAIKARTATINQIHQQLVVAPDDVRAKYANLSISALLKALATSRPAPTSPAFAVLIALKTLAVRAQFLTTQHTELGEHLDQLVATANPALRAAYGIGVDVAAQLLITAGANPERMRSEAALAALCGVAPVPASSGRTTRHRLSRGGDRAANNALYRIVLVRMSSHAATRAYVTRQRAAGRPTKEIIRMLKRAVVREVYRYLSNAVTVPDISDLRPTRQAKNITVTAAAQHFHVWPSVISNLERGIRRDDELATTYRQWLKAA

SEQ ID NO: 418647 - protein, 348 aa, unidentified
MENSTTIAVDLAKAFFQVSVSKVPGRVSERKRLSRAKFVSFLMQQPPAEIVMEACGSAHFWARTARDLGHRPVLLPAHYTAKYVLRNKHDRADADAILEARRREAIRPVPIKTVEQQTIAFLHRMRSGWLQTRTARINAMRAIFRELGKVIPAGPRNVLPHLPDLMADIPGALHPCLLAIADEIRLLEAHIKDAEHQIKTLLADSDGARSLQSVPGIGLITCSAMIASVGSPSRFRSCRAYASYFGITPKEHSSGAKRRLGAINKEGDRYLRTLLIHGARAVLLAARRSKNPDRLHTWALHVHDRRGHNRATVALANKIARIAWAVWSKDTLYQSLPATAPARATAAN

SEQ ID NO: 418648 - protein, 362 aa, unidentified
MASMCHSGGVVTPLEEVCVSKVITIGLDIAKNVFHAHGADERGATVFSRKLTRGKLLEFFAGQPACTVALEACGGAHHWARQLQALGHDVRLIPPAYVKPFVKRNKNDAVDAEAICEAAQRPGMRFVAVKSEEQQAAGLVFRTRDLVVRQRTQLINAIRGHLAEYGWVAPRGTASMTMLADLLEDGDMAGSLPKAARPMFKLMIDLLAELDEQIAVLDREIARRAKDDEAARRLMTIPGIGPIAATAIIALAPPIETFRKGRDFAAWLGLAPRQHSTGGKQRLGSITKMGERTIRRLLIIGASSVVLQASRRGAQSGSWLERMLARKPRMLVSVALANKMARMVWALLTRKEDYRAPAAVSA

SEQ ID NO: 418649 - protein, 338 aa, unidentified
MTILMGLDQHRAQITADWVDTSTGEVSRARVTPGHRAGVRQFVGRFAGEELEVALEATTGWRFVVEELHAVGARVHLAEPAETSALRGNKKRAKSDRADARHLRQLLMADRLPESWIPPDHILDLRARVRLRHTLSEQRGEWQQRIQSVLYHHGCPQRGDLMNRDGLAWLDAQPLAACARDQVRIALAMIDALDTQIAPLDQELRSYARRQPGCKALLAHYGIGPITSVTILAELGDPNRFSSSREAVRYAGLDITVHQSDQRRAPGRLSRQGPPALRWALFEAAQCARRRTSPDHAYYLEAAERLGGNRACLSVARKLLKRSYHTLRELGEEALQPA

SEQ ID NO: 418650 - protein, 399 aa, unidentified
MIENYDSVDVFIGVDVGKSEHHAVALDRTGKRLYDKALPNDEARLRAVIQKLKVRGQVLLVVDQPETVGALPVAVAYAEGILVGYLPGLAMRRIADLHAGEAKTDARDAAIIAEAARTLPHALRPLRREDEQIAELSMLCGFDDDIVGQMTATSNRLRGLLMQIHPALERVLGPHLDHPAVLDLLQKYPTPTALTAAGKVRVGNRLITLAPRMGRRLAEKIFQALSEQTVIVGGTHATRAVLPRLAEQLGTLHRQRAEIAVEVAELVDANPLQPIITSMPGVGVRTAARVITEISGKEFATAGHLASYAGLAPVTRRSGSSIRGEHPSRRGNKVLKRTLFLSAFAALSDPVSRTYYDRKIAQGKRHNQALIALARRRCDVLYAMLRDGTLYQNKTPVKT

SEQ ID NO: 418651 - protein, 411 aa, unidentified
MTCGIDWAEDHHDIAVVDTDARLLGKLRIGDDATGFQDLLRLLAEHGDSPEDPIPIAIETSRGLLVACLRASGRRVYAINPMAVARYRDRHAVSRKKSDHQDAVVLANILRTDAELHRPLPDDSDLVRAIAVLARAQQDTVWDRTRAHNRLRSHLREYYPAILEAFADKRERLPAREARAILAVVPTPGEAACLTRSRLKAAVTRAGRQRRIDAETDRLLEVLRRTRLRRPGLVEAAMGRQTLALLAQLDAACQACDDLARATEELFLQHPDAEIITSFPGLAVLTGARILAEIGDDHTRFDTARDLKACAGSAPVTRESGRSRRVSHRRIKNSRLAATGRHWAFAALTASPGAHAHYNRRRETGDRYYAALRHLFNRMIGQLHHCLTTHQKFDETTAFTPPTKPQLTTAA

SEQ ID NO: 418652 - protein, 461 aa, unidentified
MRKTRKVAGQRGKKRVDVTANLEILHPNAAGIDVGNAQHYAAVPVGRDPQPVQTFGSFTADLHRLGQWLRACKIETVVMQATGVYWIALYEVLEGYGFNVYVVNAKHTKTLPGRKTDVCECQWLQKLHTFGLLNNSFLPPEEIRVLRTYLRQRENLVAGAGTCIQQMQKVLTQMNVQLANVLSDLSGRSGLEILKAILSGERDPYRLAALADPRVQASRKEIAQSLEGHWREDLLFVLRQVHDLYFFHLDNIAECDRRIEAHLQTLGSKVDLATQPLPQPTPLPRRKHIPQTNLREELYRITGVDLTRIDGIQVQTAQVVLSETGVDMTPWEDEHHFASWLGLCPNHQITGGKIIRRGTKKVLNRATTALRLAAQTLHHSQSYLGAKYRRLRAKLGAPKAITAMAHQLARLIYRLLRFGTEYHDKGMQHYERQYRKNQIEWLKRQAAQLNMQLIPNTGVAR

SEQ ID NO: 418653 - protein, 346 aa, unidentified
MMLIGCDYHPSWQQISWVDTVTGETQEKKLEHASGEAERFYRQLPAPALIGMESTGNCQWFVELAATLGHDLWIGDAAKIRACEVRAQKHDRRDAALILKLLLEGRFPRIWTPSGEEKDLRQLLIHRYKLVRIRAQVKNELQHLAMNQGVTKKRKLWSKAGEKVLRELPLAPWAGRRREDLFKVREMLNGQIDLLDQAVVEAAEKNEKARLLMTQPGVGPITSMAFVLTMGDVHRFQRGKQVASYLGLIPREYSSGEHQRYGSISKQGNRFMRMLLVEAAQCAVRYDPQMRSEYLHRCHRKVKGVAKVAAARKLAIRLYWMLRTNTGYPEVVRVESSSRVPLVSAS

SEQ ID NO: 418654 - protein, 429 aa, unidentified
MTRISAGVDVSKNRSTVCIMDQDGKVIMRPFLVWHSTEELDFLADTLKRLNGEVRVIMESTSIYQYPIALHLKEKGIFISIVNAYKVKKFANTDFRGGKTDKKDSRTIASYGISYWDKLVEWQIPKDTYFNLDLLNRTYMNAKKHRQIILQELQHYIDCAMPGMDKELHSLNLNTKKDFMLDFVEKFWHRDEIVNMTEAEFTEVFTAWAKEKGYRPGKGKAAKIYAIAKSCIPYYPANPTVKTILQCIVDKLSGVNRTLVTIVTQMIEEAKKLPEYQIVREMPGVGDPLAARFFGSAGDIRRFKNSKALVAYAGIDSPPDESGDFSSTHRHITKKGSKVFRDTGYEIMMALRAQKRTWEKVRKNPEVYDYMLKKEAEGKPPKVAKIAALNKFLRIVYARIKELYDNMALAERAKAKTKSKTKAKTKVTA

SEQ ID NO: 418655 - protein, 448 aa, unidentified
MFIMHYKRLLTFIDGVSSYLSVGLDVGADFTWMSIALPNGSFVGKPFKIIHSDSRSRDLAVTKIKEAQETYSLKSRCFLESTGIYHIPLLCFLRDKGFDCSVINPIITKNSTNINIRKLHNDKFDSKKAALVGLNVSLKTSILPDDSVVDLRNLVRDYYYFKDLQSAVALKLTAELKVSFPAYAKVFSKVTTQSSLKLLSSYPLPADMLAASKEDIVDIIRSTARFGEAYALRKYDAIIAAAQDAAVFGRALPSNAVRIRLYIDTYQEYQKHLDALLKALHETIEKLQDTLIYDQICLLQSLRGIGFLSAVVLIAEMGNFKLFSSPKKLYAYFGLDPAVKQSGKLNGDKVHMSKRGSSLARRVLHMAALNNVKVDKGSGTPVNPVVYDYYTRKCSGKKRPAAMGAVMHKICNIIFAMLRDNKPFEIITPEEHCRRFATEHPDKIRKAA

SEQ ID NO: 418656 - protein, 401 aa, unidentified
MNAVGIDVSKGKSMVCVMRPFGEVVLKPFEVLHTAQNLHDLAEKLKALDGETRVVLEATGNYHKPVAFVLHDAGLFVSVVNPVLIHDYDNNSLRRVKTDKKDAVKIANYTLDKWTQLRQYLPEDDTRLALKNCYRQYQQAVAIRTMLKNNLISSLDLTFPDANKLFSSPVKNNGCEKWVDFIGDFWHSECVSSLSANAFAKKYLKWCQKHGYVFTRSKSDEIYACAVNSASLPKSPTSKLLIQQQVAQLKAVSQSVAAFRQEMLRLSQQLPEFDTVMEMYGVGPSLGPQLMAEIGDVRRFSSKKSLIAFAGIEPQPNDSGKVVGNDKGISKVGSAVLRRTLFLIMTVILQTQPQDEPVFQFMNKKRSEGKPYKVYMMASANKFLRIYYARVKAVMDSERSQ

SEQ ID NO: 418657 - protein, 351 aa, unidentified
MDYRVYCGVDFHARQQTICSLTTEDGVVSTHELKHQDKAELRAFYSQFSGPVLVGLEASGYSPWFEQLLEELGHEVWLGDAIEISRRARRRQKNDQRDAELILDLLVHDEFPRIHRPTPESREILRMLRYRQKLVKMRTIIKNSLQALSLQSGLSRRSQLFTKAGLEQLRATTMSPVMQYQRDQWLQSIEPLNQRVAETVVWLKQQAKGDQRIERLRTHPGIGLLTALTIVHTLEPVGRFRNQRQVAAYGGFDPREHSSGEKKRYLGISKAGSRLLRFFMVEAAHTAVRYDDDLKRFYQRLHLRRGKPTAKVAVARKLLIRSYILLRDEIDYAEFSRRAVAAGLARPLHRP

SEQ ID NO: 418658 - protein, 368 aa, unidentified
MLKQSHYKVGCDAHKHYSLFAVFDRQGKPVKRTRVNHTPGAIRAFLSGFPPGTPVALETVGNWYWIVDEIEAADCLPQMAHAAKAKMMMGHVHKTDKLDADGLATLLHNGTLPSIWIAPGSLRDERELPRTRMAFSKMRTALKNRMHSTLAKYALSLDTQSDIYAPKWLPQLLQLICSLPDETRRCMEQELELLGLVQDQIDRLEARILERVQMTPTIQLIQSVPGPAKILAIVIDREVGSIDRFPSPACFASYAGLVPRVRASGGKVHYGRMIKQANNYLKWAFIEAANVVVRQRHHPAWQSKHVVQIYERTRQRKGHSVAVGAVARYLAEATYWILKKDEPYREPISRQPAGTTSAASSKQGQAPA

SEQ ID NO: 418659 - protein, 318 aa, unidentified
MNVIGLDVSKDTIDATLITTKGSKDYIKISNSTDGFENLINWIKTKRIRKIAISMEATGIYYEQAAEYLSALYTVYVINPLKIKEYAKSQFSHTKTDKADSKLIAEFANRHLDKLTPFRPSENPILYKLVNLLQQLKEQQKETQNRLHTAKDIYIKSTHEAIIELLEEKIDQTSKRIEGMIKQKESLNIEYQNLQTIPAIGKETAVILLRHLTDKNFETANKFVAFAGLSPKIEQSGTSVKKNGRLSRYGHRQLKRALFMPALVAYRMNAFPQLVRNLEAAKKPKMIIIVALMRKLAKIAFYIHKTKKPFDKARHQTV

SEQ ID NO: 418660 - protein, 415 aa, unidentified
MALKIVYKICCGIDVHKTFVVACIASTDSKGVTTYKRHRFSTYTKGLKELLQWLLNNNCTDVCMESTGKYWIPVFNILEHSCNIVLAHPKYVKAIRGKKTDKKDARWIADLFKHDLVAGSFMPPADIRQLRDLMRYRFKLTCFMSSEKNRLQNCLTVSNIQLGNVVSDTFGKSSMRIIDKILENPLDTSFDINPLIHGSMKKKLPELELAVDGFITPQQAGKLKIIKRHYEDLKTRKEELEQLILALAVSYQQEIDIILTAPGFKNIFSAIAVISEIGANMEAFPSAKHLCSWAGLSPTNNESAGKKKSVRVSKAGCYIKPLLVQCATAVVKSEKHPEIRNRYLRIKRRRGHKKAIIAIARMLLTALYNMLKKNEPYNAELYRKSDILPVNREISVEQAILIAQSQGYKIKSATA

SEQ ID NO: 418661 - protein, 387 aa, unidentified
MPASGPRPDQVAVQTSLAAIFVSLELSRSSWLITSLVPGGADKMSKHSVRSGDVAELMVHLAKLRDKAHARAGASFPIIAIQEAGLDGFWVHRVLERAGIESFVVDAASILTSRRRRRAKTDRIDGEALLRTLLAHKRGEPRVCAMVRAPSPEEEDRRRLCRERRTLVAERVAHVNRIKGLLFAQGICDYEPLRSDRRQRLEALRTCDGRPLPPYLKAQIGRELDRLELLLEQLKTVEAERNALLEPANDVAPVAVKALAALRGIGPELTAMLWSECLFRSFRNRRQIAAYAGLAPTPWQSGSVQHEQGVSKSGNPRLRSTMIQLAWLWLRHQPTSELSLWFRERVKRNGGRGKKTAIVALARKLLVALWKFSSSGVVIKGAMMKAA

SEQ ID NO: 418662 - protein, 361 aa, unidentified
MRRILIKYRILMNENQDVIKQVVGIDIGKDLFYACHKVLNSKHQTIIKGTKSFSNDLLGMQEFYIWCEKRSRESIKNVVFVMEATGVYYENLAYFLYEYDCLVSVQLAQKIKYYAKSCNLKTKTDKVDSKMIAEFGIEKNLSGTELWTPPGKSFKMIRDLSREHTSLKEACSAARSQLHALKQAHNVYPRVIELKQQQIEFYQQQEEAVKQELLLLVKEDESLYTRVENIVSVKGLGFITVIKILAETNGFLLFRNIRQLVSYAGLDVIEKESGSFKGKTKISKKGNARIRSALYMPAMTAAVYNSELKTFYNRVNEGRNIKRQGLIAVMRKLLILVYTLWRKNEAYIENYPEMNLIAIKG

SEQ ID NO: 418663 - protein, 351 aa, unidentified
MRTSQKITGIVTTIGIDIGKNTFHLVGFDERGAIILQQKVSRSQLERRVANIPRCLIGMEACSGSHHIGRQLAEIGHDVRLIPAQYVKPFLKGHKNDYRDAEAIAEAVQRPTMHFVTIKTPEQMDLLALHRVRSRLVGRRTGVINQIRGFLIERGITVRQGPMPLRKALSEILSSDTGALSPRMLGLIADLAQDWRRLDERIAAVSAEIEALAEQDDSCQRLMTVPGVGPIISSAVVAAIGNGTGFKQGRDFGAWLGLVPKQESTGDRTILGKISKRGNKYLRTLFVQAAHVVLERRPSAAMRGLWPWAEQASKRLHRNMLAIALANKLARIAWAVLARGGTYQPRITHAA

SEQ ID NO: 418664 - protein, 338 aa, unidentified
MSLYAAIDLHSSNSVLAVMDGDGKALLQCRRPNDLPRLLADLAPYQQDLTGIAVESTYNWYWLVDGLMDHGYTVHLVNTTAIPQYDGLKHGDDHSDALHLAQLMRLGLLPEGYIYPREQRATRDLLRRRFALVRQAVRLMLSIQSSFSRSTGKQLSGSAMRQLTAAQLESLFPDLSTRFGVLIQFKLWLTLQDQITALERWVRRDLVRPDLLVRLQSVPGIGPILGMTILLESGAIERFASVGDYASYCRMVESVRLSNGKKKGHGNRRCGNRYLCWAFMEAANYAVRFHPAIRRWYERKRARKHRVVAIKAVAHKLARACYHMLHEGTSFDPARAFG

SEQ ID NO: 418665 - protein, 350 aa, unidentified
MEAYDGPQVVGMDLHRRRSVLVRMTEDGQKLDTARITNSPARVAAEIRRAGPHPRAVLEACNGWYWAADALAAAGAEVHLAHPLGVKAFSNRRVKNDELDARDLADLLRMGRLAEAWIAPPEIRELREVTRYRGKLVSLRTSCKDQVHAVLAKLGIEVTCSDIFGTWGSQWLDELPLPQPYAWKAASLRQLISALTGDISVLEQVTASLLAGHGGYRAVQALPGIGPVLGAVIVAEIGDITRFGNPARLCSWAGLTPRHYESDTKVVRGHITKQGSPALRWALIEAVQRTPDGTAVREAKDAIIARRGPQARNIAKVAAARKLLTFVFYAMRDGHVRSLTARAAQHQEAG

SEQ ID NO: 418666 - protein, 340 aa, unidentified
MNEITTIGLDLAKHVFQVHGVDAAGATVLRKQLRRGQVLAFFSRLPRCLVGMEACATAHYWARELRALGHEVRLMPAQYVKAYVKRNKNDAADAEAICEAVVRPTMRFVPAKTAEQQAAVLLHRGRERLVRQRTMLVNALRAHLAEFGVIAPQGLRNVGRLIAIIRDDDDARLPGLARQVLQVLAVQIEQLEAAIAALEKQLMGWHKSNPVSQRLATIPGIGPIIATAIAAMVAEPSGFRSGREFAAWLGLVPRQNSTGGKNRLGGISKRGNQYLRRLLINGASANLLRSKATNADPWVIGLRRRRPSLVVAVALANKTARIAWAVMHRQENYQRMATAA

SEQ ID NO: 418667 - protein, 329 aa, unidentified
MTRGGKVATDATDEVFIGVDVSKARLDVAVRPTGEVFSSDNTPEGVAALGARLVKLEPALIVLEPTGGYEKAPALALAELGLPVVVVNARQVRNFARATGRLAKTDRIDAIVLACFAQAVRPEIRSLPDASARTLEAVVARRRQMLEMMVMERNRLGNCAEAGVRSSIEAHLEFLEGQRDGLDGELLELVKREPAWRERDELLRSVPGVGPVLSTTLMAELPELGRLSSKRLASLVGVAPINRDSGTRRGHRSVWGGRAEVRGVLYMATVAAVRFNPALKGMYERLVAAGKAKKVALIACARKLLSVLNAVARDGKRWEDRTAVSALTS

SEQ ID NO: 418668 - protein, 270 aa, unidentified
MSEVSTIGLDIAKQAFQAHGADASGRVVFRRKIVRGKLIEFFSSQPRCVVALEACGGAHHWGRQLAKLGHVVRLIPPAYVKPFVKRQKNDAADAEAICEAAQRPTMRFVAVKDEAHQASSIVFRARDVLVRQRTQCINAVRGHLTEYGYVVAKGATHVPTLIDQIEDPNCQLPDVARAIFKVLIATLTSLEENIAVLDAEISRRSKEDPVARRLTTIPGVGPITATAIVALAPPGETFRSGRDFAAWLGLTPLQKSTGGKQRLGATSEDG

SEQ ID NO: 418669 - protein, 368 aa, unidentified
MLFIGMDVHKDATVFCLFDPAAEPKAQYRHATVPTTREGLESILAPLNRNCRVAFEVGLQAQWVAEIVRPLTTDLQVANPSKMPWLFRDGRKNDKLDARKLATLLYLDQLPRVHLPRAEVSIWRSLINHRRARIKRRTMVKNQIRALLRARALRCPCKSLWTRKGQTWLRSLAFDPVCVHMMQGLLEELALIKGHIDGVELQLDGIAKTQPAIALLRTIPGIGPRSAEAIVAYTDDIRRFGNRKQFASYFGLTPTQDASGRVDRHGHISKRGPSVVRWVLVEATHQVVLRCPAFRAFFERIVRGKPDRRKRAIVAVARKLLTIVFAMWRDGTPFDPARVSPPAENKKPAPQAANDPKEKPEMTHKPAA

SEQ ID NO: 418670 - protein, 465 aa, unidentified
MKKLFVGIDVAEAKFDVAFRNVKGQPVRPDATFPNSPDGIRDLKGAIIATASILGKRTKIIAGMESTSNFHKNLASALYSARPRKIETHIINPYAIKQFKKMHLKVYKTDKLDAHMIALYLAKMTPKPSPQDLPGQKELRELTRIRRSFQEETTKFKNRLRRLLRTYFPGYKHLLGKKISMKMLVAFSSVSSPDEIISLGESKLSSLSVAFRHKLGPKFASNLIRLAQNAPVKTLPAGTSLIIKWTAQRLLQLLSQIRTLDSEIVSLLNSYFPNHCLNSIPGLGPVSIATIIAEVGDIRRFPTPERFIGYVGLYPVVWESGETKTCFKMTIKGNKSLKMTFLVASAAARLFNPVIRDFYDHLRKRDKSKKAAGGAIARKLAILVYTILKTNEPWNPEKALAGLQKSIAMRTNSENMGERRPVEVIPHAVNAANPVRDNSGSSCPPNKIIAHSLPAGKKGGFIEKS

SEQ ID NO: 418671 - protein, 353 aa, unidentified
MKTYYVGMDVHKATIVIAVLDANGKVVSQSIIETSTQSVRDCFKSLGGEIHVTFEEGNHAAWLYDVVKPLVKRLVVCNPKHNHLLKQGSKNDRIDARKLAELLRVNALKPVYHGEHGTRTLKELVRCYECLVKDRSRVQNRLKALYNSQAIPNRRGELYQLSKRESWIQKQENAGRRMRAELLFRQMDELKVLKRAARKAMIAESRRHQAQSVLSQVPELGAVRVAQIIATVDSPFRFRTKRPFWAYLGLAVETRSSADHEVMNGRASRRKVKVETRGLNEDYNRRLKSVFKSAATHAGSCGAYKEYYEKLVAGGMRPEMARLSVARKLAAAVLAVWKKGESFDERMIMSRAA

SEQ ID NO: 418672 - protein, 403 aa, unidentified
MEGPLISLDVSKGKSNYRFFENGTDRKGKKGVIRHDIQGFDSIRDEAEKMEKRLRIKPSVIFESTGVYSDVVEKYFTDKGFDVYVISPLLSASMRKEGVRPAKNDSLDTLSIAKVFYSKDDLRKCSENDKKAERLREMSYELDMMNRRIRPMKCQFLRLLDKVWPCLDEVSDYSSRFMLDFIIAFGHPENIKTVKGVLSVIRKSKMGTAGRKDKIAQDLFDYCHTHLSAVSKDSSYVELLKRMAIELKAMAKKKSELIDRMAEEARNKDEFARLLTIPAVAKTTALKIMARVGDISRFRNAEALVAYCGLDPRVYQSGKMTGEHRTITKKGDCILRSTLFLAVKLMVMLYPDTKVARFVAAKAKNGLFYKQAVVAGSAKLARIIYSMLTHHENYVEFNADIVA

SEQ ID NO: 418673 - protein, 320 aa, unidentified
MSDSLDIGVDVDSKEFVPAVADRKAGDRVANTRAGIAKWLKTLPQRCRIGMEATGRYYELLARMAGQAGHVVYVIDPRLIKNYARATGSRGKTDAMDAQAIARYVKKESDRLREYVPRTDEQQQMHDLLRKRRALVETRARLEQSFGVSKSDPGELSDLFCALAGTLSELESELQRLGRDGEHGALYKRLLTIPGIGPAVASHLIYYMTRWPLTNANAWIACTGLDPRPNESGGRTGRRRLSKQGAPMLRQMLYMAAMGLKRCRRGQPLYDELSKRGHPSTAVFNILARKLARIAWGVFKSGRDFDPAMLKVGQACFHQA

SEQ ID NO: 418674 - protein, 363 aa, unidentified
MTAKATRLVGLDVHARQTHAAILHLESGELAVSKLQGPPLEVVGVLERLGAGVVAVYEAGPTGFGLARAGRERGIDVRVVAPGSIPKGSGDRVKTDRRDAIRLVRLLAAGELSFALVPTVEDEQFRDMVRCIDDIRADLMRARHRLGKFLLRRGERYPGPAGAWTTTHMAWLRAVRFPDACSQAAFADYLAAVEFLLGRRRTLLQTLEQQVPESAHAPVIARLRCFRGIDTLSAAGICADVGRFERFPKPGLLSGFLGIVPSEHTSDTRRRQGSITKAGPPHARRLLVEAAHHYRYQPRVGDKLARRQAGQDPRIIEIAWRAQRRLYQRWQHLRSQRRKHTSVVTIAVARELAAFLWEAATLD

SEQ ID NO: 418675 - protein, 333 aa, unidentified
MTETTSIKFAALVGIDWADRKHDICLQVADTGEREFSVLEHGPEAIDEWANALRVRFSNQPVAVCLEQRKGALITAWLKYEHLVLFPVNPRLLAGLRRAFSPSGAKDDPTDAEIAVDILLQHRDKLRAWTPGDPRTRQLQAFVEARRRLVEQRVRVTNRLTANLKGYFPQALDCFESLDSVLACDFLTRWPSLGEAKRARAETLRAFFLKHNARSQELIAARIALLKSAMALTSDAGVIVPALLATRTLVAELRTLIAGIERYDVAIAKVFNAHPDAFIFRSLPGAGPTFAPRLLAALGADRARFESVRAVQEYLGIAPVTERSGRSEWVHWR

SEQ ID NO: 418676 - protein, 423 aa, unidentified
MGRSIGLDVHRDFCQVAIADGGRARSAGRIAASPDVLELFAQSLAPTDRVVMEATGNALAIARILAPHVAEVVLAHAKQVRAISHARIKTDKVDAKVLADLLAGDLIPAVWIGDERCRMLRRLVSRRRGLVKRRTQIKNEISAALHRNLKGRNPASDPFGKAGRPWIKAQQLPIDERLTVDGCLRQLDFFGDELAEIDRLIAQQVLGDADVRRLMTIPGIDVVTAATLVAVIGDVGRFPTSRHLVGYLGLHPTIRQSGNGPARHGRLSKEGSAAARHVLVEAAWSAAKAPGPLRAFAQRTAVRRGRHVATVAVARKLAVLAWQLLTRGEDYALARPGLVRRKLRALELTAGAPRTKPGPNPDPVWNTTSDAAEKRLAEQAEAAYRRLVADWQANGPKVGAGATPERASQGPSKGKAARQASCS

SEQ ID NO: 418677 - protein, 339 aa, unidentified
MTKVAIIGIDLAKNIFQLHGVNRGGHCVLKRRVMRDQLMQVVAQLPPSLIGIEACTGAFYWQRRFEEHGHTVKVIAPQYVRPFGRGQKNDSNDAEAICTAVQQPNMRFVPTKSVEQQDIQAVHRARQRLVNHRTALISQMRGLLLERGVAIAKSASRAQRLIPQIISDPTVDITDMTREIIGTLFDFLLQINEKIKGFDVKINRIFRESSVCQRIAKISGIGPKTATAIVAAVGDGCDFKNGRHMAAWMGLVPRQHSSGDRQVLMGISKRGDKNLRTLLVHGGRAVVRTAVKKKDTRSQWVNQLRERRGYNRAAVAVANKNARIIWALLRHGDEYHASI

SEQ ID NO: 418678 - protein, 408 aa, unidentified
MQRREKLLYVGIDLHKETHTAVMVNCWNEKLEVVVIENKPSEFKKLAEKVNRKSNHLGLEPIYGLENAYGYGRSLAVWLIENGYIVKDINPALAYDQRKSAPMLRKNDEHDAYCVATVLINQLHTLPDAKPKDNEWTLAQLVNRRDLLVKDGIRFKNGLHEQISMAYPSYSKFFSEIDGKCAMYFWKTYPSPVHLQGKTAEDLTIEFKEISRIARRDKAELILECVQNDGNTVREYQESRDFITTSLVRDLEHQKEELAGLDKEIEKILLSFDYKLTSMPGIGTSIASKLIAEIGDIRRFSNADKLARFAGVAPVKFSSAGKGKEQSSRQGNRQLHGLFYFLAVTMVSRPKNGMPNHPVFYDYYMRKIGEGKTKSQALVCIMRRLVNIVYGMMKNKTKYREPILKEEQ

SEQ ID NO: 418679 - protein, 440 aa, unidentified
MAMRKRNDEVFPNAAGIDVGGSSHWVAVPRHLAEQAIREFGTVTDELNAMADWLLGCGVDTVALESTGVYWIPVFEVLERRGLTVWLVDARQLRYVPGRKSDVQDCQWLQKLMSLGLLRAAWRPGDEVCVVRAVVRQREVLLTEQARWVQRMQKALVQMNIQLTEVLTDIMGATGQAIIRAIVAGERDPKVLARHRRRRVKASGEQVLKALTGNWREEHLFVLGQALAMYDEIAARLAECDAKLQTLLAERSQTPLALGKAPRAGSKRYAEFGVRQALANWAGVDLTRIDGLGVTVVMKLLAEIGPDLSRFASVKHFCSWLGLCPGTKISGGKVLASGTKRSASRARQALKMAAMALWHSDSALGAFYRRLCARMDKPRANTAVAHKLARLVYFMLTRGEAYVDRGQQHYEQQQRQRSIAALRRRAAALGFQLNPTTLTA

SEQ ID NO: 418680 - protein, 326 aa, unidentified
MFFRFTALMHRVTVLRKRLRRGQVLAFFSRIPRCVVGLEACATAHYWARELGALGHEVRLMPAQYVKAYIKRNKHDAADAEAICEAVERPTMRFVPVKTAEQQATALLHRGREQLVRQRTMLVNALRAHLAEFGIVAAQGLRNVGELIAIVRDDGDTRLPDMARQVLQVLASQIEQIETAVAALERQLLAWHKTNPVSQRLASIPGIGPIIATAIATTVADPKVFRSGREFAAWLGLVPRQNSTGGKTRLGGITKRGNRYLRRLLINGASANLLRSKATKADPWVIGLRRRRPPLVVAVALANKTARIAWAVMLREKEYQPRAVAA

SEQ ID NO: 418681 - protein, 342 aa, unidentified
MSEIITVGLDLAKNVFQAHGADASGRAVLRKKLRRHQVLEFFGRLPSCVVAMEACGGAHFWGREIGKLGHDVRLIPPAYVKPFVKRQKNDAADAEAICEAAQRPTMRFVPVKSEETQGAAMVFRVRELLIRQRTQTINALRGHLGEFGQIVPQGAANASKLIAIVEDPDCELPADAIPTLKVLVGALVQLEAEIGKLDTEITRRAKENDVARRLMTVPGIGPLIATAIATLAPPPENFRKARDFAAWLGLVPRQHSTGGKQRLGATTKMGERSLRRLLIIGANSVIIKRHVHAAARPGTWLAGMLTRKPPTLVRVALANKMARIVGALMARGGVYQSPVVAA

SEQ ID NO: 418682 - protein, 329 aa, unidentified
MSKLSKKVIGVDVGSKFLTVSFNDDQNQDQIYNIGNNQRSILSFLKKICAEEYCFVIESTGNYSSRLLHLSLSSGFEASLINCMSVKHFSRMKNIITKTDAEDAKLIRLYGEMFRPEIYKAKSIEIEYLDQEIKLLNDLEEEKRRYGVKLKALRYNSQLNPDTEKHYERRLKQLDKEIREVELRLPQLQDEEFKEVKGLLQSVSGIGEKTSLQLMTATSGFRNFDSAGSLVKYFGLAPRIYQSGKKSYSPGKCRTSKTHIRSLLYVCSWTAMKHNTQCKALYERLLEKGKAKKLALIAVCNKLLRICFGVVKNKTAYQQDYQKNFKILT

SEQ ID NO: 418683 - protein, 417 aa, unidentified
MVQQKISRKLAQVKKGTLHVGVDLGLKNNVAIVINEFAERLDKFSFPNDQGGYEYFLRRIEKQQQQSIAPDILVAMEPTNYLWMLLATMLEQKDVTYRLVNAYTVKKHREGDQLDRSKDDPRDAFTIADLSRTGKCTETQLQHGKYAELRQLVSLYYRLKRQIRREKQHIWHASGQLFPELPRIFKNITGDTAKAMLSTQAAAVEIRKMTEKEFISTVRNGFNGNRLFVSRLRATHRLSFSSVGVKHGVNALRLALLIHVESLDRLQNQELMLLNALELCFLSLPESSSLLSVNGIAVISGATILAEIGDPKRFRHAGQLVKLAGIQPTPNRSGRKQKGITPMSHQGRPRLRSALYFSCLRLIQVDNRFSQYYQHLQNRKKNPLTKMQALGALMNKLLHVLWALMKNQSHYRPLDTA

SEQ ID NO: 418684 - protein, 370 aa, unidentified
MLDTTTFIGLDVHARSIKAVSLDVMTGEVRAATFGYDAGAVAEWVRSMDPRARCVYESGVTGFDLQKRLSGLGVDCVVGAVSKMIKPSADRRRKNDRNDAEFLARMLSVGNVVEVWVPDDECEAARDLTRALEDARDDLSRSKQRLSKFLLRHGLVFDERTPTGRRKGNWTRAHWSWIESIRFAERADNDVLAYYVDAVRRAAEEKARLEGLVEAEARKPRWRKRVDSLRCLKGVDTASAADLVFEAGEFSRFRNARSFAAWVGLTPSEHSSGESDRRGAITKAGNKHLRKTLVEAAWHYLTCSGRPKDLAKGQAPDRGARRHAAKGVRRLVERREALLARGVHGNKANVATARELACWVWAVGLMAEEA

SEQ ID NO: 418685 - protein, 343 aa, unidentified
MDSSVPVFLGIDYADKVSQMVVLDTGGRELGTRRLRSETERLVAYGERFGPIGGVAIEACCGTATLADELIQRWGWPVQLAHPGFVRRMKRNPDKTDYSDARVLADLCRVGYLPPVWLAPSHIRELRRMTRGRQSVVEEGRREKLRVRALLRDLRISKPEGLLRVWTKCGLSWLHALTSDERLPNESRWLLQRHLSHLRFLDGELAAFKQRLEAIAADDPLIQRLLEQRGVGLITACVLRAEIGQFERFGSGKQLAHYCGVSPQNASSGERQADAGLVRGGNRQLKLALIELAHRVKRYDPHWRALAARLARAGKPRCVIVAAVANRWIRKLYHQMLPSALAA

SEQ ID NO: 418686 - protein, 309 aa, unidentified
MVFVGVDVSARRLDVAIGSEVRQFPNPEGIPDLLRQLPPGAVVGLEATGVYGRPLAFALHRSGFRVYVLNPLAVKSYARSLLRRAKTDRADARLIARFLAERYADLEPYEPTEDVLYQVGLLVRFARGLVAQRVAVLNRLHAWEYAWPDGLGLVRQVPDVLASLRREVEAIAISLLETDPEAWRHFQALQALPGVGPSIALTILAYSGDLRRFRSARAYAAYTGLTPRVHQSGQLPERASISRMGPSALRAVFWMAALSASRVEPYASLVARLVQSGKPKKVAVTAVANRLARAAWAVVVRGGLDKWEL

SEQ ID NO: 418687 - protein, 346 aa, unidentified
MMIIGCDFHPSWQQVSWVDTGSGEFGTQKLVHARGDAKQFYQQLAAPVLIGMEATGNSQWFVELIEDLGHEIWIGDAAQIRASYVRKQKTDKRDAAHILKLVIEGRFPRLWSPDREQRDLRQLVLHRHKLVMIRSRVKNELQHLSLNKGVQRKHKLWSQAGQKMLRGLPLKPWAACRREDLLGLLAMLHQQIGKLDTAVQTAAEENPQAKLLMTQPGVGPNTALAYVLTIGDVSRFRRGKQIASYLGLIPREESSGGRQKLGAITKQGNRLLRSLLVEAAQIAVQHDPQFRREYLHRCHQKPKGVAKVATARKLAVGLYWMLRTQVAYPEIVRIESSSRVALVGAS

SEQ ID NO: 418688 - protein, 343 aa, unidentified
MYYIGLDVHKKTISYCVKDAAGCVLREGKIGSTRRELDGWIKTLPQPRTIAMEATIFTGWIYDHLLPHADKVKVAHPLMLRAIAAAKKKNDRIDAAKIADCLRCDFLPECHMASTAIRDRRRTLRYRNLLVKQKVQIMNRVSGLLMETGVSYNKRRLHKVGYFADLMATNEEISDCVRPLLRLSREHIDRAQRLDYALVSSLERDPLLAERLRRLRTVPGVGPITALTWALEIGDFTRFRSVKEAISYCGLCGDESSSADKVMRMPLSKQRNKHIQRVLVEAAKLAPRQCHELAVVRERELQRGNPNRATLAVARKMVCYLLAVERRQRDFVPAEEFTRTAAA

SEQ ID NO: 418689 - protein, 349 aa, unidentified
MVADELDYVIGVDTHLDEHVLAIIAARSGAVVAQHSIQASARGYAAALRFAADEANGARVWAIEGTGSYGAGLARFLAGRGETVLEISRTPRAERRLRGKDDSLDATRTARAALASETLALPRSGERREALRLLLVARRSAVDVRREALGQLRGVIVTAPDKLREELRVLPTGRLLKRCSRLRRSSKVGADELATRLVLRSLARRIEAATLEAAELERELLGHLRALAPALLDEPGVGPIVAAQLIVAWSHPGRVRSEAAFARLAGVAPLPASSGKTTRHRLSRGGDRQLNRALHTVVLHRRQHDPATKDYISKRIAEGKSRRDATRLLKRYLARHLYRLLQTQEPLLA

SEQ ID NO: 418690 - protein, 357 aa, unidentified
MPPRSGVNLTFVIGVDTHARNHVLAVMASDGRLIDTASFPTSQAGLGRAIAWAARRTGGDLGALWVIEGAANYGAQLAHSVTRAGYQVVEAPRMGARGPQGKTDAVDARRIAEAVLPLDHTQLRHPRRDNGERAALQILITARDQMSTERTATINALTALTRTIDLGIDARRALTRTQIRQIATWQPLGNDPIATATARTEAIRLAHRITALDTQLATNLTTITTLLKATPAAGLLTKTGIGPITAAIALTAWSHPGRLRSEAAFAALAGVNPIPASSGNTQRHRLNRGGDRRLNRALHMATITRMTHDPDTRTYTQRRTEQGRTTKEIRRCLKRYLARHIHRYLTNAYTPTTLDKT

SEQ ID NO: 418691 - protein, 337 aa, unidentified
MKYSGIDLHSNNSVVTVIDETGRVVAERRLVNDLGKVLAFLQPWRNELAAVAVESTYNWYWLVDGLQAAGFMVQLANTGAIKQYDGLKHSGDETDARHLAELLRLGILPTGTILPPAQRAIRDLARKRMQLVRSRTAHILAVENIVARQLGARISSNQIKRLAEDGIDQLALPADVALAIKSNVAVIVTLNEQIERLERRLREDVGARPGYALLHSVPGIGNVLATAMVLEIGSIDRFPGVGQFASYARCVDSRRVSNGKKKGAGNTRNGNKYLAWAFVEAANFARRYCPEAKRFYERKKARTNAVVAVKALAHKLARACYHILKEGKPFEVQRCFA

SEQ ID NO: 418692 - protein, 347 aa, unidentified
MRFYTKQHLYYCGIDLHARTMYLCVLNQEGEIVLHRNMPCTPEFFLKAIAPSRDDVAVAVECIFTWYWLADLCSKENIPFVLGHALYMKAIHGGKAKNDKIDAHKIAVLLRGGMLPMAYVYPAPMRSTRDLLRRRMHLMHKRSELLAHIQNTNSQYCLPQFGKKIAYKKNRDGVAEHFPDPSVRKSMEMDLALIDHYDRLLTDVELYITKTAKVHDIDAFHRLRSVPGIGKILTLVILYEIHDIERFPTVQDFVSYARLVKCSKDSAGKRLGFSGAKIGNVHLKWAFSEASVLFPRQNPQAKRYLDKLTSKHGKAKALSILAQKLGRAVYYMLRRQKAFDMKKFFSS

SEQ ID NO: 418693 - protein, 313 aa, unidentified
MTVIICGVDVASKKLDARIGREGPFETFDNDAAGVSALAAFCRQHGALLVVMEAAGGYERQAFAPLWGLGLKAAIVNPRNVRDFAKAMGWLEKTDKIDAGAIAWYGEVRQVKPTPLASPTQQRLSALVIRLGQLTTLRTAQNQQRRGVTDASVLSTISAIPAVTARQIRVLEIEIAQEIAADPLWKKLDATFRSLKGVADRTVARLMARLPEIGLISGKAIAKLVGLAPIARDSGTSHGKRAIRGGREDVRAILFVVADIVRKFDPDFTRFRDRLLAAGKPKMVVRIALAHKLLVRLNAKAREARVSSATAAC

SEQ ID NO: 418694 - protein, 411 aa, unidentified
MTCAIDLGKFNSVCCFFDPATQQHQFQVIATRRSHFEHLLTTRPDIDLVVMEACGPNGWISETCRARGMKTIVFSTNDEAWCWKNTKRKTDRDDVLKLAEMSLLRRLVPVHVPKPDIREQRAFIKYRKSVDKDINRLKNSIRSLFANRGIEIDTGERAWNTGPVHINSCRKPIEDCTRDELWRGQLDMQLSRLDDVTRKLESLEAKLDEFAAEHPNIVRLMTIPGVGRKTAEAIVAAIDDPHRFKNAKHLSSYLGLTPKQHQSGEIDRNGRISKRGSKLLRTMLLQCAWCSLRYNKWSKKTYDRITGGSKTRRKKAGIALARKLGVIAWAMMRDQTNWDASKLLPQDEAKDNGKLKIKRKPPKPPGPVHSDESSGVAHRKANLTMKPKRQTRTGNRSTRTGNRRTQTVQLK

SEQ ID NO: 418695 - protein, 354 aa, unidentified
MDYYGLDVHKRYTVYTRLDERGEILGQGRITNEPASLAALVAPSAGQAKVVLEACGMWPVIADALQDLTDELVLAHPLKTRAIASARIKTDRIDSATIAHLLRTDLEPRSYLARRPVRELREFLRYRSRLVKVQTSIKNRVHAVLTIHGIGGRPSTDLFGRAGREWLKEVQLPAIARQSVDGLLTVLDVIHARIMEANRVVRQRETRSSEARRLQTIPGVGWFGALLILAEAGDVRRFPDEHHFVSYAGLVPSVRSSGGHTRYGRITKQGSPWLRWIFVEAAAVASRRPGVLRDRFLKLARRKDAKTARVALARHLAAVAYLLLSRATFYEERSCRQGSWSAHLPGHPVEPVVA

SEQ ID NO: 418696 - protein, 375 aa, unidentified
MKIIGCDYHPSFQQIAMLDTETGEVIERRLYHANGEAQKFYESLSGPVLVGVESSGNMLWFERLLARLKQELWIGDAAAIHWQNPRKQQLTDKRDAQHLLDLLVEKRFPRIWVPSVEERDLRQLLKHRHTLVQMRTRVKNQLQHIALNQGLQKKSKLWSREGQEWLKKLELAAWTQRRRDDLLQMLEDLDRQVKQMNREAEKAAAARKDAQLLMSHPGVGPILALATVLTLGDVSRFQCGRQVASYIGLVPTEMSSGQHRWLGSITKQGNSFMRFLLVQAGLSAVRGDAELGRVYKRLVQKKHHGVAKVAVARKLLVRLYWMLRTQKQYPEVVRMQGSLSHPVAAAKADRLSGRPASRPEPQDQKPKKEKRKQQK

SEQ ID NO: 418697 - protein, 352 aa, unidentified
MAVTIGADSHKATHTVVAVDEVGRVLGEKQVRATSEGHLVLVQWAAQFAEVMFALEDCRHLTRRLEADLLRAGHVVVRVPTKLMAQARRSARHPGKSDPIDAEAVALASLRYPDLPRAELDGPAREVKLLSDHRRDLVNQRTRIAAQVRWHLHELDPTLAIPSRGLRRKTVVTQLQQRLSTAPGVVARITRELLARCEQLNAQIAGLDAELRVLVRGQAPTLLAIPGCGVLSAAVIIGETAGVHRFKSRARFARFTGTAPVPVWSGASAGKVRLNRGGNRDMNCALHTIAITQARQGIGPGSSYLTKQTERGKDTTAALRLLRRRLSDTVFTALRIDQGVLSQPETTLAKAA

SEQ ID NO: 418698 - protein, 340 aa, unidentified
MSEVGIIGLDIAKHVFQAHGVDARGGAVLRKKISRAKLLPFFASQPRCRVVLEACGGAHHWARELAKLGHDVQLIAPAYVRPFVKRQKNDAADAEAICEAAQRPSMRFVPVKSEGQQASAMVFRGRDLLVRQRTQISNALRGHMAEYGWVAPKGLAHLDKLAALLADPTAVPEGVRSVCTVLLESLALLDRQIAALDKEIVRRSREDEIARRLMTIPGIGPITATAITALAPPPGTFAKGRDFAAWVGLTPRQHSTGGKQKLGAISKMGERTLRRLLIIGSSAVVLQASKRGAPKGSWLEQMLARKPRMLVTVALANKTARIVWALLVKNEDYRAPAVAA

SEQ ID NO: 418699 - protein, 394 aa, unidentified
MKLIGIDIGKNKHFFCVMDQQTGEIISQPVSFSNDKEGFDFLVQKIKSYPKDSILIGMEDTGHYHFALLKYLLDLQYTVALINPKTTDFNRKMQGGITKNDKLDTINICDVLDTPERKKQYRITKVNSFDLYEQKQLTRHHHNLKEEENVYKNRLQKCIDIVFPEFNKLFNSKYGIVYMNILKMFGSAENIANTDIRTIRKCFEIEGRGNRISLTPERLKECAISSIGISSLAEVSQIKHLTAQIELIEEQLTEIDKKIEEFSIQNNSPILSIPGISHFSGTSILAELGDISNYSKPSQIIKFAGVAPLHYESSQFNAQHTAITKKGSKYLRKTLYQIMLPVIRHNPVFNKYYQLKISQGKGHRCAQGHCVRKLLRIIYHLLKTNQQFDPQLLR

SEQ ID NO: 418700 - protein, 383 aa, unidentified
MPDVSSTAPAQVRLWVALDVHKHSIVAATLPPTGGAPEVQRIESSERAIRRLIDRLGGPSGLAVAYEAGPCGYDLFRLFGRLGVACDVIAPSLVPVRAGDRVKTDRRDAKKLVRLYRAGELSFVAAPTPEQEGLRDLVRCFDDLRCARTAARHRVAKQLLRHGRIFREGKKSWTKQHVAWVRRQRLEQPNAQRALEHMLAHLNGLDAQLGALEHELAALATSDPWRDPVAWLCRFRGIGLRTALGLLAEIGDFRRFGSARELMSFLGLVVSEYSSGDRQHRGQLTKTGNRHARRLLIEAAWHYQHPPRRPLRTGALAEPVPSAVDARAWQAQIRLHHRYRHLTDHRKRSTVAVAAVARELAGFIWAAMTHQPVRTDQQLTATA

SEQ ID NO: 418701 - protein, 351 aa, unidentified
MNNSMVAFNPCGIEVSHLTLVVALRGHDHDEPLREFPNTREGHQAVRRFLERSARPVRVALESTGLYGLDLALTLHQAGVAVMVANPRAVRHFAQALLQRSKNDQLDAAVLCEFAARMPFQAWRPPSAAALQLVAVARRLEALTDMMAAEKNRGHAASLSEALPLVIRRDIQRSIQTQQRAIARLTRAAQEFIADDRELARRYELLLSIPGFGATSALHILAEITLLPADLDVRQWVAYAGLDPRECSSGTSVHKKVRISKAGNKHLRRALYMPALVAVQHQPQVRAFYDHLLARAKTKMQALVATMRKLLHAIYGMFKHDQLFDGEKVYTLTGPALAPALSNSEVVCLQT

SEQ ID NO: 418702 - protein, 412 aa, unidentified
MKQIRDKVAGLDVHRDSVVAATRIVQPDRTVTITKASFSTTSKGLGELAAWLSEAGPTCVVMEATGVYWKPVYYVLEGLFDELWLCNAAHVKNVPGRKSDLSDAEWLADVAAHGMVRPSFVPPPEIRELRDLTRYRKAQVDARGKEIQRLEKVLQDAGIKLTSVASTVWSQSSRAMIEALIAGERDPKVLAQMAKSRLRSKLPQLEEAFSGRFSEHHAFMCKEIIGHIDHLDVSIAKLNAEIARHVAPFEAAITLLCSIPGISRTTAEVLIAEMGTDMSRFPTAAHLCAWAGVAPASHESAGKHRPAGTRHGAPWLRRTLVPAAQAAARTKGSYFSAHYARIARRRGHNKAVVAVANSMVAVAWHLLRNGALYEDPGADYFERRNDPAREAQRLQRRIEALGYEVTLSEKAA

SEQ ID NO: 418703 - protein, 369 aa, unidentified
MHSITNTELSSHEETRCQFNGGKADIKLGIDVHQDFYVVVEQVGGTNPKPPQRFSKQAFLRWAAKLKQRGAEVHAVYEACGFGFSLQRQLSGLGIVCHVVCPQKLDERNKRVKTDGLDAKALCLKLDRFVQGNRDALAIVRVPTEEEERSRAIHRQREQLVGARKRLEAQGRSLMVNHGLDPVQNWWKPRTFAVLPIPQWMRELLLNSQPILLALQEKIAALTLQLQSAAAPNQPRGLGKMTSLVIDREIGDWHRFNNRRQIASYTGLCPGEYSSGNTRLQSCVTKHGNPRLRAALVELAWRLVRFQPNYKPVVKWRQILAKGGANRTGPIATGAARKKAIVAVARQLAVDLWRVRTGRCKPEALGLVI

SEQ ID NO: 418704 - protein, 369 aa, unidentified
MNTTTFVGLDVHARSIKAVALDAMTGEVRSATFGYDAAEVAGWVSSVDPSAKCVYESGVTGFDLQKRLSSMGIDCVVGAVSKMIKPSADRRRKNDRNDAEFLARMLSVGNVVEVCVPDDECEAARDLTRALDDAREDLKRCKQRLSKFLLRHGLVFSETNAKGQRKKNWTAAHWAWIRSISFPDKADDEVLAYYIDAVRQAMENKKRLEKLVEAEASKPRWKKRVDSLRCLKGVDAMTAADIVFEAGEFSRFKSARSFAAWIGLTPSEHSSGESARQGGITKAGNKHLRRVLVEAAWHYISASPHPKDLAKGQAPDPAARRHAAKGIRRLVKRREEMLGRGVHKNKANVATARELACWCWAIGRMVENG

SEQ ID NO: 418705 - protein, 357 aa, unidentified
MLSSNIKYIGLDVHKEAIAIAVVNGAGKLVMESIVETKASTLLDFLHGLRGELHVTLEEGTWAAWLYDVLKPHVREIVVCNPRRNALLKEGSKSDKVDARKLAELLRAGLLRAVYHGENGLRTLRELARSYLTVSKDLKRVMNRLKALYHSWGICCAGKQVYAPRHREQWLSKIAQVGVRRRAELFYQQLDGLLILRQTVREELLAESQKHKAVKILRQIPLIGPLRAALLLALMQTPHRFRSKRQLWTYSGLAVVTHDSAQHRYVDGQLQRSKKPQQIRGLNQNYNHAMKEIFKSTALDASRCAGPLQNFYAGLLAKGMKPDMARLTLARKIAAITLTLWKKGGSFDAEHLKSRAA

SEQ ID NO: 418706 - protein, 325 aa, unidentified
MQVIGIDVAKATFDIALPLGQGKYRTRGKLGNTAAGWDQLLAWRQAHAPEAAVGMEATGIYHEALAERLVAAGVTVYVVNPAQIKAYGQSELLRTKTDRTDAKLIARFLQSRLQEPDRLHPYVPPTPVERTLRALVRRRDELKQMRQMELNRLESTHAALAASIGQVVATLEQQIAQVEKAIAEHIDNDPDLRGRRDLLTTIPGISDTTSAFLLACLGELNQYSDVGQIVAHAGLNPARRQSGTHEGKVRISRVGNATLRAKLYMPALVGKRHNPVLAAFARRLAERGKPPKLILCALMRKLLHIVWGVLKSATPFDPRKAIAHA

SEQ ID NO: 418707 - protein, 372 aa, unidentified
MQSTTKFIGLDVSKAKISVAIADVSGEAPRYYGTIPHTPAALRKLIKELGAAETLSFCYEAGPTGYETYRWIASMGAHCVVIAPSLIPKRPGDQVKTDRRDAEQLARLYRAGELTPVYVPEREDEALRELVRAREVAKEDAHRARQRILKFLLRHQIEPPATIKRRWTKKYRVWLGQLTFPYESMHVAFSEMLHALDEIEQRMGRLEKALVQQAATGSKASLIQVLQSLRGIGLLTAITLAAEIGTFARFRSPAQLMAYLGLVPREYSTGLSTRRGSMTKAGNGRLRRTLVESAWSYRHRPAVKGDLAKRLDGMPADVQLLSWKAQERLHYKYRHLVFGKNKHKNVAVGAVARELIGFIWAVARTVEQPAAS

SEQ ID NO: 418708 - protein, 464 aa, unidentified
MRQPSKTRKNKRSAVARNQDWSLGLAVVNSKAAGIDIGNEEHFVAVPPSMDPQPVRMFGCYTSELKRMATWLRSLGITTVAMQSTGVYWIAVADTLREQGMRVTVANGRDTKNLPGRKTDIQECQWLLKLHVYGLLKDSFVPDEQLLAMRRYWRQRQQHIADASTAVQRMQKTLTQMNVQLRNAISDITGTTGISIIEAILSGERDPEKLAQFRDPRVKKSKRELAQALEGNWREELLFILQQEYETYCMYQGKAAECDAALERHLARLQQRADPAELPPCPRHKKPRSGDNVPSNFDLREELFRVSGADLTQIDGINVLTAQTILAEVGWDVSYWPTEGQFVSWLGLAPNHKISGGKIIGRDYRKVVSGAGQALRMCATTLLRSKTYLGAQYRRLRTKLGAPKAIKAMAARLARIVYRMLKFGLDYVDKGAHYYEQKYREQQIRQITKQARKLGLHIVAPKAA

SEQ ID NO: 418709 - protein, 316 aa, unidentified
MSPANVYVGIDVAKDWLDVAQRPGGEAWRVASDETGVAALVERLKGVRPTLVVLEATGGLQIPAVAALAAAGLRTVVVNPRQVRQFAGATGRLAKTDAIDAQVLAQFGEAVRPEVRPLPDAATQELSALVARRRQLIEMLTAEKNRLRLAAEKVRPNIGAHIRWLEGELLDLEGGLGDVIRSSPVWRERDNLLRSVPGVGPVLSSVLLADLPELGKLSRKEVAALVGVAPLNRDSGLFRGRRQVWGGRSHVRTALYMATLVASRHNPAIKSFYQRLLSAGKAKKVALTACMRKLLTILNAMMRHQAPWQHALLLDR

SEQ ID NO: 418710 - protein, 457 aa, unidentified
MKKRNKEQNAKRTKKDQKIFQMINPNAAGIDIGSEEHWVAVPEDRDEQPVRKFGCFTSDLYALCDWLKKCHIETVAMESTGVYWIPLFQILESRGFAVKLVNARHAKNVPGRKTDVEDCQWLQQLHTFGLLSGSFRPEDSICVLRSYCRQRENLIQHAAAHIQHMQKALIQMNLQLHKVISDISGLTGMRIIKSILAGERDPITLAKMRDPRIKRSAETIAKALEGDYRQEHLFALKQAVEAYEVYQRQIQDCDQEMEAYLAKLDSKVDDNTLPLSEGKSRNRRGNAPHFDLRSHLYRITGVDFTQIHGLDASSVYSIVTEVGLDPNAFPSVKRFTNWLALCPNNRITGGKVKSSKTRKVKSRAADAFRLAAMSLTNSASALGGYFRRMRSRLGPPEAITATAHKLARIFYHLWRTGEAYQDPGQHYYEQKYKERVLANMKKRAKELGYEISLIPAT

SEQ ID NO: 418711 - protein, 344 aa, unidentified
MSTFHGPPIWIQAYVGGSPPRQCVSNYEGALRPTPLNFGIDVAKDTLQIAWAESPAELCLANRRRAIADWLAKLAPGSRIAMEATGRYHLLLAELAHAAGMIVYVLNPCDLLHYARAVGLRGKTDRVDARLIGRYIVREHAELHPYVPPTPVQREIDQLLRRRATVVETKTRLRLSLHGMVGLAADLRIALKRLDGLITKLDQRLRQLATHQAESLRRVESVLGVGPLLGVALTNTFERVPLRNGDAAVAFVGFDPRAKDSGQCIGRRRLSKRGPAELRRLLFNGARSASKTKLWRPLYERYRARGLSTIEATVVLARKLVRVAFSIYRHGTTFDPARFARGLT

SEQ ID NO: 418712 - protein, 353 aa, unidentified
MEQFIGCDAHKKFSVFVAVNEKGHAGEAMRVAHDRQLYREFLGRLPPHSMIAVEASGHYSWLVDEMERLGHHPKLANPLEAKRRMALTKKTDKLDARGLAILLRNGTLPEVWIPPSELRDQRELLRLRIFLVRLRTRVKNRIHGTLARHNVQIPGADLFGVAARLKLGARLPELPIHSREAVEQELATLDFLEIQIESAEQRLEAIMNVSVEADLLKTLPCVGKILSMVLMLEIGRVDRFPTAAHLASYAGLVPRVHSSGGRTRMGQVCGNVNRNLKWAFVEIGNLIVINQTRLAGTHVVRLYQRIKCAKNHQKAVVAVARHLAEAAWWLLTKQEVYREPQGPRQRTLSSTLG

SEQ ID NO: 418713 - protein, 355 aa, unidentified
MNDAKYIGMDVHTATISAAVRDSSGNLVLEATLETKTETILEFVHGLRGSLHVSFEEGTWAAWLHDLLKPHVTEVLVCDSRKNALLRVGNKNDREDARKLSELLFLNKLHSVYHGETGIRTLKELARSYLTITRDLTRVMNRLKAIYRGWGIACAGQQVYAPRYRAEWLAKITEAGVRRRAEIYYQQFDALAALRQEVRRELLAESRKHSAMRLLRQIPSIGLIRAALLIALMQTPHRFRTKRQLWAYCGLALRTYDSGEYRFVGGQLKRSKKAVTIRGLNKNHNHDLKNIFKGAATRAAAAAGPFQNFYEARIANGMKPPMARLTLARKIAAITLLVWKKGVRFDAEQLKQQAA

SEQ ID NO: 418714 - protein, 392 aa, unidentified
MYIVGIDIGKNHHEASIVSPKGKQIGRSLRFATTHKGADSLMSFIFKNIGNSPCVFGMEATGHYWYPIYSFLKAKGYTIYVINPIQSDSLRKMYIRQTKNDSIDSFLIAEVIRFGQFGTTSMADENILAMRQLCRYRDSVISSRTEIKLRIGTIMEQIFPEYEKQFSSLWVSTSMGILEKYLTPENIENTPIDELFEIIKDKSHNRLTRAKAISIKEAAADTFGIKIAQDAFSFQLKQLIDRMNFLDKQIEALDIEIMKYYEQFDCYLHTIPGIGIIGAATILAEIGDISRFKNSSALVAFAGIDPTVRQSGEFNSTHNHMSKRGSPYLRHAIFLAATTCSFHNSPLNAYYKKKRDQGKHHLTATGAVARKLTTVIYAVLQYSKHYEPKSFC

SEQ ID NO: 418715 - protein, 390 aa, unidentified
MYVIGIDISKYKHDCIVIDEAGVVIRDTFSFNNDRNGFNHFLNVVHSLDQTKEKKIGFEATGHYQDNLKVFLEQSHLPFMELNALLVHKFRSAQTLRGIKTDKTDARLIASYLSQVDFIPYPPKAYHVHALRLLTKRHFDLVGERTKYLIRITNFLDRTFFEFKSFFNNNLKSKTALLILDKYPLPNKIARIPLGFYEKLRKTSRGRFSAKKFYELKELAKNTVGFSWDHDVIEIKSLLRFYHAANDEISMLEDEIAHTLSKINTKIASIPGIGLVSAATIVAIINDVNRFETPDKLLAFAGLDPRLYQSGTSSYKGRMNKKGSVTLRRVLMNSALASMMFNPTFDDYYRKKRDEGKPHRVALSHLARKLVRLIYKLETTQTDFNLTLFR

SEQ ID NO: 418716 - protein, 352 aa, unidentified
MTSIALEPGDVIVGVDTHKDQHVAVAIDGLGGLWDQPLFIEATNEGYARLLEWAQSLGRVRTFAVEGCGSYGIGLARFLRRHGHHPVEVSRPPRKGERRLSGKSDAIDAEHAARSALVGAGIVTPKLADGQVEAIRLVKIARDTAVKAQSTAMITLKAVLVTASDDLRAELEPLSDYRLIRAAAALDEAGDIADPRVAMRHTLKALAQRWLELHEEIKDHARRLKGLTRAAAPELLNAFGIGVDIAAQMLITAGDNADRVRSEAALAKMCGASPIPAGSGRTNGRHRLNRGGNRQANAALYRAVIVRMRWHQPTIAYVQRRTAEGLSKREIIRCLKRYLVREIFQLLPPIST

SEQ ID NO: 418717 - protein, 463 aa, unidentified
MKADISWSGKPAGESGLDIAPNPKWLPRFGESAQGRLFYSSMSASAGRKGTIMENVFSCCAGLDVHKDSVEACVRRMEPTGQLHHQTRHWGTMTEDLLAMADWMAAQGVTHVAMESTGVYWKPIFNILESRFTVLLVNARHLKQVPGHKSDVQDCQWIAQLLQHGLLKGSFIPPRPQRELRDLTRHRTQITEEKTRTVNRIHKVLEDANIKLASVASDVLGVSGRAMLAALMQGQEHPVRLAELAQGQLRGKIPELEKALQGRLTEHHRFLLRMLWQQLAQQETWIAELEAKIGELTRPLAVEIERLDAVPGIDRRVAEVLLAEAGPDMSPFPSHQHLSSWAGMCPGNEQSAGKRRRQRITPGNRWLKATLVQAAWAASHTKNSYLASQYRRLAGRRGKKRALIAVGHSILVIYYHMMSETTRYADLGGDFFDRLEPDRLRRYYVRRLERLGYKVALESAVAA

SEQ ID NO: 418718 - protein, 365 aa, unidentified
MAERLNVLGAQTSCYMKGAWEMIYIGMDVSCKSFVIHAIDKRKRTVCKEEIAPCKEALVGLLNRLGKEPKLVVFEAGNQMKWIAQTLMKIESVEVHVVHPNELKWISQSNGKTDKVDARKMAELARGDLLPRKVHIVEGHVRQLREMLSGRQVLQSKRVALINGIRAMMLQEGVKLPEKFFNRMDWRQRLEKSPVSEVTRMIIVAYMQGISGLQAAEEVLSERIVAIEDGRLKQLESIPGLGVLSSRVLLGALDDATRFDNKKSAAKYGALTPTVYQSGNVTHYGHICRDGRHEVRKVLLQCAHTVVRMKSYDSRPLREFFERIQKRRGKKIAIVALARKLLTIAYGILKTGTFFDPARLSLRPV

SEQ ID NO: 418719 - protein, 405 aa, unidentified
MNAVGIDVSKGKSTVTIRRPGDGVLMPPCDIPHTQSAINALIKLIKSLDGETKVCMEHTGRYYEPVANWLSDAGIFVSAVNPILIRDFGDDSLRTPKTDKADSQKIARYALDRWAKLKQYGSMDKTRSQLKTMNRQFGFYMDQKTAMKNNLIALLDQSYPGANDFFNSPARSDGSQKWVDFVYTYWHVDCVRSKSLQAFTEHYQKWCKRNGYNFSAAKAEKIYLGSSDLIAVFPKDDSTKMLIRQAVTMLNTASQTVESLRLKMDQTAATLPEYPVVMAMNGVGPSLGPQLMAEIGDVTRFTHREALTAFAGVDPGKNDSGKRNQKSVRTSKKGSPSLRKTLFQIMDGLIKRSPVDDPVYAFMDKKRSEGKPYYVYMTAGANKFLRIYYGRVREYLASLEETRES

SEQ ID NO: 418720 - protein, 340 aa, unidentified
MRLYCGIDLHSNNSYVVLLDEFDKVVYKKRLTNDIEGILRELSPYYEQIFGIVVESTYNWYWLVDGLKAAGYRVHLANTTAIQQYSGLKHTDDKDDAIWLAKMLRLGLLAEGYIYPKEERGVRELLRKRLILVRQQTMCLLGIQGMITRYENVGLSGEKIKRLASEEDKILSYLKDEHVRVATQSQLKILRCIMEQIALLEKSILTKLKQDPAFILIKTIPGIGPILGMTILLETGEISRFLQAGNYSSYCRCVESKRVSNAKKKGENNRKNGNAYLGWAFIEASNAAIQHYPEIKKYYQRKLNKTMRVVALKTIANKLSKATYFILRDGVQFDMKKIFG

SEQ ID NO: 418721 - protein, 348 aa, unidentified
MKIIGCDFHPSWQQVAWLDAETGETGEQSLVNGDGEAERFYGSLAEPALVGVEACGNSQWFLEMVQRLGHEVWVGDAAQIRASYVRKQKTDKRDAAHILRLLLENRFPKLWVPSAEQRDVRQLLLHRHKLVEIRTRVKNGLQHLALNRGMQKKSKLWSEAGQKALRELPLEGWAGRRRQDLLGLLKNLDEQIGQLDQAAEEESQRDKMVQLLRTQPGVGPITALAFVVTIGDVTRFRRGKQVASYLGLIPRERSSGGRQRLGAISKQGNRFLRMLLVEAAHSANRKDEGFRKTYQQRCHRMAKGVAKVAAARKLAVRLYWMLRTNTAYPEIVQIESSPRVPLVGRRDD

SEQ ID NO: 418722 - protein, 356 aa, unidentified
MKTTTPVKSYDDEAGYGGLDVHKRTYVVVVRVCKPVVKKWTTVSDPKALANQLLKFFKGGKIYTVYEAGFSGFRLHRELRCAGIDSIVVHPAAVEVAANNRVKTDKRDAAKLAEQLEAGRLKGIRVPSEDQEQARLLSRTREQLVQTRSQVKQQIRAKAHQFGLIAPEDRREMSPRFFQELLECSPSEMFTLAIEALWQIWQSLDQQINHLVVQLKQQAAVDANEATYRSAPGVGPISARVLSIELGVMAQFKNERAVFSYTGLTPSEHSSGDNVRRGHITKQGNRHLRGILLEIAWRAVRKDSALQVFFDRLHPRVGRKKAIIAVARKLIGKIRAAFRKGELYQLDYPTEANATV

SEQ ID NO: 418723 - protein, 466 aa, unidentified
MEQMTLGIDVACRAAHQASLADAAGRFAWSGRRFRTSAADLQRLWESIPQGTAVTVVMEPTRNAWVPLAAWFRRHGATVIMVPPEQSADLRDYYSKHAKSDRLDSRMLARLPLLHPDGLRPAEGLGPADPLRRATKLRASLVKRRSVIVARLDSYLELLGPQWHAAFGGDLALNTPLRFLAAGYADPHALRRLGKTRLTRFIWRYSHGAWGEEHAARLLAAATETLQLWDGELSYPDLAEDIAAEARLALALCTEIRDLDTKLAALLHQADPAAIMTSAPGIGVINGAQILARLGDPARFQSLAGARSFSGLVPSLSASGVNGRHGPPTKSGDAPLREALFMAADQARRTDPTLAARYYRLMVTCGKHHNSALCHISATLLTRIISCWRAGTPYQLRDTDGTPLTTAQGRAIIAQRYRVSDELRAQRRTSHSKTGTSRRHQESPGAPTPARPRTTLRPPAQTLDTA

SEQ ID NO: 418724 - protein, 409 aa, unidentified
MEVVHEVCCGLDVHKKSVTACVLWASGRRRQTRAFGTFTRQLLELGDWLRACGVTHVAMESTGVYWKPVWNLLEGQFEVLLVNAQHIKAVPGRKTDQKDSEWIADLLQHGLLRASFVPPSPIRELRDLTRYRASLAQEINRIANRIQKVLEDANIKLASVATDTLGASGRAMLEAIIQGEQDSQRLAEMSRGLLRNKIPELQEALHGRVSRHHRFLLRELLDHLYFVQSKMQRIEQEVAERLGPFQSEVARLCTIPGVDRVTAWGLLAEIGLSMKQFPDAQHLASWAGLCPGSHESAGKRKSGKIRKGSLWLRRCLCQGAWAVSTKKNNYLSALYRRLAVRRGSKRATIAVAHKLLVIAYYILRDGTCYSDLGADYFDRLNPEGLRRRLTKRLEGLGFKVTLEPAAQVA

SEQ ID NO: 418725 - protein, 411 aa, unidentified
MAQERRLVIGGVDTHKDVHVGAVIDVRGKILDTAEFGTTAKGYRLLVEWMVGFGELQRVGVEGTGAYGAGLARYLAEAGVAVVEVNRPNRQMRRRRGKCDTVDAEAAARAALNGEATVTPKAEDGIVESIRILRVAFTSARNSRTRVALQIRDLIITAPHQLREALGSLTTAQRVARCARFRLGGDTAEPTAATKLALRTLARRYEALSAELAELNATLDELTARANPALRGSKGVGADVAAILLVAAGDNPDRLRGEASFAAMCGVNPIEASSGKTVRHRLNRSGNRQANHALWRIVMNRLTTDPTTKAYAARRTAEGKTKREIVRCLKRYVAREIYRLIVNPGAVPAGADLRVVRVGAGLRLHHAATALGTTVVSISRLELGHAHDTGLAQRYERWLGEITTSADFQAA

SEQ ID NO: 418726 - protein, 371 aa, unidentified
MNSIVYVGMDVHKESYTLCCYCYDTDKVEYKQTIPSDYKLILKYIESMRRVYGEDATFVCGYEAGCLGYSLYHQLKEHVVDCKILAPTTMAITNTNRIKTDKRDAANIARCLAFHTYSEVYVPDDEDNSVKEYIRMRDDQKLMLKKIKQQILAFVLRQGKKFEGGKTYWTIAHMKWLKNLDLKGVAKETLSEYLVTYEYLVEKIERLDNRIEELASLEKYKEKVKNMGCFLGIKTHTALSMIVEIGDFNRFEKAPKFAGFLGLVPSEDSSGDDKNRYGITKAGNSHLRRLMVEAAQSYTRGTVGHKSIALKQRQQGCSADVIAYADKANERLRRRFYKMTLNKGINRNVATTAIARELACFMWGMATGNIS

SEQ ID NO: 418727 - protein, 412 aa, unidentified
MDVLFERCCGLDVHKKLVVACVIITPPDGEPERTVHSFGTMTQDLLKLADWLEASGVSHVAMESTGVYWQPIWNLLEDHFTLVLVNAQHVHQVPGHKTDVRDCEWLAELLRHGLLRGSFVPARPQRELRELVRYRTGLVRQRAQVTNRIHKTLEGANIKLASVATNVIGVSGRAMLTALVNGQTDPAELARLARGRMQRKQLELEGALLGRVGPHQRFLLQEQLALVDSLDASIQRVNQEIARRLEPHADLLQRLDEIPGIGPRIIQIILAEIGPDVTRFPSAGHLASWVGLCPGNHESAGQQRTGRTRKGNPWLRTALVEAAQAAARVKGSYLGAQFRRLAAHRGVKRALVAVAHSLLVIIYALLTRGSSYTDLGAAYFDQRDRHHASQRLVARLERLGYHVNLELPAATG

SEQ ID NO: 418728 - protein, 342 aa, unidentified
MTLYIGVDIHARQQTLSYLETADGATGQVVLDHEVDDVPGFYRQFQGEVIIGIEACGYTNWFEELVERLGHQLLVGDAAEIRRLARRRQKNDRRDADLLLDLLVHDEFPALYRYCQESREVLRQLRYRHKLVKLRTMVANTLHALALNAGLSLRAKLLTKGGRKQLSALPLSAISQQQRNELLSLADELTRRIQLVEQWLAVQAARDGRVQRLQTHPGVGLLTSLCVVHTLGEVQRFSSTRKVAAYVGFDPMEDSSAERKAYGGISKAGSRLLRYLLIEAGQTAAKDDEQLKQFYRRLLPRRGKARAKVAVGRKLLLRCFIMWRAEIDYAEFLRRGQKEETE

SEQ ID NO: 418729 - protein, 386 aa, unidentified
MKDETFVPREYDVFAGLDVDKKSIAATFSSPQGFIRSLHMPYSVDYLLNHVRKHFGDQKVAFVYEAGPTGYGLYDGLVAQGYRCLVAAPSMIPRAPGQRVKTNRLDSRGLSESLRGGQLKSIHVPSPIYRELRHLTQLRDTVVREAAAHKQRIKALLLLEGIGFPPATAGRQWTLRVKAQLRKLRCSRTVRFKLDQLLDSLEFCEKQVVSSTKEIRRFCKKDVELFQSIEYLMSIPGIGWIVASQLLARMGDWREIDNVRQLGSFLGLVPTENSTGDSVDRGSITRAGDGRLRSKMIQAAWSAIRQDGELREFYRSVCQRNPRGKGARIAIVAVARKLSTRIYAVLKKQRPYIVRKQVHSAPLTQEETSPQGTTRRCAEPGETDNS

SEQ ID NO: 418730 - protein, 392 aa, unidentified
MYIVGIDIGKNHHEASIVSPEGKQIGRSLRFATTHKGADSLMSFIFKNIGNSPCVFGMEATGHYWYPIYSFLKAKGYTIYVINPIQSDSLRKMYIRQTKNDSIDSFLIAEVIRFGQFGTTSMADENILAMRQLCRYRDSVISSRTEIKLRIGTIMEQIFPEYEKQFSSLWVSTSMGILEKYLTPENIENAPIDELFEIIKDKSHNRLTKAKAISIKEAAADTFGIKIAQDAFSFQLKQLIDRMNFLDKQIEALDCQILEYYEKFDCYLHTIPGIGIIGAATILAEIGDISRFKNSSSLIAFAGIDPTVRQSGEFNSTHNHMSKRGSPYLRHAIFLAATTCSFHNSPLNAYYKKKREQGKHHLTATGAVARKLTTVIYAVLRDSKPYEPKKFC

SEQ ID NO: 418731 - protein, 347 aa, unidentified
MLHAGLDLSRKKLDVCVLSDQGEHLDQLAVPPDVDSLRRLARRVVEVDRQPVCAVIESMTGARIVHDTLEQQGWSVEIADAQKVKGLAPLACKTDKIDSKVLAVLSHRDLVPAIWLPDPSVREERELARFRLHLVKHKSALKCRIHSTLINFGKPCPVTDLFGVEGRRLLKRLQVPEPWRGNITASIELIDDLERQIAEINHRLKKGHAEHPYVPLLLTVPGIGWVLAFTIAAEIGEIERFPSPEKLAGYTGLCPRVNQSGEKDRRGPLTKHGPTYLRWALLEATMHALRHPAYAERYQRTKRRLGKQRGAKVAQLDIARRLAHAIWHMLSRKEKFAPRGAAFRLAA

SEQ ID NO: 418732 - protein, 371 aa, unidentified
MEHTRFVGLDIHKERISIAVAESGRSGAVEYLGEISNDPVAIGKLCERLGRPGKMLAFCYEAGPCGYGVHRQLTSLGHRCDVVAPSLIPTKPGDRVKTNRRDATMLARLHRAGELTPVWVPDADHEAMRDLIRLRSVVRQIVTRARQHLQGFLLRHGRKHGRGTAWRMAYRRWLSTLAFEHPAQQIAFQDYTDAVMDAERRLKRVEEQISGLLPEWNLRPVVDALQAMRGIALINAVVLVAEVGDFTRFSNPRQLMAYFGLVPGERSSGETIRRGGITKTGNTHARRALVEGAWAYRMKARIGRHKVDRIEALPKIIRDIGWKAQVRLCTRYRRLRARGKTANVVNVAIAREMVGFIWSIACTVQSTPKTA

SEQ ID NO: 418733 - protein, 348 aa, unidentified
MTEALFAGMDLHSNNVLVGIEDETGRRIKHQKLECDLPAIDRFLKPYKSRLKSLAVESTYNWYWLVDGLRALSYPIKLANPAQIQQYNGLKHADDKSDAYFLAELQRLNILPTGYIYDPVLRPVRDLLRRRLSLVQQRTALVLSFKSLYTRTTGQDLKLGRVKSMTAEEAKGLYEHPANCLIAKVQKEQIENLDQSIHRIEKAVLLSARALPCYEKLLTIPGIGRILGMTITMETGEISRFQTPGDFASYCRTVKSQRTSNDKKKGDNNRKCGNKYLAWAFVEAANFSRRYDETCRRWFDRKAAKTNKVVATKALACKLAKAAWHVVSQNENYSPDRMFPESANMPKQ

SEQ ID NO: 418734 - protein, 400 aa, unidentified
MSGLKGNFDCIVGIDVSKDKFDACGITGEEVKLFQISVAMDRKGFEKLKKHLSSFSVSSVLIGMESTASYHVNLFSYLVAAGYKVILINPLQISNYVKMELRKTKTDKKDAVVIARFLLANGDTLIQRATPSLISDLRDLSRQRESLVDEMTSLKIEIKQLLNITFPELEHMVGIFTKSILKLLQQYPSAVALREADIDQLSQSLITDSYGHKREEFAKALIKAARFSIGTNSPAKEIIIKQKIRFLLHQEEALQEITDMLMEMARKLMEEDINIITSIKGIGDKTAANFLVEMGGDIHKFECSGKIIAMAGLDPAVYQSGKHEGKGRITKRGNRHLRRIIWLMTTSVIQYTDIFHAYYLKRRKEGLPYKKAVLATAHKLIRVIYAMLTQRKTFCPQGNS

SEQ ID NO: 418735 - protein, 350 aa, unidentified
MATSIVAEPEEVVVGVDTHADLHVGVVLSSLGARLGSRAVATTVAGFRELADWARGFGPVRCFGVEGTGSYGAALARHLRAAGHTVVEVVRPDRRTRRLQGKSDPVDAEAAARAVLAGTAKGCPKTGDGRVEMIRSLRVARRSALKARTQATNQLLALVLTSPEELRASLRGLSVPSLVRAAARFRPGPLVSPAAATKLALRHLARRYAALTAEIAELDRGLAMVAAEAAPALLALRGVGTDVAGALLVAAGDNPERLSSEAAFARLCGVAPLPASSGKTNRHRLNRGGDRIANNALWRIVLVRMSGDPRTRNYVERRTKEGLSKKEIIRCLKRYVAREVYRRLVGLDEQ

SEQ ID NO: 418736 - protein, 353 aa, unidentified
MEEINKQCAGIDCSKKDFAVTISHSDRYQEIQHLSSRTFANNDVGFKAFNKWAGKLYKKSIPMLFVMEATGVYHERLAHFLSQLGYHISIVAPKRAKDFSKTLKVKKITDKIASQYLAIMGLEKKLDLWSPPHREYAELKHLTREKEQIQNQITMLKNFMEAEKSAYLIHEESLKRFDQTLNLLKKQKAEILKQLKGLISENKELKDRVEKVTSIPGVGVLTAATIIGETNGFSQVRNKRQLVSYAGYDVMNQESGTSVLTKARISKRGNKHIGKAMHMPALTSIKHTDSSEATFIRITSKTGIKMKGVVAVQRKLLVLIYTLWKNEAIYDPNYELKKEGDIKPPCELDHVRS

SEQ ID NO: 418737 - protein, 422 aa, unidentified
MLEQSQDDEQIIARVAALDIGKAEVMCCIRVPRDAPAGRRRQEVQAYSTMTRSLLVMADRLRELGVTRVVMEATSDYWKPVFYLLEAHGFDPWLVNAKDVKHLPGRPKTDKLDAVWLCKIAERQMIRPSFIPPPPIRQLRDLTRYRVDLVSARTAEKNRAEKLLEDAQIKLSVVATNIFGVSGRDMMAALIAGERDPRVLAQMARVRLRAKMSQLEEAFHGHFTDHHAFLLAKMLARVDAISADIAEIDERIEAQLRPFADAVTRLQQIPGIGPVAAAVIIAEIGTDMGRFPTAGHLASWARFTPTVKQSAGHNKGNGSTGRGNPYLARILGEAVVAAGRTRTFLGERYRRLARRRGKQKAIVAVGRSMLIITWHLLSSPSTQFADLGPSFYDSRIQPDRKKREHIRQLEALGYKVNLEPAA

SEQ ID NO: 418738 - protein, 402 aa, unidentified
MNALGFDVSKGKSLVAIMRPFGEIVSTPFEIKHTSSDINSLVKLIKSIEGESRIVMEHTGRYYEVLAHQLSEANLFVSAINPKLIKDFDNDSLRKVKTDKADSVKIARYALDKWQNLKQYSVMDELRNQLKTMNRQFGFYMKHKTAMKNNLIGLLDQTYPGVNTYFDSPARSDGSQKWVDFASTYWHVDCVRKMSINAFIDHYENWCKRKKYNFSKSKAEEIYGKAKELVPVLPKDDITKLIIKQAVDQLNSASITVESLRTLMNETASKLPEYPVVMAMKGVGTSLGPQLMAEIGDVSRFTHKGAITAFAGVDPGVNESGSYEQKSVPTSKRGSSDLRKTLFQVMDVLIKTHPQDDPVYQFLDKKRAQKKPYYVYMTAGANKFLRIYYGRVKEYLASLPES

SEQ ID NO: 418739 - protein, 340 aa, unidentified
MSEVSIIGLDISKHVFQVHGADASGRAVFRRKIGRAKLLPFFASQPRCRVVLEACGGAHHWARELAALGHDVRLIAPAYVKPFVKRQKNDAADAEAICEAAQRPSMRFVPVKSQAQQAAAMVFRGRDLLVRQRTQISNALRSHMAEYGWVAPKGLAHLDKLAALLVDPSAVPEGVRSVCMVLLDSLALLDRQIALLDKEIVRRSREDEIARRLMTIPGIGPITATAITALAPPPGTFAKGRDFAAWVGLTPRQHSTGGKQKLGAISKMGERTLRRLLIIGSSAVVLQASRRGAPAGSWLEQMLARKPRMLVTVALANKTARIVWALLTRHEDYRAPAAAA

SEQ ID NO: 418740 - protein, 442 aa, unidentified
MVAVMIGIDPHKASHTAVAIDPAEVPLGQLRVRACAAQAERLLEWAQAWPQRTWAVEGAGGVGRLLARQLAAAGERVLDVPPKLAARVRLLATGNINKNDPNDARSVAVAALRSAGVRQFRRDDHAAVLKVWSKRYRDLGRARTQVACRLHQVLCELVPGGVPGEITAGQAERILASITPAEAVQAARWELAAEFTEDLRGIDARIRQTRNKLAAAVAAAGTSLTGLFGVGPVIAAAVIGDVRHVARFPDRDHFAAYNGTAPIEVSSGGRKIWRLSRRGNRRLNHAIHMAAITQIRYRHSQGHAYYQKKLAEGKTGKEALRALKRQVSDAIYACLQADARRAAAHAKSPGGQPGNGSDSSAAGSHPRHRLFGQATPGPATYPTIPDASLPAPLPSRASGRPGPGPGTARPRQRRPQGVLDPAAREPIMPAAGRKATGPAGHR

SEQ ID NO: 418741 - protein, 408 aa, unidentified
MKALHRRCAGLDVHQQEIVACRRIVAGRKVQTEVGRFSTTTEGLLELADWLEDGKITHVAMEATGVYWKPVWHILDGRFTLILANAAHIRNVPGRKSDVNDATWIAELLAHGLIRASFVPPQPIQELRDLTRTRKELTREIVRHTQRIHAVLEEANIKLASVITDILGYSGRRMLKAIVAGETDAGRLAELGSSRLAAPREALVAALNGRIRDHHRFLIGQHLKTIEQVETTIGEFDARIEAALAPFRDAVERLTDVPGISRTAAQIVIAEIGFDMSQFPTADHLISWAGLCPRLDESAGKRRSTRLRKGATWLKPVLVQSALAAGRKKNSSFKTRYCALKGRVGPKKAAVAVAANLLRVIYHMLKDGTCYKDLGESYRRPRNPARAAANLANRIRALGYQVDIRRAA

SEQ ID NO: 418742 - protein, 320 aa, unidentified
MPKLNDLSRSLTALELDSTLIAVIEMSLSNWLVAGIVLGIERQPLKKVGTDEQELLKLLYRWRDEATKAGHTVKRVAVAFEAGRDGFWLARWLRARDIEAYVIHPTSVAVSREHRRAKTDRLDTELLKRAFTGWLRGEPQHCQMAGIPTLSEEDARRPNRERENLICERTRIINRMKACLVRFGIRNFKPTLRKAPELLMRLHTPEGVPLAPNTMAEMRRDLARLRFVMDQIKEIENARLQWLEHAPEEKPLAMVRLLARVIGVGIETADMLVQEVLSRNMRDRRAIARYAGITGSPDESGRKRREKGLAKAGNARGSCR

SEQ ID NO: 418743 - protein, 478 aa, unidentified
MQEKRHIGLDLGVKSKSKIYLIDQAGKKVRAEFSIWTTPQGLEYMMQQALKGTSNEVTLDLTMEPTNIAWFKVAVYLRRKYPQVKIYRIKSEKVQDLRKFYRKHTKTDSLDAKTLAKMPVVDSDSLEEVYIRPKYILALNTRCKQRARLVENATAKKNSISDQIELGFPHLVDCFSSKFTAPFIRFCEKYANPFKVKRSGKEKLLKVLIKLGFRKDLSSLAENIYQRAEEACILLGDEDSIIDYADFQDRIRSEFRIFKALKKEIDKVTEKEQDLYEKCYPRKSLNSIPGIADVSGAVVASTIGDPFRFSSGRSLVGYMGYYPKEDSSGLSSKKGLRMTKAGPNIAKGSLYLIGNIARLIDPQMGKIYYEQMVVCGNPHTKAVCRVTRALIPRILKIMKEDQDYVIRDLEGNPISKKEGRRIVKEQFFVPEEARQRLSNRKRMPLNKKGRTKPQYKRGSLQTPQIRVSSSRRFAFSLN

SEQ ID NO: 418744 - protein, 338 aa, unidentified
MKDIKTEKGKKINKKSLIVALDVAQEKHVVYIRCPDGRGEKPFVVFNRREEYEQMWERISQTKEAYGLEEVVVGFESTGPYAEPLVHYLMKKEVKLVQVNPMHTKRVKEIRGNSPNKTDEKDPEVIADIIELGYERLEETLRKITRGRMGKERAEALYEAAVNTVGVKEGQGSIVFEIKQLMTGIEETERFIDEMEERMKEHLKEIPYSRCMLSIQGVGEVTVGGLIGEVGDFTKYRTIAEITKLAGLDLFEVSSGKHKGERHISKRGRPLMRKLLFYAAINVVREGRIMHERYERYLQRGMPRIKALIAIARKLLGILFALARDQRNYEEIPLKEAA

SEQ ID NO: 418745 - protein, 468 aa, unidentified
MARLAEHSPRSESSQQNSEGEVEGLPVIRPHVAGIDLGSNEHWVCAPQVDGSGREVEKFGATTPELERMVEWLKQRRVESVAMESTGVYWIAPHEILERHGLEVVLVNTRELARVPGRKKTDRVDCKWIQRLHSCGLLTGSFRPAEQICMLRTLVRDKGNLVAEAGDWVRRMQKSLDQMNVRVHRAVSDLDGATGMAILRAIVKGERDARQLAKLRDRRCQKSEEEIAEQLSGHWREDHLFSLQQALRMYDAVQERIADYEREILRKLAEMERDDCRGQRTPTSNHPQKAKAIRKRGEEPLRQALYRMSGVDLTAIDAIGVGTVEVVLSEYGADLSRFATEKQFVSHITLAPRQAVSGGKPVKKKKRGSASTRVAAALRMAALSLRHSQTALGAYYRQIARRIGGDVAVFATARKLATLIYRLLKWGQPYVDEGAQAYEKRYQEQRLKRLTAMARDLGYQLTPKAAQA

SEQ ID NO: 418746 - protein, 381 aa, unidentified
MEKASGLDVHKDSVFACILDGQGNKIFEKRFGTLTPELTALRDTLVSHGCGRVAMESTSIYWMPVWHVLSSDFSLKLANPYFIKQLPGRKSDVKDAHWIAQCLQKDLIKGSFVPGGVLQEMRQYGRQCFRLTKNRVRLEQQLDNQLQRCNIRFSNYVSNQGNNVSLRKVIDALIQGERDPGKLARLVHGRIRNKHGEQVIGDSLDGVLRPTDIELLKQCMEQLDLFEKQQAACLNHLEELADKYYAREISLLCTIPGIQKYSAMCILSEIGNDMDAFGSASRLVGWAGLRPRNDESAGKIQSRKTLHGNKYLRKPLIQVSWSAARSNKSFLGKKYNQLSKRMKPQKALMAIARKMLVIIFNVLKTGQPFDANRNLQAVTPG

SEQ ID NO: 418747 - protein, 359 aa, unidentified
MPVYVGIDVHRKRSQVAVIDEGGEVLANRNVPNGVQPVLGVIGGLPPGTPAAFEAAFGWGWLVELLEDYGFDPHLVHPLQCKAIASARLKNDKVDAAILAQLLRADLLPEAWIAPPQVRQLRALLRHRIQLVRLRTLLRNRIHAILADHGHDRPGGCWSGPGRAWLASLELPAVSREVIEDDLALIDALQVPIGRLDWEVHQHARSDPSVKVLTQLPGVGPFTALVLLAEIGDVTRFGSARKLAAWAGLTPTVRGSDRTVRHGHISKQGSVWARWALCEAAQTAKRHPDFAASYQAIARRRGKNIATTAIARKLLARAYHLLTDAQITAPAPAATAPAPAGAPTGREGVASPGRARKTA

SEQ ID NO: 418748 - protein, 344 aa, unidentified
MTYYAALDVSLRTVNLCVIDEEGVLVAETKLDSEVIDIVAYLDGLELEITSVGLEAGTLCQYLTYGLQFAGFEVVCMEARQVKAALSAMRNKTDKNDARGIAQLLRSGWYSKVHIKSMASHRIRALLSSRKAVLCKCIDLENEIRGLFKVFGIKLPAKLGHGAFDAAVRHAIETDATLSHALLPLLDARLVLYHCFRELDNRTRKLAHSDPVCQRLMSAPGVGFITALTYKAGVDDPTRFKRSRTVAAHFGLTPRRFQSGEIDIDGHISRCGDRGVRCTLYTAANALMTRSSKWSSLKVWGLQLAKTRGHRRAVIAVARKLAVILHRMWIDDTQFQWGSEGARS

SEQ ID NO: 418749 - protein, 334 aa, unidentified
MENIALIGIDLGKNSFHIHCQDHRGKAVYRKKFTRPKLIEFLATCPATTIAMEACGGSHFMARKLAELGHFPKLISPQFVRPFVKSNKNDFVDAEAICEAASRPSMRFVQPRTESQQAMRALHRVRESLVQDKVKTTNQMHAFLLEFGISVPRGAAVISRLSTLLEDSSLPLYLSQLLLKLQQHYHYLVEQIKDLESQLKRKLDEDEVGQRLLSIPCVGTLTASTISTEIGDGKQYASSRDFAAATGLVPRQYSTGGRTTLLGISKRGNKKIRTLLVQCARVFIQKLERQSGKLADWVRELLCRKSNFVVTCALANKLARIAWALTARQQTYEA

SEQ ID NO: 418750 - protein, 401 aa, unidentified
MEGPIVSIDVSNGNSHYMCFIKNNKRFGKVKKIDHDIEGFKRLLEDIQKLEAETNEKVCAVFEATGVYTKPLERFLSKNSIKTYIINPLESARKRKEEIHNKKTDKLDPISISKVYYDKKEMMELKKKDETYNWLRKKNQLYEDQLNHLRKYKVTFQNQLSICFPGYLDLFKDGYSDIPMTILKKYPHPDLLKNKKAETVARYLEKNTCHTHKVSLEYALKIIEFAKKTYPGCEKDDVEVEIFKILLDKVIETQRECEKTLNEMITVASTLEEYRYISSIDGIGPNLAARIIAEIGDIEEFKSREALVAYAGLDPHIYQSGDQDGKHLKISKKGNKYLRCLLFLAVGCSIRGAKDNPVNRFYQKKKQQSNPLNSKAAKTACTAKLLKIIYGICKNKTTYER

SEQ ID NO: 418751 - protein, 338 aa, unidentified
MDKFNHFVGIDISKKTFDAALIMGGDTTHIKHQVFRQNATGFAEFSEWLGHYNIAKEEVLICMEHTGLYTYGLIDYLTAAGLHLWVEMPLRIKKSMGLQRGGDDKAAAIQIALYTYRYKDQVSLWKPEQAIVLELRQLSTQRDRLKLALNQLIIPLQEIADACHDAAILKLQVKLQAPVIKAIEKSITAIETQIDNLIAAAPAIQSTIARVSSIKGVGKQTAIHVFIYTKGFTTFSSGKQLASYCGVVPFTKSSGTSVRYKTQVSPFANKHLKKLLHLCAMAAIQHNDEIKQYYNRKVGEGKNKMSVVNAVRNKLVQRIYAVVRDGRNYVENYQFQRA

SEQ ID NO: 418752 - protein, 356 aa, unidentified
MTSMAQPAAPQLTIGVDTHLEIHVAHANDQLGRPVATLQIPTTPAGYTKLLAWTHELGEPVAWGVEGTGSYGAALARFLAANGQVVVEVNRPDRQARRRHGKSDPLDARAAAKAVQAGEVTVLPKAGSGQVEMIRCLRVARATAIRARTQTINALKGLVVTAPAELREQLRGRSVPRLVAAAADLEPGPLTSPLAAAILALGTLARRHQALSAEITALTGELERLVATTAPGLVARFGVGSDSAGALLVAAGDNHDRLTSEAAFSMLCGASPIPASSGKTTRYRLNRGGDRQANAALHRIVVVRLRWHQPTQAYMTRRLAQGKTKKEIIRCLKRYVAREVFAALHQMRQDPPTTAA

SEQ ID NO: 418753 - protein, 369 aa, unidentified
MKVVGMDVHVRNSFLCVADSDGAVLRRGRVGNTLGEIAQFLSMLEEKKEPVRVVLESTTNSRAIHRMLQEYGRQSGLEVDAQVLDARKLRIIAESVSKCDKQDAAVLCELARSQLKLPVCYMPDDEVFALREHLRARSDLVRMRTMLKNRVHAVLHRRGILNPLGDLFTKGGRQWLKELTLDEAGRSILDRYLAMIDQLQGTLEQSTADLMRLSRSQRWCKPVALLRTMPGVGPITSLTILAELGEIGRFKSRAAVSNYAGLVPVVRDSNQKHYSGGITRRGPTHLRGVLIEAAWMSKGRVPQYQAIFNRVSQRKGSHVAIVAVSRRMLEDAWTMLKKDEVFRLSSTTATAVVEERIGESVVADPGVAG

SEQ ID NO: 418754 - protein, 355 aa, unidentified
MECKKYIGMDVHQASISIAVRDATGKVVAESVIETKAATILAFIRGIQGSLWITFEEGTSAAWLYDLLKPHVTKVIVCDPRKNALLNAGNKNDRVDARKLSDLLRAGLVTPVYHGENGVRTLRELCRGYLTINKDLTRVMNRLKALYRSWAIPCAGDKVYSPRHRNAWLEKLSEAGVRRRAEQLYQQLDALVPIRREARRQLLAESQKHPATQLLRQIPRLGPIRVALLIALIQTPHRFRTKRQLWAYCGLALQTRASGEYRFTGGELQHSKRSPALRGLNVNHNHDLKNVFKSAATHVSTSTDPLGDFYRSLLAKGMKPTMARLTLARKMAAIVLSVWKKGARFDPGELKQQAA

SEQ ID NO: 418755 - protein, 438 aa, unidentified
MAVARQTFLQENPLMLYLGIDQHSKQITVCVRDQDGEVILRRQVSTKPEKIASFFGQITDQDRDFAAIVEVCGFNDWLIDVLRTWNCNDIVLIQPGKQSKKKTDRRDANKLSEMLWLNRERLQAGQRPQGLRRVYIPTQEELANRQITATRKRLAELRTRTLNRIHRILHRHNLMWEYPTKTFQTKRGRAWLTQVALPQVDRIEMDLLTEQWNLWERQIAQVDEQIVARAGKHAPGDVFSDTDLLRTVPGVSHYSGLALVSRIGPIERFPRPRSLANFFGLTPGCRNSGNAQHRLGSITKEGSSIVRFHLGQLVIHVLKRDRVIRQWYRKIKGRRGSKIARVAVMRRITTILWHILTHREAYSSGGPPPRLRKPDAIHADQLSAATCTANEQAASSARAPRMAQGSSLSPSLTLHRIARHLGPPKVVGLVDDVRLDGD

SEQ ID NO: 418756 - protein, 366 aa, unidentified
MKQVSRVAAKPSRNNSQPKLTIGLDLGDRNSWYCVVDEVGQIRLEQRVRTNAKALQEVFGALPRSRIALEIGTHSPWISRLLSELGHEVIVANARKVRLIGESRQKDDRLDAQTLARLARIDPELLHAVKHRSAQAQADLMMIRARAGLVRARTGLVNTARGLAKSYGERLRGCNVRNMNPEKAESLSPELQRALEPLLSAIAELSERICEYNERIDELAQTSYSQVALLKQIKGVGTLIALTFLLTLEDPHRFRKSRDVGCYLGLQPGRRNSGQSEPQMHISKEGDPYLRTLLVQGAQHILGPFGVDCDLRRWGLKLAERGGRNGKKRAIVATARKLAVLLHRLWVSGEVYEPLHNRRAIVAAAA

SEQ ID NO: 418757 - protein, 430 aa, unidentified
MHNKNYISVGIDVGSAFSFMTILAPDETVILKPFKITHNNKDSLERAVSEIKKAEELYSLESRIFLESTGIYHFPLFCYLVDCGFNASIINPIITHSTKNGNIRKVKNDKIDSKGIAKLGLSKDIPVSQFPAKLVLELRSLTRKYYDLTDERSAHINKLKGDLHTVFPQYLDVFCDVTGKTSTMILRQYGTPDKILRGHKKTMIEKISKASRKGLAKASERYEKLCAAANAAKTFGCQIDSIYFNIFLTLDLVEKLDSALDSILNRIRQLITFNKNEKFIQQIKLLNTIPGVGFLTAVTIMCEIGDFSAFRNPKQLFAYFGLDPEVNESGKFVGTQLHMSKRGSRIARRAIFAVALASIRTKRNGEGINPYLRKYYELKSGQKPKMVAIGAVMHKICNIVFAVLRDEKAFELRSPEEHCKQYQRPALAAA

SEQ ID NO: 418758 - protein, 323 aa, unidentified
MMAEPAEIQSVLGLDVSRNTVTLCDGRTRHTVTIANDADALRTALLPYQGTATLAVCEATGGHEDTLLGVLLELAIPAHRADPAKVKAYIKSFGKRAKNDPIDARWLSRYGRDRAATLPRWQPVDLTQQKLELLVARRLDLVAMRVQEQNRLKAPRSRLIADNIRDHLAELERHIEALNAEIGALIGESRDLALRAEQLRSVPGVGPVLAPLLLAVIPELGTLNRRQVASLAGVAPHPKDSGKASWHRSTTGGRRQIRPALFIAALAACRGDNPLATAYKALLKAAKPKRVALTAIMRKIITIANARVRDAVRHQNEIGQINA

SEQ ID NO: 418759 - protein, 483 aa, unidentified
MSKRIVGVDLAIKGSHRASVYDAQAMAFLGKSFCFTRSYEGFMAFLRKVTDSAGDREVLFVMEPTSGTWKPLSAFLMAKGYTVYLIKPQKVYDLRKFLKKHTKSDRIDSQTLAKLPVIDPEGIYPLTVPRTDIEALNRYCRQRERIIRSISARKVRIQAFFTAVSPLLFECFGEHKFTRCSKAFLHRYADPFKVVKLGIKRLATFLTKHAFGTPDASLAENIYAASCSAVNIYREARERDSLPFCPDQFQDEINLELDLMAFEEEKVKELDKKIDALYQQLDPNNVIQSIPGFGPVIAPSILGATGNPKRFTNLRAYKSYCGLVPRKKQSATHDKKGLPITKSSQRILKKSYCMAAETARKYDPEAAMLYHRLIARGRHHYQAICAVGSNLAGRTFSVMKRAGLGTQTDTRCTSEVSYVIRDFDGKAIDQTSAGKLIKERFPPKKKRESAQHIRSRQSLPTSWDNSSVDDGVTLPKEIYYSKK

SEQ ID NO: 418760 - protein, 331 aa, unidentified
MDNSLYFVGADIALKKFDAAIRLDSNRYKHKVFANTPEGFTAFHAWLQGFGSHFHILMEATNVYHEDLADYLLVQGLTVSVINPRCMPNFAKSTNMRSKTDKVDARLLADYAYCNAARLRKYAPLATNYRTLKRLMRQLTHLKKIIAKEQVRIQMMMDALCVEISQEIIAGTKALAKELEKKIKELVKEDKVLSRNAQLLQSIPAVGWMSAMYLLSHLGDGSRFRNSKAAATYMGLTPIVKQSGDSLHIVSGISKMGPRDIRDVLYAPAMSYAFGPWKERVYAPFVQRLTANGKAPKEVIVALMRKLVSIAQAVLQHQRPFDSAILVGKAA

SEQ ID NO: 418761 - protein, 408 aa, unidentified
MNAVGIDVSKGKSMVAALRPMGEVALLPQEFLHTGVGLEQMAYAILALGEDTRVVMEATGRYHEPVAAALHEYGIYVCVLNPLYIKQSGGGSIRKVKTDKADAMKIAKYGLDNWVDLREYTPMDTVRQQLKLCSRQYNLYMKTVVSLQNNLISLTDKTFPGVSELFSSPERTDGHQKWVDFVMTFWHCDCICRVSEKAFTERYQKWCKRKGYHCSVEKALDIYASSCGHFTTLPKNDNTKLLIVTAAQQLLAGKTTLAALRAEMTRLASQLPEYETVRAMYGVGETTAAQLMAEIGDVRRFPRRSSIVGFAGVDPAVDQSGKHETQSTHTTKRGSPHLRKTLYQIVCTYLRKAPADEPVYQFLDKKRAEGKPYFVYMTAAQNKFLRIYYARVKECLEAFDAQQGTSQG

SEQ ID NO: 418762 - protein, 308 aa, unidentified
MTSNRQYIAIDIAKQTLQVQSDLKSLSLNYDEVGLKQLRAFIKQHERPMIIAEATGGYERPLMSMLFKYNISVALINPRLARAFAVSEGIKAKSDPIDADMLLRFAKEKNPRPTEYIGAEREELGALMDRRSQLTEHIAKEKNRLDKSPKSICGSIKKMIRLLDKELALIEARITKLIDSNEQMKAQSKLMQEVCGVGANTAWSILAYLSEITSLNRNQLVALAGLAPYNRDSGKYKGKRSIQGGRAKVRATLYMAATSASQHNAVIKDYYQGLKSRGKPSKMALVAVMRKLLIHLQSILKKQQLLLD

SEQ ID NO: 418763 - protein, 348 aa, unidentified
MTEACDGREVVGMDLHRRRSVLVRMTADGRKLETARITNSPAELRRAIAGAGTHPRVVLEATYGWYWAADTLSAAGAEVHLAHPLGVKGFAYRRVKNDVRDAADLADLLRMGRLPEAWIAPDQVRELRELTRYRVKLVRIRTSCKDQVHAILAKLGIPVTCTDIFGVWGSTWLDGLELPQPYAGKMASLRKICAVLAGEIALLEAVIAGLVKDHQGYQAVRTLPGIGPVLGAVIVAEIGDITLFPRPAELCSWAGLTPRHRESDTKVSRGHITKQGSRNLRWALIEAIQHVPAGHPLRQRKDDIMTRRGAQARNIAKVAMARQLLTWVFYAMRDGQVRSLAAAARQAA

SEQ ID NO: 418764 - protein, 395 aa, unidentified
MTQEGPDRLSHYCLVPAIGFGESLFNNIIRKWGAEMNNSSSSNHQSIVGGVDTHKDLHFAAVVDAYDRVLANNSFPTTRQGYKSMLNWMRSFGEVRRIGIECTGTYGAGLLRYLQQFDIEILEVTSPDKIDRRRRGKNDSIDAENAAHAAFAGIRTVTPRTRDGMVESLRVLKVCRKTAIAARRIALQMIQMNIISAPESIREPLCAMTRMQLIRTLVTWRPDLSGYRNISTAYKIALKSLARRYLELHDEIADLDVMISAIVDELSPELIAGKAIGYESAAQLLITAGDNPDRLKSEASFAALCGVNPIPASSGKISRHRLNRGGDRAANSALHIIAIGRLRTDNKTKEYVDKRLTQGHTKLEALRCLKRYIAREVYYILKKRNNLINSIQIAA

SEQ ID NO: 418765 - protein, 348 aa, unidentified
MTTTVYCGVDFHARVQTVAYCVIADGEIHLHELDHRKDDVRGFYSQFSGEVVVGLEASGYSPWFERMLEELGHSVWLGHAAEIRRFAKRRQKNDRRDAELILDLLLKGEFPLIHRPTADSLEVLRMLRYRHRMVKMRTMIVNNLQALAIGSGLSLQSRLLTRSGRLRLLATQMSPVMSRQREEWLSLVDTLNARIASVEKWLEQQAQANSRVQLLRTQPGLGLLTSLGLVHSMEPVSRFCNQRKVAAYFGMDPMERSSAEKRRCIGISKAGSRLVRFLLVEAAQTAARKDQELKRFYQRLVARRGRQKALVAVGRKLLTRSYIMLRDGIDYAEFLRRGVEARPARRDA

SEQ ID NO: 418766 - protein, 377 aa, unidentified
MKIAIGIDVHKEKCATFAVYAGKEEPRKKNLDFLERFNADFRRFPSDAAGMVGLTNRLHGQDAYILIENSTKSRDVYWMLTNLGFRVTVAHAADLYRITRSKTKNDDNDAAELAGYMRRRLMREIEFAVAHMPSREVLVQRELCRFDINDRNDLTALKKQIRSHLLIRGMKLSRDYSDITCVLALRELKATGDHILILDAAKAESIKARKSQTEKMIRYRMEGNRMFDIVWSVPGFGILSAAYVTCMADDMTRFVDGRAFAASAGITPKLDESADRPKNCGISRRGDPGLRRLLCQATFVHINHADSFISEKYKRLKANGKHHNEALVACANSMARMIWAMVTHDRKYSADPTVMAVTRYLADSDEIEDEMEAAQTE

SEQ ID NO: 418767 - protein, 419 aa, unidentified
MVQEDDNSLVSVVHPICCGLDVHKETLAACLLITGADGRIQSEIKEFATFTDDLLRLREWLAVNDCPVMAMESTGVYWRPVHNVLEGQVTVILVNARHIKNVPGRKTDVADSQWLAGLLRLGLLKGSFLPPQEVRQWRELTRLRKHYQESIADFKRQVHKLLESSNIKLAAVLSDIFGATGRLILERLAHQDGIPDLSDLERGAGRPLRHKTQELRRAVGGFFTAHHRFQLCLLLRSIRQLEGQLGEVLARLEEQLTSHQELRQRLQVVPGISQVASAGILAEVGPSLADFRSSDALSSWCGLCPGNNQSAGKRKSGRSPVRSHPLKTLMVQVAWAAVKKKGSYYKDKFHRLRYRLGPKKAIVAIAHRLLKAVYHIIKDGAAFRDLGEDYLQRRHHPGRLNHLKKQAQLLGYQLIPATA

SEQ ID NO: 418768 - protein, 340 aa, unidentified
MQITTVGLDLAKNVFQIHAINGAGEVVARRALRRAQMLPFFAKLAPCLVGIEACGTSHHWARELVRLGHQVRLMPPAYVKAYVKRGKTDAADAEAICEAVSRPTMRFVAIKSVDQQAALSLHRARDLLVRQRTQLVNLVRGLLAEFGVNIPRGITHALAFARRLVAGEAHEVPDLAAKVAGALAAQALAVQDQIRGLERELMAWYRASALARRIATVPGVGLLGATALAATVTDPGQFRSGRQFAAWLGLTPRLNSSGGKERLGRISKMGDRYLRRLLIVGMTSLVRQAKRGPGVTDPRLAQLLARKPARVATVAMANRAARVIWAIMTRGGVYRAPQAA

SEQ ID NO: 418769 - protein, 369 aa, unidentified
MTRTPATSDPDQASTAVFAGVDTHKELHVAAVIDAGETVLGTRSFPTTRTGYRAMLAWIGEFGDLARIGVEGTGSYGAGLTRHLAKAGVMILEVDRPDRSDRRRKGKDDDLDAINAARAALQGRRTSIPKSKDGAVDALRVLRVTRAHAVRERRSALQLLRMSIVSAPEELRDQVRHLTRMQLIRTLAAWRPDVSNATDPVTAYRVSMKSLARRYLELTDEITDLDELINPIVEALAPQLLERVGIGIEVAGQLLVTAGDNPDRMKSEAAFAMLCGVSPLPASSGMTQRHRLNRGGDRQANRALHLAVISRIRLDPRTQTYVAKKTAEGHSKMEIIRCLKRYLAREVYFILNPGRQHIVPNTRQHRTAA

SEQ ID NO: 418770 - protein, 337 aa, unidentified
MKSWSVTVLSETSVLKKFSQHPSPEALHGFLARSYPGAEYHSVYEAGFCGFWIHERLTALGIDNIVVNPGDVPTKSSEKLRKSDAVDSNKLARSLRANELKGIYTPDSASLEMRSLIRLKNSITKDTTRQKNRIKSQLRYLGIGIPQEFLEPFSNWSKRFIAWLKEVETLTPSGRQAFDIQIRHLEELRRQKLEMTRALRTLAKTDRFREPLRLIMTVPGFGQATGMAFLSEICDIARFRNAEQLAAYIGMIPMCHSSGEKDGTGDITVRRNAVMRCNLIEAAWVAVRQDPAMNLFFTEQCKRMPKSKAIVKVARKLVNRLYFVLKHQTDYVNSVMS

SEQ ID NO: 418771 - protein, 380 aa, unidentified
MDKVCGLDVHKDSVFACILDEKGKKILEERYGVLTPDLDKLRDVLVNHGVGRVAMESTSIYWFPVKRVLESDFQVTVVNPYFIKQLPGRKTDVKDAHWIAQCLQKDLIRGSYVPDWDLQQMRQYSRRYHYLNRNKVRVEQRIDNHLQQCNIRFSNYISNQGDNVSMRKFIKALIDGERDPDKLCRLVHGRTINKHGRDIITAALTGVINGTDIEMLRQCMEELELIEKQQSTCIESLEELANRHYAEEISLLCTIPSIKKLSALLILAELGGDMDAFYTAAMLVSWAGLRPRNDESAGKIRSRKTLHGNKYLRLILIEIAWSASLSNKTFLGAKYRQLAKRMIHQKALLAIARKLLVIIYCVLSKKQTFDHNRNSKAITA

SEQ ID NO: 418772 - protein, 344 aa, unidentified
MQITTIGLDLAKNVFQVHGVDATGQVVVRKSLRRSQMLPFFAKLPPCLVGIEACGTSHHWARELIKLGHEVRLMPPAYVKPYVKRGKTDAADAEAVCEAVTRPTMRFVPVKSPEQQAALSMHRTRDLLVKQRTQLINMIRGLLAEFGIDIPKGLERALLMARQIVDGKSPDVPIEAAKIVGTLSQQALDTHVRLREIDRDLAVWLRGNDVARRLTTIPGIGPVGATALAASVTDPHQFRSGRQFAAWLGLTPLQKSSGGKERLGRISKMGDKYLRKLLIVGMTSLVRRAKYNPGKIDPRLADLLARKPTRVATVAMANKTARVIWAIMARGETYRTGHQPELAA

SEQ ID NO: 418773 - protein, 394 aa, unidentified
MKLVGIDVGKNSHHFCVIDKETGEFNVAPSSFSNNKEGFDFLINSLKPYSKKSILIGMEDTGHYHVALLKFLLSNGYTVALINPKTTDLTRKMEGGITKNDKMDTITICDVLDTPERKKQYRITKVDRFDLYEQRQLTRHHHNLKEELNVYCNRLQKSIDLVFPEFNTLFSSKYGIVYMNLLKTFGSAEAIASTDIRTIRKCFEVKGRGGRISLTPEKLKECAKNSIGISSEVETIQIKHLVSQIMLIKEQIAEIDKKIEEFSIKNNSPILSIPGISHFSGTSILAELGDIGNYSKPSQIIKFAGVAPYHYESSQYNAQHTGITKKGSKYLRKTLYQIILPVINNNPIFKKYYRLKISQGKGHRCAQGHCIRKLLRIIYHLLETGQSFDPALLR

SEQ ID NO: 418774 - protein, 370 aa, unidentified
MQFIGIDLHTNKFTCCYRDEKPSADGKDSKRIETFDLSATGLVRFYKTLTEDTYVLLEATITTFCFVRLIQPKVKEVVVANTYELKQISLGRNKTDKIDSDKLCRIMKMQVLSGEKAISPVTVPPVIIQNLRGLFSTYRLLKKQSTQFKNRIHSLLKEKLYGFTQEQIFGKSRRKMIREMEGDPVLSFQLNHLFDLLENLEAGVEELEEKIKEQAEPFMREIEILTSMKGISVLIAISIIADIIKVDRFKDSKSFTSYLRSAPRVESSNTTKGNKGTNKMGRKLSATLITQVLNHVLAASPKLDKWYTRLTAYKKAGSVRTGLRRRVFAEIYQMLKKGEYHYGRDVKKHDEKLYQYKRFLEKRKNLLKSA

SEQ ID NO: 418775 - protein, 341 aa, unidentified
MHNFSAVAGLDLSLNSFTTSLISSNEKFKSKIKTFKRTKEGLEEFVKWIENQGFPKEKVLVVMEATNNFWEEVAVKLAENKIAVSVINPRVIKDFARSLQRKAKTDKIDAEVIALYGVRMKPKVLDISKSKRFGKLRNLVREREFWLREKVRLENYERTLKSGVFVSEEGKERVKEMIEKVLLYIEEIEQEIKREIEKEEELREALKIVGSIPGIGEVNGVVILVETGLFKGFRRGKEVVSYAGIVPRVYESGTRKGSKGITREGNRRLRQAAYFAAVASLRSKCGVFKEFYDRLKERGKAKKVALVALAGKILRIAFALVKKREYFDARKLQSQISSVGA

SEQ ID NO: 418776 - protein, 459 aa, unidentified
MSRKSKSQSKPQAAPVVEWETLNPDAAGLDIGASEIWVAVPPDRDPHPVRSFKTFTPDLQALVAWLKACRVTTVAMESTGVYWIPIYELLEASGIKAYLVNAQHIHNVPGRKSDVQDCQWVQRLHSFGLLSASFRPEAEMVVVRAYLRHRAMLIEHRAPHVQHMQKALHQMNVQLTQVLSDIAGQTGLAMIRAIVAGERNPVTLAQLADPRCHSSQDEIAKALTGSYRPEHVFALKQALALYDAYTGQLVECDRQLEQQYAAAKPRFDPDDPAHPLGPDPKPQSRRRNGPDFDVRTPLFKLVGVDLVAVDGFDESTAQTVLAEIGTQMDRFPSAKHFCSWLGLAPHNDITGGKVVRRHTLKTHNRAAQALRMAAQAAGNSHSAMGDYFRRMRARLGPKDAVTATAHKLARIVYHMLKDRQPYNPLTPEAYTDQMRQRELNYLKRRAAQHGWTIQEPATG

SEQ ID NO: 418777 - protein, 389 aa, unidentified
MIYVGIDVAKDKHDCCILGSEADKLFPVFTIPNNKAGFDELYEKMFSVTDDKTKIKVGLEATGHYSLNLLGSLIDKGLPTCVINPLHTNLYRKGLSLRKTKTDKVDARSIAMMLMTNKTLKPYSDISYHNEELKSLTRYRFDKVQERAKLKSSVARLVNILFPALEKLVPSLHMASVYSLLSKLPGASYITECHLTHLKNLLETASKGHYGRDMAITLRNTARDSIGSVIPAKSMELKHTIHLIKVMTEEIDEIEDSIKSIMDTCNSPIMTIPGISYRMGAMILAEIGDFTRFNYADQILAFAGLSPSTYQSGQLDSSYSHMEKRGSRYLRYALFNAAKFVCKWDENFGAYLSKKIGEGKHYNVAIGHATKKLVRTIYRMELTGEAYRR

SEQ ID NO: 418778 - protein, 376 aa, unidentified
MNKSTPNSSVKKTTKGAAKGRADAVDWTRVATIGIDVGDRFSSYCAIDSSGTIVAEGRITTTVGAIELELGQISRKTVAIEAGMHSPWMSRLLNRLGHEVIVANPRKLRLIYENQHKNDRVDAQYLARIARLDPKLLGAIEHRSELGQSHLALLRARDVLVRARVRLIHHVRAAIKSIGSPVPSGHTDAFHKRMRSAIPELLRGSLDPLVETVEQLTARIHEFDRKIERLAEDRYPETEVLTQVAGVGPLTALAFMLTVDDHRRFRTSRSVGAWIGLTPGQCQSGESNPQRHITKQGDHYLRRLLVGSAQYILGPFGTDSDLRRYGLAIAARGGKNAKKRAAVAVARKLAVLLHHLWRTLDVYEPLHTTKTRRKAA

SEQ ID NO: 418779 - protein, 444 aa, unidentified
MARKNHQQPLRVVHDHCAGIDIGSREHWVGVDPDRCDNPVRRFSTFTDDLLGLADWLESLEINVVAMEATGVYWIPLFEILDARGFDVYLVNSRATRQITGRKSDVLDCQWIWQLMSYGLLRGAFRPSDATCSMRSIVRQRANKVRDQAQALNRMQKALSQMNIQLANVISNIAGVTGMKILRAIIEGERDPRKLAAYRDRRIKADHETIERSLRGNWRQEHLHALAQEVACHDFLEGQIAECDQAIMQALEHLPTLNDAPQPSTKVLRSPHRCALEQAALHQALWKIMGVDLTAIPTLGVDTVLVLSSEIGPDLTRFPTSEHFCSWLGLAPPTRISGGKALPGSGPKVLNRAAQALKQAASNARNDKSFIGASHRSRLARMDTSCAIKATAHQLARLIYAMLTKGQPYVEQGIEAFEAKSQQKQVRALLRKAQKLGLQLVKAA

SEQ ID NO: 418780 - protein, 353 aa, unidentified
MKKLFIGIDFAKEKFDAAIIEACGLKEFGNREYGTFTNDKKGYRQFFKWVKTNADKSVENEWLFCGEDTGSCSLGLSKWLYGKGLDIWIENAYSIKHSSGIQRVKSDKADSSMIAEYAWRHQDKAVLFEPLSESLSQLREVLLYRHKLVQQHIAMDVRKQDKEAAEPSKAISFIKRKSKHLMSEIDNAIKECDLMIDRIIESDAELKENYAIITSIKGVARQNGACLLICTNNIRRFDLAARKIACYYGVAPFGKDSGTSIHSPAKTSHFANKLIKSLLGQAAHCAKKFNPEIREYYNRLIGRGKKPQVALNNVKNKLIRIIVALVRKKVYYDPKTYMFYNAKFTDVKKMLNS

SEQ ID NO: 418781 - protein, 415 aa, unidentified
MSVVTRRFFVGIDWGSQTHVVCVLNAEAQIVEERKVQHTANAIAEFLDWLSALTAAPASSMAIAIEVPHGTLVEELLEHGFSVYSINPKQLDRFRDRYFPAGAKDDGRDAFVLADSLRTDHHCFRAVSVNDPTVVRLRELTRLDEELNHCFQRHCCQLRQQLQRYYPHVLQLSKTADEPWIWALVELAPTPAKAVKLTSKRIEKLLRDWRIRRLDAEQVAAALRGRSFSLALGTIEAASEHVLLLLPHLRLLHQQRLAIAARIERILDELSAPGDSDQPLPDVKVLLSLPGVGRIVTATMLAEAPQLLAERDYHALRAYAGVAPITRQSGKKSAVLMRYGCNLRLRNAVYHWSRVSMQHDTRSREHYHRLRSKGHTHGRALRGLADRLLALLCAMLRSGTTYDPARRQSVGSPSA

SEQ ID NO: 418782 - protein, 341 aa, unidentified
MTVYVGMDVHRKRSQVAIVDAAGVPQRNRNLANDPAKLVPVLGVLPPGTPVAFEAAYGWGWLVDLLEELELEPHLVHPSRCKAIASARLKNDKVDAATLAQLLRADLLPEAWIAPQQVRDLRALLRHRASLVRLSTLCKNRIHAVLADRGIGEDQVLWTGPGRAWLADLALPPTPRAIIEDCCGLLDTLAIPIVRLEGEIATLAKPDPRVQALMVLPGVGKLTAMTLVAEIGDIARFPTARKLCAWAGLTPQVRNSDRKVRHGHITKQGSPWVRGILQEAAQTAKRHPMFAGAYGELARRRGKNIATTAIARRLLARSFHILTQLEATSEKAGTGRARVSA

SEQ ID NO: 418783 - protein, 335 aa, unidentified
MDTHADVHVAAALNHIGGLLGVESFPTTPAGYGRLLAWLQSFGTVALVGVEGTGSYGAGLTRHLTAAGVRVVEVDRSDRQERYRSGKSDPLDAESAARAALSGKAKGAPRGRDGTVEAIRALMVVKRSARGERTRSINQARALVVTGPDDLRARFEGHRTDDLVADLAGLRPRPGDVVGYATRVALRELGRRAEYLGAQIDHLDSLLLPLIELQAPSLLDMYGTGPHIAAILIIAAGDHPDRLRSEAAWAHLCGACPIPAGSGKTTGRYRLNPGGDRQANHALWRIIFTRLSSHQPTQIYVERRTKEGKSKPEIIRCLKRYVAREVYHHLLATAT

SEQ ID NO: 418784 - protein, 490 aa, unidentified
MRKSQPHPVALALAAPPDAVAVPPLTAAPTFAACIGIDRADRKLDICLQATPAPGLVAPAPEISVLPNKPAELHQWVAQLRQRFDGQPVAIGFEQPAPALLHLFLGYDFLTVYALNPVVLAKYRQAFTPSRAKDDTRDAGYLMELVRDHRAKLRAFRPDDLATRSLTTLSEARRKAVQLRTRLANMLRDHLKVHFPQALDLVGDDLHCALSCDFLLKWPTLQAVQRARPATVRAFYNAHQSRSQTRNDARLALLASTRPLNDDAALAACGALTTIMLATQLQALVPAITAFDTQLAALLAEHADTFIFASLPGAGAVHTARLIAAFGTDRARFTNAEEVARYTGIAPIIKQSGNARVVQRRHARSKFLHQSLLEYAHQSRLHCAWANAHYEQQRARGKSHYAAVRSLAYKWIRILFRCWQDRVAYDEAAYLAALQRHDSPLRPPPTPAVAAAGAKDIKGTKSAKRNVTLQPRTQAATMKAVSGHAAAARA

SEQ ID NO: 418785 - protein, 319 aa, unidentified
MHYLAFDVSRDTADGVLLSHTLQIRERFSVPNTTEEIISLITQCQRTVSALTVGAESTGLFHLPVVEAAEHCSVPCRILNPILTKQFLKSSIRKRKTDREDAVVIAKLLAQGEGTSVTTKDIRNPARIHGRALNKLTSLRVSCMMYLRTVEKRLGSVPPECTEALAALKKAHDAMFKELMKEIPVENRRLLESIPGIGPKLSTSILSEIGDISRFHSGDSLIAYAGLDPKIRQSGATLLSVGRMTKRGSPHLRRALFLAANIARMHDPELRAFYEKKRSEGKRHSAATCAVARKLTLRIFSVLKRKSPYTVKEITMQSS

SEQ ID NO: 418786 - protein, 338 aa, unidentified
MPTYAAIDLHSNNGVLTIIDETDRVLRQRRIPNNIEEFIKELEPFRATLQGVAVESTFNWYWLVDGLRAKKFPAILVNTAAIQQYEGLKRSDDQYDAWWLAHMMRLGILPKGYIHPREERAVRDLLRKRATLVQQRTANILSVQNLEARNRGTKISSNEVKHLTSASIAALYDNEDLALALTTTLTVIDALTKQTSLLEKAVLKKARLRSEWELLLTVWGVGKILGLTIMYEAGEMSRFAGPGHFASYCRCVDATRISNGKKKADNNAKNGNKYLAWAFVEAAHFAVRFYPEAKRFYDRKTAKTNNVVAIKALAHKLARAAFHVLHDQKPFDPKRVFV

SEQ ID NO: 418787 - protein, 339 aa, unidentified
MQVTTIGLDLGKDVLQVHGIAADGTVVFNRSIRRRQLLAFFEKLPSCLVGIEACGSAHHWARELRAIGHDVRLMPAIYVKPYVKRGKTDAVDAEAICEAVTRPTMRFVEVKEKEQQALLTMHRVRQLIVRQKTQILNVIRGLLREFGHVIGNGPVAAMRFVKACRSGDFPDIPDLVKSVLNTLCDQVIVLDDRVVFYDKLIEYHSRIDERAKRLRTIPGVGPITASAIVATIGDGKQFKNGRELAAWLGLTPLNKSSGGKERLGGISKKGDRYIRRLLVIGMTSQVQRARGFPERVHPWIKQLLERKPVRLATVAMANKAARIIWAILTNETQYRHSAA

SEQ ID NO: 418788 - protein, 407 aa, unidentified
MNENGKRYIGLDVHKHYLIALGVDANLEVVMPARRVELSHLENWMKKNLTRQDEVVLEMTTNTWQLYDELVEYAGLVMVVHPPHVALITRSQVMNDKIAASILARLLAKGLLVGIWVPPQEVRELRGLVAQRRKMTRLATQAKNRLHAVIQRHHLKPPAGNPFAKTNNGWWQALPLGKLEKMNLQSDLETLQFGEQQEARIQKEMTGIAAEDEEIGRLLHISGFGVITAVTVYAAIGDIGRFVEPKKLVGYAGLGARVHDSGMTTRTGKITKAGRRDLRVALVEAAHVVANSHPHWKAELARLQPRLGYNKAIVAIARKLLVTVWHVLARKVADRFAEPKKVSQKMLRFAYAVGKENRAGKSAAQFARARLDILNLGEELTSIPWGAKKPIPLPPSKLKERSAVPNQ

SEQ ID NO: 418789 - protein, 370 aa, unidentified
MKSIIYVGMDVHKASFTISCFSVTTQETFATVKISPDAKAIKKYLDGVSLSRSEECEFVCGYEAGCLGYTLYHQLTAMNIRCVIMAPTTIMRNGKRVKTDRIDAENLARCLAYGGYKSVYIPTAQDEAVRDYLRMRDDHKLMLKKIKQQINAFCLKHNKIYPGNKSKWTQAHVKWLNALEFDGYLQDAFNEYMITYRELTDKVERLESQIEQLAELEEYRDKVKKLICIKGIKTHTALSLIVETGDFSRFQSAERYASYIGLVPGEHSSSEDQNRLGITKAGNRHMRMLLIEAAQCYSRGVPAKKSKDLKSRQKGASPEVIAYADKASIRLRRKYIRMELINKKKANVAKTAVARELACFIWGMMTDNIA

SEQ ID NO: 418790 - protein, 369 aa, unidentified
MKTGLLGGTLAVSPRSDREEARDMLYAGLDLSRKRLDFELLAGDGERVLAGACPPDADGLAGLAERLGGLGEPISAAIESMNGARFVHDRLEEAGWRVEIADALKVKGLAPLACKTDRIDAHVLAELARRDLVPALWLPDPAVRAERERARFRLHLVRQRTRLKARIHATLLAFGHPCPVSDLFGARGRALLAGLALPEPWAGNVRASLQLIDQLDAQTEALERELRRLGAEHPYVALLTSMPGVAWILGYTIAAEIGDIGRFSAPRKLVGYTGLTPRVMQSGERDRRGPLTKNGPRYLRWAYIEAAQHACRYPPYHDLYVRTKRRLGRNRGAKVAAITVARRLAEATWWMLTRNQPFAPAGAAPVLAA

SEQ ID NO: 418791 - protein, 439 aa, unidentified
MRRLNRETGITTTDEVDGKWFPYGVGIDCHRDMVWCCVLRPVYDTGRQKRDLAKFDTSPFGLKAMREWLEDRVPLANRRVLMESTSTYHFPVLWALSEWVRIVINPMLVGSAKRKTDRWDAQALAHHCMAGTFAPYVLPTWEELALRTSYRRWVKLGSAITRSTNALKSRMCMFGINAEFNINTKRGWAIFSDACRGIVRPPEELSSRGAAGLAPLSGFINALPLLVRETNDRQLVGVEAMRAERVAVFLRTVSAVTGGELELLETVPFVRPVLALCFLSEVGLDPRRRFNGLRSIVAYSGFDPSKRVSADKVTSHLPTRGARHMRRAFLQAAASAMMNEGPLQDYGRSVADRTGKFGWRSGRNAVGRKLVRWCSAVLLSRKPFSLEIEHGWKVEINDGTTGEADPTEAGFEDGDSAGDDRELVGPDEGVAPAPGWDGH

SEQ ID NO: 418792 - protein, 336 aa, unidentified
MENFYFIGVDVSKKKLDICVMCGSKVVTEEQVTNHQQAILKLINELKRDLNMTNGDFIICAEHTGQYTYPLICVCKSIDCKLWLENPTQIKYCSGLTRGKNDKVDAKRIAIYASRFCDQAVCYKRPSEELTRLNQLEAERTLYLVDLSKYKAQLTDQKDFMPKALYKDKSSRLKMLIKSLEQVLKAIEDEMNRIIESTKILSRQMDLLTSIDGIGRVVAMNMIIATEAFTRFDNPRQFCCYAGVAPFAYTSGSSQHSKNRVSQRACKYIKTLLHMSAVAITHRKSGELKAYYERKVDEGKNKMTIINALRAKLVARMFAVIKRDEFYSPILSENFC

SEQ ID NO: 418793 - protein, 344 aa, unidentified
MDYFVGLDVSLRSVAVCVIDADGQTVFERSVACEIDDISGCLADFAVCDLLIGFEAGAMSQHLFFGLQAIGFDVVCMEARQVNAALSAMRNKTDKTDARGIANVLRSGWFNPVHMKSREAHAVRALLSSRKAVQRKCIDLANEIRGLFRIFGLRLPSRIDQASFDERVRPLIESDPDLSRALLPLLDARAVLFNAYRELDRRVKQAASHDETCLRFMAIPGVGPIAALTFKAAVDDPKRFTSSRTVAAHFGLTPRRYQSGEMDNPGRISKAGDADVRSALYAAANAMMMRSVASSEIKSWGLRLMCRKGRRRAVVAVARKLAVVMHRMWADNTEFRQRPLEGAA

SEQ ID NO: 418794 - protein, 341 aa, unidentified
MTKNIYFIGIDIAAYSFVASIYQAPQKPVITKEGFENTFDGFNVFSSWMIAQNINPENCVICMEATGVYSEGIAHFLVTQGFKVSVEAPLKVKRAFDPVGHKTDPVDSRQIAEYAYRYSDELRFWQPKDEIIEKIRHLLTAREQFTKQSVAIQNAMGAYKRHLVQVSLITTSHSHILKELKKQIAEIDKELEQLVCKNPTISNMKNQLISLPGYGLLLSSSLIAITSAFSEITSYKTLAAFIGICPYQHQSGKSVYRQAHIRPFGSQYARKLLMLAAWSVVTHNADFKKYYLRKLAEGKAKKLVLNNVANKLVKIACAMIKNNSRYVSTYRSVNPMCLISA

SEQ ID NO: 418795 - protein, 345 aa, unidentified
MTADPVVVHLCVGVDIAAVTFTAAWSHTDTPVSPAHTYHQTPHGFAALQTRLAATNVLPADTLVVMEATGSPWIALAVTLHTAGYQVSVINPLGAHHFAKAPLRRAKTDALDAQDLCRLAAVLRPPVWTPPPSVYPEVRQRLLVRDGLVTMRQQARNQLHALIQWPVVVVGAAEQLTAVIADMDARIAVREGEIAPVLAASDWAASLGYLTSAPGIGLLIAAWLLVTTVNFTLGETPEAVAAGCSLGRTGLAPIPRQSGTSVRASRRSGTAATNACARQRISPRAAVRYNPMLRAFSQRLRDAGKPVKVARCAAARKLLHLAWALVTKRQRFDPSRYPLRTSEQP

SEQ ID NO: 418796 - protein, 346 aa, unidentified
MRFYTKTHGAYCGIDLHARTMYVCILSQDGEIMLHRNMQTTPEAFLKAIAPYRDDLVVAAECMFTWYWLADLCADEGIPFVLGHAQYMKAIHGGKAKNDRVDAQKIAVLLRGGMLPQAYAYPAQMRATRDLLRRRLKLVRQRAELLTHIRQTNAQYNLPALKDLKSKTQREGVAERFDNPAVQKTIEVDLALIDHYDGLIRDLERHIMVTARQHAPETLTRLRTVPGIGPILSLVLLYEIHAIDRFPRVQDFVSYCRVVKCAKESGGKRYGTSGHKIGNVHLKWALSEAAVLFLSGNPPGQKYYRRLEKKHGQGKALTVLAHKLARAIYYMLKRETDFDIDTFMQG

SEQ ID NO: 418797 - protein, 321 aa, unidentified
MNKYKEIYGIDISKDVFDVYGLQSGHNQFKNDAKGFVSFMKHLPKDVLVVMEATGYYHYRLAQFLYKSGVAVSVVNPLSVKRFIQMKLAKVKTDKSDAKAICEYGQMNDVPLYTALTDVQSECLQLFGLLDNYIKHRTATKNKLKGEEVLGVPSKFVYRSLKRNLKHLNKEVDALESRLLELVKQDQQAQLTLLKSIPGMGVKTALFLIVVTDGIKKFENASQLCSYVGITPTIRQSGSSVRGRSRISKVGNKKLRNLLFLCAFSACKHNKACREIYERLVAKGKSKKLALIAVANKLLKQAFAIAKSGLPYDENFVSKLA

SEQ ID NO: 418798 - protein, 357 aa, unidentified
MDNVTRIGVDLAKNVIQLHGVDSAGRVVLKKSISRHKFLDYFANLPSCLVAMEACSASHYWARKLRALGHEARLIAPQFAAPYRKGGKPVKNDARDAEAVCEAAGRPQMRFVPVKTADQQNTLVVHRMRTGFVEERTALVNRLRAELVEFGVFLPQGIDALRAHFLDALEDGATELNGTARTALLRGWEHWQALDREIAWFDGQIAAQIKHDLSAQRVMAIVGIGPLTASAAIATVGDARQFRNGRQMAAWLGAVPKQASSGGKTRLGHITKQGNTYLRTLLFQGARTAVTTAHRRDDRLSRWIVQLRARVGLYRTVVAVANKHARILWAILAKGERFDPSHVPTRPTPARCHKATR

SEQ ID NO: 418799 - protein, 349 aa, unidentified
MAMTIVEAAPGITGGVDTHLDTHVAAALDPLGRLVGTEAFSADAAGYKALFAWLEDFGEVTKIGIEGTSSYGTGLVRFLRRKGVEVVEVNRQNRQSRRNQGKSDPLDAIEAARAAISGRAGGSAKSKDGPVEAIRVLVVAKRSARQARVKAITQMRHLGFTAPEQLHCRLKGMTVTALVAECAGLRPGRSGDPVTAATKASLSSLAHRVQSLDVELAGLDDKIQSLLVATVPDLLARFGVGPDTAAALLVAAGDNPERLHSEAAWAHLCGVSPIPADSGKSAGHLRHHQGGDRQANSALWRIVMVRIAHDPETTAYFERRVKEGRTKRDVIRILKRYVAREVYRYLPRG

SEQ ID NO: 418800 - protein, 434 aa, unidentified
MHYTQNDKIRQATEGTIVVGVDVGSEKNYFRAFRGNGIEITRRAICFANTLEGFKAFDETVTKLTVPMAEVKIVVGMEPTGHYWFNFADYCQGKQMTVVTVAPQHVKHSKEMDDNTQRKDDRKDPRVIAKLVIEGRYCIPYRPKGVYAELRVAYNRRCELVEEETRVKNRIRRWFDLYFPEYRTVYGKVVAVSGIMILKRASLPQDIVKLGVDGILRIWRANKMRGAGIKRAKTLYEAARGSICPQDAGRAVRMQLCQLLEDYEKVEKQLNDANIMIGIVTADIPEVNELMKIPGIGVITAAGLISEIGDIRRFDDPRQIQKLAGLAIVVNESGKQKGQSKISRRGRKRLRRILFQAAMSLVKSNQEFKQIHERFTTRAKNPLKKMQSLMAVAAKFLRVCFGMVKNGTPYDPERVLKDIYRMETNTQKPVENVA

SEQ ID NO: 418801 - protein, 344 aa, unidentified
MEHFAGLDVSVKDTSVCIVDDTGKIVREVKVASEPEALLAVLTNPAYRFKRIGLEAGPLSQWLFSALAEAGLPVICVETRHMRAVLKAQINKTDRNDARGIAQMMRVGLYRPVHVKTLRSQKLRMLLTHRQLLLSKAIALENDLRGTLRNFGLKVGMVGKVKFEARIRELVENLPDLAVLVEPMLIVRRVLREQIVILHRRLLAIVRDDEVCQRLMTTPGVGPVVSLTYRATVDIPARFRKSKSVGAVFGLTCAKYQSGEVDWDGRISRCGDEMMRTMLYEAAQAMMRSKKWSWLKAWAMQIARRRGMKKAIVALARRLAVIMHRIWVDGTEFRWTREQATATA

SEQ ID NO: 418802 - protein, 339 aa, unidentified
MELYAGLDLHSRNTYIGIMDKEFKRVFAKRVPNKLPLILGTLEPFREQLKGIVVESTYNWYWLIDGLMDSGFQCVHLANPSAMKQYEGIKHTDDQHDSFFLAQMLILGILPQGYIYPKEERPVRDLARKRLFLVRHKTSNILSLQSLIARCCAQRVSANEIRKFTVEDLQHLLKQEYIVLSAQANLEAIGFLSQQVLRLEKAIKNKVKLNKAFQQLLTVPGIGLVLAMTIMLEVGDIGRFPQVGNFASYTRSVSSNRFSNGKSKGHGNRKNGNRYLSWAFTEAAHLSRRYNEHFRSYYNRKVAQANTSLATKALSNKLARICYYIMRDQVPFREELQSH

SEQ ID NO: 418803 - protein, 344 aa, unidentified
MAGILRPDEQVPDVEKVFHDEESVRRLIGRFASPGELWACYEAGPTGYELHRLLVSLGVRCDVVAPSLIPRSPGDKVKTDKRDARRLARLHRAGELTAIRVPSPAEEGVRDLCRARRAAMRDLRRARQRLGAFLLRHSVVWRGGTNWSMRHQQWVATRTFEDPAVRSAFSFYVGEVTTREVSLDAMDAELAGWFTNSLFADAVGRLGAYRGIDHLGALTMVSEVCDWRRFSTAGAFMGFCGLVPREYSSGNSTWRGEITRAGNVGVRTQLVESAWAYRYLANVSAGIRRRQQGVDPATIARSWAAQTRLSRRWRHLAARKDSQNTVAAAIARELAGFVWAEMIA

SEQ ID NO: 418804 - protein, 332 aa, unidentified
MENFYFIGVDVSKKKLDFCVMFEGKVVHEEETTNHQSAIMSLLHHLEEDYGIVSEQILVCAEHTGQYTFPLACACKAVECKLWLENAAEIKYSSGVQRGKNDKVDAKRIAVYARRFQDKVQYYERPTEDIERLKQLESEHTLYVTDLAKYKGQMKDQKDYMPKALYERKVKRLQALMDDLEEAIQAITDEMDEVTASCPVLSRQRELLMSIDGVGRVVATNMIIATEAFTRFDDPRKFNCYAGVAPFSYSSGSSQHSKARVSHRADKVMKRLLHLAAVAVTHRIGGELKKYYERKVAEGKNRMSVINALRAKIVARMFAVIKRNEKYKPILS

SEQ ID NO: 418805 - protein, 337 aa, unidentified
MDYFAGLDISMDETHVCVVDREGVVVRESKTSSATDAIAGELAKAPSCRRIVFETGRMAPILFHGLSQLGLPVICIESRQAYQALKSLSTHKTDRNDARGLAHLARTGFFKSVHVKSLQAHALRSLIIARKKLVGQRVTLENQIRGLAVVFGIRLPRALTAAFVNQALKASEGIVGLSAAMRGLIAARTAVMTAVAAIDADMRRMTRASAACRRLMTIPGVGQLTALAFVAAIDDPLRIRRSRDVGAYLGLVPRRHQSGEIDYVGSISKCGDRRVRTLLYEAANVMLTRYKGQLKLKDWAFAIAKRSTMRKARVALARRLAIIMHAMLRDGTEFAFA

SEQ ID NO: 418806 - protein, 389 aa, unidentified
MKIYVGIDIAKLNHFAAAISSDGEIILEPFKFTNDADGFQLLVSKLESFDKNSIIIGLESTAHYGDNLVRYLVAEFYQVCVLNPIQTCQMRKNNIRKTKTDKVDTFVIAKTLMMQDNLRFVSFYDLDMMDLKALGRFRQKTIKQRTRLKIQLTTYVDQVFPEIQYFFKSGLHQHAVYALLKEAPSPKEIASMHMTHLANLLKVNSHGHFTKEQAKELRVLAQKSVGANDSSISIQITQTIQQIELLDSQLEKIEAEMTDIMRFNDSVIMTIPGIGYINGGMILGEIGDIHRFSNPNKLLAFAGLDPSVYQSGNFQAKTTRMSKRGSRVLRYALVNAAWNVVRNNATFKAYYDAKRAEGRSHYNALGHCAGKLVRVIWKMLTDKVEFNLE

SEQ ID NO: 418807 - protein, 416 aa, unidentified
MDVLYERCCGLDVHKKTVVACRITPHEPGDGGGVRKEVRTFGTMTRDLLALSDWLKAAGCTAVAMESTGVYWKPVYTLLEGEFELLVVNARHIKAVPGRKTDVKDAEWIAELLRHGLLKASFIPDAPQRELRELTRHRQTLVEERAHVAQRLLKVLEEANVKLGSVVSDIQGRSARAILEAVLRGEEDPEALAGLAKGRLREKREELTRAVEGRLRPHHKLLVRQHLSHLDFLSDAIRQVSEEIEARLGPFEDAIRRLDEIPGVNRRVAEVLLAEVGGEMGRFPTAAHLASWAGMCPGSHESAGKRKSGKTRKGSPALRQALVEAAHGASHSKGTYLQAQYRRVAARRGQKRAWVAVGHSILKIAYHLLKDPSATYQDLGGNYFDERDRSGVERRLVRRLEQLGYEVSLQPLPQAA

SEQ ID NO: 418808 - protein, 391 aa, unidentified
MYYIGIDIAKRNHEVSIINADGKSLSKSISIANSQKGLDDFNNYLSSFNVTSQNSIIGMESTGHYWLNLYSSLVNLNFNVFVINPIQTDAFRKMYIRKTKNDSKDSYIIAQIMRFGQFSSSSISDENIFAIRQLSRYRSSLVDECSNWKRKVITILDQVFPEYSDLFSDTFGVTSKELLSKYPLPENMLEVSTKELTSLLNKASKGRFGIEKAQEIKEYATKSFGISFAKETFSFQIKQIINQISFIESQLKELEEKITNILETLNSEITTITGIGDILGASILGEIGDISRFEKASQLVAFAGLDVAINQSGEFTGTEMKITKRGSPYLRRSIWIAATVACFKDPALSVYYKKLIDRGKKHLTAVGAVARKMCNIIFSVLKNKKPYTPNI

SEQ ID NO: 418809 - protein, 385 aa, unidentified
MMLIGIDPHKSTHTATAIAPDTNHEAASIRIDATLREYQRMLTWARQWPQRRWAVENAEGLGRHLTSWLLARGEDVVDVPTTATARVRQLSRGGGRKNDRIDAGAAACVAALQGDARPLEAEGYVDAMAVLDERRVNLAQSRVRAVNQLHALLRALIAGGAPRDLSATTAAALLRTIRPHGAVEQARKAVAKDLVTEIRTLDIQLKANAQAIARLVAATGSTLTEVVGVGPIMAGRLISRTGRASRFLTASAFANYAGAAPVEIASAEKSRHRLSRHGDRQLNSALHTIAITQIRIPSSRGHRYYKSKIAEGKTPREAARCLKRRLADHLWRTMINDERRAVGPGGQLGTTLQSSVAGPTPTTSSSDKSLPGPATHDSTTAKPAA

SEQ ID NO: 418810 - protein, 408 aa, unidentified
MEVIHPRCAGLDVHKQSVVACARIAGPSPLVQEVRTFATTTSGLLELADWLESLGVEHVAMEATGVYWKPVWHVLEGHFELVLANAAHVKNVPGRKTDVNDSMWLADLLAHGLIRASFVPPVAVQELRTLTRTRKQFVRERTSHVQRIEKVLEDANLKITSLLSDIMGKSGRAVLHALIDGQSDPQRLASYVVGNRLKASRAELVEALSGRIRAHHRFMLQLHLGHIDALDKAIADIEKEVGLGLHPFRQAARLLSTMPGLSQVSANVVVAEIGIDMSRFATPGHLLSWACLCPRNDESAGKRRSTRLRRGGIWLKTTLVQAAWAAVKVKGSYLQAQFHRIRARRGAKKAIIAVAASMLTAAWHMLRDGTEWHDLGAAHFDRADATKTANRLIRRLQQIGYTVHAAPA

SEQ ID NO: 418811 - protein, 343 aa, unidentified
MTKTPIAVLGIDLGKNSCSLAGLDAAGAVIMRRRMTREGTIKFVAALPACVVAMEACCGAHFLGRTFVSQGHTVRLMSPEYVAPYVKAQKTDDRDAEAIAEAATRPTMRLVTLKSEAQLDLQVLHRARERLVAGRTRLTNQLRAVLLERGVILPKRRAPLIKRLDELMAGELPVSQRMRQLLQDLRDEWMEQDRRIKAYDDELLALTREDDAARRLATIPGIGVINATALLAAVGDASAFAKGRDLAAWLGLTPRQHSTGGKTKLLGISKRGNKYLRTQLIHGARAAMVHFVKTATPVGIWVRQLLTRAHPNVVVVALAAKLARIAWAVLRHGRNYDHQAAIA

SEQ ID NO: 418812 - protein, 341 aa, unidentified
MENVALIGIALGKHSFHLHCQDKSGKALQRKKFTRTNLMQFLATCPSTVVVMEACAGAHFMARRISDIGHEAKLISSQLVRPFVKSNKNDFVDAEAICEAASRPSMWFVQPRTEVQQAMRALHRARESLIRDKVKTTNQINGFLLEFGISLPVGDTVIKRLPLVLVEHEIPEYLSRLLMKLHAHYLYLVEQITELESELNQSIKTDDATQRIMTIPGVGPITASLLSSQLGDGKQFSCSRDFAASTGLFAASTGLVPRQYSTGGKSTLLGISKRGDKNLRRLLVQCARSFMMRLEHQQGRLAEWVREQLSKKHSNVVACALANKLARIAWAITTNHNAYQA

SEQ ID NO: 418813 - protein, 400 aa, unidentified
MLDQAWVGVDVGKEHHWVVAEDSQGRVVLSRKVANDQQEIVQVLQDAAGLAQRLVWTVDLTTVEAALLLAVLWQGGQRVQYLSGRAVNQAAAGYRGEGKTDARDARVIADQARMRRDLPALRPSDGLVAELRMLTARRADLVCDRTRALNRLRQQLTAVCPALERAAEVTRQRGWVVLLTRYQRPAAIRRAGVARLAARLVADGVRAGTAQAIAQAAVAAVRTQPLALPGEAVTGDLIAELASQVLDLDARIATVDAAIKQRFGRHRLAKVICSMPGFGFRLGAELLAAIGDLELVDSADRLAAYAGLAPVANDSGKRTGRRHRPVRYNRALRRALYLSALVAIRCDPAARAYYQRKRAEGKRPIQATICLARRRTNVLWALLRDHRTWQPEPPVKPQAA

SEQ ID NO: 418814 - protein, 369 aa, unidentified
MGEYSEAFVAFDVSKTKHAVAIADGGRGSEVRFLGEVPNSPAAVDRLIRKLAARYAKLHFCYEAGPTGYGLYRQIQALGHACLVVAPALIPKRPGERIKTNRRDAVTLARLHRAGELTGVWVPDATHEAVRDLVRAREGAVDDRRRKRQQLLSFLLRHGRIYSGGGHWTLAHRRWLAQQGFEHPAQQIVFQEAIDAIADADQRLRRLEQQLALIVPSWSMAPVVEAYQAMRGASFIVAVTFAAEIGDVRRFETPCQLMSFLGLVPAESSTGQTVRRKGLTLAGNRRARRVLVEAAWTYRYPARVGETLRARLEGLPKAVREIAWKGQIRLCARYRRLSNAGKKLPVVVAAIAREMAAFLWAIGREVAPA

SEQ ID NO: 418815 - protein, 351 aa, unidentified
MIIIGVDYHPSFQTIAFLMEETGEYGEQELNHSDGEAEKFYRDLNQRGVSVRVGLEATGYSRWFERLLAELGFEVWIGNAAEIKKKRVRKQKTDREDARLLLKLLLENRFPRIWVPSPENRDLRQLLWHRHRLVQMRTRIMNQLQAVAMNEGYRWKKKLFSQQGRALLEKLSLAPWASRRRKELLELLDQLDPKIAELTAAVQQEANQRPDVLRLMTHPGVGPVTGLAYVQVIGTPDRFPCGKQIGSYIGLIPCEDSSAGKQRLGHLSKQGNALLRYLLGEAAQAAARCNPDWRRRYVHLAMRRHKNIAKAAMARKLAVRLYWMWRNGWDYSQLVSFGSNAGKLATGHGVN

SEQ ID NO: 418816 - protein, 410 aa, unidentified
MEVLHAHCAGLDVHKDSVVACARHMVDGKVTTAVKTFKTTTQELMALSGWLSTEGATHIAMEATGVYWKPVWHILSDGEFELVLANAAHVKNVPGRKTDVNDATWLADLMAHGLIKASFVPDEPTQQMRDLLRTRKQIVRERSSHIQRIQKTLEDANIKLDSVVTNILGLSGRRIIEALIAGQTMPQALASLAHRRIHASADELEAALRGRITRHHRFLLKLHLDQIAAIDATIAAIDKEVDGNVEPFRVAIEMLSAIPGVGELSAAVIVSEIGIDMSRFETAGHLVSWAGLCPRNDQSAGKRRSTRMKKGAPWLKSALIQCAWCASRTKDSYLQAQYLRLRSRRGAKKAVCAVAASILTAAYHMLKNGTVYQDLGASYFDNRAKDKQALRLVSRLKNLGFEVQIKPLAA

SEQ ID NO: 418817 - protein, 343 aa, unidentified
MEHSAGLDVSVKETNVCIVDDAGKIVREVKVASEPEALLAVLTNPAYRFKRIGLEAGPLSQWLFSALAEAGLPAICVETRHMRAALKAQINKTDRNDARGIRADDAGWAYRPVHVKTLRSQKLRMLLTHRKLLQSKAIAIENDLRATLRNFGLKVGVVGTIKFEARIKELVEGLPDLIVLVEPMLVVRRTLREQIGVLHRRLLTVVRDDEVCRRLMTVPGVGPVVALTYRATVDVPARFRNSKAVGAVFGLTPSKHQSGEVDRSGAISRCGDDMMRTMLYEAAHIMLVRSTKWSWLKAWAMQIARRRGLKKAVVALARRLAVIMHRIWVDGTEFQWTRKAAAA

SEQ ID NO: 418818 - protein, 423 aa, unidentified
MEVIHERVAGLDVHKDSVVACVRIMSGGKAKRECRTFGTTTAELEALRDWITSWECTLVAMEATGVYWLPIWKILLGGAFEMNIANARHIKAVPGRKTDMNDAMWIADLAAYGLIRASFVPDEEFHELRTLTRTRKQLVRDQTSHVQRIQKTLTEANIRLDSVISDIMGVNGRRMIEAMIEGVRDPGKLAALGDRRLKATRKELHDALHGRLTEHHCFLLKLHLDQHDALEKTIRVIDAEVERRIARLDKQAKPAETALSRLIELLVSIPGVSYLSAITIISEIGSNMSRFPTAGHLIAWAGLCPGQNESAGKRKRSRLRKGAPWLKTMLVQCAWAAKRQKNSYYRAQFYRLQARRGPQKAICAVAASILTAIYHILKDGVPHQDLGIDYFDKRKPEAKVKRLVAQIAKLGFEATLHPIAKAA

SEQ ID NO: 418819 - protein, 350 aa, unidentified
MEKRITTYVGLDVSDKFTEMCVLDDTGAVVDRDQIRTTKGSLEKRLSKLRDARVILEVGTHSRWMAELIGALGHEVIVANPRQVRLIWQRRTKSDRSDALVLARLGRLDVDLLAPVQHRSRGAQVDLACARSRDILVRNRSQLINHVRGMLKPFGHRVRDCSSEVFVDEAEAVVPAELLPALGPVLAVMRVLNEQIAAQDRQIEQLVTTVHPATKRLTQVPGVGSITALAYYLTIEDPARFKKSRFAAAFLGLVPGKNQSGESDPQQHITKTGDPFVRKLLVQCAHYTLGALSPDSELKRWGLALASRGGKNARKRAVVAVARKLAVLLHRLWLSGAPYQPLGYGKAHAG

SEQ ID NO: 418820 - protein, 408 aa, unidentified
MQVLYPRCAGLDVHKDMVMARVRCVNDPPHDEVRSFGTTTSALLELSDWLAEHAVTHVAMEATGVYWKPIWHLLEEHFQLVLANAQHIKNVPGRKTDVNDASWIADLLAHGLIRSSFVPPTPIQELRDLTRTRKQLVREISQHSLRIQKTLEDANLKLGSVLSNVLGNSGRAILAALIAGESDPEKLADLAQGSARKKRAELVEALRGRIRAHHRELLRIHLNLIEALYQALEDVDTRVGKTLAPIKDSARLLTSLPGVSDLTARVMVAEIGVDMSRFATAGHLISWAGLCPRNEESAGKRRSTRVREGAPWLKVALVTAAWAAVRVKGGYLQAQFLRLKGRRGAKKAILAVAASMLTAAYHMLKNGVEYKDLGADHFSRRERSKTIQRLVRRLNDLGCEVQLRSQAA

SEQ ID NO: 418821 - protein, 419 aa, unidentified
MSTGEYLFYVGVDWATEAHRVVVLDAARRPVADRVVPHTGVALAALAEDLATQAAGEVARVAIAIEVPRGPVVETLLERGFAVFALNPKQLDRFRDRHSVAGAKDDRRDAWVLADALATDRAAFRALRPDTPAVIRLRELGRTEDELQQELTRLANRLREQLLRFYPQALALCPAAQEPWFWALLALAPTPAAAQALARTQVAALLRAHRIRRLTTDEVLAQLQVPAVHVAPGTAEAASEHIAWLLLRVRLVHEQRRECAQRLEQVLEALAEGELGQPGEQRDVTILRSLPGVGRVVTATLLAEAAAAVTTRDYHALRAQTGAAPITRQSGKRWAVGMRYACNGRLRTAVYHWARVSVQRDAHSCHHYAQLRARGHSHARALRGVVDRLLRILIVMLKTHTLYDPGRRRPIAQPVEQTA

SEQ ID NO: 418822 - protein, 366 aa, unidentified
MLYLGIDQHARQITISLRDDSGDVVQARQVSTQPEKIHAFFQQLTRERLPAGEAFVAVLEVCGFNDWLIRMLHDYRCPKVILIQPDDRKKCKTDRRDAASLSELLWVNRERLLHGKPVRGVRQVDIASSTDQENRRLTTLRKEAGQARTRLVNKVRHLLRRHNLQWQMPTKRFPTKAAIAWLKQLVLPAIDRLEMNHLLADVEQVQQRVKELEQVIVQRCGVSEEAVLLASMPGVSYFTATALACRVGRVERFPRAQSLANYWGLTPGCRNSGENSQRLGNITKAGNAMARWLLAQVTHKVLRKDARLREWFKRIKRRRGSTIARVAVMRKLATIIWHMLRKRKTYAECRALATEGTKAREQQPCG

SEQ ID NO: 418823 - protein, 341 aa, unidentified
MSVYVGIDVHRKRSQVAVIDAGGEVLANRNVPNGVETILGVIGGLPPGTPAAFEAAFGWGWLLELLEDYGFDPHLVHPLQCKAIASARLKNDKVDAAILAQLLRADLLPEAWIAPPAVRQLRALLRHRAQLVRLRTLLRNRIHAVLAGHGHDRPAGCWTGPGRAWLAALELPAVSREVIEDDLAPIDALQAPVGRLDWEVHQQARSDLRVKVLTQLPGVGPLTALVILAEVGDITRFGSARKLAAWAGLTPTVRGSDRTVRHGHISKQGSAWLRWILCEAAQTAKRSPQFAASYHELARRRGKKIAATAIARKLLTRAWHLLTEAEHAAAGRQAAISPPAA

SEQ ID NO: 418824 - protein, 337 aa, unidentified
MDNCIGIDISKASINIHISKNGQDLKVDNNMKGFKSLYSKLKKLYKKEIENNVFIFEPTGSYSEALRKYCFEQKIKCFIINPKQFSNYAKALGVEVKNDVEDARVLSKALHLAKDGQVKIPVYDEDVERIKELMSYYKFTTKQTTQQKNHLESLESKNGDSFAIRELKKSIKASKVKEQDIIDQIQMIIDANAKYKNDYENIISIMGIGQIGAIALLHLFLKYPEANQRQVTSLTGLNPIYKQSGTSIQSGYRISKSGAKTYRGSLFMASMSAVRHDKNFKAFYERLKSKGKHTTQAQIAVMRKLIITAHSLYKNNRKYDVNYNLQGGKTMVESSAE

SEQ ID NO: 418825 - protein, 383 aa, unidentified
MILRNAPNINVEGKMDVSNIHFINANAGGAFMAKYNIGVDYHKKFSYLVVKEEKGKVLRSGQVTNSKKAVSDFLEPFKTDSKAVIESCRNWCVMHDWLEDIVDDVILANPFKVKAIAEAKIKTDKIDATILADLLRVDLIPQSYIAKRPVRDMRNILRERIFFVRLRTMTKNRITTIFDRYPEEVRKEKAKTDLFGKKGREQLENIDLRDADRALIDRELNFIDLINIFIKETEEVISENFKESKNAKHLKTIPGIGQFFSMLIDAEVGDVSRFRNEKKFAAYIGLVPSTYSSGGSSVNGRIIKGGNKLLRWAFVEAVIPAIASDEYLRWEYDRLRSRMNYNKAKTAMARKLSSIAYKCLKEQRNYKKFNKIELEYKKLGRAS

SEQ ID NO: 418826 - protein, 351 aa, unidentified
MEEYIAFDSHKRYTWVEREEVASGKLRQFRLAHAPGAIRNALVGCAAGTAVAIEATANWYWITDEIEQAGLQPRLVHPRKAKLMMGLTNKTDRLDAHGLNQLQRNKTLPTVWIPPGPLRELRELTRTRVVLVAQRTRWKNRITATLAKWGLPASEYSDAYGKSARGELQTRIASLPTQTRWVVQQMLAQLDVLGEQIRQFEQRLKELVEVTPEMQRLESLPGVGEILAATIVLEIGEIGRFLSAERLASYAGTVPRVHASGDRVRYGRTRVDVNRYLKWAFAEAANSVAVNYKRRPERHVSRLYARLRAKKGHSKAVGAVARHLAEATFHVLSGRQDYRDPAVAVGRTREV

SEQ ID NO: 418827 - protein, 365 aa, unidentified
MPTTDEETGVYDRQWSASWSGARKERIMIPEIVVGIDVSKNELACSLCDRTQRPLAQRTFPNTAEGVAQIARWARPEAAWVLEPTGRYSLQAVAHGRAAGRTVLLAPPREAKQFLRSLNVRAKTDTIDSAGLALFALSRPLRPYPLRTEVHEEIAQLVKTRKSLSKALATMSQQCRSMPYSKSVLEPAMAAIRAQMRQADVRLGQLVRTSPELSSARQLARIHGVGPVTAAAVASCLSARDFTHPDQFVAFIGLDVRVVQSGGSSSNRGLTKHGDAELRRLLYCCAQSSLRSRGSPFVMQYEREREKGLSTTAALCAVARKMARVCWAIHVRKVAYDPERVYHRPPRSDVAEVVAQSDEQANVGA

SEQ ID NO: 418828 - protein, 356 aa, unidentified
MVMVLGVDVHKDTHTVVAVDEVGRADGERTVRATDTGHRQLLDWARRQVPQDRMWAVEDCRHVSTRLERALLAAGETVVRVPPKLMAGARSSARTRGKSDPIDALAIARAALREPDLPLARHDDTSRTLKLLVDHRDDLVIERTKMANRLRWHLHELDPELDIPARGLNRLNLLDRLITWLAEQSRPDRLGQVLARLAAELLTDIRAATVRINALEREINTLARQAAPRLMTLPGAGGLTTAKIVGETANITRFRSEACFAMHAGVAPIPASSGRTQRHRLARGGNRQLNAALHRIAITQVRITASPGQLYYQRRRAQGDTAMEALRALKRRLARVAFNLLQADTTIAINDLSTAA

SEQ ID NO: 418829 - protein, 346 aa, unidentified
MSDVVIGVDPAKRSHAIEVIDDRERTLAAGVFDNNNDGYRQMREVARRFPKRVWAVEGASGVGRQLAQRLVADGERVLDVPAKLSTRVRSLSTGHGRKTDPADAHAVAVVGLRKSGLTEVVVDDETVALRLLSERRRDLVRSRTQTVNRLHQVLMELIPAGAPQKLTATKARALLATVRPRDVAGKARRQLAADFIDDVTALDRKLKTIEKRIAEAVEATGTTLTDIVGVGPITAALILGEVGNVARFPSKHHFASYTGTAPLDASSGDVIRHRLSRAGNRQLNHALHIIAMVHKRYDPRGADYYARKLAAGKGTKGALRCLKRRLSDVVFRALVDDQTTRVREGH

SEQ ID NO: 418830 - protein, 318 aa, unidentified
MTGEIKGGRVAPADREHLRAWLARFTGCEDVHFALEGCTGWRYVAEELLAAGITPHLAEPADTAALRGKKRHAKTDKADARHLRTHLLAGDLPECWIPPAHVLEARALVRLYKDLLDERGAWRQRIAATVFHQGAPPAAGMPTAEGRATGMGLSAAGQQAVEAGQRQIGRLDAELDLLRRQLAMLSRRQPGCAALRAAHYGIGAVISVAIWAELGDVRRFANSDAVVRHTGLDITVYSSDTKRSAGHLSRQGPPLLRWALYEAAICAARRTAPDHGYYTAVRARRDAGRATLSMARKLARRCYHTLRELGEDALAPAA

SEQ ID NO: 418831 - protein, 336 aa, unidentified
METVCAIVGIDVSKKKLDIALLVNGKTKAKVVENSADGYKLLLEWFSKSKVTKETLHVCMEATGIYYEPVALALHDAGVAVSVVNPACIKGFGHSENIRNKNDTADAGLIARYCAAMKPAFWSPPPLEQRQLRAWSLRVQALKDIRQQEENRLEANTFTGMTDVADHVKQHIAWLSAEIQKLEADIDDHIDRHPGLKHDAELITSIPGIGATTVAQILGQLGDIRRFDNAKAFAAFLGVTPKQRSSGTSIKGRTMMSRAGSMSMRAALYMPSLVACRHNPILRRFAQRLSATGMAKKAVIGAVMHKMTHLIYGVIHSGKPFDPNYLTNGLAIQDGI

SEQ ID NO: 418832 - protein, 373 aa, unidentified
MNTFDAYIGLDVHKETISVAVAEAERKGEIRMIGAIPHETVAINRMVKRLAAKFETLSFAYEAGPCGYGLHRHLIGLGHSCEVVAPSRTPVQPGKRRVKNDTIDATNLARLHRAGELTYIWTPDAVHEAMQDLVRARRVSSHQVRKARQRISCFLLKHGRRYEKKKWGYRHRVWIADLQFSHVGTQFALQSYINEEEQAVDRRTHIDGQIESLMSEWVLAPVVRELTALRGVAIVIAAAVVAEVGDFARFDNPRRLMSYFGLVPGEFSSGSTIRPRGITKAGSSDIRALLFEAAWLYRLKPKIGQWSLARQEGISQAAKDIAWKAQLRLYGRYQRLTQIRHKRSQVAVTAVARELVGFIWAIARNAEENLIAR

SEQ ID NO: 418833 - protein, 391 aa, unidentified
MSMNFVGIDISKYKHDCCIISAADQQIVSKFTVKNDKDGFEHLLTTLNSLSNPEDIKIGFESTAHYALNLELFLENAHHNFMEVNPVLIKEYKKSTTLRRTKTDSVDCESIARWLMTVEYKPHSKGFYHSYSLKSLTRLRDRLIRQRSFYLVKITNVLDHTFPEFKPFFNERLSKTAIYLLENYGSAEKMAHMNSASYDKLRCASRGKFSIQQFLHLKELAANTVGVNNSIFDIELNSLLTLYNSLCKEIKTLEAEITKLIEEVHPHYMSIPGIGPISAAVIYAEYGDISNFSNPGQMLAFAGIEPGINDSGTESHGGRMVKHGSSQLRYVLLNACLPLIRFDITFATYYAKKRAEGKKHRVAITHVAKKLIRVIYALERQDVDFNVQKLR

SEQ ID NO: 418834 - protein, 311 aa, unidentified
MYYIGIDVSKKDLAVFDGKDLKFINQEGLKSFKKYLKKKVNFSDLVLIFEPTGVYSQYLKEFCAENSIKVYIVNPKQSHNFARALGIRPKTDKIDARILYQFHKLIDAKDIQVPEINQQAKTLSSYLTSYEFALKQRISLSHHLESLRDKKLIALIKKELKRAQELEDKIFNDIKKYVEQNQNLKEDYQRLSTIPSIGEKAAIALLTLFKTYQGTNRAQITALTGLDPVKRESGSSVKYKVKISKNGKGIYRKILYLPTLCATVHNQKIRIFYQRLLANHKNKKLAVIASMRKILLIAHAMHRDKTEYAAA

SEQ ID NO: 418835 - protein, 422 aa, unidentified
MLEEAHDSEELIGRVAALDIGKAQLVCCVRVPSPDRPGKRLQEVRTYPTMTRSLLAMADRLGALGVSRVVMEATSDYWKAPFYLLEAHGFEVWLVNAKDVKHLPGRPKTDRLDAVWLCKVAERQMLRPSFVPPPAIRRLRDLTRYRADLVVGRTAEKQRVEKLLEDAQIKLSVVASDIFGVSGRAMLAALVAGERDPKVLAQLARTRLRAKRGLLEEAFVGRFGDHHAFLLQTMLARVDQASADIAALEVHIEAEIAPFAAAADRLDEICGVGRTAAQVIIAEVGVDMGRFPTPGHLVSWARFAPGVKESAGRRKGNATTGHGNPYLARVLGEAAVAAGRTNTFLGERYRRIARRRGAKRAMVAVGRSILIIVWHLLSDPTVRYQDLGAGFYDTRINAERRKRNHIRQLEALGYKVTLEPAA

SEQ ID NO: 418836 - protein, 344 aa, unidentified
MQSNKTEKIKRISEKTLIAALDIGKTVHYGYFRTPKNKDIKPFPIYNTGQSFKKFWKKLCRFKEEHMLDEVVIGFEFTGPYAEPITNYLKKKPVNLIQVNPMHTKRIKELTGNSPNKTDKKDPRVIADVISLGHSLTVVMPEGAAAQLRRLTHARERAIEHRTAMSNQLQQLVFVIFPELVSIIKPSTKTGMYLIKNFPDPETIASIGIENLSDIIRKVSRGKFGRDRGEELYNAAKQSIEITEGKESIIFETNHLVSNIESENRYIESLEERIIEHLEQIPYSHSILSVKGLGYVTTAGLIGEVGDFNKFNTISEITKLAGLDLFEISSGKHKGQRRIEVCSK

SEQ ID NO: 418837 - protein, 443 aa, unidentified
MARNQSRQRFELVHPHCAGIDIGSREHWVAVDRDHEQPVRSFSTFTDDLIKLADWLETLKIEVVAMEATGVYWIPLFELLDARGFKVYLVNSRATRQISGRKSDVLDCQWIWQLMSHGLLRGAFRPDDAICSMRALIRQRASKVRNQAQTLNRMQKALSQMNIQLANVISDISGVTGMKILRAIIAGERDPAVLAELTDRRIKASKETIARSLHGNWRLEHLHALGQEVECYDFFEQQIGACDKAITDALSQLPEREEAPQPSRKILRSPHRCAADQAALHQSLWRVMGVDLTAIPTISVDTALIIAGEIGPDLSRFPTMEHFCSWLGVAPPTRISGGRQLSGKSQKTLNNAAQALKQAASNARNDKSLIGASHRARLARMDTSCAIKATAHQLARLIYAMLTKGQPYVEQGIEAFEERSKEKQYRALLRKARKLGLDLVKAS

SEQ ID NO: 418838 - protein, 349 aa, unidentified
MITKILAIDLGKAASVMRFHCTDGRPDHTFTVPTTAQALHDQIAASGPDLVIIEACAIAWWVHDLIAAMDIKVIVTANNGPGWRWKNVRNKSDRSDAAKIIKMYLSQQLEEVHVPAHNVRQWRGLILHRQDLVHDLNMFRNRIIGLLTMQNIVLTGSRWTRAWMEQLRALATDAYQSDDEQLWRLRLVQDLESVEVAQRHIDRIEEQLSAMAAKHEAVALLQREPGVGPRLAETVVAVIDDPLRFKSGRQVACYAGLTPRHWSSGQTERSGGISKQGNKILRTLLVEVSWLGLRHNPWLAEIHRRIKRDTAGRGKIAIVAAARRLLIKLWAIWRDFERERRGTHALAAA

SEQ ID NO: 418839 - protein, 352 aa, unidentified
MTVTIVETPAQTRAITGGVDTHAEVHVAAALDPVGGLLGVQEFPAAPAGYAQLLSWLAGFGAVCLVGVEGTGSYGAGLARHLTAAGVRVVEVDRADRQDRRRAGKSDPLDAVSAARAAQSGRAAGAPKGRDGAVEAIRALMVAKRSARAGRTQTINQARALILTGPDDLRIRFGEHPPAGLVAELAALRPRPGAPVGYPTRIALRELGRRAVFLDRQLQRLDALIVPLVAGRAPGLLALYGIGPDTAAMLLIAAGDHPERLRSEAAWAHLCATAPIPASSGKVTRHRLNPGGDRQANHALWRIVITRMSSHPATRAYVARRAKEGLSKKEIIRCLKRYVAREVYPHLRAHAG

SEQ ID NO: 418840 - protein, 432 aa, unidentified
MQRVSTEEFAAFIGLDWADAKHDSCLQATGSAHREFLCLDHRPDAIDAWVQSLRTRFNGQPMAVCLELNTGPIVSALRQYEFLVLFPVNPLTVARYREAFTPSRAKDDPTDAELQVEILLKHRDKLTPLTPQSPAMRALAQRVEDRRRLVGDKVRLTNRLTSALKNYFPHVLQWFQEKDTAIFCDFLSRWPTLKASQLARRTTLEGFFRAHHVRSADVITTRLEAIKRARALTTDDGVITPNVLLVQALVAQLRVTVPAIADFDNAITQRAQDHPDFPLFDALPGAGAVFAPRLLVAFGAQRERDASAAALHKYAGIAPVTERSGKQSWVHWRWQCPTCLRQTCVEWAAESIRHAFWAQVYYQQQRDKGKAHQAAVRALAFTWIRILYRCWQDRTPYDESTYLQALHRRGSSLMQTLAKGGRCIVGSIPTET

SEQ ID NO: 418841 - protein, 482 aa, unidentified
MKKRNIYLNRSQELLGLFEQAGNNAKVMCVPIDYAKKDHVVMFCNGYGDIVRKPFSVQNSPEGVEYLTQQVVRSCRHRAINRKHVFFGGEDPNSYAENFVNTLRSQRWLVASVNARDAKKQRANLQASTDRLDLMGIAVMLLNRRANCSPAQSGIYRNLRTLVRHRRKLVVMRTEVSNRIHTVVDRLFPGFLNERNTGICPFRRSSLWLMGNRFSARQIRRRNRAKLIEALRRYGTSEPGKAASKLQQYAAQVLSTPPEYIGTLQLSLSQHVKHYRCLQDNIDQAVKEIALWLAQTQGAFLTTVRGIGIVLAAGVTAELGNPNEQKPVNNLVSYSGIIPRVKQSGGPEGKIYVGHVAKRCNRILKNFVVSSAVHLGFHGPPDLMADYKRRDAAGQHADFGIARRYLRMAMCLMRTSQVYMPLRLRSGKVKREERAGYYLTMWPYLCEKWKKLGALEAAFAQDRPLGQWRDMVQQLYEIKLTL

SEQ ID NO: 418842 - protein, 349 aa, unidentified
MRKGGNLHQRGRELAPIRNEAYKIYLETPDIKGKELQRIDVAKARLDVAIRPTGQQWQVAYTEKGIQGLVDQFADLHPTLVLLEASGGLELLIVTALAAAGLPVAVVNPRQVRDFAKATGELAKTDVLDAQVLAHFAEAVRPTPRSLPDTETQTLAALVARRTQVISMLVAEKNRLYASRPPVHQRIQTHIAWLKQELDEMDRGLNEALHKSPIWREKENLLRTVPGVGPQLTLSLLAYLPELGTLNRKSIAALAGVAPFNRDSGTLRGKRTVWGGRSRIRTSLYMGTLVATRYNPVINTFYQRLVAAGKPKKVALTACMRKLLIILNAMLKHHTSWQYLTPQLLRPCS

SEQ ID NO: 418843 - protein, 385 aa, unidentified
MAPPARPEIVIGLDVGKSSHWACVVTREGELLASKPVLNRENAIDGLYAQYPGALVVVDQVRNIGSLALSRARLAGMPRAYLPGLAAHGASRLFAGDAKTDERDAMVIAKTALGIPDALLAVADRPPEVEAARSLAAQRDFLTCENTRSKNRLRSILLESCPEFEAHADLSDPATLKLMAAVGGPWSISEASPQSVGALTRGCGRAKVAALVESVGSSSRPHPAAVACEDRAVRLLARRISENDAEIGSLTSEISALLSADETYRCLLTVPGIGPRTASELVISIDIADFPSHDRLASYCGLAPRNRRSGTSISSVSASRQGNKRLKNLLVFSCNCLARSRNRWGEYYARCRDRGMPHGKALKAVARKRLKVIYAVMRDKVPYAA

SEQ ID NO: 418844 - protein, 329 aa, unidentified
MSASPIAVPLGIDISKVSFDVALLQASNRAKRAKFDNTAAGFEQLNEWLKAQDIEQVHACMEATNTYGHALARYLHHQGHPVSIVNPARIKGYGKSQLSRTKNDAADASLIARFCRDLKPTLWHPAPDEVAKLQMLTRRLETLEQMMTQEKNRRELCDDDELRADIDAHIEFLEAQETSLKKRLQQHIQAHDRLAKQQALLESITGIGTQTALTVLGEIGSIEVFGSARQLAAFAGLTPQEFQSGSSINGKTRLCKIGNARLRKALYFPALVMIRYCPEIQAFRQRLLAAGKQKMQVVGAVMHKLIRIIYGVLSSEEKFDSAKLVPQNT

SEQ ID NO: 418845 - protein, 411 aa, unidentified
MNFIGVDLHKKSITICVMDEKRKILARKTLPCTQTNEIVEFFRQFRPFKVVVEATASYVWFVELVEPLAEKIVLANPKKLRVIAESTKKTDNLDAQVLTEFLVLDMIPESYQATPRLRQHRALVRHRQYLQGRITSVRSKIRHILSNYNADRKDLFSANCGPAYLKEVRLNDVDRFVIKQLWAEWQDHLAQRLAVSKKLKAFVAKAPQREAEAREILKTAPQVGSVTAEVILSELGDISRFRNAKTVCAYAGLVPVVRQSGERKSKDMKITKEGSGLLRWALVEAAWRLVGKSPKWAALFSRLRHRSGKKRAIVAVARKLLCVLYAMLRTSTPYKIVTTQTTAPRTTGKELVRTSTPDQTTPTETTAPRTTGKKLVRTSTPEQTTPTETTAPRTTGKKLVRTSTPDQTITT

SEQ ID NO: 418846 - protein, 328 aa, unidentified
MQKNKEYVGVDVSKESLDMVAYSTGETRIFGNDDAGIAKATTWLKQVNSAIIVMEATGGMEVSLYIALQEANLPVAVINPRQIRDFARSMGTLAKTDKVDAKVLARYAATIQPEARPLPDEEVRQLNTLVTRRCQLVEMITAESNRATITRDKTMKQRIHTHIDWLKQELTGIDKHISQMLKENPVWHAKDELLQSVPGVGPVLSATLIAELSELGILNRKKIAALVGVAPFNRDSGKHRGERSIWGGRCRVRQPLYMATLSAVRFNPTIRIFYERLLANGKEKKVALTACMHKLLIILNVMLKHNSYWSCNYAIFNNTCIPDAKTVA

SEQ ID NO: 418847 - protein, 410 aa, unidentified
MELLHRRCCGLDVHKETVVACLRLVSDGKVTTEVRTFQTTTADLLRLSEWLAANECTHVAMEATGVYWKPVWHILDDGEFALVLANAAHVKNVPGRKTDVNDAMWLAELLALIRASFVPDAQTQEMRNLLRTRKQLVREQSSHVLRVQKTLEDANIKLDSVLTDLMGKSGRAIIEALIAGETNPVKLAGLADRRVKASPEEFREALRGRVTKHHRFLLRLHLNQIDALDAAMATLDAQVEANLGPFRTAVELIGSIPGIKNLGAHVIVSEIGIDMSRFPSAAHLISWACICPRNDESAGKRRSNRVRKGGTWLKTTLVQCAWAAVKKKDSYLQAQFYRIKARRGPKKAIMAVVASILTAIYHMLKDGTMYKDLGRNHFDRRSSDQQKNRLVKRLADLGYAVEIKPLAATA

SEQ ID NO: 418848 - protein, 231 aa, unidentified
MVSRGIDISKSSFVAAYPSTNGNPTKTFPNTTARMRELIGTLAVAEHHCVMEATSNYGCCCTCYIRTVLPSVLPPPKKKQIKHFSRMMMPVTKTDEKDAYMIAMYGEKMNPPIYKMPSQATIRILTTEGFTYFDNAKQLSRFIGICPTYQQSRTSVNIREHINRNDDERLRSLLYIAFWTALRYNSRECYIRLKANEKPFKVALIAVTNKLVRPVLTITTINSIYRWICPG

SEQ ID NO: 418849 - protein, 468 aa, unidentified
MEHNRPRSRQKKGKKPKHPSLLKQINRHAAGIDCGAETHFVAVPAERDRESVRSFKTFTGDLRRLADWLEACKIKTVAMESTGVYWIPIFEILEDRGFEVVLVNSRHIKNVPGRKTDVLDCQWIQELHSVGLLRGSFRPAAEIATLRAYLRHRERLVQSAATNIHRMQKALVEMNLQLHNVISDITGATGMRILRDIVAGVTDPVALAAHRDYRCRASEEKIAASLTGNYRAEHLFALRQNLELFDTFQRQITDCDGEIESLLLRLARKQRKPARALPPPRYKFRNGDNEPRFEVRDPLYRLSGVDLTQIDGIGPHTALQLIAEIGTDMTRWPTYKHFTSWLTLAPKNKISGKRLISSRTQPSANKAAALLRMSAMVLGRTSTALGAYYRRIAYRIGKPKAITATARKLAILVYRTLKGELDYADPGASAYEEQHRQRTLRNVRNRAKKLGFGLVNLETGELIHGPVT

SEQ ID NO: 418850 - protein, 347 aa, unidentified
MDQVIIGVDTHKSNHIAVAINAQGARLGEKSIPTSRHGYLDLEAWASGFGPIKAFGIEGTGSYGAGLSRDLLAKGHTVLDVMRPNRQLHYLHGKSDSLDAESAARSVLNGQATALSKTQTGSSEMIRHIKVARDSAVKAKSQAMITLKTLIINAPTELRDTLDRVKGRITLARHIAALRPGKITSPMASAKAAMRAIARRWLSLHEEIQAHDQELGRLVREKAPELMKSHGISTMTVAEMLILVGDNPERIKSEAALAKLCGVCPIPASSGKTNRMRLNRGGNRQANAAIYRVAIVRMRDDERTKNYAARRTAEGKSRREIVRCLKRYIVRELYHHLCASPTEQKKA

SEQ ID NO: 418851 - protein, 366 aa, unidentified
MGWMAPLRHRRAKLVFWRITRNREPSMSEITTIGLDLGKHVFQVHGIDAAGRTVLRKRLRRGQVLAFFSRIPSCLVGLEACATGHYWARELGALGHEVRLMPAQYVKAYIKRNKNDAADAEAICEAVSRPTMRFVPVKTAEQQAAQLLHRGRERLVRQRTMLVNALRAHLAEFGIVAAQGLRNVGQLIAIVRDDGETRLPEIARQVLQVLGSQIEQIEAAIIRLEKQLMAWHKTNAVSQRLASIPGIGPIIATAIATTVADPNVFRSGREFAAWLGLVPRQNSTGGKTRLGGITKRGNRYLRRLLINGASANLLRSKATKADPWVIGIRRRRPPLVVAVALANKTARIAWAVMLRQNEYQPRSVAA

SEQ ID NO: 418852 - protein, 470 aa, unidentified
MTPRKQKNLRMPPQPAEPLRVTNPHAAGIDVHAAVHWVAVPPGSSPAPPKDQPANLPPYVRKFGTCTADLEMLADWLAACGVTTVAMEATGVYWIALFELLERRGLQVYLVDPRQSKRAPGRPKTDCLDCQWLQRLHSYGLLTPSFRPADQVVVLRSYLRQRQMLISYGGQHIQHMQKALEQMNVKLAEVVSDITGVTGMSIIKAILRGQRDPLQLAKLRNDQCKRTEAEIARALYGSWREEHLFALRQAVALYEFYQEQLRECDGCLERHLGTFADQSDGEVLPHKPRRHKRSNNGARFDVRQRLFQMAGVDLTLIEGIEESTALTILSEIGTDMAKFPTVKQFTSWLGLCPQHQGSAGKIKSRRVRRGQNRAARALRLAALGCHHAKSALGAFYRRIQARCGGPKAVVATARKIAERVYRLLKYGADYVRQEMALYEETYRLRLVKGLARKAQEMGYQLVPATAPASP

SEQ ID NO: 418853 - protein, 338 aa, unidentified
MTIVMGLDQHRAQITAEWLDTDTGELSRTRISPAHRAGVRRFCERFRGQDLEVGLEATTGWRFVAEELRRVGAVVHLAEPAETAARRGNKKRAKSDRADARHVRELLMIDRLPESWMPPEHILDLRARVRLRHTLSHQRGEWQQRIQAVLYHHGCSQRRNLMTEESRSWLGAQPLPPTALEQVTVALSMIDALDHQLGPLDKKLRAYARRQAGCKALMSQFGVGELTAVTILAELGDPGRFSSSRDAVRYAGLDITVHQSDQRRAAGRLSRQGPPALRWALFEATMTASRLGSPDRAYYVQAAERLGSNRARLSVARKLLKRSYHLLRELGQEALQPA

SEQ ID NO: 418854 - protein, 347 aa, unidentified
MTIIRIGLDTSKHVFQIHGVDENERPVLRRQIRRQDVAKFFAKLAPTRIGMEACGASHYWARVLRGLGHEVVLMPPQYVKPYAQRNKNDKIDAEAICEAMSRPMVQARFVPIKTVEEQAALTMLSARDLLVKQRTMLINAIRGHAAEFGVTVAKGPQQVTELLRRLASDECVPALAREMIGVLASQLPVLEARLKAIEARLVAWHRQNATSQLLATIPGIGPIGGVSFALKVPQPRVFRSSRHFAAWIGITPREHSTAGRQRLGHISKEGDEDLRRLLVLGATAVIQQAKPGRASPWLLGLLARKPKKVATLALANKMARTIWALMISGEVYRPEGGGSGGLSRLQT

SEQ ID NO: 418855 - protein, 378 aa, unidentified
MPSETTIHVAIELSVSSWLVATRPPGAEKSRLHHIEGGDTTALLALIAELRTRASTKLGKPAEVVCCFEAGRDGFWLHRALTMHGVAAYVLEPTSILVNRRARRAKTDRLDAEGMLRVLAAWLAGDRQVCSMVRVPTPEEEDAKRPHREREHLVQERLRIENRIEALLFTQGIRKRPSLRSWERDVAELRTGDGRALPSLLRVELDRLRRRLVLALELIREVEAEHAEALAVTAEDEMTQKIAALQRIRGIGTNFAAVLVREVLYRSFANRRQLASYVGIAPMPYQSGGTDRDRSISRAGNPRARTTLIQLAWLWLRYQPGSALAAWFRERVGTLQGRTRRIAIVAMARKLLIALWRYVETGVTPDGVEIRAQADVTA

SEQ ID NO: 418856 - protein, 447 aa, unidentified
MLEPNAAGIDVGAREMFVAVPPGADEHPVRVFTTFTEDLHRLADWLAQCGVTTVAMEATGVYWIPLYEILEQRGIRPCLVNARHMKNVPGRRTDWHECQWLQFLHSVGLLRAAFRPEEDICAVRTVLRHRSELVMAATQHVQHMHKTLTQMNLQIHHVISDITGATGLAIVDAILAGQRDPAELVKLRDVRIKADPETIRKSLVGNWRPEHLFTLRQSRELYRIYQQQIVECDVQVETMLGKFEPRVDPAEKPLPPDRKRNRTGKKRRKKMGHPNPGFDLRTEAYKLFGVDVTQIPGLEENTLPLFSEVGRDMSRWPTAAHFVSWLALCPDNDISGGKLLWRGMRVVKNRAGHLFRLAAYSLHHSPTPLGNYLRRMKAKLDSKAATTATAHKIAVIFYTMVKNQVEYDETIWAARDAAREKRLEAKLKRQAKQLGYQLVPIERKPAA

SEQ ID NO: 418857 - protein, 330 aa, unidentified
MSAPIEIHSVPQKKLQMIGVDVAKQKLDVSVNDDTTLTIDNDEESFKNLLKILPDRRPVCVVMEATGGYERKLVTFLQAREIAVAVVNPKRIRDYAKAMGAYAKNDRIDADMIRHYAQTAYDKNRLQLSETLTEAARRRDSLLRRRNQLVGQRAIEKQHLESATDKDTVRSIKRIIKQLDKEIEKIEALIKADIDADDRLKKSMKQLMQVPGVGDVTVLTLLTQLPELGKRSNKEIAALVGVAPYARDSGKKTGRRAIFGGRMQIRSTLYMATLNATRFNKPIRIFYQRLLAQGKLKKVALVACMRKLLTMLNSMAKTGDEWNPDFAKQA

SEQ ID NO: 418858 - protein, 427 aa, unidentified
MNEIKTNRVDEFRQFKRHIRGSKDYLVVGLDIAKRKHHAFFGDASGRTLLKGLIVENSAEGFRHLLTQVRFYMDREGFSRVVFGLEPTSVYHKPLAEHLIEQGHLVVYATNEAIKKNRSLLDGRWDKNDTKDSANVADLVAQGKCHYYDLPELRLRDLRSLLLYRRRLKKQLHSCRVRIRNNLVAQYFPELDLFWNNAEAENLAIVRWFLDPARIRPLTCEQFIAKVTTHNGGLRQQRRLRHIWEAAGRSIGCRPGPAMALEAELVVESLKSVKEQLDRVEQAIEQLAEGFEEYGYLKSIPGFGPYVSAMTLAAIGNPHRFENRAQLIRLAGLDLSASRSGEKSKSAVPVISKKGKADLRYALYQAALIASSLTTHFRDYYNRLLEGRQREKGIRTKMRVKIAAKMLVIAWTLMKRKEPFNPAFIQS

SEQ ID NO: 418859 - protein, 360 aa, unidentified
MNTTLTAPSATTVAIDLAKDVFELAYVDADGRIVARQRLGRSAFAKVFDNRAPLRLVMEACGSAHYWGRRFRRLGHGVELLPAHDVRPYVHRTKTDRADAAGLWEAARCAAIRPVPVKTVEQQGIQGLHRVREFHKAQRTAAINLLRGLLREFGVVIPAGAAKVRPAVLAALEDGDNELPMALRDTLQELLDAVVAANTAMAAIETRLQEFAERDLRSQRLLRAGGVGVLTATALSASVGEFERFPSARHFASCLGLTPREHSSGSRRRLGRVTKRGDVYLRTLLIHGARAVLRSAKVAHGKSRPFDRTQTWALALAARIGHNKAAVALANKTARRLWAAEHHRTSFDPDHVSAMPATAH

SEQ ID NO: 418860 - protein, 355 aa, unidentified
MLYLGIDQHARQITISLRDEKGDVVQARQVSTEPKKISDFFQQLTRERLRSGEPFVAVLEVCGFNDWLIRMLRDYHCHKVILIQPDDRKKCKTDRRDAAALSELLWANRDRLLHGKPVRGLRQVDIASTTDQENRRLTTLRKEAGQTRARLINKIRHMLRRHNLQWEMPTKRLPTLSAIAWLKQVVLPEIDRLEMNQLLADLEHVQQHRKELEAMIAQRSAASTEAAIIATMPGVSHFTATSLACRVGRVERFPRAHSLANYWGLTPGCRNSGENNQRLGSITKAGSAMARWLLAQLTHKVLRKDARLREWFKRIKRRRGSSIARVAVMRKLATIIWHMLSKRKTFAECRAPVAA

SEQ ID NO: 418861 - protein, 411 aa, unidentified
MRLFVGDDWAEDHHDVEVMDQAGKVLAKRRLPEGVAGMGQLHELTGRFLPDDEQGAQVVIGIETDRGPWVTALIAAGYVVYPVNPKQASRYRERHGVSGAKSDGADAHMLADMVRTDSHQLRPAAGDSPEAEAVKVTARMHKTMIWERTRAVQRLRHQLREYFPAALEAFEDLDAPDTLELLGKAPDPERARKLTRAQVSAALKRARRRNIPDKATAILAALRGGHLGQPPALTVAYAGTVRSLIALITTLNEQVKILDGQVREHFGRHPDAEVYLSQPGMGPILGARVLAEFGDDPRRYRDGKARRNYAATSPITRASGKKKVIAARFIHNDRLVDALNAQAFAALNASPGARAFYDQQRAKGIEHNDALRRLANRLVGILHGCLKARALYDEATAWGHRQNLPQSSVAA

SEQ ID NO: 418862 - protein, 352 aa, unidentified
MMLIGVDPHKSTSTATAVEPESNREVASIRIEATLREYRRLLTWAGRWPERRWAIENAEGLGRHLASWLLARGEQVVDVSTNATARVRQLSRGGGRKNDRIDAAAAACVAALQGDARQLEAEGAADAIGVLDERRANLSQARVRSVNQLHAVFRALLAGGAPTGLTAGAAAALLRTVRPVGEVERVRKHIASDLVAEIRSLDARLKGNAEVMAELVKASGSTLEQTVGIGPVTAGRLIGRTGSPSRFPTPAAYAAYTGVAPIEVASGERSRHRLSRSGDRQLNATLHTIAVTQIRTAGSLGNIYYLTKIAERKTPREARRCLKRRLANHIWRTMIADEKRQRAKTSNVADAA

SEQ ID NO: 418863 - protein, 332 aa, unidentified
MMAQSELVVVGIDVAKDKVDACIRSLSQRQTFPSTPDGRRALIRWLRKHKVGKAAMEASGGYERDWAKALREAGIEALIIDPKRVRHFARSAGRLVKNDPIDAEMIARFAETFVEAKGQAYDAARERLVQIVNARQALLDVRTSLHNRSEHSAQDVVQKMQARLLKSIADEVAKLEAAIAAMIKATPHFAELAEIIESVPGLAEITSAGLIAAMPELGQVSNKTAAALLGVAPYDNDSGKHRGDRHIQGGRRKVRNLFYMPCMGAATRHNPVLKAFYDRLIAKGKEPKVALTACMRKLIVILNVMIARGEKWDATRYEVSDPARLPPSACAA

SEQ ID NO: 418864 - protein, 367 aa, unidentified
MKKVSTALAKQSGNISQQKLTIGLDLGDRNSWYCVVDEAGQIQLEQRVRTTAKALREVFGALPHGRIALEIGTHSPWISRLLSELGHEVIVANARKVRLIGESRKKDDRLDAQTLARLARIDPELLYPVKHRSAQAQADLAVIRARAGLVRARTGLVNTARGMAKSYGERLRGCNVRNLNPEKAEGLSPELQRALEPLLSAIEELSERICEYNDQIEALAEASYPQVTLLKQIKGVGTLIALTFLLTLEDPHRFRKSRDVGCYLGLQPGRRNSGQSEPQLHISKEGDPYLRTLLVQGAQHILGPFGVDCDLRRWGLKLAERGGRIGKKRAIVATARKLAVLLHHLWVSGEVYEPLHNSSRMTTAVAA

SEQ ID NO: 418865 - protein, 415 aa, unidentified
MALKIVYQICCGIDVHKTFVVACIASTNKQGVTIYKRHRFSTFTQGLKELLQWLLDNHCKDVCMESTGKYWIPIYNVLEKDCNIVLAHPKYVKAIRGKKTDKKDAKWIADLFKHDLVAGSFMPPADIRQLRDLMRYRFKLTCFMSSEKNRLQNCLTVSNIQLASVVSDTFGKSSQRILDKILENPDDTSFDIEPLIHGSMKKKLPELELAIDGFITPEQAGKLKVIKKHFEDLESRKAELEKLILALASPYQQELDLILTAPSFKNKFTAIGIISEIGVSMEAFPSAKHLCSWAGLTPTNNESAGKKKSVRVSKAGCYIKPLLVQCANSVVKSEKHPEIRNRYLRLRKRRGHKKAIIAIARMLLTALYNMLKNKEPYNAELYRKSDALPVNREITIEQAILIAQFQGYKIKSAAE

SEQ ID NO: 418866 - protein, 335 aa, unidentified
MDKEATAIGIDVSKYKLDVALIIEGKLRSKAVTNSSTGYQELTAWLARENVELDSCLVCMESTGVYSEPVALGLQALGLTVRIVNPGRIKGYGQSELVRNKNDGIDAALIARYCAKMQPQPWKSPTPEQRQLRSWCDRLKALKAMRLQEENRQEACIVTANLELVDHIEQHVGWLKAQIKLVEQHIEDHIACHPKLKRDSDLMTSIPGIGKATAAVMLGHVGDIRRFDNAKALAAHLGVSPRQRSSGTSIRGRTSMCQTGSRATRSALYMPAVVACRHNPVLKVFAERLHINGLPKKAVIGAVMRKLVHLMFAVIRSGVEFQADYRGAAGSSQSR

SEQ ID NO: 418867 - protein, 342 aa, unidentified
MYYIGLDVHKKTISYCVKDASGQIHREGTIGATRNDLDVWIRTLPEPRIMAMEATIFTGWIYDHLLPHAEQVKVAHPLMLRAIAAAKKKNDRIDAGKIADCLRCDFLPECHMASTAIRNRRRTLRYRHLLVRQMVQMKNRISGLLLETGVSHNKQRLHKVGYFRELISKNEEVQENIRPLLRLSRETIVRCQKTEYALVSSLERDPLLAERLKRLRTVPGVGPITALTWALEIGDVARFRSVKQAISYCGLCGEEKSSADKVLRTPLSKQRNKHIQHVLVEAAKLAPRQCHELALIREREMQKGNRNRATLAVARKMVAYLLAVDRREREFVPAEVRSTAAA

SEQ ID NO: 418868 - protein, 356 aa, unidentified
MPSIASISRVVVGGVDTHKDLHVAAVVDTGDQVLGAQSFSTTRAGYRALLAWMRTFGDVRRIGVEGTGSYGAGLLRHLQQAGIEVVEVDRPDRSDRRRRGKDDTIDAENAAHAALSGRRVITPKTRDGMVESLRVLRIARTTAVKSRRVALQMLRAQIISAPEELRDQLRNLTRMQLIRTIAAWRPDLTAFRDPVAATRIALKSLARRYLELHDEIADLDDLIEPLVRELAPSLLEAVGFGVENTAQLLISCGDNPTRPGSEARFAKLCGVAPLPASSGLHQRHRLNRGGDRQANSALHLAVVTRIRTDARTQAYLARRTTEGKSKLEIIRCLKRFVAREAYYLIKKDADPRRSAT

SEQ ID NO: 418869 - protein, 399 aa, unidentified
MITNHDAVEVFVGLDVGKGVHHAVAVDRAGRKLLDRALPNDEAKIREIMAELEDNGRILFVVDQPATIGALPVAVAQAAGVLVGYLPGLAMRRIADLHPGEAKTDARDAFIIAEAARTMPHALRSVQLVDEQLAELSMLCGFDDDLAKQATATSNRIRGLLTQIHPALERVLGPYMDHPAVLDLLRTWPTPEALRHAGRRRIGNRLTNLAPRMGERLADEIIEALGRQTVTVVGTNAATIVLPQLAAMLAGLHESRATVLTQVETLVEAHPLHPVLMSLPAVGIRTAARILTEVAGKDFPTSGHLASYAGLAPVTWRSGSSIRGDHSSRKGNKALKRTLFLSAFAALKDPPSRAYYDRKRAEGKRHNQALIALARRRCDTLYAMLRDGTLYQPPTPATA

SEQ ID NO: 418870 - protein, 358 aa, unidentified
MAVIEGVCRIVGGVDTHKDLHVAAIVDEQDRIIGTRSFATTRQGYRQMLAWMRSCGELQRIGIESTGSYGAGLLRFMQQAKVTVLEVTTPDKQDRRRRGKNDDLDAQNAAHAAFAGQRTVTPRSRDGMIESLRVLMACRKTAVSARRVALQMIHNTIVCAPDGLRDQLRNLTRMQLVRTLASWRPDLTAYRDLDSAYRIGLKSLARRYLELHDEIADLDAMIAAIVDELAPNLVARNSIGHTGAAQLLLTAGDNPERLRSEASFASLCGASPVPASSGRTVRHRLNRGGDRAANSALHIIAIGRLRTDQRTKDYVARRLAEGHSKLDAIRALKRYLAREVFTLITQRRKEINATRIAA

SEQ ID NO: 418871 - protein, 359 aa, unidentified
MKIVGCDFHPSYQQIAVLDTETGEVVEKKLMHAHGEAEKFYGELERPALIGMEATGNALWFELLLQKFGHQLWIGDAAKIRASYVRKQKTDKRDAGHILTLLTERRFPRLWLADSHQRDIRQLLIHRHNLVGVRTRLKTELQHLALNQGVQKKRQLWNEKGRVLLSTLALEGWTRQRREDLLQLLAVVEPQIAQLDKAVEQAARASSQAVLLMSQPGVGPITALAFTVTIGEVARFPRSKQVASYLGLIPSEHSSGSKRRLGSISKQGNVFLRTLLVEAAQSAVRHDPDFRKEYQHRCHHKAKGVAKVAAARKLAVRLYWMLKSNKPYPEVLLIEGSPRHPVAAKAKAVQLNGHPRISH

SEQ ID NO: 418872 - protein, 427 aa, unidentified
MISAAIERCAGIDVGKKFLAVCVMVGPLEGEPRVEIRKFGTIRVELEGLRDWLKQQEVTHVVMESTGSYWKPVFNALEDAVKVYLANPQEVKNRKGHKTDNKDGWWLAHLLRHAMIHPSFIPPRTIRELRDLTRRRKRLLGAGTSERNRVQKVLEDANVKLGNVLLDLFGVSGQLMLEALLQGQAKPEEIAHFAKGRAKKKIPEMIAALEGHQMSDHHRRMIRYSVDHMGFLEGQIEQLDQDIAARIREAGLEPQWLLLQSVPGVQETSAAEILAETGTDMTQFPSEKHISSWAGICPGNNRSAGKNRSSHTTGGNRWLRGTLTECAWAASAKKNCFTKDKFWRIITKSGGKKPPAVVAIAHTLLILIYQALLTGQPYQDKRAPVLDQRQKQRLIRHHIRRLGKLGVAVCSARPGSSETAAKTPTGT

SEQ ID NO: 418873 - protein, 387 aa, unidentified
MYFVGIDISKFKHDCAIVDELGDVITPSWSFQNDREGFSLLKELLDALNGEKKIGLKATSHYGQNLKLFLENNDFSFMEFNPLLINRFVHSKSLRKTKTDSIDALMIAQYLMTVEYKPYPPSFYTLEKLKSLTRFRDSLIRQRSKQLVELTNILDKVFPEFKPFFKGRFSATALYILSHYASPEKISNMNSKSYEPLRRLSRGRFSMVDLVELKTLARNTVGSTCNYLLQEMEIIIDIYNQLQSKVEEIEIQINDCVLGLAPPILTIPGIGVASAAVILSEFGDLSKFNSPSKLLSFAGMEPGYFQSGTSESTGKMVKHGSSHLRYAMMNCAQTVINNEPTFAAYYAKKRAEGKEHRVALTHVAKKLLRVIYTLETKELSYNPDLVR

SEQ ID NO: 418874 - protein, 345 aa, unidentified
MKIVGCDLQTRYQQIAMLDNETGELIERRLEHASGEAKEFYTSLKGPVRVGIEATGHTRWCERLLGELGHELWVGDAARIRAADVRKQKTDARDAALLLELLLSGRFPRLWRPSREDRDLRQLLWHRQKLVWMRNPVGNQLHALAMGEGICRKKQLFTKKGRAELEALNLDPWASRRRQELLHMLDQTDASLKQFDQAVNEQASGNPSAVRLMTHPGIGPVTSLAFVLTVGPVVRFERSKQLVSYLGLNPSEYSSGGRQRLGSISKQGNPMLRGLLVEAGHTAARLDSELRQDYQRLRLRRGGSVAKVAIARKLAVRMYWMLRREINYAQLVRMQGSSRATLVQR

SEQ ID NO: 418875 - protein, 351 aa, unidentified
MPHKLNSGIAVIGIDIGKNSFHVVGHDKRGAILLRQKWSRGQVEARLANLPPCLIGMEACVGAHHLSRKLQMLGHDARLMSAKYVRPYSKGQKNDFRDAEAITEAVQRPTMKFVATKTTEQLDLQALHRVRERLVSQRTGIINQIRAFLLERGVAVRQGLRFLRAELPRILAAPCDALSPRMLRVVEDLAGDWRRLDERIEGLSSEIEALARQDKGCERLMTVPGIGPIISSAMVAAIGTGDAFSKGRDFGAWLGLVPKQISTGDRTILGSISKRGNRYLRALFVQAAWVVLVKVGPKHWERYGLKSWIEAAKKRLHHNVLAVALANKLARIAWSVLAHGRTFETSKIQAA

SEQ ID NO: 418876 - protein, 336 aa, unidentified
MEPTTIAIDLAKRVFQIHYVEPDTGTIHSKVLKRAQLVPFFANRPASRVVMEACGSAHHWARALARLGHDVRLIAAQFVRPFVKSNKNDAADAAAIWEAAQRPGMRFVAVKTEDQQAMLALHRIRQQLVRIRVMQVNQLRGLLYEFGVVLPQGRRASVEAAKVALASLADQLPAMLTDSLQDQVSRLRTLDEQIARIELRILDWRRNDEACRRISEIPGVGVLTATAAVSVIGQAKTFRSGREFAAYLGLVPRQNGSGGKVKLGGISKRGDVYLRTLLIHGARFVISAAKHLPERLRALLARRPTNVVAVALANKMARTIWALLAYGRTYQSTPAQ

SEQ ID NO: 418877 - protein, 403 aa, unidentified
MSPEHSIDIFLGLDVGKSEHHACALDRDGNKVFDKPLPQLESELAGVFHQLQKLGTVLVIVDQPNTIGALPIAVARDCGCEVGYLPGLAMRKAADLYPGRAKTDKRDAFIIADTARTMPHTLRAVDRNDEVLSALKMLSGFDDDIARDCTRTVNRLRSVLTQIYPSLERVFAGSTLTRTPILELLIHYKGPQGLKRAGYQRVLNWMIKRTRKDPTPLVDDIFTALKAQTVTVPGSDAAELVIPQLAANIQALKEQRNTIAEQVEEMLADFPLCEVLMSMPGVDIKTAAQILLAIGDGSDFASAGHLAAYAGIAPVTRRSGSSIRGEFPARSGNKRLKNALFYSAFAVIRSHEPSRRYYERKRAEGKRHNAAVICLARRRCNVIYAMLKNKEFFREIPPRPVAA

SEQ ID NO: 418878 - protein, 338 aa, unidentified
MNHNTIIGIDLAKTVFQIAIMQDNHIQSNKQVRRKKLIELIANHPETTIAMEACYSSHYWGRLFESYGHKVLLIPAQHVKPFTRGNKTDANDAIAIIEASKRPNLRFVPTKSVHQQDIQNLHRIRERLVGNRTALSNQTRGLLAEYGIVFAVGKKAFLLGIETALNDESISGLFKTELRLVLDELQSIASHIAKIESQLSDYVVNNEDCRILYSIPGIGVINASAMVCKYGDASQFNKARSLAVNLGLTPKLSASGQRHQMLGISKRGDPYLRKQLIHGARALLRVCEKHPDDALCRWASRIKERRGSQIAVVALANRLARLIWVLLRKREMYRAMPV

SEQ ID NO: 418879 - protein, 368 aa, unidentified
MKERITSFVGLDTHIDSIAIGVAPIGREPHFVGTVPPQLGALSRALARLGKPEALQIVYEAGPCGYTLARQLRAHGYACQVIAPAKVPRRPGDRIKTDRRDALLLARAARAGELVSVTIPDERDEAIRDLCRAREDAVRARLKARQQLKAMLLRHGRHYTGRSSWTAAHELYLASVSFKHPAQDIAYAEYRSAVRERNERVENLTQSMGAQLEHWRMRPVVEALMTLRGIDRVAAMTLVAEIGDFTRFARPRELMGFLGLVPSEYTSGDQRQQGKITKTGNSHARRVLIEAAWNYRFPARMSTTLQRRQEGQPKVVRQIAWRAQLRLAKRYRHLSARKLAMNKICVAIARELSGFIWDIARQVKPLAS

SEQ ID NO: 418880 - protein, 452 aa, unidentified
MKKEKIALDVVNPQAAGIDVGSRSHYVAIGQRDEDVKEFGVYNEDLMALAQWLLDNQVKTVAMESTGTYWQSLFTTLQGVGLEVILCNGKFTKNIKGKKTDVKDCQWIQKLHTLGLLSGSFLPDEATEQLRTYCRHRANLLEQAADTSRKMQKYLRLLNLRLDVVVKDVTGLTGLSIIDAICKGEMNPEKLASLRHGNCKKSEQEIAKALQSNGRKDLLFSLTHEYELYQIFQGKISECDKQIQKLLNEQINNDENKKQHHIDSKVHKRLNKNNPDININLLSYQYFEGVDLLAIEGVSHSTVLTLMSEVGHGINKFESAKQFTSWLRLAPNNKISGGKILSNKMPKGSNRLKIALRQAANAVGNLKDTALSNFFKRIAFRKGRTSAISATARKLAVIIWNMITKKVPYKTDAQYEFLDQKRKRKVMEMKKLIHKFDITSDDLGLQLNINNL

SEQ ID NO: 418881 - protein, 408 aa, unidentified
MQVLYTRCAGLDVHKDTIVACVRCVSPPMHQEVRSFGTTTTQLLELADWLGEHGCTHVAMEATGVYWKPVWHVLEDEFELVLANAAHIRNVPGRKTDVNDAMWIADLLAHGLIRSSFVPPHAIQQLRDLTRTRKQLVREVSQHSLRIQKVLEDANLKLGSVLSDVLGKSGRAMLDAIVAGETDPARLAALAQGTARNKTAELREALRGRITEHHRTMLRLHVQVIAALHRTRGGLDTAVGKALAPIQQRTRLLTSMPGVSDLTASVMVAEIGVDMSRFPNAGHLISWAGLCPRSDESAGKRRSTRVRKSGTWIKTTLVTAAWAAVRVKTSYLRAQFLRIKARRGAKKAILAVAASMLTAAFHMLRDGTEYNDLGSEHLDRQDRSKTIRRLLKRLQDLGCEVPQMAHET

SEQ ID NO: 418882 - protein, 386 aa, unidentified
MHHPTTLPVSEQTCSREDCAILFVSLELSRSTWVATSLALGSRKMSKHTLVGGDARKLLDLLARLKSRAEQRIAAPVKVVAIQEVGLDGFWIHRLLEANGVESHVVDPASIAVPRRHRRAKTDAIDGETLLRTLMAWQRGEPRVCAMTVPPTPSEEDRRRVSRERATLLRERIRHTNRIRGLLFGQGITNYNPLHKNRREGLEELRTGDGHPVPVHLKAEILREIDRLELVLRQINEVEAERDEMLRPGQASSPVALLMRLKGIGPEFAAVLYLEGLFRHFENRRQLAAYAGLAPSPWKSGSVDHEQGISKAGNPRLRTTMVELAWMWVRYQPASALSCWFRQRVGSERGRIRRISIVALARKLLIALSRYINHGEIPAGAVVKPV

SEQ ID NO: 418883 - protein, 451 aa, unidentified
MTKKKMELDIINPNCSGIDVGSKSHFVAVGQALEDVKEFGVYADDLTAICLHLKEYGITSVAMESTGNYWQNLYVELEKHGMEVTLCNGKFTKHAKGKKTDVKDCRWIQKLHALGLLTGSFLPDETTEQLRTYCRQRTNWIDLAAEASHKMQKYLRLLNFRLDVVVKDICGLTGLAIIADICKGNLDPEKLSLHRHGNCRKSQEEIAKALKGNNRTDFLFGLKQEYESYLFFQKKIEACDVQINSFLKMQINTHPDKKKLQTDNKTHKRVNKNSIKGIDLNQASYQYFNGVDLMKIEGLSHSTILTIMSEVGPEGFIKFESSKQFTSWLRLAPNNKISGGKILSNKIPKGSNRLKIALRHAANAIGNLKDTHLSDFFRRVAYRKGRATAVSATARKLAVILWNMITKGIAYNPPIEYLFLDQKRKLRLVQNIKRNIAKFEIKPEDVGFASV

SEQ ID NO: 418884 - protein, 416 aa, unidentified
MRTLKLTLKGYKMYYVGIDVAKEKHYVCILDDTGEYAVKPFWIYTNVVGLRELIKRFGDLSLDNDDFLIGLESTGAFSENLYEYITDSDYKAILLNSYQTAKFRDFSTMKKIKNDAIDALVIAELLFAGKYKESHISNDAYHSLKVLGRTKKSLMDKIKTIKREISTVMATVNPEITNVFPNIFTKTALEVIKVYPTATDIAQATPKKLTRLFRHIKGNNFSEDKAKYLIDLAQTSVYAGRACKARASLLSSYIRILELYYQEKKEIEAQIKQLIEEEIDTEDNTVENLQSIPGVSDKTISAILGECGDLRRFDSAKAFIGYLGLYPTQYQSGNSNSVGRLAKRGIPIAKHALYMAAVGSVLHNPQLNKIFRDKVSSGKSKKEALIILSKKIATIMYSIVMYNKPYDAQRVFIPKR

SEQ ID NO: 418885 - protein, 327 aa, unidentified
MTQKMDVVGIDVSKATLDAYALTSQQARQFANDPAGHQGLVAWLQALGVGVAVFEASGGYERAAAQSLRRAGLVAHVVDPKRVRHYARAAGQLAKTDRIDARMIAAFGAAFLLGKPSGVASGDDPARQDLAELVGTRQVLVDHRTSLQQQADAVTSAIAKKLLLAPLKQLDRQIETSDRQIAAAIARHEPFAALARRLDTVPGLGPVSIAALIAWLPELGQLDRRQLAALVGVAPFADDSGKRTGQRHIQGGRMKLRNILYMATVGAATRHNPVLHARYRRLLENGKKPKVALIACLRPLLTILNAMVAHQQDWNPTRLPATEPAAA

SEQ ID NO: 418886 - protein, 312 aa, unidentified
MGQPEVFIGIDASKDSLEVAIRPTAEEMAFANTEDGLFLMVDFIKPFSPRLVVLEATGGCERAAVMALAAKGLPVVVVNPRHVRDFAKSKGILAKTDKIDARVIAHFAEAIRPEVRPLRTEEAQKLDALLTRRRQILQMITAEKNRLYSAPQWIKKEIQTHLQWLEKCLAKLNKDLDRMVKNSPLWQAKDEILQSAKGVGPVLSLNLINDLPELGILNRKKIAALVGVAPMNRDSGKFRGRRTIWGGRSEIRTALLMATRSAIRFNPVIRAFYERLETAGKPRKVSETACMRKFLTILNTMMRNRTCWQAGC

SEQ ID NO: 418887 - protein, 348 aa, unidentified
MAVTMLETRPVTGGVDTHLDIHVAAALDANGGLLGVESFATTPEGFTTLYRWLASFGPVARVGVEGTGAYGAGLARHLRRAGIEVIEVDRPNRLLRRVAGKSDTVDAVEAARAVLSGRARGVAKTADGNVEAMRALLIAKRSGREARITCLNQLRHLGFCAPDELRERFRGVPRTQLADVAAALRPRLDSDPVSYATKLAMRALARRVLSAVEDTDHIDTVLAHLVTATAPGLLELYGVGIDTAAILLVAAGDNADRLHSEAAWAHLCGVAPLPATSGKVTQRHRLNRGGNRQANHALWRIVFTPMSSESRTRAYVTRRLDEGLSKPEIMRVLKRYVARETYRHLRPT

SEQ ID NO: 418888 - protein, 338 aa, unidentified
MKLYAGIDLHSNNSVIDLLDEKDKVIFDKRLPNELPTILSALSPYQAQIQSIAIESTFNWYWLVDGLIDAGYSVQLVNTAAVQVYSGLKYTDDNHDARWLAHLLRLNILPTGYIYPKVDRAIRDLLRKRSQMVRLQTLNILSIQNLVARNTGHSIKSNTIKRMKIEDVASHLPNDDHALAMQCNLSVLQQCHEQIKILESAILKRIRLRPEFQCLLSVPGIGKILALTIMLETGDIKRFDKAGNFASYARCVQSKRVSNGKKKGENNRKNGNKYLAWAFVEAAHFSIRYSDTIKSFYQRKCAKTKKVVALKAVAHKLARACFYVMRDNVEFDVNKAFT

SEQ ID NO: 418889 - protein, 359 aa, unidentified
MQTQNNKLDFNGQNIYVGFDVHLKSWTVTILTDRLYHKTFNQPPQPKVLYEYLSKNFPGAQYHSAYEAGFCGYWIHNTLKLLGVNSMVVNPADIPTTDKEKVQKEDSRDSRKIARALKSGDLKPIHVPAAKTLDDRGLVRTRSALVKDLTRNKNRVKSFLHFHGIEIPAPFQKSSYRWSKRFTDWLKSIEFAEPSARSSLDALINSSEHIRDMVLQVTGQINSLSKTPAYSESVELLKSIPGIGLITAMIITLELETIHRFESLDKLSSFIGLIPSTHSSGEHETVGDMTRRGHPMLRSALVESAWVAARIDPALNKSYHTYCKRMDANKAIIRIAKKLVSRIRYVLKNKTPYVCSVIN

SEQ ID NO: 418890 - protein, 350 aa, unidentified
MDTNTSALASIGIDIGKEVFHIVGFGTNGKIAFRRKIKRLALVDTFKGLPSCVVGMEACLSAHFVSRALRQLGHQPRIIPSIYVKPFVKGQKNDYNDAEAIAEAALRPNLRTVREKTQDQLDLQALHRVRSRLVSRRTATINQIRAFLIEQGIAVRTGARALRNSLMAILENRQDEISPRMRGLIADLYEDWVGLDERIETIAGEIETIGEKEANCQRLMSIPGIGPLISTAVVAAIGTGEAFERGRDFGAWLGLVPRQYSTGGRSILGRISKRGSKYLRTLFIQAAKVILMRPHNWERFSFGAWLLNATPRLHPNKLATALANKLARIAWSILRNEKVFDVPRREAMAI

SEQ ID NO: 418891 - protein, 361 aa, unidentified
MDKITRVGVDLAKRVYQVNAVDRAERCVLARPMSPQRFLLWAATLPAGCVVAMESCSGAHHLARRLRLMGLDARLIAAHFIAPFRVQGASGKNDANDAAAICEAAARVRTRCVPVKTPEQQGWQGIHRLREGYKEERTACINRIRGLLAEFGLVFPQSPDALRRVLSEVLEDASNELPGMLRLGLQRAQGHWRVLDDDIAWCDQQVRRHVRQDPVANRAAQLHGVGELTASALVAAVGDMHQFDSARQFSAWLGLVPSQNSSGGKQRLGRITKRGDDYLRTLLIQGAKSALLAARKRSDRISQWLVQLRERVGWQKALVAMANKNARILWAVLTREIDYDPEHVPPIPQCKQLTLKVPMLA

SEQ ID NO: 418892 - protein, 322 aa, unidentified
MSLPGPLCVGIDVSKATLDIAASSAIEPFSVTNDTDGFDSIIAELRKYSVALVLMEATGGLEAAVACALQAEGFELAVVNPRQARDFARAMGYLAKTDRIDARVLAQMAEVINRHPERSRFIRALPDVERQVLNAMVVRRRQLIAMLVAERNRLYLAPPQSRKSINTIIKALEDELVRIDDDMNNHIRRHFKELSERLSSIKGVGAMTVAALLAEVPELGRLSRREISALVGVAPVNRDSGTMRGRRTIFGGRAGVRTALYMAALVATRYNPVIKAFYTRLVAAGKPKKVALVACMRKLLTILNAMLRKNEEWNESYHHVAP

SEQ ID NO: 418893 - protein, 369 aa, unidentified
MEEYSEVFIGLDVAKDRHAVAVAEPGRQGEVRYFGEINADAASVRKLVARLEKRHHRLHFCYEAGPTGYGLYRQIISLGHECSVVAPSLIPRKPGDRIKTNRRDALQLARLLRAGELTAVWVPEDGHEAVRELIRSRAAAVDDLRRKRQAISSMMLRYGRTYPGKTTWTKQHKQWLQTQKFEHAAQHLVLQDMILAAQHAQERLEQLEDVIGEFLPSWSLAPMVEALQALRGVRLVTAATIMAEIGDLCRFETAGQLMSYLGLVPGEDSTGNHVRRLSITKAGNRRVRTALIEAAWTYRHLPRTSQLKSCVHEKVPPIVRDIALKAQARLCARYRVLSNRGKKLTVAVTAIARELAGFIWAIGKAMQTA

SEQ ID NO: 418894 - protein, 352 aa, unidentified
MVMLADVIDAAVGADTHRDTHTLEITTAAGITLATTTVPNTDEGSDRAVAWIGEHAPGPQVAAAVEGSRSYGIGLARALSAAGVSVLEIEQPHSRERRRGKSDPIDAHLAALHALRLDADRLPTPRTDGDREALRILLGARQELIMTRRRAINQLRALLLTGDEADRQLARTKQFSDARLETIIQRAVLDGQTREQSIRREEARRLALRIRETGADLATNNTRLRTIVTELAPDLIAKLGVGPISAAQAIVTWSHHGRCRNEAAFAALAGASPLPASSGRTTRHRLNRGGDRALNCALHSIVLTRWRSCPRTRAYVERRRSEGRSDREIRRILKRYVARELYRTLNTTTTLP

SEQ ID NO: 418895 - protein, 412 aa, unidentified
MEWTIVGIDWGSRVHSACVMDGEGSVVGEWEFEHSGEAIAGCVDKLIELAGDASCLRVAIEIPHGAVVEALLDRGVKVFSINPKQLDRFRDRHSVAGAKDDDLDAYVLADSLRTDTKLYRPVELPDAGLVELRDISRLYDSLTEQVVALANQVQAQLQRYYVQLRDLGRWHEEPWLWDLFDAAPTPKKLETLRQSDLKAILKSHRIRRYKPLPLLEALQGQKALVVAPGVAEGASARIAMVLPVLRAAHQQRRACEKRIESLLKRPSPEGEEETHRDAEILLSLPGLGNRTGATMLAEAPIALQRRDYQDLRRLCGAAPVSTRTGGKRKKPSVAMRRACNMRLRNALHHWANRATQVDERARRHYVQLRSKGHSHGRALRGVGDRLLKVLVVMLHTGSLFDPELRNPKAEAA

SEQ ID NO: 418896 - protein, 349 aa, unidentified
MVTIGADLHKRTHTLVAVDETGRKLAEKTAPATTAGHLELLRWAARWPERTFALEDCRHLSRRLERDLLLAGERVLRVPPKLMAGARRSSREPGKSDPIDALAVARAALREPDLPVAVLDGPERDLRLLVDHRDDLVTQRTQIENRLRWHLHELMPGEEPAPRSLDRAAVLAELERHLADLPGTVARIARDLLGRIRELTAAIDGLEREIARLVAALAPSLLALQGCGSLTAAKLVGETAGIGRFASRAKFARHNGCAPLPVWSGNTVRHRLSRGGNRQLNVALHRIAITQVRLGGQGRAYFDHRLQAGDTKTEALRALRRRISDEVFRRMHNDEAARAVRPTGLAAAA

SEQ ID NO: 418897 - protein, 343 aa, unidentified
MTFVGCDLHTRSQQVAVLDTRTGEVSEHQLVHEGLAVEEFYAALPWPVTVGIESTGYAIWFHALMQCLGHTLLVGDAAQIRAMVVRKTKTDRRDARHMLELLRHDRFPTIWVPDPATRDLRALLTHRMRLDRIRTMVKNGLHAIALNYRLVRGAKLLRQAGLAQLQALALPPHTAQRRDHSLQLLTGLNAQIRELDDAITTAALAHPEAPRLITHPGVGALTALATIVVLGPVARFSDSKHVVSYVGLAPALNASADKYHLGHITKQGSTLLRFVLGQAAAHAARLDPDLIRTYRTLAPRRGRSKARVAVARKLLVRLFIMLRDHIDYDEFRRRGRAPAAAPG

SEQ ID NO: 418898 - protein, 335 aa, unidentified
MQYTTFLGIDVSKLTLDCCFRCPTPTGVRQRYTQVANTASGYQRLLAWLPRQGGHPATTICCLEQTGVYDDQLLQALTTAGWVCALEKTTVLQKVAPEHHYKTDAVDAARLAEYAERFQDQLTPYVPLHPVQVELRALLIERNRLVAHRQATRQKQHQAVYQTTPMPTLDRLWDESVVCLSAQIATIEQRMLVCLKTHPRLYHRYQQVTAIPGVGPCFGSLWVSVFGDQPWLNPRQIASRYGHAPHARTSGSSRRIPPTSTGHGEALFRKLVTLVARSAQQHWHPMQIYKAKKLAEGKAPRLITNNVINRMIRIICAIWNADSWFDPDYQSPFVT

SEQ ID NO: 418899 - protein, 403 aa, unidentified
MEAIVQRSAGLDVHKKLIVTTILLEQADGSVSEETREFGTTYEECERLSEWLSSNDIQLSVMESTGIYWKNIYAALERKGLRVSVVNARHVKQVPGRKTDVKDSQWLARLARYGLVKGSFIPPQDLRELRIVARYRTKLTRMLASEMNRIHKVLDDAGVRLGNVVTEISGKTATAIIKGLIEGAPIELLLTCTKGKLNKKKEELRAELEGELSPRHIFLLKKIRDHMDYLEGELADLDAYIFSAMAPYQQQWEILQTIPGLSVVGAALLIIEIGVDMQQFGSREQFCSWAGMCPGNNESAGKKKSGKTPKGSKQLRFVICEAANAAVRTESQFKHKYKSLMIRRGHKKAIVAIGHKMLRIIFSRLKEGKYYRDPEVSHEELLVKKNAPRWIKMLTKYNHVIAE

SEQ ID NO: 418900 - protein, 396 aa, unidentified
MARIWAGVDAGKTHHHCVAIDENGKRLLSRRVANDEPVLLDLVADVLALDTDVVWAVDLADGAAGLLIALLVDHDQHLLYIPGRVVNRAADGYRGEGKTDAKDAAIIADQARVRRDLHPLRPGDELTVELGLLSAHRMDLAADRTRSINRLRALLTGIFPSLERELDLTNVGPLVLLTGYQTPGAIRRAGARRLETWLRNRKVRNPAELAVGAVTAAERQHSAVPGEKVTAHLVHTLAREVMALNARIAETDKLVEGRFREHEHAAVIASMPGIGPLLGAEFLAATGGDMAAFATPDRLAAFAGVAPAPRDSGKVSGNLHRPQRYNRRLQRVFYTSALISIRCCEESRRFYDRKRAEGKRHTQAVLALARRRVNVLWALLRDGRCYQPTPPVTLAA

SEQ ID NO: 418901 - protein, 317 aa, unidentified
MFIGIDVGSRHLDAAATAAAADLPRRVPNAADGIARLVAALGELAPALIVLEATGTYHRPLLAALLAAGLPVAVANPTQVAAFRATRLGRHKTDRADAALLARFAEVHHDELRRATVDEPDLARLRALVGYRDDLVARRTRLRNQRHAAQWAGEEAVVAWLAADLDELAARLAEVDAAIGALMATRPETAVLTAQVGVGLVTAAAVLAYLPAGVLGNAKAAAAYAGVHPRHQQSGQRTTSRLSKQGCPALRRYLYLAALTAIRRDPAIAAWHATLRGRGHAAKSAACAVAHKLLRQLMGKIREQRKALHAEPLSLAA

SEQ ID NO: 418902 - protein, 344 aa, unidentified
MEMVKNKVCGADIHKKFLVATILSIDGTKISERFGMKLDDILKFKEWVLENNCEQVAVESTGVYWVPIYTVLEDKIEVIVANAYQIKHTPGRKTDLRDSEWIAELCLKGMIEPSRIFPKEDRELRTLTRARESLVNNSTQMKNRIHQALESSCIKISSVLSDIFGKSGRYILDGLLEGKTIDEILLGVKSKKIRKKDQELREAIKNSLDLAQILVIRICLELMEEIQKKIKNFDTEIMSRIERMKEDVEIAMSIPGIAFTSASSILAEIGNYRDFENENKLAAWCGLVPKISESADKRIIGSITKQGSKHVRRMLVQVAHAISRTRNSRLKSFFLRLKAKKELK

SEQ ID NO: 418903 - protein, 415 aa, unidentified
MEPMHQRVAGIDVHRMKHVVTILIGQEDGAVSSQTREFGGFKRDMRALVAWLQTHHIQQVVMESTGIYWKSVFAHLEAAGIPALVVNAFHVKNVPGRKTDVGDSEWLAQLARFGLLRGSFIPPKDLRELRIVSRYRRKLTGMLAGEKNRLHKLLDDAGIKLGGVVADIDGVCASKMVEGLIAGGKPDELAALGRGKVRATTDILEAAMDGELSARHRLVLDMAYDHLRYLEGKLTALDRYLLAAMQPYAWAWRLLQTIPGIDAISAAMILIEIGDDPHRFGSPARLASWSALCPGNNESAGKRKSGKTRHGNPIVRYLLCEAANAARRTKTVFRAKYESLVIRRGHKKTIIALAHKLVRTIYFVLVRRKPYRDSTVDYEAASVAKNAPRWIRALKKYGYWPQVAAPNPPTAATAT

SEQ ID NO: 418904 - protein, 337 aa, unidentified
MEYFAGLDVSMAETHVCVVTRDGAVMHEVKVPSTPSNIAAALAEAPACQRIVFETGRMAPMLYHGLGQLGLPVVCVESRQAYQALKSLATHKTDRNDARGLAHLARTGFFKPVHVKSLSAHAVRSLIIARKKLVGQRVTLENQIRGLAVVFGVRLPRALSPAFIRQALQASEGIPGLSAAMRGLVAARAAVLAAVVAIDADIRRMVRASDACRRLMSIPGVGQLTALAFTAAVDDPGRFRRSRDIGAYLGLVPRRYQSGEVDYTGSISKCGDRRVRTLLYEAANVMLTRYKGRLKLKDWAFAIAKRSTMRKARIALARRLAIIMHAMLRHGTEFKPA

SEQ ID NO: 418905 - protein, 385 aa, unidentified
MANNTRYVGLDVHAESISVAVAEAGRQGEVRSLGVVPNRPECVRKLVKKLGARKSLAVCYEAGPCGYELYWQFVQLGVACEVVAPTLVPVKSGDRVKTDRRDAIKLARCYRAGELTAVWVPDRSHEALRDLVRARHAAKCDQRRARQRLGKLLLRYGRRPPQHKRAWGAAYMVWLRAVRFDEFALQATLIDYLAEVDHAAARLERLERAIDEAVGGAPQETQALVAGLQALRGVAKTTAVTIVAELGRLSRFNHPEQLMGYSGLVPSEHSTGGPGKAKRGGITKAGNCHLRRVMVEAAWAYRHRPSVQGNLKKRQELLSEKITSTAWKAQHRLHDRYRRLVVHGKLKPVVITAIARELLGFVWAVGCQVEQETSTAAPASGARAA

SEQ ID NO: 418906 - protein, 400 aa, unidentified
MRVVFGIDVSKASSEVAILVNGEKVHGYTISNDAIGFARLLGDLRTVHKPEIIFEATGVYSRRLQTFLDDNGYAYTRLNPLETKKQLDSLRVRKTDQIDAEKLAQSQFVLNRKPTYVQEEVYQNLRDLSRFYQNLTEDIVRAKNRLHKVLQVTFPELENILSTPSGEQYWNLVIAFPCKDCVLELSNDELSKSIRLSTSKRISDKRVAYLAEKLIALANQSYCAVKKTSPILEEVRYYTKELLRLSEQRQAVLDEMVELAQPLPEYDILLSIPGIAETTATSIIGELGDIRRFQSANQINVFIGIDLRHYESGNFLAKEHITKRGNPYARKILFKCIHNIASANHTNPCHIADFYKKRKRQSQTTSTKLHTIASIHRLIRTMYYLIMHNKFYDYASTQNR

SEQ ID NO: 418907 - protein, 322 aa, unidentified
MSNKNYGGIDVAKQNVVIGIFGYPKTKTEANNPNGHTNTVEYLKKHNVNLVVLESTGGLEVPLANALYAAGMRVVIANPQRTHKYAESFSLGKTDHLDAKMLADYAQALDARKMVDDILYVPPSAEIQELEALVKRRSQLVEMRKMEKNRLEQTHASQKASVAALIAHLGELIVALDKDIDRYNKSGFNGKGTILSEMKGVGNTTCATLLSMMPELGKVAHKRAAALAGVVPLPHQSGDKEKKTGCIGGRKMVRNALYMAALTATRFEPKIKEFYERLMNRGKPFKVAINACMHKLLRILNARMRDYLASLEQTKASTPQTA

SEQ ID NO: 418908 - protein, 352 aa, unidentified
MELLSTIETKEEETEMKITTIGLDLAKSVFHVVCFDARHQEVGKRMLRRSQVLAYFAQQEPCVVAMEACAGAHYWGRELEKLGHTAKLIPPQYVKPYVKGNKNDYNDARAIAEAATRPGMRFVGIQTVEQQDIQALHRLRAQQVKQRTALCNQLRALVAEYGIVMNKGVAALRRGIPRLLEDAENGLSEAFRALLSRGYEQLLEREGHIDDYTHQVEVHSRQNEQTRRLQTLPGFGPIVASVFASVVGDGSAFKRGRDVSACLGLVPRQHSSGGKEVLLGISKRGDKYLRSLLIHGARSVVLHAKHKEDALSRWVNRVRERRGTNKAAVALANKLARMGWALLRHETVYRPA

SEQ ID NO: 418909 - protein, 410 aa, unidentified
MDIVYQRCAGLDVHKQTVVACVRVVQGQELTQQIRTFKTHTAGLLELAQWLKSYGVREVAMEATGVYWKPPWHVLEEDFDLVLANAAHVKNVPGRKTDVNDAMWLADLLAHGLIQPSFVPPGPVQELRTLTRTRKQFVRDRSAQVQRLDKILEDANVKLSTVVSDLTGKSGRAVIQALIDGCNDPQQLLAHISPRVKASRQELLLALHGRVNAHHRFLLKLHLHQIDAIDQAIAQIDQEAGAEPEPFRHAVALLSTMPGLSEVSAQVLIAEIGLDMSRFASADRLRSWACLCPRNDESAGKRRSTRLRSGGQWLKTTLVQAAWAAVRVKGGYLQAQFHRLRARRGVKKAIVAVASSMLTAAWYMLKNDTPWHDLGAAHFDRADAAKTANRLVHRLQQIGYHVTLATAPET

SEQ ID NO: 418910 - protein, 385 aa, unidentified
MKEQNFVPREFDIFGGLDVDKKTIAVTFMNHEGVLQSFSVPYRAEHLLNYVSKHFAGKKVAFAYEAGPTGWGLYDKLTAEGHPCVVAAPSMIPKVPGQRVKTNRLDSQKLSEHLRGGQLRSVHVPSEPYRQLRHLTQLRDTFVNDVVAMKLRVKGLLLFEGMEFPPAPPGSQWSFLVKDKLRKLSCSTSVRFKLDRLLESLEYSEKQALETIKEIRRFYKQDPELCQAMAHLKSIPGIGEIVASHLLARIGDPQKLGNVRQLAGFIGLAPSEHSTGERIARGRITRTGDGRLRSKLIQAAWSAIRQDAELRGFYRSVFQRHPRDRAARKAIVAVARKLTTRIYAVLKQKRPYVVREKVHSAPLTQEETVPQGTTRRFAEPGEINS

SEQ ID NO: 418911 - protein, 458 aa, unidentified
MKKKVKKTEKQKDIVEMSLVNPHAAGIDVGDTEHVVAVPEGRDKERVKKFGTMTCDLEAIVLWLKTCLIETVAMESTGVYWKPLFAMLVRNGFEVYLVNSKHVKNVTGRKTDEDDAMWIQKLHSCGLLRSSYLPGDEQEALRTLVRFRKSLTQDMSRFINRMQKSLELMNIKFHTVIDDITGKTGTAVIEAIIAGERNAANFLPFIDRRIKASHETIQKSLQGNWRDEHLFTLGQNYELYKTYKQHIEVCDLQIEKQLQQYEASRNDGIIESGKEKKDESVVKKKKAKAKNHPKFDVRGYLERIHGVDVLAIFGLSDIGGLELLGEVGTDLSKWEDESHFTSWLNLCPNNKISGGKTISSKLMRKKPGVASQAFRHAANSVQKSDHWLGDYFRRKKAKGGNKYAVVATANKIATIYYKMIRYKEEFKPLDLEQYQQKYKQAKIAYLERKLSELKMPAA

SEQ ID NO: 418912 - protein, 351 aa, unidentified
MPRASTVHAVIAIGIDMGKNTLHMVGLDSCGAIVLREKVSRGRIASRLVNLPPCLIGIEAGMATHYVARELAALGHDVKQVPATYAKPFRQGHKNDFRDAHAVAEAVQRPTTRFVPAKTDEQLDLQALHRVRSRLVSERTAVINQIRGFLLERGIIVRQGLRFLRQLLPDILAKRADVLSPRMVRIVAELAGDWRRLDERIETVTDEIEALAKSDDSCRRVMTVPGIGPIISSAMVAAIGNGVAFARGRDFSAWLGLVPKQMSTGDRTILGRISKRGNGYLRMLFMQAARVILLRPANWPKHGFGAWLARAAQRLHPNVLAAALANKLARIAWTVLAQERSYETRVTKTAA

SEQ ID NO: 418913 - protein, 320 aa, unidentified
MAAVLGLDISKAKLNAALRTDDGKVRRKVCRNNPTGFTELLAWVERYSTRPVHACLEATGTYGEGVALFLHDAGYVVSIVNPAAIRAYAGSQLKRAKTDEVDAVLIAHFAVTQRPPAWTPPAPAIRTLQALVRRLDALVEMHAQEANRLAAGVSIDEVRSSIEGVLTHLHGQIAHVRRLIQDHINRHPDLRQRRELLTSIPGIGEATAATLIAELFDKPYTNARQAAAFAGLVPRIQQSGQWRGRARLSKIGPARLRKALYFPAITALRCNPTIQATAARLRAAGKPPMVIIGAAMRRLIHLAFGVLKSRQVYEPQLARP

SEQ ID NO: 418914 - protein, 406 aa, unidentified
MNYLGIDVSKATSRYVFLDDAGERFTKPFTLDNNHQGFTKLLEKLKELTLSPDNILIGIEATGIWWENLYGMLTEHKFKVIVLNPHQTNKFREALRIKAKTDDIDAYVIAGLLRSQEYSSSFIPEESIQSLREITKLRFELVKDRQNYERQTNALLGLLFPEIHLTALKNPFTIASMAILKAYPTAKHLAGAKPKNIEKIVRSIQGNNFNINEIQSLIETAQKSIYSGRAKQDRGLNLNILLTQVETFQNAIAQLDERTNDILSPTNSSDANSFPGANLLTIPGVGPKTLAAILSAVGSDGQTFPDGKHLIGHIGFFPKIYESGETKRENEISNHGPKYLRWALYMAAVACLKHNPELKTLYDRKVSQGKTGKQALVYVAKKLAHLCLSMLKSGEDYNPSRVFMPA

SEQ ID NO: 418915 - protein, 301 aa, unidentified
MIIGCDFHPSWQQVSWLETETGETGERKLVQASGDAEQFYRQLPVPSLIGMEATGNCHWLVDLLAEIGHELWVGDAAQIRASCVRQQKTDQRDAEHILKLLVEGRFPRIWMPSSEVRDLRQLLLHRHKLVTIRTRVKNELQHLCLNQGVQRKHKLWSKAGQQVLRELPLKPWAARRREDLLGLLAMLDQQMEPLDRAVKEEAQRDKMALLLQTQPGVGAVTALAYVLTMGDVSRFARGKQVASYLGLIPREHSSGGRQKLGAITKQGNRMLRTLLVEAAQMAVRCDPGLRREYLHRCHQKP

SEQ ID NO: 418916 - protein, 325 aa, unidentified
MKQVFIGIDVSAATLDICIKVNDSFTSVVINNQIKDIRNFLQPFQQQSVMIGMENTGRYNWAFYEALSGFEFTTYVISPLHLKKSMGLVRGKNDKIDAERIVHFLVKNYTELRPWVCPGSTIQKLKVLITERNYRIKSKRQLSTMDKDYAKMRTLGLERPLAKMNKRLKAALDAQILEIEKEIEQLLKGDPEIKKQVALIRSVPGVGKVLSWVIIAKTNGFSSIRTPREMACYCGVAPFEYQSGTSIYRRPAVSHLADKTLKSLLHMGAMSAIRLQNDLGEYYRRKVAEGKNKMSVINAVRNKIIHRIYAVIKNQIIYQNNLVLS

SEQ ID NO: 418917 - protein, 341 aa, unidentified
MKQEMSVLGIDIAKRVMHAVGMDERGKIVFRKRLSRHDLMPFLAKLPPVLIGLEACGGAHYWARRCRAYGHEVRLMAPQFVKPFVKSHKNDMRDAEAIAEAVTRPTMRFVPTKDVDQQDIQALHRVRERLIGERTALVNEVHGLMHEYGIVLPKGVPKFRQAVVDKLESEQEKLTALSQEMFGKLVEEFVALEKQLAYYQEKLEALATAHPECQRLMTIPGIGPITATALVAAVGDMRVFKNGRQFAAWLGLVPRQHSTGGQTRLLGISKRGDSYVRKLLIHGARATLRWAKLKTDDRSRWMRGLLERRGWNRTAVAVANKNARIVWALLSRGGVYGDNVD

SEQ ID NO: 418918 - protein, 343 aa, unidentified
MKLSRVGVDLAKNVYQLHGVDRFGKTLWKRRLKRHQWFKALLDKTEPDCEIGMEACASAHHWGRELQSRGYTVKLIPPQFVKPYVKSNKSDAKDAEAICEAMSRPNMRFVTVKRVEQQDIQATHRIRAELMRQRTAKANQIRGLVAEYGLVAPKHMSSLRAAIPCWLEDAENGLTGDFRNLLHGVWNDFLGLDDRVCEMDKLIKRLAENHEECVRLQQLRGVGPMISTAMIASVGDARQYRTSRQMAAAIGITPRQHSSGDKHRLLGISKRGDVYLRTLMIHGARAVVARAAHKDDRLSRWVTNIANKKHPNVAAVALANKTARMAWAMLRNETDYDPDFAIS

SEQ ID NO: 418919 - protein, 358 aa, unidentified
MPATMTYVGLDVHARSTHAAAIEVCSGELRRARFGGGTEEVIGWLGGLPQPLHGCYEAGPTGYALYRAAEAAGLRVEVIAPSKTPRPSGDRVKSDRKDAELLARLLLAGQLKAVTVPPVAFEAARHLTRAREQVRQDLMRCRHRVSKLLLLHGRVYEGSAWTKTHRRWLEGQRFDEPATELAYADALAAVDGLVARKAALDERLSRLACEGEWWPTVARLRCFRGIDTLTALVLCLEIGDFRRFRRPAQLAAWLGLVPSLNQSGQSETRGPITKTGSSIARRLLVEAAWHYLPQPSVSVALAERRAGQPAEVLQVALRAQRRLHRLYHRLRQRGKPGNITTVAVARELACFLWAAAVV

SEQ ID NO: 418920 - protein, 348 aa, unidentified
MEASVSEVITIGLDIAKNVFHAHGADAGGQMIFSRRLTRAKLLDFFAAQPACLVAMEACGGAHHWARQLTQFGHSVRLIPPAYVKPFVKRQKNDAVDAEAICEAAQRPGMRFVAVKTEEQQASGMVFRTRDLMVRQRTQLINALRGHLAEYGWIAPKGKMHMNLLAGLLDDDEMASTLPPAARAMLKVMTNHLERIDEQIADLDREIARRAREDDTARRLMTIPGIGPVTAAAILSLAPPIETFAKGRDFAAWLGLTPLQHSTGGKPKLGSISKMGDRTIRRLLIIGGSSMVRQACRFGAPAGSWLESMLARKPRMLVSVALANKMARIVWALLTRHEDFKAPALVAA

SEQ ID NO: 418921 - protein, 358 aa, unidentified
MVYIGVDLHRKVSQVAAVDERGEMLGNRRVASNFDELFRVFGELAPEPHQTAVAFEATFGWGWFADLLRDAGMDAHMSHPLLTKAIANARVKNDAVDAKTLAQLLRTGMLPEAWMAPPEVREARRLVRMRVSLTRMRSRLKAQVHALLAEHGVANPMSDVFGRRGRQLLEELRLPQHSQGRLEACLRLIDDLGTEIEIADTEILALYETDPRTRRLLPIPGIGPTTAAIILAEIGDVYRFPDARHLCAWAGLTATERSSADHIRRGHISKQGSRWLRWIMVETATHALANRQLGLFFTRIEKKRGAKIARVALAHRLLTLVYYALRDECGCQAFPAPLAPTLTTTSRGRARSCEFMAS

SEQ ID NO: 418922 - protein, 435 aa, unidentified
MSTKVKEFIGRTGETAYQFNIVLDPVLYVAIDVAKYFHKAMIFDLDKNVLEKPFTFDISRQGFNLLLEKIKQQASKLKTESIVIGMEATGHYHETLVEHLRSNGFKVLLFNPYATFKTRVLNIDYVKTDEIDLKAISEAMLLGKGREFRPDGDIYTELKLLTRFRRAKCKDKVILKNQMLRDLDRVWPGLLKECRSKFGLFTKLWESKIARALLKLNLLPQQVAALSPHEMLDLLKTQTKGVGLCWANKIIKHAANILPCNDKEAAIHLHVLKSNLALLESLDNLIDELERRTAILLAETPGVYLLSVQGLSSIRVAEFIAEIGNPYKYNNAQEWVKLAGINPSRYQSGTMDRKTNRITKVGNTYLRHTLFSLARDICRWEPLFVEYKNKLCDKGKHIQVAYGAAANKFLRVAFSMMIRKSNFIIDYETKKEKNA

SEQ ID NO: 418923 - protein, 389 aa, unidentified
MQKSSTHKKNENIDLFVGLDVHKETIDIAVAADGRTAEVRHYGKIGGDLAALDKVLRKLQADGRTLHVVYEAGPCGYAIYRHLTARQIACAVIAPSLTPKKSGDRVKTDRRDALSLARLHRAGELTTVYVPREDDEAMRDLSRAREDAKRAETRARQQLQALLLRHDLRYTGRTPWSAPHLRWLAQLKLPHPAQQITFQEYVTAIDEAAQRVARLTTQIEELLPSWRMAPIVEALQAMRGVALITAVCMVAEVGDLTRFDNPRQLMAYLGLVPSEHSSGGRRHLGAITKAGNSHVRRMLIESAWAYRLPARVTPIIQKRQEKLSKPVREIAWKAQLRLCARYRRLSGKGKTKQLIVTAIARELAAFMWAIAGEVTPAAGGAVASQQRAA

SEQ ID NO: 418924 - protein, 470 aa, unidentified
MNHRRLVGIDLGIATAHTVRVLDGEGNIVAKRKAWPTMESLIAVEAAALAGCPQDIRLEVVIEPTGPAWLPIAVFFTRRGHRVFRVSSQKAADLRRFLSRHAKSNGIDADTLARLPLFDPAGLRPLVLPGAERAALDRRVRATDRLTRDAAERKVRIKDLARQLLPASPLARDLGIADLAVLERYADPRALANAGQAKLTALIAKASHGHQGADRARQWLDAARASLDLYAGHPAVDFTGLAAEVATEIGLLRAVQAELTAHAAERETRYRAVDPAGLARSLPGLADIGGPALAACMGDPARFANGKQFRSFTGLVPKASETGQTDRKGQPMSKAGSSLLRTTLVRAANTARTQDPQLARIYHQQMTERGKDHLGALCVTAAHLAERAWTVMRRGTPYIICDTDGRPVTAEQAKAIIAERWTVPPDTRARRRSKKTGKAPQKVLEGQCTRGSLPRGTTSPRHPGPVKTAP

SEQ ID NO: 418925 - protein, 341 aa, unidentified
MDKELYIGVDVSKKTLDLAYYDGETIDWKNAHIKVSNDTSGFKEVASWLAKIANRFDNLLFCMEHTGLYCQDFRMWLESHQYIYGMVDPRKMHRFEPDLDAGQRSLDRVKSDELDAFRIAIYCEQNHKKILRSPSRLPPAIYFKLKRLYAERKQDSKQSVLYKQQLHDTCAYDTESSMERKRLLLGSLKESIKAVDEEIACCLDEEASIRKNYDLLLSIPGIGHVVALETIILTENFTAITNPRKYACYIGIAPFPRESGTSVRKRTSVSCKGFSKAKADLSISAVSAITHSPTLREYWQRKRKEKCGSIVLNAVKFKLVLRMFAVIKRGTPYVETDAYKN

SEQ ID NO: 418926 - protein, 368 aa, unidentified
MIQRFHGIDRHKKFSTISVVNREGQEIQFLSACWDLRKYIEDLGPEDAVILEASSGAFWWADRIEAKGADCYILDPHRFRIIKDSWKKTDKSDARNMVKALWVHLVTGEFGVPSVYKPSGLTRELRKLFSQYELLNRQIRMLKNNIQAILLENGIVISSKEVLHLISPQEGAELLKALDISEASRTGIEVSQQVLWVVLEKKAGLHREILHTGAPLQQEVKRLITIKGITPLTALAFLSDVGDVTRFKSLRKMNAYLGLVPRGKESGGKNRCGHINRESRKLTRTILTQSIHHVSNSSPYLRRFYCDLTEKRGCGRARVALIRKVCSIMRRMLLTGEEFRWIEHSLFERKLKAYDKTLEEMREEKKSA

SEQ ID NO: 418927 - protein, 387 aa, unidentified
MTVRKVNNLPAAAHGETVRCLFAIELSKQSWVIGFTTPLSAKISRRILSGGDWKGLLELIEEVRARVSREIGRPVEVMSCYEAGYDGFWLHRQLEAHGVRNYVIDPASLQVDRRMRRAKTDRIDTERLLRSLMAYLRGEPKVWSVVQVPSVAAEDARRLHRERDRLISERVQHVNRIKGLCALQGIYDYHPLHPQAMARLEQLRTAQGIALPPRLKSEIKRELHRLTLVVEMIATLEAERDAIVENEASTHVNAEKIHALHKLKAIGPEFATVLVGEIFHRDFNNRRQLASYVGYAPSPFQSGNVAHDQGISKAGNRKGRTTGIELAWLWLRYQPDSDLSAWFRARVGTVKGRIRRIAIVALARKLLVALWRYLETGLVPRGAVFKS

SEQ ID NO: 418928 - protein, 385 aa, unidentified
MDEEVNPTTKNGDKHMKKTDKYVGLDVHQDTTVIGVADGGRTGEVRSYGTIPSDLQALSKVLGKLGGEAVRLHVVYEAGPTGFVVYRRLKQMGIDCIVVAPSKTPQPKGGRIKTDRRDALQLARLHRAGELIGINVPDEVDESVRDLTRARADAVHDLTRAKQRLKAFLLRQGYRYPGKANWSEAHQRYLRKLTLPLPALRSVLEEQLLAVDQATERVKRLDELIEAQVPQWRYYPAVQAVMCLRGFQLNAATVIVSELGDVRRFAHPKNVMAFLGLVPKEDSTGNTRRLGSITKAGNAQARWCLIEAVQKALTPPKVSARLSMRQEGQPAAYKELAWKIQLRLHKRGWHLLQRGLMKAKVNVALARELAGFIWDLLRQVPIPEA

SEQ ID NO: 418929 - protein, 317 aa, unidentified
MTNQSLTIGIDVGKMFLDIHIHPVNQSFRCDNTKGGHKTLLAYLQEHQVPENSVAVLEASGGYERPVWICLQSAGYTVHLVQPMRARNFIRARGILAKTDKIDAQALACFGSSGLTKGSTLPDKTQLALRDLSRSLQNLRKHAGQVKEQIEKATHPITVKALKALHRSCQRQAEKLENVLQNMIEECPKLFNLTQLFCSMPGIGNYTAMILVAELPEIGQCSKTQIAALSGLAPYTKQSGAWKGKSHIAGGRKQVRNALYMAALSAVRYNPPLKTFYNRLKDNGKTFKVSITATMRKMIVALNSMAKNNSTWETNHA

SEQ ID NO: 418930 - protein, 356 aa, unidentified
MNNSNRVDFTGQHIYIGLDVHKKSWSVSIFSQHCEHKTFTQPPEVDKLSSYLRRHFPGASYHSVYEAGYCGFWIHDQLKEQGIDSTVVNPADVPTKNKERRGKRDPVDCRKLARTLRSGELVGIYVPSRSQLEDRSLIRTRMRMVRKQTRCKNQIKSMLLFYGIHLPEELLNSHWSRRFIRWLESIRMQRASGDMALKIHLEELKHLRQIIASLNRAILALARTEQYRVPVSLLRTVPGISTLTAITLLTELSDIARFPSLDEMSCYVGLIPDTHSSGEKERVGEITQRRHRQLRGLLIEASWVAIRKDPVMLMAFSQYCKRMPKTRAIVKIARKLLNRIRYVLKNQKEYVLAVIE

SEQ ID NO: 418931 - protein, 354 aa, unidentified
MDQFIIVGCDLHDRTMRLKIAVDRGEPVSRTWANSPSSRKALIEDLYRRATEAGGARIVMAYEASGSGFVVCDEMLAAGIECHVLAPTRMEKSPKHCRGKTDDRDALDVLGRLRGHLLAGNELPSVWVPDLQTRDDRELVRVRQEAADKKTRIKTQIRWLLKRQGQEQAPAEPWTIDYYHWLDALRQGGLKFGAASALTSLLRQLQSVEQEIDELDVAVGQLSEQPRYRAAMEALRKLKGVGVLTAMVYLTEMGDLRRFANRYQIGSFLGLAPSSNESGQADDRKGHITRQGSGRVRKVLCQAIWNRVREGGPDHGKYQRLVARNPKHKKIAIVALMRELAVIMWHRASEAVAA

SEQ ID NO: 418932 - protein, 339 aa, unidentified
MSKSIDCSQATVFCGIDVSAATLAVAVIEQDQPLQQREFVNRASGHKALIGWLGKRKAQVRVSLEATGIYSLDLALALNDAPGIEAAVLNPKMANRFAQTLRRSKTDAADALVLAEYSCRMPFTAWRPPSLSALRLRAVGRHIVALVVQHTREQNRLHAAAGSQATPRCVVQDLKRSLISLERRIVKMRREAMALVHGDTEVQQRFRLLTGIPGIAATSAVQILGELALLAPEMNVRQWVAHSGLDPVHQHSGTSVHKLSRISRAGNRYLRRALYMPALSAVRWDPHMKAFYELLQTRHKTKLQAVIAVARKLLHAIYGVLRSRTPYDGRKLFPQLEPA

SEQ ID NO: 418933 - protein, 381 aa, unidentified
MNNNDTASSELSSLEGTRCQFNGSRAVIKLGIDVHQDYYVVVKQEGGTNPKPAQRFTKEAFLLWAAKLKGQGREVHAVYEACGFGFGLQRKLSELGIQCHVVCPQKLDERNKRVKTDGLDAKALCLKLDRFVQGNREELALVRVPTEEEEQKRAIHRQREQLVKARKRLEAQGRSLMVNHGIEPVKKWWKARTFASLKLPEWMKQLLQNSQPIVLALQQKIDALTVQLEEAASPGQPRGFGKLTSVVIDREIGNWNRFKSRRRVGSYTGLCPGQYSSGETRVQLCVTKHGNPRLRAALVEAAWRLVRFQPNYRPVKKWKVLLAKGVLTTRAARKKAIVALARQLAVDLWRIRSGRVHADELGFNQLMVPGEQKGGASRTWR

SEQ ID NO: 418934 - protein, 343 aa, unidentified
MELYVGMDVSLKETSICVVDDDGEIQCEGTVISEPEALARFIKTNAVGAKRIGLETGPTTTWLWHELRALGLPVICIDARHAKAALSMQINKSDRNDAVGLARIMQCGWYKEVQVKSLSCHEIRALLNSRAQLVKIKRDLENQIRGLLKNLGLVIGKAGGNVFRCRAEELLGSQGLLWEAVRPLLDIREKVSREIAALHRKLLDLARNDEDSRRSMTVPGIGPITALAFHTAIDEPCRFKRSRSVGAYLGLTPRRHASGEVDWSGRISKCGDGMVRTYLFEAAGVLLTRVPQWCTLKAWGHRLWKRIGFKKAKIAVARKLAVILHRMWRDGTDFQWSTKEAKA

SEQ ID NO: 418935 - protein, 415 aa, unidentified
MDVQMKHACGLDVHQATVVACLLSVLNSGQVKKQIRTFGTTTRELQTLREWLQAQGCTQVAMESTGVYWKPIYTLLEGPLELTVANAQQIKNVPGRKTDVKDAEWIADLLLHGLLKPSFVPPKPIRELRDLTRYRRKLADSQSAECNRLLKVLETANIKLASVASDVFGVSGMDMLDALAEGTATPAEMAELARGRLRGKIPQLEPALEGRMEEHHRYMLKLQLRRLRDLDKDLAELDARIQEKLQPYEKQVELLRGIPGVDWILAAVIIAELGIDMKVFDSAPRLACWAGVCPGNHESAGKRRKVRVTKGNVHLKTALVEAAHAAARTKGTYLRDKYFRLKARRGAKRAVVAIAHKILVSIYHMLSGDVSYHDLGDLYLDKLNRHHLTRNLVRRLERLGYCVTLQQQVVEQAAA

SEQ ID NO: 418936 - protein, 417 aa, unidentified
MNESGQWQQHRAFGALDWASEKHSVIVVDQAGKVIEDFEIEHSALGWKKFREKLQPYGSIPFAIETSQGAAVEQLLEAGMIVYPLNPKSAQAYRERKAPSGVKDDRLDAWSFADALRVDGQGWKALKPEEPLIKELRLLCRDEVSLIEQRSAFIQQLRHALAEYYPAALEAFGDWTGVSAWMFLQRFPTPQALAQAGKRKWQNFLHSRRLWGSDEGPRRMEIFARATEFAGTAPTVKAKSLLALSLVEMLFTVEKQLGLYRRHIEELFASHPDHDLFGSLPGAGTKIAPRLLAEIGDDRQRFGGDVQGLQCLGGTAPVTKRSGKYRHVHQRWACDKHLRHALHLFAERSLSRCVWAERYYQLHRQKDRSHANALRRLAHRWLKIIHKMWMDRTPYDPELHHRNQLQHGSWIFQLKAL

SEQ ID NO: 418937 - protein, 336 aa, unidentified
MNKYIGIDVAKATLQVYIPKSNTDLDIENNPKAIKQLYAKLKKQYKEEFQSLIFVYEPTGSYSTFLDRFSMEHSIRCYKVKPSQSSAFAKTLDHRNKSDKIDARLLHQMGAIAKDDQIEIPHIDEDAHKLQSLYKYLRRIIKERTALSNYLEAVELHQEDSFVIKRLKSRLKAFKKEEEELTQKMLDFIKHNPKYQKEFDNITSIKGIGPIAGLALFTLFIRYPNASRKKITALCGLDPITKSSGTSVKTRGRISKQGNRAIRETLFMPVLISINYNTEFKTMFDRLKNNGKHTTVAQIAIMRKLVLLAYSLYKNDTKYDPERYSKYQQAKASDIQ

SEQ ID NO: 418938 - protein, 304 aa, unidentified
MSKAKLDVCIEPGHRLASFNNDTSGIAELAAFCREHKAELVVMEASGGYERRTFIELWEQDISCALTNPRSVRRYAEAMGILEKTDRIDASVIARFADAKGLAPTPLPSQAQQRLKALVARLRQVTDDLVVQKQRRSSMFDNTEMQASVDEVVDLLKRQSRSLEGEIASMIDDDPLWAKLADTWRELKGVARRTIAWLHADLPEIGTLSNKAIAKLAGLAPIANDSGKRKGKRPTRGGRAGVRSILFLVAAIVARYDQSLGEFRDRLLKAGKEKMVVRIALARKLLVRLNAKAREARAQYAIAT

SEQ ID NO: 418939 - protein, 343 aa, unidentified
MKISRVGVDLAKNVFQLHGVDRHGKTVLKRRLSRDKWISALIKSAEPSCEIGIEACGGAHHWARLLMAKGFTVKVIPPQFVTPYVKSNKNDANDAEAICEAMSRPNMRYVTAKTVEQQDIQATHRVRSELMCHRTAKANQIRGLATEYGLVAPLQMASLRAAIPRWLEDAENGLTSRFRALLHGLWDDLIRLDQRIETLNGEIGSIAKSDPLAQRLQQLRGVGPLVATALIATVGTGKQFDKGRQMAASLGLTPRQHSSGGKDRLLGISKRGDAYLRSILIHGARAVVAKAKHKEDRLSRWVTELADRSHPNVAAVALANKTVRMAWAMMKYDADYEPEFAAS

SEQ ID NO: 418940 - protein, 342 aa, unidentified
MSEIITVGLDLAKNVFQAHGADASGRAVLRKKLRRDQVLAFFGQLRPCVVAMEACGGAHFWGREIGKLGHEVRLIPPAYVKPFVKRQKNDAADAEAICEAAQRPTMRFVPVKSEETQGAAMVFRIRELLIRQRTQAINALRGHLGEFGQIVPQGAANAARLIAIVDDPDGGLPADAVATLKVLVSTLTHLEAEIGKLDAEIARRAKENEVARRLMTVPGIGPLIATAIAVLAPPPGTFRKGRDFAAWLGLTPRQHSTGGKQRLGATTKMGERSLRRLLIIGANSVIIKRHVHAAARPGTWLGGMLTRKPPMLVRVALANKMARIVWALMARGGVYQSPTAAA

SEQ ID NO: 418941 - protein, 337 aa, unidentified
MLEISILAVDLAKNSFQVCAVRGDGTVVSNRAVSRPRLYQLFAEQEGCIVAMEACATSHHWGRVAQSYGHDVHLIPAQYVKPFVKRQKNDRADAEAIAEAASRPTMSFVAVKSAEKQGRAVAFRTHQCFVRQRTQLINSLRGHLAEFGLVAAKGPASLKILENALADPSTDIPAQVREMGAIYLTQIVQLTKIIEQLANELETASKTDEELRRLCTVPGIGPVTAGAIAAFAPDMSTFDSGRNFAAWLGLVPRQRSTGGKARLGAVSKMGQCDIRKLLIVGAMSVIRWVVRKGGSKNRWLASLVARKPRMVAAVALANKMARMIWAMTMKEEDYRMA

SEQ ID NO: 418942 - protein, 343 aa, unidentified
MGEVSTIGLDIAKSVFQIHGVDAGGAVVIRKRISRAKLLEFFATLPTCLVGIEACPSAHYWSRRLQGLGHTVRLMPPSYVKAYVKRSKNDANDAAAICEAVTRPSMRFVATKSEQQQSGLMLHRSRQLLVCQRTMLSNAIRGHMAELGIISAKGRNGTAELLKIIADEQDDRIPAAARFSLGVLARQYAAIRAETVAIERRIHAWHRSSEESRRLEEIPGVGPIVATALMAEVGDWKTFSSGRSLAAWIGLVPRQHSTGGKERLGRISKQGNRHLRWLLVAGAMAVIRYARQHGTKRPWLARLMDRRPIKVAAVALANKIARMAWAMMVRGERFKEPKLLPAA

SEQ ID NO: 418943 - protein, 337 aa, unidentified
METYVGLDVSQKSTMVCVIDGDGNPVWRGTVASDPQAIDSIIRQQAPEVRRVGMETGPLAVWFYHGLRERGVPVDCIHARHVHAALATQLNKTDSNDARGIAQLTRSGWYRAVEVKSIASHEVRLLLGARSRLVSMRTGLYNQIRGVLKTFGVVLPAGTRSAFERLVEQHTPATSLIHGVIEILLDSWRHIDRQVRETDKALERIARASDVCRRLMTVPGVGVTTAVAFAAAVDNPDRFRRVGDIGPYLGLTPRKYQSGEVDHNGGISKTGCRLTRHMLFEAASALLLRHKRDCALRRWAQSLIPRIGLRKALVATARKLATLLLSMWRSGKEFIPG

SEQ ID NO: 418944 - protein, 318 aa, unidentified
MTQISTFIGGIDIAKEKLDAAVHGMPGGIMVENAEAGWEQLAQFFKQAGVGKVGVEATGGYERRVVRYLQRAGFDVVVLQPNQVRAFAKMRLQRAKNDRIDAHLIAACTYVLDARARAPRDERFDELADHLTFIEQIESDATRIKTRLEHIGDRRQRGIYARMIKSLEVRAKAERLRLMKHLAVHPDLVRRVELVSSIPGCGEKTALAIVIRMPELGQISREEVASLAGLAPFVHQSGKHQGKMHIGGGREPLRRALYKAVLPAATFWNPALMALSERLKSRGKGHLCAQIACARKLLIFANTVVRRDTPWEARPIAA

SEQ ID NO: 418945 - protein, 395 aa, unidentified
MNKVIHYVGLDVHKETIAVSIAPQNTTEVRRYGIMGGTLDAVDKLIKKLSADNVELRWVYEAGPCGFVLCRHLRSKGFVCQVVAPSLIPKKASDRVKTDRRDADQLARLCRAGELTAIHVPDQEDEAIRDLVRARASAVVEQRKARNRLKGFLLRLGYRYTGKSGWNDAHKRYLSSLVMPRPAQQIAFQEYIHAINDATERLERLSQAVEDALPGWKWEPVVRALMSLRGVQVLTGMTPVAEVGDFSRFDDARSLMNFFGLTPSEHSSGGSRVQGGITKCGNVHCRRVLTEAAWHYRLTPKVSEPLQKRQEGQSKEVRLIAWNAQKRLHQRFRQLSAKKKSVIAAAAVARELTGFVWAIARQVKPVERPAAPEISRTCRGKVYRLNPKKKMQPAK

SEQ ID NO: 418946 - protein, 414 aa, unidentified
MEVLHPRCAGLDVHKDNVVAAVRLAEPGGVRTEVRRFDTTTPGLLALGDWLAECDCTHAVMEATGVYWKPVWHVLSDGELALVLANAAHVKNVPGRKTDVADAAWLADLLAHGLVRASFVPDAPTQAMRALLRTRKQLVREQSSHVQRLQKTLEDANLKLASVLTDIMGLSGRAILAALVAGETDPERLLALVHHRVKAEPAQLRAALSGRVGDSHRFLLRLHLGQYDALAKALEEIDAEVERNLDPFRDAVRLLRTVPGIGDLAARAIVAEIGSDMRRFPTAAHLVSWAGLCPRNDESAGKRHSTRLRQGAPWLKTALVQCAWAASRKKDGYLRAQFQRLRQRRGPKKAVCAVAASMLTAIWHMLRNGTFYQDLGADHFHRRSPEQQAQYLARQIAKLGFACTITPQPELVSA

SEQ ID NO: 418947 - protein, 336 aa, unidentified
MTNIIGCDYHPRFQMIAMLDKGTGEVKVMRLEHENGEAKKFYWSLPKGTRVGIEATGATQWFERLMAECGHELWVGDPAEIRARMVRKQKTDERDALHLLDLLMTERFPRVWVPSPEERDARQLLQHRQKLVRMRTSVKNQLHGLAMGQGLCRKQKLWSERGRKQLEALELGPWASRRRQELLKLLDELEPQITELNKAVEAEAARRPEVVLLMEVEGVGPVTGLAYVLTLGPVERFPRSRQVVGYLGLDPEEDTTGGHQRFGHITKQGNTMMRWLLVEAGQTAARLDPELRRVYKRLKVRRGANVAKVAIARRLAVRMYWILREAPPAPAGSHVR

SEQ ID NO: 418948 - protein, 399 aa, unidentified
MFYGLDVHKEFIQICQLDDKGAKRKEYRIGGSAEEIDRWAQDLGPRDQVVLETTFHTWAIHAIVSQYAGRVVVANALQVKAIAHAKIKTDKVDAYTLARLLQADFLPSVELPDEKTWALRQLVSHRRLLVKQRVAIKNTVLAVFHRCLISTPEGNAFSTRGRRWMRSVKLADAQHFLVHNALELLEAIEARIEATDQELLKTAGIEEQAQLLMTIPGVGVTVAMGLLAAIGDIRRFPSPGQLASYFGLVPRVSQSAGRCHHGRITKAGPGNARSLAIEAAQALARSPSPIASTFYRVRHKKGYNVAVTALARKLIVLVWYMLQNGEPYRYATLESTRRKLRSLVPKHERPRALRPPRTVDEVYREAGLPLPSPASKAERRAAANNRRTRTRLTRSQAKT

SEQ ID NO: 418949 - protein, 347 aa, unidentified
MRFYTKQHKFYCGIDLHAKKMYLCILDAEGEVRLHRNINTNRDIFLNIIEPFREDVVVAVECMFTWYWIADLCTKEDIPFVLGHALYMKAIHGGKAKNDKIDSHKIAVLLRGGMIPQAYVYPQKMRATRDLLRRRNHLMRKRAELYAHIQNTRSQYNLPEPLGCIAKPQNRDGIVERFEDTSVQNMIATDLAVITAYDPIIAKVERYIIKTAKHHDPVAHALLNTIPGIGRILSLVILYEIENINRFPAVQDFASYSRLVKCAKESNGKKYGSSGKKIGNAHLKWAFSEAAVLFLKGNEPGKRYLDRLANKHGKGKALSILAHKMGRAVYFMLKNKKPFDQNMFLGL

SEQ ID NO: 418950 - protein, 388 aa, unidentified
MKTPAEVNLQTGGEQVAVGVDPSRNALQLAILAPHGTVSKRFPLTPASLRSIDALLGQGQGVRIGIEGAATCGALVLLHWLRQGYDIREVNPQISKRLRECFTEAHTDASDAQGLAWGVRFHPNLPQVRLTVITAAWKRLSRLRTRLVKAQTGLYNRLHSLLAESYGAVYKRLFPKLQSKKALEFFQTFPTLDDALNDFPQVRSLLGKEGAALLEEAGCWGEDLYLETLRLEIHLTIQLLFAHRAAIKGVEGKMAELSRADPQVERLRAIAGMGTTLALTILGHSGDFSRFRSHDAYAAYCGLAPAVWQSGQSRVYARRRHRYSRPLRQAFLQLALTQLRLNPESRAYYERKRGEGKSHWVALTALARRLCKRVYKLMREETPAMSAY

SEQ ID NO: 418951 - protein, 338 aa, unidentified
MELYAGIDLHSNNSVVTVLDEQDRTVFAKRLANDLTAIIAALRSCAGTVRGVAVESTYNWYWLVDGLQDAGFTVHLVNTAAVKQYDGLKHGGDFSDARHLAHLLRLGILPTGYIYPREQRAVRDLLRKRSQLVRQRSTQILSIGNLVARNLGTHAGGNEIKRWQREHVDAMPLLDEQKQALMANLAVMRCLDSQIDALERSILAKAKLREDYQALKTVSGIGEVLALTIALETGEVGRFDSPGHFASYARTVDSRRESNGKKKGEGNAKCGNKHLAWAFIEAAHFAVRYDAAIKRWYQKKCANGLAVVAIKAVAHKLARACWHVMKDGKAFDVTRAFG

SEQ ID NO: 418952 - protein, 384 aa, unidentified
MQKPNDLNQSRIVLKQDSTLIAVIEMSLSSWLVAGIVPGVERQPLKKLAVDESALLKLLNRWREEAEKAGCRIERIAVAFEAGRDGFWLARWLRARGIEAHVIHASSVAVSREHRRAKTDRLDTELLKRAFLGWLRGERDHCKMVAIPTTKDEDAKRPNRERQSLVGEQTRIVNRMKAALIRLGIRGFNPKLKKAAGRLEDLRTPEGEPIPPNTLAELHRDMERRRLVSDQIRQIEEARLERMEQAPGDGPHAMVRLIARVIGVGIETADMLVHEVLSRKLRDRRAVARYAGLTGAPDESGSKRREKGLAKAGNARVRRGMIQLAWRFLLFQKDSALAQWYRTRTEGGRNRKTIIVALARKLLIALWRLVTTGEVPAGVVLRAA

SEQ ID NO: 418953 - protein, 457 aa, unidentified
MTQKRSKPKIDRTMPMVHPNAAAIDVGATMHTAAVRADWTPEPVRSFGTFTTDLHRLVNWFKECGVETVVMESTSVYWIPIFELLDARGFSVFLVNARDAKHVPGRKTDVSDAQWLQRLHSYGLLRASFRPKGQIAELRAYVRQRERLLEYAASHIQHMQKALTEMNLQLHHVVADITGTTGMRIMRAILAGERDPNVLARLRHYSCHASIETIEKALTGSYRAEHLFALEQALALYDAYHEKVSACDMMIEAVLKELSVRRGRQSGSLPSPHRRTDQANGLAFDVRAALFSLLGKDMTQIDGLGSYLSLKLIAECGDDLSAWPTAKHFTSWLCLAPSNKISGGKVLSSRTRRGSRAAALLRLAAVTVGRTDTALGAFYRRLSARIGKAKAVTATARKIAVLFYNAVRHGMEYVDPGASSYETRYRTRVVNNLHRRAKAFGFVLQPLEPEAGAAAVS

SEQ ID NO: 418954 - protein, 327 aa, unidentified
MFYLGIDVAKAKLDAKLLLQLQPLKFRSKTVPNTATGVSRLLAWSTRQAGCAVSGLHVLLEATGHYHDIAATACFDAGARVSVLNPAQVKEFARGLAVKSKTDAQDSAVLARFGALLQPPPWQPEAREIRELKALLGRLDAIEVDLRREQNRREKAEHTVLPAEVLESIDASIAFLRAQQTALQRRIHDHVDGHPALRQDRELLQSIPAIGEKTACRMLALLRSRSFAHASQAAAFVGLHPVEHQSGSSVHGRPRLAKTGNPRFRAALYMAAVTAIQHNPDVRALYQRLLARGKAKMAALCAAMRKLVHICFGVLKHQLPYQPRCTI

SEQ ID NO: 418955 - protein, 333 aa, unidentified
MNKITLIGIDTAKQVFHLVGVDAHGHYVWRKRLSRRQLLSVLAQIACCEVVLEACGASHHWARCIKALGHTVRLIAPQHVRPYRRGQKNDYPDAEAIIAAALSPGMRFVGVKRVEQQAEQALHRVRSRLMSQRNAAANELRGLLGEYGVVFRQGLKPLREGARCFAETEAAHTLGLVELVNDVLEEIGVLQARMDHYERLIEQRVQADETSRRLREELSGVGKLGASALRVKVADVRDFGGGRHFAAYLGLAPGHSGTGGQVHIGHLKRGHDRYLRQLLIHGARSALRHLGDKQDAQSCWLRGLLARRGFNIASVALAHKNARQAWAIMAREQ

SEQ ID NO: 418956 - protein, 337 aa, unidentified
MVYGAIDLHMRHSRIRIIEAEGHVLRDQRVPTNAERFLAAFAGYGSMLLVVESGTESEWVAQTLEGAGHEVIVVDPNFAPMYGELRRKVKTDTRDVAALAEANRRGWYRAAYRASPAQRARRQTLRARRQLVRMRSGTIALVRALVRQTGARVGAGSSERFAQRLEQLPLSPALRETIAPLTRTLTLLTREIATLDTHLAQEAKSDPVVQRLQTVPGVGPVVALTFRAFVDRIERFGSAAQVSAAIGLVPREDSSAERRHQGHITKAGPGEVRSLLIQAAWVCWRTSRQGPFRAWADQVAARRGKRIAVVALARRLSRVLYAMWRDETDFLGSRVAA

SEQ ID NO: 418957 - protein, 341 aa, unidentified
MSKVTVYVGLDYHKDSIQVCIMDHAGKILANRSCPNRAEAVVSFVAGHGQDVHAAVEACGGSANLADELATRHGWVINLAHPGYVARMKQTPDKTDWADARVIADLVRVGYLPKVWLAPEDVRQLRTLTRYRQQLVQRRTAAKLRVTALLREHRVVEPGARRWTRAWMTWLVTTEGLGSEGRWVADRLLGEVRDLDGSVAEVEGRLAEVTAGDAVVAELLELPGVGRVTAWALRAEIGRFDRFTTGKQMARYCGLSPRDASSGQRQADAGLIKAGNEALRSTIVEAAHRLIRYDPRWKALAATMRQAGKPACLIVAAIGNRWIRWLFHQVSGGPITLKRAA

SEQ ID NO: 418958 - protein, 307 aa, unidentified
MSVSIGIDVAKDKLDIFYNDQSEVIKNTTKAIRDFFSKVDKHCQIVMESTGIYHRVAHNELESLGFAVMIINPFQSKHFAKSMNVLCKTDKVDAKILALFGERMDFKATSCLSGQQQKMQDLMRHLDDLKKHKVQLTLQKNETPRWTNQSFDRVLEALEKSISEVEDKLHNMVMSDDVLKQKVTLLQTIPGIGVSTAIMLLCYMSELGRLNKKQIAALAGLAPVCNDSGRHKGKRVIRGGRHDIRSHLYMPILGAATMHNKRLNVFYKRLVDNGKLKKVALTACMRKLVVWANAILQTGQSWQENMA

SEQ ID NO: 418959 - protein, 348 aa, unidentified
MRQETKVYVGLDVHKEFCQACVMNKSGKVISNERFSSDQESLDKFLDRFDKAKFVLESTGIWEFIYEGIEKRGFEVVLAHPLKVRAISEAKVKTDKVDAETLAHLLRADLIPRSHVPPRDIRNLRQLVRHRAYLVRQCTSIKNRIHAELLRRGIRRPDDLKKTFTFKHVGWMRSLGILTIESSLNCLEGIQAQIKEVESVLLAEYNSRKDAQLIATIPGIGFYGALLILAEIDDIRRFSHPEKLCAYAGLVPTVHQSASTMYHGGITKNGAPHLRWILIEAVHVHTNYCPGSKLSKFHAKVAQRRGKQRATVATARKLLHTIYWMLLTKEKYHCQGFNLVEKAATLIA

SEQ ID NO: 418960 - protein, 397 aa, unidentified
MKDVIANEVGKQSVTGLHAITGVDRYGAYIGLDVHKETIAVAVALPGRAEPVYQGEIAHEPKAVKKWLVRLQEAYGGEVLLFCYEAGPCGYGLYRQLLAAGHDCQVVAPSLIPKKAGERIKTDRRDALKLARLLRAGELTAVWVPDGEQEAMRDLTRARDDMKSQERKARQQLNAYVLRHGHHWPRGKTRWTVTHYNWLESIRFEQPWLQIVLQEYIDAAKAATRRVDDLTAQLLRVLPEWSLAPVVEALVALRGIDKLSAIVLLAELGDISRFDSPKQLMAYLGLVPSEHSSGGRRRQGAITLTGNSHARRTLVESAWSYRFPARQTMHLKRKAQNASAEAKAIAWRAQKRLCGRYRVLTQAGKNVKLVCVAIARELVGFIWDIVRQEMPRMVAAQ

SEQ ID NO: 418961 - protein, 410 aa, unidentified
MDVLIPRCCGLDVHQKTVVASVRILGPTGEVSRETRTFGTMTRELETLAAWLRPWQITHIAMEATGVLWKPVWHILEPEWQLLLVNPQHLKRVPGRKTDVQDAEWIAQLLQCGLLRGSYVPPAVIRELRDLTRTRTTLEDETTGVVNRIHKVLEDANIKLATVATDIMGVSGRAMLRAIIAGETDPERLADLARRRLRLKRVALIEALRGRVTAHHRFLLERLLTQVKFLEEEIGRFDQRVAELSAPFAAALARLDGIPGINRRIAENVIAEVGHDMAPFPSVPDVVSWAGICPGKRETAGKSRSGRMRKGNRWLSRALVQAAWAARRKKNCYLAAQFQRITRRRGEQRAAVAVAHSILTAAYVILRDGVAYHDLGPEHFHRLTPEKRVRDLVRQLEKLGHKVTLEKVAA

SEQ ID NO: 418962 - protein, 309 aa, unidentified
MNECFAGIDISKATLDVVILPSNEHWTVSNNETGFAEIIERLKAVKLVVLEATGGLQVAVTAALLNAGIPVVAVNPRQIRDFAKAIGVLAKTDHVDANVIARFAGTIRPQVRLLKNEEMLQLEAIVVRRRQLVSMQIEEKNRLHIAPNKVKKDIEEHIESLQKRLHEIDKEMDRFIKSSPAWREKEKILRSVPGVGPILVATLLCELPELGTLDRKKIAALVGVAPFNRDSGKFSGTRSVWGGRAAVRAVLYMSTIAAIRFNPAIKEFYQRLRSAGKKPKQAITACMRKLLTILNSIVKTGAPWQFNCS

SEQ ID NO: 418963 - protein, 345 aa, unidentified
MENMYYIGLDVHKKTISYCVKDGSGRIHAEGKIPATRFDLDRWMKTLPQPWTVAMEATIFTGWIYDHLRPHAAAVKVAHPLMLRAIAAAKKKNDRIDAKKIADGLRCNFLPECYMAPTAIRERRRTLRYRNLLVRQTVQLKNRISGLLMEAGVNYNKEKLHKVGYFRELLKSNPDIDESLRPLLQLCRETLVRLQKTESALIRSLARDRFLVERVEHLMTIPAVGPITALTWALEVGEVSRFSSIKKAISYCGLCGDEQSSGEHVKRTPISKQRNKHLQWVLVEAAHMAPRLSPELALLYDREKQKGNTNRATLAVARKLVAYLVAIDRSQRDFLLVEKENQAAA

SEQ ID NO: 418964 - protein, 403 aa, unidentified
MTGVMIGVDPHKLSATIEVVDHHGHLLGSGRFTTDKTGYTAMRAYVKAWPDHVWAIEGANGAGRPLAQRLVEAGEQVVDVPAKLAARVRLFDTGHNRKTDALDAHSIAMVALRTAGLRVVTPDGDLEALRMLTDRRDELARLRVQTLNRLQRLLTELIPGQRKKDLSALQAKAMLATVRPRDIAGRTRRRMAAEELADLVAVDKKLKKIKAELKAAVAARGSTLMEVHGIGPAGAARILADVGDIARFADRNRFASWTGTAPLDASSGEQIRHRLSRAGNRRMNHVIHIAAIVQLRHDTEGRAYYRRKLAAGKTPLEALRCLKRRLSDVIYRRLLADARTAHTQTGDTGPGGHCGASQESSAVDLPPHIDTSDQPLPGPAAPTLRPSTRVRKSTTTPPLEPTS

SEQ ID NO: 418965 - protein, 429 aa, unidentified
MNYNTQNAKIASITEKTLIIGIDVGSETHYARAFSWRNYEYSKKPFAFSNDEAGFAAFKEWMDDIVEKHGMEVIIPGMEPTGHYWLNLGAYLQEQGMKPVHVNPHHVKKSKELDDNNPSKNDRKDPKTIASLVNEGRFSYPYIPTGIYAEIRNLSNLRIQTQEEITRIKNRMARWFSIYFPEIKDVYRNPDAVSGLMVIKQAPLPCDIRELGVEGVNKIWRDARLKGAGIKRATTLVTAAEHSIGNTEAPRSARKEIRNLLEDYEGYKKRMDELMEEIEKTLSEIPYIDKLMKINGIGIKTVSCFIAEVGDIGRFDNPKQVQKLAGYAIVADSSGKHNGESRISHRGRKRLRYALYEAAISVIGKNKEFKEIHSYYRTREKNPLKKMQSVIAVACKLIRIFYTILTKGVDYDGQKMLNDIVRPEIQPAA

SEQ ID NO: 418966 - protein, 358 aa, unidentified
MKIIGCDFHPSWQQVAWLDAETGETGECKLVNGDGEAERFYRALAEPALVGVEACGNSQWLVDLLQQLGHEVWVGDAAQIRASYVRKQKTDRRDAAHILKLLVEGRFPRLWMPSAEQRDVRQLLIHRHKLVEIRTRVKNGLQHLMLNRGVQKKSRLWSAAGQKALRELPLQGWAARRRADLLGLLQSLDQQIGELDRAVEEEAQRDKMAQLLRTQPGVGPITALAFVVTIGDVSRFRRGKQVASYLGLIPREHSSGGRQRLGAISKQGNRFVRTLLVEAAHSANRVDESFRKTYQQRCHRMAKGVAKVAAARKLAVRLYWMLRTNTAYPEIVRIESSPRVALVGASQTDGLIGRSRLP

SEQ ID NO: 418967 - protein, 456 aa, unidentified
MSHCTANKKAASAFVRRNSIPTTGAVAKALFNSAIGIDVHHDILVCAYQYCNRESDEITTEVCSFGTTASELAKFTDWCRNHHPEQILMESTGVLWFSPYEALESVGFTNRQLSLINARDFKAIVGRKSDKQDAERLALYARIGNVRSSFVPAKCFREMRAVSRLLSKTTDEQSRARSRYLKTLNFIGCRASSVFSDVRGKAATAILEVLAEGTREQLIDAIKIHGRRLRKSAAEILDALDFAVSPAMAMQLRIQKQHMEALSQTCEELYALLKVMQANYQPWINRLMTVPGIKERAARVIFAEVTNDLSSFPDAAHLASWVGVCPGTMESAGKRYSGRAAKGNRYLRRILVECSQAIGLMRKGALYSLFQAFKERKGSRRAVVAMAHHLVKIIYCLFTKGGNFEAQSTDALTKVRKQKYLSAVANIKKQNFEILTSGSLVDKATGAITAVDPMTV

SEQ ID NO: 418968 - protein, 400 aa, unidentified
MRAVFGIDVSKASSEVAILVNGEKVHGYTISNDALGFARLLGDLKTVHKPEIIFEATGVYSRRLQAFLEDNGYAYTRLNPLEAQKQLDSLRVRKTDQIDAEKLAQSQFVLNRKPTYVQEEVYQELRDLSRFYQNLTEDIVRAKNRLHKVLQVTFSELETILSTPTGEQYWNLVIAFPCKDFVLDLSKNELSKSIRQSTSKRISDKRVAYLAEKLTVLANQSYCAVKKTSPILEEVHYYAKELLRLSEQRQAVLDQMVELAQPLPEYDILLSIPGIAETTATSIIGELGDIRRFQSANQINAFIGIDLRHYESGNFLAKEHITKRGNPYARKILFKCIHNIASASHTNPCHIADFYEKRKRQSQTTSTKPHTIASIHRLIRTMYYLIMHNKLYDYASTQNR

SEQ ID NO: 418969 - protein, 369 aa, unidentified
MTSMLQSDTEEGDATADNVVVLGVDTHKDVHVAAVISMLGVFLASQSFPTTAAGYEQMLAWARTFGTVRQAGVECTGSYGAALTRYLRAHHVSVIEINQPDKATRRKRGKTDAVDAESAARAVLSGRATAIAKTSDGPVEMMRMFKLAKTSALKARTQAINQLKAVLVTTDPALRESLAGLSRWMLIRRCAELDTTDPRDAVAAAIYTLRLLGQRILRLGEEIRELEQHITTAINACAPALLHRRGIGHDSAAALLLAAGDNPERLDTEASFAALCGTSPIEASSGKTQRRRLNRGGDRQANAALYRIVLTRLRCDPSTQEYLQRRLAQGKTRREVIRCLKRYVAREVHPLLRQVWTTPESTPSPLDKT

SEQ ID NO: 418970 - protein, 393 aa, unidentified
MNKISYFCGVDVAKDSFVASIKNGRFLAKEKTFTMDRVGFKNFEQTIKRFKEDIAVGMEPTGIYHNNLLNFLKARDYNSVVVNPYMLHQFFKFTNNKPTKTDKKDSKTITEFLEFKQNTLEKKPQMHDERYSARYFVREKEKITQDIAKTKTEIKRIFSLVFPEIETYPGILSREVLSIILKIGAASKIKNISRKSFLKETGCILDKGRGRKSNLYPEKIYELACSSIAGDYPDYEELLKIKIRRLNGLLEEREYITKLIAEKAERLFKKEIEILCSIPGVGQESSIYLMAELVDIKRFSEWRKLIGFCGLDPIIKQSGKFKINCRISKRGNSHARRIAWIMAGCAKRSCPYFREYYLKKRSEGKSYKEAVVATSTKLLRTIYALLNENRCFR

SEQ ID NO: 418971 - protein, 355 aa, unidentified
MNDAKYIGMDVHQATISVAVRDSRGNLVMEAILETKADTILEFIHGLRGSLSVTFEEGTWAAWLHGLLHPHVTRVVACDPRKNALLKVGNHNDRMDARKLSELLYLNKLSPVYHGEQSIRTLKELARSYITITRDLTRVMSRLKAIYRSWGIPCAGQQVYAPRYRAEWLAKISEAGVRRRAELYYQQFDALAALRQGTRRELLAEARKHPAMRLLRQIPAIGPIRAALLIALIQTPNRFRTKRQLWAYCGLALRTYTSGEYRFVAGQLKRSKKVLAVRGLNINHNHDLKNIFKGAATRAAATAGPFQDCYQACVARGVKPHLARLTLARKIAAIPLLVWKKGVRFDAEHLKQQAA

SEQ ID NO: 418972 - protein, 416 aa, unidentified
MMEGLRPTYTVGIDWASDKHDVCVLAAAGESRLAFAIPHTADGLAALVQRLHRYGAPADLPIAIERPSGLLVDTLVEAGFPVVPIHPNALKASRPRYAAAPAKSDPGDAYILADLLRTDGHRFRPLRAPSDPTKALRAAVRTRDDLVATRVQLANQLRTLLDSFWPGAAAIFADVDSPIALDFLNTFPTPDSAAHLGVKRLERFLQRAAYCGRRPAAELLGRLRAAPRGQAGPLERETKGQLVRALVAVLRPLVTQLRELEGLIAAQLAQHPDGALLQSFPRSGTVNAAQLLAELGEDRRRFPTAAQLAAEAGVAPVTHTSGKHRAVACRFACNKRLRQAATTWADNSRHGHAWAAAVYRQARVRGCDHPHAVRILARAWLRVLWRCWQDRTLYDPAQHGRALPFLTPQPPSSAAA

SEQ ID NO: 418973 - protein, 436 aa, unidentified
MRGCRCSMIMGFTKSIEHSNLTRKEGDFMNPLYVGIDVSSKSNVVYFMLPDGSKHSNFSVANSHVGSTQLVKRIHAAIESMSLDTVLIGLESTSVYGDNLVYFLREDESLAPFNRKIHVLNPKQVKKFKDAYNDLPKNDYVDSFVIADCLRFGRINKEVYIGDYRYKALQNLTRARFFTVCNLTKEKQRFINVLFKKYSTITQEKVFSDTFSTTALAVYDEFESAEALAYMDLQELTAFIIKKGKNRFPDPDAVAKAIQKAARSSYRLPKTVNDSVNQVLSISITSIKALEVQIKEFDKAISAQIQLLPNVLISIPGIGPVYSAGIMAEIGDINRFANQAQLAKYAGLAWTQYQSGNFEAENTRLIKSGNRFLKYYLCEAAFSLVRCDKEYKAFYHQKYKEVNRYQHKRALALTARKFVRLVFTLLKDNRLYRSAK

SEQ ID NO: 418974 - protein, 321 aa, unidentified
MSKDKNYCGIDVSKDVLDAFNEQAGHIVVENDLKGFRELLKWAPSKAHFVMEATGVYHKKLAHFIHNRACQVSVVNPLIIKRFSQMLLRSTKTDKADAQMIYKYAVHNFPALWEPPAAYIDACMDLSGSLSLMFKQRTALKNKVHALKTKACSEKVIFRCIRQSINNLNRQIEQMEEQMEMYIEKNAPELFKQLKSIPGIGTKTAAFLIVITNGFIDFETSKQVSSYLGMAPSIIRSGSSIRGQSRITKTGNKHARNLLFLSSFTACKYNPACKQLFDRLTGTGKSKKLALIAVGNKLIKQAFALAKSGQYFNPEFVSIRS

SEQ ID NO: 418975 - protein, 313 aa, unidentified
MSPNNPNILHVGLDVAKLSLQLHLAGRFHSLVNDPKGHAQLLKHLRVHPNAHVVCEATGGYEQAVVRVLQAAAIPVSIVEAGRVRYFARAQGQRAKTDPIDAAVLSEYGAAFQPAPTPPASPQQQQLADLAQRRRQIVQLLTNERNHAEHYTDAFRLRQTRRLCKTLEQQVAQCDEAIATLIAQDAQLAHKASRLRAIPGVGPVVAATMLAEMPELGTLTRRTAAALAGVAPYTRDSGGQTGSRSIQGGRSAARNALYMATLTAMRYDRILKEFYQRLRAAGKKPLVAMTACMRKLVILMNRLLKNNDFQLAN

SEQ ID NO: 418976 - protein, 341 aa, unidentified
MGRYIAVDLHKNSFTSCSYKSDDDYKLKTHSVSAKGLAAFKESLARGDEVAVESTGNTAFFVREIASKVKRVRIVNPIQFKVISSSVKKTDEADALTIAKFLSKDMIPEVRMRTKKQSQIASLIGTRDKFVKLRTALKNKIHNILNANGIVSKPEMFSSEKGLEKVTGIDLEPSYRFEVDLLVAEIRNLNQAIDKINEELKSRGENIEGHKNLTSIKGISDIGATIFLNTIGDINDFKSDKHLAAYFGIVPRVYMSNKTVQYGRITKMGNKIARTALVQSTLVAIRYSPYLRRFYEKLKAKKGAGKAIIATSRKMLGIIYHTLKNNWVFEDFTQFKLAECA

SEQ ID NO: 418977 - protein, 344 aa, unidentified
MNFYSGIDLHSRQSTICVIDDKDKIHLRTTVSNQIEQILQPLRSFTPFPEVAVEATLNWYWLVDGLQDAGFKVKLAHPFGLQIIKKAKVKTDNRDAFNLARLLRLDALPESYIYPKAKRPIRDLLRRRQKIVSLRASDYVTLQRVFQQYAIADLASMGAKMIGPKDIEFQVNEPAIKCRCQMKLERIGLYSRQIQVCEDIIISSLVDDADFKRIQTIPGIGNILGAIILYETGDINRFKSAKHYCSYARVVPGIAQSSSTIRRSKGSKQGNPYLKFAFNQAAALAVRYCQPIRKFRQKHLNRKRSRARKLISISIVSHKLAKAAYYMLTRKEPFRMEMMFGSYI

SEQ ID NO: 418978 - protein, 350 aa, unidentified
MIIIGCDYHPGVQQISFVDTDTGEFQETRLQHREPAEQFYRELALRGMQVRLGMEASGQARWFERLLAELQMELWIGDAAEIRARRVRKKKTDREDARHILRLLMEDRFPRIWVPSWENRDVRQLLWHRHRMVQMRTRVMNQLQAVALNEGMRCKKRLGGERGRQQLESFPLAMWGSRRRHDLLELLDRLNPTIAELTQAIEAEVATYPAAQRLMTHPGVGALTALAFVLIIGETERFQWGKQIAAYLGLVPEENSSGESRRLGHISKQGSGFMRFLLVEAAQVTVRSDGQWRSRYFHLAMRRGRKIANVAMARRLAVRLYWMWRRQWDYEQWKEFGPHAGQPGMSDGVK

SEQ ID NO: 418979 - protein, 397 aa, unidentified
MIAVGIDISKAKSTVAVIDSDGTVLASPFTMAHTQPEMEAFVTYLKGLGEPTTILMEYTGHYHYPVLKKLQDEGFPVCIVNPYQMKKYGDVEIHKAKTDKKDALRIAAYALEKSYKLVPYSSMEQKYEDLKFLSRQYSQRITYVAKLKVQLIALLDQTMPGITRILPLNSRNPEKCALLLFIRRFKSFDEIHRIGKTRFLASYDVLAKKTSERSASSKGLSIYELAVDSITTRGEDPYIWLSQNQCVDLLSTTQNAADEIISQMRNIAETIPEYKVLRAMRGVGDRLGPIILAEIGDIRRFHSGKALNSYAGNDAPPYQSGQFESRNRHISKRGSSTLRKACYEVMQALKLTKPQDDPVYLFMLKKEQEGKPFNVAKMAGVNKFLRIYYARAMELYK

SEQ ID NO: 418980 - protein, 368 aa, unidentified
MQELITGFVGLDAHAESTAIAVAEAGRAAPRFVGTVGPRLAELTKALSKLGTPQSLCVVYEAGPCGYVLARELTRLSYRCEVVAPSKIPRRPGERIKTDRRDALKLAGLARAGELVPVRIPDERDEAIRDLSRARVDAVRARLKARQQLKALMLRHGRRYSGKTSWGAAHERYLAAVSFAHPAQDIAFTEYRQAISEAEVRVQRLSQSLTQEVEHWRMHSLVSAVMTLRGLDLVAATTVVAELGDLRRFAHPRELMGYLGLVPSEHTSGSKRRLGAITKTGNTHVRRVLIEAAWNYRYPARISRPLQLRQERQPAEIRAIAWRAQLRLNHRYRRLKARGLQHNKICVALARELAAFVWDIGRHVTPSA

SEQ ID NO: 418981 - protein, 349 aa, unidentified
MNQSEVLLGVDTHLDTHVGAVISEAGKLLGTLAVPTNLDGYCELLVWAKSFGKLRRAGVEGTGTYGAGLTRVLRDHEIEVLEVNRPDRAARRSKGKSDPIDAENAARAVLAEKATAIPKTQSGAAEAMRAVSVARRSAVKAKTQAINQLRALLVSAPQDVRERLLKVKAAECVKRCLRLRSLGTSVMEQALTATLRLLAKRWASLADELKTLDAMLERLTTEYAPRLRERFGIGPQTAATLVAVAGDNPGRLHSEAALAALCGTSPLQASSGKTTRHRLNRGGDRTANNALWTIAMVRMRSDPRTRTYVERRTQEGLSSKEIHRCLKRYIVREIYPLIMADLAFSRGCG

SEQ ID NO: 418982 - protein, 342 aa, unidentified
MKIHTIGIDLGKTTFHILGLNECGEVVVRKQLSRAQLLRFTANRKVHLIGMEACGGSHFLGRALEEQGHEVRLIPAQYGKPYVKTNKSDYIDAEAIAEAVGRPTMRFVPIKSDDQLDLQSLHRVRERWVSRRTAVINQIRGLLLERGITVRKGRRYIEAALPGLLEDADAKLSGALRLLLTQLKLELDQMAKRLEEADALIERTALENEACRRLVKIPGLGPVTATAVIAAIGNGAAFRKGREFAAWMGVVPREHSTGGKQKLLGISKRGNRYLRKLFVQCARAVLQQKTKQTPGLRAWLEKLTARTHRHVAGVALANKLARMAWAVLATGEAYRAPLPAAA

SEQ ID NO: 418983 - protein, 331 aa, unidentified
MKTKEIIGIAVSKLFIDVCIYSKQIVYQFENSKRGFKLMMNWIKDSTTFSSTETLFVFEHTGMYSHLLSVFLTKENLSFFIASGLEIKRSGGIARGKDDQIDAKRIAQYGYRLKEELKPSNLPNSSILQLKSLLSLRTKLNKQRAGFKATLKEQKIIYKSKDYKIIFEIQQKMIIELTKQIDKINAAMQSIIDDNSTLKQTYKLVTSVKGIGMQTALVMIAFTENFSKFDEWRKFASYCGIAPFPYQSGTSIKGRTKVSHLANKKLKAIINMCAISAIQHNPEMRLYFKKRTLEGKNKMSTVNIIRNKLIARVFAVVKRQTPYVDILKYAA

SEQ ID NO: 418984 - protein, 322 aa, unidentified
MLFAGIDISKTTFDCVVLIDGDYRHKKISNDLIGFKALSNWLKPHKAPILFCMEATGIYGVALAKYLYQKKMPIVVVNPLKTHAFSKMEMVRNKTDKSDAASISRYCKHLFDQGDWEQKCFKPKAIGFERLNLLVTRLDQLNKISNQEKNRLQVSLDKATSRSIKTMIKYTRTQINQIEKEIEKMVTHEPELHKQISLLISIDGIGRKTAWSLLAYLGDISLFSHARQVTSYAGLNPKICQSGSSINTTSLSKVGNKRLRKALYMPALVATRYNPLMVEFYERLKMNGKPKKVALCGVMRKLLVLSYGVLKSGVPFDVNYAK

SEQ ID NO: 418985 - protein, 414 aa, unidentified
MSNPLIVGVDVHRKTNTFCLMDTSGQEVGSRFTLENNRPGTQAFVQQVAELMEAGGFSELQIAAEATGWYWFHFFQSLQQDELLAAWPLDLHALNPRLTANFKKSYVDVDKTDPIDAFVIADRLRWGRDIGSPFEYDETYLALRFLTRYRYHVVHNLAREKAYCTAILYLKASEYSRQDKKPFSNLFGAASRAVIQEFASIEAIAAMPFEELVEFIDIKGKRRFPDPTENARLLQQVAQDSYPLPEALQEPINLILSLSLKQISALENQAERLSTAIAERIAAIPNTLQTIPGFGPVFAAGILAEIGNPQRFNYDQAKVAKFAGFKWRKTGSADFTADETRMTRTGNPYLRYYFCEAAFSVQGCDREYGLYFQRKLNEVRKHAHKRATVLTARKLVRLVMRLLATNQPYRPRRL

SEQ ID NO: 418986 - protein, 388 aa, unidentified
MQVVTGQAAAPTAIQTNLRAIFVSLELSRSTWLITSLSPGAAEKMSKHSVQAGDIVGLLRRLAQIKEKARARTGRDFPIITIQEAGLDGFWIHRVLQSEGIESHVVDPASIATSRRRRRAKTDKIDGETLVRTLLAYKRGEPRVCAMIKVPTPEEEDSRRLCRERKVLTAERVLHVNRIKGLLFCQGISGYEPLRRDRHERLEELQTGDGRPLPPHLKAQVNRELDRLELLLKQIKAVEAERDALLVAAHTPAAVPASMLLNIRGIGPEFAAVLWSEGLFRHFDNRRQVAAYAGLAPTPWQSGAVDREQGVSKAGNPRLRTTLIQLAWLWLRNQPHSALTLWFHERVSRNGGRLRKTTIVALARKLLVALWKYVTAGVVIEGAAMTAA

SEQ ID NO: 418987 - protein, 336 aa, unidentified
MKPMPVGIDIAKNVMQVHFVNTDTGEIFNKAIKRAKFIEFFTNRSPCLIGMEACGGAHHWARQLSRLGHQVKLMPGEFVKAFNIRNKNDTADAQAIWRAVQQPGKAVAVKTEDQQAMLALHRIRSQLMKFRLMQTNALHGLLSEYGEVMRKGHVSLVRNVPEILARLSGRLPAVLIDSLREQLGEVKRTDTRITDIERRIRELNKNDPGVKAISEIPGVGLLTATAAVASMGDADTFRSGREFASWVGLVPRQTGTGGKIQLLGIRKRGDKYLRKLLVNGAHSVIQNAREPGPWVTDLLKRRPINVVSVALANKMARIIWAVLAHGRPYRKEAAHN

SEQ ID NO: 418988 - protein, 336 aa, unidentified
MRHIGVDLHTTQITVCYLTEKDAVDIRKYQLCEMDKFVSDLKKTDEIAVEATCNTRWFAEQVEKKVSRVVLVNPRAFEVVKNSVKKTDKNDAINLARFLKADLLPEVRGKVMEATSVQSLVNTRTKLVRLKTSLINKIHSLAVSKGRKLKKTSLSSDKGLAKVLLQDWSRIERIELEIIVEQMRSLKVSIVKLDKAIEAQSEKLKGYQNLKSISGIGSLSAGVLLSVIGNVKDFASIDKLASYFGIVPRVSNSNETVNHGRITKRGNKTGRTTLVQCSLAAIKKNEYLKKYYEQVKARRGHGKAKIALARKYLGIIYNPLTNGWVFADFNNFELAE

SEQ ID NO: 418989 - protein, 478 aa, unidentified
MAPKEKQRLDLVPIPMLLHESLYVGIDVGKAKHVAGFVSTTLLERHQRFEACPALVVENSREGFRSLIDRMRSYVPLEQVFVLLEPTGHYHRALVEYLQELDISVYIMPVQKRPVGMLKTDKRDALSLANHLFNQLEKGIQLSDKTHLVRRMLPSTEAARQLKGWMRHRYELIHESTQRKNKLISICDELFPEMTQVFKDPTLPTALALREQFPTPHAIATTTLSALAELRLKHSYPSNAQLMQLQQLAAQSIGTKDLVRQRGLVLEQAQFIRELRMLQEHIQQLDKEIRQLVEQSREGQILTSIAGIGIIQAAAMMAAIGTIWNFERASELKSYFGWAPVSEISGTTLDQVHLTHGGNRTMKQMFFLCVAHAIQLDCEWAKLYERLVPKKCRYDERRRAYRGKLKVIGRIAGQLIEMIYALLKQDAEILSQIPPGETPPEPILYDPDVHKRHRNGAYRPIKNTPRLRKVIRLPEHPR

SEQ ID NO: 418990 - protein, 318 aa, unidentified
MLSFCGIDVSKDRLDVMVLPEEQCCSVPNDASGWAALVERLRNFSIMAIGLEASGGYERGVMRALLAAGMSVRQVNPFKLRQFARASGVLAKNDPLDARMIFVGIMPTRPAQRPTPATEQLVETLAVRRQLSAEKAAAENASRLLEETILRRLSRRRIRRLAADVEVLDERLLEIVATDAVLARRYRLLTSMPGVGSLLACTLIALLPELGRMNRKQVAALAGVAPYAFESGTLKGRRCIWGGRANVRQVLYMAALSASNWNPALKAFHDRLEAAGKKPKVTIVAVMRKMITTLNAMVRDDVVWADRHSGRNSVTTAR

SEQ ID NO: 418991 - protein, 326 aa, unidentified
MGCKELVVVVMVNGKARKSKFFDNPPLGHQSIIQSLTKLKGETKVCIEATGIYHFDLAVALSRADDIEVMVINPKAAHNIAKALMTRSKTDAIDAENLAIYAERMPFEAWERPADECIGLRATARRIAALSKQKIQTKNQLHALESTVETPALVIEQTKQLIDILDAQSKILRDSALNLIKQNEGLEQAYTLITGIKGIAQASAIQILSELMILPKNMTARQWVAHAGLDPRIFDSGSSVSKKPRISKVGNKYIRQALYMPALVASRFDPNIKGYYHHLIEDNGLKKVQAVCAVMRKLLHAIHGMLRTNKEFDGARFYTLPITTNS

SEQ ID NO: 418992 - protein, 320 aa, unidentified
MASRESLVIGIDGSKPTLDVAFGADPHAPRETIPYTDEGVQRLVTRLQRLQPTLIVLEATGGLERMVFAHLLQAGVPTARVQPRRVRALAHAEGRQAKTDRLDARVLARCAERVRPPHHQATDEQRASLRDLLVRREQVIQMRTAEINRLTAAAPNLRPGIQQHMDWLDQEIRALAQERDNEAERTDEVRRKRELRDSVPGIGAITARNLLLRLPELGTINRKEAAAVVGVAPYAHQSGAQHKPRHISGGRRDGRRVLSMATLAATRRRLVRRAFDQRLCQAGKPRKVAIVAAMRKLLTILGAILRQQKPWDPAVHTSAP

SEQ ID NO: 418993 - protein, 367 aa, unidentified
MELRSLAYFARIAELGSITRAAAHLRLAQPALTRHVQRLEEELGVALFTRANRGVRLTEAGEKLLEFFAPQAPCVVAMEACAGSHYWAREIGKLGHTVRLIPPAYVRPFVKRQKNDVADAEAICEAAQRPNMRFVPVKTEEQQANGVVFRARDLLVHQRTQCINALRGHLSEYGYVFPQGIAQVAALIAHVEDPNAALPDNARTILKLLIDTFTTLEAQIHELDGEINRRSKADPVARRLMTIPGVGPITATAITALVPAAESFRVGRDFAAWLGLTPLQKSTGGKQKLGAVSKRGERTIRRLLIIGACAVIQQVSRRGAPAGSWLAQMLLRKPKMLVIVALANKMARVVWALLVKGGVYKAPAAAV

SEQ ID NO: 418994 - protein, 372 aa, unidentified
MTTTGREGRRGKDSGTVVEGVVLGVDTHLDLHVTVALDCLGRHLGELAVPTTKKGYEMLVCWAEGFGPVGCAGVEGTSSYGAGLARHLRSAGIRVLEVERPKRRHLRRKGKSDSRDAESAARAVLAGETAGEPKSGDGRVEMIRVLRGARRSAVKARTQAANQLRGVRVTAPEALRRRLRGLSTKELVAGAARFRPGGNPGDVEEATRFALRSVARRYQALSEEIAQLDAQLHRLVAETAPELTSLPAIGTDHAATLLMVAGDNPERLGSEASFASLCGVSPVEASSGKVVRHRLNRGGNRDANRALHLICVVRMRIDQRTRRYAARRASEGKSKKEIIRCLKRYVAREVYRVLTTSVDFADSPRKRDASSL

SEQ ID NO: 418995 - protein, 363 aa, unidentified
MTIVMGVDQHRAQITTEWIDTTTGEIGRARVAPAHRESVRRFLRRFVSEELEVALEATTGWRFVVEELCRVGATVHLAEPAETAERRGRKKRAKTDRADARLLRELVMAGRLPESWIAPAHILDLRARVRLRHTLVDQRGEWQQRIHAVLYHHGVPHRRGLSLLTAEGRSWLEGVALPVSAREQITVALQMIDKLDGQLRPIDKELRCFARRQPGCKALMGLYGIGHLTAVTILAELGDARRFSSSREAVRYSGLDITVHQSDQRRAPGHLSRQGPPALRWALYEAAQSAHRKSSPDREYYLQTAERLGGNRACLALARKLLYAAITRCESSARTPWRHPRPTALAQPRAARQAPAQPLKTVR

SEQ ID NO: 418996 - protein, 377 aa, unidentified
MSNVRFIGLDVHAETIAVAVAEPNGEVRSVGVIPNRPESIRKLVKKLGPPAQLRVCYEAGPTGYVVYWQLTALDVACQVVAPTLVPVKPGDRVKTDRRDALKLARSYRAGDLTPVWVPDAAPEALRDLVRAREAAKKDQLRARHRLGKFLLRHGRRPPIAMKAWTQAHLVWVKSAVRFDQAAQEATLLDYIHEVDHVAGRITRLESAIDAAVQTAPGRMRAVIEALQALRGIALVTAVTIAAEVGELSRFAKPRQLMGYSGAVASEDSSGQRTRRGGITKAGNAHLRRVVVEAAWAYRHRPAVGPALRKRQAPVSVEVKEIAWKAQHRLHGRYRALMARGKCKQQVVTAIGRELLGFIWAIGVLVEARTADGRPIAA

SEQ ID NO: 418997 - protein, 417 aa, unidentified
MKKNSNSLKQSEAQAKRRKLGVVVERKPQEVMAELVARLAEQLDVKIVPASEGEKGERDALHPNLDRLTVGVDLGDQWSNYCILGLGGETLAEGQFRTRKQETAEFFQGLATSRVVVEVGTHSAWVREIIAGFGHEVLVANPRLMEGSKRRRRKNDRIDAEKLARLGRIDPKSLHPVQHRSTEVREDLLVLRARDALVKSRTELINSVRGLVKSMGARVSSCSSESFSEKAAAEIPVEVGETLQPLLRLIATLSDEIKTFDRRIDKLAAEKYMHTQILRQVAGVGPVTALGYVLTLETPLRFAKSRDVGPYLGLVPKQEDSGDSQPQLGISKTGDQMLRKLLVGSAHYILGPFGPDTDLRRFGMRLCEHGGKNAKKRAVVAVARKLAVLLHRLWASGEVYEPLGHGAPTKLVRPAAA

SEQ ID NO: 418998 - protein, 366 aa, unidentified
MLEGTTFIGLDVHKRSIVVAVRRRGVEGLLEERLPNERGAVARWARRWKRESGGKLVCAYEAGACGYALQRQLESLGIVCRVVAPSLVPRRPGERIKTDRRDARKLAEYLEGGHLTEVRPPTPAEEAARDLCRAREDAMQDRMRCRHRLSKFLLRRGIRYGAGRKPWTQAHRSWLGQQSFEDLSEQAVFDDYRLAVAQLDARIDALDRQLEVLAQQPAYRRAVGALRCFRGIDTCTALGLVTELHGIERFGRASGLMAFVGLVPSEASSGDRQRRGAITKAGNGHARRLLIEAAWHARHKPAIPVALRRRRQGQPPELIAMADVAQQRLHRRYWRLVQRGKPTTVAATAVARELVGFVWAALRAVA

SEQ ID NO: 418999 - protein, 345 aa, unidentified
MELHTVGIDLGKTVFHLVGLNLHGEVVLRKKLSRKQLLHFTANLQVGLIGMEACGGAHFLGRALREQGHEVRLMPAQYVKPYVKTNKNDYIDAEAIAEAVARPTMRFVPIKTDDQLDMQSLHRVRERWVARRTAVVNQIRGLLLERGITLRKGRRHVDAALPEILEDATAKLSGALRILLAQLKLELDQMAMRIDEADAVLNKTAHENAACQRLVAIPGIGPVTATALIAAIGNGAAFRKGREFAAWMGVVPREHSTGGKQKLLGISKRGNSYLRTLFIQGARAVLQQRTKQASGLSAWLAQLTGRTHCNVAAVALANKLARIAWAVLAKEVPYRPPVLTSPAVA

SEQ ID NO: 419000 - protein, 363 aa, unidentified
MIVIGADIHKSTHALAAVSGDGGSVAGELEIGADGAGHRSALRWARTLDEERVWAIEDCRHLSRRLEQALIAAGERVVRVPPRMMGQARRGEREPGKSDQIDARAVARAVVREGVERFPVAFLDERALEIRLLADHRADLVAERTRQINRLRWHLVDACPEVEAKIPARQLDSGVMLDRIARRLRREERSARIRVALELVASIRGVSRQADSLERELRTLILSYRPALLAEQGLGVLTAATLIGRTAGAERFPTDAHFARQAGVAPIPVSSGRTDRHRLHRGGDRQLNRALHVIAITRARIDPQTRAYLERKQAEGKTKREALRCLKRHLARHIHRLLSMPPINHDPRTRIQLNSAISVPCLT

SEQ ID NO: 419001 - protein, 354 aa, unidentified
MTSTKYIGMDVHKESISIAVMNAAGKTVMECVIETKANTILQCIDGLRGDLHVTFEEGTSAAWLYDLLKPHVAELIVCDPRKNASMREDNQNDKIDARRLAELLRIDHLSPVYHGEHGLRTLKELVRSYLTVTKDLVRVMTRIKAIYRSWAIPCAGKQVYAARHRAEWLAKINEPGVRRRAEFYYQQLDALRVLRQGVRRELLAESKKQKAWKRLCQIPAIGPIRAAVLLGILQTPHRFRAKRPLWKYSGLAIETCSSADHRSINGQLQRSKKNSVRGLNRNCNHDLKNLFKGAAVIASSKAGPFQEFYAALLAKGMRPEMARLTLARKIATIVLIVWKKGVRFDAQHLKPQTA

SEQ ID NO: 419002 - protein, 449 aa, unidentified
MSKSGKLIGLPIVNARAAGIDIGSRIQVASVPPELSDDPVRTFQSFTADIEQMANWLVSIGITTVAMESTGVYWIPVYEILEAHGLTVVLANARDCKAVPGRKSDVNDAQWLQRLHACGLLRASFQPAREIAALRAYMRIRDRHLEYASAHMQHMQKALTLMNLQLHHVISDISGVTGLKIIRAIVAGEQDPDILASMRDVRCRESLQTIRSALVGNYQPEHVFALSQALALFDAYQARIADCDKQIENSLQVLNADRPQLETPLPAPRTKTKQANAPKFDVRSMLYQLTGTDLTLIHGIGPSIALSLVAECGTDMSKWPTEKHFASWLCLSPGCKISGGKVLSARTRKSSSRLASQLRLAASNVGRTETALGAFYRRLAARIGKAKAVTATARKLAILFYRTMRFGMRYEDPGVDQYEQRYRERVVKQLQRRAAHFGFSLQPTEAGVS

SEQ ID NO: 419003 - protein, 300 aa, unidentified
MPDGIRWVGVDVHARESTFAVFDQATGEVTTRRVVGRPHELLPWLRAVERPARMVYEAGPTGYGLARRALAEGIELGVCAPGKTERPPADRVKTDKRDAIRLARLLAAGELTLVTIPSVEREQLRDLVRCREDIRLDLMRARNRIGKFLLRREIYWEGPGEAWSRKHRAWLTSVRFADRASQATLADYLHAHDVLIARRDQVEADLAAVALSVPCAPTLARLRCLRGIDTLTALGLCAEIGEWERFDHPDQLASYLGIVPSEHTTGQQRRLGAITKAGPRPRPAAAGRGGLPLPPQPGGR

SEQ ID NO: 419004 - protein, 317 aa, unidentified
MVSSEDTVIVGIDVSQDWLDIHIIPAGVKDHVANDEQGFQKLVQSLTSYAPKVIILEGTGGLERMAATYMAQAGLPVAIVNPRQVRDFARASGTLAKTDAIDAQIIARFGEAMKVEPRFIPDTLRSELKSLVARREQLIAMRKAELSRLSRAFDQSVRQSHNRIMKAIQSELDDIDRNISGLIETSPVWRVKDELLQSIKGVGQQMARMAIAALPELGKVNRRQIAALVGVAPFNNDSGRRTGKRRIRGGRPQVRRVLYMAALSAMRFNPEIKALHDRLAEKGKKNKVIIVACMRKLLIIMNATLKTKSDLIACENA

SEQ ID NO: 419005 - protein, 390 aa, unidentified
MDSKKYIGMDVHKESISIAVMNGAGKIVMECVIETKASMILQFIDGLRGDLQVTFEEGTSAAWLYDLLKPHVTKLLVCDPRKNASMKEGNKSDKIDARRLAELLRLNHLNPVYHGEHGLRSLKELVRSYLTITKDLGRVMTRVKAIYRSWAIPCSGKQVYAPRHRVEWLGKISEPGVRRRAEFYYQQLDALRTVRQQVRRDLLAEGKKHQAWKRLCQIPSIGPIRAAVLLGILQTPHRFRTKRQLWTYSGFGIETHSSADHRSVDGQLQRAKKQISIRGLNRNCNHDLKNLFKGAAIVASSKPGPLQEFYAALLTKGIRPEMARLTLARKIATIVLIVWEERSVLRRPTSETTNSLSVSDRVRSILGIFSGGGRRVLETLWFESESQLIC

SEQ ID NO: 419006 - protein, 397 aa, unidentified
MPTPTCGLDVASTSACVCVQSADGKVLHELNLPATRAGEDRLLALLPAGTAIFMESTGRYHLTWARRLAAAGFVVYVLNALLAKRLMGAANALRQNKTDRIDARELAALGRRHGPELGTYRFREDAARFGLRALCAVRVHQRRLLTDTLKSAAGLLGTMLPEMPGLKLAENRGLATLFLRIDSLVQLQRLRLATLQTYACGKAEALHAALRQPLSAATVFDALLPALQGQLRLIESLREQQLVLLADIRAAVIAAKRDDEVKLVECIPGYGEKTAATMVACVPEDLRSWGPKQKVARKLQAYFGCDPKLRESGLWKGRVRMSKRGVELARTALFQAATCAMLHDPDMKAVFERKKAEGKFYLICVSHVMRIQLRRLVAVLYDRKPFVRSSPNIAVVV

SEQ ID NO: 419007 - protein, 341 aa, unidentified
MSEVSIIGLDLAKNVFQAHGANASGAMIFRKKLRRDQVLKFLAAQPVCTVAMEACAGSHYWAREFAKLGHEVRLIAPSYVKPFVKRQKNDAADAEAICEAAQRPTMRFVAVKSDEQQAAAVVFRARDLLVRQRTQTINAVRGHLAEFGIVAAKGPFHVARLVAAIEDNHSNVPEIARPILRLLLEHLRLLDEKVALLDRELARRTREDDDARRLMTVPGIGPITAIALVALAPVAQAFKRGRDFAAWLGLTPLQHSTGGKQKLGATSRMGERTLRRLLILGASAAVRWAKRKGSTVDPWLARMLDRKPPMLVIVALANKMARIVWALLAKGGTYRSSAVAG

SEQ ID NO: 419008 - protein, 317 aa, unidentified
MAKVPPTYIGIDVSKARFDMASSPCRTMKSFLNDRSGTDELVKYLCAVKPVLIVLEASGGIERALVRALVAAELPVAVANPRQVRDFAKATGKLAKTDALDAQTLARFAEVVRPALRLLPNEMTLELRALVGRRRQIIEILTAEKNRLSRASRRIQTRIQAHIDWLESELERSNEDLDEAINQSPLWREQQDLLKSVPGVGYVISRTILAELPELGCLNRKQIAALVGVAPLNWDSGLMRGRRVIWGGRAHVRTALYMAAVTASRCNPVIRDFYKRLRAAGKPANVALVASIRKLLVILNAILKHHVRWRPVVNQLD

SEQ ID NO: 419009 - protein, 425 aa, unidentified
MQKDERIEFVIDKLIVGIDIAKHKHWARIIDCHGRDLRKPFRFENNKEGFDRLAAEIQLVQQKAGMTGVVVGMEPTGHYWKPLARWLQGLGYTVVMVNPMWVKRHKEDYDNSPSKSDRKDTGVVAGLVKDGKYMQVMLPTGVYADLRELIVVRRQQKQALNSVLNRLETVLDEYFPEFHTVFKGTLGLAAQCVLTECPFPSYITALNVKELTDKLKRASNNRVGQKRAQLLRDVAARSIGVTEGLQGARERLESTLAEIRFLKDRLRKTETAMAEKLYQTGLAESLLSIPGVGVATAAGFLGEIGDPHNYENWRQIRNLAGLNLKENSSGNRESRTEITKRGRPGLRSLIYQIAVTAVACNPQLRALYRYFLARDVNPLTKKQALIAVGLKLVRIMHALMMRGQRYDPALALGEVREFQLEKQAA

SEQ ID NO: 419010 - protein, 315 aa, unidentified
MTNLKKSKSKVNVGVDVGKCFLDVCLYEKDLYWQVENTPEGVKKLLGRLGRYQVDRLVMEATGRYQHLLVEKAFERDLPVCVVKPLAVRRYAQAIGRTAKTDRIDAQVIAEFSARLKPPVTMRKSKNLLVIRDLLSRRRQLVSMRTRELNRVKIMGKALETSCKRIIRVLDQEIARMEKRLQTVIEQEAQWSEKKAVLKSAPGIGDTMVYTLLADLPELGSMTNKQAAALVGVAPMNRDSGKMKGKRRIKGGRYGVRTTLYMATLSATLCNPVIKEFYQRLVAKGKHKKVALTACMRKFIVILNAMLRDNCEWQY

SEQ ID NO: 419011 - protein, 415 aa, unidentified
MALKIVYKVCCGIDVHKTFAVACIASTNKQGVTTYNSHRFSTYTKGLKELLQWLLESNCKDVCMESTGKYWIPVYNVLEKDCSIVLAHPKYVKAIRGKKTDKKDAKWIADLFKHDLVAGSFMPPADIRQLRDLMRYRYKLTCFMSSEKNRLQNCLTVSNIQLGNVVSDTFGKSSTRILDKILENPLDTSFDIEPLIHGSMKNKIPELELAVDGYITPEQAGKLKIIKKHLEDLESRKAELEELILALASPYQQELDLILTAPSFKNPFSAITVISEIGVNMEAFPSAKHLCSWAGLTPTNNESAGKKKSVRVSKAGCYIKPLLVQCANSVVKSEKHPEIRNRYLRLRKRRGHKKAIIAIARMLLTALYNMLKKNEPYNAELYRNSDVIPANREITVEQAIKLAKLQGYRIKSATK

SEQ ID NO: 419012 - protein, 338 aa, unidentified
MSSLALGLDIAKNVFQVHAIDGEDKPRFQRKLRRGEVLRFFARLEPCLIGIEACHGSHYWGRELSKLGHQVRLIPTQYVKPYLLGGKNDANDAAAICAALKRADLHNVSIKSAEQQSVQSLHRMRERLNHERTAKSNQIRSMFAEEGFVFATSIGRLRASVASLIGNPDASVTPILRRLGAMYLEQIATLERWLAELNTQLQEIFSQREECQLLGSVPGIGPLVATALVGTVADPRQFKNGRHFAAWIGLTPKQRSSGGKVRLAGITKHGDTYLRTMLVQGARAVMRFVARRTDRQALWLQRLIQRRHKNVAVIALANKIARIAWAVLTRRVAYSPIV

SEQ ID NO: 419013 - protein, 343 aa, unidentified
MQTVSTIGLDIAKSVFQVHGVDANGLVVVRRQLKRRYVLAFFEKLAPCLVGIEACASSHYWSRQLQALGHNVRLMPPAYVKPYVKRQKNDMADAEAICEAVTRANMRFVPTKTPEQQSGLVLHRTRHLFIRQQTSLINAIRGHLAEFGVTAPVGRKGIEELLRVIADPSDKRVPDVVRACLAALGSQLLSLKKQILDFDRMIMAWHRSNQTSQRLNCIPGVGPLLATALVASVADPKVFRSGRNFSAWIGLVPKQHSSGGRARLGSISKQGDRYLRGLFVAGALAVIRYAKLHGTKYRPWVAALLARRPTKVAAIALANKLARMAWAMMARGERYNYPTALRV

SEQ ID NO: 419014 - protein, 365 aa, unidentified
MWEAPVKVQRTSIGLDVHARSVVGCGLDGDTGEVFQRRLCPDHQEILEWIQGLPAPVAVTYEAGPTGFGLARALICAGVDCRVAAPSKLQRPSGDRVKTDARDAAHLARLLHLGQIVEVAIPSPAQEAARDLVRAREDCRGDLMGARHRISKLLLRQGIVYCGGQAWTGKHEMWLRAQQFDTAGLQLAYDAAFDAMVCCVHRRDRLDEAIVGLAADSEFTPVVRRLGCLRGVSTLTAFGLAVEIGDWSRLTGRSIGAYLGLVPTEYSSGNTRAQGGLTKTGNTHARRLLVEAAWHHRAPYRPSRDLRRRWEAACPAARARGHAANHRLHTRWVGFDTRKKRPVVANAAIARELAGWCWSLAVLDG

SEQ ID NO: 419015 - protein, 342 aa, unidentified
MDHFAGLDVSVKDTSVCIVDGTGKIVREVKVASEPAALLPVLTSPTYHFKRIGLEAGPLSQWLYSALAEAGLPAICVETRHMRAMLKVQINKTDRNDARGLAQMMRAGLYRPVHVKTLRSQKLRMLLTHRKLLQSKAIAIENDLRGTLRNFGLKVGMVGKLKFEPRIKELVENLPDLAVLVEPLLVVRRVLREQLVILHRRLLAIVRDDEVCRRLMTTPGVGPVVALTYRATVDVPARFRKSKSVGAVFGLTCAKYQSGESERSGRISRCGDEMMRVMLYEAAQAMLHSKRWSWLKAWGMKIARHRGMKKAIVALARRLAVIMHRIWVDGTEFQWTREAAVA

SEQ ID NO: 419016 - protein, 389 aa, unidentified
MKNRYGSVACGGMDVHYKSSHVTLRDADGRVVAREQLDHTNRAGVREQLTRWPKGIPIVLEASFGWGWLSDLMEEVGLNPQLSNCYKVDGMRKARGWVKTNKKDADLLSLLPAETPSEPEPWWKVWRAPAEVRDRREWMRYRADLVALATGTKNRIHAVFHRHGIFFEEATDLFGGQGRRFLESLSQDGRHAGGVLPEGAREVLHGLVDLHTYLRQALAQIAQTLRGQLERDDLTRRLDGIPGIGLILSHTLRSEIGDIGRFRNDRKLASYACLAPRSDDTGEPHPGRPPLGRHLGDRGNRTLKWAFIEAAHGAVKRGGKWRAMWDRATDGGKTNRGRGYIKVARELVKVVYIVWSRNVAYGEAPPRPPGSGRPRRRPRKNSRPGTGQP

SEQ ID NO: 419017 - protein, 262 aa, unidentified
MDKYNEIYGVDISKDVFDVQNSKGDYFQLTNDEKGFKNFVKKLSEESLIVMEATGYYHYCLAQYLYEQGYSVSVVNPLSVKRFIQMKLSKIKTDKSDAKAICDYAIFNEVHLYTAKDKNQAECLQLIRLIDIYIKQSTALKNKLNGEKTLGIPSKVVYRSLNRSLKSAEKEIKLLDERLIELVKEHQQSQLTLLKSIPGMGVKTALMLIVMTDGFNRFENANQLCSYTGITPTIRQSGSSVRGRSRISKMGNKKLRNLLFFM

SEQ ID NO: 419018 - protein, 349 aa, unidentified
MTEQRHSYAGECVYVGVDVHKETYAVTCVCHKQIVKTATVQAEPTGLAASLLRWFPGATLYSAYEAGFSAFVLHRALTTAGITNIVVNPASIAVAANDKVKTDRRDSKRLAVDLADGRLRGIYVPTEEEELARLLPRTRAQLVEHRATLARQIKAKLHQFGLITPSSRRLLSHRYLREIESWMLPPELRASLKMLAEQWRFVTRQLIEMRCLLRDQAKAQEDIEKVYRSVPGIGEVVARTLATELGDMTRFANERALFSYTGLTPSEYSSGASVRRGHISRQGSSRVRHLLVETAWRALPRDGVLKEIFDRIAATRGKKRAIVAIARRLTGRMRACFRQGTTYAVGTYA

SEQ ID NO: 419019 - protein, 402 aa, unidentified
MPMLSIGIDVSKGKSTVCGMKPGGEIVYAPFEVQHTREGMSELVSLLRSSGEEVRAVLESTGSYHCPVVAALLENGIFVSVVNSLRMKRFCSQSIRKVKTDRIDAMQIALYGLAYWQELQPTRLPEDTYRELQLLARQYYQMTSLLIKAKVDFNAICDQVLPGMQELMSDHAGRHKLSDFVLRYCHTTHILEMGETRFRKDYCKWAEKKGYRNCERMAALIFATAQNGIPVLPNAPSTQIVITEAIRVLHTVEASRDAILTQMQALAKTLPEYSLVREMPCIGDTLAPRLIAEIGDVRRFHSKRALIAYAGIDAPPYQSGKFCANNRHISKRGNRYLRKTGYEVMQSYVMHKPANDPIFTFIEKKRGEGKSGKLAMVAGLNKFLRVYYGKVTELYRSLPAIE

SEQ ID NO: 419020 - protein, 367 aa, unidentified
MKDSITVVGLDVHRNSIQIVTADTDGAMEVRHFGRIGGTMDALDRAVRKLVSRGSTLRFVYEAGPCGYEIYRHLTGKGFSCKVVAPSKTPKKSGDRIKNDRRDAETLARLERAGELTAIYVPREEDEAMRDLTRAREDAVKALKTARHQLNAFLLRYGQRYPGKASWTPSHLRWLSDIALPHPSQQIVLQEYINTVTVDTERTTRLTDQIAKLLPEWRMFPVVKALQALRGVAPIVAATTIAEIGSMSRFETPRQLMAYLGLVPSEDSSGESTHRGSITKTGNGHVRRALIEAAHAYGFPARVSRHLLKRQEGLPQPVLAIAWKAQVRLCGKFRRLMARGKLKTKIVTAIARELCGFMWAIAREVEV

SEQ ID NO: 419021 - protein, 411 aa, unidentified
MDVYCGIDWAEDHHDIAVVDRDGKLLARRRISDDAGGLATLLALLAEHGDTAGDPVPVAIETPRGLLVACLRATGRAVYPVNPMAVARYRDRHSVSGKKSDHGDAVVLANVLRTDRGMHRPLPADSELAQAIAVLARAQQDAVWDRTAAHNKLRSCLREYFPGFLAAFADARGGITRPEARAILAAAPTPAAAAVLTVAQLRSLLAKAGRSRGIDTEAARLRDAFRIQQMRQLPLVEQAMGQQALALLRQLDAACASADDLEQAAVASFNQHPDAGIITSFPGLGPLTGARVLAEIGDDRSRFQDAKGLKAYAGAAPITRASGKTKSVTRRKVKNNRLSAVGYTWAFSALTASPGARAHYDRRRDAGDKHAGGLRNLFSRLLGCLHHCLTTGQHYDEATAFPAPAKQPAAA

SEQ ID NO: 419022 - protein, 414 aa, unidentified
MLKIVYPVCCGMDVHKSFIYACIASTNEQGVTTYKSKRFSTFTNDLRMCAIWLAENNCKDVCMESTGKYWIPVYNILEPTCKIVLAHPKYVKAIKGKKTDKKDAKWIADIFKHDLVSGNFIPPADIRQLQDLVRYHYKLTNFKVGEKNRAQNCLTVSNIKLDDVFSDVFGKASANIITWLLENPNEKLRDVSSFRTKGMKATDEEVLAAVDGEICAEQAEKLLIIRSHLDSIELCRLNLESLILTTAEKYLPQINLVSTVPGIQTFAAVSIISEIGVDMSVFATSKHLCSWAGLTPQNNESAGKKKTTRISRAGAYIKPLLVQCALCAICKKSNPEIRSRYLSIKKRRGHKKAIIAIARMLLTAIYNILKKNEPYNSELYSRCNNTPPEHRAVSVEEAIFILQRQGYIVTPNAP

SEQ ID NO: 419023 - protein, 345 aa, unidentified
MAQVTTLGVDIAKNGVCVHGIDTQEHVIVQKRLARQKVLPFMAQLPPCLIGMEASGGAHYWAREFTKLGHTVKWMSPQFVKPYVQSQKNDPNDAAGICEAVARPRMRGVPVKSVAQQDMQALHRIRERQIKARTALINQIRGLLTEYGIVIPQRASQVRHKLPFILEDADNGLTATARAWLSALAEELKALDQRIATTDTQIEEVFQSDDACQRLAQLAGIGPLTATALVAAVGDATAFKNGRQFAAWLGLVPRQHSTGGKTVLLGMTKGGNCYLRTLLIHGARAVLRVVDRKTDPWSRWLQGVKARRGMNCASGAQANKTARVAWALLARGERYRPPASPRLAA

SEQ ID NO: 419024 - protein, 400 aa, unidentified
MISVGIDVSKGKSTVCILKPYGEIVSKPFNITHTQKDLSELSSMLFRLNDEVKIVMEATGIYHLPVLTYLQEKGFFVSVINPYLMKSYRNESLRKAKTDKIDSRIIANYGIDHWFKMKEFQTSGEIYKELKLLGQQYRHYMKLHLLSLAELTHLLDLTMPGIKNLLASWNETNRKDKRSDFVERFWHYDVITSMSEQEFTEEYILWAKEKKYVPSQEKAKVIYTLAQESIPTLPSETSSVKILVTEAVRVLKEVDATLGLILSRMQEIAKTLPEYSVVREMGGVGNTLAPKLIAEIGDVRRFRNGKALVAFAGIDPPPYESGQFVGCNRKISKRGSASLRKVGYETMRSLKMRSRPEDPVYRYVVKKESEGKSKKSAKIAGLNKFLRIYYARVTELYKNI

SEQ ID NO: 419025 - protein, 428 aa, unidentified
MNNKQNQKIMQITSETIVVGVDIGSEENYARAFDYRGIELSKKVFRFNNDDNGFTNFSNWMTYLMNENKKNAIMVGMEPTGHYWLNVGHYLKDNQVKLVLVNPFHVKRSKEFDDNSPTKNDIKDPKTIAMLVNEGRYMEPYIPEGIYNELRVAAEIKDQITKQLVTVKNRVARWISIYFPEFNKVFADWEGKAALMTLKRFPMPAEIVKLTGEKIVIYWREEVARAVGIKKANKLLEAAKKSVGVKEGLELAKMELELLLAQYDLYKKQLDKTLGKIDEMTVNIPGMNEILDIKGIGLTTVVGFISEVGDIERFEHPRQIQKLAGLNIKENSSGKHKGQTTISKRGRRKLRSILFQAILPVVASNKEFQELHKYYTTRNVNPLKKKQSLILLCCKLIRVFYAILKKKVKYDPQKMMNDINRPLNDVAC

SEQ ID NO: 419026 - protein, 370 aa, unidentified
MQFIGIDLHTNKFTCCYRDENSPADGKDGKKTETFYFDALNLKWFIETLTSQTYVLIEATITTFAFARIIRPHVKEVIVANTYELKQISLARKNTDKIDADILCRIIKMQVLSGEKAISPVTIPPLEIQELRGLFTSYRLYKKQTTQTKNRIHSLLKEKLYGFTQEEIFDKKSREKILGLEKGSPMAFQISQLFEILEFLECQVEKLQDKIKELAEPFMREIDILTSMKGVSVFIAIAIIADIIKVDRFKNSKAFTSYLRSAPRVSNSNTSVRIGRTNKKGRKLSSTLLTQSLNHVLDASQKLAKWYNEKTKHKKAGLVRGGLRRRIMAEMYQMLKKGEYHYARDDKNHWTKMSQYRIFLKKRKILLEIA

SEQ ID NO: 419027 - protein, 409 aa, unidentified
MDIMYERCCGLDVHKQTVVACVLEPGSGRQPHKEIRTFGTVTDDLLELLDWLVAKQVTHVAMESTGVYWHAVWNLLEGQLELLLVNARHIKQVPGRKTDVRDCEWIANLLRHGLLRASFVPVRPQRELRELTRYRTSLIRERAAEINRIQKTLEGANIKLGDVASDILGVSARRILEALIGGASDPAQLADLAIDKLRNKLPQLERALKGQFGAHHRFLLAQQFAHLSGLDDLIEQLSGEIADRVQPVQQVVERIDGIPGFGRRTAEIVVAEVGIDLSRFPSVKHLTSWVGLCPGNNESAGKRRTGKTRTGNVWLRSALIEAAHAASRTKNTYLAAQYHRIAARRGKKKAIVALAHSLLTIIYYLVTRDRDFEDLGPEYLDEHDRERTERRLIRRLEERGYTVTRAPAA

SEQ ID NO: 419028 - protein, 440 aa, unidentified
MSNRTEKQNVPQMKASAKDPVLWVGIDWADQKHCVATRRPDGSDSKLHWVDQKPQKLDEFFLELQKQHLTGHIGVVLEQSRGALLYALLKYSFLELYPINPRCLADFRKAMAASGAKGDPSDADLLCELGCKHGERLRALELEDEATRQLELLNEHRRGIVDEQTGLSNQLGSALKCYYPLILELFADHLVAPIALDFLERWPNLAALQKAKPGVLRAFFHKHNGRSEEKIQERIKAIGEAKPLTNDAVVIACYQLQVQTLIERLRAVQAGIAQYDERIKVVFASHAKARVFSSFPAAGPVLAPRLAAAFGTSEANFPAPDAMLCWSGVAPIQIQSGKSKVVHCRWARPKFLHQTFVEYARTSVLFCPWAREFFKSRTEKGWGKFRIYRALAFKWIRIMWRCWKDNVEYDEAKYLAGLQKRGVQLYASLYAAPDAKKPNE

SEQ ID NO: 419029 - protein, 335 aa, unidentified
MVCIGLDVHAQNFTACVLDGHGEVLLEGSFAVSAQKLRSVVGAIAGPKQVVFEETTVAAWVYRVLEGHADRIVVADPRQNAWISKDEKMDDDRAAHRLAQLLQNKLVTSVYHPDPAGQSLRELVHGYHDMGRESTRAKNKLKHKFRQHGIPCTGATVFNPDKRDEWLDKFDDDNARFLAQQLMTSVDYFDSQRQALRQRIARCARDNETVSRLMRVPGIGLIRAMTFYAIIDTPHRFADNRKLWSYCGIGLAQRTSDKGRGPVHLTRYGNRVLKNLANGAAISAIQAKNNQFVRQHERLIAKGASKSKARLTVARAIISTMWAMWRKGEPYIPRD

SEQ ID NO: 419030 - protein, 341 aa, unidentified
MKHEMHVLGIDIAKRVFHAVGMDDRGHIVYRKRLARHDLMPCIAKLPPVRIGIEACGGAHYWARRFRACGHEVKLMAPQFVKPYVKSNKNDSRDAEAIAEAVTRPTMRFVPIKDVAQQDIQALHRVRERLIGERTALVNEVHGLMQEYGIVLPKGVAKFRQAVVGKLEAEKDKLTPLSQELFWKLVEEFAALEKQLAYYQEKLDTLAQTHPECQRLMTIPGIGPLTATALVAAVSDASAFKNGRQFAAWLGLVPRQHTTGGKERLLGISKRGDTYLRKLLVHGARTTIRWVGHKTDRRSQWIRHLVERRGKNRTAVAVANKNARIVWALLTSHQDYQPVTS

SEQ ID NO: 419031 - protein, 369 aa, unidentified
MKYIGMDVHIRNSYLHITDEQGQVFGRGRCGNTFLELREFLEDLEGESVRVCLESTTNSRAVRQLVLRCGQDVGADVTVDVLHARKLRIIAESVTKCDRLDAQVINELARSNLKLPVCYMPDDEEFALREHLRARSDLVGIRTMLKNRIHAVLHRRGILTPAKLDLFARAGRLFLDQADLDEAGRTILTRYLSEMDHIDATIDESTQSLKELARRPRWSKPAALLQTVPGIGLITSLTILAELGDLRRFHRRAAVANYAGLVPVIRLSDEAGYSGGITRRGSNHLRQVLAEAAWVAVGRVPSYAALFDRVSRRRGRQRAIIGVARQMLEDAWTILRKDEAFRYVDPPETEEPAGESRCDSKEVASSVAG

SEQ ID NO: 419032 - protein, 351 aa, unidentified
MEQITEKCLYVGIDVHKRQWSVSIFTSTIHHKTFSQPPEPAALQSYIDKFFKGRRVICAYEACKFGFWIYRELTSFGYECLVVNPADIPTTNKESSEKTDPVDSRKIARALQGGMLRGIYVPDECTLGHRQLFRYRKKLWADLVRVKNRIKDKLLFNGIAIPKEFDNPYWSKAFLKWLATVEFKSLHTRTTLDHLLEQYEMVYRHFLKVSIEVRALHKLPRYKEDAKRLRQIPGIGPLTSVLLLIEIEDINRFKNFKHFNGYLGLKPMVHSSGDKDRKGYMTYRSNHALRSSLVECAWTAVQRDPVMLNCYEELITRHTKKRAIVKIARKLASRIYRVLKEKEDYEVGVVQ

SEQ ID NO: 419033 - protein, 393 aa, unidentified
MIYAGVDIAKTDHVIGAVDERGAEMCRPMPFKNTEAGLERAVAWLEGLAGPPSDVVVGTEATGRCWMACYSFLVARGCSVAVINPMQVKAVRKLKGLDKVKNDRIDARLIAEALRIGRYDETRLATDEAASLRSLSRYLQSLRGMAAELKTQCVCLMDAHFPEHAGMFSDMFGAGSRAVLSRSPLPFEPARRRADSLARDIAEASRRGGKSAGYAAKIKAAARSSIGVRLGQEAASFQVKSLIRQIEFADSECAKVEARVRALLDEVEPLALTIPGAPYATGAQIVSEIGDVSRFRNAPALVSYAGLNSSVSQSGQFDSGGPITKHGSPYLRRALWLAANRARQYDPGLRAFYDKKRAEGKPHRVAVTAVARKLCRIVFAVMRDQVPYGPGRE

SEQ ID NO: 419034 - protein, 355 aa, unidentified
MKRWHFIGADTHCPHCDVAAVNAAGQVVQRQHCETTIPALLQVIDQVPRPRALVIEEGPLAGWLWRSLHGAVDRMVVSEPRRNRLIYDEGDKDDPIDGEKLAQLLRGGYVKEVHQVGSLERAVFKQQVALYHFRVRQRVREGLRLSSLFRQHGVMIRENAYVACADRPALLARLPDNGVLREAVQLLWQAYDGLVAQEDSWRKRLVRLAQQEEVVERFTALPGISWIRAATLYAYLDTPGRFRSKSALWKYLGIGLQRSRSGQGPERLGVPVLMHRLLKCTILGAAQSAVAQGDNPFADLYERWCRQGLAARLARRNVARAQAATLWGMWKNGSAYRPDWVGVPAAANPATKVSR

SEQ ID NO: 419035 - protein, 411 aa, unidentified
MEQIHDRVAGLDVHRDEVAVCVRRPGPRGGVHTDKARFSTTAGGLAAMASWLAECEVTLAAMEATGVYWKPVYYALEGRFELWLCNAHHVKNVPGRKTDMSDAEWLADVAAHGMVRPSFVPPPAIRELRELTRYRKTQIDVRAAEIARLEKVLQDAGIKLTSVASKVLTQSGRAIIEALIAGQRDPRALADLAKGKLRPKIPQLTAALAGHFGAHHAIVAACILGHLDFLDAAIGGLDEQVAARVADGYQPAARLLADVPGLERRSIEVIIAETGADMSRFPSPGHLASWAGLCPGNHESAGKRRRVATTPGNQWLRRTMIESARAAARTKGSYFGAQYRQIARRRGPNKAAVAVAHSLLDVIWHILTTGEVFTDLGEDYFTSRQDKEHQARRLIGQLEKLGFTVQLTEAG

SEQ ID NO: 419036 - protein, 351 aa, unidentified
MTIGQRSTPSSTDPPVRREVVLGVDTHGEVHVAAVVSPLGKILGTESFPATMAGYRRLLVWARKRGTVRRAGVEGTGTFGAGLSRYLLAQQVEVYEVNRLDRSARRLLGKSDPLDAQAAARAVLSGRARARAKSGDGPVHSARMFKLAKDSAVKARTQAINQLKAVLVIADPALRERLSSLGNRELFRTCARLGPGDGEDGEGVVAQATHMTLRMLAERIEQLTGQINELNQRLTQLVEHHAPQLLITMGDNPERLNTEASFAALCGVSPIEYSSGRRSTRRLNYGGDRQANAALHRIVFTRLRHDPRTQAYYERRTQEGKTRREIIRCLKRYAAREVFNLVRSVSCNPAL

SEQ ID NO: 419037 - protein, 338 aa, unidentified
MKLYGGIDLHSNNHVIVLIDEHDQVVYQKRLPNSLDTTLSALKPFQKGIVSLAVESTYNWYWLVDGLMDHQYPVQLVNTLAVKQYDGLKHQNDHTDAFHLAHLMRLGILPCGYIYPKADRGLRDLLRKRMQLVQQRTLNLLSLKSNLTRQLALTVKAHTIKQWMSQGLPQWNLDPTIVFALQSNLSVMKTVDQYIEAIEHKVKLALKSSSSLTLLQSVNGIGDVLGMMILLETGDIARFDKVGRFASYCRCVNATRESNGKSKGQGNRKNGNKFLAWAFVQAAHSCVRYCPEAKRYYQKKKRKTNTPVATKAVAHKLARACFYILRDKTTFDPSRCFA

SEQ ID NO: 419038 - protein, 357 aa, unidentified
MAELNFTGIVGGVDTHKDLHVAAVVDQNNKVMGTQFFSTTRQGYRQMLAWMTSFGALKRIGVECTGIYGSGLLHYLQNAGLEVLEVIAPDRMERRKRGKSDTIDAECAAHAAFSGIRTVTPKTRNGMIESLRVLKTCRKTAISARRVALQIIHSNILSAPDELREQFRNMTRMQLIRTLGSWRPDASEYRNVTNVYRISLKSLARRYPELHDEIADLDVMIAAIVDELAPELIKRNTIGYESASQLLITAGDNPQRLRSESGFAALCSVSPVPVPSGKTNRYRLNRGGDRAANSALHIIAIGRLRTDDKTKEYVARRVAEGHTKLEAIRCLKRYISREVYTLLRNQNRQINSIPITA

SEQ ID NO: 419039 - protein, 342 aa, unidentified
MKSTTIAVDVAKEVLEVAVSVRPGQVSEQRRLSRAAFVKFCTNQPPATVLLEACGSAHYWGRQLQSLGHQVVLLPPHATRPYVFRNKTDRTDTRGLLEAYRNEDIHSVPVKSVSQQALTALHRLRSTWLATRTARINTVRGLLREFGCTIPLGAHHVLTRASALLADADSDVPEALRPALAAACIEIRDIEDRIRVVESQLQVLADQTPVVARLCSIPGVGLITATALVAFVEDIQRFPSGRHFASYLGLTPRERSSGLIRRLGAISKRGDVYLRMLLIHGARAVLWAAKKRRTPDHLRAWALHLQTLRGHNKAAIALANKLARIVWAVWKHDVVFREVPAA

SEQ ID NO: 419040 - protein, 344 aa, unidentified
MDKNWFIGIDVSKKTLDASIFVAGEVVNKFPHVQMRNDRQGFKDLLRWAKEQGVKTKDTLFGLEFTGYYSDALEQFLTKKQICYTMLPTTVVKHYQRGPHDKNDKIDSAKIADYLFRFNGTECIKLRVLPSKAMQELKALKSERKFLVQQRVACENRQKVAKFKGEEKHLQKLIDLYKTEIEQVEQQIADVIVLDEEIYTTYRLLNSIPGIGFVNAVNTIANTQNFTAFETARQYAKYVGVAPSEHSSGTSVRWRRRPSPHADLQAKADLSMAALHAIELSAEIRQLYERKLGNRTKDKDMQKKALNAVKFKLIREMFSVVKQAKNFELRGLDNAQTEAHSTEE

SEQ ID NO: 419041 - protein, 350 aa, unidentified
MMIIGCDYHPSFQQIAFVDTESGELGERRLVHREEAEQFYGELQQQHQGVRVGMEASGHSRWFERLLRDLQFELWVGDAAEIRTKRVRKQKTDRQDAQLLLRLMVEDRFPRIWVPDAANRDLRQLLWHRHRLVQMPTRVMNQLHVIALNEGLRRKKALWRTAGRKELELIALAPWASRRRQDLLDLLDQLTPKIQELTHALEAVVEKRPVTRRLMTHPGVGPLTGLAFELVIGTPDRFHCGKQIASYVGLVPSEESSGNRRRLGHISKQGSVLLRFLLVEAAQVTVRSQAQWRSKFFHLAMRRGRKIAKVAMARKLAVHLYWMWRQGWDYEQFQHFGSHAGEPGNPDGVQ

SEQ ID NO: 419042 - protein, 341 aa, unidentified
MQITTIGLDIAKNVFQVHGIDAAEKVVVRKQLRRSQVLKFFEALPPCLVGMEACATAHYWARELRKLGHQVRLMPAKDVKAYVKRNKNDAADAEAICEAVRRPTMRFVEVKSAAQQGRLMQHRTRDLLLRQRTQAINALRAHMAELGIVAAQGREGLKKLLTIIADEKDERLPVDARASLIVLAAQLQALQTMIGSIEKRIIAQHRASEESKRVATVPGIGTLGASAITATVTDPTAFRSGRDFAAWIGLVPRRDSTGGKQKLGPISKQGDRYLRRILVVGAHSVLRRAKQSPQKYPWLTELLARRPFKVVAIALANKMARVAWALLVRGGTYRVPALAAA

SEQ ID NO: 419043 - protein, 368 aa, unidentified
MDSEYYTTIGMDVSDRTTKVCVMAKERGTRRILEETTIPTTRDGLRAYLSGKCTGWPVVFETGTHCRWMKREVESLGMKAIVANPSKLRMVTGSNTKNDRNDARELARFALADVGLLHPVRLRSERCQQMLRLMKARDLLVKVRTMHVNELRGFAKSMGFRLPSCPANKAHRQGKAGWPEDFESLAWPLMDMLETIDLKIRAYESQIKSLAESGELKDKIGRVREVYGIGLLSGAALVASIDADPGRFRNARDAGAYFGLVPKQRQSGEMDVQCHITRAGSGFVRRLMIEAAQIAMRETARDTDVKLKGHRICARGGKIAKKRALVAVARCLVVTAVALLKKPDAEYVPLSERARREFEAMRSAEMVA

SEQ ID NO: 419044 - protein, 428 aa, unidentified
MDEVNRNRLEEFRQLRKEIRHSEEYLIVGIDIAKDRHYAFFGTATGKTLLRRLVFSNDHEGFRKLLDQAEALRVQHGLKKVVYGMEPTANYHKPLGEYLITLGRTVVLVSGVTVKRNRESLDGRWDKHDTKDAANVADLISQGKCLYYEYPSAELRGLRGLLSLKRRLKRQEHGYKVRIRNHLIAQYFPEMDRDYERLGATGLSILRWCFPASQITELDVEPFIQRVTSRRIRMDQRRRLEAIWETAGKSIGCDAVPGLDHEAKVMVEGLRQIREAIKETEDKIQQLCEQFPEYHCVLTIPGFGPDVSAKVLGAIGDPDRFQNGKQVLKMGGLDLSADRSGNDSDKAIPEISKRGKADLRYALYQAALIASHKNRDVMIYYTNKIRGREREKGIHIKMRVKLAAKLLVIAWTLMKKKEKFDPTYLNIG

SEQ ID NO: 419045 - protein, 386 aa, unidentified
MRGWLVLGNPQKGKVMDKITRIGVDLAKNIIQVHGVDSMERVVVRKAISRQKFLEWFANLEPCLVAMEACSAAHYWGRKLRALGHEVRLIAPQFAAPYRKGGKHVKNDRLDAEAICEAAGRPHMRFVAVKTADQQNVLVLHRMRDGFVEERTALVNRLRGELVEFGVFLPQGIDAFRAHFVEALEDGATELNGVARTALLRGWEHLQALDQQIAWCDAQVATHVKHDSNAQRVMAVIGIGPLTASATVATVGDARLFKNGRQFAAWVGTVPKQKSSGGKTRLGHITKQGNTYLRTLLFQGARSAVTSAHRRTDRLSRWIVQLQARVGWYRTLVAVANKHARILWAILAKGERFDPSYVSTPSTPGPATVGQQHEQVNSQRHPSVTS

SEQ ID NO: 419046 - protein, 366 aa, unidentified
MKKISTVATNRNEIFKQAKLTIGLDLGDRTSHYCILDEAGNVILEDSLPTTPKGIQRVFSKIPRCRIALETGTHSPWVSRQLKQMGHEVIVAHARNVRLIGESSRKDDQFDARTLARLARIDPGLLSPVRHRSAEAQIHLTVIRARAALVSTRTALVNAARGLTKSYGQRLNKCGTEQMNRDSSKGLSQELREALDPLLREIESLNERIAEYNGRIEQIAKEVHPEVARLKQVKGVGTLIALTYVLTLDDPHRFRRSRDAGCFLGLRPGRRNSGQSEPQLHISKEGDRYLRTLMVQGAHYILGPFGQDSDLRRWGLKLAERGGRNAKKRAVVAVARKLAVLLHKLWVSGEVYEPLRNNHKVQSAVA

SEQ ID NO: 419047 - protein, 340 aa, unidentified
METVAVVGVDLAKSVFQMHGVDESGAVVLRRRVSRGQFVKLFTKLPPCLVGMEACSSSHHWARQLMALGHEVKLMPAQYVKPYLKRGKNDAADAEAICEAVTRPTMRFVGVKTPEQQAVMMLHRVRKILTRQRTQLTNALRAHLAEFGITAPVGRIGLDRLLAVVADPNDDRLPAQARESLAVLASQLEMVKEQILDNDRRIMADARKSEAGRRLMKIPGIGPLLASAILASVADPAMFSNGRSLSAWIGLTPRQNSSGGKERLGSITKAGNTYLRELLVVGAMAVVRHAQRSSAKRPWLGQLLERKKPKVAAVALANKNARIIWAMMTRGESYREMQAA

SEQ ID NO: 419048 - protein, 371 aa, unidentified
MVWTAPDGINCARLRSVADLRHRRPSVEQIIRIGMDTSKHVFQLHGVNAAEVPILRKKLRRKEMVAFFEKLAPTVIAIEACGASHHWARLRQSFGHTVKLIPAQLVKPYVKRGKNDAADAEALCEAMSRPTMRFVPVKTSDQQAALMLVGVRDRLIRNRTQLANTIRGHAAEFGLTAAKGMAHLVPRLDRIQADESLPALARELFALQAKEYLQMQAQIKEIDGKLTAWHRADECSQRLAKIPGVGPIGAVLLRMKTPDPELFRSGRQFAAWIGLTPQDHSTAGKTRLGVITRAGDEGLRSVLVVGATAVIKQAQRSGKASPWLAALLKRKSPKLVAVALANKMARIAWKMMVTGETYMANSAPAVVANVA

SEQ ID NO: 419049 - protein, 341 aa, unidentified
MQITTIGLDIAKNVFQVHGIDATEKVVVRKQFRRGQLVKFFEALAPCLIGMEACATAHYWARELTKLGHQVRLMPAKDVKAYVKRNKNDSADAEAICEAVRRPTMRFVAVKSAEQQGRLMQHRVRDLLMRQRTQLINALRAHLAELGIAAAQGREGIKELLAIVAQDGDSRLPVDAHSSLIVLAAQLQAVQTMIGSIEKRVVGQHRSNEESKRLESIPGIGVIGATAIAAVVPDPKVFRSGRDFAAWIGLAPREDSTGGKQKLGPISKQGDRYLRRILVVGACSVLRRARQQPEKYPWLIQLLARRPFKVVAVALANKMARVAWALLAKGGTYRAPRLTAA

SEQ ID NO: 419050 - protein, 413 aa, unidentified
MDKIYDICCGIDVHKKLIVACLNHKRKKELREFGATTRELMELAEWLQKNECEIVAMESTGSYWKPLYNIMESYGLHAIVVNPAHMKAVPGRKTDVKDAEWIAELLQHGLLQPSYIPSKDQRELRELVQYRKSLVGERTRELNRLQKMLEGANIKLSGTVTNINGKSARKILEYILSGNEIDEKKYDDMYEEKLIAHNLKASKEQILDDLKGFMSPLQRRMLKELLQHLDELNVHIENLNDEIDNFMKPEEKQASQVIQDVTGIGNTSAQTIIAVIGTDMERFPSDRHISSWAGLCPGDNVSAKKRKSGKIRKGNALLKSTLVLCAHAAVRHKSSYFHAQFKRISTHRGKKRAYVAVAHSILIAIYHILKDGVKYQDLGAEYYNQFNAERKIHAYLKKLKALGWEPPKEAVPA

SEQ ID NO: 419051 - protein, 349 aa, unidentified
MILVGCDLHARDQQVAVLDTATGEIQEQRLTHDGPSVEQFYAALPAPVTVGIESTGYALWFHALLHRLGHEVIVGDAAKIRAMVVRKTKTDRRDAAHLLDLLRHDRFPTVWLPDPAVRDQRTLVAHRMRLVRMRTMVKNGVHAIALNYRLALGPSLFTRAGVAQLQALSLPPHTSCRRSESLELLRWLDTHIKGLDDQIEEAAHAHPEAQRLMTHPGVGPLSALATVLVLGSVIRFPTSKHVVSYVGLAPAIESSAGKHRLGRITKQGNALLRYVLGQAGQAAIKRDPDLRRLYYAVLHRRGRSRAKIAVARKLLVRLYVMLRDQIDYQTFLDRAPAAARRKELMPTTP

SEQ ID NO: 419052 - protein, 367 aa, unidentified
MKKVSTAAVKQSRNISQQKLTVGLDLGDRNSWYCVLDEAGQIQLEQRVGTTAKALQEVFGAMPRSRIALEIGTHSPWISRLLSELGHEVIVANARKVRLIGESRKKDDRLDAQTLARLARIDPKLLYPVKHRSAQAQADLMMIRGRAGLVRARTGLVNAARGLAKSYGERLRGCNVRNMNPEKAEGLSPELQRALEPLLSAIEELSARIHEYNERIEALAQESYPQVALLKQVKGVGTLIALTYMLTLEDPHRFRKSRDVGGYLGLQPGRRNSGQSEPQMHISKEGDPYLRTLLVQGAQHILGPFGIDCDLRRWGLKLAERGGRNGKKRAIVATARKLAVLLHHLWVSGEVYEPLHHSNRIPVAAAA

SEQ ID NO: 419053 - protein, 325 aa, unidentified
MQLYAAIDLHSNNSVPVVMDETGKVVFTRRVPNRPASAIVDALAPYRDSIVAVAVESTPNWYWLERTLREARFKVELVNTAAVDQYGGIKYRNDFSDAQNLADLMRMGRLPTAYICPEKDRALRDLARRRSHLVRQHTSELLIAHNLIARDLGDHVVGNALKGMLAGTIDKMALLANQKTSLKATVAVIRCLESQIQRLEGEILKQVRPMETFRRLKSVTGIGDILALTIALEAGEVARFRDAGHFASYARMVKSERISNGKKKGEGNAKCGNRYLAWAFVEAAHHAIAHDAVIRPGTNASVPNPTRSLRSRRLRTSSRAPAFTS

SEQ ID NO: 419054 - protein, 345 aa, unidentified
MNITQVGIDLAKMVFQVHGIDARGKVLLRKQLKRQQMMAFFAQLPRCLIGMEACGGSHYWARRLTEFGHTVKLISPQFVKPYVKTNKNDVADAEAICEAVGRPNMRFVPIKNAEQQALLALHRARQGFVAARTAQANQIRGFLGEFGLVMPVGIRSLERKLPEFLEDAENGLSGASRALLARLFEHFRALNCQVDELEREINTWHREDTASQRLQAIPGIGPITASALVASVGDAKVFHNGRQFAAWLGLVPRQSSTGGKTNLLGISKRGDVYLRTLLIHGARSVLLSLKRQPDRAEGWLARVAARRNPNIAAVALANKNARTIWALLAHDRDYQVGYRTALAAV

SEQ ID NO: 419055 - protein, 326 aa, unidentified
MIQLGVDVGKSKIDVCLLPEGPGGRKKTKVLSNGPDVARQLLEWLAVRKVALSELQVILEPTGTYHEHLAYGLHEKGLRVVVASPVRVRSFATGMGILTKNDHVDAHVLALYGALRQPEAWVPPPPAIRELKALLKRRDALREDLQREQNRLEKLHVTRFSTRVEASVTKMIAALDAELLSVQQQIDDHIDNHPDLKQDMKYLTSVKGIGKQVGSNMLAVLRGNAFSSPEQAAAWLGLVPREKRSGSSVNGRSRLTKTGPADLRAKLYLSAMTAIKHNPMLRIFYERLLKAGKAKMSALCAVMRKLVHICYAVLMKQQEFDPNYSA

SEQ ID NO: 419056 - protein, 403 aa, unidentified
MSTSSGPVTRFVGLDVHKRSVMVGAVDAHQQIVLRPHRLSWDEFELWRQQHLHATDAVVLEATTNAWHLYDQLVSQVASVTVANPLLVKWISSASIKTDGHDTLKLARLLAAGMIPAVWVPPEPVRQLRALVSHRRRLIRQRTQTRNRLHSLLHRHNLTPPDGELFAPAQRNWWRQLNLKPMEQLLVTQDLQQLDAVAPLLEQVEQQLCLESVQEPWATQVPYLIQQTGIGLLTAMILLAAIGDIERFPHAPKLVGYAGLGARVHDSADTHRGGGITKQGRRDLRAAMVEAAWVAVIHNAQWKARFEHLCRRLSREKAIVAIARQMLVVVWHVWHDREADQHTDAIAIARKMMTWAEQGGKAMRHGLTAPQFVRWQLDRLGLGQDLTELHYGSHVYKLPRQVQ

SEQ ID NO: 419057 - protein, 347 aa, unidentified
MSYIGVDLHQNSITVCRREADGTEAFETLTLSPGDMDRFCGSLDADDEVAIEATGNSAWFRDQILPCVGRVVVVNPSQFKVIRKSVKKTDKNDAAALALFLEKDMLPETRVKTSAENELASLAHTRDLLVKQRTRLLNKIHALHVGKGLKLKKESLGSKRGLAAIDMALFSPCEQVEITVLREAALSLTASLKQLDTEIEKHASALTGYEGIVSIKGVGPRSAAVLLAAIGNVHDFESADKLAAYFGMVPRVAQSNETDHRGRITKRGNKLARTTLVQCSLVATRYSPYLKSFHERIRQRRGTGKAIIATARKLLSIIYDTLKNGWVFSDFTTFSRSEPTLAAGQSS

SEQ ID NO: 419058 - protein, 408 aa, unidentified
MKRYYIGVDWGDRLHQVYVGDDEGKKVREMRVQESPEGLAEIGRWLDENRAEGIDLWAAIEKPQGRIVDFLLDHGVEVYPVNPKAVDRVRDRYRMSDSKSDAFDAYVLAEFLRTDQAHLKVLRPNSEKAQELKMLSRDQRRVGRHKTRLLHQFTTTLKEYYARPLEVFDDIETEVALDFLTRYPTPAHLSALKRKEFNRFATKQHHLSKQRCEELWEKLKKPQLAVPEHVVRAKAQLVEVLIEQLRTSIKAVKIYNHRVESFFASSPAAQFAKTLPGGKSGTLVAAIWAELGDAQGRWESSRHLQAEAGAVPVTKASGKSRVVHFRFACNKHLRHTMYWFSFVSVNHSEWAKLYYRGQRDKGHSHHQALRALGAKWLKIIFVMWRDHKPYDENYHLANIARQKMRQAA

SEQ ID NO: 419059 - protein, 369 aa, unidentified
MAKPITYVGLDVHKDTIAVALAEAGLRGEVREHGKIPNTPAALKALAVKLVPAGRELRFCYEAGPCGYGIQRQLTGMGHECAVVAPSLIPRKPGERIKTDRRDAINLAKLHRAGELTPVWVPDQAHEAIRDLVRARQAAVRTLRQARQRLSGFLLRHGRHYHRPAWTQLHRRWLASLKFDQAIHHIVLEDCIAAVEAAMARRDRLEAHIEAVLPEWSLAPVVEALQALRGVRLVAAATLVAELGDITRFTNPRQLMAYLGLVPSEHSSGRTRRQGGITKAGNGAARRMLIEAAWSYRFPARIGREQLLRQERQVKPIRDIAWKAQERLCRRYRKLARAGKQPTVITAAIARELAGFIWAIAKQVQPMAT

SEQ ID NO: 419060 - protein, 348 aa, unidentified
MEYYLGIDLHKQFAYWHLIDDSGEILWTGKVPSTERDTKARLEQPGIPLGSVTAAIESVEHYGWYADLLTKYGVGTVHLANPHKLRLIAENPLKNDKKDAEIIAQYLRSGTLPLSYLAPEEIRNLRELVRTRMYLAKQRTAAKVRIRNALAKHGLTCRYKDIAGEKAKVWLDIADIPEDHKREIESLLRVMSTLTKEIDSFEAEMKRRGQSYPEVQILKTVPGIADVRALIIMAEVGDFSRFNSPHKLAAFAGLVPRSFSSGGQERLGRITKRGSSLLRHALVQAAQQAHPKWGDLYTFKARIKEQKHTGAAKVALARKILTICWYLVQRDEPFVTRLSEPGGSVNTI

SEQ ID NO: 419061 - protein, 322 aa, unidentified
MSKIAVGVDVSKATFDVALLVPGRDKPSQEVFDNKLTGFKKLDAWLQARHAQKAHVCMESTGIYSQELATYLVGAGFEVSVVNPARIKAYAGSEMTRNKTDRSDAVLIAKYCLRHDLSAWKPLDAVHLKLRKIVRCLQDLQEDRVRILGRLEGVKDEVIRKFWHENLDFLDGQIRVMQKERDTLAKDNKALSDQRNLLKSIPGVGQRTALVMLAEIPDVHSFSSAKQLAAFAGLTPANHVSGTSIRGRSRLSKRGNRSLRSALFLPAMSAIRCNPAVRALAERMRARGKSKMAIIGAAMRKLLHIVYGVLKSGVPFQVLATC

SEQ ID NO: 419062 - protein, 373 aa, unidentified
MNNYIIAGIDLHDNMMVVRVAKNTEKSVRLTYRNTRAGRGALVRDLKARASDAGEALIVAAYEASSQGFGLYDDLMECGIVCHVFAPTEMERSARAADSKNDDRDAEQILGILRAHLLAGNSLPSIWVPDKETRDDREIVRARLDAASKLTAIKAQVQTLLKRNSVREPADTLTRWTKKYRAWLAGLTGGATPLAFGARNVLKSLLRQLEFLEDEIERLDSLVETLSAMARYALAADELMKQKGVGLLTAMVFLTEMGDLSRFKNRKDVGSYLGLAPTCHESGEANDRKGHITHRGPHRVRKVLCQAVWARVRHDKKETERYDKQVARNPKHKKIAVVAAMRRLAVILWHKGLEAQQRAGVFQREAEALPCMS

SEQ ID NO: 419063 - protein, 365 aa, unidentified
MDAPCTGVECAKMEVLLTPQQGTPMSEITVIGLDLAKHVFQVHGADPDGRPVLRKRLRRGQVLEFFASLSPCLIGMEACAGSHYWGRELRALGHEVRLIPPQYVKPYVKTNKNDATDAEAISEALTRPTMRFTAVKSAEQQSVLMLHRTRELLVRQRTMLVNALRGHCGEFGIVAAQGLSRAGDLIKRIEDPADTALPDLARQALQCLTSQIRAIQEQIALIEKKLLAWHSSCEASRRLAEIPGVGLMTATAVVASVGNATQFRSARQFAAWLGLVPQQHSSGGKERLGHISKRGDGYIRRLLVHGARAHLSWSRRKKQIRSAWLTGLLARRPTSCCSRWPTRPRIAWATLSRGERYQEMIAAAA

SEQ ID NO: 419064 - protein, 397 aa, unidentified
MIAVGIDISKAKSTVAVIDSDGTVLASPFTMAHTQPEMEAFVTYLKGLGEPTTILMEYTGHYHYPVLKKLQGEGFPVCIVNPYQMKKYGDVEIHKAKTDKKDALRIAAYALEKSYKLVPYSSMEQKYEDLKFLSRQYSQRITYVAKLKVQLIALLDQTMPGITRILPLNSRNPEKCALLLFIRRFKSFDEIHRIGKARFLASYDVLAKKTSERSASSKGLSIYELAVDSITTRGEDPYIWLSQNQCVDLLSTTQNAADEIISQMRNIAETIPEYKVLRAMRGVGDRLGPIILAEIGDIRRFHSGKALNSYAGNDAPPYQSGQFESRNRHISKRGSSTLRKACYEVMQALKLTKPQDDPVYLFMLKKEQEGKPFNVAKMAGVNKFLRIYYARAMELYK

SEQ ID NO: 419065 - protein, 356 aa, unidentified
MQTQVTKKIDFKGKDLFIGLDVHKKSWSVTILVEGMEHRTFTQPPDPRTLYAYLQKMFPGGTYYSAYEAGFCGYGIHRALNDLGIKNIVINAADIPTSQKDQIHKLDPVDSRKIARVLEKGLLRAIHIFDRDREELRSLNRTRFYLMRDLRRSKNRIKSFLQYYGIPIPPEYDNNLWTLKYIAWLKQIQMETSSGQDAFSNLISSYEYHREQILILSRQIRIRMREYDNELYNLLKTVSGIGPLTSSALITELGDINRFPHINHLSSFVGLVPRVKQSGETSYNAGMTFRCNEYLRTLLIESSWQAIRLDPALMQYYHQHIINNKGQKVIIKVARKLLNRIRYVMKNRQPYVTGVA

SEQ ID NO: 419066 - protein, 413 aa, unidentified
MRPQPVRRFGTFTVDLDALADWLIDCGVITVAMESTGVYWIPLFELLEARGVQVLLIDPRQAKRAPGRPKTDRLDCQWLQRLHAYGLLAGAFRPDDQVCVLRAYLRHRQRLLTYAAHHIQHMHKALQQMNLKLTQVVSDLTGVTGMAIIKAILAGERNPQHLAKLRNPHCHHDADDIAKALQGTWRAEHLFALRQAVELYEVYHQQMAQCDQQITRHLETFADKSDGQPLPPKARRHKKTNEPRFDARTPLSRLAGVDLTTIEGIEENTALILLSEIGTDMHRWPSVKHFCRWLGLCPQHKISGGKVLSRRVRPGAHRVTVALRLAARRLHHSQSALGAFFRRMKVRLGTPKAITATAHKLARLVSSLWQHGSAYVQQGLDAYEAQYRERKVTTMAKQAKALGYTLVLLAAQG

SEQ ID NO: 419067 - protein, 342 aa, unidentified
MPHVTSIGLDVHARSVAAAAFNPFTGEVVHRDFGTDAAEIAEWALGFEEPRACYESGPTGFHMARELRALGLDCAVAAVSKMQRPAADARRKNDRRDAEFIARMLATHNIVEVPLPDAAVEAARDLDRALDDAVEYRRARQRLNMFLIRLGHVWDERNADGTRKGSWTRAHWRWISGIGLEGPQRDVLEYYVTAARCAESDRRQLEKKVLALARTDRWRPAVEALSCIKGIDALTAFRLAAEAGSFTRFRTAPAFASWCGLVPSERSSGETERRGGITKTGNRLARTALVESAWHYLTCTPRPKAPAPGADVPAAIRARAAVARELACWVWEIGRRAEGTLG

SEQ ID NO: 419068 - protein, 431 aa, unidentified
MSWIALSAPYLTRLHPVNAGGIPLPVDSSREVTRMFYAGIDIAKRKHEVSIIDTEGRALSQSLSFTNDREGSDRLLALFERLSISPQELVIGMEATGHYWLSLYSWLLEKGYDVKVINPIQSDAFRRLSIRKTKNDSKDSLVIAQLMRFGEYSTTRLSEENIHALKQLSRYRLSLVEECGNCKRRVIALLDQVFPEYETLFSDTFGTTSKELLLNCPTPEDMLTISSRKLTTLLTKTSKGRFRDEKANQIRKTASNSFGVTFSRDAFSFQIRQLIEQITFLEKQTEELEKKIAALLRKTNTVITTIPGIGETIGAAIIGEIGDINRFDTPGKLVAFAGLDAAVHQSGEFSGTKGGISKRGSPYLRRAIWMAASRAVFCDPILSKYYQGLKERGKHHLTAVSAVARKMCNIIFTILKENRPYEVNPPKPLRN

SEQ ID NO: 419069 - protein, 459 aa, unidentified
MDTRIIGIDLAVTAAHKAIVLDQASNRFVSPVLTFHTDPAEMDRLLATARIGASPDLQLVAVLEATAMSWFTVGVYLERQGVAVYRVNGQQVADLRKVYQRHAKSDRIDARVLARLYVTHPEQLHRVFLPTGPQMALQRACRELHRLTRLIAASKQRLLTTDQFAWLGLPDILSPYADIARWLREHWYDPWRVYEAGETALAEAWEAASPIQPADTAWIPALYERARQVMALYDDAHRPDYSLLQASVAREQARLKAVEEQAHFLRLKVVRPLYRQLHPTRHLETLRGVGQDSAAVYIAFIGDILRFPSLHDFRGWSGMIPFSRQSGEAQVRGLHITQAGPDLIKATAFMDANVARLYDPQIAAIYYEQMVERGKHHLQAVCACATHLLDRIYVILKEDRPYELRDVDGKPVTKRQARAICQERYHVPDEIRRRNNVRQRQARAEERTERRYQRCHKDE

SEQ ID NO: 419070 - protein, 496 aa, unidentified
MKNSIYSSRSQILNEKFEGVKDLSKLMIVGIDYAKSEHTVIVTSGNGEHLQRKPLRIFNTSKGFDFLLQKIEKLTTKYKILKNNIIIAIEDPPPYLVNFLYKLQKNGYYIVKVNPGEAKKFRNNSRASSDTIDANGIVQAVINRKGYDWEQDNAIYDALKNFSRQRENAVIEKSKLKNKIHNSINILFPHYTTFYKSFDPFSAFSIELLKKDFSVEKIKKMRLKMIEKKMQKYGIPSYKEKAKQLKELAEHTLSPPPEIVFNKSKELSCFINSFLTVENNIKEYENLLAINLVQTEGFYLTSIPAIGIVRAASLLGEYGAPHKWKDADKIMSYAGLACRENQTGGSNKPAIKLGLPWDANKHLKNTLLQTAYGLGLYKHPAGKIHPCFEEHRLYKKYHQIKNNGGCPGLRTAKLLVKIIIQMFKSETVYAYEGSNFELEEKMAYYTAVDEMLNNKWRKYDLSNIPDDKKYTVKWKAKLVELKSIATIVHNAFNSKK

SEQ ID NO: 419071 - protein, 315 aa, unidentified
MTATIAQTLGVDIAKATLDVYLHPEAAAQQFANTQAGIAALLAWLQPYAISRVVFEPTGAYHRLFERQVGSTGLPMVKVNPLQARRFAEAIGRRAKTDAVDAAMLARFGALDELQPRPVVSQTLSAMKELLVARRGLIKDRVAATSRNHVHQAPLLKRFAVQRLRQVARQLAAIDDALRALCRADPGLQARLDILVSIPGIGEATALAMLIDMPELGTLDHKCAASLAGLAPIARDAGQHSGKRCIRAGRAHLRQALYMPALVAIRFNTDLTAKYQALVAAGKPPKVAITAVMRKLVILANALLHQGRAWTPKAA

SEQ ID NO: 419072 - protein, 370 aa, unidentified
MKKHSTTPKSPKQTSACKGGPITIGLDLGDKTSRYCVLGANGEVMSEGSVGTTRKAMAEKFAKMRRCRVAMEVGTHSPWLNRWLSSLGFEVIVANARQVQLISASSRKNDRLDARLLARLARVDPQLLRPIRHRSETAQADLMRIRVRAALVEARTRLVNAARGFAKAMGERLPACDTDSMGVERMESLPEGMRDTLKPLLEQVESLTEKIKESDVKIEQIARTQYPETELLRQVSGVGTLIALTFVLTLEDRERFRKSRDVGCYVGLRPKQSESGQSQPQLRITKEGDVYLRTLLVQAAHCILSRRGPDTDLKRWGLKLASRGGKNAKKRAVVAVARKLAVLLHRLWVCGEVYEPLRNSQASGSSKKAA

SEQ ID NO: 419073 - protein, 419 aa, unidentified
MTHKLAKKLLSVKPGTLFAGVDMALERNMTVLMTERAEVLAQFYFPNDRLGYDYLLGQLRVGQKRSQAPAVLVGMEPTNYFWKLLAAELERQSIPYRLVNPYTVKKHREGDNLDRSKDDPRDAFTIADLLRTGKFTETRLLHGRYAELRQYAQSYDRLQQELRRQKNLIVNLAGQLFPELGREFKDRTGQTALALLRSSAAAGVIRQQAWPDFLAQVTAHFTGKGLAQAKLTRAYHLAATSVGLTEGVESLQWALASHIATWELLQNQCAQVQTRLGDTFLAWPEAPYWLSVPGLGLVSAALILAEIGDPHQYRQVDQWVKLAGTQPVPNTTGKKTRSLTPMSHQGRPRLRTVVYFAVLRLVQWDESFGRTYVHLQTRTPDPLTKMQALGVLMNKLLRILWALGKQHCFYDPTWGLPAA

SEQ ID NO: 419074 - protein, 327 aa, unidentified
MNTIGIDVDSKYLVCRIRRSGKDFPEARFVNDPAGHRKLITWATRGKRTARICMEATGVYSAPLAILLDADPRIEVMVANPKAIKHFATAILQRGKTDSLDAGTMLEYVERVPFTSWHAPSEEVLAIQHISRRIVQLNTDLTRERNRHAAAIRLNRIGHVVAEDTAANIHQLQQRIEQLESTLRELIEQIPELSDKLHILQSATGIANKTGPRILAELATLPGDMTGRQWVAHAGLDPRAYESGTSTHKPRRISKNGNRYLREALYFPALVASRHDPHVKAYYDKLIARGKKPMQVIVAIMRKLLLAIWGMFKNKEQWDGNKFYKCA

SEQ ID NO: 419075 - protein, 359 aa, unidentified
MRIIGCDLHARQQTVAMLDTTTGEVVEKTLLHEASNVREFYSTLPRPVRVGIEATGSMQWFVNLMEELGIECQVGHPAKIRAAEPRKQKHDRRDADLILKLLVENRFPAIWLPSQELLDLRSLLRHRHQWVRMRTRVQNALQAIALANGLRRGPSLWSHDGQSAIASLPLAPHTAHRRSELQALYGKFETEIEQLNQRVEEQAGGRPGAQLLMTHPGVGPVTALATDVFLGDPTRFADGKVLASYVGIIPREYSSGGRQRLGGLSKQGNPLLRFLWGEAGAHAVRRDPELKRFYRRKLIQKGLGKARMAVARKLGIRLWIMLRDQIDYNEFCRRGQKNGAACAGIPGTRYGATSHRPID

SEQ ID NO: 419076 - protein, 312 aa, unidentified
MGSHWIGIDVAKTWLDVARSDTPTVARHANTDTGIAALLVLLQADAPAGIVLEATGGYEQLTVQHLRAAGLPVAIINPERARAFARAAGTRAKTDALDARMLAHFGARMQPTSPPPPGETTSALGDLVNRRRQLQEMLTAEQNRRERAPARIRPGIEAHLDWLGEQLAELEREIAQAIAADPVVAAKAQALRAIPGIGPVVAATLLGALPELGTLSRQEVAALVGVAPINRDSGGRTGVRAIGGGRRAIRAPLYMAALTASRRGAFKPFYDRLISVGKPPKVALVALMRKLVVVANAVLRDGTTWTAHAPSA

SEQ ID NO: 419077 - protein, 412 aa, unidentified
MSKNEITAVGIDVSKGKSTVAVRRPGGEIVMMPFVVLHTAEDLAELTNTLRSIGGEIRVVMEHTGMYWRPIALALKEGGFFVSVVNAMLIHDFSDNSIRKVKTDRADSLKIANYALTFWQDLRDYSVEDETRQMLKIQSRLYERTLNSSIALRNGLISLLDQTFPGANKLFDEQRTKAGHIKWVDFVRRFWHKDCVAASSLSTFADTFQKWCKRTGYHYSLSDAERIHGIARNSVATLTKNDSTKLIITQAVDSLNAVYDTLQILRSEMQHLASMLPEYEVVMAMQGAGPITGPQLMAEIGDVRRFTSKGALVAFAGVDAPPFQSGTFDSKSRHVSKRGSPHLRRVLFTICSVILQHSDPENAVFQFMDRKRAEGKHFYVYTVAGGAKFLRIYYAKVKEYLNTIDSQTGCVA

SEQ ID NO: 419078 - protein, 353 aa, unidentified
MRTYYVGMDVHRATIAIVALNGAGKVVEQLVVETSATRVRNYLKQLRGRVYVTFEEGTQAQWLYDVVQPLVTEVLVCDPRHNKLLKAGNKSDRIDAQKLAALLRNGALQAVDHRDYGVRALKELVRNYDCLVSDTTRVMNRLKAMFRGRAIACGGHEVYRQDRREVWLSKLTERGAKERAGSLYRQLAALRALRQEAKLAMVREARRAAAYSWLMSVPRLGAVSVAQLLAVVGTPHRFRTKRQFWSYVGLAVVTSSTADMEVVEGVLRRSRRPVATRGLNRNHNHLLKRVFKNAATSACQSEPFKQHYELRLQQGMDPALARLTVARQLSAITLSLWKRGEKFQAERMKRPAV

SEQ ID NO: 419079 - protein, 354 aa, unidentified
MIIIGADYHPGFQQIAFVDTDTGELQERRLEHREEAETFYRGLAQPGRTVRVGMEASGHARWFERLLAELQFELWIGDAAEIRTKRVRKQKTDRQDAQLILQLLLEERFPRIWVPSGENRDLRQLLWHRHRMVQARTRIMNQLQAVALNEGLRCKKRLWRDSGREQLESFLLAPWASRRRHDLLELLDRLSPTIAELTQAIEQEVEKCPEAQRLRTHPGVGALTALAFVLIIGRTDRFRCGKQAACYLGLVPVEESSGERRRLGHITKQGNSLLRFLLVEAAQVTVRSDQEWRSKFFHLALRRGRKIAKVAMARRLAVRLYWMWRKGWDYEQMKKFGSHAGQPGNRDGVQQSIE

SEQ ID NO: 419080 - protein, 368 aa, unidentified
MSHTESDLNKLVQLIKSLSGETKVVMEYTGAYYEPIANALHNQGIFVSVVNPLLIDDYGTKRVRKVKTDKQDSLKIASFAIDKWLDLREYIPANDIRKTLKILNRQYVQYNKILVMQKNNLISLLDSCFPNANTLFTSPRRESDGHEKWVDFVLKFPHIHSISKLSLSAFKVKYQSWCRKNNYNYSDKKVADIHSYCKTQISVLPMTDSVIKIITEAAGVLNSTLETLCTFRDEMDRLSSTLPEYNAVMGIYGVGKVLCSQLIAEIGDVRKLNNSKSLVAMAGIDPPPNQSGKVDTKSRSISKRGSPVLRKTLFQIMTIIIQNKPVDDPVYQFLNKKRSEGKPYRVYMIAAAHKFLRIYYARVMQALN

SEQ ID NO: 419081 - protein, 430 aa, unidentified
MQVLYARCAGLDIHKDTVVACVRITGDDGHVERQVRTFETTTGRLLQLHDWLSSQEVTHVLMESTGVYWKPVWHVLEGNFELQLANAMHVKNVPGRKSDVNDATWLADLLAHGLLRPSFVPPTPIQELRDLMRTRKQLVRERVSHQQRIDKVLQDANIKLGSVLSDTLGRSGRAILNAIVAGQNDPEKLADLVSKRVKATRQEMVEALRGHVTAHHRFMLKLHLSQIDALSKAITQIEEEAGERLAPFRQAAALLTTIPGISDMAATVIVSEIGVDMSRFPSAAHLISWAGLCPRSDESAGKRRSTRIRKGAPWLKTLLVQCAWSAVRARGSYLRAKFLRLRARRGAKKAIVAVAAAILTSVYFMLNRGTEYKDLGAEYFTFLSRAKTTSRLVRKLNELGYQVELKAANEGDGVGPEAAEERDEVGAQGG

SEQ ID NO: 419082 - protein, 466 aa, unidentified
MKNNTTTLHDCTLEGIRFGGCGNSEAMVWKLGLDIELRAVAVAMQCGRGVIGPAAKWSREQLLQWVKEKRARGEAVHTVYESCGFGYTLHEQLSAAGANSLVTTPMRLNLERKRKNDRIDARELCVRLSRYLDGQSHELRPIRIPSRCEQQRRELGRQREFWKREVRRLENRGRALRIEHEHQTLEAGWSGPRKWKRLAPQCSQFVREQLTPVVAQIRSAKAQLDRLSEQIESLVKKEQIPVGLGALTVSLIEGEVCQWERFAHRKAVGSYTGCCPSEHSSGPIQRFGAIDRHGNKHLRVLLVEAVWRLLRWQPHWHARQKYLLKLRHGSKKKIAVALARQLAIDLWRWRTGRASAQELGWSLPTLPLPEQPKPALVFTKPHQPRQSVPQGGTLLDAAADPKGSSLRMGAFHPQALPQVQARHHGRRSPLTTARIGAGDREKPPHINGKPPIAEQTDPWEKPQKQK

SEQ ID NO: 419083 - protein, 400 aa, unidentified
MPMLSIGIDVSKGKSTVCGMKPGGEIVYTPFEVQHTREGMSELVSLLRGSGEEVRVVLESTGSYHCPVVAALLENGIFVSVVNSLRMKRFCSQSIRRVKTDQIDAMQIALYGLAYWQELQPTRLPENTYRELQLLARQYYQMTSLLIKAKVDFNALCDQVLPGMQELMSDHAGRHKLSDFVLRYHHTAHILKMGETRFRKDYCKWAEKKGYRNHERMAALIFATAQNGIPVLPDAPSTQIVITEAIRVLHTVEASRDAILTQMQALAKTLPEYSLVREMPCIGDTLAPRLIAEIGDVRRFHSKRALIAYAGIDAPPYQSGKFSANNRHISKRGNRYLRKTGYEVMQSYVMHKPANDPIFTFIEKKRSEGKSGKLAMVAGLNKFLRVYYGKVTELYRSLPQ

SEQ ID NO: 419084 - protein, 396 aa, unidentified
MTVVVAIDVGKNEFAVSVTTGARRRLLKPRLGCPMTAPSVREVVGRISRLLPSGAVVKVGIEAAGHYHLPLLAAAVWPTGWELLELNPAHVTEQRRVLGKRTIKTDVIDLEAMTELLLAGRGLPVTATEVVLVELTAWSAHRTRRIEIRSGLKNQLLGQLDRSFPGLTLALPDVLGTKVGRLVAAEFADPTRLVALGSSRLIRFGATRGVQIRKPIADKLLAAARDALPMPDAAIARQVLAADLALASDLDRQVAQAEVELARLLPLSPFRTLTSVPGWAVVRAGNYAGALGDPARFGNPRQVYRSAGLNPIQYESAGKRHDTRISREGSVELRRALIDLGMGLWLNEPAATARAVELRARGKKGGVIACAMAHRANRIAFAMVRDQAVYDPSRWT

SEQ ID NO: 419085 - protein, 406 aa, unidentified
MTLIIVGDDWAEEHHDVYVMDEAGKRLAAKRFPEGLAGIRGLHALIATHAEESDQVVVGIETDRGLWVDALTAAGYQVFAINPLAAARYRDRHHLSGAKSDPADAKLLADLVRTDRHNHRPVAGDSGGAAAVKVLARAHQSLIWARTRHTNMLRSALREYYPGALETFDDLDDRDALAVLGRAPTPAEGARLSLAKIRSALKAAGRQRNIDARALEIQAGLRTEQLTASDAVTAAFAASTRAAVGIIAELNHQISDLETELATHFETHPDADIYLSLPGLGVILGARVLGEFGDDPNRYTTAKCRKNYAGTSPLTIASGRKRAVLARHVRNRRLYDAIDQWAFCALTTSPGARAFYDQRRDADDLHHQALRALGNRLVGILHGCLRHHTLYDEHKAWAHRQPTAAA

SEQ ID NO: 419086 - protein, 362 aa, unidentified
MAGMDLHGNNVMVGIVDAQGARLQHRRLGCELPEIIEFLAPYKTELESIAVESTFNWYWLVDGLRAAGFPVVLANPAKIDQYGGIKHADDKNDAYFLAELQRLKILPTGYIYDPELRPVRDLLRRRMSLMRQRTTLFLSAKSLHQRTTGRALELRRLKAMEPEEAVALYTHPANQLIARIQKEHIDSLDQSIRQIEKAVMKVALQQPYYQRLQTMPGVGIILGLTISMEVGNIDRFAGPGQFASYCRTVDAKRVSNGKTKGENNQKCGNKYLAWAFVEAAHGARRFDTACRRWYDRKAGKRCPTVATKALACKLAKAAWYVMAKGEEYQAGRVFPGLTEPKVEEISGEQASARKGVGPNPED

SEQ ID NO: 419087 - protein, 425 aa, unidentified
MDFKQNQKINQVTEETLVVGIDIAKRTHFSCFVDDRGRILQKSFSITQSHQGFESFYDRILKALREHGKTEVLVGIEPTGHYWLNLAYFLEERGIPLVMTNPMHVKRSKELDDNLPTKHDRKDALVIARLLKDGRFSYPRILKDVEAELRVGSTFRSKLTEELGAVKNMMIRWLDRYFPEFTQVFPSFGKMALAVLECTPFPSDLYQKQPDELLVMYRQVEGMKSPQKPKAVRLIEVAAHSIGVTEGRKMARFEIATLVQRYHQLEQEIESITQSLVELVKTSVEYEWLSTVNGLGDTTIVDLLAEIGSFSHYEDPRQLIKLAGLTLRENSSGQHKGQKRISKRGRRKLRALLFRVMMPMIRHNEAFRKLHEYYTNRTVNPLRKKQSIVVLCGKLLKVLHGISTKHKAFDAQRMMRDVPSLEEAM

SEQ ID NO: 419088 - protein, 339 aa, unidentified
MSVKTVGLDLAKDVFQVHGISENGRVIFNKAIKRAKLLAFFETLPPCIVGMEACGSSHHWGRTLRKLGHDVRLMPANYVKPYVKRGKTDAVDAEAICEAVRRPTMRFVDIKTEDQQAVLSIHRTRDLAVKQRTQMANMIRSLLREFGHILPLGIEAVTAFATRHLDGDQPDMPDIANGMLGMQCYQFIGLNERIAGYSKMIEQHALSSSDARRLMRMPGIGPITASAIVATIGDAHQFRTGRDLAAWLGLTPLNKSSGGKERLGKITKKGDRYIRKLLVVGMTSRAVMAKRSPEKVDLWTAKIIADKPFRLATTAMANKAARIIWAILTKKQEYRQPAF

SEQ ID NO: 419089 - protein, 418 aa, unidentified
MAKLRKVFDQLHERVAGLDVHKAQVTAAIRVPGPDGARVQEVAEFKTTVQGLLALRDWLSAHGVTYVAMEATGVYWRPLWAVLEDPFECILCNARDVKQVPGRKTDVADAAWLAQLAEAGLLRASFVPPKPIRALRNQTRYRKAQIEERQREANRLHKILEDTGIKLDCVASDILGKSGRAMLDALVSGTTDPEVLADLARGRLRSKLPELREALEGRFDDQHALIVSAILSHLDFLDEQIALLSEAIEEQIRPFAAAVELLCTIPGVKQRTAEVIIAETGGDMSAFPTDKHLASWGGQCPGNDESAGKRRSGRSRKGSRWLGIALTEAALAATRQTDTYLGAQYRRLRGRRGHKRALGAVRHSILVAVWHMLTTGEVYNDPGADYFDRKVNPDRKIKRLIAQLEGLGQQVEVQPAVA

SEQ ID NO: 419090 - protein, 319 aa, unidentified
MNRVAYGQIIGIDVSRDWLDIHCLPDGHRLRVPNTDKGHACLAELACERAALVCFEATGGQEWRLWAALDKAGVETRQLPPAQIKAFAASRGTRAKTDRIDAELIARFMAFRPEAGRCLPHEKLRLLRALTSKRGQLVETRKRLLAQIKAHGKLGTADMFAHMDDNLKELLDQQITELEHRIENTIAADATLAENAAILRSIPGIGPVSSTRLIAEMPELGQITGEQAAALTGLAPIAHDSGTLRGKRAIGGGRRLLRHVMFQAALVAAHHNPVLKAFADRHRAAGKSHKVIITAVARKLVTIANALCKMRRKWAPQPA

SEQ ID NO: 419091 - protein, 451 aa, unidentified
MTKSKRRRAERDFTPTHPDAAAIDIGSRMHVAAVPPDRDPEPVRAFGTCTGDLQQLADWFERCGVRTVAMESTGVYWIPAYELLEQRGFEVVLVNARDAKHVPGRKSDVSDAQWLRRLHEYGLLRASFRPKGELAALRAYLRQRERLLDYSASHIQHMQKALMQMNVQLHHGVTDITGETGMRIIRAVVAGERDPAVLASHRDRRCHASEAEIAAALAGNWREEHVFALGQALELHDAYHAKVVECDLRIEAVLQRLRDAAAKPVGRLPPARHRDKTPNAPTFDARAALHAVLGVDLTQIHGLGPSLALKLIGECGTDLSAWPNAKHFTSWLCLAPANKISGGKVLSTRTRRSGSRAAALLRLAAVTVGRTQTALGAFYRRLSARVGKAKAVTATARKIATLFYNALRHGMDYADPGASSYEDRYRARVLANLRRRAKSLGYTLHEMPAPA

SEQ ID NO: 419092 - protein, 350 aa, unidentified
MDKGSTGMTIGIDLGDRKSHVCVLDADGKVVKRDIVQTTRTAFEGWFGKRARCRVVLEASGHSRWSSRLLLELGFEVLVANPRRLPEIYGQTRKNDPLDAERLARLGRLDPGLLHPIEHRSDAAQLGLVAIKVREALVRTRTRLVTSIRGTAKMFGIRVPACDAAQFHRKAAEALTDELLGMVQPLIDTLDELAVRIKACEKQLEEFAREVYPETEQLRQVAGVGPITSLAFVLTIENPKRFKRSRDVAPYLGLVPKQDQSGSIDKELGITKAGNKLLRGLLVQSAQYILGRFGPDSDLKRWALPKTEGSKAAKKRATIGLARRLAVLLHRLWVTGEEYQPLGYGTQPAA

SEQ ID NO: 419093 - protein, 409 aa, unidentified
MLYAGDDWAEDHHDVALVDAAGRRLARARLPEGVAGIARFHELIAEYAAEGEAPGRVVVGIETDRGPWVTALVASGYQVYAINPMSVARYRERHSVSGAKSDAGDAWLLADLVRTDASRHRPVAGDSPAADGIKVLARAHQRLIWERNRSVLRLRSTLREYFPAALAAFDDLAAPDVLELLTRAPDPHSAARLTKAQITAALKRAGRRRVQRRAEDIAAALRAPQLSQPAELVAAYAAAVTSLTGVIAAFSEQIGMLEQQVSASFRRHHSAGIYLSQPGLADVLAARVLGEFGDDPHRYASAKSRKNYASTSPITKASGKRTAVLARYARNDRLADAIHRWAFASLRASPGARGYYDQLRGRGKTHSAALRQLGNRLVGILHGCLKTGTCYNEHTAWGHHPRLPEPAAA

SEQ ID NO: 419094 - protein, 343 aa, unidentified
MPFYVGLDVSQETTAICVVDHCGSRHWRGSCATDPSVIASAVSRHAGADAKIGVETGSMTPWLVHGLRDAGLAVECLDARRVKAALQMRLNKTDQNDAEGLAQVVRTGWYRAVHVKSLGAHRARSLLGARAQLVGMRTRLSNMIRGVLKTFGMLPGSGRGQRFDRRVEALLEGEPLVAAIVHPLLETWHQLGKQITTFDKAVQRQVRADPICRLLMTVPGIGALSSLAYVSTVEDPKRFSRSRSVGAHLGLTPRRYQSGEIDRSGRISRCGDSLARTLMYEAAIVILHRVKRPSQLKDWALAIAQRTGPGKARVALARKLSVILHSVWRSGEPFRWSAEASVA

SEQ ID NO: 419095 - protein, 411 aa, unidentified
MQVIYERCCGLDVHKRTITACRLRWLGGGWEKEIRQFGTMTKDLLALLDWLVSEGCTQVAMESTGVYWKPVYNVLEGQFELVVVNAQHLKAVPGRKTDVRDAEWIAELLAHGLLRGSFVPPPSVRELRELTRYRTSLVRDRARTLNRLQKVLEAANIKLASVVSDIDGVSARLMLEGLVAGKTDTEELANLAKGRLKEKHAQLVEALSCRLQPHQSFLIAEHLAQIDYLEGAVERLSLQIEEKLRPFEQQIGWLDTIPGVNRRTAEVLWAETGGDMSRFASARHLASWAGMCPGNNESAGKRRSGRTRKGSPWLRHCLVEAAHGAAHTKNKYLSSQYHRLAARRGKKKALLAVGHSILVIAYHLLTRQQAYVDLGANYFDERDRQAVTRRCVNRLQKLGYQISLEKLQMAA

SEQ ID NO: 419096 - protein, 369 aa, unidentified
MKSIAYVGIDAHKDTHTICVLPEGSQEPFLRQTYVADKKAIVEAFRVLAERYDLRCCYEASSCGYVLYRWLTEIGVSCQVIAPSLTPVRPGEHVRTDKRDALKLARLYSAGQLTPIRVPTEFEQSVRGLTRLREAVVREVVLAKTLLNQFLRDQGRVFDGKTRWTQSYWKWLRGQSFSKLDSFVFTEYLGLLEFKLARLHEIDAQVSEWAQTKTYQPQVKRLCSLRGVGIVTAMTLVAEIIDFKRFASAASLMSFLGLVPRENSSGQSQSRGAITKAGNARCRRILIEAAWKYTRKPAVCKALKERHEGLPADLIAHSWKAQQRLFKKYWSIANRKEKGKAVVGVARELVGFIWGIMNSATLQRPTLQN

SEQ ID NO: 419097 - protein, 367 aa, unidentified
MQKSSTVRKTGNKIVKGRRQFTIGMDLGDRWSFYCVLDESGKVILEEKLATTPDAMKQTFARIPRSRIAMETGTHSPWVSRLLTPLGHEVIVAHAQKVDLITKSTRKDDRHDAKTLARLARIDPELLGPVRHRSAKAQIHLAVIRARAELVRARTALINGARGLTKSYGERLPKCGTQQISREFGTGLSTELREVLEPLFREIESLNERIKEYDRRIEKIAKETYPETELLKQVKGVGELIALTYVLTIDDPHRFRKSRDAGCFVGLQPGRRNSGDSEPQLHISKQGDEYLRTLLVQGAHYILGPFGEDSDLRRWGRKLAERGGKIAKKRAVVAVARKLAVLLHRLWVSGEVYEPLRNSQKAMRAAA

SEQ ID NO: 419098 - protein, 349 aa, unidentified
MTMVGGFDVHRKQITFDYVDSDGVVRWGQIRPATRTALRGWLGEHCPDGDGEFALEGCTGWRYVSEELAAADMGVHLGDPAEIAALRGPKKRAKTDRADARLLRTLLLEGRFPESWVPPAHVLETRTLGRLYCRLMDERRAWQQRIHAQLFHQGCPPIKGLLSAAGREALAGAELSMAGRQYVDTALRRIDELSAEIESLRTQLVTFARRQRGCQALQARQYGVGSLCAAIIWAEIGDARRFHSSDQLVRFSGLDVTVYSSDGKRSPGHLSRQGSPELRWATFEAAKCAARHGSPDYAYYHELAARPDSGKNPTLAVERKILRRSYHTLRELGDAALAMPVPDDKGVAA

SEQ ID NO: 419099 - protein, 338 aa, unidentified
MNIKTLGIDLAKSVLHLCGMDVHGKVVLRKRLSRGKLLEFLANVPACLIGMEACGGAHYWAREIGKLGHEVRLMSPQFVKPYVKTNKNDSNDAEAVCEAVGRANMRFVPVKSVEQQDIQAIHRIREQLIKSRTAQANQIRGLLGEYGIIIPKGLRQVRGRLPGILEDAENGLSFRARRFLSDLVERVRELDERIRAYDKEIEELFKEDERSQRIEKVEGIGPVVATAIVAAVGNGTFFKDGRQLSAWLGLVPRQHSTGGRERLLGISKRGDRYIRTLLIHGARSVVRYAQRKTDPRSRWINGLKARRGTNAAAVALANKNARIIWALLSKGEAYRPAR

SEQ ID NO: 419100 - protein, 466 aa, unidentified
MKPFYLGIDVSKGYADFMIINAQKQPTIQGFQLDDTYDGHRCLYNILSRFLADHPQSALFAGMESTGGYENNWYNSLIRFQGSLNIQTARLNPLGIMHNSKADLKKNTTDKISAQNIAEYLVAHPEKVVYHKDNQLAGLRKQWGFIKMLTKQCTQFLNQLNTLLYTAGPELLQYCQAGMPDWMLKLLIKYPSAARLKKARVKTVAKIPYVSTKRAQQIIAEAKRSVAPTTDPVTEQLIMATARQILHLKKIISDQTKQMIDQCGLPEVKLLKSFPGISDSSAIGLLIEIQTIKRFADVKKLASFFGVHPVYKISGDGIGGIKMSKQGRSEPRQILYMIALSAIQYNPLIRQIYETHQKQGKHNMAVMGICMHKILRIIYGMLKHNQPFNPQIDIANRKRNVRPKTDRAVKATYRRFQDYDTNAPVSRRQQKKRLERVRSNSVADTKFGITEPVPLANIIADLLPKL

SEQ ID NO: 419101 - protein, 439 aa, unidentified
MPAALRADGGRLRASRGRGATRAAAGTRLEVVIEPTGPAWLPVAVFFTGRGHSVYRVSSAKASDLRKFFSRHAKSNGIDADTLARLPLVAPAGLQPLELPGPEAAALDRRVRAADRLTRVAAEHKVRIKDLVHQLMPLTPLTGDLGAADLAVLERYADPRALLKAGPARLSTLIDKASHGHHGAERATAWRASATAAVELYAAYPAMPFSDLADEVVSEVRLLRATQTEIARHGEAREQAYRPVLVAVMGRAARFPTAGHFRSYTGLTPRASETGNTDRKGQPMSKAGSSLLRTTLAAPPTPPANRTPNSRRSTTRRWSTAAPTTSKRSAWSPPPSPNAPGRCCAAACPTSSATPTPPPSPPSRPKRSSPSSGRSPPRSAPADAAPKPPTRPTTRRRGRPLNKSSQDKSGQTREAPTNEATPRERSSSRPRRNVKPTTS

SEQ ID NO: 419102 - protein, 340 aa, unidentified
MEIKTLGIDLAKNLFRIHGVDAEGRTTLERQLRRQQLLRFVAQLQPCLVGMEACGGAHYWAREIAKLGHQVRLMSPRFVRPYVKSNKNDAKDAEAICEAVARPSMRFVAVKSQAQQDVLALHRVRSLLIRERTALMNQMRGLLAECGIVVAQGAAHLRRTLAEILGSRDNQVSELLREALVEMSERLRSFEERLGRYDRQIGTLARSDRRAGQLMTVPGVGPLIATALIATVGDARQFKSGRELSAWLGLVPREHSSGERTILLGISKRGDRYLRTLLIHGARSALRSASHKRDRRSLWIGTLRDRRGPNIAAVALANKNARVLWALLTRTEEYRAPAAA

SEQ ID NO: 419103 - protein, 322 aa, unidentified
MAMLSFGGIDVSKDRLDVMVLPEEQCSSVPNDAAGWAKLVEQLRGFSISAVGIEASGGYERGAVRALLAAGMSVRQVNPFKLRQFARASGVLAKNDPLDARMIASFIAIMPTRPAQPHAPAVERLAEILTMRRQLSDAKVAAENASRLLEDAMLQRLSRRRIARLAADIDLLDGRLVEIVMADAALVRRYQLLTSMPGVGPVLACTLIALLPELGRMNRKQVAALVGLAPYAFDSGKLKGARCIWGGRASIRRVLYMAALIAMRCNPALKAFHNRLAATGKKPKVVIVAVMRKMIITLNAMLRNETPWVDRSSGRHSVLTAR

SEQ ID NO: 419104 - protein, 333 aa, unidentified
MKVEKVAGIDVAAKTLALAIRTGEQTGKVRELENTPSGHQAVIKALTSAGVQRVCLEATGIYHLDLALALDAAGVSLMVVNPTAAKRFAQALMTRSKSDAVDAGVLAQFAQSMPFQPWQRPATPVLEVRACARRLAALVKARTQAKNQLHAASQTLSTPQIVLADLRLSVTQCDEHIEQLRAGACALIEADAQLREVFTLLNTVKGIAAASAIQIMGEILVLPADMQAKQWVAQAGLDPRHATSGTSVNQKPHLSKAGNRYLRLALYMPALSAARHEKHVNGYYRHLIKDRGLKPIQAVCAVMRKLLHAIHAMLKARQPFDGSRFYALVETPA

SEQ ID NO: 419105 - protein, 376 aa, unidentified
MKNRKRTYRSKKKAGTSEGGRIVAVRASGELQKINEHAAGVDIGSERHYVAVPPGATEHPVREFGVFTKDLYAMADWLRDCGVEAVAMESTGVYWVPLYEALEERGFQVKLVDARKVKNVSGRKSDVLDCQWLQQLESYGLLAGAYWPQDEIVILRGYVRQRGMLVKSAARHIQHMQKALQQMNLRLDNVVADITGQTGMRILKAILAGERDVEKLGEMRDRRCHASAAVISQSLVGNYRQEHLFELKQAVELFEVYQEKIGECEAEIEKYLGSLPHVREDEPPPLPGGEKRQTLSFNVRDHAYKLTGVDLFRIKGLNSETVLRIVSEVGVDMSGFPTGNHFASWLCLSPNRRMSGGKVLSSQTNPSSNRAAAAFR

SEQ ID NO: 419106 - protein, 399 aa, unidentified
MASMVTGRACRQLKRDHGRAGPSVEVSAGSLAAGNHDAGSGRPVTKEADETMRRYTGQHRFYAGVDLHARSLFTHVLDDRGQTVFERDLPASPAAFLDAVRPFRDGLVVGAECMFAWYWLADLCEDHAIPFVLGHALYMKAIHGGKAKTDRIDAGKLAAMLRGGMFPMAYVYPRAKRQTRDLLRRRSFFVRQRAQFIAHIQNTNSQFNLPLFPKKLTYAGNRSADLADRFTDPSTKLSVTGDLNLIAAYDEQIAALERHLIRHAKIDDPVTFGLLRSVPGIGPILGLVLLYEIDQIGRFPEAGNFLSYSRLVRCDHESAGKKKGSGGKKIGNAHLKWAFSEAACLMVRACPAVRAWKQRQERKRGKRKALAVLEAKIGRTVYHLWRKQVPFDAKRFLNG

SEQ ID NO: 419107 - protein, 482 aa, unidentified
MGARHRHKQKPAVAAGPVEIPDAEHELVIERVAAIDVAKAAGKVCVRLPGKTGRRFSRVWDVAARTGAITELGDQLLELGIEKVTVESTSDYWRIWYYLLEAAGLKVDLVNARDVKNVPGRPKTDKLDAVWLAKLTEKGLLRPSFVPPAPLRRLRDYTRLRDDLTRERTRYWQRLEKLLEDALIKVSSVASTLDTLSTRDMIEALIAGERDPRRLAELARGRMKAKHSELITALDGRFDDHHAELARMLLSQIDALSTQIDTLSARIEELIAELPDDRAIDHPDNDPGAGPGADIDPDPNSSTAGGNAIRVDPAIEAECALSTVERLDEVPGIGALNAQDILAEIGLDMSRFLTPEHLVSWARLCPRTIQSGPVTRAGKTGKGNPYLKGALGEAAAAAAKTDTFLGERYRRLVKRRGKLKALVAVARSILVIIWHLLSNPAARFHDLGPDYHTNRVATQRRLRNHIAQLTAMGYRVTLEPAA

SEQ ID NO: 419108 - protein, 339 aa, unidentified
MKKITTIGIDLAKNVFHLHGVDEHGKVVLRKKLMRDQVLPFLATLSPCLIGMEACGGSNYWARKIKELGHDARLINPKFVKAYVKSNKNDYNDAEGICEAVSRPSMRFVPIKTVDQLDMQALHRVRSQLIKERTGIVNQVRGLLGEFGIVIPKGIEYARKNLPDILEDQTNELTEFGLKLFRDLYERLIELDDRISKMDQEIKTLFNADETCQRIHALEGVGPLIATAIIAMVGNFNEFKNGRDLSAWLGLVPRQHSTGGKELLLGISKRGNRYLRTMLIHGARSVVYRAAKKDDPKSRWINALKARRGENVACVAVANKNARIIWALITNGTEYQKAV

SEQ ID NO: 419109 - protein, 425 aa, unidentified
MNSNREIAAFIGLDWADQQHVIRLRVAGSTTFESQILDQKPESLQAWIAQLRQRFAGRPVAIALEQSRGSLLYALMNVDFLLLYPVNPQNLAKFRKAFSCSGAKDDPQDALLLLELLEKHRDRLRVWVPDDADTRCLRLLAENRRKLVNRRTALTNQLTSLLKESFPQALDWAGPLGSLRACDFLQSWPSLQALQKASTSRLRKFYRDHTREDAQAIHQRLESMRQATPLISDPAVLTAAELMIPALVKQLRCLIESIQQFDQQLKDRFQQHDDYTLFHSFPGAGPALGPRLLSAFGSNRDRFQCAAEVQNLSGIAPVTERSGKSCWVHWRLACPTFLRQSFHEFAAQSILFSQWARAFYDQLRARGASHHAAVRTLAYKWIRILFRCWQTRTPYDERIYLASLRRRGSPLCATLSSKLQEVPCE

SEQ ID NO: 419110 - protein, 392 aa, unidentified
MIIVGIDVASEKHDYFMLQKETGLVFRTSSVTIGNTEEGYKKLHADIQSFCGATGDSNVRIGLESTGIYHTNIITFLVTQNYKVMMINPILTNMARKAAKVHSAKNDNLDAKTICRYLVDHPDEFSPYTPTLYHTSMLKSIARKRYFITEDLRKAKLAVNNIVQLVFPEFKKFFSNIYGESALAILKEYPSVKKLAKAHISKLASFIHGRCKCTAEQLINAAKHSVGLSEDWYTFELEDAIAELEHIQKRIAAYDAQIKRYVNEACPNILTIPGVGYVTAGLILGEIGDISRFRSADSLVSFSGLDLTVYESGKYKALHVSPSKKGSVFLRYALFQVSRVIWQCNSTFCDYYRKKQAEGKHHYVILGHIQKKLARVIFSVLKNNSSFREQSV

SEQ ID NO: 419111 - protein, 354 aa, unidentified
MPATAQTAIAAIGIDIGKNSFHVVGQDTRGQIVLRQKWSRHQVEARFANMPPCLIGMEACVGAHHLSRRLKTLGHDARLMPAKYVRPYSKGQKNDFRDAEAIAEAVQRPTMKFVATKTADQLDLQALHRVRERLVSQRTGIINQIRAFLLERGIAVRQGQRFLRAELPRILATPPDVLSPRMLRIIEDLAGDWRRLDERVEGLSNEIEAIARQDAGCERLMSVPGIGPMISSAMVAAIGAGDVFTKGRDFAAWLGLVPKQISTGDRTILGKISRRGNRYLRVLFVQAAWVVLIKPKIWERHGLKPWIEAARKRLHHNVLAIALANKLARIAWSVLARGRAFEARKMDQAVNQSA

SEQ ID NO: 419112 - protein, 426 aa, unidentified
MDARTTKLAEAQEAAVIVGVDVAKRAHWARVIDPRGRELVKPLRFDNSRVGFLRLEQVLAEALGGVGLERVIVGLEPSGHYWKPLAWHLYSRGIRVVLVNPYHVKCSKELDDNSQLKSDRKDALLVASLVQQGRFLGAYFPEGAYADLRVLVTERFHLKRRLNSAINRLRGMLDEYFPEYEGVFRDLLGKASWWVLRHCPFPQDVLEYDPEGLATSLKLATRGRVGMKRARVLMRAASESVGVKVGPASARQKLYCLLDEIEFYRRQLEVVEARMRELLERLPEAKLLMSIPGVGPLVAATVLGEVGDFRRFRHWKQLRKLAGYNLVAQSSGQKEGRSVISKRGRPVLRHILYLAALATVTRSGEFRALYESLRMRQRNPLKGKQALVAVATKILRIMFALVKSGQEYCPGKLLGRCQQQLAEAAA

SEQ ID NO: 419113 - protein, 355 aa, unidentified
MAHPTTTRPRITVGVDTHLDVHVAHACDQLGRRVATVQVPTTPAGYQDLLAWARGLGEVEAWGVEGTGSYGAALARFLHAEGQVVLEVNRPDRAARRRHGKSDPLDAQAAARAVQAGQVTVVPKAGDGQVEMIRSLRVGRQTAMRARTQTINALHALLVTAPAELREQLRGLSVTWLVRAAAELEPGPITSPLAAAMLALRILAGRYQALSAEITTLTTELDRLTRAAAPRLVVLFGVGQDSAGALLVAAGDNPGRLRSDACFSMLCGASPIQASSGKTTRHRLNRGGDRQANAALYRIVLVRLCHDQQTKDYMARRLKQGKSKKEIIRCLKRYVAREVFAALNQMGQDALTAAA

SEQ ID NO: 419114 - protein, 347 aa, unidentified
MKEQNNRSEFTIGLDLGERRHRFCALNGKGEVVEEGTLGNDRVSLGRLSARYRGALAVMEAGAHSPWISRYLERLGWEVIVSNPRKVRAIYQQERKSDRRDALMLARIGRMDRALLYPVRHGSEEAQQDLLRIKLRDSLVRARVALINSVRFSLKSLGYAVSNPSSERFHKVAMESLPEAVREMIAPSVQALAELSARIAVLEREISLLARTKYPQTLWLQQVPGVGAITALYFVLKIEDPKRFKNVRDVGAYTGLCPRRDQSGASDPQLRISKRGDAYLRRLLVSAAQYILGPFGPQSALREYGLRLAADGTTRAKKRAVVAVARKLCVLLLSLWKNQTPYQPYPA

SEQ ID NO: 419115 - protein, 412 aa, unidentified
MNPVVGLDVSKGESQLQAFLDKGKPYRKSFSIKHDLNGLGNLLEFLEEVEDAANGNPPSVVLESTGHYHTPVIQFLEEQQYVYIIVNPLISHRAKSSSLRKVKTDAVDAYHLCELFYKEELEPYKKRGIQLLNLRNLTRQQESIAEISAKTKLQLHSLMDQVFPEYRGVFGSLYSKVSLLTLLEFPTSEAVLKMSERELADRIGALCKSRSDLWAIEKAQKLRDAALRNPFKKNLYESHIFNLEVLVTIVLQYQEHLSKIATEIDALANEIEEYHILQSIPGIGEKIAGTIISEVGEIDRFNDAKKLVAFAGVDPSVYSSGKFTASVNRITKRGSNRLRHALYMAVQSGIRDSRKKKTTDDIMARNKRLREFYDKKREEGKPFRVAVIACVNKLLHWIYALLKSRTTFQDIA

SEQ ID NO: 419116 - protein, 360 aa, unidentified
MQYDAALDTSATTTAICVVNSRDGAVVLEASATTDPDAIFRVLAPYAPRLRLVGHEATTWSAWLHRELEARGVPMVMLETHHAARMLEAQRNKTDKNDARGLAQLVRSGWFKPVHAKSDEANRMKLLLAHRRTLKRKLLDIENEVRQSLKMFGYMVGPRVQRGSFVTRVRALTGDDPLLSGTTECLLRCWSVLWDEYRKLHKLLVQIVGRDEVCQRWCEIPGVGPVTAMTFRAAIDDPARFAKSKVVGAHFGLTPKRVQSGTSVDLDGHISRRGDGEVRSALYEAASSMLTRSQKPSTLKAWGMKLAAKRGHKRAVVAVARKLAVIMHRMWRDGSSFRFAPEKQNDGNESAGATRASAQA

SEQ ID NO: 419117 - protein, 357 aa, unidentified
MGKLYLGVDLHKRSCWVTVLDADGHLLESRKLGTDQWELLDYFGKVRKPAALAVEATFNWYYFLNLVEPLGLELHLVHPWKTRAIASARIKHDRLDSRVLAELLRTGFLAEAWIAPRAVRERRQLLRYRVHTVQWATRAKNCIHAILNRNGMRSPLRSPFGPRGRQFLEGVELASPDRWEVDGQLARLDLLAGQLRELDREIRKRTKASPVAQALEQIPGIGPFLAWLLIAEIGDFQRFPTAKHLASYTGLVPSLYASGEHRWGGAITKQGSTVLRWGLVQAAHRAALSPRFQDYYQRQRERHGAGKATVALARKLAVIAYYRWWQALKAAGPPKVEEVRERSCAGAWSEDRPYLSD

SEQ ID NO: 419118 - protein, 330 aa, unidentified
MTKISQSMDTVFVGIDVCKAILEVALNDRQATQRFDNDAAGIKALRVRLAQLPVAVVLMETTGGLERAVARHLVCAGFDVMAVNPRSAHDFAKAMNYLAKTDSIDARVLSHFARTLHGSERGQKMLLRLPSEQQQQLAALLTRRTQLVQMRVAETNRLPLAHALQAKSINIIVKALDKRIKALDDHIDKRLDTHFKQKLDLLKGLKGIGRTTKAMLMSALPELGNLSGKAISKLVGVAPLARDSGTLRGKRTCWGGRADVRTVLYMSTMTAVRYAPSLRAFFQRLKAAGKPGKVALVACMRKLLVTINAIFKSGNSWSPAYPQERITKHA

SEQ ID NO: 419119 - protein, 414 aa, unidentified
MDVIVDRCAGLDVHKKTVVACVRSPGSGRQKRHSEVRTFGTFEHELVALREWLLGQGVTQVAMEATGVYWKPVWHVLDDGHTFEAVLLVNPAHIKNVPGRKTDVNDATWIGQLLECGLLRGSFVPPTEIRQLREMTRYRRQLTEERSREVQRLQKLLEDANVKLSSVASDILGVTGRMILDALCAGERDPDVLAAMAQRKLKAKTDYLRQCVPGRFGEFHTVMTRQLLSHIDYLDRAASDLDDQIDRLMIPFVEARDRFDTIPGIGKRNAEIIVAEIGIDMTQFPTPAHLASWAGLCPGNNESAGKHKSTATRSGNPWLTSALVEAAWSAVRTKDCYLAVRFRRIAKRRGDQRALIAIAHTILVICWHLLVDQTTYTELGTDYLAGKDQPDRRRKQLVAQLEQLGYNVDLTHAA

SEQ ID NO: 419120 - protein, 353 aa, unidentified
MRMIIGVDPHKSSHTATAFDAVTNTPVASVRVDATLAGYRELMRWAKELPDRRWAVEGARGVGRHLAQWLVARGEVVVDVPSTATARVRELSRGSGRKTEVIDAAAAASVAALQGDATTVAGEDHTTVFAMLEERRANLAAQRVRVANQLHAVLRDLVAGGAALAITAKSASTMLRSVRPASLCEHTRKELAQDLVRDLRAVDASLVAIEKRMSDALDDHGSTLRQVDGVGAVTAVRLIGRTGSAVRFATPDAFATYAGVAPIEVASGERTRHRLSRRGDRQLNSAIHLIAVTQVRMRDSIGRHYFDAKIAEGKTRNEAKRCLKRRLANHLWRLMTADERRLSTVTELDQLAT

SEQ ID NO: 419121 - protein, 423 aa, unidentified
MEVLYERCAGLDVSKRDAKACVRVTGPAGKATQTITTWTSMTNQVHELAAYLRAERVDLVVIEATSDYWRQFYFLLQEAGLNVELVNARDARNLPGRKTDVSDAAWLAQLGAHGLVRGCFVPPADIRRIRDLTRVRTAITDERSREIQRLEKMLEDSGIKLSSVATDITGVSGRTMLEALISGEEDPHVLAGLARTRMRPKIPALVEALTGRFNDHHRFMARLFLDRIDAQTTDLERVDARLAELMTPFSQARQLLVSIPGISDHIADVIIAETGADMSRFETPGRLASWAGTAPGANESAGRVKSTKTRPGNRYLKRALGTAALSISRSQTTYLGAKYRRIKSRRGPMKALVALEHSILIAVWHMLTNGELYADPGPDYFLRLKPAQTQTRAIRQLEALGFTVTLQPQTAAASGPRQTLFSR

SEQ ID NO: 419122 - protein, 362 aa, unidentified
MRHVGVDLHKQTSQIAVLSEEGELTQHRVANDIQRLEQFFTQLPPATPVAIEASGTWWWLVDLLERLGHHAILSHPKQTKAIAAARLKNDRVDAHRLVLLLRGDLLPSVWIPPAPLREARELLRHRMQLVWLRGEIRNRLVALLDRRNLHPTTAKSWFTKRGQRELQQLPLAETPSRVREDCAALLPLLDAQIRRLDAELVAHWGRDARVQRLTTIPGIGPFIAILLVLELGDIQRFANAKRVSSYIGLTPRIRASADRVRTGHISKEGNRLLRWALVLAATQAVRRPGPLRAWYHAVKKRRGRNVARVALARRLAEIVYHVWKHECDYFNRPPSRCCAGVSSRGDMGSSTASLIGQPPSRG

SEQ ID NO: 419123 - protein, 402 aa, unidentified
MAEHRCAGVDWASEKHDLVIVDAQGHRIAERTTRHDRRGLDELAVLLHAHHVTRVAIERPDGVLVERLLETGITILAIHPNQVAAARPRYRASGGKSDRFDAFVLAELARTDHHRFRALTPDSAETRALKALTRGREDLVQTRVALANQLRDQLDRFWPGATRLFADIDSPIALAFLERYPSPSDTNGLGEKRLAQFLARHGYSGRRAPSALLQRLRDAPASHASHAEQDARRQIVLALVAALKPLVEKIAQLTSEIAHAVHAHPDGPIFLSFFKDPKSVICAATLLAEIGDDRNRYPTPDALAADAGMCPVAIESGKRKTAVFRRGCDHRLRAATSTLADATRHWHPWATSHYAAARARGHDHPRAIRTLGRAWTRVLWACWQNHTPYDPNLHRALNNTRG

SEQ ID NO: 419124 - protein, 463 aa, unidentified
MAARKPKRMGAQTVEDEDYQLRYERVAGIDVAKGSAMVCLRLPPGPGKVRRTSRTWEVMARVPDIEALAAELKAARVERVSMESTSDYWRIWVVVLEGAGLDVQLVNSSQARNLPGRPKTDKADAQWIARLTEMGLLRGSFVPPPEIRALRQYTRQLVHLSQDRTRYWQRLEKLLESALCKLTSVVSGLAGSASCLAMLEAMIAGERDPQVLAGYARGPMRSKHAALVKAFTGMQFGPEHVFSASSDLRMIKMLDAEITGLEQQVRDHLAAIPAAWGTDADGVTGPGAGTGPDAAVLPAVDRLTEIPGVGPAIAAGLIAEIGLDMSRFPTPHALVSWVGMAPVPNQSGPRKGRGKKGHGSSYARRLAGQAGNGAARTDTFLGQRHRRIRSRPAGGGWKKANVAVGRSIIIIVWHLLKDPAARFTDLGPDHYAKHTDTNRKARNHKRQLEALGYDVILTPREAA

SEQ ID NO: 419125 - protein, 338 aa, unidentified
MFVIGIDPHRGSHAAAALDSQEHLQGELQLSADRRQRQQLLAWASDFTPRVWAVEGATGTGALLAQQLVAAGEQVLDVPPKLAARVRLLDNNHSDKTDRHDARSAAIVALRNSRLRRVSVDDHGAVLRLLAKRHHDLIAARTRAICRLHTTVTFLVEGHLPRRLRADRAARILAGIHPTTAIAVERKALARDLLAEVRRLDRELAAHCERISAAVAATDTTLTQLHGVGPIVAAYVIGYSGDITPFPSAGHYARYNATAPIEASSGPVVRHRLNPRGNRQLNHAIHMIAVTQVRHNTPGRDYYLRKQSEGHSRKEAMRALKRRISDAVYRQLVIDSRH

SEQ ID NO: 419126 - protein, 350 aa, unidentified
MNKKIVKQSVGIDVAQKELVVTLGRMYDDWTPELYSYKTFPNNEKGFMAMVSWVKKQSTEEVSVRFIMEATGVYHESLAYFLARNSYDVSIVLPNKISSYSRTLDIKTVTDKTASEAIARFGLERKLDNWVAPEPIYKRLRQLTRERGQLVEERTMVKNQLHAEQAEAEPNKGSVERIKKRIVFLNKQELEIKAEMLALTKKEESVQKSIALLTSLPGIGQLTAVTILAETNGFELIRNKRQLTSYAGLDVREKQSGTSVKGKPRISKKGNKYLRKAMHMPALTVIKNDERFKAIFARLVSKHGIKMKAAVAVQRKLLEMTYILFKTNTPYDKNYLKKEDAESLHDGTSC

SEQ ID NO: 419127 - protein, 442 aa, unidentified
MAQRNRALSITNPDAAGIDIGSASHFVAVPPDRDDEPVREFRSFTADLHALADWLKACGVETVAMESTGVYWIALYELLESRGFEVLLVNARHVKNVSGRKSDVLDCQWLQQLHAYGLLRGAFRPAEAVCSLRSLSRQREMLLRGQARCVQHMQKALAQMNIQLANVISDVAGETGQRIIRAIVAGERDPYALAAMKHGRIRASRDDIAQSLHGHWRTEHLFALRQALAHFDFHGTQLAECDRALQASLTQLHAHAGAPGPGRRSGRTRNSPQFDLRTQLFQMCGVDLTRINGIEVTTALAVLSEIGADLSRFPSVKHFTSWLGLCPGTRISGGKSLSGKSKRTANRAAHALKLAAAALRTSQSALGAYFRRMCARLDKPKAIAATAHKLARLIYMMLTKGEEFVDRGEEYYEERHRQRVLHHLTKRAEKLGMKLMPAQTIE

SEQ ID NO: 419128 - protein, 344 aa, unidentified
MTEYVGLDVSKEETSFCVKDLAGKVLARGKVATDPEALFEALKAHCLCPERIVLETGTLSGWLARELGRLGLAVDVIDARQAHAVMGLQHNKTDANDAALLAEIARTGFYRGVAVKSEAAQEARILLKARGHLVRQRRDTENTIRGLLATLGIRFPRGSGKLAGRVREALEDAPGLRLMIEPLLSSVAALGRELGRLDEAVTARAKSAPACRLLMTVPGVGPVTALAFAATIDDPARFAKSRTVGAYMGLTSRRWQSGEMDYSGRISKHGDAMLRSLLYEAANSLLTVVRRAHPLKDWARRIRKRTSHKKACVALARKLAVILHRMLITGEAFRWPEKQAATVA

SEQ ID NO: 419129 - protein, 340 aa, unidentified
MQVTTVGLDLAKSVFQVHGVSGHGKVVLRKQLRRDQVAVFFTNLPACLVGMEACASAHHWARKLQAMGHTVRLMAPQFVKPYVKSNKNDAADAEAICEAVARPSMRFVPIKNVEQQSVLALHRVRQGFVKARTAQANQIRGLLAEYGLVVPQGIAYVAKRVPDLIEDASIELPGSFRLLIVRLLEHLKLLQRQAEELEAQIKAWHRASDASRRLEKVPGIGPLTATALVASVGDAKNFDNGRQFAAWLGVVPRQHSSGGKPTLLGMSKRGDAYLRTMLIHGARSVIYRATQRLDASSWLMKLTNRRNKNVAAVALANKTARIVWALLAHDREFEADYAAA

SEQ ID NO: 419130 - protein, 321 aa, unidentified
MTYVGIDVSKATFVVAYSSAKSSETKTFKNTTKGIREFIRTISPEENHCVLEATGNYSMLLVYLLSKAGFTVSMENPLKIKNFARVMLSVVKTDEIDARLIALYGERMQPAPFKLRSDSLLLLKQKRTVLRQLKKQLTANRNLEGSLKVLPFIDSKCKKVLEKTIKFLEKQIEEMEEELTSLAEIEYKKQMDLLTSIKGIGATLAAALIIATGGFTYFDNAKQLTRYLGLSPTYQQSGTSVNVKGHINRNGDAYLRSQLYIGAMASLRCNTECKACFERLRSNGKPGKVAIVAVANKLIRQAFAVVTQEKIYIDGYKSVKP

SEQ ID NO: 419131 - protein, 482 aa, unidentified
MTLVSSDDDLDWEFVFDSRLGHPTGRSEEPMVKRSKKRCEELPILHPHAAGIDVGASELFVAVSADRDPQPIRSFPTFTRDLNALADWLQQCGVRSVAMESTSVYWIPVYQILESRGLEVCLVNAQHVKNVPGRKTDVSDCQWLQYLHSVGLLRASFRPPGFICAIRSLWRHRSSLIQMAAEHVLHMQKALDQMNLQIHRVLNDITGMSGLRILDAILAGERDPVTLARLCHGGVKNSEDTIAKSLEGDYRPEHLFALRQSLAAFHYYQQLVVEVDQEIQGQLGSLETATTAEPTVPKRTKASAYQRRRYEPKTFDLRGELYRIFGVDLTNVPGISAITAQTVLCEIGTDVSRFRNASAFASWLGLCPENKISGGKVLYTKSRRVRSRVATALRMAANSLHHAKDYLGEFFRRITRKLGKPQAITATAHKLARIVYHLLSTKEAYNETVFHRCDEEAIKRAQYRLRKQAAHLGFQVIPLQNG

SEQ ID NO: 419132 - protein, 417 aa, unidentified
MAEEIEWFVGIDWASQTHQVCLVDAHGECLGERAVAHGGPGIEELCDWLITRTGATPEVIGVAIEMTQGPIVEALLERGFCVYGINPKQLDRFRDRFTVAGAKDDRRDAHVLGDSLRTDRHAFRRLSNDEPVIVKLREWSRMADDLQQERNRLASRMREQLWRYYPQLLELADDLAADWFLDLWSRAPTPAMAVRLRETTIERFVKAHRLRRWQASEVLSILKQKPLSVAPGVVEAASDHIRTLTVRIRLVNQQLKAAHRKLDELCAQLIPSEEDEPGQQCEQRDVVILRSMPGLGRIILAVLLAEVWQLLRRRDYHALRSLSGVAPVTRRSGKTRVVVRRYACNKRLANALYHWARLATQHDALSRRRYAALRRRGHSHGRALRTVADRLLSVACTQLEQQTLFDPTYEVRDAASG

SEQ ID NO: 419133 - protein, 341 aa, unidentified
MGEVTTIGLDLAKSVFQAHGADRSGGVVFRKKLRRDQLLAFFASQPRCIVAMEACASAHYWAREIAALGHETRLIPPAYVKPFVKRQKNDMADAEAICEAAQRPTMRFVGPKSAEAQGAAVVFRTRDLLVRQRTQLINALRGHLGEFGFVVRQGAGHVTKLIDLVADPSSDLPAEARPVLAVIAESLRSVQAKIAVLDREIAARAKANPIAKRLMTIPGVGPVVATAMVALAPPPSTFRRGRDFAAWLGLTPKQHSSGGKERLGRTSKMGERSLRRLLILGASSATKVAARDGSRASPWLAGMLARKPRMLVIVALANKMARIVWALMAQGGSYRAPAMAV

SEQ ID NO: 419134 - protein, 400 aa, unidentified
MNERQQFRWFLGIDVSKETFDACCIPSHGERLFNLSASMDRRGFEELIRQLSSLSIPQDSVLVGMESTACYHINLYSFLTSLGYSVVVINPLLISNFVKLQLRKTKTDKKDASVIARFLLLNRDSLSQTIVSSDISDLRDLSRQRESLVDQMSSTKSEIKRLLTMTFPELEHILGIFTKSMLRLLCQYPSAASIKQAKRSKIAKILIPGSYGKQTDASVDRIVKAAQVSVGTSSATKEIILRQKASLLIQLGEHLQELTDILIELCQGKIQGEMDILTSMKGIGEKSAMNFLIEIGGEIKQFESHKKVIAMAGLDPALYQSGKIDRKGKISKRGNRHLRRVIWLMATKVIQFNERFKQYYLKRIKDGLPYKKAVLATAHKLIRVMFAMLRNKTLFDPRMN

SEQ ID NO: 419135 - protein, 316 aa, unidentified
MKKYHNFIGIDIGKFSFVVNIQGTNNIEEFDNTKVGIKKFHKQHKDILSSSLYILEATGCYEAKLLEFLSMKKYSVHRADTRKVKNFIRSYGNSVKTDYLDAKALALYGKERVDGLSLYEFPPKQQKILFDLAQRRIELKQMIVAEKNRLSGPDNKNIGNSCKSIIKVIQEQIDMITAQIKDLVAKDIALSNKARTLMTVPGIGEITALNLLVLLPEIGSLCRRKIASLAGLAPRANDSGQFKGYRRINHGRQVIKPILFLSAMAARNSNSHLKQFYQKLIKKGKKKMVALTALMRKILIIANARLKNIDISTKHG

SEQ ID NO: 419136 - protein, 346 aa, unidentified
MSEKKHFPCWVGVDVSKDSFTAAFQVAGDERTLYPAQDSFGLDRAGVRRLLKWMRGCAGALPCGIAMETTGRCSERLAALILKEAPGQHVAVCNALAVSRYRSSYTCDKADRHVDPKYIAKFACDRQPEAYTPMAKEAAELRELVRARVALVEACQRLRNRQDGLHDGLAMEANRQVVAVMERKIKKLDAAIRSLVEKEEEIRREVELMVTVPGVGIPSAATIYAELGTLSGYSRRQLSALSGICPSVRQSGTSLRKGAMSRRGSRLLRRTLFLDSQQAINKIPSVASLHERLLRRPNSTKMTAKCACMRKLLMIIRGVVVSGKPFDQGHVPENFTHFEKKGEKTA

SEQ ID NO: 419137 - protein, 342 aa, unidentified
MRISTIGLDIAKNVFQVHGIDAAEKVVVRKRLRRRQVLEFFKAVPPCLIGMEACGTAHYWARELTKLGHRVRLMPAKDVKAYVKRNKNDTTDAEAICEAVRRPTMRFVQIKSAEQQGRLMLHRTRDLLMRQRTQVINALRAHLAELGIVAAQGREGIKELLNIIASEHDARLPVDAHTSLVVLGAELQAMQTLIGSIEKRMMAQHRGNEASQRLESIPGIGVIGATAIAATVPDPKIFRSGRDFAAWIGLVPREDSTGGKQKLGPISKQGDRYLRRILVVGACAVLRYARHRPEKYPWLAQLLTRKPFKVVAVALANKMARTAWALLAKGGTYRAPALAAAA

SEQ ID NO: 419138 - protein, 404 aa, unidentified
MPEQSDFQRWIGLDIHKAYFVAVGVNAEKRTIFGPQKIPNDQLETWISKHLQPTDAVVMEMTTNAYLFYDTLVPHVGSVIAVHPPNVRLVTGVRVKTDKKAAETLAQLHAAGMLKGVWIPPVEVRELRAVIAQRAKMVRLATQAKNRLNSLLHRTHRERPAQPFSPEQRFWWESLPLTTFEKYIMQSDLETLAFAEKQVEAIEEILRQEAAKDERVPLLTQLPGVALLTALTILAAIGPIERFEDAKHLVGYSGLGASVHDSGQTHATGHITKAGRRDLRGAMVDAANAAVRDHPYWKKEFERLEFRLGRSKAIVAIARRLLVAVWHILRNEAADRHADVTSVAASMFKLAYEIKVRNLPDDLSARAFTRKQLDRLGIGQDLDILPWGGTKIKLPPSTLPLEKK

SEQ ID NO: 419139 - protein, 309 aa, unidentified
MKQSVVYIGVDVAKLHLDVAWAAECRRFPNDKRGQAALVAWIKPSLTAVQLICEASGGYEQGLLESLERSEVKFTLVQANRVRQYARAAGILAKTDKIDARVLAAFGAAMQPSPSLPHSAEQKRLRQYDAHRRHLSVLLVAEQNRLAQLNCAELRALSPSLINKIQKQIDTLDARIGDLIAHDQQLRAKAQKLISITGVGTRTAALVLAQMPELGKLNRRQTAALGGVAPFNHDSGKVHGQRTIFGGRRALRSGLYMAALCAARHNPILSSFYQRLRAKGKPHKLALTAVMRKLLLALNSCLKPQPILA

SEQ ID NO: 419140 - protein, 455 aa, unidentified
MPRRRPSTRPVTMPVLHPHAGGIDVGATELYVCVPLDRDPQPIRRFGAFTADLHTLADWLTQCGVTSVAMESTGVYWIPLFQILETRGFDVCLVNARHVKNVPGRKTDVQDCQWLQYLHSVGLLRASFRPPETVCAVRALLRHRETLVQGAATHTQHMQKALNQMNLQLHHVISDLTGVTGLAILDALLAGERDPQVLAGHRDGRIKASRETIAKALVGDYRPEHLFTLRQALASYRHYQGLIAECDGAVQTLLGAVASQVDLARQPLPLAPAGHRKPHRKAPSFDLRAELYRVLGTDLTQVPGLQTPTVYTLFAELGADLSAFPSGAHFASWLGLCPDNRISGGKVLSVSTRPVKHRVAQALRLAAQSLCRSQSALGDFFRRTRAKLGAPKAITATAHKLARIVYHLLTTRQPYNESRLAVADATRRRHSESRLRAQARALGFQLVPALEPAVS

SEQ ID NO: 419141 - protein, 341 aa, unidentified
MTMFAGLDVGGKRTAVCVIDAAGKIVWRGMVDTHPEMIDAALERFKGMLDKVGLESGPFTPHLFRSLATMGYRMICMDARRAADAIKSRRIKSDKGDAWALAEMLRTGWFTSVHVKTVDSHRLKALLGARDQLVKVKRSLGNQVRGLLRPFGIKLPSRVGAKKFDEAAYEATRHDPMLHAAVRALLEALASIDAQQALLDEELNELAKRNEIAWLLMSVPGVGRITALAFIAAIENVERFRRTRDIGAYLGLTERRYQSADTDVGMGISKQGDAMARHYLYEAANVLLTTVKKRFALRSWGLKLIKTVGPKRARVAVARKLAVLMGRMWKDGVHFEAAVTA

SEQ ID NO: 419142 - protein, 352 aa, unidentified
MMIIGCDFHPRFQQISFLFEETGECGQRRLMHTAEAEQYYRSLRGTKVRVGIEATGSYGWFRRLLSELGHELLVGDATQIRASNPRRQKTDKRDAEHILGLLAQDRFPAIWQPPAENEQLRQLLLHRSRLVRLRTRVTNQLDGMAKNEGLLVPGGWSGKRRMAIEALPLPGWYGERRKDLLGLLDRLEERIAPLNKAVSQAAANNAEACLLRTHPGVGPVVSLAYVLTIGNWQRFARGKQVGSYLGLIPSEDSSSDKRRLGHISKQGNTLLRWLLVEAASTAQRYDASWHRQYLRLSMNKHHGVAKVAIAHKLAVRLYWMLRSGEDYRHVRERGSHARQSECPGGRNTRPIE

SEQ ID NO: 419143 - protein, 360 aa, unidentified
MQTKVNENLFSGQSIYVGIDCHKKNWTVTILGEHYEHKTMSQNPDPDILASYLRRNFPGADYSAVYEAGFNGFYSCRKLRQLGINCSVIHAADVPTMNKEKIQKIDPVDSRKLARSLRSKEFKSIDIPEPSLEADRSLVRQRFRVMKDVTRTKSRIRSLLFQFNINVPDRFTTGQTRSWSKVYINWLKELQIEHESLKQTLDNYIRIGEIQRKELLSVNRQVRSLSQTDAYRGNYNLLISIPGIGFLTAMTFLVQIGDIRRFERIDDLCDYIGLVPMMKGSGPKLYTGKMINRGRKELKIMIIEAAWDAVRMDPALMARFNELTRRMNKNKAIIRIARKLVSRMRYVLLSHEPYKLGITE

SEQ ID NO: 419144 - protein, 421 aa, unidentified
MSRTVEIVYPVCCGMDVHKNFLVACIATTNEHGHTEHHIKRFSTYTGDLRRLSEWLISHNCRDVCMESSGKYWIPIFNALEKANINVCLTHPKYVKAIKGKKTDKKDAKWISELFKCDLVRSSFIPPLDIRQLRDLCRYYVKLTGFASGEKNRAQNCLTMCNFKLDDAFSDIFGKSAMRVLDALLEHGHGNFELDGLVSGKCKSSPEKIRDALDGELDPAQTEKLNLIRQHINNINDLKTSLENLIYQLAEKYQTEIDLLLSVPGISSKLTAIRILAEIGADMSVFETAKKLVSWAGLTPQNQESAGKKKTTRIGRAGAYLKPLLVQIALAVSKSDKHPELKNNYLSLKKRRGGKKAVIAIARKLLTAIWHMLDKSEAYNPVLYQKADKPPASREFTTAQAVAFLRNKGFVVIDEVSGEIA

SEQ ID NO: 419145 - protein, 374 aa, unidentified
MEHHSEVFVALDTAKLRNAVAIADGGRNGEVRYLGEIDNSEAETRKLVTKLAGKYARLTFCYEAGPTGYGLYRLIKSIGHDCIVVAPSLIPSKPGDRVKTNRRDAVNLVKLLRAGELTAVWVPDERHEAMRDLVRARDAAVKDYRIKRQNVSSLLLRLGRHYPGKKTWGRAHINWLTSLRLEHREQRIAYEEMLLAVRQVRERIDRLEQAMRKAVADWTLSPVIEAVQAMRGIDMVGAITFLAELGDLSRFESPRQLMAYLGLTPSERSTGESVNRGGITKAGNTRARRLLIEAAWSYRFPPRVSKDMQTRVGAAPRIAREIAWKAQMRLCGRFRTLTRKGKRPTIVVTAIARELSAFIWAINREVAGSHATAN

SEQ ID NO: 419146 - protein, 341 aa, unidentified
MNAITIGLDIAKSVFQVHGEDQTGKVVLQKRLRRHQVEAFFSKQLRCLIGIEACGTAHHWARTLVALGHDVRLIPAGYVKPFVRRNKNDARDAAAICTALSRPDMRFVTIKSVDQQASRGLERSRDLLVKQHTQLMNCTRSLLAELGIIAAVGRRGFAELIARVKHNEAAIPPVLLAALLPLIQQIEGLHTAIAALEDRIIAAARDNPVMRRLAGIPGIGGLTAHAIVTAIGDGRQFGSARDFAAWCGLTPQQHSSANKRHDKGISRQGDIRLRKLLALGASTIMRNARSRSDRATLWQRGILARRPVKVAVLAQAAKNARIAWALLVSGETYRNTTATTA

SEQ ID NO: 419147 - protein, 338 aa, unidentified
MNIVFLGIDLAKNVFQICGLNQAGKPVYTKRTGRKELLQMLANIPACLIGIEASTGAFYWQREFEKLGHNVKVISPQYVKPFVRGQKNDGNDAQAIAVALMQPTMHFVPPKSPEQQDIQALHRARQRIVNHRTATVCQIRGLLLDRGITIGAAVSRVRRAVPLILEDAENGLSVRMRSTIAELYDLFNDLERRIHFFDKEIEIVFRQSEACQRIAKVKGIGPKTATAVVAAIGKGTEFKNGRHFAAWLGLVPRQHSSGDRQVLMNMTKKGDKHLRTLFIHGARAVVRVAANNNDSHMNQWVNQLKERRGFNKTTVAVANKNARIIWSMLRNETEYQVV

SEQ ID NO: 419148 - protein, 354 aa, unidentified
MKRSTKYVALDVHQAMTVVAVREENGRIISRTILPTEEQAILEFFRSMRGSIHVTFEEGTQAQWLYDLLVNRVDRVLVCDRRGEKRHGSKGDQADADHLSELLRLGSLRAVYHGSPHLSTLKELTRTYQNVVEDSTRVMLRLKALFRARGIKAPGKRVYHPRNREEWMAKLPEDGVRFRAQVLYAQLDGLRELRPKAKAVMVAEARKDPAWEVLRTIPHLGPVRVALVLAIMRTPWRFRTKRNLWAYCGLAVVTHSSSDFVQVNGQVVRRKRAPMTRGLNRNYNRELKDVFKAAATAAIGRPGPLRDYYQARVDGGMREELARLTLTRKLVAVTLRLWKKGQPYDPEKLTVQAC

SEQ ID NO: 419149 - protein, 416 aa, unidentified
MEKEREVVCGADIHKQFLLATILTKGGQKFQDRFESNFEGLLSFRQWLLGHGCQKLAVESTANYWQPIYLVLGKDVEFVLANADQIKHIPGRKTDVLDSEWIAELCLKNLIAPSRIFLEDDRDLRAMIRTRENYVKIRSQIKNRIHQELESSCIKLSSVLSDIFGKSGIHIIRGILNGLSIVEIMDDIPSKRLKAKRKEIQDAIRTNISPVQVGLIGQLLDSVDFLGNEIASIDKQIQALISKRQEDLMIAMSIPGMGFTYASTILAEIGSFADFKTGERLAAYCGLVPSVYQSAGKLITGHITKHGSPHVRRMLIEVAHAISRTKADSKLKRFYFRIKRRHEAKVAIVALARKVICILHHLIINREMFEDETAPKSKRERPGRSSSMTELNVTDAIQILIRAGYTVQKRSEKEGG

SEQ ID NO: 419150 - protein, 469 aa, unidentified
MTYTLLNHIQGKNGSQWAKFIRETGTENLLMVAIDAAKYTHKAMICTFYGDILVKPFEFDASLTGLDIVKKHIREEREKYGMKEVVVGIETTGHYYEDLVRRCHKEGYRVRIINAATTDQERQALLNWSKTDNIDLMAIIQSLIHGRGTSSELRSGSIGSLQKLTRARRELVDDRTSTQNLIRMHIDHVFREFQGKSIWDNGKRKHVQPFSKLFGKAPRYMMRHYPHPNDILELGKEGLRELSIRENLKLRDSTIECLLDFAQSSISQPKENVEVDIYLLAQKLDRLELLDNQIKRLEKKIEDLFIETPGAIILAVPGIGVVTGAEFYAEMGDITDFDHAGQLIKLAGTNPIVKQSGGHKPSYYGISKQGRRPFRNIVYQVGKSLAVNNPEMRQRYLALKERGKHTRQAYVALGNRMIRLAFSMIRHQSLYRTDQENYVLVEVIRNKLRSPNVEKFFENFVSPGLTQSA

SEQ ID NO: 419151 - protein, 370 aa, unidentified
MGSPLLCGIRCARLEMRFLPITRRGSDMKVTRVGLDIAKEVFEVHGVNDHGKAEVQRQLRRARVLEFFANLEPCLIGMETGSGAHYWARALQKLGHTVRLMAPRFVKPYRKNDKSDRNDAEAICEAVGRPNMRFVAVKSEEQQVVLSVHRMHAGLKSERDAMANRLRGLLAEFGIVLPKGAARLRSGLPALIAQERVPVLMNQALADGWTRLRELDAQVNQHERQIRALALLSEPARRLMEARGIGPMTATAAVATIGDAKLFKNGRAVTAWLGMVPRHSGTGGKIWMGSITGRGDTYLRTLFVQGARSVMNTTRGKKDPLSLWVERLRARRGDNIAAVALAAKNVRMVWAMLARGESYRSPQAAQGAAA

SEQ ID NO: 419152 - protein, 403 aa, unidentified
MNAVGIEVSKGKSMVTIMRPFGEIVSSPFEIKHTSSDIHSLIKLIHSIEGESRVVMEHTGRYYEALAHQLSAADLFVSAVNPKLVKDFNNDSLRKIKSDKADSVKIARYALDKWQSLEPYSITDELRAQLKVMNRQFHFYVKQKTAMKNNLIGLIDQTYPNANTYFNSPTRSDGSQKWVDFVSTYWHVDCIRKMSLNAFVEHYQNWCKRKKYAFNKSKAEEIYTKTKELVPVFPKNEITKHIIRQAIDQLNSTSVTVETIRTLMNETASKLPEYSIVMQFKGIGPSLGPQLMAEIGDVTRFTHKGALTAFAGVDPGVNESGSYAQKSVPTSKRGSSNLRKTLFQVMDVLIKTMPQDDPVYQFMDRKRTQGKPYYVYMTAGANKFLRIYYGRVKEYLSVLPDPS

SEQ ID NO: 419153 - protein, 390 aa, unidentified
MQPTQMQDVTRNDEVLAVSLELASKSWKVGLDDGRRKAPAVHGVDHGEPKGRLEEAIAVIEKVKKKWGLAPGVRVVVVYEAGQDGFWIQRALSERGYEALVVDPASIPVERKARRAKTDRLDAIRLVLALRAWLRGERDRMKVVRVPPVEAEGQRHLVRDRGTLQKEIGQHRDRMRKLLRTVGCWESIEGDLTGRLERGEVTGYDGNALPAWLQERLVRECVRLQLVEEQLAQLEKTLPGQLPEAVRQQIVQLMQLKAVGPVGAQRLMLELFWRQFNNRREVGSCVGLVPQPYDSGESRVDQGISKAGNRRVRALLIEMAWMWLRWQPHSELAHWFAQRTRGSGSNKRSKRMAIVAVARRLAILLWRYLKHGVLPEGVQLKPVKVTLKAA

SEQ ID NO: 419154 - protein, 348 aa, unidentified
MTISMIGLDTAKHVFQVHGVDAAGKAALKCKLRREEVIPFFEQQERCTVVLEACGAGHHWARMLTQLGHEAKLLAPEAARPFVKKGKKNDAADAAALCAAASQPEVTFVPVKSPEQQGVLALHSVRSLLVKQQTMLANAMRGLAAEFGLVVAKGVHRLDELEAQVQAEASMPAPAKQAFAELHGHSQAAATRIAGLEAQIVAHARQDATARRLATIPGIGPITASLIAATVGDTIGSFKSARHFAAWLGLVPRQHSTGGKTRLGRITKAGNGEIRKLLVLGATSMVYRAAQWNSAAGAWLRGVLERRPVRLATVALANKMARIAWAVMTRGEVYQVKGRAPAAAVAVA

SEQ ID NO: 419155 - protein, 481 aa, unidentified
MSKPTQHSKKPGEKKTAAAQGKRDRKRKGMCLEDRPILEVNAAGIDIGAREIFVAVPPDRDEDPVRVFSTFTEDLEKMAQWLVSCGVTTVAMESTGVYWIPLYDVLETHGVRPCLVDAHGMKNVPGRRTDWHECQWLQFLHSVGLLRAAFRPDGDVCAVRSLMRHRSDLVQMTNQHIQHIHKALTQMNVQIHHVIDDITGVTGLAIVDAIGDGQRDPLELAKLRDRRIKASEETIVKSLQGTWRPEHLFTLKQSRQMYRHYQEQIAACDEEIEKLLVTFQPRVDPAEKPLPPDRKKRKRGRQKKNAKTKQGFDLRSESYKIFGVDLTQIPGLMAMVLTLFSEVGRDMSRWKTAGQFVSWLALCPDNDITGGRVAWRGMRRVHNRAGELFRMAAYSLHHDKSPLGDYLRRMKSKLGPAGATTATAHKIAIIFYTMVKKQVEYDATLWAERDTQREKRFEAKLKRQAQQLGYKLVPIEENPAA

SEQ ID NO: 419156 - protein, 426 aa, unidentified
MKVMHDRVAAIDVHKDMVKVAVRVPGERRGTRKTDVLEFRTFYGVLEEMGRELRRRGVTHVVMEASGVYTEPVYYALAGLDFTEVMVINPAHAKALKGHKTDARDAIRLLDLYECGLLSGSYIPAPDLKEVRDLARYRMKTVQARASEIQRLQKTLETAGIKLSSVVSDVTGVSATAMIEALIDGERRGAVLADLAQGRLRTAGKMADLSMALAGRFTDHHALMCRLHLDRLQGLGEAVAGLDATIAPLAARHAREAGLLKSLPGFGDVVVAGWLGEIGPAPHQHFATAQRLASWATVCPGNYMSAKKSKGGRTGDGGNYIKPLLVQAAWAAVRVPGRLQARFHRLVRRFGGARNKGAIKRAIMAIAHTLLKIAYQVLKTGTPYTDLGAGFYASRETPQARQDYLIRQLQKLNPGCVITVTPAEAA

SEQ ID NO: 419157 - protein, 446 aa, unidentified
MSRKKRTHLRGKRGQAFADKIRGIPLDCILCVSIDIHKYFHMVMMHNALGEIVTPTFEIDIFQTGFDRLCQAVDEAVERTGTELVLTGMEPTSHYFENLARHLRHRPQPVTLINSYAVKENRNQQMMHHEKDDEIDTAAIGDLLKRGEGTPFNPAVGVYLEMQHLDRVRLSKVKIRSMLKNQVIGHLDRIFPGLVIIGETAKARYEPLFATDFWLCQTMQHLTRVCPNPRKLAAMSVQDLIDAFHDHGYAMGPKTARKIIAYAHKVLPPAPELIAIRGELLSHDLALLDEVQSHITQLEERLCTLLAQTPYHIWVRLKGLSAVQVASLAAATGDPTHYEYAGQVFRRSGLVSGRNDSGTRKRKGKGKRVTKAGDVYLRRSLIGAVSTLMLHQPVLYQYYTELKLSKPAGVARVATARRAIGILWAIQRDQRSDSLCFKKGQQDVDK

SEQ ID NO: 419158 - protein, 337 aa, unidentified
MMYSGIDLHSNNSVVAVIDDSDRVVAQKRLPNDIAKITGFLARWQDELAGVVVESTYNWYWLVDGLQDAGHHVHLANTAAIKQYEGLKHSGDEADAQHLAHLLRLGILPTGTILPREQRAARDLARKRMQLVQSCTTHVLAVENIMARQLGGRITSNQIKRLTDDAIDSLPLAADVGLAIKANVAVIATVQSQIEVLEKRLQERVEPRPQYGLLTSVPGIGQTLATVIVLETGPIDRFADVGNFASYARCVDSVLTSNRKKKGEGNVKNGNKYLAWAFVEAANFARRFCPEAKRFHERKKAKTNNIVATKALAHKLARACYHILKEGKPFDVTRCFA

SEQ ID NO: 419159 - protein, 355 aa, unidentified
MNSKKYVGMDVHQATISVAVRDSSGKLIMESIIETKAATILEFIRGLNGSLSVTFEEGTGASWLYDLLKPHVSELIVCDPRKNALLKGGNKNDKVDARKLSELLRAGLLSPVYHGERGVRTLKELARSYLTLTKDLTRVMNRIKGLYRSWGIRCAGRDVYTASHRDDWLAKLSEAGVRRRADRLYQQLDHLRPLRQQARKELVAESHNHPACKLLCEVPWLGPIRVALLIALMQTPHRFRTKRQLWMYSGLALETRVSGEYRFAGGELQRSKKRATPRGLNENHNHDLKNVFKGAATRASVSAGPFQNFYAGLLAKSMKPSMARLTLARKIAAITLAVWKKGARFDATQLKSQAA

SEQ ID NO: 419160 - protein, 404 aa, unidentified
MGTPDETTVWIGLDIGKTEHFAEVLDEAGSPLFAGAVTNDEADIEALLARAESFGSPALVVDQPGSLARLVLGVAARCGVPVAYVPGLVMRRAADLYPGESKTDRRDAFVLADTGRTRRHQVHWLDAGNDELLEQLRVLNGYDIDLAADVTRLTNRLRDALTGLSPALERVLGPKLRYAGARDLLARYPTPQALATAGRGRIARTIRKRSPRVAKTLTEAVTEALAAQTVVVPGSVAMGRVIAEVATELERAQQRRERLGAEIEELFEAHPFGRILGSLPGVGPRTGARMLAEIGDISRFANGSRLASYAGLAPVTRQSGSSIRGQTRSRRGNHRLKNAMYLSAFASLRDPVSRAFYDRKRAEGKKHTAAVICLARRRCDVVLAMLRSREPYRAEAPRSESAAA

SEQ ID NO: 419161 - protein, 366 aa, unidentified
MLQKAELSCEADSENYLGGSSETMYFIGLDVHKRTISYCVKDAAGKVHQEGKIGSTRRELDAWVKTVPQPRTIAMEATIFTGWIYDHLLPHAEKVKVAHPLMLRAIAAAKRKNDKIDASKIADCLRCDFLPECHMASTEIRDRRRTLRYRGLLVKQMVQMKNRVSGLLLEKGVTHTRQRLHKVGYFAELMSSSEEIDQSIRPLLKLSREHIVRAQKLDYALVSSLERDPMLAERLKRLRTVPGVGPITALTWALEIGDVSRFRSIKQAISYCGLCGAERSSADKVARMPISKQRNKHIQHVLVEAAKLAPRQCHELALLYEKEMQRGNRNRATLAVARKLVCWILAVERRKQDFVPAEKFGGTAAA

SEQ ID NO: 419162 - protein, 390 aa, unidentified
MQVTADRPEAPSAIRSDLGAIFVSLELSRSIWLITSLSSGSGEKMSKHSVPAGDICALMARFSELKQKALARTGKLFQIIVIQEAGLDGFWIHRMLQNEGIESHVVDPASIAISRRRRRAKTDRIDGEALLRTLLAYKRGEPRVCAMVKAPTPEEEDRRRLCRERKVLIAARVEHVNRIKGLLFSQGVSGYEPLRRNRRQRLDELKTGDGRVLPDHLKAQISRELDRFELLIEQIKAVEAERDALFAAAKAAAPTPAPVTMLLDIKGIGPEFAAVLWSEGLFRHFDNRRQVASYAGLAPTPWQSGSVDREQGVSKSGNPRLRTTLIQLAWLWLRHQPQSALAQWFEERVTRNGGRFKKTAIVALARKLLVALWKYVSAGVVIEGAVMKTA

SEQ ID NO: 419163 - protein, 318 aa, unidentified
MIEESFVGIDVAKSWLDVGFLAASSTERLNHDEAGITGLCERLRAQMPTLVVMEATGGLETGLASALAAAGVPVAVVNPRQVRDYAKACGRLAKMDKIDALILAAFAQAIRPQVRTLKDEDTQALGALLARRRQLIDMRVQEKLRLDRAAAVQRSSLKEHIAWLDARIDQIDIDLIHRLRTSAIWREKDDLLQAIPGVGKVTRLTLLAELPELGSLDRKQIAALVGLAPFNRDSGQHRGQRVIWGGRAQVRQVLYMAALAATRSNPAIRAFYQRLCAQGKPKKVALTACMRKLLTVMNAVVKNQTPWTASGLDLEHSC

SEQ ID NO: 419164 - protein, 310 aa, unidentified
MEITVGIDVSKARLDVHVHPEGESFAVSNDEAGVSELVGRLGRLEGLISIGLEASGRYERLAVAQLAVAGLPVVVLNPAQVRHYARAIGQRAKTDPIDARVIALFVDAVRPEPRPLPEARSDELATLMTRRRQLVQMLVAERLRRQQAPKGIVRVSMARIVASLEDALREIDAEIDRTVRGTPVWRDKEDLLSSVPGIGKTIARTLLAEMPELGTLSPRQAAALAGLAPYTRQSGKWRGRSTISGGRGQVRTALFMGALVAARYNPTLKAFRDRLIAAGKPKLVAIIAIARKLLVILNAIIRDKKPWKQA

SEQ ID NO: 419165 - protein, 346 aa, unidentified
MKILALDLSKFKSVGCVYEAESGDHRYRRVNTTPQALHDLLVEVEPDRVVIEVSSVSGWVSDLVRALGIELQVVNTNGEAWRWRSVKQKHDQADALKLARLSAMNQLDLVHVPAPEIRQWRAVIKYRQHLVGRRTDIKNHVRELLVREGVILPRGRKCWSQEGCAALEEMCRSWEEVEIAELWRGELQSELQQLQVIQERLREVEAKLETLAAADDRVGLLRTIPGVGPRLAEAMVTLIDDPHRFKRGRDVGAYLGLVPRQYQSGEMNRLCRITKRGSKLLRSLLVEVSWVSLRHNPWLRSLYERMNRGSKTRKKIAIVAVARHLAIYCWAMLRDGTTWRQPCATQ

SEQ ID NO: 419166 - protein, 365 aa, unidentified
MNKNTNAKRMAREETKQPLAFYIGIDLGDKNSDVCVLDQAGEVNQEFRLRMKEADVRAYFSKIGRSRVAIEAGGQSRWVAEVIEKCGHEVYVSNTRKVPYIHDSDDKHDPGDAYKLAELVHFKPQLLHPIRHRSQEIQADLSWIRAREVLVESRTQLINAVRGISKALGERLAKCSSEAFTGKRAEQIPAAIRGAVAPLLETIDHLNEQIRYYDQMEEQIARQRYPKYWLLEQVDGVGVHTALSYMLTIGDPGRFEKSRMVGCFLGMRPKKKDSGSSQPQLGITKAGDEYLRKTLVNCAHYILGVHGKDSDLRRFGQRICARGGKNAKKRAVIAVARKLSVLLHRLWVSGEVYEPLRNSQERTAA

SEQ ID NO: 419167 - protein, 402 aa, unidentified
MEVLHERCAGLDVHKDIVVACARVRLEATVRHAKAEFATTTRGLLALVDWLEEQHCTHVAMEATGVYWKPVWHVLEGRFELLLVNPAHARNVPGRKSDVSDAHWLADLLAHGLIRPSFVPPEPIQELRDLTRTRKQLVRQVARHTLRIQKTLEDANLKITGVVSDLLGASGRAILRALIAGESDPERLLEHTTGRLRASRERLLDGLQGMVTEHHRFMLRLHLRQIEALEAGIAQLERQIARLLRPFRSRIEQLTTIPGVSDTVAQVLVAEIGMDMTRFPTPGHLVSWAGLCPRMDESAGKPRSTPRPTRCALAQDHAGECRLGRCFLARHLPARPVPAPQDPPWAQEGRGRRRRLDPDRGLLHPARWRPLPRSRSGLLRSSRPQRRRAPAQAPHRVARLSG

SEQ ID NO: 419168 - protein, 348 aa, unidentified
MKTITTKPVTIGLDIAKNVFQVHAVDAAGEVVMRKRLPRSQVVRYFSRLERCVVGIEACATAHHWARELAALGHEVRLLPPAYVKAYVKRGKTDAADAEAICEAATRPSMRFVPVKGLEHQAVLTLHKVRDLLVRQRTAQINALRGLLAEFGLVAPKGREALAKLYEALAKAGADRVPSLARPAFATLKGQIADLDRCIYEVEVVIVRWHNGSELSKLAASAAGVGPITASAVVASVGDMTRFRSARHFAAWIGLVPRQTGTGGKVTLGPISKMGNRYLRRLLVLGATSLVRQAKNPRTEQMAWLKAVLDRRPARVAAIAQANKTARILWAVLTTGVAYEPRPLANAA

SEQ ID NO: 419169 - protein, 427 aa, unidentified
MPYNIAGIDVHKKMLAVVVADVEGEGDFQFERHKVGTSPAELRALAGWLVERQVDEVVMESTAQYWRPVWEALELHWRPQRRTRDGASPLSGTLHLAQAQSNRGAVGRKKDFPDAERLVKRLVAQELTLSFVPDAEQRLWRTVMRRRFQVTRNRVQLHNRLEALLEEAHIKLSSLVTDLLGTSARRMLQALADGETDPASVAALADPRLRATAAQLSDACMACMTLNPVYRRLLTLTLEELRMIEDHLDQLDQQMAALLRQHHDAVHRLAEVPGLGVDSAQQILAEVGATAATFPSAKHLASWMGACPGSEETAGKNYSHRCPHGNRQMRRVLNQAANAAVKAKGTIFAIVYRRLVPRLGHAQAIGAIAHRLCRLIWKILHQGIRYEERGPAVSAEAKKVRARKMIRELRNLGYRVEPLSAPSDSPA

SEQ ID NO: 419170 - protein, 425 aa, unidentified
MAVVMIGVDPHKASHTAVAINGHEEPLGQLRVRASAVQAERLLAWAQAWPERAWAVEGAGGVGHLLAQQLLSAGERVLDVQPKLAARVRLLATGDVNKNDPNDARSVAVAALRSADVREARRDDHAAVLKVWSKRYQDLGRARTQVACRLHQVLCELIPGGVPGEISAGQAAQILASITPADAVEAARWELATELTGDLRSADAAIRETRKKAAAAVRAAGTSLTGLFGVGPVIAAAVIGDVRHVSRFPNRDHFAAYNGTAPIEVSSGGRKVCRLSRRGNRRLNHAIHMAAITQIRYRHSPGRAYYDKKLAEGKTPKEALRALKRQISDAIFACLQADARRAARAQSPGGQPGNHSASRAAGSHPDHRLFGQATPGPAPHPATPAAPFPAPLPSRASGRPGLGPGAARPRSGVRRASLRRPPGSR

SEQ ID NO: 419171 - protein, 322 aa, unidentified
MFNSEEGYLHKVVQLGIDVSKAKLDCTLLLDRDTLRSRSKIVPNTAAGFVQLVEWVQRQAQVAAAEVVAAMEPTGVYHQALALALYEAGMTVVVVNPGQLRQFAEGLAVRTKTDAKDSVVLARYAGQPERIVWQPAPVEVRQLQALMGRLATVETELRRELNRREAAQLGHDPQLVQASIADAIAFWSAEQSKLQQAIDEHIDRHPGLKIERERLLTIPAVGPKTANRMLCVLSAHDFGRASQAAAFIGLTPVEHQSGSSVRGRPRLSKCGDARLRAALYMAAVVAIRHNPDVRALYQRLLKRGKAKLSALNRSEFSGDSWV

SEQ ID NO: 419172 - protein, 312 aa, unidentified
MIEPLVKCSAGLDVHKKSVTCTVLKEQEDGGIAKFTREYPAFRARLQELARWLVELEVELAVLESSGIYWQSVYAALEEAGVRTYLVNARHVKHVPQRKTDVKDSEWLAELARCGLLRASFIPPRDLRELRVLTRYRQKLTGYLAGEKNRLHKVLDGCGLRLGSVVSDINGVTAQRLIAAVIEGRLSPAEMAELALGRLEKKQDDLKLALEGDVSDRHRFLLQRLTNHIKWLQEQLAELDDQIVAAMEPYQREWQLLQTIPGIDRIGAAMLLAEIGTDMGRFGSAERLSAWAGMCPGNHESAGKKKRSHRAR

SEQ ID NO: 419173 - protein, 468 aa, unidentified
MSTTPTRTLRRREVPIVSKRKVALPPQLKRVNLNAAGIDIGAEEHWTAVPPGRDPEGQDVRRFGAFTGDLCALADWLKRCEIETVAMESTGVYWISLYELLVERGFEVLLVDARQAKNVPGRKSDVLDCQWLQELHTYGLLRGAFRPVDQVCILRNYLRQRSMLVAYASHHIQHMQKALEQMNLKLAHVVSDITGLTGMGIIKAILSGERDPVKLAKLRDPRCKSSEATVARALEGHYREEHLFALQQAVELVDFYQRQISACDRQIEACLQQFEEKSTETPVTTRSRKRRRSGMAFDARSYLYRMTGVDLTQIDSIEANTALTVIGEIGLDMSRWPTEKHFGSWLGLAPGSKISGGKRLSSRTKPSANRAAAALRLAAQSLNQSQSALGAYFRRLKARLGAPKALTAAAYKLARIFYRMLKYGVDQGEAAYEERYRDRLLRNLKRRAAELGFQLTTINSSTGRPALT

SEQ ID NO: 419174 - protein, 373 aa, unidentified
MFHFTTLFIGMDVHKESFSLCYYDMMTNQFKHSTKVGPNVSYIVNYVNELRRLYGQDAEVLYGYEAGCLGFTLYHQLQAHGLPCIVMAPTTVMKEGSKRVKTDKKDAAQLAKALAFRSYRPVHIPTVEDEQVKEYIRMRTDHKVALKKIKQQILAFCLRHDFRYTEGSSNWTQKHVRWLHSLNLDGLYAEILTEYLLTYEKLVDQIERYDARIEQLAQSDCYQEKVSQLSCFIGVKTLTALSIVTEIGDFNRFATAQHFASYLGLTPSENSSGDKERRGAITKAGNSHVRRLLIEAAQSLAKGTVGYKSKELKRRQSGNRVEVIAYADKANERLRRRYRTLVLGKNKKQNVAKTAIARELSGFIWGMMTGRIA

SEQ ID NO: 419175 - protein, 410 aa, unidentified
MEAIIERVAGVDVGQATVVATVLVGAAHERARKETRTFRTVTRELLEMREWCLAKGVTHVAMEGTGVYWRPVYELLEDAFEMILGNAQHIKNVPGRKTDVKDSEWLADLARHGLIAKSFVPPKPLRQLRELLRYRRKLMESRTAERNRLLKLLETANIKLASVVTDVFGVSGRLMLDALIEGTATPATMAALAKGVLRKKTRDLEHALEGRVEAHHRFLLGLQLRRLDQADADLAVLDARIDEALMPYQPQCQLLQQIPGVNRVVAAVVVAELGTDMGVFRSAQHAAAWAGVCPGNNESAGKHKGAGARKGNVHLRTALVEAAVAASHKKGSYLRDKFYRLRARRGTKRAAMAIGHKILIAAYHMLATGLPYQDLGATYLDGVEKRRTTRNLVRRLERLGYEVTLGTKAA

SEQ ID NO: 419176 - protein, 344 aa, unidentified
MQITTVGIDLAKNVFQIHGVNEHGKVVLRKQMRREQVTAFFANLPPSLIGMEACSSAHHWARKLQEFGHTVRLMAPQFVKPYVKSNKNDAADAEAICEAVTRPTMRFVPIKNIEQQSVLALHRVRQGFVKARTAQANQIRGLLAEYGLVVPQGIGHITTRIPTLLERAGDTLPGVFRHLMNRLLEHFKELDRQVGELELQIKAWHRTNEASCRLEAIPGIGPLTATAMVASIGDARNFDNGRQLAAWLGLVPRQHSSGGKNNLLGMSKRGDTYLRTLLIHGARAVIYRARQRPNAEGWLIKLVARRNANIAAVALANKTARTIWALLAHQRAFRSDYARVAEVA

SEQ ID NO: 419177 - protein, 350 aa, unidentified
MFVGIDVHKHAHAAALIDERGGEFGTMTVPNSPAGYRRLLDWLGDHDADAAVVGVESPGSYGRQLVGALAAAGFEVLHVPAWRTHRERHRQGPGKTDPGDALAIADVVRRKHGELSPALEPELVRALAMLELQRRRFVRDRTQAIQRLRSDWTQLDPVAEAGVIRCDRQRELRRLKRISFGDGLVEKLAARCIRELARDIEDLNQRITALDREIAELLDQHDNPLADLLGAGTNLTATVIAQAGDVRRFRDAAAFARFCGAAPIPCGSGQTAGRHRLHRGGNRQLNAALYRIAIVQQRHHPAAKAFLTRKTAEGKTPREARRALKRHLANVVYRRLHTWSETTPGMNVLT

SEQ ID NO: 419178 - protein, 371 aa, unidentified
MKIIQYVGMDVHKESYTLCCYSFDEDKTQYEQKISPDYKLVLKYLEQIRSRSKEEVEFVCGYEAGCLGYTLYHQLTDHGVKCVILAPTTMAITNKNRVKTDKRDAGCIARCLAFHSYSEVNVPTGEDESVKEYIRMRDDQKKALKIIKQQILALVLRHGYRFVEGRNYWTIKHVTWLKSLDLGGILQESLSEYLITYDYFVNKIERLDERIEELAEGERYQEKVNKLSCLLGVKTHTALSVVVEIGDFKRFAEAEKLASFVGLVPGEDSSGEKQRRIGITKAGNSHVRRLLVEAAQSYTKGAIGHKSKELKHRQSGNTPQVIAYADRANERLRRKFYRMTLTNKTNRNVATTAIARELVCFMWGLMTDNIA

SEQ ID NO: 419179 - protein, 351 aa, unidentified
MLIIGCDFHTRFQQIAMMDTTTGELIERRLEHGTGEAEGFYAALAAPARVGIEATIATQWFERMLRRYGHELWFGDAAEIRAAMVRKQKTDTRDARHILDLLIQDRFPRIWVPSVAERDVRQLVRHRHKLVRFRTSVMNQLHALAMGQGLCLRKKLWTKVDRQKLESLTLDPWASRRRWELLELLDHFDPSIQELDRAVISEAESRPAAVCLMQQPGVGPVTALAFVLTVGPVSRFPNSKKLVSYLGLNPSEESSGGRQRLGAISKQGNTILRCLLVEAAQTAARFDPELRRDYQRLKFRRGISGVAKVAIARKLAVRLYWKLREAAQPVPLARMQGSPATPVVGESLSSF

SEQ ID NO: 419180 - protein, 351 aa, unidentified
MKTQIKTTSKLWIGIDFHKKTWRVHFRSDTFSDNPFSMEPDPDALFKKVVRDYKGYEVEVVYECGCFGYWAHRKFESYGWNSVVVNPCDIPRVSKQKFTKTDSIDARNLSKLLKAGLLNSVTIPDIKREQLRSLFRRRVHLVMYTRSIKSRLKAQLLYYGIKIPDDLDNAAWTKAFKGWVKEVKWEHETGKLMMLSNLKQVEYQHYETNEISTHLRKYCRGNYKKEYDLLQSVPGVGPLTAICFISEVGNINRFKNFKQLSCLVGMMPTTYQSSDANRTQGLTPRALRIMRSYLVEAAWQAVRIDPVLREYYKKHTGKKPNDIIVKVARKLLSRMYGVLRTETEYEIGLVK

SEQ ID NO: 419181 - protein, 421 aa, unidentified
MNNLPSRKDLPVATNGRHVVGIDIGQMRHAAAGLTAAGAIFGRELSFENNRAGVERLAQQLLVPLGGPEKVLIGMEATGHYWMPLYYQLTRRGYQVIVINPIQTRGKFRSRIRKTKTDKLDARSIARLVLNGEAHAARIPDEPTLELRILTRQRWRLVGISGDIQRFAQSLIDRLFPEYPGLFSSPLIAAGKALIREYGLSPKALADDSEVLPTFLKHASRGNLSPVKVQELIKRAKSSIGMTIAQATLTQQLQTTVTMIDAFAAQIAELDKELERRVEELKSPLSSLGLNAPLIATIHAESDPMSDFKHYWQYVAYTGLDPSTFDSGKMHGTCVHISKRGSPHLRSALYLAAWTTYRRHKVLHHLYLRMKKSGRHHADALIIVAHKLARIIWRLLTDNRPFKARPPKPAPNKLSVAAVTH

SEQ ID NO: 419182 - protein, 385 aa, unidentified
MSELNDLSRSLTSLEQDKTIIAVIEMSQSSWLVAGIVPGIERHPLKKLEPSEEELVRLLMRWRTEATKNGHTITRIAVAFEAGRDGFWLARWLRARDIETYVIHPTSVAVSREHRRAKTDRLDTGLLKRVFIGWLRGEPDHCHMAAIPTLAEEDAKRPNREREGLVRERTRIVNRMKSCLARFGIRNFKPTLRKAPERLATLATPEGVPLPPNTLLELRRDMARLRFVMDQIKEVEEARAQRLEQAPQEKTHAMVRLIARVIGVGIETADMLVHEILSRQLRDRRAVARYAGLTGAPDESGNKRREKGLAKAGNARVRRGMIQLAWRFLVFQKDSALARWYRTRTESAGKKRKTMIVALARKLLIALWRLVTIGEVPAGVVLRAA

SEQ ID NO: 419183 - protein, 364 aa, unidentified
MLIIGCDYHPGFQQIACVDTDTGELRERRLAHREEAEAFYRELKQQNRSVRVGMESSGHSRWFERLLDELGFELWIGDPAAIRTKRVRKQKTDRQDARLILQLMLENRFPRVWVPDAENRDLRQLLWHRHRMVQMRTRVMNQLHVVPLNEGLRRKKALWRSAGRKELESIPLAPWASRRRQDLLDLLDQLTPKILELTRALEEEVEKRPVTRRLMTHPGVGPLTALAYELVIGTPDRFHCGKQLASYVGLVPEEKSSGDRRRQGHISKQGNILLRFLLVEAAQVTVSSQQEWRNKFFHLAMRRGRKIAKVAMARKLAVHLYWMWRQGSDYGQTPKLGSHAGEPGHPDGVPSNTDVMIGHPAPSK

SEQ ID NO: 419184 - protein, 350 aa, unidentified
MKDIVIGIDLGDKKNSICVLDKKGEIVEVTEVSNTTKAMTKYFYKYKDKEVSAVLEASTHSPWVSRLIEEMGHKVLVGNPRKLRAIWASEHKTDVRDAEMLARIGRFDPKLLYPIKHRGVDTQADLAVLKARDCLVKSRTGMINHVRATIKATGGRIKSCSAASFHKRAFEAVGKELQPALGSLISFIQQLTEQIKKYDKQIGQLCQEKYGETWLLQQISGVGPVTALAFVLTLEDAHRFKKSRKVGPYLGLTPRRDQSGETDKELRITKAGNGYLRRLLVGSAHYIMGPFGPDCELRRFGMRIAASGSKKAKRRAVIAVARKLSCVMHRLWVTAEVYDPFYNSKDKNAA

SEQ ID NO: 419185 - protein, 415 aa, unidentified
MSDPKRWYAGVDWGSQSHCVFLTDDEGRKLGQKFFKHSGEGLAEMADWLMKTSGAETAGQVFVAIEVPHGPVVEALIERGFTVHAINPKQMDRFRDRFSMSGAKDDSRDAEVMASSLRTDPRCFRRLAVGDPIVVELREWSRIADELGFERIRLANRLRAQLWRYFPALLELEEDCGAEWLLDFLGIAPTPAKAARLREARVAQFLKERRIRRFDAATILKAGRATPPTLAPGTVEAASAHVASIIPRLKLVNRQIKEADRKIGALIDGLAASEENEPGQEKQHDAAILASLPGVGRTVLATLLAEAWEPLQRRDYPALRSLAGVAPVTKRSGKSCIVVRRQACDNRLANALYHWARVAVQHDPRSRAKYAELRKRGHSHGRALRSVADRNLNVACAMLRNGTLFDPSLAAQKAA

SEQ ID NO: 419186 - protein, 399 aa, unidentified
MNAVGIDVSKGKSMVSVPRPFGEVVAKPFEVRHTASELRELADYLKSLDGETKVILEHTGRYYELLHDAGLFVSAVNPKLIKDYGNNSLRKVKTDKADSRKIARYGLDNWVELRQHTPMDTIRYRLKTMNRQYGLYSKTKVSMKNNLIPLLDQIFPCVNTLFSSPAREDGSQKWVGFAASFWHLDCVRGLSLAAFTQRYQKWCKRHGYNFSSGKAAEIYENAKNQVAMLPKDAMTKLLIHQAIDQLNSTSKTVELLRIEMNCLAQQLPEYPVVMAMGGVGKSLGPQLMAEIGDVTCFAHKGSLAAYASVDPGANQSGTHEAKSTASSKSGSPELRRTLFLVMSVLIQTSLVDAPVLQFLDKKRAEGKPYYVYMTAGANKFLRVYYGRVKEYLLSLEPTD

SEQ ID NO: 419187 - protein, 343 aa, unidentified
MTIKVLGIDIAKNTFQLHGADDAGKAVLKKRLPRNRLSPYVANLHPCTIVMESCGGANYWARVFQRSGHTVKLISPQFVKPFVKTNKNDANDAEAIVEAASRPSMHFVPIKRPEQQDIQSLHRVRSRLVKNRTALINEIRGLCLEYGVIIAPGAARVKQSLCATVADSGNGLTPSSRDCMQDLYEELVDIEARLKKLDARNRQLCRQNDSCRRILSIPGVGELTATAIVAAVGDAQEFKNGRHMSAWLGLVPRQSSSGDKRVLLGISKRGDRYLRTLLIHGARAALSHYKTTDNDYGLWLARKKATLSFNKAAVALANKNARIIWSLLNSGEEFNYGVQTAAA

SEQ ID NO: 419188 - protein, 340 aa, unidentified
MKNIKLLSIDVAKNVFQVAGILANQKVAFNRQIKRSDLMEFMVQQKKTEVVMEACYSSHYWARQFEAMGRTVRLLPAQYVSPFLVGNKSDKNDTIAIAEASRRPHINSVPVKTIEQQDVQSLHRIRERYVSSRTALMNQIHGLTSEYGIAISRGHKSFRYFLNTLTESENQSLSTTLRHEIAHIADEYYWLTDRIDALNNQMKQIVKENELCQIIQSVPGIGPLNATALYSAIGNGSQFHKAREFSVWLGLTPKQSSSGEKSQTHGISKRGNPYLRKQIIHGARAVLTRCKDREDNLSRWAVQLIERRGFHKAAVALASKIARIVWRLLQKRELYVPQMS

SEQ ID NO: 419189 - protein, 326 aa, unidentified
MDPTTTAQLFAGVDVSKDRLDVCLRWSEPERHDDEEAFVVTYDDSGIDALVFRLLEARLQLVIVEATGGFERTVVGALAAAGLPVVVVNPRQVRDFARATGRLAKTDRIDAAILARFAEAVRPAPRPLPDREIRALQAIVARRRQLLGMIAAENNRLSSATKPVAKRIKAHLRWLEKELSRTERDLEAAIESSPALGENEALLRSVPGVGPVLARTLLAGVPELGTLTHKRLAALVGVAPLNRDSGTLRGHRSVWGGRAEVRGALYMGALVGARRNPVLKKFYERLLAAGKPKKVALVACMRKLLSILNAVLKHRTAWRSPHFLST

SEQ ID NO: 419190 - protein, 339 aa, unidentified
MRLYAGFDLHSSNTYLGIVDEDGKRVFKKKLSNDREVILSTLAPYKDSIAGIVVESTYNWYWLVDILTEEGYKVHLANTTKIQKYSGLKYADDQHDAFWLAEMLRLGILPEGYIYPKEDRPIRDLLRKRSHLVRLRTSLILSLQNILSRNNGIKLKANAVKALTIDHVTPYLADNQDLALAGKVSKTSIDFFTLQIKSLESVVEERIDLREPYNKLLTEPGIGKVLGLTIMLETGPINRFAEVGNFVSYCRKVSTAWISNEKQKGKGNRKCGNKYLAWAFSEAAELARRFDVDARAYYNRKAQKTNRMVAHNALAHKLARAAFYIMRDGVTFVPEKCFG

SEQ ID NO: 419191 - protein, 413 aa, unidentified
MALKIVYQTCCGIDVHKTFVVACIASTNKQGVTTYKSHRFSTFTKGLKELLQWLLDNNCRDVCMESTGKYWIPVYNILESDCFIVLAHPKYVKAIRGKKTDKKDAKWIADLFKHDLVAASFMPPPDIRNLRDLMRYRFKLTCFMSSEKNRLQNCLTVSNIQLANVVSDTFGMSSMNILDKILQDPSDTSFDIQPLIHGSMKKKLPQLELAVDGYISPQQAGKLKVIKKHFDNLESRKKELEELILALANPYQQELDIILTAPSFKNRFSAITIISEIGVNMYAFPSAKHLCSWAGLTPTNNESAGKKKSVRVSKAECYIKPLLVQCANSVVKSEKHPEIRNRYLRIRKRRGHKKAIIAIARMLLTALYNMLKNKEPYNSELYRKYDSLPVEREITVEQAILLAQFQGFKIKSA

SEQ ID NO: 419192 - protein, 417 aa, unidentified
MINAVLERCAGIDIGKRFLMACVMVGAADQDPSQEIRRFGTTVPELENLRAWLQTEGCTHVAMESTGSYWKPVFNVLEGTVVVILANAQQVKARKGHKTDPHDSVWLAHLLRHAMIRPSFIPPRAIRELRELTRRRRQLMNAGTAERNRLHKILEQANVKIGSVLSDVFGMTGQTILEALLEGKATPEEMAKLARGVAKRKIPQLVEALKGHRLTDAQRFLIEHCLQHMAFLEQSLEQLEARILQQIEEAGLTRPFELLQTVPAIKQAAAAAVLAEIGSSMEPFPTPGQLASWAGVCPGNNRSADKSRGTHCTKGNQWLRSVLAQCAWAASLQNGSIFQARFQRLAPRLGRRGAIVAVAHAILIAVYQVLQSGQAYSKDTARATPNQKHRLVRHHFRCLQKLGVKVKIEPTDSGGQI

SEQ ID NO: 419193 - protein, 412 aa, unidentified
MQTLVERGCGLDVHQATVVACLLIVWKDGKVQKQMRTFGTTTRELLALREWLLTEGCTHVAMESTGVYWKPVYAILEGGLEIVVANAQHVKKVPGRKTDVKDAEWIADLLCHGLLRSSFVPPKPIRELRDLTRYRRKLVESQAAERNRLLKVLETANIKLASVATDVFGVSGRLMLRALVEGKATPQEMAELAKRKLRQKIPQLELALEGRVEEHQRFLVKLQLDRLEAVETDLKVLQNRIQEKFEPYAAQLALLREIPGVDWTLAAVIIAELGVDMSVFESVSQLASWAGVCPGNNESAGKRKSSRIPKGNVYLKTALVEAANSAAKAKGTYLRDKFYRLKARRGYKRAAVAIAHKILAAIYHMLSQQVSYHDLGDLYLDKLNKHHLTRNLVHRLERLGYAVTLALQEKAA

SEQ ID NO: 419194 - protein, 370 aa, unidentified
MHKPTTLFVGLDVHKDSISVAYACEDRDSDVTFVGPIGTLQRDVDKLVRRLQSKASRLVFAYEAGPCGFVLHRYLTGKEIECLVVAPTRIPKKPGDPIKTDRRDTIQIARSLRAGDLDSVYVPSVDDEAIRDLSRAREDGVIDLKAARLRLKSFLLRLGIVYVGRADWSDAHQRFLARVVYPTPVQQIVLQEYLNAITEIADRLKRITVELREHSSSWRLLPLVEAYQAMRGVQDTIAITAAAELGDITRFDNPRQLAAFVGLVPSCHATGKSRRLGAITKAGNSHVRRVLIEGAWTYRHPAKVSEAIRKRVERLPKTIQDIGRKAQVRLCKRFRRLTARGKHPNVIVTAIARELLAFMWAIAREVKISA

SEQ ID NO: 419195 - protein, 430 aa, unidentified
MKSNTQNAKIEAITEKTLVLGIDVGSETHYARAFDYRGIEYPKRPFKFCNTEAGFVTFKEWILDLKEKHEKDKVVPGMEPTGHYWFNLGKFLQDNEMKPVLVNPHHVKKSKELDDNNPTKNDRKDPKVIAGLVREGRYMIPYLPEGVYADLRTASNIRFQLQAELTRIQNRISRWFNIYFPEYKTVYGKPDAKSGMLILKAAPLPEDILTLGIDGVNQIWRDAKLRAVGKARAKTLIEAAEHSVGSKEGAVSARMEIRMLLEDYESRNIRLQEVMTLIEGLVKQIPMAEKLLEIKGVGIKTVSGFLAEVGDISRFNTPKELQKLAGLALVENSSGKHKGETTISRRGRKRLRYLLFEVAMSLVAKNPEFRELHNYYTTRRLNPLKKMQSLMAIAAKLIRVFYVMLTKGVDYDPKKMVSDIKRPAVYQQAA

SEQ ID NO: 419196 - protein, 344 aa, unidentified
MDNHTLIAVDVAKCVFEIVVSQSPGKVHERARVPRNKFLAFFVQRPAATVVMEACGSAHHWGRQLQALGHQVVLLPAHQVRPYVLRNKTDRTDAKGLLEAFRNDDIHHVPVKSVEQQTLTALHRLRSAWLAERTAKINTLRGLLRELGLVIPVGAHHVVPRAWGLIEDADSGLPEALREAFAEVCRELRTLEERVKGIEHQLAALAEQLPVVERLRSIPGVGLLTATAVVALTADIQRFPSGRHFASYLGLTPREHSSGSKRRLGAISKRGDVYLRMLLIHGARATLWHAKQLKEPDRLRVWALRLEKSIGHNKAAVALANKLARIVWAVWKYDRRFESVAQAA

SEQ ID NO: 419197 - protein, 339 aa, unidentified
MKYTPVGVDIAKHLIQVHFIDEHTGEVIDKQLRRQDFLMFFCNREPCLIGMEACRGSQHWVRELTKLGHKVRLLQAHFVKAFVMGNKNDVMDARAIWMAVQQPGKDIAVKTEEQQSVLVLHRSRRQLVKFRTMQINSLHGTLLEFGKTIHKGRAAMERELPEALERMKERLPPYLITVLENQYNRLNELDSLIEDIEKKLTSVARQNETCKRLLDIPGVGPLIATAAVATMGEASAFKSGREFAAYVGLVPKQTGSGGKIRLLGISKRGNTYLRALFIHSARAAALLPKEPGPWITELKKRRPTSVAIVAMANKLARTVWAIAAHGSKYDKNHVSIRSY

SEQ ID NO: 419198 - protein, 430 aa, unidentified
MKSNTQNAKIEAITEKTLVLGIDVGSETHYARAFDYRGIEYSKKPFKFSNTEAGFVTFKEWILDLKERHEKDKVVPGMEPTGHYWFNLGKFLQDNEMKPVLVNPHHVKKSKELDDNNPTKNDRKDPKVIAGLVREGRYMIPYLPDGVYADLRTASNIRFQLQAELTRIQNRISRWFNIYFPEYKTVYGKPDAKSGMLILKAAPLPEDILTLGIDGVNQIWRDAKLRAVGKARAKTLIEAAEHSVGSKEGAVAARMEIRMLLEDYESRNIRLQEVMTLIEGLVKQIPMAEKLLEIKGVGIRTVSGFLAEVGDISRFNNPKELQKLAGLALVENSSGKHKGETTISRRGRKRLRYLLFEVAMSLVTKNPEFRELHNYYTTRRLNPLKKMQSLMAIAAKLIRVFYVMLTKGVNYDPKKMVNDIKRPAVYLQTA

SEQ ID NO: 419199 - protein, 345 aa, unidentified
MGYYAGFDVSEEVTCVCVLDGRGAVVDEARVASDPVALAGYLSRWGGELAIVGLEAGALTPWLARELVGVGLPVVAIETRRMKAYARASSVKTDRRDAKMIAQAMRAGLYRPVHVKGEEAHAARLLLSARAMLLGQARQLQVKIRGDLKPFGVRLGKVGSGGFAARLKQRLAGREDLMALVAPMLAMRAALLDEVRGYDRQIRAQATGDPVCRRLMSAPGIGTVIAFAYKASVENPARFARSADVPALLGLVPRIDQSGERERIGSITKTGDAMLRSLLFEAANVLLTRTKKSFALKRWGLRIAKRRGMNRARVAVARRLAIILHRMWADGSTFRLQEETKPLAV

SEQ ID NO: 419200 - protein, 375 aa, unidentified
MATNVITWVGMDAHKNSIKVAAWLPGQTEPVEWTEDTTAEAIRRLGRRLRRLAPGEVRACYEAGPTGYGLQRLLGAEGVICEVVAPSLTPVKPGARVKTDRRDARKLGELLRAGLLTEVHPPSEMDEALRDLCRCRDDVRVDLLRARHRLSKFLLRRHLIYRQTKHHWGSRHVQWLEQLRFDDAMSQATFDSYFLAVQQLEERQNQLDQRLAEFGAHEPYRDKVAALRCFKGIDTVTAVCLVAELHDFRRFRSPRQLAAYVGLVPSEHSSGEREQRGSITKSGNRHVRRLLVEASWHHRHRPALSRPLRARRAGQPARVLAIADRAQERLAARYRRMSEAGKVHPKTIVAMARELCGYLWAVMHPAATTTRPKTA

SEQ ID NO: 419201 - protein, 375 aa, unidentified
MKRPVSRSHCPPAFFNPERETEIRRVPRETVNKLGSPLHCCSEARTIAWAACASPYPRARVRCSEENTMTASVGIDVSKDCLDWAHGSEGSIERTRNQPRPIAELVRHLVAIDPDRIVVESTGGYERRLVEKLAAVGLPVVVVNPRRVRSFGEGIGMLAKTDALDARLLALFGEKAKPPLRPIVQGKDRLLADLVARRRQLLALVVAEKNRLGIAPPAIRRLITSLLRTLEKHVKALDEQIDAVLFEDADRAALYDLLQSVPAVGPGVARTLLADLPELGHLDRREIAALVGVAPFARDSGKIRGSRRVRGGRASVRTALYLAAMTGARFNPVLRALYQRLREAGKPPKLAFIAVARKLLTILNAIARDRTAWQA

SEQ ID NO: 419202 - protein, 417 aa, unidentified
MLKIVFPICCGIDVHKTFLVATIASTDRSSVTTYQTKRFSTFTKDLENLSKWLLDNQCADVCMESTGKYWIPVYNVLELTCEVILAHPKYVKSLRGKKTDRKDSVWIADLFKHGLVKASFIPEKAIRDLREVMRYRTKLVSMKSSEKNRYQNALTVSNVQLASVVSDTFGKSAQALINQLLQQPKDTSFDVLPFLHGSLKKKAEQISESLNGSIDDIQAQKIRSCTSHMAELDSHIEDLQVAADLLASPFTAALRIIESVPGIGHLSALTILSEIGTDMSKFLSAKHLCSWAGLTPCNDQSAGKKKSTRISRAGCYIKPILVQCALAAIKDKSFPYYGQRYKVLKHRRGHKKAIISIARMMLSVIYTLLSRGELFSKELYEESLKNPMVILSQEEQFQRLAKKFGYVVVKVHEPVPV

SEQ ID NO: 419203 - protein, 318 aa, unidentified
MKETTATVYVGIDIAKATLQVHRQGSQAEWANTPAAHRKLCKELKSFPMVHVVCEATGGYEQALVGALHKAKIPVSVVNPAQVRAAARARGLRAKSDRIDAAMLTDYGQRYQPKPTPQPSRVQQQLVALTQWLKQLVRTQMVVRSQAEHHQDPFVKKQHQALIDYYQAQIKNVEERLETLLEKDQMLRQRVEALDAIEGVGPRTAFVVLAHMPELGQLNRQQVAALAGLAPWTRDSGTMKGLRCIGGGRPEVRLALYMPALTAARRNPLLSALYQRLIAKGKPAKVALTAVMRKLLIYMNHKLKALDAQPLSAVPIPS

SEQ ID NO: 419204 - protein, 343 aa, unidentified
MTFVGCDLHTRQQQVAVLDTTTGEIHEQQLPHAGTAVEDFYAALPRPVTVGLESTGYAIWFHTLLQRLGHTVLVGDAAKIRAMVVRKTKTDRRDALHILDLLRHDRFPSIWIPDPATRELRALLMHRLRLVRIQTMLKNGVHALALNQGLARGSKLLRRAGLAQLQALPLPPYTAQRRDQSLDLLGTLRTHLDHLDDAIAAAARAHPDAPRLLTHPGVGPVTALATVVVLGAVSRFPDSKHVVSYVGLAPALNASADKYRLGKITKQGSALLRFVLGQAAAHAARLDPDLTRTYRTLAQRRGRSKAKVAVARKLLVRLFIMLRDHIDYDEFRRRGRAPAVAPG

SEQ ID NO: 419205 - protein, 355 aa, unidentified
MTQTTRTSTTTPAPAWTVGLDVGDRVTHVCVLDAAGAVVEQARLATTPTAMAQRFAGRPRQRVVLETGTHAPWLARQLRAAGHEVLVANARRVRLISENVAKRDAVDAETLARLGRLDPQLLAPVASRTEATQVQLAQVRARDALVRTRTLLINHVRGAVKSLGGRCPRASAESFARHAAPALPAALDAVLTPVLTEIQALTTAIRTAEAALAPLAEAQPATARLRQVPGVGLLTALTYVLVLEDPMRFRSGRHVGAYLGLTPGRAQSGARDPQQRITKQGDRLLRRLLVGSAQYVLGPFGPDTALRRWGLTLAVRGGRSAKKRAVVAVARKLAALLHTLWTTGAPYVPLPATAA

SEQ ID NO: 419206 - protein, 420 aa, unidentified
MKVVYQTCCGVDVHKSFLVATIIKTTSGVQPSYLKKRFSTFNNSILQFKEWLLLNECRDVCMESTGKYWVPVFNLLEDDINVTIANPKWVKAVKGNKDDTKDSKWIGDLFRLGLVPGSYIPCKPIRILREFTRYRYKLTSCRSSEKNRYQNALTVCNVALDSVVSDIFGKSATSVIDYLIEQSDNSINHEEIASRLLRSLKKKSVSVIESIEGYQMTDSQKYRMRLVRAHMDYITSAINDIDTMLDSLVAPYENAVQLLCTIPGVDRNSAITVISEIGTDMAPFSNSKRLCCWAGLTPGNNESAGKKKSVRITRAGVYLKPALVQVAHAAVKSDKSPYYKQKYERIMKRRGKKRAIIAIARMILTAIYQILSTGEVWNPTDLYKIDMPEPLKEKQKEKAIKQAKKLLISEGIIFESQLVS

SEQ ID NO: 419207 - protein, 319 aa, unidentified
MSRIILGIDVAKKTLDVALIADERTLIKQFANSPARFNLLAAWLESLHLSAIDICLEATGSYGEAVALFLHEQGHRVAVVNPLRIKGYAQSKLQRQKTDRTDARLIASFCLSQEPAQWFPPSPEVRHLQALMRRIEALEEMLQAELNGLSAAPPEVQPSLQRIIDTLHREIKKLQEQVRQHIDQFPDLKEQSRLLQTIPGIGERTANLLLSEIEFERYSSARSIAAQAGVTPRKRQSGTSLKQTNLSKLGNARLRKALYFPAIVARQHNEIVKEFAERLKSRGKTPMQIVCAAMRKLLHIAFGVLKHKRPFDSSLAFSA

SEQ ID NO: 419208 - protein, 796 aa, unidentified
MEQIHDRVAGLDVHRDEVAVCVRTPGPRGGVHTEKARFSTTTGGLAMLAGWLAERAVTLTAMEATGVYWKPVYYALEDRFELWLCNAHHVKNVPGRKTDMSDAQWLADVAAHGMVRPSFVPPPPIRELRELTRYRKTQVDARAAEIARVEKVLQDAGIKLTSVASKVLTQSGRAMIEALIAGERDPATLAGLAKGKLRPKIPQLTAALSGHFGAHHAVVAARILAHLDSLDDAIAVLDGQIAARVAGGYQSAARLLADVPGLERRSIEVIIAETGADMSRFPSPAHLASWAGLCPGNHESAGKRRKVATTPGNPWLRRTLIESARAAARTKDSYFGAQYRQIARRRGPNKAAVAVAHSLLDVICLPPGQGAPDPAPGPAAGETRPHRAAHRHRHLAAGRKTLRPGHALAGCRAPAGARISPQIEHRLFSYITLNWRGRPLTSHEVVVQTIASTRTSGGLRVEAVLDSSDYPTGVAISKERMAGLPLERHATHGAWNYTLHPRRVSSPADQAPASESRGPAQRRQATLAKLADPRLTGMTAAQLEQLAAALAPAQAARAQQRYSQQRGGRARRATGNVRARPLFDDAARLLLTLLYQRQVCSMNVLADLLEVTATCIGDLVQETREILEDHGRDPGVAPVRFTAHDALLAFADSDRRPARTTVIERLSHPALTGLTRRELHDLTTRLAARQSAQAERLTYQRRGGPRQPGTRGGVFHQKISNSERILLALLSHRRLCTLDVLADALGDVSRSAVGNVIRETLPLLQQEDRIPGPAPTRYRTAAELLAAGATNDTATS

SEQ ID NO: 419209 - protein, 341 aa, unidentified
MGEDIIIGVDLAKNVFQLHGALRDGQVLFRKKLSRSQFTKFCAEHPRSLFAMEACATAHYWARELVSMGHEVRLIPPIYVKPFVKRHKNDAADAEAITEAVLRPNMSFVVPKTAEKQALTMMMRTRDQLLEQRTATVNALRGHLAEFGLIAPVGLKNIERLRELVDDHSDLPELVVAMAKMYFKRIDHISEEIDTITGRIKSHCADSPEALRLQTMPGIGPIAAMVIEAFAPDMKCFEKGRDFAAWLGLVPKQHSTGGKTRLGQTSKMGQKDIRRALIIGAMSCIAAAARRGKRCHPWLQDKLERKPKMVAAVALANRMARQIWAMITKEQGYLPNQEVAA

SEQ ID NO: 419210 - protein, 359 aa, unidentified
MALTNMTQDNSARVVIGVDTHRDLHVAVALDHLGRPLDQRIITTDRAGYQELLEWSDGLGRVEAFGIEGTGSYGAGLSRWLAERGAKVIEVDSPRRTVRRRGGAKSDPVDAEAAARAVLSGQATGTPKAGDDKAEMVRMLRTSRSGAIKARTAAINNLRALVVTAPGELAEQLKGLSHEHLVARVVRLRPGPLLTTTAAAKAAMISLARRIQFLDAEVAQLDASLEVLVAAAAPRLVSLLGVGTDCAGALLVSVGDNPQRLRSEQAAARLWGVAPLEASSGQTCRHRLNRGGDRQANAALYRVVVVRMRHHQPTRDYVERRTKEGLSKKEIMRCLKRYLVREVYRALTASEQAPVLEAA

SEQ ID NO: 419211 - protein, 354 aa, unidentified
MDIKYIGMDVHKEAISIAVMNGDGKLVMESIIETKAITILQFIQGLRGALHVTFEEGTWAAWLYDLLKPHVTKLVVCDPRKNALLKEGNKSDKIDARKLADLLRGGYLRSVYHGENGLRTLKELSRSYLTISKDLTRIMNRLKAIYRGWAIPCEGQQVYDPRHRAEWLDKIREAGVRRRAEFFYQQLDALQALRQEVRRDLLAESRKHDATKRLRQIPCIGPIRAAQLVALMQTPHRFRTKRQIWTYSGLGLETHDSAQYRYVEGQLQRSKKPQQLRGLNENHNHDLKNIFKGAATRASSCPGPFHDFYEALRAKGMKPTMARLTVARKMAAITLIIWKKGVSFDAKHLKQQAA

SEQ ID NO: 419212 - protein, 425 aa, unidentified
MNNESTLNPEAPRPFVACIGLDWGDQTHALALHPTQGPVESSTLVNSPEVLHTWLQGLAQRFAGQPVALAVETSRGPLIHVFSAYPWLEIYPIHPATSARYRAAFKPSGAKDDQPDALLLLELVRYHRDKLRPLQLQDTATRKLAALVELRRDVVDRRTQVVLQLISLLKSYYPQALKLAGEKLTTPMALEFLSRWPDPLALKAARAATLKKFYYRHSVRSRDLVTERLALAQKTVAITSDEAVMEPALLQLRVLLDQLRTFQKHITILEQQIESLFKAHSEAYLFRDLPGAGQALKPRLLVAFGQDRTLYPDPASLQKFSGVAPVVEKSGNRAWVHWRWQACRFLRQTFVEWVGKTINESAWAKAYYQHMKGIGKSHHVILRALAFKWIRVLWKCWQDRTPYDETRYLKQLAARKSPYAAATKL

SEQ ID NO: 419213 - protein, 421 aa, unidentified
MKREGTTDSDERYAAWVGFDWGDEEHVWVLQWADTGERERGPLEQTPEALDAWMCQLMSRLNGRRIGLAIEQKHGAVVWMLLKYECVEIYPIHPQAAGQFRQSLYPSGSKSDPLDGELLLELLVHHRDRLHALDQEDEPTRRLLMLVEQRRHWVEEKKRHGNRLLARLKVYFPQVLNWFEDISAAPVLDLLARWPRLEQLQKAQRKTLETFLREHRRGPQEASAWAEQVRCAVAAVQDVALMDSYVLETTALVALLKQMQTSIKKFDIAIAEISRQHPCWTIVQSWPGAGPVMAPRLLAAMGNGKRYQNAHEMQCATGIAPVTVATGRTRSVQFRRACPKFLRQTFHEWAQHSMKSCRWARAYYNQLRAGGKRHHAALRALAFKWQRILFRCWKDGVVYNESRYIASLKKRNSPLGVWLPE

SEQ ID NO: 419214 - protein, 368 aa, unidentified
MNTVKFIGMDVHKKTITIAIADEGREDQPRLYGTIANNLDALNNFCRKMVSTSTQIHFAYEAGPCGYGIYRHLTQKGFNCMVAAPSMIPKKSGDRIKNDNRDAAMLARLHRAGDLTAVFVPDAQDEAMRDLSRAREDAVAVAKKAKQRLKAFLLRNSVVFTGRSQWSKTYFRWLADIAMPHPAQQVALQEYIDAVHESLNRVDRLTDQIRQMVAGWRLAPMVSALQAARGVSMVVAVTILAELGDLTRFKKPSQLMAYLGLIPSEHSSGPSIKRGGITKTGNGHARKALVEAAWAYRMQARVSHVLLKRQKDLPKQICRIAWKAQLRLCARFRKLAAKGKPRQKVVAAIARELSAFLWAIAKQVPSVA

SEQ ID NO: 419215 - protein, 421 aa, unidentified
MQVLYERCAAVDVGKDVIAVAVRLPGDGPDGRQMVRRTFKAFYGVLGEAARWLTSLGVTHVAMEATGIYSMPVYHALIEHGHFTQVLVCNAGHVKNVPGRKTDLADADWLVHLLECGLLRGSFIPPAEIKAARDVIRYRTKIVQSRASEAQRLGNVLQDAGIKIDSVASSITTKSGRAMIEALIDGERRPKVLADLALGKMRAKIGDLELALEGRFGEHHALMCRLHLDHIGHLDEMICRLDAQIEAMMKPFRAERDLLTTAPGIGPLAAAAVISEIGASPAEFFPDAAHLASWTGICPGNHESAGKRRSGRRRHGNAHLQAVLVEAAWAAVRHDGYLKALYHRHVMKWGGYRSPVAKKKAIIVVAHALLVIIWHMLAGGASYHELGTDFFTRRLDPERETRRLIARLEALGHQVTLQPAA

SEQ ID NO: 419216 - protein, 311 aa, unidentified
MENFVGIDISKDTLDVHVDPEREILHVAYDCQGIAMVCQRLKAVSPALIVMEATGGLEVRLACELGALALNVAVINPRQARDFAKATGQLAKTDRVDAAILAAFARAIRPQARPLKDADTRALDDLVTRRRQLVAMRVQETLRLGTAASKPLQKSLNAHIAWLDKRIDEIDTDLTQRLRQSDLWRTKDDLLRGIPGVGAITSLTLLAKCPELGTLNRREIAALVGVAPLANDSGKHRGKRFVWGGRADIRAVLYMAAVSAIRCNPAIQTFAKRLKDTGKPAKVVIVACMRKLLTIMNAILKNKLPWTLKSA

SEQ ID NO: 419217 - protein, 452 aa, unidentified
MTLPVRHGVCDRLVRCRATERYPLGRRARLELDGIAVKRHEEVVTLSITCGIDWAEAHHDVALIDEHGVAVARSRIDTGAAGFSALLALIAEHGGGVDDTPVAVETDKNLIVVALVEAGFTVYPINPRGVARYRERYGQAGAKSDPGDATVLAHVLRTDRHMHRRLPANTSQASAIKVLARQHQEAIWALHQTVSRLRSVLLEFYPQALQAFPNLQHHAATTVLAAVPTPAAAGKLTRTRVATLLRRSGRGNQAALAERILTELRVPSLRQPSCVEEAYGHTVQGLVGAVEAMRTAADALEKALACEFDQHPQSDLLRSVPGLGPVLAARVLAEIGDDPARFENPQSLRAYAGTAPVTIASGRSRYVKARKVRNKRLADACHWWAFTTLTKSGGARAHYDRRRAAGDHHNAALRNLANKLIGRLWWCLVNNQPWDEDDAWPNIARTEKATAA

SEQ ID NO: 419218 - protein, 309 aa, unidentified
MNAPVVGIDVARGRLDIHVHPSGANFAVDRTTEGVEQLCERLRPLKPKLVVLEATGGLETMVARALTTWRLPAVIVNPAQVRAFAHALGQRAKTDRLDATVIARFAAATNPPVRARADAETQALADLVTRRRQIVGLIASERQRASQAPSCIRDSVRRVIEALEQEQSVIDRSIDAEVDRSLEWRRKETLLTSVPGVGPTIARTLIAELPELGSLNGKQVAALVGLAPWTRQSGQWRGRSFIAGGRAPVRTALFMGALVASRHNAALKTFRDRLIAAGKPKLVALIATARKLITILNAILRDGTPWQPA

SEQ ID NO: 419219 - protein, 324 aa, unidentified
MQGKEASEQETKVQSNVGIDISKCWLDAHVLPGDDRLRVANNCAGIRRLKRWLSHYRIALVAIEATGKWHRHLHRSLVASAIPVAIVDPYRVRMFARAQGILAKTDQLDARVLALFAAMMAPPVRPVAPQAMAELAELVVARASAVEAQVALKNQFAAAEGTFLKRQLDRRISRADKDIAALDREILKRIKADASLARRYAILTSIPSFGFAVAATLIACLAEIGSTTAKQIGMLAGLAPVADQSGDREGIRVIWGGRPAVRRVLYLAALSASRFNADMKTFYKRLIDSGKPSKVALIAVARKLVVLANALVSEDRTWQPCAPT

SEQ ID NO: 419220 - protein, 408 aa, unidentified
MKNSRKRYIGLDVHKHYLIAIGVDDELNVVLPVRRVEFSYLETWMKKTLTKQDAVVLEMTTNTWQLYDELCEHAGWVTVVHPPHVALLTRSLVMNDKIAASILARLLAKGLLVGIWIPPQEIRELRGLVAQRKKMTGLGTQAKNRLHAVLQRHHLLPPEGNAFHEAQQDWWLRLALGTLEKVNVESDLETLRFAQRQQVRLTSIMEEIANQQEQITRLLQLPGFGVVTAVTVWAAIGDIERFADSQHLVGYAGLGTKVHDSGMTSRSGRITKAGRCDLRLVLIEAAQVAANNHPHWKAELARLQPRLGRNKAIVAIARKLLVAVWYILAQHKTDRFAQPEAIAQKFLKFAYQLGKENRPQGQSAAQFVRQRLDALHLGNDLTSIAWGSKKPIPLPPSTHKVSDVPNTK

SEQ ID NO: 419221 - protein, 342 aa, unidentified
MKIIGCDFHPSFQQIAMVDTETGEYTERKLTPEEARQFYAELKGPVLVGMEACGNTLWFERLLAALGIELWLGDAGKIRAMEVRKQKTDRRDAQLLLQLLLEKRFPKVWVPSVQQRDTRQLLLHRHKLVCMRRQVKNELQHLALNQGVQQKRKLWSAAGRQRLEELPLTGWTKQRRQDSLELLDELSGRVAKLDIAAQQEADRDAVARLLQTHPGVGPITALAFSLTLGTIERFARSRQVVSYLGLNPAEHSSGGRQHLGAISKQGNPMLRSLLVEAGQSAARSVPELKRAYQRLKHRKHSGVGKVMVARKLAVRLYWMWKTQQPYTVARTQGSPSHHVVAV

SEQ ID NO: 419222 - protein, 404 aa, unidentified
MFNAVGIDVSKGKSTVSVLQPGGTVVKKPFNVVHSSSSLNELSRFILHLDGQTRVVMECTGRYHEPILHALHDAGIFVSAVNPHLIKNFGSNSIRKVKSDPADSRKIARYALDNWASLRQYSDMDTTRTQLKTLNSQMDFFTKQKVAARTNLISLMDMTYPGVNFLFSSPARDDGSEKWLDYAESFWHVDCVRKIGLKAFTKRYQAFCKRNGYNFQPGKPEELYLASKELVAVYPKDKVYKDLIMTGIEQLKSTTQHVEHIRHEMDALASTLPEYETVLSMRGVGKTLGPQLMAEIGDITNYTHREALTAFAGVDPGVNESGSFRSKSNPASKCGPSRLRKTLFLIMTSLLQTSPADDRVYQFLDRKRSEGKPYLVYMTAGANKFLRIYYGKVKACIAAQSKSE

SEQ ID NO: 419223 - protein, 474 aa, unidentified
MEKKLSNKQEAVIKLLARQKIRDVRELESYKLSECHPCSAGIDLGSREMYVALHPQVAAELGMSIVHRFETFTNDLLACKDLLVYCGVKTVAMESTSVYWTTIYFILEEAGIEVCLVNPKKFRMVPGRKTDITDCQWLQTLHLYGLLRGSFHPPHEIAMLRSFMRERDNIIKERSTFVQRMQKALVKMNLLLHNVIDDITGKTGMLIITSILAGETDPKRLASFRDQHCKKSEEQIMEALTGYYREDQLYLLRINYQSYCFFDKQLSDLDRQITKLLKRFPSKKDKKEKRPANGKRKSKGKNDIRTTENMEDVLYHMLGTDLSALPGIGVNAILQIISETGTDMSKFPTAHHFASYLGFVPHNKITGGYVISSKTDRIKSTAAQAFRKLIPSISQTKTALGAFYRRLAPRIGKAQAIIATCRKLAILLYNTLAFGKAYMELGELKYKQKQEEWERRKLLNLAKKYNYAITPNTI

SEQ ID NO: 419224 - protein, 386 aa, unidentified
MQKLNDLSRCLTLLEPDSTVIAVIEMSQSSWLVAGIVPGVERQPLKKLAVNEAALLKLLHRWREEAEEAGYGITRITVAFEAGRDGFWLARWLRARDIEAHVIHASSVAVSREHRRAKTDRLDTELLKRAFLGWLRGERDHCKMVAIPTIDDEDAKRPNRERESLVGEQSRIINRIKATLARLGIRGFNPKLKKAAERLEGLHTPEGELIPPNTLSELHRDMERRRLVRDQIRQIESARLDRLEHAPGEGAHAMVRLLARVMGIGIETADMLVQEVLSRNLRDRRAVARYAGLTGSPDESGKKRREKGLARSGNPRVRRGMIQLAWRFLMFQKDSALAQWFRARTENARGSRKTMIVALARKLLIALWRLVREGVVPDGVILRPAQ

SEQ ID NO: 419225 - protein, 359 aa, unidentified
MDKNEERLRQVVGGVDTHKDLHVAAIVDEQDHVIGTQSFPTTRQGYRQMLAWMRAAGDLMRVGVESTGSYGAGLLRYLQAAGIEVLEVTAPDRHDRRRRGKNDDLDAQNAAHAAFAGQRTVTPRRRDGMVEALRVLRACRKTAVSARRISLQMIQNTIIAAPDTLREHLRSMTRMQLIRTLAASRPDLTAYRDIEAAYRISLKSLARRYLELHDEIGELDLMIKAIVEELAPDLIARNSIGYNGAAQLLLTAGDNPDRLKSEASFAALCGVTPVPASSGKTIRHRLNRGGDRAANSALHIIAIGRLRTDEKTRAYVARRVAEGHSKLEVIRILKRYIAREVYGIIIRRHRDINATRFAT

SEQ ID NO: 419226 - protein, 392 aa, unidentified
MIYVGIDVAKDKHDCFITNSDGEVLFKSFTISNNRDGFETLFQRIESVSDDLNKVKVGLEATGHYSYNLLGFLLDKGLTTFVINPLHTNLYRKSLSLRKTKTDKVDSRTIATMMMSDMNLKSYSDTSYHNEDLKSLTRYRFDKVKERAKLKSSVSRLICILFPELEKLVPTLHMASVYALLSEFPSADAVANAHLTRLSNLLSESSKGRYGKDTAITFRDAAKISIGSYMPAKSLELKHTIKLIRELTVEIDEIEAAIKRIMDEEIQSPILTIPGISYRMGAMIIAEVGDFSRFDSADKILAYAGMSPSTYQSGQLDNCYSHMEKRGSRYLRYALYNATKYVCHWDKSFGAYLEKKRSEGKHYNVALSHATKKLVRLIFAMEKSGKAYLPAA

SEQ ID NO: 419227 - protein, 342 aa, unidentified
MYYIGLDVHKKTISYCVKDASGQVHQEGKVGATRRELDSWIKTLPQPRTMAMEATIFTGWIYDHLLPHAQQVKVAHPLMLRAIAAAKKKNDRIDAGKIADCLRCDFLPECHMASTQIRDRRRTLRYRHLLVRQMVQMKNRISGLLMETGVSYNKQRLHKVGYFRELLSTNEDVHESIRPLLKLSRDTVVRLQKTEYALVSSLQRDPLLADRVNRLRTVPGVGPITALAWALEIGDVARFRSIRQAISYCGLCGEEKSSADKVMRTPLSKQRNKHIQRVLVEAAKLAPRQDHDLALVYETEKQKGNANRATLAVARKMVAYLLAVDREERDFVPAENYQRAAA

SEQ ID NO: 419228 - protein, 429 aa, unidentified
MDYPPVAGIDVGKNFSEMCILSPNNEIYHRIKIYHDSIDSIKKAIGLLQKAEKDFAIRPVVVLESTGHYHKILFHYLSDSGFEVSIINPIQSDSIKNIGIRKVKNDKFDAHKIALLYRFSFIKTTVVPDDVIDCLKSLCRQYYKLGDELTTYKNRLIGIIDQVMLNFTDVFQSVYSNTALAVLDRYPSPKQILKANKQTLISLIEKTSKKGLAWSTEKYELLVLKAKEFKNLSINNPGNLAILKVNISMVRTLQDAQKDILDAINEIILADSLEDNPVLAPIINLLCSIPGIGILTAATILAEVGDFSAFSSPNKLVAFFGIDPSVNQSGEFIGTRNKMSKRGSRLLRRVIFTTALANIRSKRNGDKTNPVLYEFYQKKCTNKPKKVALGAVMRKLVNIIFAVMRDKKPFELRTPEEHEELLLTRSLVA

SEQ ID NO: 419229 - protein, 363 aa, unidentified
MFTERTSVGLDVHARSVAAAAIDGATGELFQTKLTPAHDHIGSWLKELPGPVAVAYEAGPTGFGLYRHLRAAGIRCEVVAPSKLQKPAGDRVKTDAKDAVHLARLLRLDEITPVAIPTVDQEAARDLVRAREDCRGDLMAARHRLSKLLLRHGIVYYGGNAWTTKHDQWLRTDALPQLTTHSTRLAFDSGYETVLATKARRDRLDAAIEELAADSEFTPVVRRLGCLRGIGTLTGFALAVEIGDWHRFTGNTIGSFVGLVPTEHSSGGTRSQGSITKTGNGHARRLLVEAAWHHRPRYTIGATMRARWDLAPAAARARGDKGNRRLHQRWVKFIDRRKPNTTADVAIARELAGWCWSLAAMND

SEQ ID NO: 419230 - protein, 408 aa, unidentified
MNPLYVGIDVSSKSNVVYLMLPSGDKHSNFSVANSHDGSTQLVKRICSALTSESLDTVSIGLEATSVYGDNLVYFLREDASLASFNKMIHVLNPKQVNKFKESYNDLPKNDWVDSFVIADCLRFGRINKEVYVGDYRYKALQNLTRARYFTVSNLTKEKQRFMNVLFKKYSTMTQEKVFSDTFSTTALAVYDEFESAEALAYMDLQELTAFIIDKGKNRFPDPDTVAKAIQKAARSSYRLPKTVNDSVNQVLSLSITSMKALESQIKEFDKAIAAQMELLPNVLISIPGIGPVYSAGIMAEIGDINRFENQAALAKYAGLAWTQHQSGNFEAKNTRLIRSGNRFLKYYLCEAAFSLVRCDKEYKAFYHLKYKEVNRYQHKRALALTARKFVRLVFTLLKDNRLYRSAE

SEQ ID NO: 419231 - protein, 359 aa, unidentified
MRTITIGVDLAKQVFSVCSVDAAGRVQDRRELRREAFRQWLPNVPAGTIVAMEACSGAHQWARRCQDSGLQPRLIAAQFVAPFRKSRTAKNDRNDAEAIATAARQGNMRFVPVKTVDQQVRLSWHRVREGYKADALATSNRLRGLLAEFGVVVPQSDVALRRALADLDALALPSSLVELLRDVDAHWQQLQVRIADADRRIQAHAKADEACTRLRAIIGVGPITADAVVATIGSAQDFKNGRQFAAWLGLVPMQHSSGGRSRLGRISCRGDGYLRTLLIQGARSSLQRAKAVPWEKASPEQRWIQDLERRLPFGKVLVAIANKHARQLWAMLARGEHYDAEAWLKHPMVQRPAKKRAAE

SEQ ID NO: 419232 - protein, 354 aa, unidentified
MRIVCALDVHRRQITYAVVDVRSGELSRGRVTPATRESVREWLARFDSLHDVHFALEGTTGWRFVAEEVTRAGHRAHLADPAETAVKRGRKRRAKTDRADCDLLLRLLSARELPESWIPPAQILELRTRVRLRKTLVDERTGWQQRLQAQLFHQGVTAGVRPRTRAGREALASVELSPAGRELVALALRMIDRVERELAPLDRALSLYARRQPGCRALITRLYGVGPVTATAIVAELGDARRFGCSDDAVRHCGLDVTVHQSDRKRAPGHLSHEGPELLRWALFEAAQQACRPASPDYDYYRQVARRIDHNRACLSVARKLCRRAFHILRELGAEALAPIEPAPAGEEVTPAAA

SEQ ID NO: 419233 - protein, 432 aa, unidentified
MVSIMNCNTQNAKIASITEKTLIVGIDVGSETHFARAFDWRNYEYTKKPLEFSNTEAGFMMFKAWVEDIAEKQGKTAVIPGMEPTGHYWFALGKFLQDSGMKPVHVNPHHVKKSKELDDNNPNKNDRKDPKTIAALVNEGRFSYPYIPTGIYAEIRSLSNLRFQTQEELTRIKNRIARWFAIYFPEYKDVYGDLMAVSGRMILKEAPLPEDIRILGVNGVNQIWRNAKLRGTGMKRAKILVSAAEHSVGSKEAPEAARIELKNLLNDMDVYVSRMEELLQTIEEKLKTIPYVDKLMEIKGIGLITVSGFIAEVGDIGRFDNPKQLQKLAGYAIVANDSGKHNGESRISYRGRKRLRYVLYEAAISLVGKNAEFKEIHEYYRTRKENPLKKMQSVVAVACKIIRVFYTILTKGVDYDPMKLMSDIRRPQLQAA

SEQ ID NO: 419234 - protein, 317 aa, unidentified
MTQKQVIVGIDIAKEKIDAAIRFGAETSFANSAEGRHELLAWLKEHGVRKAAMEASGGYERSWARLLREAGVEVAIVDPKRVRHFAKSAGQLAKNDPIDARMIAWFGEVFGHASGQPHDGERQELDQMVTARMAMARLKEQIEGWGEHEQPKAVQKAHQALLKAVVTQLDKLEDVIAAKIDKTEHFAQRAEIIQSVPGLAGTAAAGIIAFLPELGLVDRQAASALLGVAPFNDDSGKRHGERHIQGGRRKLRKLLFMPIVGAATQHNPVLKACYQRLIAKGKKAKVAFIACMRKLIGILNTMLARGEKWDPAKHAIA

SEQ ID NO: 419235 - protein, 345 aa, unidentified
MKVTTAGIDLAKNVFQVHGVDEHGKTVLRKQLKREQVALFFANLPTCLIGLEACGSAHHWARKLQSLGHTVRLVAPQFVKPYVKTNKNDAADAEAICEAVGRPNMRFVPVKNVEQQAVLALHRVRQGFIKARTAQANQIRGLLAEFGLIVPQGIGHIAARVPELIEDASNELPGSFRMLVDQLVDHLKVLDTHVLNLEAKIKAWHRENEISRKLEQIPGIGPVTASALVATIGDAKAFENARQLAAWMGLVPRQNSTGGKTKLLGISKRGDTYLRTLLIHGARSAILAAQRKATNEDSWLGKLLLRRNPNVAAVALANKNARVVWALLAKDRTYRSDLITSAAGA

SEQ ID NO: 419236 - protein, 350 aa, unidentified
MIIIGVDFHPEFQQIALVDKETGEFQEKRLGHREEAEKFYRALAAGGQKVRVGMEASGHARWFERLLAELQIELWIGDAAEIRTKRVRKQKTDRQDARLILQLLLEDRFPQIWVPSWENRDLRQLLWHRHRMVQARTRVMNQLQAVALNEGLRCKKRLWRAHGREQLESFRLAPWASRRRRDLLDLLDRLNPTITELSQAIEQEVEKCPAARRLMTHPGVGPLTALGFVLMIGDASRFKCGKQVASYLGLVPLEDSSGNRRRLGHITKQGSSMLRFLLVEAAQVTVRSLPQWRSKYLHLMMRRGRKTAKVAMARRLAVRLYWMMRQGWDYQQSIKFGSHAGQPGNRHGVQ

SEQ ID NO: 419237 - protein, 399 aa, unidentified
MKKHAFFELRVSVDIGCRNHNVAIGLSSGEVLDEFSIPHVPDGFRQFFARVEKQALRFGCPVSVAMEGYNGYARPLDTLVRAHDYRLFNINNLKLARFKEIFPAAAKTDALDARKGLELFQLRDHLPMAGDVLQEVRATPRENDILKRLSRRRRRLVDERTRLLNNLQADLQAVCPGLLEITGRADNLWFLRLLTSTDDLRKLARLRRSSLLKIAGIGVTYASVICAWQKRAQFSDEVEWVGEMIQEDAARVLELHDRIHSLEARMETVARDSSIAKTLSTIPGFGPVCTAELAGEIGTIERFGTEESLALYVGMANLDNSSGKQRGSKPPRQVNTRAKAAMMVAVDRHRKQVPLSQRYYEKKRTEGKKHNQSIRALGRHLCRVIFKMLKDNRGYRLPQ

SEQ ID NO: 419238 - protein, 344 aa, unidentified
MEITTIGLDLAKSVFQVHGVDATGRVVVRKSLRRAQMLPFFAKLPSCLVGMEACGTSHYWARELIKLGHQVRLMPPAYVKPYVKRGKTDAADAEAVCEAVARPTMRFVPVKSPEQQAALSMHRTRDLLVKQRTQLVNMIRGLLAEFGVDIPKGLERALLMARRIVDGEAPNVPMEAAKIVGTLSQQALDIHVRLREIDRDLLVWQRNNDVARRLMTIPGIGPVGATALAASVTDPHQFRSGRQFAAWLGLTPLQKSSGGKERLGRITKMGDKYLRKLLIVGMTSLVRRARYNPKTVDPRLADLLARKPVRVATVAMANKTARTVWAIMARGEAYRAGHRPALTA

SEQ ID NO: 419239 - protein, 366 aa, unidentified
MVQSSTAYLGLDVHKESIDVAIADAKEARHYGRVGGDAHSVDRLVRKLRGVHRAPLFVYEAGPCGFWIYRRLKSQGLQCMVVSPSMTPRNAADRVKTDRRDAMKLARLARAGELAPIYVPDARDEAMRDLVRAREDAVCMQRQARQRLQALLLRNEIRYVGRSSWTRAHRRWLSGIKLPNAAQQIAFEEYVQVCEECERRVERFEQAILAQLEHWRWRRTVQELQALRGISALHAVRIVAELGDFQRFDTPRKLMGYLGMIPSEDSSGPRRRQGAITKAGNSSARRALVEAAHAYAHPARVSWIIARRQVHASKRACDIAWKAQLRLCSRFARLAARRLPRNKAIVAVARELAGFVWAIAREVKPA

SEQ ID NO: 419240 - protein, 318 aa, unidentified
MVTAVGIDVGKKLCQVAIRRQTGEYIEQSFENSRQGLKKCVKFFGTRGVSKETPLVMESTGGYHLLFAMTLKDTYQYGSVKVINGILTKKYAGANIRKIKTDSVDAKILADIGEREELMPFEKDEEELLQKKRITLLKKLEHLRQQLTTSINSLEETSKSLGLSSETETRSRLILVAINTEIKALLIEISEAEKSDLVDTMILLPGVSRSAISVVLGLLGKRKFASRNQLVAFTGLDLTIRESGISIHGKRHLSKRGDPFLRKKLFQIAWALKMHNPEYQKYYEKKREEGHHYYTCLIAVARKFLKHMYGIQRSLEHD

SEQ ID NO: 419241 - protein, 328 aa, unidentified
MSKVFVGIDVSARELAVARQDDQRLRRFVNDRHGHKALIKHLAKKGRIARVCLEATGIYSLDIAVALSKARDIEVMMANPRAVKDFAGAFMRRSKDDQIDAVILAEFAARMPFVPYVPCSPQGLKLRSLSRRIAALTDVMVAEKNRLHAASATELCGTAVDIKVHIRFLKRRIEVLRNRAFDQIRADEELSSKYDCLVSVKGIARASAIQILGELIGLPEDMDKRQWTAHAGLDPRHYTSGSSVQKKARISKRGNVYLRRALYMPAVVAARREPMIKEYYLHLLDAGKRPLQALVAVMRKLLCAIWGMFSSGRAFDGSRFYQAAAVAA

SEQ ID NO: 419242 - protein, 386 aa, unidentified
MHHRTTLPVSEHTCSREDCATLFVSLELSRSTWVATSLALGSRKMSKHTLVGGDARKLLDLLARLKSRAEQRIAAPVKVVAIQEAGLDGFWIHRLLEANGVESHVVDPASIAVPRRHRRAKTDAIDGETLLRTLMAWQRGEPRVCAMTVPPTPSEEDRRRVSRERATLLRERIRHTNRIRGLLFGQGITNYNPLHKNRRKGLEELQTGDGHPVPVHLKAEILREIDRLELVLRQINEVEAERDEMLRPGQASSPVALLMRLKGIGPEFAAVLYLEGLFRHFENRRQLAAYAGLAPSPWKSGSVDHEQGISKAGNPRLRTTMVELAWMWVRYQPASALSCWFRQRVGSERGRIRRISIVALARKLLIALSRYINHGEIPAGAVVKPV

SEQ ID NO: 419243 - protein, 343 aa, unidentified
MEKIITVGLDLAKSIFRVHGTAEDGKVLVRRTLRRSQVLPFFRSLPACFVGMEACASAHHWAREIAALGHSVRMMPPAYVKPYVKRNKTDVADAEAICEAVTRPTMRFVPVKTAEQQAASMILRTREMLMRQRSQTANALRAHVAELGIIAGTGMASIAKLLVLLRDEKDNRIPGAARIALILFAEQIELLTTRIEKLDREILVAVRQDPDARRLMSIPGVGPLIAATVRTSVLDARDFATARDFAAWTGLTPRAQSSGGKERLGAISKRENRQLRTLLIVGATSIIKLAKRGLKVPLWIRTMLQRRPVKVVSVALANKIARTIWALLVRGGIYQAPAAMLKS

SEQ ID NO: 419244 - protein, 344 aa, unidentified
MNEIKVIGIDLAKSVFQVCVWMSDGSIASNRKVSRAKLLDAIRQFPAGSMIAMEACATSHYWGRTFQSIGFQVRLIPTQHVKALTHHQKNDANDALAICETAFRPGIHFVAIKTVEQQDIKALRAARQLMVEQRTALANQARSLAAEQGVEIPVGIHILQQRLPDIIEDAEQLISPVLRQLLFSLLENIHSLNGRILSVEHSLAALCQQQPKYKVLMTIPGIGPLIAAAFLREVNAAQFTNGRQLSAWCGLVPRQHSSGGKNSLSAMTKNGNRDLRTLIIHGARSVMHWAHKRDDALGMWLKRLTERRGKMKATVALANKMTRIVWRLLTESTSFNIDRAFAMN

SEQ ID NO: 419245 - protein, 363 aa, unidentified
MKIIGCDFHPSFQQIAMLDTATGELVERKLLHPEEATRFYESLAGEEVVVGLESMGNTLWFERVLSRLGLTCRIGDALAIRVSNPRKQKTDKRDAEHILRLLREGRFPQIWVPSIAERDLRQLLKHRHTLVQMRTRIKNQLQHIALNQGWQKKRTLWTKSGQQWLSQLELEPWTKRRRDDLLQMLEEMNRRIAELNTAVEEAAAQRPEAVLLMSHPGVGPILALATVLTLGDVSRFPRGKHLASYLGLIPKEASSGQRRRLGAISKQGNSFMRFLLVQAGLSAARGDAGLGRVYKRLLAQRKHHGVAKVAVARLLVVRLYWMLREQKQYPAVVRMQGSPSHPVVAVKAVLLNGRPASRPSKEG

SEQ ID NO: 419246 - protein, 360 aa, unidentified
MTGTMTWVGLDVHARSTHASAIDVVTGELTRARFAGSEDVVAWLSGLRAPARVVYEAGPTGFALFRAARAAGIAIEVIAPSKTARPSGDRVKNDRKDAELLARLAMAGQLTAVAVPPEFVEACRHLSRTREQVRGDLMSARHRVSKLLLAHGRVYDGTTTWNKPHRGWLGGQRFEQAPTELAFIDLLAAVDGLIARKDALDERLSRLATDDRLWPTVARLRCFRGVDTLTALVLHLELGGDWQRFASPRKLFSWLGLTPSLDQSGQSKTQGSITKTGSTYARRLLVEAAWHYARPPRIGATVANRQAGQPDHVLQIAWRAQHRLHRLHTRLRERGKPHNVATVAIARELAGFLWAAATAP

SEQ ID NO: 419247 - protein, 313 aa, unidentified
MPVSCGVGIDVAKDALEVAWSTEPEARWHTTNDERGWAALIDRLRALQPNVIVLEASGGYETGVASALSVAGLPVAVVNPRQVRAFAQALGRLEKTDALDAGVLAEFAVRIDPVPRPVADEVQADLQALVTRRRQLVEMLTAERNRVPLARGAVRKNLLAHIAWLEKQIGQTDRDLRTRIENSPIWRVRDRLLQSVPGIGPTTAACLLASLPELGTLSHRQIGKLVGVAPLPDDSGTRVGYRRIQGGRAAVRRALYMATVTAIVHNPPIAAAYRRWRAAGKLPKVALVAAMHKLLIHLNAMLKHHTSWQTTQP

SEQ ID NO: 419248 - protein, 408 aa, unidentified
MNAVGIDVSKGKSMVAALRPMGEVALLPQEFLHTEVGLEQMAYAIVALGEDTRVIMEATGRYHEPIAAALHEYGIYVCVLNPLFIKQSGGGSIRKVKTDKADAMKIAKYGLDNWVELREYTPMDTVRQQLKLCSRQYNLYMKTVVSLQNNLISLTDKTFPGVNELFSSPERADGHQKWVDFVMTFWHCDCICRVSEKAFTDRYQKWCKRKGYHFSTEKALDLYAGSCGHFTTLPKNDNTKLLITTAAQQLLSGKMTLAALRAEMTRLAKQLPEYDTVRAMYGVGETTAAQLMAEIGDVRRFPRRSSIVGFAGVDPAVDQSGKHSAKSVPTTKRGSPHLRKTLYQIVCTYLKKSPADEPVYQFLDKKRAEGKPYFVYMTAAQNKFLRIYYARVKECIETFDAQQDTVQN

SEQ ID NO: 419249 - protein, 411 aa, unidentified
MQTLYSRAAGLDLHKETIVACIARDGSPKLVRTFGTMTDDLLRLYDWLTENSVTHVAMESTGVLWKPVWNILDGGPWELLLVNPRDLKQVPGRKSDVSDSQWIAQLLAHGLLKASYVPDRAQRELRDLTRQRAQLAGDHTRCVNRLHKVLQDANIKLSSVATDVMGDSGRAMLEALIRGERDPHKLAELARGKLRVKIADLRRALRGHITPHHQFMLEQLLENVAHLEQQLGAFNERIAEAMRPFLDEGAFQRLDEVPGINRETIENVIAEIGTDMSRFPTAEHLSSWAGMCPGNEESAGKRKRTRTTKGNVWLRRALTQAAWAASRKKDSYFQAQYRRLAGRRGRKRAAIAVGHSLLVVIYHLLKHPSLEFHDLGGNYFDTLDPKRLCRHLVKRLESLGYEVTLEPRAAA

SEQ ID NO: 419250 - protein, 369 aa, unidentified
MKHSIIFVGLDVHKDSIDIALADDGRNGEIRFYGTIGGDLDSLNKAIRKFRRAGTELRFVYEAGPCGYEIYRHLIAQEFHCDVIAPSMTPKKSGDRIKTDRRDALSLARLYRAGELTPVYVPREDDEAMRDLVRGRGDAVNATRKARQRLSAFVLRHGFRYSGRNAWSAAHLKWLADIKMPHPAQQITLQEYIHSIEENSERVDRLTAQILNLIPTWRMAPVVAAFQALRGVAAIVATTMVVEIGDLRRFENPRQLMAYLGLVPSENSSGQTTKRGGITKTGNSHARRALIEAAQTYSFPAKVSRELRKRQEGLPREIKAISWKAQVRLCGRFRKLMAKGKNRNRTVTAIARELSGFMWAIAKEVPMPT

SEQ ID NO: 419251 - protein, 323 aa, unidentified
MQGKVSFQEDAMPVVYAGVDVSKEWLDVHLHPLGESRRFSNDKAGIGQLKRLLARYRPERIVMEATGKFHRPVHRSLWCDGFAVAVIDPLRARMFARACGYLAKTDRLDARFLALLAESLRPPAAAPPSPHIEALQELVNARSAAKDDLTALQNRSKTATTAVLRGELNRLVRRLEQHIDRLDKEIERYVGKDPQLCRKAEILTSIPGIGRVTALALMAGMDELGSCSGKQAAMLAGLAPIANDSGARTGRRSIRAGRPAPRRALYMAALSACRYNPALARFAETLKAAGKPAKVVLVAIMRKLLVLANCLLSQDRLWTPNPP

SEQ ID NO: 419252 - protein, 457 aa, unidentified
MSKRRKRAQSKSFNLQSLPKQLQHINLNAAGIDIGSERHMVAVPEGRAEVAVREFGAFTGDLVSLADWLEQCGVTTVAMESTGVYWIPLFELLERRGFEVKLVDARHVKNVTGRKSDILDCQWIQQLHTYGLLAGAFRPADQLCVLRSYLRQREMLTQTASMHIQHMQKALQQMNLLLHNVVSDITGVTGMKIIKAILAGERDPQVLASHRDNKCHHDSATIAKSLVGNYRAEHIFALRQAVDLYEIYQTKIGDCDEAIVTQVSTQPDVTDEPPPPEQKRTSARDRQRGGVNVRDLLFQKSGVDLFAIPGLAADTLLVLSSEVGFDLSPWKTVKHFSSWLSLCPGTKISGGKVLSRRVKRNPNRAAQAFRMAAATLSRSKSALGAFYRRIKARSGGKQAITATAHKIARIYYALLTQGTTYVELGQQAYEQKYEARRLKHLMAQAKSLGFQLVPSQT

SEQ ID NO: 419253 - protein, 311 aa, unidentified
MIIAPGFIGIDVSKNHLDIFDAAIGRSIRIDNSVPALAGLTESWAQREAAFVLFEATGRYDLLLRRALAAGGIRFARVNPGRARDFARAAGFLAKTDAVDAHMLAAMAHCLHPRTEEARTEPREQLALLNKRRDQLVATRQQERTRRHECSDPISLDSIAEHLAWLDAAIEAMQAQIAALIASTPELDRARRLLASTPGVGPVTAATLLALLPELGQRSPKQLAALVGLAPFNNDSGARRRQRSIRGGRKRVRDALYIAAFSAAHHAPRFVAFYKTLISAGKPTKLAIIAVARKLLTVLNAIVRDQQPFRA

SEQ ID NO: 419254 - protein, 343 aa, unidentified
MKATTVGIDLAKTTFQVCALNRAGKVICNRPVKRAALAETVAQLRPTHIAMESCSGAHHWGRTFQEFGHEVILVPPQHVKPFVRGGKSDPRDALAICEAARRPGLHPVPVKTTAQQDLQSLHRVRQQQVEHSTGIANQIRGIAHEYGVCFPSGIQRLLRELPYALEDAENGLTPITRELLARRFIDLLAVREEIKRTGQRIVAAAEQLHAWPHLMELPGFGVLVTSSYLASIGNGRQFQRGRQVSAWLGLVPRQHGTGGKVRLYGMTKSGDRYLRTMLLHGARAAIRWSRDKDTPLARWIAPLIERRGFNKAVVALANKNARIAWHIVARGARYDPGKAFGSA

SEQ ID NO: 419255 - protein, 416 aa, unidentified
MKIVRPICCGMDVHKNIIVATIGITNKKNRITEYIQETFSTLNPDLLNLKQWLINHKCFDACMESTGKYWIPIFNILEDEINIYLTHPKYVKAIKGKKTDKKDSKWICDLFKHDLIKFSFIPPKEIRALREISRYRYKLVGMRSSERNRYQNCMTVSNIGIGSVFSDPFGKSAQAIMKEVLESDIIEDEKILKCIHGSCKNKDKILDSIKHCNIETDQRFKMNESMTHMEELQVHINNCEIEIMKRAAPMFDRFMHITQLPGISTLSAILIISEIGVDMKQFESDKQLACWAGLAPANNESANKKKSVRISKAGQYLKPLLVQCALGAIKDKEGYFGIKYSRIKKRRGHKKAIIAIARMMLVSIYHMILTGETFNPSDYESFKNPKPPIKQQVLTEESAIEFLKKSGFDVSKLTKP

SEQ ID NO: 419256 - protein, 341 aa, unidentified
MSQVTTTGLDIAKHVFHAHGADSAGCTMFSRRLTRGKLLSFFVSQPRCTVALEACGGAHHWARELHAMGHEVRLIPPADVKPFVKRHKNDAVDAEAICEAAQRPTMRFVVVKSEEQQAAALVFRTRDLLVKQRTWLGNAIRGHLTEYGWVAPKGPNHLAMLADLFDDGEMAATLPEAARPMFAIMVDMLTELDKRVVALDKEIARRAREDEVARRLMTIAGIGPITATAIAPSAETFAKRRDFAAWLGLIPKQASTGGKQKLGSISRMGERTLRRLLIIGSSAIVLQATRRGAPAGSWLEDMLARKPRMLVTVALANKTARIVWAVLVKQQDYRAPVAATA

SEQ ID NO: 419257 - protein, 349 aa, unidentified
MKIIGCDFHPGYQQIAVLDLATGEMVEKALSHERKEEVRTFYAGLEGSVRVGIEASGQSQWFERMLAELGHQVWIGDAAKIRASCERKQKTDRRDAELLLRLLAEDRFPRIWVPTAAERDARQLLLHRHKLVRMRTQVKNQLQALALNQGVQRKRKLWSETGRKQLESLPLLPWASRRRVELLQLLDQLGASITELDRAVVEQANARPAAQRLMTHPGVGPITALAFTLTMGPAERFQRGKQVASYLGLIPSEYSSGGRQQRLGHISKQGSPFLRGLLVEAAQSAVRHEPEMRRAYQRLAQRKCRALAKVAMARKLAVRLYWMLRLQVNYAQLIQGSHAGQPGTFCGRG

SEQ ID NO: 419258 - protein, 337 aa, unidentified
MRRCIGLDVHREFAQVAIWEDGVIWQAGRIQTTPEALREFADSLCLSDEVALEATCNTYAIARLLEQHVGQVVVSNPQKTRAIAEAKVKTDKVDAAVLAPAGFLPAVWLPDEATFALRRQVVRRAHIVRQRTRLKNQVQSILHRNLIPRCPAADLFGVKGRAWLAAQDLPHDELQAVGALLRQLDFHGQELRIVDAELGRVGLERAEVRRLLTIPGVDATVALAIVAAVGDFGRFSSPQRLVSYLGLNPRVRQSGGQPAQHGRITKQGRAHARGMLVEAAWAAAKTPRPQGRCVPSTSASAPGAACRLLWWPPPASSPPCAGTWWSASRTMPSPVRR

SEQ ID NO: 419259 - protein, 359 aa, unidentified
MKKLSKFAGETAGLDLGDRYSQVVVLDEGGEVVEESRLATREEPLRRRFGGCPRMRIALETGTHSPWVSRVLTECGHEVIVANSRKLRLIYENPSKDDKVDAMYLARLARVEPALLSPVQHRSAGAQKDLALLRSRDVLVAARTQLINHVRGQVKSLGGRLPACATSAFGQRISAHVPDSLRPALVPLLEEIASLNDRIKAMNRQIRTLAEQSYPQTKLLRQVRGVGAITSLAFVLTLEDPRRFQNSRTLGPYLGLVPGRKQSGDSDPQRRITRHGDRDLRRLLVNAAHYILGPFGEDCDLRRFGRKIASRGGKIARKKAIIAVARKLAILLHCLWSRAELYDPFYNQTHKPPRRQKVA

SEQ ID NO: 419260 - protein, 341 aa, unidentified
MQITTIGLDIAKNVFQVHGVDTEENVVVRKRLRRGQVIAFFEALTPCLVGMEACATSHYWARALTKLGHEVRLMPAKDVKAYVKRNKNDAADAEAICEAVRRPTIRFVQVKSAEQQARLMQHRTRDLLMRQRTQVINALRAHLAELGITAAQGREGIKELLAIVADDRDQRLPTDARASLRVLAAQLQAMQTLLSSLEKRIMAQHRANADSRRLETIPGIGIVGATAIAATVTDPKVFRSGRDFAAWVGLVPREDSTGGKRKLGPISKQGDRYVRRILVVGAHSVLRRARQSPEKYPWLTGLLARRPFRVVAIALANKMARIAWALLAKGGTFRAPQLAAA

SEQ ID NO: 419261 - protein, 370 aa, unidentified
MKMSVGSDLHKTQFTVWNLSEDRVVDESRFYPTSKCGYDAFLKKMKIFMQQGYEVTVAVESTGNTRYFRNLLLKHGIRVKVINTMKFKVVTESVKKTDKHDARTIAEFLEKDMLPESILCSQESEDIRRVIKSRSILVKALVSLKNQVHGLLLGYGIESKRGQLQSKKERQRILCGLEDHECYGNAAQAVKPLLESIDRIASEIKNIEKVLAELVAEDEDVELLQTIPGVGLITAATIRAYTDDINRYDNEKKYAAHCGLVPWVQNSNKIIHHGHITKRGPVELRTAFVQMVMGMVRYQKVTSKYRIMTKYREMKKHKGTGKSIIAAARKLSTIVYAILKSREPFDATKMAPVKRKKKPVPVGHPFALAG

SEQ ID NO: 419262 - protein, 432 aa, unidentified
MDNRLQVGIDFSQKRADCCLLFPDGRPLESHIAFDNSYLGYSLAKQLLLDALDSYPFDGVDISGEATGYLWLPFFLQLAADPDLEPHDLNLYLLNPRWVKWFKKCFSQDDKTDEKDSFYIAERTRTRRPDAAWLADPSILALRFYTRLRFHLVQNLAREKCYFSAFLFLKASSYRRLKPFSDVFGVTSRLVLTQQPRLDELAELPVEDLAMQLHEMSGHHLPDPFENARKLKRVSQESFPLDECLALPVQRILDLTLEHIRFLEAQVAQADQWVTSELQAHPQISQLATIPGVGPVFSSGNGAEIGKTQRFLQAPKWDKKRKRYRARNLRDVEDAVAKIAGLWWPRSDSGDFEAEDRRMAKTGNRYLRYYLIEAANKMRQHIPEYAKFYARKYQEASKHRHKRALVLTARKSVGLVVGLLHRNEPYRSKEHR

SEQ ID NO: 419263 - protein, 332 aa, unidentified
MTSIIYVGMDVHTTNYTLCCYSMEDDRFFAEVQVEPDAKNILKYLARIEKQQSRDCRIVCGYEAGCLGYSLYHQLHAHGIDCVILAPTTMMTKPGKRIKTDRRDARLISKCLAFHTYSPVYIPTEVDNAVKEYIRMRDDANSALARVKQQIIAFCIRHGKIHDGKSYWTNKHLEWLSSLDLGNKILSEVLQEYLIRYYQLREQVDMYDMRINELAQAEPYRQKVEKLGCFRGIAAHTALSFCVEVGDFRRFATAQQFASYLGLVPGECSSGDKQQYTGITKAGNSHLRKLLVETAQVFGRSATKSGKSVALKERQAKCDSLTVAYAAKEKIL

SEQ ID NO: 419264 - protein, 408 aa, unidentified
MNTLYVGIDVSSKSNVVYLMLPNGDKHSNFSVANSHEGSTQLVKRILSALTSLSLDTVLIGLEATSVYGDNLVYFLREDASLAPFHRKIHVLNPKQVKKFHDTYNDLPKNDYVDSFVIADCLRFGRINKEVYLGDYRYKALQNLTRARFFAVQNLIKEKQRFMNVLFKKYSTMTQEKVFSDAFSTTALAVYDEFDSAEALANMDLHELTDFIIEKGKNRFPDPDAVAKAIQKAARSSYRLPKTVNDSVNQVLSISITSMKALESQIKEFDKAIKAQMELLPNVLISIPGIGPVYSAGIMAEIGDINRFDNQAALAKYAGLAWKQHQSGDFEAEVTRLIPSGNRFLKYYLCEAALSLVRCDKEYSDFYHLKYKEVNRCQHKRALALTARKFMRLVFRLLKDNRLYCPAK

SEQ ID NO: 419265 - protein, 353 aa, unidentified
MHEQAMQREVILGVDTHLDLHVGAVIDGAGKFLGTLATATNAVGYQQLIAWARSLGHLHRAGVEGTGTYGSGLARALYEQGVEVFEVNRPDRSRRRLVGKSDPVDAESAARSVLSGQATAIPKSHTGVAEALRILAVARRSAVKARTQAINQLRAILVSAPEEIRDRLWKTKAEQCVAGCVDLRPLGTTTHLIALTSTLRLLAKRWLMLKAELKELDSELEQLTLEYTPNLRKQFGVAPLTAATLIVAAGDNPERLRSEAALAALCGVNPLQASSGKTARHRLNRGGNRQANNALWTIAMVRMRSEPRTRAYVQKRSAEGLSNKEIHRCVNRYVVRELYPYILADLKATAQTC

SEQ ID NO: 419266 - protein, 443 aa, unidentified
MKTLSVINPNAAGIDVGSEKLFLSIAGDEPVVFGTVTDEVYRLRDYVKEQGVTSVAMEATGVYWLYAYSVLEAAGLEVIVVNGRYVKNLPGRKTDMADCQWLATLQAHGLLRGGFVPPAEIRRLQDYQRLRADHMREAARHVQKMQQALERMNIKLHEVISSLTGASGLAVIRAIVAGERDPQVLLGLCDIRIRNVKAERVVESLRGDWAEEHLFALAQAVQCWDHYQGLIAACDHQIEVVLRQMPDANTPPSAASTQTGKSRTRPGVNAPDIADLREILARICGAKDLTTLPAHSEYSVLQLIGEIGTDLTKWRTEKHFTSWLGLAPGSAQSGKRKVPVKRRRNRAGQLFCVMARALARSKYVALGGFYRRMAVRRGGLVANKALARKLATLFWRVMVKGLDFVETGVAQYEAKVVETKRRILHRLARQLGQQIVPSPAAAV

SEQ ID NO: 419267 - protein, 345 aa, unidentified
MGAAAAYWIQPEQSPGPNKPVLARKGAPMSTNCSIAVLGIDLSKNWLDAHSLPDRQSWHVKTDPDSLAEWIKELPDGITLAVMEATGGLQNLPAAALANANIPVAIVNPKQVRDFAKALGQRAKTDAIDAKIIAQFGVGIQPTPPKLPDEAQTLLSELIARRSQLIQNHVAEQNRIKTAQAKPIRRNIEANIQWLDKLLAKIDDDIDKQVRNSPIWLVNEQLLTSVPGIGSTTARVLLGKLPELGRLSRREIAALVGLAPFARESGRWRGKRFVSGGRAHVRASLYMAALTASRCNSVLKKFYQRLIQKGKPPKLALTAVMRRLLTILNAIIRDQKPWNDSKITS

SEQ ID NO: 419268 - protein, 344 aa, unidentified
MKKHTTIAMDIAKSVYEVAVSEEPGRVKERRRLSRSQMLRFFANREPARVVIEACGSAHALARTLEGYGHEMVLLPPGQVRRYVLRDKTDRTDTKGLLEADRNEEIVPVPVKTVGQQVLVSVHRMRSGWMATRTARLNAIRGLLRELGVTVPVGATKVLPALAEATAAGKLPGVLEGLLQAMAAEIRDLEARMAEAERTLKRMAADLGAAKRLQTVPGIGLLTATALIGSVGEPSRFPSGRHMSSFLGLVPRENSSGDRRRLGSITKRGDDYVRMLFTHGARSVLHAASRRKQNDRLRTWALETQKRCGHNKATIALANKMTRIAWAVWLKDSTYKGRAPEETL

SEQ ID NO: 419269 - protein, 347 aa, unidentified
MNFYTTQHKHYCGVDLHARTMYVCIVSQQGVVLLHRNLPCDPQKFLLTILPFREDLVVAVECIYSWYWLADLCAKEGITFVLGHALYMRIIHGAKAKNDRIDSHKTAVLLRGGLMPRAYVYPADMRATRDVMRRRLHFVRQRGSLLAHIQMTHHQYNLDSPGKRISYRSNRDGLGEGFEDASVRDSIAADLALIDHYEVVIGELELAVLRQARVHDPNAFRLLTTLPGIGRVLGLTILYEIHDISRFPSVQDFASYSRLVKCEKNSAGKSLGTSGAKIGNAHLKWAFSEAAVLFVAKCAQGKTLLTRLERKHGKAKALSILAHKLGRAVYFMLARNQAFDLERFTKS

SEQ ID NO: 419270 - protein, 418 aa, unidentified
MENRPPFLYQATVGIDWADRKHDVFVRFANGSSYRRKIGSRPEAIQEWLFELRSACAEGKIAIALEQRRGALFYQLCTHLSWIDLYPINPHSLSSFRLTFFSSRAKDDPKDGQLLEELLRTHCDRLRPYQPALTTERQLDLYCRQRRSLLGLATKTELKLISTLKQYFPVAVDLFEAVGMKSDIALNFLSRWQTMHELRRAKTHTVRSFFYAHNSRSQSLIEKRLQQIGAALEVTDDPALIEPMVLMTKCLVGQLRQFNQTINEFDRKIKGVFKSHPDHFLFEALPGAGEKLAPRLLSLFGSDRSRWPDAADIQKYSGIAPVIERSGKSLWVHRRLSRPIFICQSFHEFAQQSTRFSSWANEFYKRQREKGKSHHSAIRSLAFKWIRIIFACWKANKAYDESFYLNALAKRNASSSPT

SEQ ID NO: 419271 - protein, 394 aa, unidentified
MFFVGIDVAKRKHEAVVIDDKGRIVQKSFSFPNSLSGYNSLISCVKRITSTRKDIVFGMESTSHYWLALYSHLIKDGYTAHVINPIQSDAFRGLFIRQTKTDPIDAVIIAEVIRFGKYSSTHFPQHKILALREMCRNRLYMVDAISDLKRKTIALIDQVFPEYDQLFSDTFLVSSVEVLYRYPTPKKLLHIRRDTLTNLLIKTSGGHFGSAKADEIIHAAKNTFGIDDPYDVYADLIKTFIKQIKFIQKNVSEIDQKITAIMDEIASPITSIPGIGVTLGAVILSEIGDISRFKSADKLAAFAGIDPSLKQSGDYSSIRNHMSKRGSPYLRRALWMACIPATQVDPMFRAYYLKKRSEGKSHMKTMGHVAKKMICVIYAVLRDNKEYQPVLTAA

SEQ ID NO: 419272 - protein, 356 aa, unidentified
MILGAFDVHRRQITFDWVDQETGEARRGQITPATRQVLREWLGELPAGGGDFAVEGCTGWRFVAEELQAAGLTAHLAEPADTATLRGRKRRAKTDRADARHLRELLEQQRLPESWVPPAHLLDLRELVRLRKTLIDQRTQWKQRIHAVLFHHGLPTPPGALSTQAGRSWLAGVCLPPPSRLLVDVGLAEIQGADARLEPISGWLRAYAARQPGCRALMRELFGVGPLCAPTVLAELGDARRFRDGDAVVRYAGLDITVWSSDTKRSPGHLARQGPEVLRWALFEAAKSSARRTAPDHAYYQQVKDRLTANRATLSTARKLARHARHVLVELGEQALAPVCPAQLPPLLAVPLPEAA

SEQ ID NO: 419273 - protein, 367 aa, unidentified
MKQQSSATTETNNKVREVIDFSGKVICVGIDVHQKDYQVAKVYNGINLGNHRMSAGAAGLIKHLRSYYPGAQFKCVYESCAWGFNLQRALTAAGMECVVAHAADVSTTDKERKRKTDAVDALKLARSLEAGEITPIHVPDETLQKERSLLRYRANVTGDITRSKNRLKSLLKFSGIDIPEQYAKNNWSNNFLKWVAEQAAKDELLKDTLLLLLEEIKLLRQLLLKVEKKLRGLSQGKYKEQAALAMSVPGIGPHTALLFLLEAGDVRRFKGFDALNDFVGLCPDTNSTGEKEQATGITRRGHRRLRSAMVEAAWQAIRIDPALLESYQQLTKRMTGTKAIIRIARKLLRRLRCVLLRGTPYQKGVIA

SEQ ID NO: 419274 - protein, 422 aa, unidentified
MEVIHPRSGGLDVHKQTVVACVRLALGDKVTREVRTFETTTTGLLLLLAWLTEMGCTHVAMEATGVYWKPVWNILSDGDFELVLANAAHIKNVPGRKSDVSDAVWITDLLAHGLIRSSFVPDQEIQELRELMRTRKQLTRQQTSHVQRLQKTLECANIKLDSVISDIVGKSGRAMIQALIAGETDPVKLAALADRRIKASPQELREALRGRVTDHHRFLLRLHLQHIEFADAAILDIDRNVAALIARMDQEVEAGRAFHTLIALLITIPGIDVLAARAILAEIGPDMSRFPTAGHLLSWGGLCPRNDESAGKRRSTRLRKGDRWLKTLLVQCAWAARRKKDSYFRAQFYRITARRGPKKAACAVAASLLTTIYHMLKDGTPFQDLGADHFDRRSKEARAERLVTQLAKLGFDAKLTPLAQAA

SEQ ID NO: 419275 - protein, 336 aa, unidentified
METVCAVVGIDVSKKKLDIALLVNGKTKAKVVENSADGYKLLLEWLSKSKVAKETLHVCMEATGVYYEPVALALHDAGVVVSVINPACIKGFGHSENIRNKNDTADAGLIARYCAAMKPAPWVPPPLEQRQLRAWSLRVQALKDIRQQEENRLEANTFTGMTDVAEHVKQHIAWLSAEIQKLEGDIDDHIDRHPGLKQDAELITSIPGIGATTVARILGQLGDIRRFDSAKAFAAFLGVTPKQRSSGTSIKGRTMMSRAGSTSMRAALYMPSLVACRHNPTLRRFAERLSATGMAKKAVIGAVMHKMTHLIYGVVRTGKPFDPNYLTNGLAIQDGI

SEQ ID NO: 419276 - protein, 342 aa, unidentified
MQIASVGIDLGKTTFHLVALDERSQVVMRKKFSRKQLLAFTANLQGSLIGLEACSGAHFLGAALRRQGQDARLIPAQFVKPFRKSNKNDFLDAEAIAEAVARQNMRFVPIKTDEQLDLQALHRVRDRLVQRRTAVINQIRGFLLERGITFGRGPAQLRNRMAEVLEDAENALTPRLRTLLDRLWVEWKQLESDIEVAAEEIEQICHGDEACRRLRSIPGVGPLVATATIAAVGNGAAFRKGREFAAWLGLVPRQHSTGGKARLLGIGKRGNLYLRRMFIHGARAVVFRVRHDTGGLGQWVQQLATRATPNKVIVAVANKLARIAWAVLFRGEDYRHPALAQV

SEQ ID NO: 419277 - protein, 338 aa, unidentified
MYTHFAGIDLHKRSSTWVIINTERDVVWEEEILCTPQDLKEGLSRCPIPFTSTQATIEPVCGWQWYMDTLINAGIDTVLANPTKVRLIAESKHKTDKNDARMLAELLSTGYLPTAYRAPDDIQSLRALVRERHYLISLRTGVKNRIKGVVTRSGIHDIMDTCLTGIGRAYAERYNLGEVTDLHALMTELTVYTRRLERDIAKALKNHPLNTLLRSVPVVGTLTASTIIAEVGDFSRFKTPKQLGSYAGLVPRQRSSGERSRYGSITKVGSKYLRHSLVEAAMRFRVHHDPALHAWYERIKSTHSPMKARVALARKLLTIIWYIVKTNTPYTPRQHTAE

SEQ ID NO: 419278 - protein, 412 aa, unidentified
MQILYPCCCGLDVHTKTVVACLINHGKKQVRTFSTMTDDLLAMTDWLTSAGCTHVAIESTGVYWKPVFNLLEGLLTVILVNARHVKAVPGRKSDVKDCEWLADLLRHGLLKASFIPPLHIRELRELTRYRQTLVKEQTALANRVQKLIESSNIKLGQVATDVLGASGRLMLRALADGEQDNFKLAEMARGRLTKKKGELQRALKGHLTSAQRFVLGELLKLLDELSAAVERVNEQLRQQVSQNTDPFVAEAIKLLETIPGVGRRIAETIVSEIGVDMSRFPSDAHLASWGGMCPGNNESAGKRLSGKTNKGSTYLRDGLIQAAWAATHTKQTYLAAQFKRLVRVKGKKRALVAVGHSIIVIAYHLLKQQKSYQDLGGDYFDRQNVELQRSRLINKLEALGLKVTVEVKESAA

SEQ ID NO: 419279 - protein, 335 aa, unidentified
MEKLFSAFVGVDVSKHTLDVCLLKEQQSNSDVFENNKEGITKLISWLTAKSGVSAEAILFCFEYTGIYTMPLCCYLSEHHYQFAIVPALEVIQSMGVKRGKSDKTDAKAIARYAQTRSDDITLYTLPQKALVKLKFLLSHRNRLVKTRKAFYVAMTEPAGFLDKEITREINRHNKQLIDSLDRKIKQTEKQIKELITSDEEMKKIYELLLSVPGVGNHIAAHLIVHTNCFTTFKSSRKFACYAGIAPFEHSSGISIRGKNRVSHLANKRTKALLNMAALAARKNDEQINQYYERKLKEGKNPMLILNNIRNKLVARIFATVKRQTPYVHTMPFAA

SEQ ID NO: 419280 - protein, 458 aa, unidentified
MRIIGIDLATTAKHRAIIADGRSQFISPLIKFDTRLADLERLRTRALAGTTADEELVVVMEATDINWYPVAVYFAQHTATVHVVNPRMSADLARFYKRHAQSDRLAAKVLARLPLVSPDSVYPLVLSGAAYLALQRECKELDRLTVEISAYKNRLQATDRLGWPGLKRRVFSAPAGAAARWFRDHFYDPQQVVAAGVDGLRQAWRRAPAYDEGEDWIEPLVELARELLALYGDPGTFLDYALLADQVRREQRRLAALEADAHQVRLHITRPRYRRLHASRNLETIPGVGQDGAAVYTAFVGAPHRFASNRAFRGWSGMVPRSRQSGESETKGLRLSQAGPNLVKKYAYLDADVARQRDPQIAAIYYDQMMHKGKHHTQAVCACATHLLDRVRVILTEDRAYELRDVDGTPLSRQQARAIVVERYTVPKEVRQRNNRRARRQRAERRAERKDKRRSRAR

SEQ ID NO: 419281 - protein, 429 aa, unidentified
MPYRIAGIDVHKKMLAVVVSDVEIESEYQFERRMIGSSPDQLRSLASWLLEKEAEEVVMESTAQYWKPVWEALERYWKPIREKREGAKRRSGTLHLAQAQSNRARRGRKRDFADAERLVKRLVARELTLSFVPDTEQRLWRTVTRRKYQLTRDRVRLQNQLESLLEEAHIKLSSFVSDLLGLSAQRMLKAIVDGETDPAALAALADRKLRATPKQLCDALGACADLKPVYRRLLKMVLEQLQFLDQQIGQLDQEMASLLSQHQDAVQRLAEVPGLGVDSAQQIIAEVGATAETFPSAKCLSSWVGACPGDDESAGVNYSHRSPKGNRHMRRVLNQTANAAARTKGSIFEIVYRRSVPRLGHNQAIGAIAHRQCRLIWLILHQGVRYEERGPAVTKQSKQRRTARMIRQLRTLGYRIELPNPQHSSPAQG

SEQ ID NO: 419282 - protein, 461 aa, unidentified
MRKKKATGQQKESARKKVDWKALDIVHPEAAGIDVGGSEHWVAVSPDRDPEPVRRFGCFTADLREMGQWLVAKGVRSVAMQSTGVYWMPVFEVLEQHGLEVYLVNARHTKNMPGRKSDVQECQWLLKLHAFGLLNNSFQPTNEIRVARTLWRQRGSLVAGAGSAIQRMQKVLTEMNIQLGNVLSDLSGVSGMKILGAILEGKRDAWELAAYARPEVKATPEDIAKSLEGNWREELLFVLEQEVELYRFYQEKIVDCDLQLRKHLESFASTVDIQAQPLGPKPKGKKGSRNAPQFDLRTELYRITGIDWAQINGIDVLTAQTVIAEAGADLSAFPSEKQFTSWLGLCPTNEQSGGKILNRRTRKVVNRATVAFRNAAATLLRSQSYLGAQYRRLRTRLGAPKAITAMARKLACLFYRLIKHGQQYVDKGTEYYEARYREQQIRSLAKRAQKLGLELVIPKAA

SEQ ID NO: 419283 - protein, 387 aa, unidentified
MPQPNDLSRSLAALDENSTLIAVIEMSQSSWLVAGMIPGVERQPAKKLTPDEGGLLRLLHRWRGEAQKAGRTIDRIAVAYEAGRDGFWLARLLRAQGIEAHVIHPNSIAVSREHRRAKTDRLDTALLKRAFLGWLRGEREHCSMAAVPSLEEEDGKRPSRERENLVGERTRIGNRVKSTLARLGIRGFKPTLRTAAERLERLRTPEGEPVPPHTLAELRREMARLRLVAEQIREIETARLERLERQPNRGAHPMIRLLAQVRGLGIETADMLAREAFSRRLRDRRAVARYGGLTGAPDESGARRREKGLAKAGNARVRRGMIQLAWRFLRFQKDSALAQWYRARTADARGATRKALIIALARKLLVALWRLVTTGEVPHGVVLRPAS

SEQ ID NO: 419284 - protein, 331 aa, unidentified
MASSTDVTPVKTWVAIDVAKLTNVALMEFPDGNRKQLRFRHCAEDYDQLVSSLRQGSAPTRIAFEPTGDYHRSLGYRLVSEGFDVVLVSSVAGARMREAIFNSWDKNDPKDAQVILQLMKQGMTLRYCDPLILKTHDLQELSKTYHSIAIARKRLQHVLLTHYLPLYFPEMEAFWTSTRNEWFIRFLIEFPTPASVTSMTFSEFREAVWVSMGRRVHKEDKIAEIYRLASHSIGLPVALNSPAIETYRLQLSRYLELCQHRRALESKADELLSRGVDYQHLRSVPGVGPIVALVILAEAGDLRRFTHHRQFLKYCGLDLAKNQSGVSRSRE

SEQ ID NO: 419285 - protein, 408 aa, unidentified
MEVVHERCCGLDIHKRTVVACLRTAVGQSTKKETRTFGTTTGELLALADWLEAAGCTHVAMESTGSFWKPVYNVLEERFSLVLVNTRFLKLIPGRKTDVKDAEWIGDLLGHGLLRASFIPTGPERELRELTRYRTSLVRERSSEANRIQKVLEGANIKLASVATNVLGHSGRAMLAAIVDGVSDPRALAELAQGHLRKKRVALEDALDGLIHSHPRFVLRLQLRHIVELDELIEEISAEIEERLQPFQEALELLQTIPGVGKRTAETILSEVGTNITRFPTARHLASWSGLCPGLNESGGKNQSGRTPKGSLWLKAVLIQAAHAAARTRNTYLAGQYRRLARRIGAKRAAIAVAHSLLVITFRLLTDHTEYRDLNPDHFNNRNRDRSLRRLTYRLEQLGYKVTFEPVA

SEQ ID NO: 419286 - protein, 346 aa, unidentified
MEHYAGIDVSLELSSVCVVDTQGKIVKEAKVASEPEALVAFFKALSIAVKRIGLEAGPLSQWLHAGLRQAGFETVLLETRHVKAALSAMMVKTDRKDALGLAQLIRLGWFRSVHAKSIGSQEVRALLVARKQLLGRLIDVELSIRGILRGFGLKVGQVTRKAFEARIRELVTGQPTLERIAGAMLSARASLKVEYEKLHKAVLAIVREDAVCRRQMTVPGVRPLVAVTFKSAVDDPSRIAKSKSVGALFGLTPRKYQSGEKDVTGGITRVGDEMVRTTLYEAANVLLSRITRFSKLKRWGMDVAKRRGSKRAKVALARKIGVILHRMWVDGTTYRWAAAEPIAAQT

SEQ ID NO: 419287 - protein, 403 aa, unidentified
MHDDTPAFAGIDWASRSHAVCVMGHDGTMTEEFEVGHDGPGLEALVRRLKMRGVGRAAIERPDGPVVESLLEAGFEVVVVPSRVVKSLRTRYSLAGNKSDRSDAYMLADVLRTDGHRLRPLEPDGEATRALRSVVRARKELVGHRVALVQQLEAHLERAFPGGTRVFADTESAIALRFLRRFPTQARADWLSERRLAAWLSANAYCGRKDPAVLFERLAGAPSGLRGPDAELLGVVTASLVAAVEVIQAQVGELETRIAEALAVHPLAPVFQSLPRSGTVRAAALLVEIGDCKARFPTPESLAALAGVVPSTRASGQHNAVVHRFVSDKWLKNALCDFAQDSRQANPWAADIYRRARDSKKRHPHAVRILARAWCYVIWRCWQDETPYDPALHRGAQRLLPAA

SEQ ID NO: 419288 - protein, 338 aa, unidentified
MEHQRQYVGIDLHRRRSVIVRINDDGEVLETVRVVNDPLQLALAMANAGQDPEVALEATYGWYWAADLLQAEGAHVHLVHPLGLHWDSRRVKNDVLDATELARRLSRSDLPEAWIAPPELRELRELVRYRAKLVALRISAKAQVHAVMAKLGILPTLVDMFGPGGQKLLDEMAFEGAYAIRIASLRDLLEIYGRELAMIERAVARRLRGHTGYRAVQAISGVGPVMASIFVAEIGDVSRFHSAGHLCSWAGLTPTHRESDIKVTRGHITKQGSNLVRWAAIEAVACYHGGAPIAPSYARVAARRGAMIARVAAARKLLCLVYYGLRDGEIRCLAEAAG

SEQ ID NO: 419289 - protein, 315 aa, unidentified
MNQTNWVGVDTHKDSLACYKDGQFKEFNTTPKGFFSALEWAGQGYKWAIEGAYCFGKPFTAYLINNGCEVYEVNPLLTKTWRRSLAISNPKNDYGDAKVISINAHNARLQKISLETIQLKEKITAREHFVKDRTRAINAIKMLFSARGLDLPFEDLTTLKAGKWLSGQDDLVIKHFGKMLSDFNEAIKNFEKEIEKSLPEKARKLKQIKGISDLTAAIIYTETKGEIISPEALASYAGIAPVEHSSGKSKKHRNNKAGNRRLNCIFYRISIHQSRFDEKGKAYYEKKLAEGKTKRHARKCLARQLVRLVFNLLKD

SEQ ID NO: 419290 - protein, 403 aa, unidentified
MNSVGIDISKGRSTVAVMRPFGEVVISPFEVRHTDSELSKLARQLKILDGETRVVMEATGNYHTPVAKLLHDAGLYVSVVNAKLVHGYGNNELRRVKTDRKDAVKLANYGLDRWLTLPRYIPEEDTRLLLKNCYRQYRQYSKVQTVLKNNLISLLDTVFPNANRLFSSPIRGDGSEKWVDFVAEFWHCRCVTEKSEKAFTNKYQRWCKTHGYNFSEAKAHTIHAKASGHLGIMPKSETTKLLVEQAVAQLRATSTALAALKHEMQALTSMLPEYPVVMDMFGVGPTLGPQLIAEIGDVRRFYSKKALVAYAGLDAPPNDSGDVTGKHKSMSKIGASSLRRTLFLVMSVYLQNAPLDEPIYQFMDRKRAEGKPYRVYMMASANKFLRIYYATVKAYLESLEHTA

SEQ ID NO: 419291 - protein, 343 aa, unidentified
MNKQISAIDVASKKFDVCFKEQGNSGKSVIKGTKTFTNDMTGFKAYLSWANKRKKTDELVHVMEATGVYHENFCYFLYENGENISVQLAQKAKYFIKSLNIKTKTDKVDASSLAEMGLSRNLELWKPISSSFKDIRDLSRTLVRLNKQKNVTYSQLHASKAAHINHEASISILQELFDKQKELIQICEQEIYKLIAQDQELSERIDKIIAIKGIGQITVIKLLAETDGFRNVNSIRSLVSYAGLDVVQNESGQHKGKTRISKKGNSYIRTALYMPAMSAIQYDPRSKRTYERLNERLPKKRQSLIAVMRKLLITIYTLWKNGQEYNPNHQWNKEKRSLSPVTG

SEQ ID NO: 419292 - protein, 356 aa, unidentified
MSLIKAVGIDLAKLVFSIHGVDAHDKCKLRKTIKRNNLLAEITKLPPCIIAMEACSGAHYWAREFTKLGHDVRIMASKFVIPYRQNEKNDANDAEAICEAATRPKTRFVSIKSEEQQAVLCLHRIRQGAIKDRTARINRLRGLLSEFGIIMPKGRYPLQKNIGGILEDAENNLPFLARELLNDLWQSIKALNEEILKYDRKLYALANQMKAAKRLMSIPGIGEITATAVVATVNDAKHFETSRSFAAWIGLVPRQYSTGGVVRLGRISKRGEKHIRTSLIHGARAVIANCKNKTDRTSLWVKDLVERRGFKRATVALAAKNARLIWALLHSEKEYQVDYVQRLIKRLTPPSLCISH

SEQ ID NO: 419293 - protein, 384 aa, unidentified
MLFCGIDIAKRQHAIALLDGKGQLVQPILSIPNDRAGFDQLIQALPDPDAVAVGLEATGHYWVALYDALTRQGFSVVVLNPLQVAAYRRSGVRKVKSDRSDAVWIADFLRIANPSPTRQDLPVLLQLRELSRFRFRLTDQIGDIKRKLLTILDRVFPEYEQLFSSVFLRTSRALLEQAVAEMDLQELAALLQEASRGRFGREKAQQIQAHARRSVGVGFLADAAQIEMRCLLAQIELLEQQRDQIDDALAILMGQIPQHLTSIPGIGPVTGAAIVAEIGDVSRFDSVEKLVAYAGIDPSVYQTGQFRASEAHMSKRGSPYLRHALWLAASVAIKHDPQLQAYYQRKRQEGKHYGTALGAVCRKLLARVYIVLKEQRPYVVKPPC

SEQ ID NO: 419294 - protein, 367 aa, unidentified
MCQKGVKMTNSENSITIGIDISKEFFDIYVYESAKTMRFDNNNRGIKLFIKYITSLKPTLVAMEYTGGLERQVFFALQNNNIPCCCIKPTNIKNFSKTIDAKAKTDLISAKLIAHYAKILKPDPQPKPDESLLILKDLASRHLQLTEFLVSEKNRLSSSTFAKTKSQINKSIKVFEKLIEDNKKQFKELICSNPDLKAKIELLDTMPGVGEHSAMMLAVLLPELGTISGKQISSLCGVAPFVNQSGKYSGKAFIRGGRDKVRKLLYMVALVSITYNPVIKDYYNRLVKKGKPAKVAIVACMRKIITILNAMLTNNLPFIAEYYKLDLREQNYDSKIILTKKDEKNKEEADLVLSNTNLKEPVSKNIS

SEQ ID NO: 419295 - protein, 408 aa, unidentified
MEVLHQRCAGLDVHKATVVGCLRVQERGRVRHEVRRWGTTTAELLALGDWLRQAGCTHVAMEATGVYWKPVWHILEGELDLLLANPAHIRNVPGRKSDVNDATWIADLLAHGLIRASLVPPGPIQALRDLTRTRKQLMREIGQHKQRIQKVLEDANVKLASVVSDVFGESGRRMLEALSAGETDPSQLAALRDGRLIASRETLVAALHGKVTAHHRFLLSQHLGTIAHLEQTVAAFERQIAAVVAPFNTAVACLVTIPGISVTAAHVIIAEIGVDMSRFATAAHLRSWAGLCPQLNESAGKVMSRRLRHGAPWLKTVLVQCAWAATRNKNNYLHAQFVRLRARRGPQKAIIAVAASILTTAYYLLRDQVAYRDLGSLYFARMDKERTAQRLARRIKELGYEVEIRKAA

SEQ ID NO: 419296 - protein, 359 aa, unidentified
MKENSREAEWKQRPEQTVGVDIGDRFSRYCVLDHEGEVIEEGRVKTDREAWRQHWEGEPRQRVVMETGTHSPWASRLLQELGHQVIVANARKLRAITENESKNDRRDAKTLAYLGYCQPRLLSPIQHRSVERQQDLNLLRARDTLVRARTMLINCVRGLVKSAGGRLPSCSADYFARCVPPAVPTELVTTTQPLLEQIAGLTLQIRRLDQAIEDLSQRYPEIELLRTAPGVGPVIAAAYVLTLDRADAAAHSRSVGAFLGLRPRQSQSGDSDPEHNISKTGNLYLRRLLVQAAHHILGRFGPDSALRRWGLKLALGGKRAKKRAVVAVARKLAVILHRMWRTGKSYQPFPEQNMTVGAA

SEQ ID NO: 419297 - protein, 316 aa, unidentified
MTTAPVFVGIDISKSRLDVVLIPPETSFSIPNEEAAVKKLVARLQKARPHLILLEATGGYEHLVLAALREAELPARFINPRQVRDFARSLGILAKTDKIDARVLALFAEKLRPEPRPLPDAAQQELKQLMTRRRQLSKMIQQEQNRLPLSPAPRVQESIRSVIQALEAQLQALEQEIDDFFRQHPIWVEKEELLRSVPGVGPQTSLSLVAWLWELGRLSRREIAALVGVAPFSWDSGAWRGRRSIRGGRPQIRRVLYMATVAALRCNQVIRTFYHRLLQQGKAKKLAIIACMRKLLTILNAMVKNQQPWQTQVLTP

SEQ ID NO: 419298 - protein, 317 aa, unidentified
MGEDATMFVGIDVGKYQVDVALGPEGHVHQFKNDDEGIEGVLKLLAGHRVGLVVMEASGGYQRQLLASMLAQKLPALAVNPRQARDFAKATGKLEKTDKVDAQMLALFGERIRPAVRPLPDETLAHVSDWLARRRQLVEMLTAEKNRRLQAKGGIRRNIEAHISWLKAQLRDTEKDLSDTMSGCPAWNAVVELLDAQRGIGRLTAITLMAVIPELGTLDRKKIAKLVGVAPISRDSGTHRGRRYVAGGRAAARACLYMATLVATRYNPQIRHFYARLLAAGKPKLLALTAAMRKFITILNAIVRQHRSLPSTVTAAS

SEQ ID NO: 419299 - protein, 422 aa, unidentified
MTDAIPELIVSLDRSDKTAAVALLQAQTGTVDQYTISLQPEDLDAWWTKLQAEHPHARLLVAFEQPAPNLLAFFAARGPAAIYALNPSATWAYRQSLVVSHARTDRSDAYHQALYILHHRDALTPWAPVPEEVEQLDRLCQGRRKLVDSRTGLTNRLQAVLKRYYPQALSLMHEDIWRSMNLAFLRRWPSPQALKKVRLCTLKTFFLQHGSRSEARWETRQSVVQNLVPLTPQEPLSDLLEVSAIIEQLEALNTSLLRYDQTIAEHFATCQDTALIQALPGAGPNFAPRLYVAFARYADHCDLAEDFASAVGVAPVTDQSGKMRKVYRRLRCDKHTRQTFVEWAKETIKHSAWARAYFEQRKAAGHGFQATLRSLAYKWIRILWRCWKDHTLYDETQYIEKLRVKGSPLIKYFPSTLTPKAA

SEQ ID NO: 419300 - protein, 408 aa, unidentified
MKDSGKRYIGLDVHKHYLIALGVDEDLNVVLPARRVEFSYLETWMKKTLTKQDDVVLEMTTNTWQLYDELCAHAGSVLVVHPPHVALITRSLVMNDKIAASILARLLAKGLLVGVWVPPQEIRELRGLVAQRKKMTGLATQAKNRLHAVLQRHHWLPPEGNPFHDSQKKWWLALPLGKLEQVNLQSDLETLQFAEKQLLRLTSMLEEIANQEEQVTRLLQLPGLGVVAAVTVWAAIGDSQRFEDAQNLVGYAGLGTKVHDSGMSSRTGRITKAGRRDLRMALIEAAQVAANSHLHWKAELARLEPRLGRNKAIVAIARKLLVAVWYILAQHKTDRFAQPEAIAQKFLKFAYQLGKENRPEGQSAAQFVRQQLDVLQLGSELTTIAWGSKKPIPLPPSTNKGSDVPHTK

SEQ ID NO: 419301 - protein, 343 aa, unidentified
MKILKQSVGIDVAKNDFKVCLGKMDEQLCVAFSFQKAYDNNPKGVALFLKEVSQLFTEDVTVQFIVEASGVYHELLAHKIYQHGYDVSIILPTKSKAFFKSITQRVKTDKVDARLLSQLGVERQLDKWVPPDPIYAQMRSLTRERESLLKEKTIVANKIHAQQAAFQVARSTLRRLKQRLKMLQKQMLSIDVELKSLIESSEIISSKVHEITKVKGLSLLTVATVIAETNGFSIIRNQKQLVGYAGLDVIINQSGQKTSPGRLSKKGNGHIRRALYMPALSSSRSNELMKIIYQQLNQRQAAKKQGIMVVAKKLLLTIYALWKNNTEYDPQKNIQSRLVLATV

SEQ ID NO: 419302 - protein, 321 aa, unidentified
METTDYAAAPAVCAGIDVSKAALDVALRPSGEHWRSANDEAGIAELVGRLRPLAPRLMVLEATGGLERLVVAALALAGLPLAVVNPRQVRDFAKATGRLAKTDALDAAALAHFAEAIHPEPRPLPDAASQALAALVERRRQVVGMLTAEKHRHQQALPPVRAKVAAHIAWLEQALKELDTELEQTLRASPLWREREQLLRSVPGVGPTVSLTLLAHLPELGSGSVKRVATLVGLAPLNRDSGAWRGSRAIWGGRRPVRAALYMAALVGVRHNSVLRSFYEGLLARGKPKKVALTACMHKLLTILHALLRDGTPWQPTLLAT

SEQ ID NO: 419303 - protein, 345 aa, unidentified
MPIVGGLDIHRKQIAFDYLDTSTGQVQRGQVSPADREHLRAWLARFAGCDDVAFAVEGCTGWRYVAEELAAAGVTAHLAEPADTAFARGRKRHAKTDKTDSRHLRQLLAEGRLPECWIPPGRILECRALLELYHDLRAEHTAWVQRIHAVLFHHGAPALGEGTLRTGPGLAALREVSAVHLSPAGQLQVATALEVLEALETRMHAVRHQLLDAARHLAGAKVLAERLYGVGPFAALAITCWLAGKDRFSSSRQAVRFAGLDVTVWSSDRKGPPGRLSRQGPPVLRWALYEAGKTHARAPAPDHAYYAAVKDRCNGKRAALSEARKILRQAHHILAGLGDDALAAA

SEQ ID NO: 419304 - protein, 355 aa, unidentified
MDNRKYIGMDVHQASVSIAVNDAAGKQLMECIIETKAATILEFIQGVRGSLWVTFEEGTSAAWLYDLLKPHVTKLVVCDPRKNALLKAGNKNDRVDAQKLCDLLRAGLLTPVYHGECGVRTLRELGRSYVTVTQDLTRVMNRLKAMYRSWAIPCGGQEVYSPRHRAAWLEKLREAGVRRRAEQLYQQLDCLLGIRKETRSELVAESRKHPASALLQQIPRLGPIRVALLIALIQTPHRFRTKRQLWSYCGLGLRTRISSEYQYKGGQLQHGRKPPALRGLNVNHNHELKNIFKSAATQASASGDPLGDFYQNLLAGGMEPPMARLTLARKIAAITLKIWKKGERFDPAKLKQQAA

SEQ ID NO: 419305 - protein, 413 aa, unidentified
MDVFCGIGWAEDHHDIALTDRDGRLLARRRISDDAAGLAVLLGLLAEHGDSAGDPVPVAIETPRGLLVACLRAAGRSVYPINPMAVARYRDRHSIAGRKSDHGDAVVLANILRTDLHAHRPLPADSELAQAIAVLARAQQDAVWDRTCAHNKLRSHLREYFPGFLAAFAEARGGIMRPEARTILAAAPDPATAARLTPTQLRALLRKAGRSRGVDPEATRLREAFRAPQMRQLPLVERAMGRQALALLRHLDAACASADDLEQAAVESFNQHPDAGIITSFPGLGALTGARVLAETGDDRSRFAGARGLKAYAGAAPITRASGKTLAVLHRRVKNQRLAAAGYLWAFSAITASPGARAHYDRRKADGDRHAAAQRNLFGRLLGCLHHCLATGQHYDEATAFPAPGEATRRAAA

SEQ ID NO: 419306 - protein, 346 aa, unidentified
MTRYIGLDAHSESCTIAVLGGSGKRLRHERLQTSAELLKSFIKEVPRPRHLCMEEGTLSEWLCEELTPLVDKLVVVMPDRNPGNKSDLIDACKLADDLRRDAIRRPVYKAPGCFRALREAARTHYVLQRDKVRTKSRLSALCRGCGRPELAKALYGLNTRPDALQELPEHLRPRAALFGQELDALVECAAQAERSLQEQSGRVPIVRRLATAPGIGVVRAAYIVAIVMTPHRFRTARQFWSYSGLAVVTRSSSDWVSEGSGQWRRSKTQQTRGLNHNRHPLLKNVFKGAALQITLMPEHPLGQAYQRLLTTTKPNLARLTIARRLAAAVLAMWKNEKDYEPAKHLM

SEQ ID NO: 419307 - protein, 472 aa, unidentified
MRYIGLDLALATFHKAVVIDEQGQDVTPVLSVETAALSLEQLFHRAREGVRSDEPLVVVMEPTGMSWFPVAVFCQLQGVKVYLVNSQQVADLRRYYRKHAKSDRIDSRVLAKLPIVSPEKLHALQLIGASQLVCQRGCKELDRLMDMSIAIQNRLRAIDRFAWPGLEQVLPDNVAPITRWFREHWYDPHTVLALGEEDLLANWLENGQTSDETLESGKWATALVQLAEQVLALYGTETAFLDYAYLQAEVTREQALLSMLEAEYKQLQLETVRPLYRQLHPSRNLESLYGVGQDGAAVYFSFIGDPKRFPDHAAFRGWSGMIPRSSQSGTSEAKGLPISQAGPDLIKKFSFLGAETARQWDPQIAAIYYDQIVHHGKHHTQAVCVCATHLLDRIWTILKEDRVYELRDVDGTPVTVEQARQIIVTRYNVPKEIRQRNNQRTRLARREQLAEKNQKRKGRSHPVRGESETPSL

SEQ ID NO: 419308 - protein, 368 aa, unidentified
MEKLITSFVGLDVHKDSIAIGVAPAGREAPHFVGTVAPQWAALKKALGRLGRAKELQIVYEAGPCGYTLARELRSHGYGCEVVAPAKIARRPGDRIKTDRRDALLLARAARAGELVHVMIPDERDEALRDLSRAREDAVRARLKARQQLKALLLRHGHRYPGKSSWTATHERYLADVSFAQPAQQIAFAEYRSAAREAHERVERFTDALRAQLEHWRMRPVVEALMSLRGIDLIAAVTLVAEIGDFQRFARPRELMGFLGLVPSEYSSGSTRRQGAITKTGNGHARRVLVEAAWNYRFPARVSRTLQVRQESQPRSVRTIAWKAQLRLAQRYRHLSARKLALNKICVAIARELSAFVWDIAHQVKPSA

SEQ ID NO: 419309 - protein, 341 aa, unidentified
MNKVITIGVDLAKSVFQVHGVDAEGGVIFRRQLRRGQVLPFFKKQPPCLVGIEACATSHHWGREIAALGHQVRLMAPRYVKPYVKRNKNDMADAEAICEAVTRPTMRFVEIKTPEQQSVLMLHRTRHLFVRQRTMVINALRAHLAEFGIVAGVGRNGLERLLTIIEDGEDDRVPSAARDCLLALRAQLEMVKDQILDADRSILAWHRASEVSQRLDDIPGVGPLIATALVASVPDPHVFKSGRDMAAWIGLVPRQNSTGGKERLGHISKAGNRYLRMLLVVGALSVIRRAKQAGYSRRPWLTKLLERRSTKIAAIALANKIARTAWAMMAHGTIYEEPQAV

SEQ ID NO: 419310 - protein, 334 aa, unidentified
MENIALIGIDLGKNSFHIHCQDRRGKAVYRKKFTRSKLIEFLATCPATTIAMEACGGSHFMARKQEELGHFPKLISPQFVRPFVKSNKNDFVDAEAICEAASRPSMRFVQPRTESQQAMRALHRVRESLVQDKVKTTNQMHAFLLEFGISVPRGSAVISRLSTILEDNNLPLYLSQLLLKLQQHYHYLVEQIKELESQLKRKLDEDEVGQRLLSIPCVGTLTASTISTEIGDGKQYASSRDFAAATGLVPRQYSTGGRTTLLGISKRGNKKIRTLLVQCARVFIQKLEHQSGRLADWVRELLCRKSNFVVTCALANKLARIAWALTTRQQTYEA

SEQ ID NO: 419311 - protein, 400 aa, unidentified
MMTPDDIDVWVGLDVGKSAHHAHALDHDGNTLYDKPLKQDEKAIRTMLGKLSKHGRVLLVVDQPNTIGSLPLTVARNMGIAVAYLPGTAMRRTAQLLPGDAKTDRRDAHVIAWAALKLPETLRDAGPDDETLAALKLLAGHDEDLAHESTRHVNRLRSLLLQTHPAFERALKGERITRDATLALLERYGGPMGVKRAGIEDVKDWAKSNGLRAGRIIDDMFKAIGEQTVTVPGTLMAETIIPSIAHDIKTIRDRRREVGRQVEKLLEDHPLLTVLTSMPGIGVRTASNILLGIGGDIANFKSSAHLAAYAGISPVTGQSGTSIKGERPSRRGNKRLKNALWQTAFVASTKHPPSVAYYKRKREQGKHHNAAIICLARRRCDVIYSMLKNGTLYQEPVLVA

SEQ ID NO: 419312 - protein, 314 aa, unidentified
MSDALNIGIDVSKDALDIGTSGGDSWQSTNDQDGIGSLVKRLKDVPIERIVLEATGGYEAAVVAELAAASLPVIVINPRQVRDFAKASARLAKTDRIDAATLVAFAQAIKPEVRPLKDKQTLALEAVLGRRRQLIGMLTMERQRLHTAAPIVRKELKAHIVWLLKRVKEVDRELTGLLRASPLWRERENLLGEVQGVGKQTILSVCASLPELGRLNRKKVAALVGVAPYNCDSGTLRGQRHCWGGRADVRAVLYMAALSATRSNPVIRKFYQRLVAAGKPKKLAVTACMRKLLTILNAMVRDNAQWNPNLHIAA

SEQ ID NO: 419313 - protein, 366 aa, unidentified
MEPIYIGVDFHSRQQTICYLKTETGELVNLELRHQDKEQIRTFYQQFAGQVIIGLEASGYSPWFEALLERLGCEVWLGDATEIRRRARWRHKDDRRDAELIWDLMVHNEFPRLHQPAPQSREVLRLLRYRQKLIKVRTMTKNSLQAIAMQAGLARGHCLFTRAGQAEFRAAEMSPMLQWQRDHWFAFLQPLNQQLVETMVWFKAQAKDEANIKRLRTHPGIGLLTALCLEHTLQPVSRFRNQRKVVAYAGLDPMIRTSAERAIHLGISKAGSRMLRYLLVEAVHTAIRYDEDLKRCYKRLAERRGRPKAKVATARKLLIRAYVMMRDEIDYAEFRRRAVAARLARHSQGPGAVPEVLIGQPTSPGA

SEQ ID NO: 419314 - protein, 395 aa, unidentified
MLTSVMVNNSLTGKAGVGEVSEASRADTSRRREFGRVRASEAVTEREPRRPRGTSPNSRLNRPSVFLSKTRAGASSHLQVREKTMSEPVYVGIDVAKDTFHVATCPNILKTQLPNTPQGHRQLSRALKDHSIALIVLEATGGYERPLAAELLSDSLPVVVVNPRQVRDFAKGMGQWAKTDPIDAQVLAKFAQIVKPSPKTHSTPQTAELSELVRRRRQLNDLRVQESNRLLMIHHPKVKKSIRKMIKTLDFQINEIDQLVREHIDTDDNFKNKDRILRSTPGVGPQTSAMLIANLPELGKLNRQEIAALAGLAPWDRSSGKSDGKAHIWGGRKDVRSVLYMAAFTACRFNPVIRTLAERLRQKGKAYKVVITACMRKLLIILNTMVRNQTVWTIK

SEQ ID NO: 419315 - protein, 349 aa, unidentified
MNFYTNTHPYYCGIDLHTRLLYVCIIDNENNILVHEKIDDSPDKLLALLKPYLGNIVVGVECMHCWYWVSDFCEEHNIDFILGHALYMKAIHAGKTKNDKIDALKIAKLMRGGNFPLAHAYSKEHRSIRDALRRRTHIMRMSAQLKAHVASTVSQYNLPVLETRLDLRNSPDREKMRHFFPDEAVQKSMDLNLNIIETMVSELYKIEHYVKTQAQTHCATDLHILKSFPGIGKILALTILYEVGDIKRFPSVQKFASYSRLVKCKAESAGKTHGTQGNKIGNAHLKWAFSEAAVLYLKGNDNAKRYLAKLQKRMSKAKALSALAHKIGRCTYFMLKNQQVFDEERFLNG

SEQ ID NO: 419316 - protein, 360 aa, unidentified
MRIEDIDAPLSLETRAIINDEYLKVVSSATEPKSKTEASMNQNIIHVGLDVDDTQYHGSAFDKRTGEIIDFRCRPTLKGLLGELNKLGKHYPRCLLKLCYEASYIGYTLQRDLAEKGYHCDVVAPTSIPSPRGKQIKTDRIDAGQLAQFYANALVSIVRIPDVELEQDRDLMRSRQTLLQQQTQLRKHLQALLRRNGLHYKAQTQNKTHWTKHHYCWLERTIEASSGSLKVNLDLLLRQLKGLNTILAEYDQQIEVLAKTQRYEKPVQALTCYKGIKNLFALTMITEIGDVKRFAHPRQLVSWIGMDIREYSSGGKHHRFGITKHGNRYLRTAFIEANQRGYRSARLSQAIKARRAHTGA

SEQ ID NO: 419317 - protein, 456 aa, unidentified
MAQKELSLQIVNPHAAGIDVGSRSYFVATGQDADSVREFGVYTKDHLLLINHLRSTGVTTIAMESTGSYWQTLFNALQAAGFEVLLVNGSQTKNVKGKKTDVLDCMWIQKLHSLGLLSGSFILSDHLQQLRTYYSHRQHLIEQTSKYTNKMQKALRLMNIRLDIALNDIAGKSGMAIIHAILSGERDPNQLAGLVSGRAKKSKEEIATSLHGQWRPDLLFELQSCLSLYKMYENAIIECDRQMEAALIAHAPANSQPVEQPPLSLKSSRRMKVKRGPTFNVQQVAFAYFRTDLYEIPGVSHTTILCLLTNMGDDLPKFASAKQFASWLRLVPNNKISGGRIISNKTPSGKNQIAHSLRQAANTIGNQKAHPLTPFFKRIAYRRGRIAAITATARKLAIIVWNMITKGEPYRQFDYEKVNQKNKNQQLKNIQHRLSKLSLTTDELKTLFQRTSLLTT

SEQ ID NO: 419318 - protein, 342 aa, unidentified
MAIVAGFDVHRAQITFDALDTDTGEVTRGRIDAVPAAVTRWTERFEGREIDVAVEACTGWLFVCDALVAAGAVPHLAEPVETRALRGRKRRAKTDREDARWLRELLADGRLPEAWIPPEHVRRWRSRARLRHTLIDERTQWMQRIQAALFHHGVSGTPEKLRTATGRAFLDRLPLPDDARERIEVALAMVDAIDAQIVPLERELRRLARRQTGCKALMGLYGMGELTSLVTLCELGDVGRLSASRKAVRMAGIDIGVHRSDRRSRVGKLNRQGSPQLRWALYEAALAACRPSSPDHADYLALKARGLSHTRASLTIARKLARRSFHVLRELGPAALEPTPTR

SEQ ID NO: 419319 - protein, 334 aa, unidentified
MQNVALIGIDLGKHSFHIHCQDQSGNALLRKKFTRTKLMQFLATCPSSVVVMEACAGAHFMARRINDIGHEAKLISPQFVRPFVKSNKNDFIDAEAICEAASRPSMRFVQPRTETQQAMRALHRVRESLIRDKVKTTNQIHGFLLEFGISLPTGDATIKRLSLVLAEHEIPEYLNRLLMKLHAHYLYLIEQITELESELNQSIKADATAQRIMTIPGVGPMTASLLSSLLGDGKQFSCSRDFAASTGLVPRQYSTGGKSTLLGISKRGDKNLRRLLVQCARSFMMRLEHQQGKLAEWVRKQLDNKHSNIVACALANKLARIAWAITTQQKEYQA

SEQ ID NO: 419320 - protein, 345 aa, unidentified
MDASYDGRQVVGMDLHRRRSVLVRMTEDGRKLETVRIDNAPAALRGVLARAGKNPRVVVEATYGWYWAADVLEEAGAEVHLAHPLGVKAFSYRRVKNDERDCADLADLLRMGRLPEAWIAPPPVRALREITRYRHKLVQQRTSCKDQVHAVLAKAGIPVSHSDIFGRTGGMWLDGLVLPQPYAGKIASLRALTAVLDGEITRLEQQAAAMLAGDRGYAAIRQLPGIGPVLGAVICAEIGDITRFGKPGQLCSWAGLTPRHYESDVKVIRGHVSKQGSRILRWAVTEAIQRQPAGPRPQRVKEAIIARRGAGARSIAKTAAARVLLTQVFYGMRDGHVRRAASQAA

SEQ ID NO: 419321 - protein, 312 aa, unidentified
MQDILETCCGLDVHKETVVACLLKGGTDAKPETNLRTFPTLIPGLEELKTWLEEENCRHVAMESTGVYWQPVYNILESAFDGNMVVIVANARHMKNVPGKKTDMKDAEWIATLLRAGLLQGSFIPSQPIRRLRDLTRYRKSIVEEITSQKNRIEKHLQSCGFKLSTFLTDIFGVSGRAIMDHLARYGKISSQDVDQYVKRRARAKLNEIKLAVNGKMDRLQREFLKILLKRLDESYEHLQLIEQKIDEELEKYQRQLEQLDGIPGISKTAAAAILAEIGIDMTRFKTAEHICSWAGLSPGNNESAGKKSLPE

SEQ ID NO: 419322 - protein, 340 aa, unidentified
MEKRYIGIDLHRNRFTCCIRLENERTYVTEWELEDLGKFVKKLRPGDEVAVEITGNTRLFFDAVAPHVARVVVVNTNQFKVICQSVKKTDPHDARALALYLSKDMLPEVRMKDKEHGQLASLTQTRDTLVKLRTALKNKINNILSARGLNLAKEALSSEKKLDEVLSLPFDEIVRIELRVIVEQIRSLNKSIAELEKTIGEAGSKLEGHKGLSSIKGIGKITGAILLSVIGDVNDFADEGRLASYFGIVPRVSNSNETERSGRIHKRGTKLGRTALVQSALIAAHYSPYLKRFYEQVKARRGAGKAIIALARKFLGIIYRTLKNNWVFQDFPNFVLAEAS

SEQ ID NO: 419323 - protein, 343 aa, unidentified
MNEVITIGVDLAKNVFQVHGVDVEGAVVFRRQLRRRQMLPFFKKQPPCLVGMEACATSHYRARQLIELGHQVKVMPPHYVKPYVKRNKNDATDAAANCEAVTRPTMRFVSVKSTEQQSVLILHRTRDLLVRQRTMLINAIRAHMAEFGIVAPVGVPQVKKLLAIIADTDDTRLPPIARTCLESLARLFLSLHDEIYATEKHIHTWHRSNEVSRRLESIPWIGPIIASALAASITDSEVFKNGRELAAWIGLVPRQNSTGGKQRLGKISKQGDQYLRWLLVAGAMSVILHAKRRGTNQPWLANMIARKPTKVAAVAVANKNARIVWALLRHGGTYQKPVAVPVA

SEQ ID NO: 419324 - protein, 342 aa, unidentified
MFLFIGIDFSKEKFDACAICADGVSVKAEEGHESFKNSKRGFHSLLAWAEKLCDKHHVDELLFCGENTGDYCRKAADYIYGKGYDLWLANPLAIKRNNPMQRQKTDKTDAKMIAEYAMRHYDQRKLYESPSKAMSNLRELYLYRNYLVNLRKSVLVRDGEKHYTLDCSKAKSMNSQDSRTLLKVLDKLISKRDDAIMEVIKSDEELRENFVILKSVPGIGMLTAVCLIIYTDNFKQFDYDARRLACYFGVAPFKKESGTSVNGKPHVSHLCNHRLKAALHEAALTASRCNKPLKAYYDRLLANGKPKPLALNNLKSKMLHLVMALVKNKTMFDENYRSPLSA

SEQ ID NO: 419325 - protein, 394 aa, unidentified
MAIFLNLMRMEGGKRHHYLRTFRHETADLLALRAWLLQERCTHVGMESTGVYWMSVYRRLEGFFELVVANAQHIKAVPGRKTDVQDAEWIASLLQHGLFNPSFVPSQEQQDLRDLTRLRVSLVRERTRLVNRVHKVLEEAGIKLATVLSDILGLSGRAILQALCEGERDPERLAKRVHPGVQASQEQIVVALTGEVREHHRFLLRELLSLITVQDRSITHLEEEIERRLHPFAEQITRCEKINGVSRHVLYVLMAEVGTDLQRFPDAEHLSSWAGVCPGQKESAGKRLSGKCKKGNRYVREALVQAAHGVRRSRTYLGERYRRLKKRRGSKRAALAIGHDILVIYCQMMKTGQEYQEKGVEFFQQGDRSKFGRQLVRRLEHMGYQLTRPPQPVA

SEQ ID NO: 419326 - protein, 307 aa, unidentified
MSEKIYFGVDVCKASLVFYGPGVAEEVPNNVPGVRRLLARLPKGAHLIIEASGGYERELVSVAHQSAVSLSVVNARQVRNFARGVGRLAKSDPIDAEMLARFGAEVNPPLDVVPTAWEVALQELISARQQLVEERTVLLQQQAQHLNRIVRRLDRARHKLLQRQIAQLELAIGSILEEQSVLKQKVERLQKVKGVGFITPVSCIALCPELGSLSRRQTAALVGVAPYDDDSGARKGWRHIAGGRPKLRRALYMAAISAIRSNPILRRFYQQLRQRNKPPKVALVAVIRKLAILLNHLLQNPSFLPAS

SEQ ID NO: 419327 - protein, 382 aa, unidentified
MQASRKSTPTADHCGTIFVAIELSQKTWLITVHSPDRDQFSRHRLEGGDHAGLLALIEKVRARATQQLGSTPRVVSCYEAGYDGFWLHRLLEAAGISSLVFDAASIAVEQRSRRAKTDRIDGELLLRTLMAHLRGEPRVVRIVRVPSVEEEDARRASRERDRLITEQTAHTNRIKSLLRLLGMAVGNPRRRDWLAWLKRQRDWQGRPLPPHLLAEAQREHARLMLVREQLAALEQVQAAQASAVPAPMAERLEPLQQVSPLGPAFTATLVNELFYKDFRNRREVASYCGLAPSPWQSGGIDREQGISKAGNRRARHKAIELAWLWLRHQPNSALSHWFRTRTANAGRRAKRIAIVALARKLIVALWRYLTAGLVPEGATMKA

SEQ ID NO: 419328 - protein, 346 aa, unidentified
MRPNLFMEIDHVVSQCVGIDVSKKKLVATMCMFSQAEQAVYSKATEFDNNKTGFNQLVKWSRKEAMKELPLRYVMEATGVYHEHLANHLVRIGCTAVVMMPAKAREFACWEGMISKNDTIDSRVLALVGCVKRNLRPWKPTSPLYRELRTMTRFSQDAKKLRTELKNHLEALEHSHEAERSVVRHYESLVASLDRRIEKNLEDMRKKVDSDEELSKKVANIMTAPSLGFLSAVTVIAETDGFALIQNRKQLTSYAGLDVRDSQSGTVNGVSRISKRGNSRIRAILYMPAVQCRLHNRHLKEAYDRIVAKHPDKKMIAVTAMERRLLLLIYALWKSDRPYSEDYDKE

SEQ ID NO: 419329 - protein, 384 aa, unidentified
MNKHNILFIGLDTHKVSTEVAYIEDDRGAIPIHHGKIPTTKTAIKKLVRRFESKYPKATLHFAYKAGPCGYWIYRLITSLGHCCYVIAPSLIPKKSGDKVKTDKRDALRLAKLLKTEELTPIYVPEPEDECIRDLSRARETAMKDLNDACFQLKALLLRNNINYKGTANWSKKHLRWLSELILPHPAQQIVLQEYLQTVSERIRRLARLVNELQHQVQNWRYYPVVKALQAMRGVRLLVAAGIIAELGDLTRFDHPRKLMSYLGLVPGEHSSGDRRRLGSITKCGNIRARRLLIEGAHSYRYAANISTELQKRQESLPKEIIDIAWKAQLRLCRRYQQLMHKGKHYNLVIAAIAREMIAYIWAIAREVVLSQVNPKLRISRVPA

SEQ ID NO: 419330 - protein, 356 aa, unidentified
MSRDIKYIGMDVHQEAIVIAVLNGSGKLVMETIVETKASSILQFIHGLRGELHVTWEEGTWASWLYDLLQPQVEQVLVCNPRRNALLKEGSKSDKVDARKLAELLRTGMLRPVYHGENGLRTLRELARSYQTISKDLTRVMNRLKALYRGWGIACAGTQVYAPRYREEWLSKIAQAGVRRRAELLYQQLDGLQALRRNLRPEFLAESRKHKAAKLLRQIPCIGPIRAARLIALMQTPHRFRSKRQLWTYSGLGIETHDSAQYRYVGGQLQRSKKPQQLRGLNQNHNHEMKEIFKSTATRASCGRGPFHDFYAALLTKGMKPEMARLTLARKIAAITLTLWKKGGRFDAEQLKAQAA

SEQ ID NO: 419331 - protein, 354 aa, unidentified
MNYLGLDYHKKYSFATIITEEGEIKEKERLLNRKESFREYLQRYEGLVAVVEACWNWPVAVELLEGLVDGVKLAHPLKVKAIAEARIKTDSIDSETLAYLLRADLIPEAYLRDKTNLQRQKILRMRSFYVKLRTQVKNRVHALIDGQEEEIRETAKGYSDLFGKGGLRWLGGLRLKDPDEKMLRGLLEIYELLSKQVRETDRIVKEILDSDEDCALLKSIPGIGTFFAVLIKTEIGNIERFSSSSKLCSYAGIVPSTYASGGKVWHGKITKQGNRWLRWAIVEAVIPAICTNGELRSYYERIRYKKGPKAAKLATARRLLAIVYRVLKEKDPFKLYKIELKKGAESPSVATSAA

SEQ ID NO: 419332 - protein, 463 aa, unidentified
MLVQQARNNFGPGGLKHHRLLLLSRKHAQHNLCIGATPFHASSWEGAAMDAIYERCCGLDIHKRTVVACMIVPGSGRQARKEVRTFGTMTDDLLTLADWLAAESVTHVAMESTGVFWKPLFNLLEDRFQLLLVNARDIKQVPGRKTDVKDCEWIADLLRHGLLKASFVPDRQQRELRELVRYRTTLVRERSAEVNRLQKTLEGANIKLASVASDPLGLSGREMLNALIDGSTDVASMAELARGKMRAKRGLLERALAGRMAAHQRFLLTEQLCHIDALDEGIARASGEIAERMRPFAEALERLDTIPGIGQRMAEILVAEIGTDMRRFPSAAHLASWAGMCPGNQESAGKRKSGRTRKGNVWLRAALIESAHSLGRGRGTYLAAQYRRLTARRGKKKAAVALGHSILVIVYHLLSRGDVYHDLGVQYFDEGRRERLEHGLVRRLQDLGYKVTLEPTQPTTSAA

SEQ ID NO: 419333 - protein, 373 aa, unidentified
MKKRSRAQKSQKPTVKTKGIQERVTIGMDLGDKTSRYCMINHEGEILREGQVTTTKAGMVEGFGSLGRARIAIEVGTHSPWVSRLLKELGHEVVVANPKQVKLITESSRKDDRLDAQTLARLARIDPQLLRPIQHRSDKAQGALMVIRVRAALMGVRTSLVNTARGLAKSMGERLPKCDADQMGVPQSVTLPSKLRQVLEPLLKEVESLTEKIKDSDREIEQIARKDYPETALLQQIAGVGPLIALTFVLTIEDKGRFQKSRDIGCYVGLRPRRSDSGQSQPQLRITKEGDPYLRTMLVQGAHYIISRRGPDTDLKRWGLHLAQHGGKRGKKRAVVAVARKLGLLLQRLWVPGDVYEPFQNHNARQEQKKTAA

SEQ ID NO: 419334 - protein, 363 aa, unidentified
MTYYQGLRYNSPVDLKIKFMKQKYVIGIDISKSKVDCAVIDFGYELKLEKEVFNKEKTLDAFIKTIAKRLQINQEELLVCCENTGIYNRPLEVVCTRLGITLWVEHALKIKRASTDMRGKDDKKDALRIAHYAVRYYDKMVPYQEPSEIVKELNVLTKARDTMLTQKVALENQLREAKTHDTFEYELLARAFKKSISSLSKSIKEIEKQIDLLIQKDEQINQNKQLITSIPGIGNQGAINLIIATNNFQSFQSAKHLACYAGVVPFKNQSGTIVKKERVSKMANKTIKKLLHLSAMAAIRSDKELKGYYLRKVAEGKNKMSVLNAVRNKLVHRIMSVITRKQAYLSQEDYFYQKRNNFACLLT

SEQ ID NO: 419335 - protein, 321 aa, unidentified
MPTFHLGMDVAKAKLDCALRLPDGKFKSKVVENNPQGFKALIEWLEKHGATTPHVCLEATGIYWEAVAEVLAAHGMTVSVVNPAQIKAFGASRMVRTKTDKVDARLIAEFCVERSPEPWQAPSQSEQALHAMVLRLEALQTMRTQESNRLAVAREAVKPGIAEHIEWLDKQIDALAKTIRDHINDDPDLKDKRALLNSIPGVGERTIATLLAFYANVERFGNARQAVAFAGLDPRQHESGSSVKGKPRMSKVGHAFLRKALYMPAMVTLYKTAWGKRFRERLAASGKPPKLIIGAMMRKLVHVVFGVLKSGKMFNPALHGG

SEQ ID NO: 419336 - protein, 375 aa, unidentified
MKEKVRFLGMDVHAETIAVAVAEPDGEVRSLGTIANRAESIRKLVKKLGPVEHLRACYEAGPTGYVLYWQLMELGVECAVIAPTLVPVKAGDRVKTDRRDALKLARSHRSGDLTAVWVPDAGSEALRDLVRAREAAKQDQLRARHRLSKFLLRTGQRPAHGMKAWTQTYMMWVRQIRFAQMAQEATKLDHLHEVEHMGERVARLEQAIVEAIQLASPQIQEVVKGLQALRGIAQISAVTIAAELGNISRFEGARQLMGYSGAVPREDSSGQRKQRGSITKTGNAHLRRIAVEAAWSYRLRPSVGPALRKRQEGVAEEIKEIAWKAQHRLHKRYSRLSAAGKDRRKIITAVGRELLGFIWAIGVKAEKAANQPMAA

SEQ ID NO: 419337 - protein, 433 aa, unidentified
MLKLNYMSTLFVGIDVSSKTNAVYAMDFEENKYISSSFGNNQPGADQLVNMIAECMQKHKNLDTVLIVLESTSVYSVHISNFLSTSEVLMPYKPYVFCVNPKATSNYRKSYIGMEKTDPTDAYLIADFGRVGRTKKLEPWRGGQFIALKRLTRHRMHLSECITREKTYMVSNLYLKFSELQLLEGDDKPFGSLYGATSSAVLTEFLSPQEIIDMPEEELLTFLAGKSRNRISDLSKTSELLRKAARDSYRLDKCMYEPLSISLASSFNCIHAYQKEIKLIEQAIEKCINGMNPNALLILQSIPGIGPIWASGILSEIGDITVFHSSDALAKYAGLYWPKGDSGDFTSEDNKMSKAGNPYLRCYLGEAANSVRKHIPEYADFYARKYAEVTKHQHKRALALTSRKLVRLVFGLLVKNQLYTGEKLDAEYNIKSN

SEQ ID NO: 419338 - protein, 321 aa, unidentified
MPKKKSQCSWIGIDVSKQLLEVAIHKSDYHFRYPNDPKKFPDLIAELIDLRPARIVLEATGGLERPLLQALQAVGLPVVQVNPRQVRDFAKAVGSLAKTDRLDARVLAHFAAAVEPPLRALKTSEDTELDALMGRRNQLSDVLVAEKNRRGSAATEATRADIDAHIEWLEQRLKTLDKQLKDQLKRSVAWQHKDKLLQSVKGIGFVTSLSLLADCPELGQLNRHQIAKLAGVAPLNRDSGKQRGTRHIFAGRAQVRAKLYMATLTAIRCNPVIKAFYQQLIARNKLKKVAIVACMRKLLTIINVMIRDNKPWNVKAQPVSA

SEQ ID NO: 419339 - protein, 426 aa, unidentified
MVDDEYRIYVGIDWATEAHQACVLDCTGRVLAERSFAHTGEALTAFAKWLHGVAGGDPGRAAIAIELPRGAVVETLVEHGFHLYAINPKQLDRFRDRHSVAGAKDDRRDAFVLSDSLRTDRARFRRIRLDDPLVIQLRELSRVDEDLGHEANRLTNRLREQLHRFYVQVLKLCPSADEPWLWALLELAPSPTAGSRLQPKPIERLLRQHRIRRLNAQDVVAALRAPALRVAPGVVEAATEHIALLLPRLRLVHTQRQRCGARLDALLDKLAAVDGDDGQQREHRDVEILRSLPGVGRVVAATVLAEASGPLAERDYHALRTHAGIAPVTKQSGKRRTVVMRYACNGRLRYALYHWARVAATCDPASKTYYAALRQRGHSYARALRSVADRLLRILIAMLKSDSLFDSTQLRQSADAAVTQEAPCAS

SEQ ID NO: 419340 - protein, 346 aa, unidentified
MEIHTIGIDLGKMLFHLVGVDSGGTVVVRKRCSRAQLLTYTANIRVHRIGMEACSGSHFLGRALRDQGHDVRLLPAQYVKPYVKTNKSDYIDAEAIAEAVERPNMRFVPIKTEEQLDLQAAHRVRERWVMRRTAVVNQIRGLLLERGLTLPKGRRHLEQAVPGILKNTESKWSEAFLVLVRQLNQELGQLSERIEEMDKTIERTAAGHEACQRLMTIPGIGPVTATALMAAIGNGAEFRRGRDLAAWVGMVPREYSTGGRQKLLGISKRGNGYLRRLFVQGARTVMQHRNRQANSLGHWLDGLTARVHQNVAIVALANKLVRVAWAVLHNNEPYRCPDLVAPNAPA

SEQ ID NO: 419341 - protein, 309 aa, unidentified
MATSSYVGIDVSKDRLDVAVLGEKQERQVCNTQAGIAKLVQWMLELQPELIVVEATGGYQRAVVDALFHAGLGVAVMNPARVRQFARADGLLAKTDRLDAFVLAKFGKKMHPRQYEGKSEAEKQLSALLTRRKQVEEMLKAEQNRLRTTSPSLKSSVEQVIAVLKEQKKRLDEQIQELVKEQKAWQEQSEILGSAPGVGPVTTATLLADLPELGKMDRKKIAALVGVAPMNYDSGKKRGYRKTKGGRGDVRSVLYMSTLVATRYNPLIQAQYQHLLKRGKEKKVALTACMRKFLTILNAMVRDQQPFRM

SEQ ID NO: 419342 - protein, 349 aa, unidentified
MRTFTPPADTRFYAGVDLHARAAFLVILDHGGRTVFAKNLPAQPKPFLRAVAPFRDGLLVACECMHCWYWLADTCRDEKINFVLGHAWAMKAVHGCKSKCDRKDAEAIARLLKGGNFPPAYAYPKERRGLRDLLRARLRLVRQRAELYGHVHTARRQANLPPVSNDVKYQSKRGGCTADITDPFVRRRVETHLTLLEPLDTAIRRLEKEIADAAADSFPTELAVLQSTPGVGKVLSLTILLEIDTIGRFDTRQQFCSYARLCGAVQTSDSKRTGAGNRKAGNAWLKWAFSEAAVLAAQKDERIGALLARLASKLGKAKALSALAHKLGRAFYHMLHTKEVFDVHRFVRH

SEQ ID NO: 419343 - protein, 409 aa, unidentified
MRVIGLDIHRAFAEAVAWDDGRLKRLGRVDMRRHLLEAFAKKLTKEDVVVVEATGNAASVASVIAPHVKKVVIANPKQVRIIAHAKIKTDTIDASVLAQLYASGFLPEVWIPDEPTQALRRQVTRRNQIVRQRSRLKNIIQSILHSHLIPSCPHADLCGASGRAWLFHQVLPEDERLAVERHLREFDRLGEDLKVIERDLARSALKDEGVKRLMTIPGVDMIVALAIVAAIGEVGRFDRPEKLVSYLGLNPSVRQSGPGPAYHGRITKQGRGHARGMLVEAAWAAARAPGPLHAFFLRVRARRGQHVAAVATARKLAVIIWHLLSKGESYAWARPALHARKLRDLELRAGYKAERGPKGAAHAYNIKSHRDQERRWVEQAETAYARFVAGWNPRGPKRARTGATNEERQ

SEQ ID NO: 419344 - protein, 398 aa, unidentified
MGNFVGIDIGKSKHDYAVVDDAGAKLACGEFSGNSAGFEKLKRVLLKFEVEIIGMEATGHYWRNLWHALNHAGYALKLLNPTATVYFRRMSLTKHKTDALDAVCIARYLATVRPDGQGLDTASQESLRSLARAQATIAEQITESVNRLHKQLDLSFPEFPKLLGRLDSPKSLALLESYPTAQMMGRSRKLADKQYGLQNHRIGEALAKRLKGAAQTSFGCAQSASDALLIRQSVSHIQLLQGQAKALINEMESLVTEQDQDAANLLSVPGIAIKSAAAVIGEVGDIHRFETPKKLTGYIGAHPRFHESGNKSAHPRMSKAGNKRLRRILWQCTIVAMKHNPIIKAHYEKKLAEGKKKMVAIGHCMNKLIHIIWAVLTYQESFDPNGGVRSQMVAQNEG

SEQ ID NO: 419345 - protein, 320 aa, unidentified
MPQTTRVVGLDVAKRKIDACIRSAGLRVSMPSTPEGQAELMAWLRTNRVGRAVMEASGGYERPWAEALRAAGIKVGIVDPKRVRHFAKAAGRLAKNDPIDAETIAWFAETFPDAETPPHDPARDEINRLVQARTVLTKLEDQIRQQREHRQPAIVTQAHAAIAKIVRVERRKLDAAIAAKIKANQGFAERAELITSVPGLAKQTVAGIIAWLPELGHVTNQAAAALVGSAPYDDDSGEHKGQRHIKGGRRKLRNLLYMPVMGAATQHNPVLKAYYQRLRARGKEAKVALIACMRKLVVILNTMLARNQKWNPPAAATGVA

SEQ ID NO: 419346 - protein, 391 aa, unidentified
MIKYSLGIDISMKMFHACLSVIDDKQQVRVKSSKKFSNNVTGFKELWWWIEKHYKQKQIPLHIIMEATGVYYEHCALYLFKQGFTLAVVLPNKAKKYLQATGLKSKNDKIDAQGLAKMGAEQKLEPWQPMDDFYYTLRSLTRHHESLQALKTNISNQLHADNAGTNANKQVGKQLNKLIGTINKQIGDIEKSIEVHLTCDKAVQQKVKGILKIKGVGIMTVATLLAETNGFLLFKNAPQLVSYCGYDVIENQSGSHKGKTKISKKGNRHIRRILHMPAFNVVRYQVSPFLQLYNRTIEKHHTKMKSYVAVQKKLLVIIYCLWKNNQSFDQNHCNQSKTGDVESVQPCRLNFAEVVAAEQKSSPETNQGATQGVQPLKYHRLHPLGFCKNKA

SEQ ID NO: 419347 - protein, 412 aa, unidentified
MEVMYARCAGLDVHKETVVACVRIVEGGEVSRSVRTFATTTASLIELGEWLEVNGCTHVAMEATGVYWKPVWQVLADSSLELVLANAAQVKNVPGRKSDVNDATWVSELLAHGLVRASFVPEPAIQELRGLLRTRKQLVREKASHVQRLQKTLEEANIKLETVLSDVMGRSGRAMIQALIDGETDPAKLAALAHWKVRASAATLREALHGRIKRHHRFLLRLHLQQVDALDAAIAEIDREADAGLACFRDAVKQLSTIPGVSELSAQVILSEIGTDMGRFASAAHLRSWAGLCPRNDESAGKRRSTRLRRGAPWLKAMLVQCAWAAARTKATYLHAQFVRLRGRRGPKKAICAVAASILTAAYHMLKDGTFYEDLGAVHFDRRRPETQARRLVKRLAELGFSVELKPAAAVS

SEQ ID NO: 419348 - protein, 339 aa, unidentified
MNVIYLGIDLAKNVFQLCGLNQAGKPVYKKRTDRKTLLQTVANIPACLIGVEASTGAFYWQREFEKLGHKVKVISPQYVKPFVRGQKNDGNDAQAIAIALMQPTMQFVPPKSPEQQDIQALHWARQRIVNHRTATVCQIRGLLLDRGITIGAAVSRVRHAVPLILEDAENGLSARMRRTIAELYDLFNDLGRRINFFDKEIDTVFRQSEACQRIAKVKGIGPKTATAVVAAIGKGTEFKNGRHFAAWLGLVPRQHSSGDRQVLMNMTKKGDKHLRTLFIHGARAVVRVAANNNEGHLNQWVNQLKERRGFNKTTVAVANKNARIIWSILHNETEYRPAV

SEQ ID NO: 419349 - protein, 315 aa, unidentified
MSQETFVGIDVSKAQLDVAIHLQAGARDFPNDGKGISKLVAFLQDLAPTLVVLEATGGYEMPVACALGAAQVPVAVVNPRQTRDFAKSTGRLAKTDAIDAAVLAHFAHAVRPEVRPLPDGDARELQALVARRQQLQDMVTTEKNRLDTAPKAIRVGVAKHIEWLEKQVKAMDDDLDRMIRSSPIWREKDEVLRSAPSIGAKTSSKLLAKLPELGTLNRRQIASLVGVAPFNRDSGRLRGERHIWGGRADVRSALYMATLSAIRYNPVIAEFYSRLKASGKESKVALIACMRKLLTILNAMLKNMTPWQHQAPQNP

SEQ ID NO: 419350 - protein, 407 aa, unidentified
MRYYIGVDWADETDAVWVVDEAGDTVLQRTIAHTVTARSEWARWLRERQAEGSELWAAIERPHGRIVDFLLDHGVVVYAINPKSLDRARDRFRVGASKSDPFDARVLALFLRSDHASLRPVRPSSEAAQELKGLTRDYRRQVHLQTRLLNQLTATLKEYYPRALELCEDLTAPWAQAFLARYPTPPAAAGVREAEWRTFARTHRLGPDRTAALWQRLHQPQLPLPAHVVRTKARLLQALLRELAPTLATVAEYRQAINDFFATLPTAEIARSLPVGKSGTTVPTIWAELGDHGDRWDSFRSLQSYAGSVPETERSGHALLIKFRFACNPVLRDALHQFAFLSLSHSLWARSYYDHYRARNHTHHEALRALGAKWLKIIFVLWKRQVPYSETHHLATMARQHLQQSAA

SEQ ID NO: 419351 - protein, 403 aa, unidentified
MNNVAGIDVSKGKSMVSVLRPFGEVVAKPFSIGHTGSELKELADYLKSLDGETRVVMEHTGRYYEPVARFLHDEGVFVSAVNPKLIKDYGNNTLRKVKTDKADSRKIARYGIDNWAELRQHTPMDTIRMQLKTLNRQQSLYTKTKTMMKNNLIALLDQTYPGVNALFDSPVREDGSQKWVDFATTFWHVDCVRNMSLTAFAERYRKWCKRHGYNFSQSKAVEVHAGAQDLIAMLPRDALTKTMVRQAIDALNAISASMERLKAEMQALAAQLPEYPVVMAMHGVGDSLGPQLVAELGDVTRFTHRNAITAFAGVDPGADQSGTHEAKSNRTSKSGPPELRRALFLVMDCLLKTMPQNDPVYRFMDKKRAEGKPYLVYMTAGANKFLRIYYGRVKEYLASLEGN

SEQ ID NO: 419352 - protein, 449 aa, unidentified
MSRPRVIDDREHERVYERAAAIDVAKDAGMVCPRTPHPSRPGARRSTVWTVRARMNAVRQLGRQLVKDGIEIVTLESASGYWRIWLFVLEACGLTVPLVSAAQATNLPGRPTTDRRDAQWLARPAEMGPLRASFVPPKAIRDLRDYTRARTRLIQERTRCWQRLEKLPEGALVKLSAVASKLTTISAQDMITAMAAGQRDPQVLASLARGRMKAKHDDLAAALDGMFDDHHGELTSLLLDQITFLDAKIAQLTTQATALASALPAAWGVNTGGATGPNAGTSPDAPVLNAVTRLAQIPGISEDPARSIIAETGPDMTRFPTAARLVSWAGLCPSARQSGPRTRPGKKGQGNGYLRGSLGQAAIGASHTATFLGERYHRIARRRGKAKAQVAIARSLLVITWHLPAGPTARYTGLGPGHHAARTDTDRKLRNHIRQIQALGFDISLTKAS

SEQ ID NO: 419353 - protein, 350 aa, unidentified
MEFIAFDAHKHYTLASVATPDGQLVREGRIEHERGALREFLGRCEEGSPVAVETIGNWYWIVDEIEAAGCMPRLVHARKAKLMMGEINKTDKLDARGLNRLQRSGTLPTVWIPPGELRDQRDLPRTRMVLVRQRTQLKNRIHATLAKYALHDLEVSDVFGVRGRALLRERFERLPSHTGYASRQLLAQIEELGRQVRALETRIRVTFKLTPAIQRLLTLPGVGLTLAVVIALEVGDVARFASAEKLAAYAGTTPRVHASGGKTRFGPPRPDVNRYLKWAFVEAANVICLRRGRAPHCHVSHLYDRIARRKGHAKAIGAVARHLAEATYWMLSRQEPYREPKGSGRFVHGG

SEQ ID NO: 419354 - protein, 345 aa, unidentified
MKITTIGVDLAKDVFQLHGVDGRGKRILRKQLKRGQVLEYFAQLGPCLVGMEACAGSHYWARELSALGHEVKLMAPQFVKPYVKTNKTDAADAEAICEAVSRPNMRFVPVKDVEQQAVLSLHRARAGFVKSRTAQVNQIRGLLGEYGVVLSRGIRQVRVGVPAILAEEDGRLPGMFRELLARLYQHLVMLDEEVYALETQIKVWHGGNEDSQRLAKIPGVGVLTATALVASIGDARSFHNGRQLAAWLGLVPRQHSSGGKPLLLGISKRGDAYLRTLMIHGARAAERVVEAGRCRTDAWSVELGRRRPKNVVCVARANKNARIVWALLAHQRAYDANYQSMAAAA

SEQ ID NO: 419355 - protein, 352 aa, unidentified
MRKECNTVSFKNQVIFCGIDVHKQSWTVCIRHCGMQRENFSMNPAPRELVEHLNRNYPGAEYRSVYEAGFSGFGAHRILCELGVKNIVINPADVPTSGKERKYKNDSLDSRKLARELENGSLECIYIPEEDNLNLRDLTRRKEQLTGNITRVKNRIKGHLHFRSLKFISWAGGSLKIMESDAEKRHDEALLSDLRELRFLREERIRVIRAEHECLKRLNREKVQKNLESIPGIGFDTAVVLQAELWDMKRFKDKDHLNSYVGLAPHLVGSGEHEKVKSAGNRKKKKLHYMLIEAAWRAVRYNPEYGAQYGRLIAKGFCKQKAISIIAKKLLLSVRAVWLQDREFQVSRPAAE

SEQ ID NO: 419356 - protein, 355 aa, unidentified
MTASYEYHIGVDYHKSYSHLVVQDSSGKTLRSGRVKNDRQSLGGFLERYRENSHAVVEATRNWMVIYDWLDDICDDVVLAHPLKVKAIADAKIKTDKIDATVLAHLLRADLVPEAWAPSDRARELRIALRERMFYVRLRTMTKNRIVTVFDRYPEQTAQLKKLGDLFGKAGRAQLAQVNVSEIDRIQIDRGLAFIGDIDGRIKQSEKTIRAMTKANANVKLLKTIPGIGEFFARLIDAEIDDINRFRNAKKLAAYAGLVPSTYSSGGKTYHGKIIRQGNKWLRWAFVEAVSPAIASDPQLRAQYEHLKFRGVNKARVAIARKLLTIAFQILRDRRRYEPRDTSTGEGASTISRLS

SEQ ID NO: 419357 - protein, 415 aa, unidentified
MDTTFSNVAGLDVHHKSIQCAVRCHEPSGNLRKTSRSFGTMTVHLRAMADYLEAQGVTHVALESTGVLWKPVWNILEGRFTLLLVNPRHLKKVPGRKTDVSDAEWIAQLLQYGLLKGSFVPPREVRNLRDLTRDRAQLAAEKTRVANRIHKLLQDANIKLSAVASDILGKSGRAMLTALREGESNPDRMAEMALGLLRAKIPELRLALEGRVTVHHRFMLERLMKHLDFLEHEATVLSQEIARHISGLLSPEDMARLDAIPGVNRTTIENVIAEIGADMQVFPDEHHLSSWTGLCPGNEESAGRRLRSATRHGNRWLCRTLTEAAWAASHCKDSYLATQYRRLAARRGKKRALTAVGHSLLVVFYHVLKQRVEYKDLGRDYFDRLEPERLRRYLVRRLEALGHEVILNPRKTDAA

SEQ ID NO: 419358 - protein, 361 aa, unidentified
MLKIIYPICCGMDVHKSFVVACIASTNDHGVTTYKSKRFSTFTGDLRRCAAWLAENNCKDVCMESTGKYWIPIYNILEHTCRIVLAHPKYVKAIRGKKTDKRDAKWIADIFKHDLVAGSFIPPPDIRQLRDLVRYRWKLTNFTTGEKNRAQNCLTVSNFKLDDVFSDVFGKAASAITTRILENPTEKITDVSGFRTKGMKATNEQVLAAVDGEMCAEQAEKLRIIRSHMDSLELCKLNLESLILSTAEKYLPQLNLVMTVPGIQSFAAIGIISEIGVDMSVFPTSKHLCSWAGLTPQNNESAGKKKTTRIGRAGAYIKLLLVQCALNAIRAKNFPKSETATLLSKSAGATKRRLLPSPECC

SEQ ID NO: 419359 - protein, 438 aa, unidentified
MPTYAFVGLDVSQADARVCFLLADGAEPVPRWAIPNTLPGADALAAALAGLCQGYQIDQLRIGVEATGLLWWHLARALTDAPILAAFAPQIYALNPQLVHTFRANFGALPKSDHADAFLIAERIRYGRQLPAPYQLDARYAPLQRLTRFRCHLVQNLAREKSYFLSFLFLTFSAYGQVDPFGDPFGATSCAVLEEFTTDELAQLSLDDLATYLQQHGRGRFTDPAALAATLQQSARDSYRLDKVLQEPLRLVLGTTLASIRTLQQQLKAIDKTIAQELTTIPQTLSTVPGLGPVWTAGLIAELGDITRFDDDGAIAQYAGLTWETYQSGGFTADDTAMTKRGNSYLRYYLVEAANSVRSHCEEYGQYYAAKYAETTRHAHKRALVLTARKLVRLIEVLLREGRIYQTPTERQQRTGGRVPHAARPQPQRRSKRAEAVR

SEQ ID NO: 419360 - protein, 410 aa, unidentified
MDVIVERAGALDVHKASVMACVRVAAERGRREEHIAQFSTTVQGLLGLRDWLAAHRVSVVAMEATGVYWKPVWAILEDDFELLLVNARHVKQVPGRKTDVSDAAWLCRLLEAGLLRASLVPPKPIRDLRDLTRYRKAQIRDRQREANRLHKVMQDTGIKLDSVASDLLGKSGRAMLDALVAGTTDPEILADLARGQLRKKLPALREALEGRFSAKHALIVGQILAHIDFLDEAIDRLSEAIEEQLGPFGQAQVELLCTIPGIQRRAAEVIIAETGADMTKFPTAGHLASWAGVCPGNDESAGKRRSGRTTKGSKWLRQTLTECAKAASRTNDTYLAAHYVRTRSRRGANRATTAVAHSILIACWHMLQTGETYNDPGGDYYQRRDPERATKRLVAQLQRLGHSVTLQEAA

SEQ ID NO: 419361 - protein, 344 aa, unidentified
MDHFAGLDVSVKDTSVCIVDDAGKIVREVKVTSEPAALLAVLKNPAYRFKRIGLEAGPLSQWLFSALAEAELPVICVETRHMHAVLKAQINKTDRNDARGIAQMMRVGLYRPVHVKTLRSQKLRMLLTHRQLLQSKAIAIENDLRGTLRNFGLKVGVAGKVKFEARIRELVANLPDLAALIEPLLIVRQVLREQIVILHRRLLAIVRDDDVCRRLMTTPGVGPVVSLTYRATVDVPARFRKSKSVGAVFGLTCSKYQSGEVDRNGRVSRCGDEMMRVMLYEAAQSMLRSKKWSWLKAWAMQVAKRRGMKKAIVALARRLAVILHRIWVDGTEFRWTREQAAAAA

SEQ ID NO: 419362 - protein, 334 aa, unidentified
MKKRYFMGIDVAKATFDFCLLSSAGACLWRGRFCNDARGIERFLAQLRARSWKLSQIHFALEATGVYGKALVAALHRADLAVSVLNPAQVKYFAFSVLRRTKNDTVDAEIIARFCRERKPLATRPLRPIEEQLKVLVHERESRVGEQTRERNRAKKDPFQIELPSLISRQRQQRLKQLAKEIAQLDAAIDSLIASDECLRTQSQLLCSIPGIAELTAAKLLSELAGKEFQSARQLAAYAGLTPAEFRSGYFLYGKTHLSKIGNAFLRKALYLPAAVARRWCKPLKPWIAILESRKLHGLAIRGAIMRKLLHIAFGILKHQKPFNPLLLSFPKTV

SEQ ID NO: 419363 - protein, 344 aa, unidentified
MLQVSTIGLDIAKHVFHVHGADGKGRAVFSKRISRGKLLDFFAAQPSCTVALEACGGAHHWARQLTQLGHEVRLIPPAYVKPFVKRQKNDAIDAEAICEAAQRPSMRFVAVKSEEQQAAGLVFRTRDLMVRQRTQLINAIRGHLTEYGWIAPKGPSHVATLADLIEEEAMASSLPEAARPMFRVMLDLLAELNGKIADLDKEIARRAREDEVSRRLMTIPGIGPISATAIAALAPPIETFAKGRDFAAWLGLTPLQKSTGGKQKLGATSKMGERTLRRLLIIGSSAVVQQASKRGAPKGSWLEQMLTRKPRMLVTVALANKMARIVWALLVKRENYRAPVSAKA

SEQ ID NO: 419364 - protein, 356 aa, unidentified
MSRDVKYIGMDVHKEATVIAVRNSRGELVMESMVETESSTIVQFIHGLRGELHVTWEEGTWAAWLYDLLKPHAHEVLVCNPRRNALMKEGSKTDRIDARKLSELFHAGMLGAVDHGENGVRTLRELACMYQTVSQDLTRVMNRVKALYRGWGIACAGTQVYAPRYREEWLQKIEPAGVRRRAELLYEELDGLQALRRKVRPELLTESQKHKAAKLLRQIPCIGPIRAARLIALMQTPHRFRSKRQLWTYSGLGIETRDSGQYRFVDGQLQRSKKPQQVRGLNRNHNHEMKEIFKGAAIRASCGVGPLREFYGSLLDKGRKPEMARLTLARKIAAITLTLWKKEERFDAEQLKTQAA

SEQ ID NO: 419365 - protein, 381 aa, unidentified
MPDGIRWVGLDVHARESTFAVFDQATSEVVTRRVVGRPHELLPWLRGVERPARMVYEAGPTGYGLARRALAEGIEIAVCAPGKTERPPADRVKTDKRDAIRLARLLAAGELTLVRIPSVEREQLRDLVRCREDIRVDLMRARHRIGKFLLRREIYWEGTGETWSRKHRSWLTSVRFADHASQATLADYLHAHDVLIARRDQVEAELAKLAFSVPCAHTVARLRCLRGIDTLSALGLCAEIGEWERFDHPDQLSAYLGVVPSEHTSGAQRRLGSITKAGSTHARRLLVEAAYHYRRGPAVGEALERRQRGQAPEIINISWKAQRRLNARWRQLKDTRHKPGGIVAVAIARELAAYCWEIATCPTALEPTPTPTTRRRLTNSR

SEQ ID NO: 419366 - protein, 351 aa, unidentified
MSETIGTAIAVVGIDIGKNSFHAVGLNDRGAIVLRQKWSRSQIGTRLANLPPCLIGMEACVGAHHLSRKLKALGHDARLMPAKYVRPYSKGQKNDFRDAEAIAEAVQRPTMKFVATKTIDQLDLQALHRVRERLVSQRTGIANQIRAFLLERGIAVRQGLRFLRAELPRILAAPSDVVSPRMIRLIEDLAGDWHRLDARINGLSDEIEGIARRDINCERLMSVPGIGPIISSAMVAAIGNGEAFAKGRDFAAWLGLVPRQISTGDRTILGKISKRGNRYLRVLFVQAAWVVLVQPKSWQRYGLKPWIEAAKTRLHRNVLAVALANKLARIAWSVLACGRSFESNTAAAQSV

SEQ ID NO: 419367 - protein, 381 aa, unidentified
MTRATRTAEYTGATTLCLYLAFELGSNEWKLGFTTEPGDTPRVRTMPARDLARLTREIADAKQWFGVKAATPVRSCYEAGRDGFWLHRYLISIGIANVIVDSSSIEVNRRLRRAKSDRLDARKLLGMLLRYHAGEQKVWSVVRVPTVEQEDRRQLHRELRTWKQERTRVANRINGLLTTQGIGLPPGTDIGAAAKTVRLWDGSPVPAALRARLEREWEHAQFLRTRIRELERARQRAIAHGHGEALAKVRQLLRLRAVGPGSAWVYVNEFFGWRRFRNRKEVGAAAGLTPTPYQSGDGHREQGISKAGNRHIRAVAIDMAWCWLRYQPRSRLSGWYQARFGRGGPRARQVGIVALARKLLIALWRFLELGVVPEGAGLKTA

SEQ ID NO: 419368 - protein, 319 aa, unidentified
MNVLGIDVGKRDLHATLLQGDRPASKSVPNSQAGIAQLQTWLKNRNADRVHVCLEATGGWSEQVAISLAETGHVISIVNPARIKAFAQSEMVRTKTDRVDAALIARFCRLHQPEPWTPPAPEIRILQGLVRRQHSVIQMRVDEENRRSAPMVSPAVTASIEATLEHLARELERVDHEIEQLFDDYPPLRRQRELLISIPGIAGSTAARILGEMPNIAEFRDVKAIAAYAGLSPRHYQSGSIEHRSRLAKSGNAHLRRALYFPAISAIRFNPPIRALAKRLSARGKTKMTIVAAAMRKLLTLAYGVLKSGCAFDPVYKNA

SEQ ID NO: 419369 - protein, 340 aa, unidentified
MGEVTTVGLDIAKHVFQVHGIDAQGTVVIRRKVRRSELLKFFQSIRPCLVGMEACATAHHWGRELQSMGHKVRLMPPAYVKPYVKRQKNDMADAEAICEAVSRPTMRFVPVKTSEQQAVLMLHRSRELLIRQRTMLINALRGHLAEFGVVMRQGAAGVTSLIAMLEDHGNSLIDPTAREALLPLVAQLHDTQGRIADLDRRILGWHRSNAVSRRLETIPGIGPITASAIVATITDPSLFRSGRQLAAWLGLVPRQNSSGGKDRLGHITKKGDGYIRRLLVIGAHAVLRFVRNGKSASNQWAAEFVSRKPYKVAATALANKMARIVWALLTREEEFKVRAA

SEQ ID NO: 419370 - protein, 325 aa, unidentified
MKNVYGIDIAKKSFEVFVIHSDQSHRSSSFENTESGIKSFLKWVKRKSVEGDSIFLMEASGVYYLRLALKLFQSAHCVKVLNPLVIRRFSQMNLKRTKTDRQDAQIIANYGIQYHAQLPDWQPPQKYAFQLRQLITATEQIQKQLSMSHNLLEALCQNPLTDQWLIEQQQSLIEVLQKQLKRLDKQVEKIILAHYQDTYKAILSIPGVGPKTASLFIAITHNFTRFESQKQLASFIGVCPRIFQSGTSVKAKERIVKMGQPLARKLLYMAALTAMRCNPACEKMTQRLRENGKHYRTIRMAVAHKLLRQIFEIGKTKIQFNPNFA

SEQ ID NO: 419371 - protein, 332 aa, unidentified
MVAGTHGSLNKAGSTKMTQISTTAGIDTSKAKLDVALHGRAEHWQIDNTSVGWRRLAADLSRVGVTRVGIEASGGYESGVVGYLRDKGFIVLVLQPIQVKAYARVHLRRAKNDRLDAALIADCTATIDQPRIEPDNRLAKLAQHLTFVEQIEEDIARFKVRLEHVGDPRLRRMVMADITRLKTRRSAELSRIVTALRTHDDLARRLDLVLSIPGLGQRTAIALIVRMPELGRVSREEAAALAGLAPYDDDSGKHKGQRHIAGGRGRLRRSLFAAALPAAFRWNKPLIGFYARLTARGKAHNAALIACARKLLIYANTVVARGTPWIEKAAAA

SEQ ID NO: 419372 - protein, 376 aa, unidentified
MVERFTVAHTAAGLRDLVRRLAKLGTDEVAIERPDGPVVDALLEAGLTVVVISPNQLKHLRSRYGSAGNKDDRFDAFVLADTLRTDRARLRPLIPDSPATVALRAACRARKDLVGHRIALANQLRAHLQRAFPGAVGLFHDIDSPISLRFLARFDCQERADRLSPKRLAAWLASVGYCGRIAPATLHARLVAAPRGATGDEGAAQAHLTRAFLAVLAPLVEQIDVLSRQTAEQLALHADAHIFTSLPRAGTVRAARLLAEIGDCRARFPTPESLACLAGVAPSTRQSGKHRAVGFRWAADKQLRDAICDFAGDSRRAHPWAADLYRRAIARGHDHPHAVRILARAWLFVIWHCWQDGTAYDPGRHRALQALLQPAA

SEQ ID NO: 419373 - protein, 319 aa, unidentified
MNETPVFVGIDVAKATLEVAVRPSGAQWASANDEAGIQTLVGQLRALTPALVVLEATGGYEHAVAATLATAGVPIVIANPRQIRAFARATGQLAKTDAIDAQILALFAERVRPTPRPLPDDATQALEALLTRRRQLLEMLVAEKNRLGVARVGVRRDISQHIRWLERRVADLDRELHAGVRASPVWRAQDDLLQSVPGVGPVLSYTVLAALPELGTLGRKQIAALVGVAPLARDSGTHRGRRTSWGGRAPVRTVLYMATLTATQWNPVLRQCYQRLRAAGKPHKVALTACMRRRLLILNAIVRTQTPWRATPTAARATA

SEQ ID NO: 419374 - protein, 389 aa, unidentified
MYLIGIDISKYKHDCFIATEAGEIIKDSFSFDNDAKGFDQLLNVLQALDQSQSKKIGLEATGHYGYNLKVFLDQHGFDYMEFNPILVKKLSTGLSLRKTKTDKVDARLLSMILLSVDYKTYPVKSYHIQELKSLTRYYKTLIKKRSRELVELTNTLDLIFPEFKPFFQNKFSQTAYFILEHYQTPRRIARMSYQNYEKLHSISKGHFSYAKFLRLKELAKNTVGSSSNLLIFELESCIRLLRGINQEIKSLESLLNDWTLKIDSPVFSIKGIGNVSALSLIAEYGNFTSFDSPAQMLSFAGMEPSIIQSGTSNKQGHMVKRGSGYLRDTLMNVAIPFMMHNPVIYDYYHKKKNEGKPHRVALSHVAKKLIRIIFYLVKSNQQFNQTKLV

SEQ ID NO: 419375 - protein, 361 aa, unidentified
MFTERTSVGLDVHARSVVAAAIDGVTGEVFRKRLTPGRDDVIGWVRSLPGPSAVVYEAGPTGFGLVRAFAGAGIRCEVAAPSKIQRPAGDRVKTDARDAMLLARLLRLDDIVSVTVPSVEREAARDLVRAREDVRGDLMRARHRVSKLLLRQGVVYYGGHAWTGTHLVWLRKQHFDAPGLQLAFDAEHEAVLQAEARRNRLDKAIEAMAADSEYTPVVHRLGCLRGIATLTAFGLAVEIGDWDRLTGSSIGAYLGLVPTESSSGQSRSQGSITKTGNTHARRLLVEASWQHLKPYRTPGARMRARWELAPAAARARGHAGNQRLHQRWVHFTERKKDPVIANVAIARELAGWCWSLAVMDP

SEQ ID NO: 419376 - protein, 311 aa, unidentified
MTLYPFVVGCDISKHHLDLHHSSDGTTRRIANTADAVTAWVDGLADPPGLVVMEATGRYDAVLRQALAERGIAHARINPEQARHFARATGRRAKTDAIDARMLADLGRRLPVRVEPSAQPARVRLTALSRRRDQLVAMRKQERTRRAEEADPSIAADLDEHLALLDARIAAFDRAIADALRSDPALARQAALLRSAPGIGPVAATVLLAHLPELGHLSPKAAAALAGLAPYNNDSGSFRGKRSVRGGRTRIRQALYMAALATARSNTVLGRFHQRLRDAGKPPKVALIALARKLLATLNAMIRHQQTFVAT

SEQ ID NO: 419377 - protein, 338 aa, unidentified
MAWTVAIGVDTHKDAHVAVALDVLGVEHDHCVVEATLAGYKRLLSWAARLGEPAFAVEGCGSYGAGLARFLETSGCLVCECERPRRGDRRRGKNDLIDAALAARRLLSGEGLSTPRGGGQREQLRVLLVERRGAIQARTAALNQLHALVVTAPDALRERLTGLSNARLVKTATKLRSSSDGLCEVLRRIAKRAQSLSHEIGEIDRSLLRLVTELAPQLLAECGVGAVCAAQLLVSSGDAKRMTSEASFAALAGTSPVDASSGKQQRHRLNRGGDRQLNWALHVIAIQRVRRDAETAAYYQRMLTAGKTAREAKRCIKRALARHFYHQLRQLTPTPLTT

SEQ ID NO: 419378 - protein, 342 aa, unidentified
MQVTTIGLDIAKNVFQVHGIDAGEKVVVRKQLRRSQVLAFFKALSPCLIGMEACATAHYWARELRKLGHEVRLMPAKDVKAYVKRNKNDAADAEAICEAVRRPTMRFVRAKSAEQQGQLMQHRTRDLLMRQRTQLINALRSHMAELGIVAAQGREGIKQLLTIVASERDARLPVDAHASLVVLAAGLQAVQTMIGSIERRIIIQHRSNEASKRLKTIPGIGIVGATAIVATVPDPRAFRSGRDFAAWIGLVPRQDSTGGKQKLGPISKQGDQYLRRILVVGAHAVLKRARQQPEKYLWLTRLLARKPFRVVAVALANKMARIAWALLAKGGTYRPPALAAPA

SEQ ID NO: 419379 - protein, 409 aa, unidentified
MADHFNNKPYGAWIAIDIAKDFNAVLSETKEGKRQHFRMANSASDHDRFIAYLRTLPAPCIVGFEVCFIFSVASARYREVMFNSWDKNDPKDAAVLLELLKQGVTQRYVDPLIAGHHDLQELSKTYYQVPLSRTRLQHSILTHYLPLYFPEMGKWWNSTRSVWWINYLLHFPIPSAVIKYSQEEFCQIASPVVGRKINKAAKLIELYETALHSIGLPVEEDSLACKTFQIQLRCYQEINDCRTQLELTAQAVLADNLDSAILQSVPGIGPINALTILAEGGDLRRFSHHRQFLKYCGFDLAKNQSGNYRGQEQISKRGNARLRLALWMAVNTAIAQPENSFQQKYSRYIKDAPQDKDLQRKARTAVAAKMARVVHGLVKSKQMYQGYYEKALPSGSIPLCGAVEAARTS

SEQ ID NO: 419380 - protein, 355 aa, unidentified
MLYLGIDQHARQITISLRDDNGDVVQARQVSTQPEKIHDFFQRLTRERLRNGESFVAVLEVCGFNDWLIRMLLEYRCHQVILIQPDDRKKRKTDRRDAAALSELLWVNRARMLQGKPVRGLRQVDIASSTDQENRRLTMLRRNAGRARTRLINQIRHILRRHNLQWEMPTKRFPTKAAIAWLKQLVLPAIDHLEMAHLLADLELVQQRVQELEQVIALRCGVSKEAVLLASMPGVSHFTATSLACRVGRVERFPRAHSLANYWGLTPGCRNSGENDQRLGRITKAGSGMARWLLAQVTHKVLRKDARLREWFKRIKRRRGSGIARVAVMRKLATIMWHMLSQRTTYAECRELAAA

SEQ ID NO: 419381 - protein, 349 aa, unidentified
MRYFQPPSNTQFYAGVDLHARSLYLAVLDQHGQTRYARNLPAAPQPFLKALKPFQHSIVVACECMHSWYWLADTCRDENIPFALGHAWAMKAVHGQKTKCDRKDAEAIARLLKGGNFPPAYAYPKERRGLRDLLRARLRLVRQRAQLYGHSHTARRQLNLPPIANDVKYKSKRASATADIDDACVRRRVEADLSLLEPLDVTIRRLEKDIEVAARPHYATELAVLQSTPGVGLVIALTILLEIDTLARFDTRQQFCSYARLCGARQESAGKKVGTGNAKQGNAWLKWAFSEAAVLSAQKNERLGKYLDKLASRLGKAKALSALAHKLGRAFYHMLHKKEVFHIDKFLRH

SEQ ID NO: 419382 - protein, 393 aa, unidentified
MTTLAGVMVVVPSASCLSEAPDMRITVSDDFRKPVNIMPTPTIDIAGPVAGIDTHTDTHTVAIVTETGKHLATDTFPTTSNGYRHVTEFLTAHRVTVVGVEGTNSYGAALTRHLIDHGHVVFEVLRPTRALRRRDGKSDPVDALAAARQVLTGQALSTPKDTTGPVESLRMLQITRHQLVATAAKLVTLIKSLLVTAPVTVRQRYATMATPTLIMTLSRCRPPADVTDPINGTLISLKSLATTYNMLRAQCDELDNKITDLVEVINPGVTQVFGCRALTAAELIVSVGENPQRIRSQAALAHLWGVAPIPASSGRTNRHRLNRGGDRQANAALHRIVLVRMCHDERTRDYVQRRTKEGLSKKEIMRCLKRAIVLGDLSSAVPGATCETIQWIK

SEQ ID NO: 419383 - protein, 411 aa, unidentified
MDVVHARCCGLDVHKKSVVACALITQWDGSVERHMRTFGTVTADLLKLADWLSELQVTQVAMESTGVYWRPVFNVLEDDERTIVLVNPQHMRAVPGKKTDVKDAEWIADLLRHGLLRASFIPPAPIRAIRELTRYRKTLVQERADETNRLHKTLEGANLKLAGVATDVLGLSGRAMLAALLQGERDPDVLADLAQGRLRAKLPQLREALQGRVQPQHLVLIEHILAHIDFLTQTISEVQAAIERCLPSYEEALTLLQTIPGVKPIAAAAVLAEIGIDMSRFPSAGHLASWAGLCPSNKESAGKRMKAPMNHGNVWLRAIMGEVAWASIRTRATYFHAQFGRIARRRGAKKAAVAVAHSLLIVIYHVLRDGNPYKELGADYFNNLDTERVQRHHVRRLEQLGYKVSLTPTAA

SEQ ID NO: 419384 - protein, 449 aa, unidentified
MSRPQVIDDEEHERVHERVAAVDVAKDSGVVCTRLPHPSRPGARQSTVWTVKARMGAVGKLGRQLKDSGIELVTLESTSDYWRIWFFVLEACGLAVQLVNAAQAKNLPGRPKTDKLDAMWLARLTELGLLRASFVPPAAIRALRDYTRARTRLVQERTRCYQRLEKLLEGALVKLSSVASKLTTESAKDMIKAMIAGERDPRTLAALARTRMKAKHDELVEALDGMFDDHHGELARMLLDQIAFLDERATQLTARITAAVATMPAAWGVDGDGTAGPDAGTGPDAAVLPAVQRLAEIPGISPDLARAIIAETGLDMSRFPTAAHLVSWAGLCPSARQSGPRTRAGKKGQGNTWLRGSLGQAAIGAARTDTFLGERYWRIARRRGKAKAQVAVARSILVIIWHLLSDQAARYTDLGASYYQTRTDTDRKIRNHIRQIQALGFEVTLTKTP

SEQ ID NO: 419385 - protein, 396 aa, unidentified
MESAVYLGVDIGKSGHYAVAVDAAAKRIYQTSVANDELALRKLVDWAKERQASVVVDQAGGTAALLLKLAWQADVRIGYLHGLAMARARDFYAGASKTDPKDAFVLADVARAHPTRVVWLEPSSEALAHLELLCGYDADLRADANRLTNRLRALLGTHWPALERAFGERLTSRGVLAVVQQYPSGPAIKEAGLAPLTAALKTQRVRRAEVFAKQLHQAAMAQTVTITGSATAARLISELAVQLGLILARRDELEKEIEQAFFVLPEAAILRSLPGIGPRLGARIAVEIGSIARFRTPAHLAAYAGLGPTPWKSGTSINTNMPSRFGNHRLKNALFLAAFASLRHPPSRTYYDRKRTQGKRHNQAVLCLARRRVDVLHAMLSHGVQYRTPAPLAAAA

SEQ ID NO: 419386 - protein, 339 aa, unidentified
MMMCYAGIDLHATNSVLVVIDDADRVLYQKRLRNDLPLILTTLEPYRLALNGIVVESTYNWYWLVDGLMEAGYRVHLAHAPALPQYSGLKHADDQHDAQWLAHLLRLGLLPTGYIYPKAERAVRDLLRKRSQLVRQKTMVVLSLQSLLTRLTGTRLSLPRLRVLTPDGIQALVSFPEQAQSVRSSLSILECLEQEIHTIETTVREAGRMQPGYALLQTVPGIGPILAGTILLEAGDMTRFATVGHFASYCRCVGSEHISNGKRKGAGNTKNGNKYLSWAFIEAAHFAIRYEAMIRAYYQRKQARTHPLVALKAVAHKLARACYHMLREQVPFDLSRAFG

SEQ ID NO: 419387 - protein, 375 aa, unidentified
MKVVYPICCGIDVHKTFLVGTVISTTNGVQPHYQKKHFSTYNSNLHRFADWLHSNNCLDVCMESTGKYWVPVFNILEERGVRVIIANPKWVKAVKGNKDDTKDSKWIGDLFRLGLVPGSFIPSKDIRILLEFTRYRYKLTSMKSSEKNRFQNAFTVCNVALDSVVSDMFGKSATAITDYLISEETFNPDYCVSLLQRSLKKKSESVLESIEGYSITQEQKFRMRIVRSHLNYIENLISQIDSAIDGMVAKHESLISLLCTIPSVDRNSAITIISEIGNDMSQFGSSKRLCCWADLTPGNNESAGKKKSVRITRAGVYLKPVLVQVAHAAVKATDNSYYRLKYEQISKRRGKKRAIIAIARMILTDIFQMLTTGEV

SEQ ID NO: 419388 - protein, 380 aa, unidentified
MNKVRFIGLDVHAETIAIAVAEPGRSGEVRSLGVIPNRAASVRKLMMRLGPPEQLRVCYEAGPTGYVLYWQLTELGVKCDVVAPTLVPVKAGDRVKTDRRDAEKLARSYRAGDLTPVWVPDAAHEALRDLVRARLAAKRDQLRARHRLSKFLLRHGRRPTEGMKVWTAAYLAWVKRGVRFEQPAQEATLADYLHEVEHARERIARLERAIQDAIETMPTRMRAVVEALQALRGIATISAVTVVAELGELSRFKKPRQLMGYGGVVSSEHSSGEETRRGGITKTGNAHLRRIVVEAAWAYRHRPSMGAALALRQKRASPEVKQIAWKAQHRLHGRYRKLLAKGKTKQKVVTALARELLGFIWAIGVTVERGLTDKCEHQAA

SEQ ID NO: 419389 - protein, 401 aa, unidentified
MKPHLCVGIDVGCNAHRVGIAHPDGSILEEFDISHSNAGFQEFFRRVEGHRQRLALPVAVAMEGFNGYARPLDRLVLDNHYRLYNVNNMKLAQFKKIFPGPAKTDAIDARKILELFILKEHLPMAKDALQEIVAAPAVNEKLKRLSRRRRHLVNERVRVLNCMQADLQAVCPELLAITSDAANVWFLRFITCREDLRQLARLRRATILRIQSVGQKYARIIEEWQRQAKFSSEVEYVGPMIIEDARRILELRTQIHALDEAMEALTPDSEIARRVSTIPGFGKTSIAELAGEIGTQRRFAGEASLALYMGMSPLTHQSGQMSSTRSPRQVNRRAKAAMMTAVARHMWCVPQSRAYYDRKRAQGKTHNQAVRALGRHLVRVIWAMLRDGRDYEIREDIHPVP

SEQ ID NO: 419390 - protein, 427 aa, unidentified
MNEVMAGMDLHRNNVVCGLVDQDGRRVVEKRLPCELETIVQWLEPYRTRLKRIAIESTYNWYWLVDGLQEADFDVVLANPARIEQYSGLKHADDSSDAFFLAELLRLNILPTGHIYDRQLRPVRDLLRRRLLLVRQAAALKLSFKSLYARTTGQTLSLSRLQRLTPAEVPGLFAHGAEQLIAQEQLRLIGELGQSIAQIELAVGREVKDWTSYRWVQTIPGVGKILGLTIALETGPITRFASAGDYASYCRCVRSQRVSNGKVKGANNGKNGNRYLAWAWVEAAQFARRYYGPCRRFFDRKAGEVNGALASKALACKLAKAGWHVMREGVPFDWNRAFPGGVPGGEPERQVRAAGAPRTPPPPHRPAPETNPTSLAPLGSVSSRVSPGRGVSRKPASPAKTRSKTQAKGAKPPVSTESRTKIVKKRT

SEQ ID NO: 419391 - protein, 461 aa, unidentified
MREKQNEEPSCSRRQLQGLPLIRWNVAGIDLGSQRHWMCAPTVDGKAREVADFGATTPELIRMAEWLKARHVESVAMESTGVYWIAPHEILEAQGLEVLLVDTRQLARVPGRDKKTDPSDCEWIQRLHSCGLLHGSFRPQEAICMLRTLVRDKATLVAESGDWVRRMQKSLDQMNVRVHRAVSDIDGVTGMAILRAIVEGERDARKLAQLRNPHCRKSEEEIAEQLSGHWREDHLFSLQQALKMYDAIAERITAYEKQIQRKLDEMEPEQRRGTTAPPLSNANKARGIKRRGQEPMRQALYRMSGVDATQIDAIGVETMEVILSEYGPDLSRFPTEKQFVSHITLAPHVPKSGGKPLKKKKRHSASTRVANVLRMAALSLRHSDTALGSYYRHLAQRLGADIAVFACARKLATLIYRLLRWGQPYIDEGTETYEKRYQEQRVKSLGSKAKTLGYKLIPINV

SEQ ID NO: 419392 - protein, 348 aa, unidentified
MYYVGIDKHESQSRICVLDGSGKEVRSWTQWGPPERTAEALRELEEPFAACFEASCGTGFFYDLVKPMALRVEVAHPRKVSLIWQSKRKNDRGDARKLAKLLYLGEVPRVYVPSKRVRAWRGMIEYRRRLMGRRTALKNSLRALLRERGKRPPRSLWSRSGLAWLEAVRFEMAFDAFRRDEMASELMALEARIRRATNALNRVSLRDPRVKLLMTIPGVGVRTAEAVAAYIDRAARFRSVRDAGAYAGMIPVQDQSGPVERWGHITREGPPALRWLLVEATWQGLRKSPRLQQFYHRALKGQPARKKIAVVAAARHLLTVMVSMMKSGTPWREQVVDASAAKGLRAAV

SEQ ID NO: 419393 - protein, 414 aa, unidentified
MVEETIAWFAGVDWGSAKHQACLLGAQGAIVGEREFPHSGKGLSELADWILSMTGIASAVAVAVEVPHGPVVDVLLDRGFIVHAINPKQLDRLRDRFSIAGAKDDRRDAYVSADGLRTDRHLFRRLQIADPRLIELRAWSRLAEELQEERVRLSNRLHQQLWRYYPQMLKLTDDLTATWLLELWLRAPTPAKAARLRVSAVERLLKQYRIRRVNAEGVLRTLRQPAIKVSDGVAEAAGIHIHSLIVRLQVVNRELNGAERKLDELCTAIGETGAAPEERAEHRDVAILRSLPGIGRINLATLLSEASGPLSRRDYQALRTLSGVAPVTKRSGKSHVVVMRYASHVRLRNTVYHWARVAIQHDHESRTRYAALRRRGHSHGRAIRGVADRLLAVACVLLQRQTLFDRYFRQATTS

SEQ ID NO: 419394 - protein, 414 aa, unidentified
MQEPIRIGVDLGKNHFQLHAVEREGAVAARRKLSRSKMRAFFAQSAPCRVGMEACGSAHYWARELVAMGHEVVLMPPAYVKPYVKRGKNDAVDAAAVCEAMSRPGMGFVPIKSADQQAVLMLHKTRELLIKQRTMSVNALRGHLAEFGLIAPKGIGRVSQLLELANADASLPEEGKDAVKLLALHLEGLDRSIDVAEKKIAAASAGSPTSQLLDQVSGVGPLIASAIAASVPDPGVFKSGRDFAAWLGGVAWVDATAELHRRQGEARRHHQAGQPIPAKDAGRRVHIGAARRRQTQRRSRRLDRGVASEKAGAPGRGGARQQAGENLLGDHDHRRRLPTGDLRQGIEREAIGRVFFLAVWRAQRDVMNDRVATESRGQPANRHEREARRDDQGPRLSDFIRASGQQRRANRPDI

SEQ ID NO: 419395 - protein, 466 aa, unidentified
MSNIKHKKSNKSKTKCTLPVHLKHLNMNAAGIDVGSISHFVAVPSGSSNTPVREFKSFTADLILLANWLKECEINTVVMESTGVYWIPLFELLESRGFEVKLVDARHVKNVSGRKTDVLDCQWLQQLHTYGLLSGAFRPNEQVCALRSYLRQRTMLTQAASSHINHMQKALSQMNIQLHNVISDITGETGMRIIRSIVSGERNPGVLALKRDRRCKNPIEIIEKSLEGNYRDEHIFSLKQALELYDIYNDKIIECDKAIEKQLSKFATSNAHSSTPLVLEKAKKSSRSNCKNAPSFDAKSHLKRMIGVDLTAIPGIESSTALRIISEIGVDLSQFRSSKAFCSWLGLCPGNKVSGGKRLGGKSKRTKNKAAEALRMAAFTLHQSKTALGAFFRRLRSRLGSPKAITAAAHKLATIIYNMITNGQEYVESGQEYYNIQYRNRMLKSLAFKAKTLGFELVENKAISGC

SEQ ID NO: 419396 - protein, 344 aa, unidentified
MDKFNVIGIDLAKTVIQACRIDKHGELTSNKAISPKKLKELLVKAAPSIVAMEGCGSCHYWARFAKKCGHDVRIISPKKVKGFLQGQKTDANDALAIAIAATQLGMTFSPVKEEEQQALQTLETSRKFLDKELTALSNHIRAYLYEYGVTMNRGRKSLRETIVIVLDERDGRLPSCLIRTLNLLWERYTFTEDQLKEAEKSKAALVKQLEPCKRLLDLEGVGNVCASMLYASLGKGKEFKNGRQASVYVGLTPKQHSSGGKVYMIGIDKNGGNKELRAALFQGALSVISRLPNEPRTVKQAWLLELVKRAGVKRACIALANKTVRTAWALLATGKHYEPALLIR

SEQ ID NO: 419397 - protein, 316 aa, unidentified
MKIYIGIDISKDTFDVAVSTQKQSVTFNNTPAGFKKFIKWLSVFDSPHIAMEATGKYYLGLALYLYEQEYPVYVINPFKIKHYAQSKLKRVKTDSEDAKLIADFCEVHKLKPWQPDSPIIAKLQEFSALQSLLIQTKTRIKNQMQSLTEKEVQKIQKAQIKQLEKQIEKIQSQMKGCVQQDVELAKQMALLTSIKGLGEKTAIELITHIKDIYRFDNAKALACYSGLVPQIQQSGSSLNRSSLSKMGNANLRKCLYMPAVNSIAYNPVLKSFADNLRKRGVAGKKIVAAVMRKLIHLVYAILKSGKPFDPEYKIGA

SEQ ID NO: 419398 - protein, 392 aa, unidentified
MYIVGIDIGKNHHEASIVSPEGKQIGPSLRFATTHKGADSLMSFIFKNIGNSPCVFGMEATGHYWYPIYSFLKAKGYTIYVINPILSDSLRKMYIRQTKNDSIDSFLIAEVIRFGQFGTTSMADENILAMRQLCRYRDSVISSRTEIKLRIGTIMEQIFPEYEKQFSSLWVSTSMGILEKYLTPENIENAPIDELFEIIKDKSHNRLTRAKAISIKEAAADTFGIKIAQDAFSFQLKQLIDRMNFLDKQIEALDCQILEYYEKFDCYLHTIPGIGMIAAATILAEIGDINRFKSSSALVAFAGIDPTVRQSGEFSSTHNHMSKRGSPYLRHAIFLAATTCSFHNSPLNAYYKKKRDQGKHHLTATGAVARKLTTVIYAVLRDSKPYEPKKFC

SEQ ID NO: 419399 - protein, 358 aa, unidentified
MIVMKYYTSTTKFNCGIDLHAHQMYVCLMDRDGQKLVHTNIRNNDFAFFLKLVAPYRHDLTVCAECMFGWYWLADACQDAQIHFVLAHALYLKAIHGGKNKNDRIDSEKIAHLLRTNLIPPAYVYPAAKRPLRALLRQRILYVWRRSELLSRIQSHQLAHNRPPIRQTRPNRDPWEEGLLAQEDNPIRQLALQNDLALIRHYDTQIATLEVQLQKLTKAAAARDYTLLQTVPGIGEHLGLTLLYEIGDINRFPTVKDFVSYCRLVKGTVASAGKIKGLRGAKLGNAYLRWAFGEAAVIAKRDPEVIGPLAQRLEARMKGNKFKANTVLAIKLARAVYFMLKNHTVFDPLRLVAALTHK

SEQ ID NO: 419400 - protein, 346 aa, unidentified
MMIIGCDFHTRFQQIAMMDTTTGELVERRLEHATGEAERFYAALAVPARVGIEATIATQWFEKMLTRYGHELWFGDAAEIRAAMVRKQKTDTRDARHILSLLMEDRFPRIWVPSAAERDVRQLVRHRHKLVRLRTSVMNQLHALAMGQGLCLRKKLWTMVGRQKLESLLLDPWASLRRKELLGLLDQLDPSIQRLDRAVSSEAERRPTAVCLMQQAGVGPVTSLAFVLTVGPVSRFANSKKLVSYLGLNPSEESSGGRQRLGAISKQGNTMMRCLLVEAAQTAARLDPELRRDYQRLKFRRGHSGVAKVAIARKLAVRLYWRLREAAQPNTAARMQGSPAVTVAGE

SEQ ID NO: 419401 - protein, 343 aa, unidentified
MTCFVGLDVSQKMTAICVVDSAGHRLWRGQCPSNPEQINILVRRHAGDDARIGIETGAMTPWLVHELRTLGLEVICLDARHARAALEMQIHKTDQNDAEGLAQIVRTGWYRSVHVKSFESHRARALFSARTQLIGMATRLSNHIRGVLKTFGLLPAAMRGLPFDRKVEALILHRSDVALIVRPMLVAWRQLREQIAVFDKAIRVLVRSNSACRLLMSVRGIGVLSALAYVSTVEDPGRFSRSRSVGAHLGLTPRQYQSGEIDRRGRISKCGDTLARTLLYEAAVVILTRLKKASSLKDWGHAIARRSGNGKARVAVARKLSVILHSVWRSGQPFRWSDHANAA

SEQ ID NO: 419402 - protein, 365 aa, unidentified
MGVPTVAQARTFVALDVHVSGTVAVMIDRDSGELRRRRLSGRASEVAEFVAELPGPVRATYEAGPSGFALARRLQAAGVDCLVCAPGLIPRGPSDRVKTDQRDAERLVRLLIAGELHAVAVPSVEAESLRDLVRAREDLRGDLMSARHRVAKLLLRHDVRFEGTERNWTQPHLRWLSTVRFDHAGTQAAFDDYLGAVEVLIVRREQLERAIAEQLPLSPWALTARRLMCLRGIDTLTAAGLCAEIGDFTRFRHPEQLMSYLGVVPSEHSSGARRRQGSITKSGSQHARRLLVEAAWHYRRPPRVSEPLRRRQADADPKIVALSWKTQRRLHHVWSRMEQRGKRRTIIAVAAARELAGFCWAIATD

SEQ ID NO: 419403 - protein, 340 aa, unidentified
MEKRYVGIDLHRNRFTCCIRLENERTYLTEWKLEQLARFVKKLRPTDEVAVEITGNTRLFHDAVAPHVARVAVVDSNQFRVISRSVKKTDANDARLLALYLSKGLLPEVRMKSKQHAHLASLTQTRDTLVKQRSALKNKVNNILSARGLNLPKEALSSQKRLAEVVSLPFDEIVRVELRVIADQIRGLNKSVAELDHAIAEASAELEGHASLTSIKGIGATTSAILLSVIGDVNDFPDESRLASYFGIVPRVSNSNEKEHSGHIHKRGSKLGRTALVQSALVAAQYSPYLKSFYERVKARRGAGKAIIALARKFLGIIYRTLKNKWVFEDFPNFVLAETS

SEQ ID NO: 419404 - protein, 473 aa, unidentified
MEKRRKDKREEVTKLLTLQKIRDVKELESYKLSVCHPHSAGIDLGSKEIYVALDPRIAAEMSLPIVHVFNTFTSGLLSCRDLLCSCGITTVAMESTSVYWPTIYSILKSSGLEVCLVNPKKFRMVPGRKTDVLDCQWLQTLHLYGLITGSFHPEEKIAELRSYMRERGRIIKDRGRYVCRMQKALTKMNLLLHNVLDDIMGKTGMAIVRAILDGERDPHKLASLRSGRCKYTEDEIAESLNGYYKKDQLFLLKTNYDAFSFFDNKLTEIDSQITNLLEEFPLKKEKGEETEEKKPKYRKKNKNDIRSEKDLQDMLYHILGTDMTAITGLQPNTVLQIIAEVGTDMSKFPTCNHFASYLGFVPRNQITGGEIISTKTDRVKSSAAQAFKKVVPSISRGKSALAAFYRRIAPRIGTGKAIVAVSRKLAIIFYNTLVHGSQYVEYGQEKYLQQIEEREKRLVIKLAKKHNWEVKYS

SEQ ID NO: 419405 - protein, 425 aa, unidentified
MQTDGANQQQQYAASIGFDWGDQQHAVALQAAGSGRVETQTIKQTPESLHDWVLGLRNRFGGRNVIVAIEQSRGAVTNALLGYGFVHVLRVPPKSLARYREAFYPSGAKDDIPDASLLLEWARDHRDKVKVWIPDKPETRALQKLTEFRRDTVGRRIVITNMLTQSLKEYFPQALSWAGELNTPMACDFLEKWPTLVKLQKTKPAQIRKFYQEHGCRRTEVIQQRLEEIRSARPLTQDSAVISTSITVLETLIPQLRCLIDAIDRIESQIHVLFNKHEDRDIFDSFPGAGPVMAPRLLAAMGSDRSRYNAALEVQQHSGIAPVMERSGNSTWVHRRFACPKFFRQTFHEFAGLSIRYSSWACAYYKMQIDKGKGHHAAVRALAYKWIRIIYRCWQNRVPYNEEIYLEALRRKNAPLLEFLDQAAA

SEQ ID NO: 419406 - protein, 400 aa, unidentified
MKASGLDVHKDTVFCGIYDGKKQKEVKEYTTLTSSIKEMGEYLKSEGVKQVAMESTGTYWIPVWNILEEMGFELMLVNPYLIKQMPGRKSDVKDAQWIAKLLHKGLLRGSMVPDKKIRELRTYSRRYIKLTQRQTNLLQSIERNLEMCNIRISNFLSKITGKSFLNVVRLVVEGETSPDILMKKIHGRIKNKHGEKLIRASLEGYVTEHHKLIIEQLLQEYDLVSGQIEYLLKKMEELVKLHYAREMRLLRTIPGINKIAAIIVLAETGADMKAFASSSKFSGWTGFRPRNDESAGKYKSTATTKGNKYLRAILAQIAWAAVRTKGSYYKDKFTKLAMRKSRKKALIAIARKMGVVIWNVLSKQEVFNPERLPVYDPVKLKARLKYHEREVERLNDLIKI

SEQ ID NO: 419407 - protein, 380 aa, unidentified
MLDNPSEKGKVMDKITRIGVDLAKNVIQLHGVDSMERVVIRKAIARQKFPEWFANLQPCLIAMEACSAAHYWARKLRALGHEVRLIAPQFVAPYRKGGKHVKNDRLDAEAICEAAGRPHMRFVPVKTADQQNLLVVHRMRSGFVGQRTALVNRLRGELVEFGVFLPQGIDAFRAHFVGALENGATELNGVARTALLQGWDHIQALDRQIAWCDAQIAAHVKHDSNAQRAMTVIGIGALTASAAVATVGDARLFRNGRQFAAWLGNVPRQASSGGKTRLGRITKQGNTYLRTLLFQGARSAVMSAHRRNGRLSRWIVQLQARVGWYRTLVAVANKHSRILWAILARGERFDPAYVPTRPGTTGPSHLNRVAAPMIDPGVQT

SEQ ID NO: 419408 - protein, 348 aa, unidentified
MNVKRIGIDLAKQVFQVHGVDSHEQPVLKEKLKRVQMLAFFRDLPSCLIGLEACSSAHYWGRELEKLGHTVKLIAPQFVKPYVKANKNDANDAEAICEAVSRPTMRFVAIKTVAQQDLQATHRIRSQLVSQRTEKANQIRGLLAEYGIVVGQRLETLRKALPGLLEDGDNHLTSHFRSLLNGLKDDLIGLDERVKDLDKRIQRQADTDPGAKRLQQIPGIGPITATALVSGVGDGKQFKRGRDMAAWLGLTPGQHSSGGKERLLGISKRGDAYLRTLLIHGARAVLKVAGQKDDPRSRWLQTLSERRNKNIAAVALANKNARIAWALLSKNIDYQPDRDRPAGESAWA

SEQ ID NO: 419409 - protein, 345 aa, unidentified
MRILAVDLGKNKSVFVNDGADGQREFGKIGTNAHEVEKLLLRCKPDRLVIEAGPAAGWVCDLAERLKIHVQVANGNDERWRWKTVKEKSDRKDALKLAQMSRMDSLPTVHVPKASVRQWRALIEYRHRLVGRQTAIKNSIRSIYERQGVNLPAAKKAWNDAAIQELTTETSRATPQQLWLFQVGSELEQLQTVRRQLDEVDARLQELAQTRESVKLLKTAPCVGPRLSEVVAAVLDDPHRFKNGRQVACYAGLTPRRWQSGNTDRQGHISKAGHRLLRQLLVEIAWLGVRHKTWMLDVYEHVRRNSDKRKKIAIVAVARRLLIRLWAMLRDGTEWIEPSIPAPAT

SEQ ID NO: 419410 - protein, 467 aa, unidentified
MAHVGGQLQAQFMARVRGREPGRCLVVPVDVGKSMAMALVADHYGEIVVAPFEFALTETGFAVLAAAVARADAGRSAEIVRIGVESAGHYHRTLVARLRAEGFDVVELNPAAVKEARSQQLLRRLKSDARDLGAMAELMVRGGGRCPAERTDALATQAAWVAHRRRKVAARAALANQVIGQLDLVFPGLDGCFSDLLGAKAGRVIVAGICDPDRVRRQGVNGLRRFVARRGVVLSTPKATQVVEAARVALRLPAAERTVLGRVLAADVALLGVLEAEIAAAETALGEVLGDTPAGILTTLPGVAVVRASNYGAGIGDPARFANAAGAYRAAGLVPTSYESAKRARPGQHISREGSVDLRQAIIELGRGVAQHEPDFMAYRRRLLAAGKVPSVAAVAVGHRAHRLAFAMLRSQQAYDPQRWSRSVAAGMTVMAKTRRAHHSDVTCPPPDTSVTERGDRHNPPARRARG

SEQ ID NO: 419411 - protein, 327 aa, unidentified
MQEDGGRIKSAGKMGHLDFLNWVQKKLQEGWQIYSCYEAGASGYWLHRELVKLGVKNVVVVPKAMGQGAKKQKTDKRDAGELCDCLDRYLRGQDKALSVVAVPTEEQEEKRALIRYHRQIMADRGRCEARGKGLLCAQGIEVHGRWWHGKAWLEVQSDPRLKDWMKEQLIGWRNKLLSTEEEQGGLRERIAALAPAILPKGVGAYSAAVLEYEMRGFERFTNRRQVGSMTGLCPGIHQSDGRGKEGSINRCGIGIVRWTLVEMVWRLMIWQPQYPPVRRLAAGLVKGKRARKRLVVQAARRLAIDLWRLSTGQTTPEKLGLIMHSAK

SEQ ID NO: 419412 - protein, 423 aa, unidentified
MKLTYPICCGFDVHKTFLVATIITSEYVMPHYYQKWFSTFYNGLVAFKKWLLEYDCKDVCMESTGKYWVPVWNVLEDSCHVVIANPKWVSAVKGNKDDKKDSKWIGNLFRMGLVPSSYIPSKDIRILREFTRSRSKLVSMRSSKKNRFQNAFTVCNLTLDAVVSDMFGKSATDIENYLLDTDAVDPEHCVSLLRCSLKKKASDVVEAVSDSNMTPEQKERGRIVQEHFADIDHRIAQLDEIIGDLVAEYEGQISLLCTIPGIDRRTAITILSEIGTDMSQFGSSKRLCSWAGLAPASNQSAGKKKSVRISRAGVYLKPALLEAAHAAVKSTEKQPYYRIKFERLMKRRGKKRATIAIARMILTAIYAMLSTGEVFNPSDLKKFDMPEDLKRKQTLSSAKEAVKLLVSLGLVTAGSISLDALAG

SEQ ID NO: 419413 - protein, 341 aa, unidentified
MQDVKLIGIDLGKHDFHLHGQDRHGKALLRRKFDRKHLITFLANFQPCTIVMEACAGSHWMARQLAVFGHEAKLISPQFVRPFVKGNKNDFIDAEAICEAASRPSMRFVTPKTEAQQCLSALHRTRDSLMRDRVKAINQVHGFLLEFGIGLPKGPAIIKRLPSVLAEHALPARLVSLIERLRSHIKYLDEQLDDIEKELGRQLQEDDLGQRLMTIPGVGPITASVLSAEMGDGKQYGCGRDFAASLGLVPQQHTTGGRANLLGISKRGDKNIRRLLVQCARSYMQHLERHTDRLAQWVKSMLLRRHSNVVACALANKLARTAWAMAAHHTEYKMQEAGTSL

SEQ ID NO: 419414 - protein, 349 aa, unidentified
MDSMPPTGRDVIGGVDTHQDLHTAAVVDTAGEVLATQAFATTRAGYRAMLAWFRSYGDLARVGVEATGTYGAGIARHLGAAGIPVLEVTGPDRAARRGRGKDDRLDAIAAARAALTGQRVQVAKDRSGAIEALRVLRTTRKTAVRCRRATLQQLHNTIVAAPDELREQIHHLTRMRLLRTCAAWRPDLVAYRDPAVATKIALRSLARRILDLGDEIADLDQLIAPLVAELAPGLLALPGVGTQNAGELLVTAGENPGRLRSEAGFAMLCGACPIPASSGKTNRHRLNRGGDRQANSALHMIVVYRMRRDARTKAYVSRRSAEGLGKREIMRCLKRYVAREVYHVLVAGA

SEQ ID NO: 419415 - protein, 372 aa, unidentified
MAIYSEYPTRRADEERLFTYKFSKSNIHNMILKQVAGIDVAQKELVVSLGRMDQDLTVELFDYKVFSNNFKGFKALTRWAEKQFKNEIKIRYVMDATGVYHESLAYYLTDNNLEVSIVLPNKISNFFRTLDVNTITDKTASQAIARFGLERKLEVWKKPKKIFMDLKQLTRERDQLIADRTVLKNQLHAEQAQAFPNQSSIIRMNKRIKLIDKQDLEIKIEIADIVKKDPDLVKRVNIITTIPGVGKLTAVIVLAETNGFELIRNKKQLVSYSGLDIKLKDSGTSVKGKPRMSKKGNRHIRKAVHMPALTAIRCNEQHKALFVRLVSKHGIKMKAVVAVQRKILELIYVIFKTDVPFNKDYVQQLEKEVEVV

SEQ ID NO: 419416 - protein, 332 aa, unidentified
MAEVKRFVGIDVSKAQLDVALGANEGTFSIANDEQGIRELLKRLTPGADLVVLEATGGLEVPVAGALAAAGIAVAVVNPRQVREFARATGRLAKTDRLDAQVLARFGEAVKPPVRPLKDEQAQALEALVMRRSQLVAMLTAEKNRRANAARVIRRSIDEHIRWLEKRLSDFDDELSDLIRATPIWRERDELLRSVPGVGTVLSVTLLAHLPELGTLTRKQVAALAGLAPFNRDSGTLRGSRCIWGGRAQVRRVLYMATVAAIRANPAIRSFYTTLRQRGKHPKPALTACMRKLLVILNAILRTNTPWQTPTPAVSISTFSPLLGAVTQHGCC

SEQ ID NO: 419417 - protein, 423 aa, unidentified
MEVMHERVAGLDVHKANVVACVRVQAGRQVKRECRTFATTTDGLLALLTWLAECRCTQVAMEATGVYWMPVWKILSDGDFDLIVANAAHIKNVPGRKTDLNDAMWIADLVACGLIRASFVPEEEMQELRSLMRTRKQLTREQTRHVQRLQKTLTEANIHLDSVICDIVGASGRRIIEAMIAGVRNPSKLAALASKQVKATPKELYDALHGRLTDHHRFLLQLHLGQWDALDASIQRLDGEIDGRIKRMDQQVKTGEAPFRTLIQLLCTIPGVSVLSAMTILTEIGLDMSRFPTAGHLLAWAGLCPGQNESAGKRKSTRLRKGSPWLKTIMVQCAWAAKRKKDSYYKAQFFRLQSNRGPQKAICAVAASILTAIYHILKDGTEHRDLGVGYFNRRSTEAQAKRLVARLTKLGFEVQLQPTAKAA

SEQ ID NO: 419418 - protein, 394 aa, unidentified
MKLVGIDVGKNSHHFCVMDKETGEFNVAPSSFSNNKEGFDFLINSLKPYSKKSILLGMEDTGHYHVALLKFLLSNGYTVALINPKTTDLTRKMEGGITKNDKLDTITICDVLDTPERKKQYRITKVDRFDLYEQRQLTRHHHNLKEELNVYCNRLQKSIDLVFPEFNTLFSSKYSIVYMNLLKTFGSAEAIASTDIRTIRKCFEIKGRGNRISLTLEKLKECAKNSIGISSEVETIQIKHLVSQITLIKEQIAEIDKKIEEFSITNNSPILSIPGISHFSGTSILAELGDIGNYSKPSQIIKFAGVAPYHYESSQYNAQHTGITKKGSKYLRKTLYQIILTVINNNPVFKKYYLLKISQGKGHRCAQGHCIRKLLRIIYHLLETGQSFDPALLR

SEQ ID NO: 419419 - protein, 453 aa, unidentified
MSQRNMKISFKPGKTRAALTITHPNAAGIDIGSASHFVAVPPDRDDTPVREFPSFTVDLNSLADWLEACKVDTVAMESTGVYWIPLFELLESRGFTVLLVNARHVKNVSGRKSDVLDCQWLQQLMSYGLLSGAFRPTEQVCVLRSLWRQRAMLLRSQGRAVQHMQKALTQMNVQLANVISDVAGETGQKILRAIVAGERDGQVLGAMKNARIHASIDEIAKSLQGNWRAEHLFALKQALGTFDFTGTQLVECDHEIEQQLQRLKAHEGEPAKGKQRGRSRNAPKFDLRAQLFKMCGVDLTRIDGIDVTTAMAVISETGTDMSRFPTVGHFASWLGLCPGTKITGGKVMSGKTKRCANHAAQALRLAAAALRPSQSALGAYFRRMCSRMDKPKAITAVAHKLARLIYTMLTKGEEYTDKGQEYYEERYRQRVMHHLAKRAEKLGMHLVPIPQAA

SEQ ID NO: 419420 - protein, 350 aa, unidentified
MEIHTIGIDLGKTLFHLVGVDSSGAVVIRKRCSRTQLLAYTANMRVHRIGMEACSGAHFLGRALREQGHDVRLKPAQYVKPYVKTNKSDYIDAEAIAEAVQRPTMRFVPIKTEEQLDLQAVHRVRERWVMRRTAVVNQIRGLLLERGLTLPKGRSHVDHALPEILADTQSKLSNSFRVVLAQLKLELDQLSARIDEMDRVIRNVATEDEACRRLTTIPGIGPVTATALLAAIGNGTAFRKGRDLSAWVGMVPREYSTGGKQKLLGISKQGNSYLRRLFVQGARTVMQHRTKQALGLRCWLDQLLARTHQNVAIVALANKLVRTAWAVLRKNETYRCPVLLTSSCDPGVPG

SEQ ID NO: 419421 - protein, 431 aa, unidentified
MNYNQNYKITQITSETLIVGVDIAKHNHVARAQDFRGLELGKTCFFENTKAGFHSFLDWINQLVKECKLNQVIVGMEPTGHYWLNLAHLLKENNIKFVSVNPLHVKRSKELDDNSPTKNDVKDAKVIAQLVKDGRYAEPTIPQGIYAELRVAKKLRDLLNVDLQVVQGQVHNWLDRYFPEFLTVFKSWEGKAAIHFLKLEALPYELVKYTEEELLLSLRQVVKRSIGLKKIRALKEAANRSIGIRQGAAMAKLELRALLEKYDFIQMKFEELDYQLDQLLDHIPGVTQMLEVSGIGRDTVAGFFAEVGDLRDYQHPRQIVKLAGLSLKENTSGKHKGQTKITKRGRKKLRALLFRAAMILVAKNKAFKVLHIYYTTRAQNPLKKMQSLIALCNKLIRILFSIGKKQFTFQEDKMLMDIPHMATFMVHQTVA

SEQ ID NO: 419422 - protein, 411 aa, unidentified
MEVVYACCAGLDVHKATVVACVRVPGPRPGERRGETKTFATTTGGLAELGDWLRGHGVTEVAMESTGVYWRPVYAGLETRVRVMLVNARHVKMVPGRKTDVRDCEWLAQLLECGLLRASFVPPRAVRDLRDLTRLRKALIRERGHHVKRIEKTLELAQIKLGCVVTDLMGKTGRAILPALSTGIDDPDQLADYAQGLLRKKRAALREALAGRLTPHYAFLLQQHLALIDTLDAHIATLDARIDEAMRPFADAAALVQTMPGVAIRAAQAILAETGMDMVAFPRSAHFASWARLCPGNHESAGKRQPVSTGQGATWLRATRQESAWAAIRTKKSYYRALYHRLKGRGGAKKAVVAVQHAMLIALWHMLKHRVPHADLGADYFDRRNTERARRHHVRRLERLGYNVVLVESVA

SEQ ID NO: 419423 - protein, 410 aa, unidentified
MQIISKCCCGLDVHKRVIVACLLSIDDEGVESKEVRKFGTMTEDLLEMLDWLEKMGCTHVAMESTGVYWKPIYNILEGHIDQVLVVNAQHLKAVPGRKTDVRDSEWIAELLQHGLLKASFVPPAPVREVRDLTRYRSSLIRERARTVNRLQKVLEDANIKLASVVSDIKGVSATAMLKGLMSGEADPEALAQLAKGRLREKREQLIRALTGRLRTHHKFLIAEHLSQIDYLEEAIQRIGVEVGERLRPFDDAIKRLDDIPGISRATAEVLLAEIGWDMSRFPTAKHLSSWAGMCPGNNESAGKRRSGKTRKGSPWLRHALIEAAHGAVHTKNKYFKAQYHRIAARRGKKKALVAVGHSLLVVVFHMLTRESTYADLGANYFDVSDVEAVQRRCVRRLERLGFIVSLAPAA

SEQ ID NO: 419424 - protein, 303 aa, unidentified
MKRYLGVDLHRTQFVVCTRLENGQHEVRQWRMGQLQEFVEQLQREDEIAVEAMGTTARFHEAVVDRVARVVVVNPHQFKVISESVKKTDRKDAEALALYLAKDMLPEVRMKAKQHRELMHMAETRDLLVKQRSALKGKINNLLAMQGIELKREALSSKIALERVLALPVSGMVQLELRVLVGQIRTLSDSIAELEERLEEEGQQLPGYENLTSIKGIGWLSATVLLTTIGKISDFADANKLAAYLGLVPRIANSNESERSGRITKQGNKLARTALVQCGLVAKRYSPYLQRFYERIKQRRGGG

SEQ ID NO: 419425 - protein, 405 aa, unidentified
MLPSEGSSESWMRFVGIDIGAERHWVAVVDEGEEVKLKSTPFGEDVVGYTKLFELLGAPVDTIVAMEATGHYWKNLFAALVARGFGVALLNPLRTRRFAEEDLERTKTDSIDALGIARFACQKRPAVARLGDAELEELRELVRLRDRLQQDFGDRIRQLHRLVDLGFPEFTRYVKDLSTERATSILAEYPTAEAFRAVSIKRLARLRYDGQHRVGEELARELLAAAQSSVGHHHGHPYRIQVRFLCQDLCVLRQRLRELDRDIEKTIDANQLGRLLTTIDGIGSQTAAKILARVGDPAELRSSAALACFVGVVPALRQSGKKQHKRAPLTPYGDATLRAALWMPTLAAVQRNAWLRDHYQRLRARGKLPKVAMIACMRKLLTAVYSVAKNRRPFVPQLPTAEVPA

SEQ ID NO: 419426 - protein, 408 aa, unidentified
MDLTPMHKRVIALDVHQAKITACAVIEHDDGQVEVTKRDFGAFKRDRRALAQWALEMAPEVVVMESTGVYWKSPFAALEAVGLIAWVVNARHVKAVPGRKTDMADAQWLATLARAGLLRASFIPPVQMRQLRLVARQRQKLVGMCSAEKNRLHKVLVDAGIRINVLVADIHGQSARAMVKALIEGQPMHEVLNHKGRLRASRQELCEALSTEQFSAVHRFVAQEIVQHIEQIEQRIARMDQYLLQGLQPWQPQLRLLQTLPGIDEQGAAMLLVEIGADMSVFGSAERLASWVGICPGNNESAGKRKTGRIRKGNAWVRRLLCEFAQAAARTRCALKAKFDALTIRKGHKKSVVALAHKMLRTIYAMLSNGSHYQDKEVDYEALNVQRNAPRWIKMLRKHGFIATPAAA

SEQ ID NO: 419427 - protein, 311 aa, unidentified
MQCTIGVDIAKDTLDAHRLSDGQRIQVSNDKSGHRELVRWIGKGEVSLVVFEATGAYHHQLEAMLTTADIPFAKVNPRQARRFAEATGRLAKTDRVDAAMLAKMGAVLELERHEPKSKSFNELRELMTARRALIKDKVAAKTRLQTTRQTLLKHQINARLRQIETQIQQIDATVAEKVAQDDALSHKLAILISIPGIAEVTAFSMIVEMPELGILDGKQAACLAGLAPISQQSGKWRGKERINGGRAFLRRAIYMPALVAVQRNADLKAKYNQLIRAGKPPKLALTAIMRRLIVMANALIRDGRQWSEIRP

SEQ ID NO: 419428 - protein, 368 aa, unidentified
MEYYTSIGIDVSDRTSKICVMTKVAGTRRIVCETTVATTKEGLREFLDRQDRSAPVTFETGVHCRWMAEFIRGLGFKVYVANPAKLRLLTESDTKNDRNDARELARYTLADVEMLHPVFLRAEPYQQMIRFLEARSTLVCVRTKLVNEMRGFAKSMGFRIPKKDTAHFHLIDRGDWPKDLKDVSWPLVGVLATVSLKIKALEKQMQALSESPEFRESVERLQLVYGVGFFCSVAYVAFLGGNYTRFAKARDVGPYLGLVPRQDASGDITKQLAITKKGSSLLRTLLTECAQVILKDNAPMTDLKLKGLRIAERGGKNGRKRAVTAVVRSLAVTMMALLKHPKEDYKPLSEANQKLVERLASEKDAVAV

SEQ ID NO: 419429 - protein, 347 aa, unidentified
MQFYTKTHTHYCGIDLHAKTMYLCILDSEGNVALHRNIPCDPEKFLRAVAPYRDDLVVAVECMFSWYWLADLCAREGIAFVLGHALYMKAIHGAKAKNDRIDSKKIAALLRGGLIPQSYVYPAEMRATRDLFRRRTHFVRHRGQLLAHIQNTHHQYNYASPGKRIAYKSNREGLAEGFDDVAVRTSLTTDLELVDYYDAIIGNLELTVLRQARGHDRDAYERLKTIPGIGKILALTILYEIHDIDRFPRVQDFASYCRLVKCQSSSAGKIKGTSGAKMGNAHLKWAFSEAAVLWLAKCPEGKPLVDRLAKKHGKGKALSILAHRIGRAVYFMLKRKRAFDLARFLKA

SEQ ID NO: 419430 - protein, 343 aa, unidentified
MQHVAIDLGSRESQVCIRTADGTIVEEKKHPTRSLSEWMKQWPTSRVILETSSEAFRVADAARAAGHEVRVVRSTLAKQLGIGDRGIKTDIRDARTLSLLSCRTDVESVHIPTEETRQLRATITSRELLVQTRTQLNNRVKSWLRTQLWRLRSGSPETLPDRVRGKAVEQQQVLPDHIERVLVSLEALTLQVRSATAELKKLAKDSPTCRLLMTIPGIGPISAVTFVAAIGDVSRFEHGHRLESYVGLTPGESSSSERERRTSITKAGPSSVRRTLIQAAWAIWRGYPNDPMARWAMNIAERRGRPIAIVALARKLAGLMYAIWRTETPYQASKAARRQELAV

SEQ ID NO: 419431 - protein, 425 aa, unidentified
MNLLVLKGVPMALKIVYKICCGIDVHKTFVVACIASTDNKGITSYESHRFSTYTSGLKDLLQWLLTRNCKDVCMESTGKYWIPVYNILESDCSIVLAHPKYVKAIRGKKTDKKDAKWIADLFKHDLVAGSFMPPADIRQLRDLMRYRFKLTCFKSSEKNRLQNCLTVSNIQLGNVVSDTFGKSAQAILDKLLENPADTSFDLEPLVFRSLKKKLPELRDAIDGYITPEQAGKLKIIKAHYENLESRKAELEELILALAAPYQQELAILQTAPGISSPFTAIGIISEIGTNMEAFPSAKHLCSWAGLTPTNNESAGKKKSVRVSKAGCYIKPLLVQCANAVVKSSKHPEMRNRYLRLKKRRGHKKAIIAIARMLLTALYHMLKNGENYNAELYQKSDLLPVDREITVEQALMIARNQGYKIKSATA

SEQ ID NO: 419432 - protein, 579 aa, unidentified
MPNPKAKLLDRVREVRHELKGKRSCYGIPLSPLVPRGERGKYCFWRAYPGRRSCLACPDTLSKVIHGRAELALGAERSEAVNNFAEMNFESNLRPGNNGSGRKARGRTRSACPNPTRIKPRTPADLGAFIKKSERTTPQEGHRIRTTHDKGQGPCANKKPMNETVRWETITYYAGFDWAKDHHDVVIVNPQGKIVKDLTFEHSAEGWAKWKELVAAYALLAVAIETNQGAAIEQLLESGVIVYPVNPKSAERYRDRKAPSGTKTDFLDAWSLADALRVDGHGWRALKPLDPLIQELRLLCRDEVDLIAKRTELVNQLQAALHEYYPAALQAFEDWTATPSWNFVQQFPTPQLLRQAGRRKWEKFLHVHHLYRPELNEKRLEIFAKAHEFCGPAAVTRAKSRLALALVKLLNALENQLEDYRKEIRRLFNEHPDHELFGSLPGAGEKLAPRLLSELGSDRSLFDSAQALQCYVGTAPVSFESGQVRQVYVRFMCNKSFRHAVHLWADLSRKFCSWAQVYYQQLRAKGKTHATALRCLGQRWLKILWKMWQTKTCYNADFHMANQLKHGSWVLSVKPSKSK

SEQ ID NO: 419433 - protein, 391 aa, unidentified
MIYIGIDVAKDKHDCFITNSDGEVLFPVFTIQNNRNGFDDLFSKIQSISSDVFNIKVGLEATGHYSYNLLGYLIDKGLPTFVINPLHTNLYRKSLSLRKTKTDKVDARTIAMMLMSDVNLKSYSDTSYHNEELKSLTRYRFDKVQERAQLKQSVSRLVTILFPELEKLVPSLHLASVYALLSELPSAREIASCHLTHLTKLLENASKGRYSRERAIEIREAARVSIGSNMPAKSLELRHTLRLIGELDSEITEIESEIKRIMDQIPSPILTIPGIGYRMGAMILAEIGDFSRFDSPDKILAYAGASPSTYQSGQMESSYSHMEKRGSRYLRYALINAAKYVCHWDETFGAYLQKKISEGKHYNVAITHATKKLVRLIYAMEKSGKPYIKMA

SEQ ID NO: 419434 - protein, 472 aa, unidentified
MPMNVDEKDVLLMSLTGLVSLDSQEDVVVKGIGLSRGDKRRNGRLARLRVLVPAENAILGIDLADTKQAVVVTDHDSQVLARGPVTAKAWELGPVLDWARKVAHAHGFADVTVGCEPTGHRWRVLDQLAAQHDMALVCVQPLLTGQARQAEDYTSDKRDDKDAVLIARLVAQLHCYAPERAEETWAQLRQLGARRDELVTQAIRCVQQLRDLLECAWPAVLGAAGSPFDSTNWCAALAVVLERCDGDPRRLARRGPERFTAAVRRELPRWGGQRLWRGIVGAVFTTLTDPAGVIAQRRGALQRAGWVLDDWRLIKIRLAEVETQMAAILDELDLTKLVTSIPGVSAVGAAAILAETGDPTRFDSPRALVKHAGLCPRENTSGTYTGRSRISGRGRPRLRSAAWRAVWGALPSNPVMITRYRHLTTRKANPLKDGQARAAIAAALLRWIHVIVTKGVTWDAALAGASELATAA

SEQ ID NO: 419435 - protein, 389 aa, unidentified
MFFLGIDIGKNSHVASLIDDKKKVIFKAFSFSNSTEGASSLIKKLEPFCDSLDIAMEATGHYWINLFSFLLQKNFSVHLINPIQTDGWRNSTEIRKRKNDTIDSILIADLLRYGDFIESSLSNEDYLSLKNLTRFRSYLISSTGDLKRKTIALLDQVFPEYEKCFSNVFGKTSKEILLSFTSPQEFENISSSKLSKALENITMKKFAKKKIEELSEKAKTTIGVKFCLDSFSLQIKMLIEQISFIETQVESIEEEISTIMTKLNSPIITIPGIGPVIGATILGELGDISRFSNASKIVAYAGLDSVVSQSGNYEAKSMSISKRGSSYLRKVLFQAALIAEFCDPVFSDYYQKKIAQGKHHLVATNAVARKLCYTIFAVLTKNEAYKIQQ

SEQ ID NO: 419436 - protein, 326 aa, unidentified
MFFQLCGIDEWGKVIYTRRVKRAQYVSTVASLKVGCVVMEACGGANHWYRTFMGMGISTQLISPQHVKPYVKSNKNDRNDAQAIAEAASRASMRFVRGKTVEQQDVQALLKIRDRLVKSRTALINEIRGLLQEYGLTMARGAKRFYEELPLILASEAVGLTPRMKRVLNCLYTELLNRDEAIGDYEEELKAVAKANEDCQRVQSIPGVGYLTALSVYASVGDIHQFHRSRQLSAFIGLVPRQHSRGNKEVLLGISKRGNLMLRTLLIHGARALLRHVKNKTDKKSLWLKALIERRGMNRACVALANKNARIIWALLTRQETYRCGA

SEQ ID NO: 419437 - protein, 419 aa, unidentified
MRNHSQQLVPNIYQFFVGIDWGSQQHQVCLLNREGAILEERSIEHSGNGVAELLQWLRRKTSAAPGAIAVAIEMPRGAVVESLIEQGFAVFSINPKQLDRFRDRYSPAGAKDDRRDAFVLADSLRTDLHCFHAVRLDDPATIRLRELSRLEDDVRQEQNRLTNQLREQWHRFFPQLLELSPAADESWVWELFQSAPSPAKAAKLSPARIGGILRKHRIRRLEAQQVRAVLAKTALTLAPGAAEAASEHALLLLPRLRLLDRQRLEIAQRLEALLGELAAPPDPNSEIREHRDAAVLLSLPGVGRQIAATMLSEASQAIAERDYHALRCYAGSAPITRRSGKTTVVLMRRGCNERLRNALYHWARVTVTCEPHSKKTYAEMRAQGHSHGRALRGMSDRWLAVLISMLRHRTLYDPKRRAA

SEQ ID NO: 419438 - protein, 427 aa, unidentified
MPYKIAGIDVHKRMLHVVVSDVQVDGEYDFTRRIFGSLPEALRSLAAWLVEQQVQEVVMESTAQYWKPVWGALERYWKPICQTREGALATSGTLHLAQALSNRGRRGRKKDFRDAERLVKRLVAHELVLSFVPDVEQRLWRTVVRSKYQLTRNRVQLQNRLEALLEEAHIKLSSLVSDLLGASARRMLGAIADGETNREALAALADRGLRATQEQLQDALGVCQELNPVYRRLIRMVLDEVASIDKRIEQLNQEIANLLRPHEDQVKRLAEVPGLGVDTAQQIIAEVGATAATFPSEKHLSSWVGACPGDEESAEVNRSRRSPQGNRHMRRILNQAANAAAKLKGSIFDILYRRYVPRLGHNQTIGIIAHKLCRLVWKILHRGIRYEERGPEVSKASKQSRTRKMIHALRRLGYRIEPSPSQSAIPA

SEQ ID NO: 419439 - protein, 412 aa, unidentified
MTQVTMIGCDLHDRSMLLQTAVGKQKPEQKSFRNDFLGRKAMMGYLFKGARESGSGRIVFVYEASSQGYGLYDLLTAQGIECFVLSPTHIPRSAKSKRQKTDPKDALKLLELARGHVLAGNELPVVWTPPRLLRHDRELLRGRLEAAETCTRVKLQIFAMLKRHGIELPQWFSKSRSWPKHFVAWLKEEAERMAATVRPVLSCLIERFETLRRQVVALERHIRHLSKTPRYQVPCEELRELTGVGLITAMTFLTEMGDLARFSNRRQVAAYLGVCPASFESGEADDRKGHITRQGPGRVRKVLCQAAWAAIRTDPRTRVTWERIKRGSSRRSKKAVVAIMRRLGIRMWHVALSAGVDTKLKQPPTPPPRWTSARAQQKGPPLSPPHRPGPRPGGEGRGDGEAKGARATHLED

SEQ ID NO: 419440 - protein, 452 aa, unidentified
MRTIGLDLAVQAAHKAVVLDDAGHFCTPLLTIHTRPSELDYLLARAREGTPSINVQIVMEPTGMAWFPVAVYYARQALPVFLVNSQEVADLRRYYQRHAKSDRIDARVLARLPLVNPDKLHRLVLPSATALACQRACKQLDHFATQITAVKNRLQAIDRFAWPGLEEQVFADPFAPAARFFREHCYDPRQVVLLGATAIRQQCEASALSADDGDAWVEPLLTLAQQVLTLYGTDGQFLDFAQLQAEVQRDQAWLTWLEQQQHTLRLRTVRPLYRAVHPSRNLETLKGVGQDSAAVYASFIGDPRRFSSTRLFRGWTGMVPSSEQSADTEAKGLHITQAGPDLIKKYAYLDAEIARRYDPQIAAIYYDQMMHKGKHHKQAVCACATHLLDRVLAVLRADKPYEMRDSDGTAISNQQARELIEERYTVPPEVRRRTNKRNRRQQADQRAERRAS

SEQ ID NO: 419441 - protein, 388 aa, unidentified
MNTNTNTTTASTTILAIDLGKYKSVACVHDQATGEFAFTTFDTSRAELRKLIGKTQPAVVIIEACLLAGWVHDLCAAMGVRCLVANTASEAWKFKYLKRKTDKDDALRLAQLYLLDQLPTVTLPPTAVRQWRSLIDCRQALVGRRVAVPNRLRALFVAQGLPTPRGAKAWAATGLAGMATWAKPLAECMADELWRGLLELSLTEYRQLCELINQAETKLDAIGKQHADVVLLETAPGLGPRTAETVAAYLHDAPRFNTGKHVSAYSGLVPRQHQSGEMDRRGRITKRGPALLRQMLVECAWCMIRYNAWARGIYQRLTGGGQRRKKQAIVALARKILVRCWAMLRDRKPWHDPQTGPKPTRPPSKQRRQAEARQRRQDKQAALTVATT

SEQ ID NO: 419442 - protein, 324 aa, unidentified
MGLDQHRGQITGEWIDTETGEVQRTRVVPADRAAVRRFLWRFGGKELEVALEATTGWRFVVEELRRVGAVVHLAEPAETAGLRGPKKRAKGDRADARHLRELLMLKRLPESWIPPAHILDLRARVKLRHTLSEQRGEWQQRIQATLYHHGCPQRRSLMVGDGREWLAAQPLPTTAREQVTVALTMIDALERQITPLDRELRAYADRQAGCKALMVHYGIGPLVAVTILAELGDCTRFSSSRLAVRYAGLDITVYQSDQRRAPGHLSRQGPPALRWALFEAAQSACRRGSPDRDYYTETAARLGHNRPCLIGRPQAPQAQLPHAA

SEQ ID NO: 419443 - protein, 357 aa, unidentified
MMNKVNQLDFERQLFFIGLDVHKKSWTVTIRSNQMHLKTFSMNPSSQELSRYMNKHYPGGTYHTVYEAGYCGFWIQKQLEECGFLSIVINPADVPTTHKEKTNKRDKVDSRKLSRELENGSLRGIYIPDEFHQQLRTLCRLRYRIIQSQTRVKNRIKGLLSFYGIFLPDHCELSHWSRAFIRWLQSLEFSFPMGTESLQFCIEELLGHRKRLAELIRVLRKNMNQYELSQLINTICSVPGIGFVTASTLYCELIDINRFYNLDHLASFVGLVPSVAASGDQEYDRGLTFRYNQHLRYLLVEAAWIAVRKDPVLTFKFSKLTRRMTKQNAIIRIAKKLLSRVRYVWKHNQRYVPGVIE

SEQ ID NO: 419444 - protein, 342 aa, unidentified
MEHYAGIDVSLECSSLCVVDAGGKIIREGKVASEPEALIGWLRSLGFELVRIGLEAGPLSQWLHAAMKEAGLAVELLETRHVRKAFEAMPIKSDRNDARGIAQLMRLGWFRPVHCKSLAAQETRAMLTARKLVQCKLHDVEMSLRGILRGFGLKVGSTTPRRFAGRIRELVAGHPSLAVIAEALLAVQAVLLREFNGFERQVRKMARQDARARLLMSIPGVGTIVALTYASAVDDPKRFKSSKNVGAHFGLTPRKYQSGETEINGRISKCGDEGVRTALYEAAHIMLTKPLQGCSPLKRWAMRLAKRAGTKKAKVALARKLAVIMHRMLLDGCEFNPAAAAA

SEQ ID NO: 419445 - protein, 349 aa, unidentified
MTIVGCDLHTRKQQVAVLHTDTGEVVEQELLHAGDAVEQFYRTLPRPVTVGIESTGYALWFHELMQHLGHTLLVGEAAKIRAMVVRKTKTDRRDAQHLLDLLKHDRFPAVWIPDPATRDLRALVTHRVRLVRIRTMVKNGLQAIALNRRLALGSTLWSQRGRAQLVALALPPHTAQRREDSLDLLAWLEAHIAGLDARIAAAADAHPGARLLLTHPGVGALTALTTVLVLGPAARFPGSKHVVSYVGLAPAVSASADTCHLGQITKQGSALLRWVLGQAAPLAARADDDLHRAYRTLIHRRGRPKARVAVARKLLVRLFIMVRDQIDYAEFRRRGCLPPPRQPVLPTRA

SEQ ID NO: 419446 - protein, 332 aa, unidentified
MEEPVSDVSDRSIVGLDVSKTRLDVAVRPSGESWSVSNDEAGIKLLVKRLKPYPGALVVMEATGGFEHAAAAAVSAAGFEAAIVNPRQVRDFGRAVGQLAKTDTIDAELLALFGERVKPKPRPLADADLQVLQALMARRRQVIEMLTMEKNRVSMARTTAVQLSLKRHIEWLEKQLSDVNRELGNAIKQSPIWRAKENLLTSVPGVGRVTSTTCVAHLPELGLLNRKQMAALVGVAPFARDSGSYRGRRVIWGGRAPVRNALYMATLVATRHNPVIREFYARLIQAGKPRKVALVACMRKLLTILNAMVRDDTHWQNPLPTLLTNKTAALPL

SEQ ID NO: 419447 - protein, 390 aa, unidentified
MFFVGIDVSSAKHDCCILDSSRKPIRSFMILNNRKGFSGLSAVLTELAAPEDIKIGLEATGIYGDNLANFLRRKGYNVCTINPLLCKKHQSATTLRKTKNDRSDAKNIALIVASEDLQPDQPLSYHIVELKSLSRARFLTVKDRSSLKNKVKRFVTVLFPELLDVFTDLFGASGMALMTRYPSAKALAACNLDTLTELLKTASRGRFGRERAEALRKLAKESIGSFSESAVFQLRLLLKRIELLNAQVEMYDDEIRRLMDLLDSPILSVPGIGYTLGAMILSEIGDIKRFSSPAKLLAFAGLEPSVYQSGKFNPASGKMVKRGSPFLRWALLQAATYAPAFSITFAAYYDKKRLEGKSPSVAHSHVAKKLVRVIFALLSKNASFIDSFAA

SEQ ID NO: 419448 - protein, 341 aa, unidentified
MQELYCGIDLHSNNGYYGIVEKSGNRIYSKRLKNNLEEILTALSPYRGKIEKIAIESTYNWYWLVDGLIANGYKDKVELANPAAMQQYNGIKNANDKTDAFFLAEQSRLGILPTGNIYSEKERPIRDILRRRMMFVQQRTAQILSLQSLITRQSGHSLSMSKIHKLFPAGIDMLLKDEDSIFMAKQNVDMIRLISGKIILLEERVAGKIKLKPQFKNLTSIPGIGLILGMTIMLETGDIGRFNKCGNYTSYCRCVKAGHYSNDKKKGNNNKKNGNKYLSWAFTEAAHKFVMFCPEAQSFYQKKKNANCGALATKALSSKLSKAAYFIMRDQVMFDKKKIFG

SEQ ID NO: 419449 - protein, 393 aa, unidentified
MICVGIDVAKDKHDCVILNSEGKVLAGVFTIPNNADGFDTLLQKIHGCTSPDDKIKVGLEATGHYSYNILGFLLNQGLPTYVINPLHTNLFRKSMSLRKTKTDRVDAKTIAAMLMSNVDLKSYTDTAYHNEELKSLTRYRFDKVQERAQLKQSVSRLVTILFPELEKLVPTLHMSSVYALLIEFPGAKQIAEAHLTHLKSLLKDASKGRYGRDMATEIRDAAKRSIGSVMPAKSLELRHTIRMIRELDSEIKDIEAAIEAIMEELQSPITTIPGMGFRMAAMILAEIGDFSFFDSPDKILAYAGMSPSTYQSGHLSLAGTYSHMEKRGSRYLRYALYNATKYVCHWDPGFAAYLAKKRAEGKHYNVALSHAAKKLVRLIYALEKSRQPYRRAA

SEQ ID NO: 419450 - protein, 410 aa, unidentified
MEVMHQRCAGLDIHKKTVVAAVRIVDRGKVTTEVRTFATTMAGLLALSDWLSENGVTHVAMEATGVYWKPVWHVLSDGEFELVLANAAHVKNVPGRKTDVSDAAWLAELLAHGLIRASFVPDSETQELRALLRTRKQLVRERSRHIQRIHKVLEDANIKIDAELSDLLGKSGRAMLNAIVAGETDPVRLAALAHHNVKSSQAKLQEALRGRVTHHHRFLLQLHLRQIDGLDTALGTMDGEIEANLAPFRTAVELVSTHPGINQLSARAIVSEIGIDMSRFATAGHLLSWSGMCPRNDESAGKRRSNRLRKGAPWLKTTMVQCAQAAKNKKGSYYQAQYLRLRSRRGPKKAICAVAASILTAIFHMLKNGTVYQDLGADHFNRRSKTTQTQRLVRRLQHMGYAVEIQPLAA

SEQ ID NO: 419451 - protein, 421 aa, unidentified
MNTKSDAGMQVLYARVCGLDVHKKVVVACLRVLDALGVVQTTVRRFGTMTSDLVELRQWLSEAAVTHVAMESTGVFWQPVFNLLEGHFQVWLVNAQHIKKVPGRKTDVKDAEWIAQLLQCGLLRPSLVPDRTQRELRDLTRQRTKLVQQRNAVNNRIQKVLETANIKLGSVASDVLGVSGRSMIEALIAGEQDATVLAELAQRQLRGKIPQLQRALQGEVTDHHRFLLCELLDQYDFLERKITRMSERLVEVASSPFRAAVDRLDAIPGVAQRGAQGLLAETGIDMSRFPTHKHLASWAGRCPGNHESAGKHHSGKTPAANRHLDAVLTEIAHAAVRTKGSYFYAQYHHLAARRGKKRAIGAVKHSLLTTVYFMLRDDKPYRDLGADHFNRLNPQQRIRYYVRKLQELGQQVEVSPMADAA

SEQ ID NO: 419452 - protein, 400 aa, unidentified
MRFYTTQHKFYCGIDLHARTMYACILDQHGEIKLHRNLQANPEAFLKAIAPYRDDIVVAVECMFTWYWLADLCAREGIPFVLGHALYMKAIHGGKAKNDKIDAHKIAVLLRGGMLPQAYVYPAAMRATRDLLRRRMHLMRKRAELLAHVQNTNSQYNLPEIGKKIAYMANRHGVADRFPDPAVHKSIEVDLALIDAYDRLLTDLELYILKTARQHHANTLYRLQTVPGIGKILSLVLLYEIHDIHRFPRVQEFVSYCRLVKCAQESAGKRYGTSGKKIGNAYLKWAFSEAAVLFLRQNAAAQKLLARVEKKHGKGKALTILAHKLARVVYYMLTRDTVFELDKFLNGSGSRAGEPAASLDTHGISLNDRPWNSDKALRHGTRSRTLALFPDPARLIGHPL

SEQ ID NO: 419453 - protein, 399 aa, unidentified
MSRRCIGLDVHRDFCEVAIWDQGEVRSAGRIDSRPKTLAEFAATLGPGDEVALEATSGARQVAEILRPCVARVVIANTHRLAAISEAKCKTDRNDARTLAQLLAAGMLEGSWLPDEQTRALRRRVSRRHNLVVARTRAKNEAMSVLHRNLSQRPPMSDPFGVKGRKWLGALELPDDEVETLSASLRLIDFHGAEIETIERELARFAASSAEARRLITVPGVAMVTAVTFLAHVGEIGRFAAPKQLVGYLGLDPRVRQSGNGTAFTGRISKEGSVLVRHVMVEASHSAIRTPGPLLAFYQRVRSRRGHAVAIVATARKMVVLFWHLLTHGEDYRHSIELVTNKNCARSSCWPAPHADAAADDARGQTETSDARSTATALNAPPTTTGASPNDKTDRAPTR

SEQ ID NO: 419454 - protein, 321 aa, unidentified
MSEMLTVGIDVSKDSLDMADSHTLRVLQFGNDAKGIKRLVKHLHTLAPELIVLEATGGYEMEPALALAEAGFPVAVVNPRQTRDFAKSRNRLAKTDAIDATILALFAQAVKPEVRSLPDADLTQLRAILTRRDQLQGMLQMERNRLPKTTASMQKSIRQTIRHLEKQLTDLDIELNDFIRRSSIWQEKMQLLQTAPGVGPCTSAVLVAFAPELGTLNRKEIAALVGVAPFNCDSGKQRGQRHIWGGRKRVRDALYMATLSAMRYNPHIKQFADNLRAAGKTGKVRIVACMRKLLTILNAMCTTGTPYQPPTGTTPTAPTTA

SEQ ID NO: 419455 - protein, 344 aa, unidentified
MHIASIGIDLGKNTFHLVALGEHTKVLIRKKFSRAQLLAYTANLPSSLIGLEACAGAHFMGTALREQGHKVRLIPAQFIKPYRKSNKNDFIDGEAIAEAVTKENMRFVQIKTEEQLDVQAMHRVRDRLVQRRTALINEIRGFLLERGITFAPQPKHLSKNLPAVIEDAEQKLTPRLRWLLDRLWQEWKQMELDINAVTDEIERISKENSLCRRLQQIPGFGPLVSTATVAAIGNGSAFRRGRDFAAWVGIVPRQYSTGGKQKLFGISKRGNHYLRRMLIHGARAVLLRVKYDTGGFGQWVHRLAQRAPRNKVVVAIANKLARIAWAVLSSGKDYQHQPLQVTAA

SEQ ID NO: 419456 - protein, 430 aa, unidentified
MKFNTQNTKIEAITETTLVLGIDVGSETHFARAFDYRGIEYSKKPFKFSNTEAGFVTLKAWILDIKEMHGKDKVVPGMEPTGHYWFNLGKFLQDNEMKPVLVNPHHVKKSKELDDNHPTKNDRKDPKVIAGLVREGRYMIPYLPDGVYADLRTASNIRFQLQAELTRIQNRINRWFNIYFPEYKTVYGKPDAKSGILILKEAPLPEDILTLGIDGVNQIWRDAKLRAVGKARAKTLIEAAEHSVGSKEGAVSARMEIRMLLEDYESRNIRLQEVMGLIEGLVNQIPMAEKLLEIKGVGIKTVSGFLAEVGDIRRFNDPKELQKLAGLALVENSSGKHKGKTTISRRGRKRLRYLLFEVAMSLVAKNPEFRELHNYYTTRRLNPLKKMQSLMAIAAKLLRVFYAILTKGVGYDPKKMVNDIRRPAAYAQAA

SEQ ID NO: 419457 - protein, 450 aa, unidentified
MAQSRPLFLGMDVHKESIAVASVAHAHGADVTFLGTIGTRQCASASLLRKMPSKAQPLIFGSAAGPWGSWLSRYRTKQDDACGVVAPALLPKKPGDRGKTDRTDAMQWARLARSGDLPVVDVPQVDEEALRALARARADTLRALQAATFRLKAFLLRHALRYPGRAPWGPAPLRGLSEVVCPPPAQHIVFPEDVRAVTAHPERRQRLDHARHAQGTSWRLPPVVEALQALRGVQCTAAVTMVAEMGALPRFESPRALRQCLGLLPAEYTSAERRRQGAIPQAGTTQARSALVAGAGASRSPAQGSRPIHLRREKHPKILQDISWKAQGRRCQRSRQLSARGQHATGVTVAIARALAGCMWARAQQVPVTLSDQDSVRRHDALRRMADVPRTRRSPGGVEPSAALRGEERTREPRARQAPDGGQDGGRQPPERRRSNRRLFLAPALPMHRG

SEQ ID NO: 419458 - protein, 424 aa, unidentified
MRMSRRCIGLDVHRDFAQVAIWRNGVVTQEGRFATTPEEVRRFADGLAATDEVALEATGNTWAIASLLTSRAGRVVVSNPAKTRAIAEAKIKTDKVDAAILAELLAADYLPAVWMPDAQTAALRRQVQRRGHIVRQRTRLKNQVQAILHRNLVVRCPAADLFGIKGRAWLAGQDLPPDEAAAATALLRQLDFHADELALIDRELALVALGRDDVRRLMTIPGVDATVALSIVAAVGDFTRFRTPEKLVSYLGLNPRVRQSGNQPATHGRITKSGPGYARGMLVEAAFSASKAPGPLRGFYERIRARRGIQVAIVATARKLAVLCWHLTIKGEDYAFAMPSLVAHKQRKLQLRAGLPSARGRKGASAAYSLKEVRAAERQLAERSEQAYRTMITNWRPKPATPKTPTARSGRGRQHRDTALTPSG

SEQ ID NO: 419459 - protein, 350 aa, unidentified
MMIIGCDLHTRYQQIAMLDTETGELTERRLEHENGEARAFYAAMVGPVRVGIEATGHTHWFEAMLAEMGHELWMGDAAKIRAAVVRKQKTDARDAAHLLELMCSERFPKIWRPSFAERDLRQLVWHRQKLVWMRGAVKNQMHALAMGEGVCRKKKLFTAKGRKELEGLALGPWASYRRQELLRMFDELQAAVARLDQAVEQAAKSQALAVRLMTHPGVGPVTSLAFVLIIGPVERFAGSRKVVSYLGLNPQEHSSGGKQRLGSISKQGNPMMRSLLVEAGHTAARFDPQLRRVYQRLKFRRGASVAKVAVARKLAVRMYWMLRSTADYAQLVRMQGSPWATLVAKDSSLD

SEQ ID NO: 419460 - protein, 413 aa, unidentified
MGKEIIEFEQHIERGCGMDVHKETVVATVSGQGIKTETRTFSTITSSLKSMAQWLKKNGITHIAMESTGVYWKPVYNVLEKDFEILLVNARHIKNVPGRKTDKADSKWICKLLRSGLLKGSFIPPQDIRELRDLTRYRRKLTEQIAAEKNRIQRILEDANIKLSSVVSDIEGVVASRLIDGLLRGENVRELVKEHYHGKLSASREELEEAITGFFTSHHRFMITTIKSHIGYLEQQIDQIDTEIDRKVDTCRELIELLRTIPGVGKEGAVGIIAEIGTKMDVFPDEHHLSSWAGMSPGNNESAGKKKSSRITHGDIYLKALLVELAWAATRTKRTYLRAKYDSLAGRRGKKRALIAVGHKILCACYHIIKNKEPFKELGADFMDKKRKTKKIANLKRQLKELGVEIEIKEKAA

SEQ ID NO: 419461 - protein, 339 aa, unidentified
MQPTPIGVDIAKSVFQVHYVDPDTGEIVNRTLKRARFLEYFANRKPCLVGMEACGGAHHWARALTGMGHQVKLMPSRFVKAFNIGNKNDAADARAIWLAVQQPCKAVAVKTEAQQAVLSLHRMRQQLVKFRTAQVNNLRGLLTEYGEVMGAGRAALNRAIPGVLARLVDRLPAVMIDTLREQWMNLTELDKRIREIEHRLAQWMNQEPAVKAIAEIPGVGLLTATAAVATMGNAEVFRSGREFAAWIGLVPRQTGSGGKVTLRGISKRGDTYLRTLLVHGARSVLRVKKAPDAWSERLQSRRPLNVAIVAQANKTARTIWAILARGVAYERDHISVRPA

SEQ ID NO: 419462 - protein, 384 aa, unidentified
MKVACGLDVHKDSVFCCILCANGEKIQHKFGVLTEELVTLRDLMVSEGVEECAMESTSIYWIPIWRVLEGSVKLHLVNPYFIKQLPGKKSDVNDAEWIATCLSKELIASSFVPDDKIQRLRQYDRRIFDLNVSISRNLVKLDQCIQRCNIRISNYISTTDSKGYRSIVKLISQGVTDAEVLVKELHGRTINRHGRETLVKALTGVVSETDIDIIKQLVEEIELQQRHKDEAQEKMTALCMEWFPQEVENLQTIPGVKERSATSIIAEIGTDMTHFQTPEKLVSWVGLRPRNEESAGKIKARGITHGNRFVRKTMIECSWGAARMKESFFAEFSYRQCIERRKNKMKVQVAIARKILVAVWYVLSQGTQYIKPTDHYTAAHMTAV

SEQ ID NO: 419463 - protein, 360 aa, unidentified
MITVGVDVHKKQCTVAMQAEDGKVRFFKPVENTREGWRKLLDQLPPDTEIALEVSTSGYFAMSVLEEAGWLERTHWVHTAGIDSLRKQKYDRLDAGRLARKLSVAEQDPLPEAWFPPPEIRQLRMRARERCWLAAFRTQVKNRLQSMLPMHGLRPTVTDVYGVAGRAWLMAQVLPEATRESVEQLLRVLDFLGEEIKKAEAYLRAVDRQFPELARLRTIPGIGEVLAPVIWSEMGKLERFRSAEAFVNYTGLVPSLYQSGEVSIRGGITHQGSTWLRWALVQAANGVIQGVNPFARRYRRLRRRKLPNVAKTAIARSLARCVYGVLKSGGDYQEARWGRRPEEFVARSSGASKPEVAIGH

SEQ ID NO: 419464 - protein, 411 aa, unidentified
MCKEIEGFPLTKIRKGVYTMFYLGIDIAKVNHVASLIGEDGSVVVKAIKFTNSNEGLQKLIDSISEYDQSQIYCAMEATGTYWLSLFSALTDKDFNVSVFNPYQIKSFRGAYSNRKQKNDVIDSIIIAEFLRFNGIEQTCLPNDDLLALKNLTRYRSNLVDNISKAKIQIKGILNKVFPEYSDVFSDTFGNASKQILLNCPTPSEVANFNTRKLANLLKKASRGRHGTDTVRKVKELAKNSFGIKFTGDACSFEIKQLVSQIIFLENQVDELNLKIKELYSKLDNHLESIPGIGRAIAPVILAEIGDINNFSTPSKLTAFAGIDPSENQSGNKKSTDEKTSKRGSPYLRHAIYQAAFIASNNDPVMHDYYVKKRAEGKHHYVALAGVERKLLGIIFHVLKENRDYRPSKFS

SEQ ID NO: 419465 - protein, 428 aa, unidentified
MGNYKATRREQFCQIQREITGSDQYLVVGIDVAKDKHHAFMGTATGKTLLKKLIFENDLEGFGKLLQRCEAAKVHNGLTKVVFGLEPTGNYHKPLANHLIQNGCHLVLVTGKAVKDNRRQIDGRWDKNDTKDAANVADLVSRGRCLYYDAGSAQINQLRDLLSLRRRFKKEQHSLRMRIRNTLLAKYFPELDRFYSACESESLAIVHWCLDPKKIAAMDFDRFFTMVTTARRGIAQKLRLQKIHQLAAESVGCPMGPAAEFETTLLVQKLKQVREQTKQVNDLMQQTAQNFESYRFLLTIPGFGPYVAAVVLAAIADPFRFDSSRQLLKMAGYDLCARRSGKSSDDALPVISKNGNGQLRYALYQAAHIASAVNRDFIGYFTRMLRGPERERGIKTKMKVKLADKMLKIAWTLMKKKEAFNPDYLSTE

SEQ ID NO: 419466 - protein, 378 aa, unidentified
MPSETTIHVAIELSVSSWLVATRPPGAEKSRLHHIEGGDTTALLALIAELRTRASTKLGRPAEVVCCFEAGRDGFWLHRALTMHGVTAYVLEPTSILVNRRARRAKTDRLDAEGMLRVLAAWLAGDRQVCSMVRVPTPEEEDAKRPHREREHLVQERLRIENRIEALLFTQGIRKRPSLRSWERDVAELRTGDGRALPSLLRVELDRLRRRLVLALELIREVEAERAEALAVTADDEMTQKIAALQRIRGIGTNFAAVLVREVLYRSFANRRQLASYVGIAPMPYQSGGMDRDRSISRAGNPRARTTLIQLAWLWLRYQPGSALATWFRERVGMLQGRTRRISIVAMARKLLIALWRYVETGVMPEGVEIRAEADATA

SEQ ID NO: 419467 - protein, 418 aa, unidentified
MNKIRTKKGRVVNEKTLLVTVDIGKVMNMGYWRCPDKTEGKPFSFQNNFEGFNKFLSVILKTKTAKNLEYLVVGFESTGAYAEPLMHFLRVNGVKLVQVNPLHTKKLKDLQGNSPNKTDRKDPKVIADIIELGHALTVIIPEGVTAELRRLTHARERTLQRKTALLNQLQDAVFVSFPEFLDIMKDVKTKTAHFLLKHYPMPADILECGLEPLAIHLKKISRGKLGHKRAQLLYEAAKRSVGIPEGRIGLSLETQAFLSALEQCNGFIEQVEKEMGRLLNEVSYSRLLLSMKGIGPVVVAGLIGEVGDFNAFSTISKLLKCAGLNLYEISSGKRQGARHISKRGRALMRKLLFYVALCTVRKDGIMHEHYQRHLQNGMKRMKALVAISRKLLGVMFALVRDHKPYFKNHEEAKYLNAA

SEQ ID NO: 419468 - protein, 373 aa, unidentified
MGNRVAGRRRVGKEIRLLAEEVAFVGVDVHKKRYQVSVWTEGREWVAQWTQPADSEALCRRLEPVRAQVAHVVYEAGPTGLSLVRMLRARGFSADVVAASKTPMASGRSNKSDRRDAGQLARLDAKGMLTAIYVHTPQEEADRQVLRRREQVRGDVSRTEHRIKSFLLQHGVAEPAGLGHWSRAAVAALRGQVLVRELGRCLASLLRDLDHGRRELAAAAQDVRELAAGERHAAAVERMCSVPGVGVITAMTFATELPHPERFTTPETLGAITGLAPRVSRSGETAKGGPILKSGNSRLRRVLVQASWQWVRRDPAAEELFRHLLGETGCAQKAVVAAARHLAILLWHLVTTQSTYTPGQPAAPEPEAAAAQA

SEQ ID NO: 419469 - protein, 322 aa, unidentified
MNKYKETFGVDISKDVFDVHGSISRHHQYKNDEHGFKRFLKELPMDSLVVMEATGYYHYRLAQFLYKNAVVVSVVKPLSVKRFIQMKLAKVKTDKSDAKAICDYALVNEVPIYNALRDVQSECLQLFRALDMYSKHRTATKNKMHAEEVLGIPSKFVYRSLRRNKKYLNAEIKTLEAKILSLVKEDQQQQLSLLTSVSGIGPKTALFLIIVTDGFSTFETASQLCSYVGITPTIRESRTSVRGRARISKVGNKKLRDLLFLCSFNACKHNKGCRELYERIGNKGKSKKLALIAVANKLIKQCFAIAKSGRPYDEKYVSVLPR

SEQ ID NO: 419470 - protein, 372 aa, unidentified
MTSIIYVGMDVHTTNYTLCCYSMEDDRFFAEVQVEPDVKNILKYLARIEKQQSRDCRIVCGYEAGCLGYSLYHQLHAHGIDCVILAPTTMMTKPGKRIKTDRRDARLISKCLAFHTYSPVYIPTEVDDAVKEYIRMRDDANSALARVKQQIIAFCIRHGKIHDGKSYWTNKHLEWLSSLDLGNKVLSEVLQEYLIRYYQLREQVDMYDMRINELAQAEPYRQKVEKLGCFRGIAAHTALSFCVEVGDFRRFATAQQFASYLGLVPGECSSGDKQQYTGITKAGNSHLRKLLVETAQVFGRSATKSGKSVALKERQAKCDSLTVAYADKANARLKKKYFKIAMRSKVNIAKTAVAREMACFIWGMMTDNISCA

SEQ ID NO: 419471 - protein, 396 aa, unidentified
MVNNSLIGKSAVRLADKAGAGEASVASRASTSRQREFGRVRAIKAVTEQEPRRRYGTSPNSRLSRRKTASSHLQVREITMSESVYVGIDVAKDTFNVAASPSVLKTCLPNTSDGHRQLCQSLKNHNIALVVLEATGGYERPIVAELLEANLPVVVVNPRQVRDFANGMGQWAKTDPIDAQVLAKFAQIVKPAPKTHSTPQTTELAELVRRRRQLNDLRTQESNRLLMIHHPKVKKSIQKMIKTLNFQIDEIDHLIREYIDADDNFKNKDRILQSAPGVGPQTSAMLIANLPELGSLNRQEIAALAGLAPWDRSSGKYDGKAHIWGGRKDVRSVLYMAAFTACRFNPVIRTLAIRLKQKGKAYKVVITACMRKLLIILNTMVRNQTLWTPKISLKNT

SEQ ID NO: 419472 - protein, 412 aa, unidentified
MLFVGNDWAEDHHDVEIVNERGRRLARRRLPEGLDGITRLHALIAQFFPEEWADLEPAEAASRVKVGIETERGPWVQALIAAGYEVFAINPMSVARYRERHSSSGAKSDSGDAHVLAEIVRLDREHHRPVAGDSELGEAIKLTARAHQSLIWDRTRHVLRLRGVLREFFPAALEAFADLDAADTLELLALAPDPDRAARVPKSKIVAVLRRANRRGVEERATTIQSVWRAPALRQPTQVQAAFAAIVTSQVRLITALNGEISQLGEVVAHHFGRHRDAEIYTSQPGLGLILGARVLAEFGDDRTRFTDAKARKNYAGTSPITRASGTRKIVLARYARNQRLGDAAQQWAFGSLKGSPGARAYYDTLRTRNIGHQAALRQLANRLVGILHGCLKTGTRYDETTAWAHHNTAAA

SEQ ID NO: 419473 - protein, 478 aa, unidentified
MPKAKPKPQPTGTSEPGPKVANSKRTSQRKQDEHPVFQPHAAGIDIGAREIYVAVPADRDEHPVRKCETFTGDLHQMAEWLVSCGITTAAMESTGVYWIPVYDVLEQHGIQPCLVNPRNMKNVPGKRTDFHECQWIQYLHSIGLLHSAFRPDGEVCAVRSLMRHRNDLVEMASQHVQHMQKALTQMNVQFQHVISDITGLTGLAILDAIVAGERDPAELAKLRDPRIKASEETIRKSLEGNWRAEHILALKQRLFLYRSYRDQIHDCDQEIEKLVAAFDPKADPEQKPMPEDRKQKQRRRKKKGGSPDFDMRTEAYKLFGVDLTQIPGLMTLVLMLFSEIGRDMSRWPTAAHFVSWLGLCPDNDISGGKVLWRGARRTKNRAGTLFRLAAYSLHHNQSPMGDYLRRMKAKLGPAAATTATAHKIAIIFYTMVKMQVEYDASLWAQRDAMREKRLEARLHKQAAQRGYKLVPLEEKPAA

SEQ ID NO: 419474 - protein, 345 aa, unidentified
MKKVVKQVLGIDVAQKELVVTAGRMHEDLSHELYASKTFANNHKGFAAMLLWIKQRSDQHISVRYVMEATGVYHEHVAHYLDEQSKEVSIILPNKISNYMRTLDVKTVTDKTAADAIAQFGLERNLENWIKPKVVYRDMRQLTRERDQIVQERTVAKNQLHAEEAGAFPYKNSIQRIKERIKLLDKQDQAVQKEIKELINKDTEIKSNAKLICSIPGIGLTTAAVILAETNGFELIRNRRQLASYAGFDVKEKQSGTSVKGKSKISKRGSKYLRKALHMPALAAIKSDARPKATFARLVSKHGIKMKAVVAVQRKLLEMSYTIFKTQTPYSKDYLTKQTRQDDQT

SEQ ID NO: 419475 - protein, 409 aa, unidentified
MGTVSIVYPVCCGIDVHKSFLVACIATTDKRNHTAHQIRRFSTFKGDLNKLADWLAANNCKDVCMESTGKYWIPVFNVLEKTCTVCLTHPKYVKAIKGKKTDKKDAKWIAELFKCDLVRSSFIPPPLTRNLRELCRYHTKLTYMTSSEKNRGQNCLTVCNFKLDDVFSDVFGASASRVLELGHSDFDVAPLLHKRCKATPEQVKAAIDGELSPAQIQKLSIVRQHMTQLENLQDTLESSIVQLASPYQTQIDLLMSVPGIGCQFSAIRILAEIGVDMSVFETAKTLCSWAGLTPQNNESANKKKTTRISRAGAFLKPLLIQFALGAVRTCDWLKDKYHTLKKRRGHKKSIIAIARKLLTAIWHMLHKLESYNHELYKKSDPPPVNRVLSPEQAFALVRKQGYQIVLPAA

SEQ ID NO: 419476 - protein, 390 aa, unidentified
MANIIYIGLDVHKEKIQACAFLAAYGFGEDRVLANIELGGNYQEIIKFASTLKKKFGKETRFVCGYEAGCLGYSLCRHLQRCDIECHIMAPTTMSKEPGVRIKTDRRDAEMIARCLAYNTYKGVHLLDEEDESVRDYIRMRDDFKQMLKVVKQKILALLLRLGIRCDTCKTPWTQKHLQWLKNVDMGKGLNRETLDEYLKELDHLKDRIDNFDTRLHELCDTERYKENVKKLICFPGIKEHTALSFISEIGDFTRFGKAKNFAAFLGLVPGEQSSGSKVHRTALTKSGNIHLRRLATEAAQAAIRSSPSYKSKALKARQEGAPEEVIAYADRARDRIIRKYKKMIRGEDLLGGHKAHNVVVAAVAREMSCFICGMMNGWYDGADSDKLQT

SEQ ID NO: 419477 - protein, 358 aa, unidentified
MNNHMIQGYVVKGKEIFVGLEDSKRTWKLSVRCDRMVIHQASMEARYPVLLSYLRNNFPDCTINLIYEAGFKGFTLHDRLTGDGINCVVIPPHLVTEPKVNRVKTDRRDANRLAFILEGKDVPSICHVPDRERREDRQISRTLIAIGKDIIRTRNRIRKLIDFHGIEVPFARKATWGRKEFAALKEIPLSVPLRASLDVLLSLLGHLWLYQETLRAHLKELCRKERYRKSFDIARSLPGIGWYTAIRLVLELGEDLSRFGSAKKIAAFMGLTPGEHSSGETEYRGRITGMGHGFIRSTLVENSWAAIRKDQALLAKFMRVWRNSGSKKKAIVAVARVLIIRLRACVISGRPYATGVVR

SEQ ID NO: 419478 - protein, 427 aa, unidentified
MSYRIAAIDVHKKMLAVVVADVAGEGEYQFERRRVSATPDELHVLAQWLVQQEVEEVVMESTAQYWRPVWGALEHYWKPARQQREGAGKMCGTLHLCQAKSNHGPRGRKNDFADGERMIKRLVAQELVLSFVPDPEQRLWRTVTRRKYQLTRAKVSFRNQLESLLEQGHIKLSSFVSDLLGLSSRRMLKALAEGETDPAVLAALADWRLQATPEQLRDALGACAQWNPVYRRLLKMALEELELIDKHIEQLEREALELLQEYQDVVRRVAEVPGFGVDSALQMIAEVGPTAAKFRTEKALSSWVGVCPGNEESAEESHSTRSPKGNRHMRRLLNQAAQSAVKVKGSIFELTFQRLLPRLGYLQAIWAIAHRLCRLLWLILNKGVSYEERGPAVTAKSKRARTARMIKELQKLGYRIEGGSLPAVTSA

SEQ ID NO: 419479 - protein, 360 aa, unidentified
MSQDRTFVGLDVHAWSVTGHALDAATGEVWQRRLTPDPADILGWVSGLPGPVKVVYEAGPTGFGLARHLREQGVECLVAAPSKLQRPSGDRVKTDARDAAHLARLLKLDEIVEVVVPSLTQEAARDLVRAREDVRGDLMRSRHRLSKLLLRQGIVWTGGQAWTGRHDVWLRSQRFELPGRQLAFDSAYEAMTLTLDRRERLDKAIVEMAEASEFTDVVRRLGCLRGISTLTGFGLAVEVGDWTRFSGSTIGAFLGLVPTEYSSGQSRSQGSITKTGNSHARRLLVEAAWHHRKTYRSPGQTMRTRWDAAPAAARVRGHQGNQRLHQRWQGFTARRKKPVVANVAVARELAGWAWSLAVMD

SEQ ID NO: 419480 - protein, 303 aa, unidentified
MDSVVIGADPHKLSVTIEVLDGRERVLHQGRYGTDRDGYRQMLSAARQFERRSWAVEGCNGIGRHVAQRLVADGETVVDVPAKLAARARLFDTGNGRKTDPADAHSVAVVALRTRSLMQVRVDDELVALRLLADRRDELGRSRTQAVNRLHRLLLELVPGGAKRFLTAAQAQVLLDRVAPADVAGRVRHQLATELLGEIVVLDKKMNDSDKALRKAVTATGTGLLDLFGIGPAGAARILGDVADVARFATRARFASWNGTAPLDASSGLCRTRHRPLYGDLLVMPTGEGNRRSGKACVATRSA

SEQ ID NO: 419481 - protein, 347 aa, unidentified
MREIAYLSIDVHARNCVLGDMDGNGKFRGNRSFITSENNIINALKAVKAKKKYLVMEAGPMSNWAAQVANDHTTKVFICDPRENALIYKGSHKHDKVDTKKLCRLLRLNEFKEVYRPENDQRALFKAAVQHYQDLRDQLKALKNKTKAMYRQWGIINVFTDSVYSVSGRDKFLQQVKHRPIYLQLKRLYTLLDATAAMKQEAEKSMASLGRNYPEIKEFKKMPGMGIIGPHTFDAYIQTPHRFAKRNRLWKYCRLAVTDRTSDGKPLGFKRLDKSGVSELKAVSYRAFLSAMKGDNEVRRFYLNSLQRTHDRKHARLNTQRKILSVMLSIWKKGEAYRAELFLDPSI

SEQ ID NO: 419482 - protein, 316 aa, unidentified
MTTAPVFVGIDVSKDRLDVALRPTSDRWALANDAPGVATLVARLQGLAPTLIVLEATGGLAVPLTGALAAAGLPVVVVNPRQVRDFAKATGQLAKTDALDAAVLAQFAEAVRPALRPLPDAATQALSAVLARRRQLIEMLTAEKNRLGSALPPVRPGIRAHIRWLDRRLADLDADLAQAIRESPVWREKDDLLRSVPGVGPVLATTLLASLPELGTLTRQQIAALVGVAPLNRDSGAWRGKRRVWGGRAPVRAALYMSALVATRYNPVLRAFYQRLCAAGKAKKVALTACMRKLLTILNAMLKYRTPWENNFAHAS

SEQ ID NO: 419483 - protein, 419 aa, unidentified
MTDPPLQSYLRFIAIDIHKHYLMIGAIDAAKQVVLLPRRVELSRWPKWAHANLLPTDAVVTHATTNAWAIYDLLAPLVGRAVVVHPAKVKLIAASRVKTDKVDVVSLAHLLRADLLPEVWVPPQHVRDLRALLSHRRRLVSLQTTAKNRLQSVLHRLNLRPPDGDAFAHKQRAWWIELTLSSTERLRVDQDVATLDHVAAQIADIDVELRRLSTSEEWVEQVPYLIQVPGIALLSAMTILGAVGDITRFATAKKLVGYAGLGAGVHDSGKTHRDKGITKQGRRELRYVMIEAAHAAVQSHAYWKGEFAQLERRIGEAKAIVAIARKLLMVVWHVLIAKSADRRANEEQVAFKLMIWAWKLSDEQRGGLSSRQFIRAHLIRLGLGTELTHITRGGTRRPLATIEEVLALRPELRGPPDTA

SEQ ID NO: 419484 - protein, 417 aa, unidentified
MEQPTRFIGMDVHKDTIVVAVTAAGDVGKATPYGTFPNTAAAVEKVVRRLRQASSGPLRFCYEAGPCGYGIHRTLTKLGEDCMVVAPSMIPRKSGDRQKNDKRDAASLAVLHRGGLLTAVWVPDAAHEAMRDLIRIRLAAVRAVRTARQQLSAFLLRHERIFPNGRKAWTKAHRGWLADQSFAQPAQQIVLEESIEAVRLGEQRRDRIDGYLRAQIPTWSLFPLVQNLGALRGLDTVASAGLAAAIGDPSRFASAPDFMAYLGLVPSEHSTGRKRHMGAITKAGDIHARTLLIEAAHSYRFPARVARHKLAAVDAVPEAVREIAWKAQTRLCQRYRRMVARGKLNQVVVTAIARELAGFVWSIACITSDPPAKTSVITTASHEVSPTKSTGQSRAPRRQPLKTTTAPGTPGINPCAH

SEQ ID NO: 419485 - protein, 460 aa, unidentified
MTLLERLGSPLPRRYYLGVDVGYKEHVAVVISLQTFVRGDGRWKRARCLHFPTTQAGLRKLQRYLDRFSTDHREFLGLCEPTGGYYGATVFQYLLDQEYDVNLMENATTRHVREKIFPGVPKTDEMDTRVMARIGYLHEAVGEEFTLRPLELPDPDDADLLSLCRDSWKLGTMITRARNQLTQLMAAIFPELKTFFTSSVSTVVPVSLVAAYPTPALLAEAPSEEVHQVLWKARGYQHARRVAELQALAGDSSGLLPDPSRVWRLEWLINFLRTNFQYQAALDKRIKELVEQRDDYELIVKVPYSGPATLGAILAVTGDVGRFSNYRKYVAYSGYFAGLEKSQTIDRTKMSRRGNRNLKRALFQIAAPLVWFDRGDNDYKDLFQRKKAEGREWYKAMPFVCAALARHIYHCLKFKDPYDSEKAFQGSSSTPASEQELADLRADLDEKFEVMEAHLRQIEG

SEQ ID NO: 419486 - protein, 370 aa, unidentified
MNSIIYVGMDVHKASFTLSCFSVTTQETFATVKISPDAKAIKKYLDGVSLSRSEECEFVCGYEAGCLGYTLYHQLTAMNIRCVIMAPTTILRNGKRVKTDRIDAENLARCLAYGGYKSVYIPTAQDEAVRDYLRMRDDHKLMLKKIKQQINAFCLKHNKIYPGNKSKWTQAHVKWLNALEFDGYLQDAFNEYMITYRELTDKVERLESQIEQLAELEEYRDKVKKLICIKGIKTHTALSLIVETGDFSRFQSAERYASYIGLVPGEHSSSEDQNRLGITKAGNRHMRMLLIEAAQCYSRGVPAKKSKDLKSRQKGASPEVIAYADKASIRLRRKYIRMELVNKKKANVAKTAVARELACFIWGMMTDNIA

SEQ ID NO: 419487 - protein, 310 aa, unidentified
MEPIFVGIDVSKDRLDVHVRPGGEAFVVTRDGKGLEELVGRLQELGPTLVAVEATGGFETIVAAAVAGAALPLAVVNPAQIRHFAQAVGKRAKTDPIDAGVIAHFVEAVRPVPRALPDEASRLLAELVGRRRQIIEMMVAERQREKRAANVRVRKSLARHIAMLERELAAIDQDINTLVRGSPVWRVKEDLLASVPSIGKTLARTLLAELPELGSLDRRNIASLAGLAPYARQSGRWRGRSMIGGGRAAVRSATFMAALVASRCNPPLKDFYQRLVSVGKPKMVALIAVARKLLTILNAILRDNRPWQSA

SEQ ID NO: 419488 - protein, 389 aa, unidentified
MKIFVGIDIAKLNHFAAAISSDGEIIIEPFKFTNDADGFQLLVSKLESFDKNSLIIGLESTAHYGDNLVRYLVTELYQVCVLNPIKTCQMRKNNVRKTKTDKVDTYVIAKTLMMQDNLRFVSFFDLDMMDLKALGRFRQKTIKQRTRLKIQLTTYVDQVFPEIQYFFKSGLHQNAVYALLKEAPSPKEIASMHMTHLANLLKVNSHGHFTKEQAKELRVLAQKSVGANDSAISIQITQTIQQIELLDSQLEKIEAEMTDIMKFNDSVIMTIPGIGYINGGMILGEIGDIHRFSNPNKLLAFAGLDPSVYQSGNFQAKTTRMSKRGSRVLRYALVNAAWNVVRNNATFKAYYDAKRAEGRSHYNALGHCSGKLVRVIWKMLTDNVEFNLK

SEQ ID NO: 419489 - protein, 436 aa, unidentified
MIRYLGLDLHKHLLVVCVLDAAGEVTARLRLEDLNGPALEFFCRRHLRPDDQVALEATTNCWAVVAVLRRHVSRVVVSNPLATKAIAQAKVKTDKVDAGVLAHLLRLGYLPEVWQPDAACGRLREWTARRSRLVSQRTAIINRIRATLAMRLLDCPHEIGSARGRAWLASVALDDDARWLIESDLRLLDAVAAELAAIDQRLAQRGHEDPRVKLLMTLPGVSQHTAQSLLAAIGDVDRFRTDRGLASYLGLVPSTRQSAGRCYHGSITKAGRGHTRWMLVQAAQSVREHPGPLGHFFRRLKRKKNHNVAVVATAHKLAVLAWHVLKTGEPYRYAVPRTTEAKLAALRIAATGQRRRGGVKQGTDPRTVHAAGRKGRTQRGLPEVCAVEGLPAPSDAPPGERAHLEKVGLTAFAAGLTQPTIVPRSANRSEKTPSPS

SEQ ID NO: 419490 - protein, 474 aa, unidentified
MDKSSTDKRGKVIQLLARQKIRDVKDLESYKLSECHPASAGIDLGSEELYVALNPGIAAELDIPIVHRFATFTGDLLACKDLLVWCGVKHVAMESTSVYWTTIYFILEEAGIEVCLVNPKKFRMVPGRKTDIADCQWLQTLHLYGLLRGSFHPPQQIAMLRSYMRERDSIIKERSTFVQRMQKALIKMNLLLHNVIDDITGKTGIDIITAILDGERDPKRLASFRDPHCKKSEEEIAKALTGYYNEDQLYLLQLNYQSFCFFDKQLNDLDKQITKLLKSLPCKKEKKEKRPDNGKTKSKGKNDIRTAVNLEDTLYHILGTDLSSLPGIRANAILQILSEVGMDMSKFPSTHHFASYLGFVPHNKITGGHVISSRTDRIKSSAAQAFRKLVPSISQTKTALGAFYRRLAPRIGKAQAITATCRKLAILFYNTLAYGTAYMEQGELMYQQKQEEWEKRKLLNLAKKYNFSIVSNTA

SEQ ID NO: 419491 - protein, 343 aa, unidentified
MQVSTIGVDLAKNVFQVHGVDSAGKVVIIRQLRRKQVIDFFSKIPPCLVGMEACGTAHHWAREVSKLGHTVRLMPPSYVKGYVKRSKNDAADAAAICEAVTRPSMRFVPIKSADQQALLMLHRTRDLLIRQRTQLTNALRAHLAEFGLVAETGREGLAQLAAIITDESNREALPSAMKQALQAIVDQLAALELQIGTLDRAIHAHHRANDMSCRLETVPGIGVIGATAIASTVTDPSDFKSGRDFAAWIGLVPRQHSTGGKERLGGISKQGDRYLRRLLVIGATAVVRHARQHPQKHPWIMRLLAKKPAKLVAVAVANKMARIAWAIMAKGGYYRAPELAAAA

SEQ ID NO: 419492 - protein, 402 aa, unidentified
MNAVGIDVSKGKSMVAIMRPFGEIVASPFEVKHTASDIKSLVKLINSIEGESRIVMEHTGRYYQVLAHQLSQTNLFVSAINPKLIKDFDNDSLRKVKSDKADAVKIARYALDKWQNLKQYSVMDELRNQLKTMNRQFSFYMKHKTAMKNNLIGILDQTYPGVNTYFDSPARSDGSQKWVDFASTYWHVDCVRKMSLNAFIDHYQNWCKRKKYNFSQSKAEEIYGKAKELVPVLSKDAITKLIIKQAVDQLNSASTTVESLRTLMNETASKLPEYPVVMAMKGVGTSLGPQLMAEIGDVSRFTHKSAITAFAGVDPGVNESGSYEQKSVPTSKRGSSDLRKTLFQVMDVLIKTHPQDDPVYQFLDKKRAQGKPYYVYMTAGANKFLRIYYGRVKEYLSSLPES

SEQ ID NO: 419493 - protein, 326 aa, unidentified
MKLYLGIDMGKSSFTAALCTENLERQIIHPEVMNQTDGWQTLKEWALKQSQEMQATQVQLGVESTGGYEKPMVEWFRSNTDFEITVLNPVRIKRFAQSELSRTKNDVNDARLIARYLAIRKPNPTLVIAPEIEELKIMVRHLEHLTRKQADEKTYLESVVEPNIRRQTQQIIKTYQEQIEKAQDQIRKHIDSHPNLRHQSDLLQSIPGIGKTTSAILLSECIPSLTPKQQVAHAGLAPRQNQSGKMNGKTKLCKTGNKRLRTALYLPTLCAIRHNPVIHEFYQRLIGRGKPKMVAVGACMRKFVHIIVGVLKNQQYFDPYYERNLS

SEQ ID NO: 419494 - protein, 428 aa, unidentified
MNEADRIRLEEFRQFRKEIRGSTEYLIVGIDVAKDKHYAFFGTATGKTLFRRLVFENNLEGFRKLLVQAEAMKVQEGLKKVVFGMEPTANYHKPLGEHLIRCGHRVVLVSGAAAHENRKTLDGRWDSNDTRDAANVADLVSQGKCLFYEFPIGVLQDLRNLLSLKRRFKRQEHGYRVRIRNHLVAKYFPELDRYYKQSESTSLAIVHWCLDPSVIAGLEYKRFVEMVAPGKGRISRESRLQAIWKVAVDSIGCEAGPTVEFEAQVMVEGLKQIREALRSIEEKIQEICVQFPEYEYLLSIPGFGPDVSSKVLGAVGDPFRFQNGQQVLKLAGLDLNAERSGKSSDLARPVISRKGKADLRYALYQAALIASIRDRHFIVYFTNRLRGREKEPGIKTKMRVKLAAKLLIIAWTLMKKKEPFNPDYLKIA

SEQ ID NO: 419495 - protein, 344 aa, unidentified
MQHYVGLDVSVKETSVCIVDKAGKVIREVKVATKPAEILAVLTEEALAIERIGLEAGPLSQWLYSALAEACLPVICVETRHMKAALSAQINKSDRNDARGIAQMMRVGLYRPVHVKTVASQKRRMLLTSRQLLQAKALDIENDLRGTLRNFGLKVGMVGTVEFEARIRELVADHPDLAAIVEPLLIARRVLREQLGVLHRQLLEIVRQDEVCRRLMTTPGVGPVVALTFRATVDVPSRFNNSKAVGAALGLTPRRYQSGEIDRMGGISKSGDAMMREMLFEAALVLMTHSRKWSWLKAWGMKIARHRGMKRAIIAVARRLAVIMHRMWVDGTEFRWSRKEAAAA

SEQ ID NO: 419496 - protein, 365 aa, unidentified
MKKVSRAATMKPKPEITIGLDLGDRFSHYCMLNSDGDAIETGRIQTTEAALRRHFEGEPAMRIALECGTHSPWISRLLTALGHQVIVANARKIRAITASESKNDKNDAEKLARFAWCDPRLLSPIRHRSPERQQDLNLIHARATLVRARTMLVNALRGLVKSAGGRLPACSSQGFETRAASSIPPSLATAAHPLIQQIAAITASIHEMDRGIEQLAERYAEIKLLRTVPGIGPLIAAAYVLTLDRPDAIQHSRQAGAFLGLRPRQSQSGDSDPQRRISKTGNVYLRSLLVQAAHYVLGQFGPDSALRRWGLKLASTGGKRGKKRSIVAVARKLAVMLHRIWQTGNAWQAFPQAAQKTASKNACMA

SEQ ID NO: 419497 - protein, 317 aa, unidentified
MDKPPAATCFVGIDVSKGHVDVHVRPDGTAFSCTTDPDGLANLITPLAPLQPQLVAMEASGGYEAVIAAALTEAGLPVAIVNPRQVRKFAGAIGRLAKTDAIDAGVIAHFADAIRPAPKPMPDALMLRLRELLARRRQLVVMVNAEKQRLGKAADKLAQRSFKTILRSLEAERARIDRAIDTLIQQSPLFCAKQDLLKSVPGIGDIVARTLIVELPELGSVDRHQIAALAGVAPMNRDSGRYRGKRHIQGGRVEVRAPLFMACLTAIRHNPPLRSFYRRLRDAGKPARLAIVAVMRKLLTTLNAIIRDNTAWTHVHI

SEQ ID NO: 419498 - protein, 345 aa, unidentified
MKKVVKQVVGIDVAQKELVVTLGRMFDDFTIELFSYKVFKNSDTGIKSLVEWANKKMDRKLVVSYVMEATGVYHQKFACYLEENNQQVSIVLPNKISNYIRTLEMKTVTDKSCSQAITQFGLERKLDTWTKPKKSYKELQQLTRERDQIVQERSIIKNQIHAEKSEAMPNKKSLNRMQSRIQFLNAQETEIKSDIAQIINNNPELKETIKRITTIPGVGALTATIVLAETNGFELIRSKSQLTSYAGLDVKEKQSGTSVKGKPRISKKGNRNLRKAMYLPALTAVKWDDNFKAIYARLVSKHGIKMKALVAIQRKLLELIYILFKNETIYDNEYSIKNSVQIQMI

SEQ ID NO: 419499 - protein, 385 aa, unidentified
MAPPRRPEIVIGLDVGKSSHWACVATRDGEVLASKPVANRENALDSLFAEFPGALVVVDQVRNIGSLALSRAKLAGMPRAYLPGLAAHGASRLFAGDAKTDERDAMVIAKTALGIPDALLAVADRPPEIEAARSLAAQRDFLACENTRSKNRLRSILLESCPEFEAQADLSDPATLKLMAAVGGPWSISEASPQAVGALTRGCRRAKVAALVESVESSSRPHPAAVACEDRAVRLLARRISENAAEIESLASEISALLAADETYRCLLTVPGIGPRTASELVISIDIADFAGHDRLASYCGLAPRNRQSGTSISSVSASRQGNKRLKNLLIFSCNCLARSRNRWGEYYARCRDRGMPHGKALKAVARKRLKVIYAVMRDKVPYVA

SEQ ID NO: 419500 - protein, 338 aa, unidentified
MAQVRTIGLDLAKNVFQVHGIDAEGKVLVRRPLRRAEVLPFFAKLSPCLVGMEACATAHHWGRELTKLGHTVKLMPPAYVKPYVKRGKTDAADAEAIAEAVQRPTMRFVAIKTREQQAVLMLHKVRDLLVRQRTMLVNALRGHLAEFGIVAAQGAAGVTSAIAQFRTEQADLPELARSAIRRLIGQIEAVAEEVKRAETEIVAWCRADAASRRLLTIPGIGPITASAIATAVPDPSLFRSGRQFAAWLGLTPRPHSSGGKERLGRISKQGDGMIRRLLVVGATAVIRVARQDNPGRAWAKRLLERKPARVVSVALANKTARIAWAVLMRGEVYRAPAV

SEQ ID NO: 419501 - protein, 342 aa, unidentified
MAYFAGLDVSLNQTSICVVDAAGEIIKEFKAPSEAEDLVSALLPIGPNLERVGLEAGPLSQHIYSALAEAGLPVVCVEARHMAQVLRAQTMNKTDRNDARGLAQMMRVGLFKPVHIKSDRSQRLNVLLQARKVLKSKLLDIEADLRGLLKNFGLKVGKVTPKTFEGRVRELAAFDAFIAEVVEPMLAARSAMRSQYDELHSILLRVVKDDPVCRRLMTMPGVGAVIAMNFRVVIDVPSRFTRSRTVGAHLGLTPKRYQSGEVDWTGRISKAGDAMMRASLFEAAQVLMTRVAKPSALRSWAMRLAKRRGRKKAIVALARKMGVILHRMWTDGTDFCWATQEA

SEQ ID NO: 419502 - protein, 374 aa, unidentified
MNGSLTSFMLNPITALTEQVIDNKAQGTKKAKRIVLGIDVHLRGYQVASKEDNQAIGAVHNFGNQSEVWLWIEKLKRRVEPIEVVYEAGPLGYSLYRELSAQGISCRVCAPDSSVQKRRRRKTNAIDARELAGRLFNYLNGNQQALQLVRIPSIEQERRRLKSRQHDQLVKERKRLAAQGNSILLSQGWGSMKNWWRPRIFERLSQVVVPEIKELLEVWLELLHKLDEKIQQAKAQQKRSQKGPRPKGLGAGSLEQLESELLDWKRFSNARKIACIAGMVPSEWSTGEGQRLGSITKVGLPAVRRILVEAVWRMQRLQPDYEPFKKWRAALEGKNAASKKKAVVAIARQLIVDLWRLKTGRVSAQELKLVMVGG

SEQ ID NO: 419503 - protein, 351 aa, unidentified
MTTTSMAGPDQLVTLGIDTHAEVHAVAALDERGRLLDSTTVLTSLAGFQALLEWAAGFGTIDRIGVEGTGSYGAGVARWLRAQGLVVIEVDRPDRGERRRRGKSDPIDAEIAARAVQSGRASGTPKAGDGRVEAIRALRIARGSALDARSRVANQLHALRVTAPDELREELRSLSLARLSLRASRFRVPTVVDAPLAATRLALRSLAQRFRQLSAEIARLDVHLSRLVAAAAPQLVARPGIGTHIAGQLLVTAGDNPTRLRSEGAFAMLVGTAPIPASSGKTDRQRLNRAGDRQANSALYMLALSRLSRDPRTQTYVRRRTAEGKTKPEIMRCLKRYLTREVYRLLVPMPG

SEQ ID NO: 419504 - protein, 362 aa, unidentified
MNNTISDIDIDLTAVCEAEDDAAQAEAQPAQNESDDTYAQKMQEQLALARSSANCRYIGIDLHSNNIWLSVIVNEQRPSGSVGKVIFSRSIGTQRVDGTLPEDLIKPVLERFCKDQPHIACVEATYNWYWLADLFERNGWNLVLADPSTVSEAKTKAADDRKDAEYLADRLRYNALRYAVIMPKQLREIRDLVRTRGTAVKQRAREKIIVINKLTNLIGRKITGKELRELIKEHAEFGTEAPMLLNWGLTEEVRTILDYHLTMATNIDQGIQKLEEHINAVGRNLRYTRELQKMPGCGPVISSILASEIGSIRRFATAANFVSYCRLASTSKLSNGKSKGLDAGGASDGELLRELLLKMLTI

SEQ ID NO: 419505 - protein, 481 aa, unidentified
MADNTRARTSQMQRLTRKQRRELGRRIWSEHPGLEVVHRDAAGIDIGSEQHYVAVGPDRDAEPVRTFGCFTEDLHRLARWLKECGIRTVVMQSTGVYWIPVYDVLEQYGFDVWLVNAQDTRNLPGRKSDVQESQWLLKLHTYGLLRKSFRPEPNIRALRTCWRERAEYVQQAGTCIQRMQKALTEMNVQLSNVLSDLSGVTGMCILRAIVAGERDGRRLAEFRDARVKASRETIAKSLEGTWRPEQLAILQRQLADWDHVRQQIAACDVDLEVMLKQLPDAEIDPQPPAANPPGKSKRRRQKKDRSSKNQPSFDLSGELKRVTGVDLTRIDGVKEMTIQTIITEAGLDMSKWPTENHFVSWIGLSPRNDVSGGKVLKKKTRKVVSRLATGLRLAATTLRASDSYLGEQFRRLRTRLGAPKAITAMGAKLARLVYRMLKYGQEYVDKGSAQYQAKYHEQQIRQLKKKAAQHGFTLVSMPDPI

SEQ ID NO: 419506 - protein, 477 aa, unidentified
MARKKGRQNNQQSKKKTKKPISLKAPAGELGVIRSDAAGIDVGAEEIFVCAPAKDEPGMTEVMVSRTTTSELLKTAAWLQERKVRTLAMESTGVYWIPLYEVLENRGFEVLLTDTRELSRVPGRKTDMIDCQWLQLLHAHGLLKGCFRPEERIVELRSIVRAKLVLVRERADWLRRMQKCLDQMNVRVHRAVKRLDGVTGMKMVRAIVEGERNPKQLAKLREPGVHKSEAAVAEELTGHWREDHLFGLTQGLKMYDTLSERIQEHEAEILRRMKGLECEKARGMEVPEVQKPSKAQTLKRRGQEAARRALFGMTGIDVTAIDGVGIEALEAVVSEYGPTLEKFPNEKAFVSHVRLAPSRNVTGGKAIKKKRGPVRNNTRVADVLRMAANAVAQTHTALGAYFRHTARTKDRGVAVFATARKLAQYIYRALRWGQAYIDEGVEAYERRYEHTQLRRLTQRAAQAGYDLVPKQPSSQPA

SEQ ID NO: 419507 - protein, 343 aa, unidentified
MGEVSTIGLDIAKSVFQVHGVDVDGAVVMRKRISRAKLLEFFASLPACLVGIEACPSAHYWSRRLQALGHTVRLLPPSYVKAYLKRSKNDANDAAAICEAVTRPSMRFVATKSEQQQCGLMLHRSRQLLVCQRTMLSNAIRGHMAELGIISAKGRNGTAELLEIIADEHDDRIPAAARLSLDVLARQYRGVRAEIVAIEKRIHAWHRSSEESRRLEEIPGVGPIVATALVAEVGDWKTFSSGRSLAAWIGLVPRQHSTGGKQRLGGISKQGNRHLRWLLVAGAMAVIRYARQRGTKRPWLARLMDRRPIKVAAVALANKIARMAWAMMVRGERFKEPKLLPAA

SEQ ID NO: 419508 - protein, 414 aa, unidentified
MEQKMIYVGIDWADDHHDILITDDSAKTLDQFRIDHTCDGFALLHSHLANHQTSPGLVLIAIETSRGLLVHELLQKGYTVYAINPKAVNRYKDRHVLSKAKSDALDALSLGHLLRTDRHLFQPIKPLPEDYRLLDRLCSDLRKVVDEKSRVTNQVISCLKEFYPKALETFSLNSQIFIDFLKAFPDHGTLSACTKKTFLAFLKEHRYPYPTKAEELWKIIQSPTLQPDKVIARSGKLRLGMLLDQLENLKEHITHYEQEIRAILDNLPETNPIKSLPGVGERLAPELVATLGPNSKDGHHRFQAAEEIAKLSGCVPVVRESGKWRNVSLRYACVKSLRRTFHDWAFASINYSSWARAFYDYHKEKNQSHCTILRNLGKKWIKILFAVWSNGTSYDEALHIQNLKARNVPWAMAL

SEQ ID NO: 419509 - protein, 312 aa, unidentified
MEKITVGIDVSKDRLDVAVRPSGETLVVARNAVGLEELCARLRVLGPHVVALEATGGFETVAAAALAAAGLPVVVVNPAQIRAFAQAIGQRAKTDPIDAKVIAHFAEATGLQPRPMPDEATRLLGDLIARRRQIVEMIVAERQRERRAPARLKKSIARLVKALEKELSSLEGDIDAEVRGSPAWREKEDLLASVPGIGRTIARTLIAELPELGSLDRKQIAALAGLAPFTRQSGRWKGRSFIGGGRTAVRTALFMGALVATRCNPALTAFFERLVAAGKPKMVALIAVARKLLTILNAILRDRQPWRQPAQA

SEQ ID NO: 419510 - protein, 388 aa, unidentified
MIYVGIDIAKLNHFASAISSDGEELIKPFKFTNDNDGFQLLISKLAPLDKDSLIIGLVSTAHYGDNLVRYLVAKNYKVCVLNPIKTSTMRKNNIRKTKTDKVDTYIICKTLMMQESLRFVTFYDLDLMDLKALGRFRQKTIKQRTRLKIQLTSYVDEIFPELQYFFKSGLHQKSVYALLKEAPTPEAIASMHMTHLAHLLKVNSHGRFDKEMAQQLRVLAQKSVGASDSSLSIQVTHTIQQIELLDSQLERVEAEMTEIMKFNDSVIMTIPGIGYINGGMILGEIGDIRRFSSPNKLLAYAGLDPSVYQSGNFQAKKTRMSKRGSKVLRYALVNAAHNVVKNNTTFKAYYDAKMAEGRTHYNALGHCAGKLVRIIWKMMTDNLEFNLD

SEQ ID NO: 419511 - protein, 455 aa, unidentified
MNYERQQEGVSALGQNVVVGQPSRLGQTARFVQRRNSFPAFCGIDVALKKHNVAILDEQHRVVKKFLILNDKNGVDRLCTELTPRMLITMENTGPYTLALALALHTRGFDVGICDGRDAKSHREIEFKDKKNDWIDAIALATFRVVRRHKVTSVPEYVARFRSDSPIDGLYHLRKLVREYRASSAYLGRLKNRLTMIVDVRFPEAVKVFRRRRTGMTVRAALQMTRDQLLSTTAHLKKGDELHRELSNSIGSYDLFQKEFRELLAEIERIEAERKTMLSSIEESLRTEGFGQLLEYNGINAVNGAVFVTELGDIRRFYKHAPDGKLALKRTLKTFQEYCGLRVKMKQTGQNEGVHKLSSTGNMEIRSMLYLLAMCLISQKNYEAARAQTGPLCPGKYIALYERYTANPKVPKKVALIKVMSKIATDLFFVLKELHEQRAQRLAQSAASSPTPATA

SEQ ID NO: 419512 - protein, 338 aa, unidentified
MSLYCGIDLHSNNCYLAVLDEQLRPVLGRRVANSVETILAALEPYREHIAAVAVESTFNWYWLVDGLMEGGYHVELVNTSAVRQYEGLKYVDDRHDARWLARLLQLGILPTGYIYPKEQRALRDLLRRRSFLVRQRTANLLSLKNLYSRETGAQVPTKDLKRLTAEQVADQFTNPLIAQSITCGVNISDALKTEIVSLEKTILAQARQHPEYVLLESIPGIGQTLAMTILYETGSLSRFPDAGHFCSYCRCVPSQHLSNNKVKGKGNTRNGNPYLSWAFMEAAHFAIRFEPLAKKYYERKKARTNPLVALRAVAHKIARACFYVMRDQVPFQAAQAFG

SEQ ID NO: 419513 - protein, 415 aa, unidentified
MSNYCGVDWAEGHHDIAIVDREGKLVSKKRIGDDPTGFAELTQLLADAGDAEGHPIPVAIETPRGLMVAALRASGRPVFAINPMAVARYRERHSVARAKSDHADAMTLANILRVDAHLRRVMPADSELAQAIAVLARAQQDAVWRRTKAGNELRSLLREYYPAFLATFAVKSATNLAKPEARAVLALAPTPALAAKLTKTRVAAALRRAGRQRGIDQLATQIVEGLKTTQLRQPGPVEQAMGRQALALVAMLDAACAGADDLEQAAAEEFRKHPDYTVITSFPGLADLTGSRMLAEIGDDRKRFADARALKAYAGSAPVTRASGKSISISHRRIKNDRLAAVGWVWGTTMVVLPGPGQQHYRRRREHGDRHAPAIRHLFNKMLGQLYHCLQTHQPYDPAKAFGDPVPEPQNHAAA

SEQ ID NO: 419514 - protein, 343 aa, unidentified
MQITTVGLDLAKHVFQVHGIDERGVAVIRKRLRRAEVLRFFAGLNPCLVGMEACATAHHWGRELTKLGHTVKLIPPAYVKPYVRRGKNDAADAEAICEAVGRPNMRFVPLKGVDQQAVLMLHRTRALLVAQRTMLANALRAHLAEFGIIVAQGIGRIGGLIEAIFSKGEQACELPPLARIALEPLALQFLQLQPRIKTIEAELLAWHRTNQESRRLETIPGVGFMTATAIAATVSDASQFRSGREFAAWLGLAPRQNSSGGKERLGRVSKMGNRYLRSLLFVGATAVIRFARSKASARTAWINALLARKPAKVAAVALANKMARITWAVLARKEAYRAPALPA

SEQ ID NO: 419515 - protein, 344 aa, unidentified
MSNLDTCGIEISAKELVVRLRRGEDLEPLRNFTNTPEGHLAILRYLRRAGRVVRVCMESTGLYGLDLALALSGQEGIEVMVANPRAVRHFAQAMMKRSKNDQIDAGVLEQFAAHMPFRSWQRPSPTALALHALARRLRELVEMQTAEKNRQHAAGLSQAIPAVVRRDLARSLRAQERAIERLTRQARKLIAQDPQLTERFELLDSVPGIGETSAVQLLGELGALAPDLDARQWVAYAGLDPREYTSGTSVHKKPSISKAGNKHLRHALFMPALVAVQHDPHLRAFYQHLLARGKVKMQALVAVMRKLLHALHAMFKTHQRYDGSKLFRLNSTPAQEVPNALVAS

SEQ ID NO: 419516 - protein, 337 aa, unidentified
MEVYAGLDLHSTNTYVAMIDGENNVLYKQRHRNDVPAILSALDPFRKDIQGVVVESTYNWYWLVDALKEAGYQVHLANVSAIKQYEGLKQVDDRRSSLWLANLLRLNILPTGYIYPKEERPTRDLLRKRLQLVRNRTSHVVSVKNILARNLGVRMKSNDIKKLKASEVSALFPDKEMRLMIMSSVGLIQHCQEEIDAIEKLIAKKVKIRKEFAKLLTVPGVGEILGLTIMLEVGHIDRFPTVGDYSSYCRCIRSIRTSNGKVTGYGNSKNGNKYLAWAYVEAANSARRWHETIRSFYERKKAKTNKVVAIKTVSHKLARASYYVMRDAVDYDEARFA

SEQ ID NO: 419517 - protein, 460 aa, unidentified
MARRKPSVEAFPVINSHAAGIDIHAARHWVSVPPGSAQPRSGESEELPPEVRVFDTCTADLEAIADWLKECGVTTIALESTGVYWIPLFELLERRGFTVLLVDPRQTHQISGRPKSDPLDCQWIRRLHSCGLLTGSFRPGDEIVVLRAYLRQRQRIIADAARQVQHIQKALEEMNVKLTEVVTDVLGLTGLKIIKAILAGERNAKKLARFRHEKCKRSEAEMARALQGNWRDEHLFALQQAMELHELYQRMLTQCDQKIITCLKSFADKSGGVPLPPKPRHHGRQRNDPRFDARSLLYRLSGADLTVIEGIGEGTSLVILSEIGPDVSKFPSEKHFASWLGLCPQHKGSGGKIKSRHVRRGAHRAGKAFRLAAQGCQNAKNAMGAFYRRIRSRCGGPKAVLATARKIAERVYRLLKYGREYVRRDAAAYEEKYKQKMIKGLTRRAAELGYRLEPTGQSSP

SEQ ID NO: 419518 - protein, 365 aa, unidentified
MQKISTMQTSEENILNGQLTIGLDLGDRFSSYCILDEVGKILREQKVPTTPEEMKQTFGRMVRSRIAMETGTHSPWVSRLLTGLGHEVIVAHAQRVRLIVKSRRKDDRLDARTLARLARIDPELLSPVQHRSAEAQIHLTEIRARAGLVSARTALVNAARGLVKSYGERLRKCGTQQFRQEITSGLSTELREALEPLVREVESLNERIKEYDRRIERMAKETYPEVELLKQVKGVGDLIALAYVLTIEDPHRFRKSRDAGCFVGLQPGRRDSGESAPQMHISKEGDEYLRKLLVQGAHYILGPFGEDSDLRRWGKKLAERGGKNAKKRAVVAVARKLAVLLHRLWVSGEAYEPLRNSQKAMSTAA

SEQ ID NO: 419519 - protein, 413 aa, unidentified
MPYTIAGIDVHKKVLMVVVVADMSAPEAKQQFERRRFGATTSELQALAAWLQQRGVQEVVMESTAQYWKPVWLALEPHLQLHLAQAQSNRAPGGRKSDFRDAERLVRRLVADELFLSYVPEPEQRIWRTLTRSKVQLVRERARLQNQIEALLEEGRIKLSSVVSDLLGASGQRILHALADGKHDAPSLAKLGDPRLRCSQQELADALNGDLAPMHCEILKLFLKRVELVDEQIVKLNQLAAEQLRTHQDAVKRLAAVPGLGADSAQQILAEIGPQAQAFPSSEQLCSWVGVCPGRNESAEHNRSGRCAKGNRYLRRILCQGAQAAVKKNGSYLQALFRRLMPRLGYLKAIWAIAHRLCQIIWNILHQGAEFIEHGQLGTPEQQKRRTRRCLAQLRKLGYTVQLNPIASASVAG

SEQ ID NO: 419520 - protein, 348 aa, unidentified
MDHIGIDVHKRESQIYILAEEGEIIEPRIRTEPERFAAVLGSRPRARMLIEASTDSEWVARCLEALGHEVIVADPNFAPMYTTRARKVKTDRRDARALAEACLLGAYRPAHRLSDPQRHVRGRLGVRDALVHTRTRYISVIRALLRQHGYRVPSGSADRFIDRVRRLPLPGRVRSVIAPLLAVMGPLNQQLAYSDATIERLAIQDPRVPRLRSVPGVGPITAAAFLAAVDDAQRFHHAHQLEAYLGLVPREYSSGETQRRGPITKAGHSRPRWLLIQAARSILRCRPPAAEALWTWALRIAARRGKHVAVVALARRLAGILYVLLRDGTVYVPRRPAALPDSVVALSA

SEQ ID NO: 419521 - protein, 423 aa, unidentified
MKLTYPICCGVDVHKTFLVATIITSEYVMPHYRQKRFSTFYSGLVAFKKWLLENNCKDVCMESTGKYWVPVWNVLEDSVHVVIANPKWVSAVKGNKDDKKDSKWIGDLFRMGLVPGSYIPSKDIRILREFTRYRSKLVSMRSSEKNRFQNAFTVCNLTLDAVVSDMFGKSATDIENYLLDTDIVDPAQCVSLLRGSLKKKSSDVVEAVSGFNMTPEQKERARIVQGHFADIDHRIAQLDEVIGNLVAEYEGQISLLCTIPGIDRRIAITILSEMGTDMTKFGSSKRLCNWAGLTPASNQSAGKKKSVRISRAGVYLKPALVEAAHAAVKATEKQSYYRIKFERLMKRRGKKRAIIAIARMILTAIYAMLSTGEVFNPCDLDKFDMPEELKKKRTLASAKEAVRLLVSLGVVSAGSISLDALAG

SEQ ID NO: 419522 - protein, 388 aa, unidentified
MIYVGIDIAKLNHFAAAVSSDGEILIEPFKFTNDYDGFYLLLSKLAPLDQNSIIIGLESTAHYGDNLVRFLISKDFKVCVLNPIQTSFMRKNNVRKTKTDKVDTFVIAKTLMMQDSLRFLTLEDLDYLELKELGRFRQKLVKQRTRLKIQLTSYVDQVFPELQYFFKSGLHQHSVYALLKEAPTPNAIASMHMTHLAHILEVASHGHFGKDKARDLRVLAQKSVGVNDSSLSIQITHTIEQIELLDSQLFHTELEMANLVTCLHSVIMTIPGIGFINGGMILGEIGDIHHFSEPKKLLAFAGLDPSVHQSGNFQAQRTRMSKRGSRVLRYALINAAHNVVKNNATFKAYYDAKRAEGRTHYNALGHCAGKLVRVIWKMLTDEVEFNLE

SEQ ID NO: 419523 - protein, 321 aa, unidentified
MQTIPVTVYAGVDVAKATLQLHLQGRQAEFSNQAAGLVQLCQQLKTIPHIHVVCEATGGYERLLVQAMHQAQIPVSVTNPAQVRAAAQAQGQRAKTDRIDAALLTDYGQRYQPKPTSPTTASQDQLVALTQWLMQLVQAQALAKTQAEHHEAAFVCGRHTKLMAHYQSQIVAVEKQIRALLAQDAQLQQRVDCLDEIKGVGARTAWLVLAHMPELGQINRQEVAALAGLAPWTRESGTMKGMRCIGGGRPEVRLALYMAALSAARCNSVLKPFYQRLRAKEKPAKVALTAVMRRLLVYLNHQLKALQATQTDTKLQNAKIP

SEQ ID NO: 419524 - protein, 343 aa, unidentified
MDHFAGLDVSVKETSVCIVDETGKIVREVKVASEPDALVEVLTSPSYHFKRIGLEAGPLSQWLYNALAEAGLPVICVETRHMRAVLKAQINKTDRNDARGMAQMMRVGLYRPVHVKTLRSQKLRMLLTHRKLLQSKAIAIDNDLRGTLRNFGLKVGMVGTAKFEARIKELVENLPDLAMLVEPLLVVRRVLREQIGVLHRRLLAIVRDDDVCRRLMTVPGVGPVVALTYRATVDVPARFKNSKAVGAVFGLTPSRHQSGESDRPGSVSRCGDEMMRMMLYEAAQTMLVVSTKWSWLKAWAMKIARHRGMKKAIVALARRLAVIMHRIWVDGTEFQWTREVTAA

SEQ ID NO: 419525 - protein, 343 aa, unidentified
MEQVTIIGVDLAKNVFQVHGASDDGSVAFRKKLTRPQFERFMREVDPCLVAMEACSGAHYWARELAAVGHEVRLIAPRYVKPFLKRQKNDAADAEAIAEAALRPTMRFVEPKSAEQQARAIVFRTREQFVSQRTDLVNALRSHLYEFGYSAPQGIQYLSRLAEVVEEKGTDLPDPARYACRLLLEQIATLTEQIKALQNKVAEISVKTGVSRQLQTMPGVGPIGALAIETFAPPMEQFRRGRDFAAWLGLVPRQHSSGGKQVLGKVTKMGQRDIRRLLISGAMTVIVACKRFGKHQGTWVARMLEKKPPMLVAVALANKMARGIWAMITKGQDYREPSVKVMA

SEQ ID NO: 419526 - protein, 341 aa, unidentified
MQAITVGLDIAKSVFQVHGVDADGQVVIRRQLKRRYVLAFFEKLAPCVIGIEACASSHHWSRQLQALGHTVRLMPPAYVKPYVKRQKNDATDAEAICEAVGRANMRFVPTKTPEQQSGLVLHRTRHLFIRQQTSVINAIRAHCAEFGIVAPVGRCGVEELLCGIANEKRVPELARACLLALGAQLRRIKEQILEFDRMITAWHRGCETSRRLDEIPGVGPALATAVVASIADPRAFRSGRDFSAWIGLVPKQSSSGGKPKLGSISKQGDRYLRGLFTAGALAVIRYAKIRGTGHRPWLTALLARRPIKVAAIALANKIARMVWAMMARGERYREPVALVAY

SEQ ID NO: 419527 - protein, 346 aa, unidentified
MHYVGMDTHITTLDFAVVDEGGRLVKAHSVATSVNGFIGFIKTVPAPRIIYMEEGTLAAWALETCVRFGEKLVIADPKKNRWIGSSGQKDDPLDALKLAQLGRGGYIKEIHHPVGQRRRFRELMIAYHDTVRSTTRIKNKIKAKFRQNGIQCTGVTVYSETYREEWEEKLPQETTVLLILDGLWRQLKQSEQTEKELLAAAKALAKQYPEIKHFEAIPGIGFISAATISAILETPYRFADKRKVWMYAGLGIMTRSSGGKTYSEKLSTDYNRLLKYTLKQAAEVAVRSEDNPFRRKYLDMTLLHTIAPHLAKLTIARDMLATMWAMWRKGEKYNPEIREKAAYQQI

SEQ ID NO: 419528 - protein, 350 aa, unidentified
MENILACCAGLDVHKESVEACVRQIEPSGRVHSETRHWGTMTRDLVAMADWLAAEGVTHVAMESTGVFWKPIFNILEGHFTVLLVNARHLKQVPGRKSDVRDCQWIAQLLQCGLLQGSFIPPRPQRELRDLTRHRTQLVEEKTRTINRIQKVLEDANIKLASVATDVMGVSGRAMIQRLMEGETDPHKLADLAQRQLRGKIPELEKALEGKLTDHHRFLLKLLWKELAQQEELIAELDAKIEEHTRPFAAEIGRLDAIPGVDQRVARVLLAEVGADIKPFPSDQHLSSRAGMCPGNEESAGKRRRRRITPGNRWLKKTLAQAAWAASRTKNTYLASQYRRVAVTAGGSAP

SEQ ID NO: 419529 - protein, 429 aa, unidentified
MTRISVGVDVSKNRSTVCIMDQDGKFIMRPFLVWHSTEELDFLADTLKRLNGEVRVIMESTSIYQYPIALHLKEKGIFISIVNAYKVKKFANTDFIGGKTDKKDSRTIASYGISYWDKLVEWQIPKDTYFNLDLLNRTYMNAKKHRQIILQELQHYIDCAMPGMDKELHSLNLSTKKDFMLDFVEKFWHRDEIVNMTEAEFTEVFTAWAKEKGYRPGKGKAAKIYAIAKSCIPYYPANPTVKTILQCIVDKLSGVNSTLVTIVTQMIEEAKKLPEYQIVREMPGVGDPLAARFFGSAGDIRRFKNSKALVAYAGIDSPPDESGDFSSTHRHITKKGSKVFRDTGYEIMMALRAQKRTWEKVRKNPEVYDYMLKKEAEGKPRKVAKIAALNKFLRIVYARIKELYDNMALAERAKAKTKSKTKAKTKATA

SEQ ID NO: 419530 - protein, 309 aa, unidentified
MSSWVGIDVSKNTLAVWVRPSSVNFIVCNSSEGHQALLLNLAEIQVERVLLEATGGYERAVMGCLAQAGHLVVRINPRRARAFAQAMGKLVKTDPVDACVLAHLAQVIEPGACQPVSLARDELQELVRRREQVVKLRDDERRRLTLARSGVVQESLQTNISQLNEQIARLNSAIEAAAQRTDNQLVKQLGAIAGIGPVTVASLLAYLPELGQLNRRQIAALAGLAPYNNDSGQHSGKRCIKGGRASIRRVLYMATRSVIRCHSSFGARYASLRARGKCAKVALVACMRVLLIRLNAMVRDHSSWRAEAV

SEQ ID NO: 419531 - protein, 362 aa, unidentified
MSDGSTENIEMTAGLDLGDQYSYLYVLDTESGELVEEGRLRTTPEGLLRRFDSERKLKVAIEVGTHSTWVSRILEGCGHEVLVANPRKTRLIYAGKRKTDKLDAQKLARLARADPELLYPVGHRGEESQAHLALIHSRDALVRSRTQLINHVRGTVKSFGARLPKCSAESFHRKAADALPSKLAETLEEVVETIGSLTETIRDYERRIERLCEQSYPQETGLLRQVPGVGAITSLSFVLTLEDPDRFEKSRSVGAYLGLVPGKDQSGQSDPGRPISGEGDEMLRRLLVGSAHYILGPFGPDSDLRRHGEKIALRGGKNAKKRAVVAVARKLSVLLHRLWITGEAYDPLRNARSAGTLGEEAA

SEQ ID NO: 419532 - protein, 323 aa, unidentified
MTAILGIDIAKQTFDATLIDGQGEKRRRHFDNTGRGHEQLHQWVQRYSQGEVHVCMESTSIYWEALAEYLHQTGYLVSVVNPARIKGYAMSQLRRSKTDPLDGDIIADFCRTQKPAAWEPPTAEQKKLRALMRHLESLKKSRTQQSNRLSTCGDEEVRASILTLLQAIDGEMAAMKQRLDRFFDDHPDLKAKLDLLVSVTGFGRQTSTHIMAEMYDLEQYENGKAAAADAGITTSHYSSGTSVRRRPKMSRMGKASIRSALYFPAITAIRHNPVVRRLAERLEAKGKHKSVIRVAAMRKLMNLAYGVLKHGQPFDPNYGLAVG

SEQ ID NO: 419533 - protein, 349 aa, unidentified
MKKNHQSKIDQEETIYERCAGIDVHKKIITVCLRVGRKTQVKEFGTLTCELREMAMWLKENDVQMIAMESTGSYWKPLYNVFEQEGIPSIVVNAGHMKSVPGRKTDVKDAEWIAKLLSQGLLKASFIPDREQRELRDLTRFRKSQIEERSRTLNRLQKMLEGANIKLSSWVSSIDGKSATQLLELVIGKEEFTVQEVEKLRHLNMKASSDELFKSLEGVVTPIQRELFAHIMNVIKEQTAQIEKTEMLISGYMTRAYQEATDAIDAIPGIGPISAQQIIAEIGIDMNRFPSAAHLSNWAGLCPGNNESAGVRKSGKTNYANKTLKSTLTQCAQAVKKTKIAFSMLNISV

SEQ ID NO: 419534 - protein, 346 aa, unidentified
MEQYVGLDVSLKMTAICIVDRTGKIEREGVVTSDPETIAAFVKSHAPHVARVGLETGATSTWLWTELNKMELPVICIDARHAKAALKMQINKSDRNGAVGIARIMQCGWYKEVRVKDRNSHAIKALLVGRALLVKIKRDLENQIRGVLKNLGLVIGQAKMNVFAVRAAELIQDRPELVAAVEPLLKVREAVEKQIADLDRKVMRLARNDSQVRRFMTAPGIGPITALCYLATIDDPTRFKRSRSVGAYVGLTSRRYASGEVDWTGRISKCGDPMLRSYLYEAAGVLLTRVAKWSALKAWGMRVAKRSGLRKAKVAVARKLAVILHRMWVDGTEFKWSSKEVATQPA

SEQ ID NO: 419535 - protein, 343 aa, unidentified
MIQYVGLDVSMKETKLHVLDEAGKRVWRGRCASEPAAIAAAIRRYAPAAVRVGLETGPLTTWLWTELTAEGLPMVCLDARHAKKALDMKVNKTDANDAEGLAHLVRAGWYREVRVKGRGAMLTKALLGARSHLLSISLSLENQIRGLLKTFGRIVPKGAGGLFEKNVRALITDDAEIAAVIMPLVQARQMTRSKCAALDSRLIAAVRGNATHRMLMTMPGIGPITAVAYVAALERPDTFKRSRAVGAWLGLTPRRFQSGEIDYDGHISRRGDGQLRALLYEAAAVLLTRVRMESGLRRWGLMLRKRLGFKRAATALARKMAVILHAMWKSGTPFNPTLGAAAS

SEQ ID NO: 419536 - protein, 341 aa, unidentified
MQITTIGLDIAKNVFQVHCIDAAEKVVVRKQLRRNQVIGFFQDLPPCLVGLEACATSHYWARELARLGHEVRLMPAKDVKAYIKRNKNDAADAAAICEAVRRPTMRFVQVKSADQQAHLMQHRARDLLMHQRTQLINATRSHLAELGIIAPQGREGVKELLAIIANEADTQLPNDARASLIVLAAQLQALQTTIGAIEKRIVVQHRANKESKRIQTVPGIGVIGASAIAATVPNPKIFRSGRDFAAWIGLVPRQMSTGGKPKLGPISKQGDRYLRRLLVVGAVSVLRRAKLHPGKFPWITQMLARRPFKVVAVALANKMARVAWALMVSGKTCRAAWFAAA

SEQ ID NO: 419537 - protein, 500 aa, unidentified
MRQIQNQVSGEGRRKRHNGGSSRGVRLAPSPDLYVAPSVADKQPLARKQVGGETRRIRQKEGSSSVVSLALSATQLRSSNGIKRRSPRIYKHEREEHEGRATRPVSGRTRMRFVGIDIGSDRHVVAAVNLDGKVVLKPSTFTEDAAGHSRLIKALGLASECLVAMEATGSYWQNIFVSLEEAGFKVALVNPIRTNRFAQSDLARTKTDALDAIGIARFAQQKRPEPTRLPDEATRTLRDLVRLRERVVQDIGDSVRRLHRLVHLGFPEFKQYVRTLESELATSVLTAFPSASAYEGATKQLAELVYDGRRVVGLERAKKLVAAARVSVGKHHGEGHRTQVLYACEDLCRGRSRLRELDARIEELLHRHEVGRLLLSIDGVREQTAARLVSEIGDFKRFGSANKLAAYVGCIPALKHSGKSRPSAQMSHLGNARLRHALWMPILALVRKNAWLGAYYRRLVAGGKKHKVAMVASMRKFLHAVYSIALSRKPFVLKQQESES

SEQ ID NO: 419538 - protein, 314 aa, unidentified
MPTLLRYLGVDVSKDTLVVACQRRRWEFANTTEGHRQFIARIQKLPGLGHVVCESTGSYHLSMCLALQEAGLAVTVANAARIRYFGLSEGIIAKNDPLDAELIERFANAKQPPADPPLCHEQLTLNESVTHRQQLVEMIKGLRTYRQQVLHAAVGTEIDRSIAVLEKRLAVLDRKLRAQVEAHPEWKRKLALLMETKGIGFITAVSLLARMPELGTLNRGQCAALGGLAPYDEDSGKHQGKRSIRGGRKEVRCALYMAALSAINYNPVLKTFYQRLLAQKKLFKVAITAVMRKLLIHLNTVLKNTAPPPLTTTP

SEQ ID NO: 419539 - protein, 457 aa, unidentified
MRQRGRRTKGMEEAHPFAGMSQVHENAAGVDIGAEEIVVCVAGDESTQIVKAFGNYTVDLQNLGRWLFEHQVKTVAMESTGVYWIPLFEELERQGFECLLISSRSLRRVSGRKSDIQDAQWIQTLHSYGLLESSFRPQGELVVLRTLLRHRAQLLEHRAPHILQMQKALLQMNVQLSQALSDVTGETGLNIIRAIVSGERDPQKLAALRDRNCKKSVEEIGKALTGTWRAEHLFIVQQSLELYDFYTQQVEVCDAEIDRMYALTRPAWEAGEVQPLTTRKRSSHSKNAPQNTDEIRKHLKRISGVDLSVVDGFGVSLAQTVIMEVGTDMGKFPSEKHFCSWLGLAPKHEISGAKVLKNRTLKTKNRAGQAFRMAAQSVKRADCVFGSLYRRLKGRLDKAQATVATAHAIARVVYRMLKYKVEYEQINVEEYEQKYKDQQIKYIKKKAEKLGFQLVPT

SEQ ID NO: 419540 - protein, 387 aa, unidentified
MPVSAHRSQGPAAIRTDLGAIFVSLELSQSKWVITSLSPSGGGKMSKHAVAAGEVAGMLGCFAELKRKARARTGRCFPIIVVQEAGLDGFWIHRVLEAEGIESHVVDPASIAISRRRRRAKTDRIDGEALIRALLAYQRGEPRVCAMVRVPTPEEEDRRRLSRERQALTSERIRHVNRIKGLLFSQGVSDYEPLRRDRRKQLEERKTGDGRPLPAHLKAQIGRELDRLELLLEQIKTIEAARDAMLSATQVVSPAPAMLLTLKGIGPEFTAVLWSEGLSRHFDNRRQVAAYAGLAQAPWQSGSVDHDQGVSKSGNPRLRTTMIQMAWLWVRHQPNAALTLWFRDRVKQNGGRLKKSTIVALARKLLVALWKYVNAGVVIEGAVIKTA

SEQ ID NO: 419541 - protein, 334 aa, unidentified
MENIALIGIDLGKNSFHIHCQDRRGKAVYRKKFTRPKLIEFLATCPATTIAMEACGGSHFMARKLEELGHSPKLISPQFVRPFVKSNKNDFVDAEAICEAASRPSMRFVQPRTESQQAMRALHRVRESLVQDKVKTTNQMHAFLLEFGIIVPRGAAVISRLSTILEDNSLPLYLSQLLLKLQQHYHYLVEQIKDLESQLKRKLDEDEVGQRLLSIPCVGTLTASTISTEIGDGKQYASSRDFAAATGLVPRQYSTGGRTTLLGISKRGNKKIRTLLVQCARVFIQKLEHQSGKLADWVRDLLCRKSNFVVTCALANKLARIAWALTARQQTYVA

SEQ ID NO: 419542 - protein, 406 aa, unidentified
MNAVGIDVSKGTSTVAIMQPFGVVVQSPFKVGHTDSELIALAKQLKKLPGETKVIMEYTGAYYQPIAYILHEEGLFVSAVHAQVIHNYGNDTIRKVKTDSADAVKIANYGISAWLKLRQWSPEEDTRRQLKFYSRQYSKYGKLRVMLVNNFIALTDQTFPGVNELFKSPPRKSDGHQKWLDFAMEFWHCECVCGSTPASFEKRYQKWCKKAGYRFSKDKAWDVFVSACGHCCVLPKDACTKLLVQQSIRQLNAVSETIAVIAREMKEIAEQLPEWPIVSAFYGVGEVLGPQLMAEIGDVYRFKKKGSLVCFAGLEAPPYSSGKFESKERAISKQGSPHLRKTLFQVMTTILQNKPADDPIYQFLDRKRAEKKHYYSYMTAGCAKFLRIYYARVKEYLDKQEAGAEG

SEQ ID NO: 419543 - protein, 334 aa, unidentified
MTMEMLAIDLGKQSFHLHGIDSDGVVISRKVSRAKLENAVTELAPAVVAMEACASAHHWGRQISAAGRQVRLINPRFVKAFVRGSKNDAIDAEAIYDAASRPTMRFVPVKTLEQQDLQSLHRVRERLVVQRTSLINHARGLLAEYGVVLPRGPWRFRQQAPAAVAEANLSELARELFAELLDQLTDVEARLAKLDAKLVSICREHDACRRLAALPGVGPVIATALVAAVDDGRHFRSGRELAAWIGLVPRQYTTGGKPRLGGIGRRANHYVRRQLIHGARAVISRLAAKDDRRSVWLKGIVARAGFNKALVALANKTARMAWVLLARKEEYRSA

SEQ ID NO: 419544 - protein, 347 aa, unidentified
MNDHRVYVIGIDLGKNWFHLVANDERGTELFRKKLNRGQLAEFAVTAPRCLIAMEACPGSQFWGRRFQQAGHELRIIPAQFVKPYLKSNKNDFNDAQAIAEAASRGSMRCVPLKTTDQIELQALHRVRQRFIVERTAVVNQMRALLLEHGIVIPVGRALFARRLPAVLADPQSGLSPRLSQIISRLRQRWLALDEEIDTASAEITQIARESELCRRVCTVPGVGPVVSTALIVAVGNGAAFKRARDMSAWLGLVPKQYSTGGKSNLGGISKRGNAYLRMMVIQGARALMIHMKRDQSRMGLWLREVEQRSHPHVALIALANKIVRICWKVLTSQQSYRPFVEVPATD

SEQ ID NO: 419545 - protein, 427 aa, unidentified
MNCTQNRKIEQVTDQTLVIGMDIAKQKHYAAIVDARGRVLKKSFPVFQSRFGFEQFYALIQEAMREFGKTEVIVGIEPTGHYWLNLAYFLEEKGIPLVMVNPMHVKRSKELDDNLPTKHDAKDALVIARLVKDGRFSYPRILHEVEAELRAGSTFRESLIKERNAVHNQMIRWLDRYFPEFVQVFPSFGKMALVVLEKTPFPMDIASQTIEGLMERYRQSEALKCPQKPKVQKLLEMARHSIGITEGQQMARIEIATLVRRYRQLEQEIAALTEELTALAQTTVEYEWLQTIPGLGEATIIELLSEIGSFHQYQDPRQLIKLAGLTLKEHSSGQHKGQKRISKRGRRRLRALLFRVMIPLIRHNKAFRTLHEYYTTRPVNPLRKKQSIVVLCGKLLKILYAVCVKQQAFDEERMMQDIFSSTQAQAA

SEQ ID NO: 419546 - protein, 428 aa, unidentified
MNCNTQNAKIASITEKTLIVGIDVGSETHYARAFDWRNYEYSKKPLEFSNTEAGFLTFKAWVEDIAEKHGKTAVIPGMEPTGHYWFALGKFLQDNGMKPVHVNPHHVKKSKELDDNNPNKNDRKDPKTIAALVNEGRFSYPYIPTGIYAEIRSLSNLRFQTQEELTRIKNRIARWFSIYFPEYKDVYGDLKAVSGRMVLKVAPLPEDIRKLGAEGVNRIWRDAKLRGAGMKRAKTLVSAAEHSVGSKEAPEAARIELKNLLNDMEVYASRLEELLQDIEEKLKEIPYVDKLMSIKGIGLVTVSGFIAEVGDIGRFDNPKQLQKLAGYAIVANDSGKHNGESRISYRGRKRLRYVLYEAAISLIGKNAEFREIHEYYRTRKENPLKKMQSVVAVACKILRIFYTILTKGVDYDAEKLMSDIRRPKIQAA

SEQ ID NO: 419547 - protein, 414 aa, unidentified
MEVLYPRCAGLDVHKDVVVACVRIAQVDGKALQEVRSFATITSELCELADWLNEHAVTHVVMEASGVYWKPVWHVLEETLELVLANAQHVKNVPGRKSDVNDAMWLADLLAHGLVRGSFVPPTHIQEVRDLSRTRKQLTREIIQHTNRIQKVLEDANIKLASAISNVLGKSGRSILEAVIAGETNPEKLVELCSGRLKASRKELIEALRGRVTAHHRFLLKLHLAQVDQLTSGMRELEGRMGEVLAPFQEHVDNLTTIPGVNDTTARALAGEIGLDMSRFPTARHLISWAGLCPKLDESAGKHRSVRIRKGAQWLKPALVSAAWAAIRTKGSYLRAQFARIKARRGAKKAIIAVAASMLTAAFHIIRDRVVYQDLGADHFTKRDPEKAAKRLLKRLEGLGYAVEVRPANAVVSI

SEQ ID NO: 419548 - protein, 332 aa, unidentified
MKGNSRMSRIQGKTSSLQLATHQVYVGIDVSKSHLDVYIHPCGIARRVRNDKTGIAALVRVLRPHTPETVVVEATGRYHRLCHRHLHNAGFCVAVMNPYRTRRFSDVLGQLAKTDKIDARMLAQFGAMVQPVASSPPAPAVAILSELLTARRQTGTEKTALQNQLSEAESNLVKRQIRARLKMCERHQTVLEKEIRTTIQQHSELKFRFDILTSIPGIALITAATLIAELDELGAANASQIAALVGVAPMNCDSGVWRGQRRIRGGRQNVRNALYMAALTASRASPDMAQFYNRLRNNGKPFKVAITAVMRKLAIIANTLITENRKWSPIHP

SEQ ID NO: 419549 - protein, 331 aa, unidentified
MINRTAQFAGIDVGAEELVLVVRKNATSMKAQKFANTPADRTRLVVKLVKLPGISVCLEATGAYHLELAVALHDAGVRLNVVNPKAAHNFAKALMKHSKTDAIDADTLAQFAERMPFTAWVRPTPQAFTVRSFARRINALTRQKAMTKNQLHALSFGPDLPKAVLDDAKLAIAQLEKRIACLSSKAQAFIGKHEDLKRVFALLLGIKGIAETSAIALMGELLLLPKGLTHKQWVRYAGLDPRAFDSGKSVHKAPRLSKAGNRQIRHALYMPALSAKQHDPYVKAFFQHLIEKGKKPLQALCAVMRKLLHAVHGMLRDNQAFDNTRFYATAA

SEQ ID NO: 419550 - protein, 312 aa, unidentified
MKASIFVGIDVAKDHLDIAIRPDGKTWTIQNNDEGIKELVLQIHTINPELIVMEATGGLETNVASALALAGLPVAVVNPRQVRDFAKSTGKLAKTDTLDAQVLAHFAEAIHPEPRFMSDEQSRLLKALNVRRRQIIEMCVSEKNRLRLCNKATREGIMDHIAWLEESLKKLDEELAQAIQTSPIWREKDKLLKSVPGIGKITSSVLLASLPELGSLNRKCIAALVGVAPFNRDSGTMRGRRSIWGGREHVRCALYMAALSASRTNPVIKIFYDRLIKAGKTPKVALTACMRKILVIINSMIRYSTPWRYQTT

SEQ ID NO: 419551 - protein, 336 aa, unidentified
MEITTIGLDLAKQVFQIHGVNEAGDVVVKRRLRRAQVITYFASLPACLIGMEACATAHFWARELRSLGHEVRLMPPQYVKAYVKRGKNDAADAAAICEAVTRPSMRFVPVKTEEQQSALTMHRVRELLVRQRTQLINALRGHLAEFGLVVAQGPWNVPRLLASMQEDRRVPELARQVLELLAAQLDEVGQRIAEVDARIMAWHKAHPVSRRLATIPGIGPLIATAIAATVPDPDAFRGGREFAAWLGLVPRQRSTGGKQRLGRISRLGDKYIRQLLIVGAQTVLLRSKAARSNAWIQSLLARRPRLVVAVALANKMARISWAVMAQGQNYRQAVPA

SEQ ID NO: 419552 - protein, 388 aa, unidentified
MKTVADRPEAATAIRTDLGAIFVSLELSRSTWLITSLSPDGGEKMSKHAVRGGDVAGLLERFAQLRKKARARTGKVFRFVVIQEAGLDGFWIDRVLRKEGIESHVVDPASIMTSRRRRRAKTDRIDGEALVRTLLAYKRGEPRVCAMVKAPTPEEEDRRRLCRERKVLIVERVRHVNRIKGLLFSQGISGYEPLRRDRRERLDTLQTGDGRLLPDHLKAQVRRELDRLELLLEQIKAVEAERDALLAVQQGAAPAPAAMLLSIKGVGPEFAAILWSEGLFRHFDNRRQVASYAGLAPTPWQSGSIDREQGVSKAGNPRLRTTLIQLAWLWLRHQPQSALTLWFEERVRRNGGRLKKTTIVALARKLLVALWKYVTAGVVIEGAVMNVA

SEQ ID NO: 419553 - protein, 437 aa, unidentified
MSNRLQAGLDIHQKQNVASFMTKGGEVMAPRHHFDNNWHGLQEFIETLVGILEAGQFEGVDIAGEATGLLWFHPFYHLSQTEKLASYDPHLYLFNPRTIKHFKKALAERDKADPKDADAVAERLRFGGRMPHQFTFDERYLPLQRLTRYRYHLSRTLARQKVYARMVPIYLKASDYTRKPMPFSDIFGATSRHILSEYATTDELATMPLDDLAEELSRVGRRRFSDATDNARRLKHAAAQSYPLAPCLAQPINVILESLLAHIRFLEKELKKLDSHIEAALVGVPGAPYLRSVQGLGLVYTSGLLAEIQNPARFMQGLKKDKNGNFRPKTQHDAQASLARFVGLWWPRGDSGEFQAEDRRMPKTGNHYGRYYFVEGANSLRRHNAEYAAYYQRKYDESLKHKHWRATVLAARKLIRLVFALLHDEEMYQPPEVRHNN

SEQ ID NO: 419554 - protein, 288 aa, unidentified
MFHFTTLFIGMDVHKESFSLCYYDMMANQFKHSTKVGPNVSYIVNYVNELRRLYGQDAEVLCGYEAGCLGFTLYHQLQAHGIPCIVMAPTTVMKEGSKRVKTDKKDAAQLAKALAFRSYRPVHIPTVEDEQVKEYIRMRTDHKVALKKIKQQILAFCLRHDFRYTEGSSNWTQKHVRWLRSLNPDGLYAEILTEYLLTYEKLVDQIERYDARIEQLGQSDSYQEKVSRLSCFIGIKTLTALSIVTEIGDFNRFATAQHFASYLGLTPSENSSGDKERRGAITKLGIAM

SEQ ID NO: 419555 - protein, 347 aa, unidentified
MRFYTKQHKFYCGIDLHTKKMYLCILDEAGEIRVHRNIKTDRAVFLSVIAPYREDLVVAVECMFTWYWIADLCAKEGIPFILGHALYMKAIHGGKAKNDKIDSHKIAALLRGGMMPMAYVYPERMRTTRDLLRRRNHFMRKRAELYAHIQNTRSQYNLDDFFGRIAKPQNREGIVERFEHPCVQKSMAVDLEMISVYDPLIAQLEGYIIKTAKHHNPIAYALLQTIPGVGRILGLVILYEIEHINRFPTVQDFVSYCRLVKCTKESNGKKYGASGKKIGNAHLKWAFSEAAALFLKGNEPGKRYLDRLTNKYGKAKALSILAHRMGRAVYFMLKNKEAFNQKKFLGL

SEQ ID NO: 419556 - protein, 315 aa, unidentified
MSHDSTITAGIDVAKDKLDLAVHDQAVRLTVGNDVRGWRQLVAALRSAQVRRGGLEATGGYERGIADHLRREGFEVRLLQPLQAKAFARLHLRRAKNDAIDAGLIAACTAMLDAPTDAPDPRLTLCADLLTFVEQIEEDIARCKTRLEHIRHPRLRRIVTADIARLKARAAAELRRIAAALRQFDDLAARLELVLSIPGIGERTAIAIVVRMPELGRVTREQAAALAGLAPFDADSGGHRGQRHIAGGRSRLRRSLYAAAFSAAFHWNPALKAFYARLTAAGKSHNAALVACARKLLIYANTVVQRGSPWQPKPE

SEQ ID NO: 419557 - protein, 331 aa, unidentified
MFPVGIDVSKNTLDLCMLYDGIKGRIKTRNIQNNRHSVENILHWLRLQHCSPEDVHVVMEATGVYHEQLATELHDAGFRVSLANPHRSREFARGMGIMTKTDKVDAYMLACYAFLKKPHRWEPPAPEIRYLGALLRRRDVLLGDALREENRLEKYLSTDTPADIISSCRRMAQLLREEISNIERQIKAHIKASPALRRDYTLLTSIKSVGPQLGMHMLIVLRSHNFVSAEQAAAFLGVVPIEKRSGTSVRRRPRMSKIGPPQLRAKLYMSALCGKIYNKRMRNIYDEMCLRGKPKMVAIGALMRKLVHWCYGVLKTGTVFNDEDLKPVLST

SEQ ID NO: 419558 - protein, 346 aa, unidentified
MRPNLFMEIDRVVSQCVGIDVSKGKLVATMCMFSQGEQAVYSKATEFDNDKTGFNQLVKWSRKEAVKGVPLRYVMEATGVYHEHLANHLVRIGCTAVVMMPTKAREFAYWEGMISKNDTIDSRALALVGCVKRSMRPWKPTNPLYRELRTMTRFSQDAKKLRTELKNHLEALEHSHEAERSVIKHYESLVASLDKRIEKNMENMKKKVASDEELNKRVENIMTAPSVGFLSAVTVIAETDGFALIQNRKRLTSYAGLDVRDSQSGTVNGVSRISKRGNSRIRAILYMPAVQCRLHNKHLKKAYDRIVAKHPDKKMIAVTAMERRLLLLIYALWKGDRPYSEDYDKE

SEQ ID NO: 419559 - protein, 331 aa, unidentified
MFPVGIDVSKNTLDLCMLYDGIKGRIKTRNIQNNRHSVENILRWLRLQHCSPEDVHVVMEATGVYHEQLATELHDAGFRVSLANPHRSREFARGMGIMTKTDKVDAYMLACYAFLKKPHRWEPPAPEIRYLGALLRRRDVLLGDALREENRLEKYLSTDTPADIISSCRRMAQLLREEISNIERQIKAHIKASPALRRDYTLLTSIKSVGPQLGMHMLIVLRSHNFVSAEQAAAFLGVVPIEKRSGTSVRRRLRMSKIGPPQLRAKLYMSALCGKIYNKRMRNIYDEMCLRGKPKMVAIGALMRKLVHWCYGVLKTGTFFNDEDLKPVLST

SEQ ID NO: 419560 - protein, 396 aa, unidentified
MAFKLFVGIDVSKEKFDVCCIDSTGEKLFRLSTDMVRSGFEELNKKLTKVAGSRGSVVIGMESTACYHIPLFSFLTSEGYSVVVINPLLISNYMKLQLRKTKTDKKDAQVIAQYLNEQREAYSQSSMRSDITDLRDLSRQRESLVDQMTALKVDIKRILSVTFPELERITNIFTKSMLRLLSQYPSASAIKSTRRTKIAKALIPGSYGKQTDESVDAIRNAAKTSIGIVSHTKEIVLKQKISILIQLEEHLQELSEILIEHCQSQMGENVEILTSMKGIGNNSATNFLVELGGGVEPYKSHKQVIAMAGIDPSIYQSGKHEGKGRISKRGNRHLRRVIWQMSTKVIMYNDLFKEYYLKRKEDGLPYKMAVLATAHKLIRVIFAMLSNKTYFKVRAS

SEQ ID NO: 419561 - protein, 411 aa, unidentified
MSEVDNTVEHGFDVFCGLDVGKSVHHACALDRAGKRLHDKPLPNDEAALTEVFTRLTTHGRTLVVVDQPASIGALAVAVARSLGIEVAYLPGLAMRRIADLHPGQGKTDARDAHVIADAARTMPHTLRRVGTDDETLAELTVLAGYDDDLAAQSTRLTNRLRDALLHVHPALERLLGPRMDRGGVLDLLTAAPTPQDLRDLGEAGIAEAMRPRSPRLAKTLPTKILAALDTQTVVVPGTTAFGRVIAGVAAQLREVRVERDTLAAELEELLEAHPLAGVLTSMPGLGFRTALKILTIVGDGAAFPTAGHLAAYAGLAPVTRRSGTSIKGETRSQRGNHALKSALFLSAFASLADPTSRAYYDRKRAEKKRHNAALICLARRRTDVIYAMLRDRRPYEPPSAPTPPPVAAAA

SEQ ID NO: 419562 - protein, 366 aa, unidentified
MSSVASPAGLVHVGMDTSKKTIMIATLWPGEQVPATERIANEEAAIRRFFGRLGDSSVLRSCYEAGPGGYDLYWLLESMGVACDVVAPSLIPKGGSDKVKTDRRDACRQARLLRAGELTAVRVPTRAEEAVRDLVRVRAALLADRKRAQQRLTAALMRHGCIWTQGSYWTAAHRAWIAAQRFGEPALAAAIAHYRGALDTRETELAAIEVALAPWALREPLAGPVARLGCYRGIAELNGLTLVSEIIDWRRFACARAFMSYTGLVPAEYSSGERTRRGHITKAGSEPVRTALTEAAWAYQHAPAIGATLRRRQAGADPGTLARSWKAQRRLYARYRALTGRGKAPAEAATAVARELAGFVWAEMTA

SEQ ID NO: 419563 - protein, 416 aa, unidentified
MKIVRPICCGMDVHKNIIVATIGITNKKTRITEYIQETFSTLNPDLLNLKQWLINHKCFDACMESTGKYWIPIFNILEDEINIYLTHPKYVKAIKGKKTDKKDSKWICDLFKHDLIKFSFIPPKEIRALREISRYRYKLVGMRSSERNRYQNCMTVSNIGIGSVFSDPFGKSAQAIMKEVLESDIIEDEKILKCVHGSCKNKDKILDSIKHCNIETDQRFKMNESMTHMEELQVHIDNCEIEMMKRAAPMFDQFMHITQLPGISTLSAILIISEIGVDMKQFESDKQLTCWAGLAPANNESANKKKSVRISKAGQYLKPLLVQCALGAIKDKEGYFGIKYSRIKKRRGHKKAIIAIARMMLVSIYHMILTGETFNPSDYESFRNPKPPIKQQDLTEESAIEFLKKSGFDVSKLTKP

SEQ ID NO: 419564 - protein, 324 aa, unidentified
MLTAGLEIGSRELVVCMSGTWSRFSNDAEGHRKLVRYLTKRGNVRVCLEATGNYHLDVALALHRHPRVQVQVLNPWVARRFAEARLQRAKTDRVDAAALAEYAARMPHEEWKAPSAAVLALRTITRRMQQLADRKSSEGSRLHAAAASEALPAVVVQSLHDDQAHTDEQLATLQREARAVVRSDAQLEQLLQLLLTIPGVGERSALYLLGELGPVGRDMSPRQLVAHAGLDPRPIESGSSIHRPRRISKRGNSRLRHILYMTALAAAHHDRHFGAFYALLLQRQKVKRAALVAVMRKQLHAICGVWRSGASFDGARLFPRLTPT

SEQ ID NO: 419565 - protein, 325 aa, unidentified
MQGKEASEQETRKCSAGIDVSKSCLDAHIRPAKESLRVANTAEGIRRLKRWLLRHKVTLVVVEATGKWHRDVYRSLSASQIAVAVVDPYRVRMFAKAHGIFAKTDRLDAEVLAMFAEMMAPSCRAPMPQALEALQELVTARDSAVAEHISLKNQLSTAEGSFLRRQLTKRIAQLAAHIKAIEKECMTQIKADEGLVRRFDILTSIPGVGGVVATTLIACLCELGSLTNKQIGALAGLAPVADDSGERQGARVIWGGRAAVRRMLYLAALSAAQHSSDMKAFYSRLLANGKAHKAALIAVARKIVLLANTLIAQNRAWLPIAPKNA

SEQ ID NO: 419566 - protein, 351 aa, unidentified
MQSKSQIRSIGIDLGKTTFHLVALGSRCQVVVRKKFSRSQLLVYTANLPSSLIGMEAGVGSHFLGRALREQGHEVRLMPAQFVRPFVKSNKNDYRDAEAIAEAVERENMRFVPIQTEDQIDLQALHRVRERLVSRRTSVINQIRAFLLERGISFAKGPARLRREIPEILENADEKLSTRMRRLLDFLWQEWKHLQLQIESLSEDLEKIANSDAACARLQQIPGVGPLVATAVVSAIGNGAAFHKGREFAAWLGLVPGQWSTGGKTKLLGISKRGNPYLRKMFIHGARAAVLRVKREGSYLGQWMGGLESRAARNVVIVATANKLARISWAVLSSGENYRPRPALAVASQTK

SEQ ID NO: 419567 - protein, 313 aa, unidentified
MSQNNPNILYVGLDVAKLSLQLHLAGRFHLLANDAKGHAQLLKRLRGHPPAHVVCEATGGYEQAVVRTLQAAGVPVSIVEAGRVRYFARAQGQRAKTDPIDAAVLSAYGTTFKPTATAPASPQQQQLADLAQRRRQLIQLLVSERNHAEHYTDAFRVRQSRQLVKALEKQITQCDEAITSLIAQDTELARKAERLKAIPGVGPVVAATMLAEMPELGKLTTQTAAALAGAAPYNRDSGGQTGVRRINGGRAAVRCALYMATLSAVRHDRILKEFYLRLRAAGKKPLVAMTACMRKLVVLMNRLLKNNDFQLAN

SEQ ID NO: 419568 - protein, 385 aa, unidentified
MANQNDLSRSLVAFEQDNTIIAVIEMSLNSWLVAGFVPGIERRPLKKLSCDEQMLLQLLYRWRDEAVKAERKITRMVVAFEAGRDGFWLARWLRSRGIEAYVIHPTSVAVSREHRRAKTDRLDTELLIRAFLGWLRGEPDHCSMAAIPNLQEEDAKRPTRERENLVGERTRIVNRMKACLIRFGIRNFNPILRRATERLNALCTPEGVSLPPNTLAELRRDMARLRFVMDQINEIEAARLRRLEQAPAEEPHAKVRLLARVIGVGLETADMLVHEILSRKLRDRRAVARYAGLTGAPDESGSKRREKGLAKAGNARVRRGMIQLAWRFLLFQKNSALSQWYRTRTESAGKKRKTMIVALARKLLIALWRLVTTGEVPAGVVLRAV

SEQ ID NO: 419569 - protein, 413 aa, unidentified
MDVLHSRCCGLDVHKSSISACILVQIAGRVQKHQRRFGAMTRDLQELANWLRQFEVTQLAMESSGVYWKPVWNILEGEFTVVLANAQHIKNVPGRKTDQKDAEWIAQLLQHGLLRPSYVPCEVIRDLRDLTRMRASLSQEASRISSRVQKVLEDANVKLSSVATNTLGKSGRAMLEEIIAGQNDPEYLASLALGHLRAKTPQLKLALEGKIRPHHCFLLRRLLDQLDFVEHEIDLLDERLEEIGRGRPELSQAVARWDSIPGIDRVAGWALLAEVGHNMAQFPTAEQLASWASLCPGNHESAGKRLGGATRKGSPWLRRMACQCAWAAARTKNTYLSAQFRRLAARRGNKRAVIAVAHSVVIIGYHLQKNQRNYEDLGGDYFDRIDSDGLKRYFIKRLEKLGHKVTLAPNKAA

SEQ ID NO: 419570 - protein, 318 aa, unidentified
MGGVNAAIEVGKQQLVVQLGSQGEQFSEANEPRAIKRIAKRLFQAGCERVLIEGGSYQSVLIAGLRAAELPVVIVNPRRVREFARSIGQLAKTDKIDARILALYGEQTQPPLRELPDEQSQALRALWVRREQLIEMLVMEKNRLEHTAEKAKAVRHNLCSHIDYLRKQVKQADNDLDREVRNSALWDKYEMLNSVPGVGPVLSVALLSDLPELGRLNRGEIAALAGVAPFNCDSGTLRGQRRIDGGRSRLRRVLYIATVAAVRCNPALKPFYLRLRAAGKPAKVALVAVARKLLTILNAMLKTKTAWRPPCPARPELT

SEQ ID NO: 419571 - protein, 403 aa, unidentified
MEGPLISLDVSKGKSNYRFFENGTDRKGKKGVIRHDIQGFDSIRDEAEKMEERLRIKPSVIFESTGVYSDVVEKYFTDKGFDVYVISPLLSASMRKEGVRPAKNDSLDTLSIAKVFYSKDDLRKCSENDKKAERLREMSYELDLMNRRIRPMKCQFLRLLDKVWPCLDEVSDYSSRFMLDFIIAFGHPENIKTVKGVLSVIRKSEMGTAGRKDKIAQDLFDCCHTHLSAVSKDSSYVELLKRMAIELKAMAKKKSELIDRMAEEARNKDEFARLLTIPAVAKTTALKIMARVGDISRFRNAEALVAYCGLDPRVYQSGKMTGEHRTITKKGDCILRSTLFLAVKLMVMLYPDTKVARFVAAKAKNGLSYKQAVVAGSAKLARIIYSMLTHHENYVEFNADIVA

SEQ ID NO: 419572 - protein, 428 aa, unidentified
MTVKDCTSVKAFWQLKKEIRGSKDHLIVGIDVAKDDHKAFFGTANGKTLLKRLIFKNDIEGFEKLLAHVKEMKVKHSLDELVLGLEPTANYHKPLGDFLIKCGHMVVLVSGVSVKRNRELLDGRWDKHDTKDSANVADLISQGKCLYYEYAPLVLKDLRGLLSLKRRLKKQEHGLRIRIRNSLLAQYFPELDKYYSKWEPEVLSVVRWCLDPSVIAGLEYDQFVSLVCPGRKNIRQQGRLEWIWKKAIDSIGCDAGEAAEYEAKVMVEELRHIREVIKETDAKIKDVCVRYPEYDYLLTIPGFGPDVSSKVLAAIGNPFRFNSGKQVLKMSGYDLSAKRSGKTSESAVPVISKKGKASLRYALYQAAFIASCKNKYFIAYYTNTLRGREREKGIKTKMKVKLAAKMLVIAWTLMKKKEPFDPGYLKID

SEQ ID NO: 419573 - protein, 414 aa, unidentified
MEQIHDRVAGLDVHRDVVVACARVPGARGGTVTEKERFQTTTGALARLAGWLADRYVTLVAMEATGVYWKPVYYALEDSFEVWLCNAHHVKNVPGRKTDMSDAEWLADVAAHGMIRPSFVPPPAIRELRELTRYRKTQTDARVAEIQRLEKVLQDAGVKLTSVASKVLTQSGRLMVEALIDGQRDPAELANLAKGKLRPKIPELTEALNAHFGAHHAVAAARILAHVDFLDATIKALTEQIDVRTKPYQAARELLMPVPGFDRLTIDTVIAETGADMSKFPGPGHLAKWAGICPGNHESAGKRRRVGVTPGNPWLRRALVEAARAAARTKGSYFGAQYRQIAKRRGPNKAAVAVAHSLSDLIWHMLSTGEVYHDLGDGYFQRRHDPERETRRLVAQLEQLGFQVALTTLQDPAA

SEQ ID NO: 419574 - protein, 436 aa, unidentified
MDEVTDEPLYRDRVCGIDIGKAGMVATIRVPSDKNPARRAAETRSFGTTEREVLALADWLRSWQVPAVVMEATGDYWKGPFYRLEAEGFDCVLADAKQVKHLPGRPKHDPGDSRWLAACFERGAVTSCFVATAEFRVIRLHTRYRRDLTGERTREKQRAEKLLESAAIKLSSVVTDLHGVTGRDIMGHLIAGERSPRALAQLARARARRKIAQLEEALEGAEFFTAGHAGLLATMLERIDQLNAKIDGLTEVIERLLAPHEEQLQQAESMPGWGRRSAQDAVAETGADMSRFPTGGHLASWAGRTPLDNSSGKRTGRTRSKKGNRYLAGITGETAAAAGKTQTREGARYRRLSRRRGKAKAQVALGNTQLKVYHALLSHPGTRYADLGPDYYDRQASTRRQIAHHVGKLGALGFEVTLCRLPSPDPDPAGTGTQAA

SEQ ID NO: 419575 - protein, 365 aa, unidentified
MQFIGVDLHTNRFTCCYRDEVKDKKITETFELSGYGLHQFYLTLTTETYVLVEATNPTFTFARLIQPLVKEVIVANTYELRQISLARKNTDKIDADILCRILKMQVLSGEQAVSPVTIPPVEIQELRRLFTTYRLYRKQTTQIKNRIHSLLKEKLYGFTQEEIFGKKDRKMIRGLESGSVMSFQINELCDTLEYLEARIQVLEDAIMEHAEPYMKEIEILTSMKGVGVFTSIAIIADIINVGRFKNSKAFTSYLRSAPKVANSNTSVNIKGTNKKGRKLAATLMTQSLTHVLTASKKLSDWYKEKTQQKKPGLVRTGLRRRVFAEIYQMLKKGEYHYGRVARLHEAKILQYKRFLQKRKNLLKTA

SEQ ID NO: 419576 - protein, 384 aa, unidentified
MNNISIVFIGLDTHKEFFEVAHELDGRDNRVLHDARISSAKSSVIKMARDFQSKYPQATLHFVYEAGPCGYWIYRLLTSLGHCCYVVAPSLLPKKPGEKVKTDRKDAMKLAHLLKMNDIPIIYVPEAEDEAVRDLSRARQTATNDLNHARCQLKGFLLRNNICYDGTANWSLKHLRWLNELILPHPAQHIVLQEMLNTINERMKRLARLVNELEHQVKQWCYYPVVKAIQAMRGIRFLIAASIIAELGDLRRFDNPRKLMKYLGLTPSEDSSGDKRRLEKISKCGNGRARRLLIEGAHSYKFPAKVSSEMQKRQEMLSKEVIDIAWQAQLRLCKRYQRLMHRSKHRNVVVTAIAREMIAYIWAISREVAIAPIDVKKRIARVPA

SEQ ID NO: 419577 - protein, 356 aa, unidentified
MDDCIRSSEFTVGIDLGDRVSRICVLDGTGEVIEESRVATRPEALRARFSVDQRMRIVLETGTHAPWVSRVLEVLGHEVFVANARQMALISKNDSKSDRIDAELLARVGRSDPKLLRAVRPRRAETMASLALVRSRSALVRARSALVNHVRGTVKAAGGRLPAVSTEAFARRVPPHVPAEVGEALSPVLDQIAVLTTAIAAYDRRIERMARDAHPETRLLRQVTGVGPLTALTYVLTLEDPHRFRTSRVVGSYLGLRPKRSQSGDRDPQLRITKAGDRALRGLLVQAAHYILGPFGPDCDLRRFGQRLTERGGKAAKKRATIAVARKLAVLLHRLWVTGEQYEPVRHGAAVASAAA

SEQ ID NO: 419578 - protein, 535 aa, unidentified
MRVMGVTESAEGDTEIAAPCTILGKETRDTGRHAGDFVPNSSAASSRAPSGPKRLEPPRGDLRLDEVGRGARPVGSRAMSACTGVTRHRGRSRCATTSEGRDPVTPQDTLYGWFVGIDWATQSHQVWVMDDHASPVAERSVAHAGAAIGEFIEWLVQLAGGRPEQVGVAIEIPRGALVDTLVERGFHVYALNPKQLDRFRDRHTVAGAKDDRRDAFVLAASLRTDRPAFRQVRLEDPVIIELREFSRLDDDLRDELARLTNRLRDQLHRFFPQMLDLVPAADEPWLWALLELVPTPREVPRLTRRRIEKLLQAHRIRRFDAETVLSTLRTAPLPVAPGTAEAASAHVALLLPRLRLVRAQRGSCEQHIEALLARLEESHVPPGQAPGHRDVQILRSLVGVGVRVAATMFGEAAQLLAERNYDALRAHTGVAPVTRQSGKRKQVMMRHACNGRLREAVYHWARISVQHDKRSATAYAEYRGRGHTHGRALRGVADRLLRILIAMLKTRTLYDPDRPGRVRPSADPIALVIAVEAAP

SEQ ID NO: 419579 - protein, 340 aa, unidentified
MIIGCDFHSSFQQIAYVDQETGEYGERRLSHGEEAVAFYRSLAGKAVRIGMEATGNDRWFHKLMSELGQELLVGDASAIHASAPREQRTDKRDARHILRLLVENRFPAIWQPSVANEEQRQLLLHRCRLVRMRARIKNQLDSIAKNEGLTSSRKWSGKRRQQIEALPLTGWYAERRADLLGLLDTLEARIKPLDEALQATAEQNAEAQLLMTHPGVGPVVSLAYVLILGDWRRFPRGKQVGSYLGLIPAEASSGKRQQRMGHITKQGNTLLRWLMVEAAIKAQSKDPSWHRQYLRLSMNKHHGVAKVAIAHKLAVRLYWMLRSGQNYTQIVERGSHAGSP

SEQ ID NO: 419580 - protein, 382 aa, unidentified
MFILAIDVSKSSLDYFSNFIGSGSVKNSPQGIFDLFSKASSCSNDFILVLESTGVYSFDVASYFYNHSIKVFFVKPDNLKSYRKLLNRPKTDKIDAQLIFDIALKFHDSLIPYVSYSEIITELRYLTRLYLKLNEDIAQLKLRLYSYVSLYFPDLDFKLNKTFSSLLKDFTIEDIAKKPINELFEYIASVSKHRVSAQVLAQKLKDLSKNALRLRPNPSNSLRLSIISTLELINTYEKQIKSIKSEISKLIKRIPNTLTTVNGIGDITAAGIIAEIGDINRFKNASSLASYAGLTWSIHQSGNFVAQDTFLKKNGNKYLRTYLVLAANSLRIYNPIFKEYYRKKYKESYKHNHMRALILSARKLVNLVFYLLKNNVPYVPMK

SEQ ID NO: 419581 - protein, 343 aa, unidentified
MEYYVGLDVSLKQTSICVVDQTGSVVREGVVDSDPEAISVYVRSKAPGAVRIGLETGPTSTWLWTELKRFGLPVICIDARHAKAVLKMQINKNDRNDAIGIARIIQTGWFKEVHVKDIDSHSVRALLASRALLVKIKRDLENHVRGLLKNLGLVIGRATFNVFAARAEELIEGRPDLVAAVRPLLEARNAVEQQVSELDRKVMKLARLDAQVQRFMTVPGVGPITALAFKATIDDPARFARSRSVGAYVGLTSRRHASGEIDWSGRISKCGDAMLRSYLFEAAGVLLTRVPKWSTVKAWGMRLAKRNGLRKAKVAVARKLAVILHRMWIDGTEFNWSKKEIAA

SEQ ID NO: 419582 - protein, 429 aa, unidentified
MTRISAGVDVSKNRSTVCIMDQDGKFIMRPFLVWHSTEELDFLADTLKRLNGEVRVIMESTSIYQYPIALHLKEKGIFISIVNAYKVKKFANTDFRGGKTDKKDSRTIASYGISYWDKLVEWQIPKDTYFNLDLLNRTYMNAKKHRQIILQELQHYIDCAMPGMDKELHSLNLSTKKDFMLDFVEKFWHRDEIVNMTEAEFTEVFTAWAKKKGYRPVEGKAAKIYAIAKSCIPYYPANPTVKTILQCIVDKLSGVNRTLVTIVTQMIEEAKKLPEYQIVREMPGVGDPLAARFFGSAGDIRRFKNSKALVAYAGIDSPPDESGDFSSTHRHITKKGSKVFRDTGYEIMMALRAQKRTWEKVRKNPEVYDYMLRKEAEGKPPKVAKIAALNKFLRIIYARIKELYDNMALAERAKTKTRSKTRAKTKVTA

SEQ ID NO: 419583 - protein, 363 aa, unidentified
MAKARTLVGLDVHATKVVAAVLDAETGEVTFFTLGGDVVQAAGLCAGLPRPVRATYEAGPTGYALARELMRRGVEVVVAAPSKIPRASGDRVKTDRRDAELLVRLLLAGKLHAVRVPGLQEEALRDLVRARDAVRQDLMRARHRLSKLLLRHGHRFEDGSAWTQRHRDWLASIDLGWPAAQATMLDARGAIDALVHRRDGLEREIVALLPSSPWALQAGRLRCLRGIDTLSAVGLCAEVGDFERFARAEQLMSYVGLVPSESTTGQQRRQGSITKTGSGHARRLLVEAAWHYRKAPRIGKALTDRQDGQPAEAVAIAWSAQRRLNRTWARLEARAKRRTIIAVAAARELTGFVWAITQIEQIE

SEQ ID NO: 419584 - protein, 385 aa, unidentified
MKGKTFKPTDYEVFGGLDIDKRSISVTFTNHQGFIRSLRMPYSVEHLVNHVRKHFGDQKVAFAYEAGPTGYGLYDGLVAKAYPCLIASPSMIPKAPGQRVKTNRLDSRGLSENLRGGQLRSIHVPSALYRELRHLTQLRDTFVSEMVGMKQRIKSLLLFEGIEFPPAPAGRQWSFRVKDKLRKLECSKTVRFKLDQLLDSLEFSEKQVLKATREIRRFCRNDAELSQCIEYLMTIPGIGWIVASQLVARIGDWRELKNIRQLGGFLGLVPTENSTGERTDRGSITHTGDGRLRSKLIQASWSAIRQDGELREFFRSVCRTHARHLASRVAIVAVARKLSVRISVVLMKQRPYEVRQKVRSTPLTQGETSPQGTTRRQAEPGEKNS

SEQ ID NO: 419585 - protein, 482 aa, unidentified
MKKRNIYQNQSQELLSLFEAAGNSAKVMCVPMDYAKKDHLVMFCNGHGDVLRKPFSVKNTPEGIAYIDDQVTRSCRRRGIQKKHVFFGGEDANSFAKNFVSTLRSKGFLVANVNAHDAKKQRGNVQASTDRIDLMGIATMLLNCRANCGPAQSGIYRNLRTLVRHRRKLVQMLTEVKNRVHGIVDELFPGFLNEKNSGIIPFTQSSLYLMEDRFSPKQIRRRRRQKLIEILKRFGTSKAEKTAAKLQQYAAKVLHAPVEYVDTMQLSLAQHVKHIRCLKESVAQMDKEIALNLAQTQGAFLTSVRGIGLVLAAGVTAEIGDLNEQKPLNNLASYSGIIPRVKQTGGSDGKTYTGPVAKRCNRILKDYVVKSAYHLGLHGPQDLMTDYKRRDASGQHANFGMGRRYLRMAINLMRTSQVYLPPNLRKDDYTLEERAGYYLMSWPYLKEKWKKVGALEAAFAKDRPLGLWRQIVQELYDIKLKL

SEQ ID NO: 419586 - protein, 345 aa, unidentified
MYCIGVDHHKQYSLMTVLDEAGQEIKTGRMLNQRAEVERFLGGLEGEVKAVIEAGMASFEMADLLKEMGMEVTIAHPAKVKAIASARIKTDKRDARILADLLRAGLIPAVYQRGGENREAQRVLRLRAFFVKQQTQVKNKIYGLLAHQGEEVRGEAAKIRDLFSGKGLEALERLRLGGKDEEMLRALVKACRQLAALVKESDGLVRELYREMETARLIDTVPGFGVTLAVLVAVEIADIGRFRRASELHSYAGLIPSTHSSGDRTYHGHITKQGNGWLRWALVEAVYPATKVDHGLRVYYQKIASRKGANVAKVATARRLLTIIHKMLKEGRAYVLYPREKSSAA

SEQ ID NO: 419587 - protein, 411 aa, unidentified
MPKIVHKICCGIDVHKSFVVACIATTDEKLVTTYSKPKRFSTFTNDLRRLAKWLEDNNCKDVCMESTGKYWIPVWNVLESTCDLVLSHPKYLKAIKGKKTDKRDAKWIADMFKHDLLNGSFIPPAEIRQLRDLVRYHTKLTSYTTGEKNRAQNCLTVSNIKLDDVFSDVFGKSASAITSRILESNEPFDVAPFVDGRCKTPIEQIQAAVDGMMCAEQAEKLRIIRSHMDSLVLCKANLESEILSVAEKFLPQINFVTTVPGIQSFSAVAIIGEISADMSVFETSRHLCSWAGLAPQNDNSAGKKKTTRVSRAGVYLKPILVQCANAAIKSNKHPEVRNRYNAIKKRRGHKKAIIAIARMLLTAIYNILKKNEPYNAEIYRQSNKPPIQREVTVEQAIFILQRQGYLVTATH

SEQ ID NO: 419588 - protein, 431 aa, unidentified
MSIQSLPAPSNIILRGCVMLKIVYPICCGIDVHKTFIVACIASTNGQGVTTYQSKRFSTFTNDLRRCAVWLAKNHCKDVCMESTGKYWIPVYNILEVTCTIVLAHPKYVKTIRGKKTDKKDAKWIADIFKHDLVSGSFIPPADIRQLRDLMRYHWKLTNFTTGEKNRAQNCLTVSNIKLDDVFSDVFGKAASAITTRLLECSEPFDVTPYLTKNIKAPVEMIQAAIDGEMCAEQAEKLRIIRSHMDALELCRLNLQSLILTTAEKYLPQLNIVATAPGIQAFSAIGIISEIGVDMSVFPTSKHLCSWAGLTPQNNESAGKKKTTRISRAGVYIKPLLVQCALAAIKARKKHPEIFNRYNNLKKRRGHKKAIIAIARMLLTAIYNMLKKNESYDPELYRKADRPPTHREVSVEEAVYILQRQGYLVTAPPTA

SEQ ID NO: 419589 - protein, 401 aa, unidentified
MSKKNTRNALDTSLSYAVIGLDLAKADCAVAAVPCSDDELGLIDRMDYESLFEQAEKLEPTLFAMEPCCGYSQISLRLQNMGHEVKVISRHAVKNWIATHKSNQKTDLNDATALAKLALYDHDLQPIRVKNVEECRIASVQAIRIQLRTQATKSLVCFKSLCQCWGIVIRRGSLNTKKMAEAVAAVEKLLGAEVASSLMILRDAYKFTMKQINALDKLLDALVEANEQARTMKTVLGIGTQTAARLAVTTGDIKRFPMPRSYVAYFGLAPRNIITGHSGTPSPSKRGALKPVSSRGQGKVSRRGDRVARSFIIQGAATIYMLYCKDMLPECQLRQWLHEQIKRGKPYGKIIVSLAAKLLRIVWALLTYGEKFDSHKAGVPRSVLAAMEKPLKHDAAAESAA

SEQ ID NO: 419590 - protein, 321 aa, unidentified
MKNSTHPVAVGIDVAKLTLEVSLGTEGATASFTNDLDGHDRLLALLQDSSVSLIVLEATGGYEAAIAGALQAAGLPVAVVNPRQARDFAKAMGVLAKTDSLDARVLAQFAQVLSQREDLQRLIKPLADESLKTLQAQLLRRRQLCAMLVAERQRLGTAHRATRPDVEASIRFLKGRLDKTDAELARLIQRDHAQLNALLSSVKGVGPRTLATLIAELPELGKLSRREIGALVGVVPLNRDSGQFRGRQCTWGGRATVRRALYMAALVASRHNPAIRRFYEHLLQQGKAPKLALTACMRKLLTILNAIARDCIPFNLALHQC

SEQ ID NO: 419591 - protein, 376 aa, unidentified
MPSENTVHVAIELAVSSWLVAARLPGAEKVRLHRIEGGDTAALLALIAELRSSASRKLGGVAEVACCFEAGRDGFWLQRLLAAHGIAAHVLEPTSVLVNRRARRAKTDRLDAEGMLRVLAAWLGGDRQVCSMVRVPTPEEEDAKRPHREREHLVQEKLRLVNRIEALLFTQGIRARPSLRSWERDLAELRTGDGRALPPLLRAELDRLRRRLVLTLELIRETETERAEALAAAADDATARKITALQRIRGVGANFAAVLGREVFYRSFANRRQLASYVGIAPTPHQSGGTDRDRSISRAGNARARTTLIQLAWLWLRYQPGSALATWFRERVGALQGRTRRIAIVAMARRLLVALWRYVETGVMPDGAAVRAEATA

SEQ ID NO: 419592 - protein, 351 aa, unidentified
MDRYIGLDAHASSCTVAVLGPSGRKLKCQVLETNAKALINFLQTIPKNRRLIFEEGTHSNWLHEVLAPHVQETVVVAVRQSRGPKDDQRDAFGLAEDLRIGNVKIKVYKKQGEFATLSHLARAHGTLVVDTVRCQNRIKSLLRSRGIAAAGQLLYSIKGRPQWLSQLPAQACGQANFLYEQYDALNKIRKQAEKEMLVEARKHPVYKVIKTCPGMGKIRTAQIMPIVVSPYRFANKRQFWAYCGLGIVMRSSSDWVRTQNGEWIKASIQKTRGLNRNFNRSLKHVFKGAATTIICRANKDDPLYQHYQVLLDGGTKPNLAKLTISRQIASIVLSVWRTQEVYDPKKLSPKT

SEQ ID NO: 419593 - protein, 320 aa, unidentified
MPEIIIGVDVSKDFLDTAVANADRPAARFANTPEGIAKLVAWAQELAPHRIIFESTGHYHKQAVTSLQLASLNAVVVNPRQVRDFAKAIGKLAKTDAIDAMVLAKFGEVFETTVRPLSSKEMVAFQQMVDRRDQLVKMRAMEKNHLHAAQALRVKKSIEKHVNHLTKQIKELEQEMDKFIEETETFRAKDEILKTLCGVASQVSRTMLAFLPELGKGSRQGITGLVGLAAYNNDSGQGRGTRRISGGRSKVRKALYQAAVVAVQWSPSMKEFYARLLARGKAKKVALVAVARKLLVLAHAMIRDMKPYEERTNPLCPKKA

SEQ ID NO: 419594 - protein, 318 aa, unidentified
MMQQTYQFNIGVDVSKQKLDVSFSDNEIGQFDNNAKGFGPFLKRIQSPEDTRVILEATGGYERPLVAFLQEQGIAVSVVNAKRVRDFAKAMGHLAKTDVIDAHVIRQFAGAINPQVTEIKSPMQQSLDALIHRREQLVRQRSVEKQHLDTVIDEEVRQSIERIIDLLDKEISLIETRLKELASSNPTSSEKLSRLQGIKGIGLITAMIFLACLPELGTLSNKEISALVGVAPFCRDSGKMKGRRGIWGGRAQVRSTLYMAALSAIKYNEAIRQFYERLLSKGKAKKVAIVACMRKLLTVANSMIKHNTDWDANHGKLA

SEQ ID NO: 419595 - protein, 399 aa, unidentified
MRKIIGIDVSKSTAKLSVAIDAKTVYEGDITLDMIGFTSLKAIIDSYGGAEVVFEATGVYSRRLERYLLDESITYHILNPLVAKKRLDDGSRTRKNDVRDARGLAITEFAKHPKPFKPRFYDPVYRELMDISRYYDQQTEDLKRTKNRIHRLIQLSFPGIEEELDLRKPSALHTLTLFSHPAELTGLSFENIKTQILDMHLKGVGAVRSSNLARALWRSRARSYPAVSGNSFVVQAVKHETQKALKLLSEREETVQAMISLAEKTPEYVILLSIPNIAENTAVRLIAELGDIRRFETRAKLNSFIGLDLREIQSGDYTAQRKITKHGDAHTRKLLYWTVINMVSSGAQPSHIRDFYAKRQATASRRKPLLVACMDRLLKTIHYLVNTNQLYSYELACSR

SEQ ID NO: 419596 - protein, 458 aa, unidentified
MPLSTLPRFLLFRLPTLAAQLEEEQTMEIMHERVAGLDVHKATIVACVRLGTGRKVTRECRTFDTTTDGLRALLAWLVECRCSHVAMEATGIYWMPVWKILGEGDFALIVANAAHIKNVPGRKTDLNDAMWIADLLACGLIKPSFVPEEDVQELRSLLRTRKQVGREQTRHVQRIQKTLAEANVKLDSVLSDIMGASGRRIIEAMIAGVRDPRRLAALANTRIKATPKQLYDALHGRLTDHHRFLLTLHLRQWDNLDATIREIDQEVEARIARMDKEVKAAEAPFRDLIGLLCTIPGVSTLSATTILSEIGRDMSRFPTAGHLVAWAGLCPGQNESAGKRKPVRLRKGAPWLKTMLVQCAWAAKRKKDSYYKAQFFRLQAGVDRRKPSVPSPPRSSRRSTTSLRTAPNTTTSGPTTSIAVRPKAKPSAWLPSSQDLASRFNFNAPPRPHDAIASPVSS

SEQ ID NO: 419597 - protein, 371 aa, unidentified
MAESSRTLYVGLDVHKDSITVAYAPEDRGAEVVLLGTIGTRQGDVDKLLRKLAAKGTRLVFGYEAGPCGYGLYRYLSGQGWACQVVAPSLIPRKAGDRVKTDRRDAITLARLMRSGDLTSIYVPGIEDEALRDLSRARDDAMQDLKRSKRRLKSFLLRQDIRYEGRASWNPAHLRWLAQVVCPTPPQQIVFQEYVRAVTEQQERVQRVERELHEAVKSWRLYPVVEAIQALRGIELTGAVILLTELGDITRFDTPRELMSYLGLTPSEYSSGGRRHQGGITKAGNSHARRALVEGAWAYRYPAKVSRHLQLRLEQLPPEVQAISWKAQVRLCRRYRQLTARGKHVNQVVVAIAREMAAFAWAIARLVPITA

SEQ ID NO: 419598 - protein, 392 aa, unidentified
MYYIGIDISKNKHEVSIIDASGKLLSESISFSNTIQGFEKLIKYLSSYNVYSDNCIVGMEATGHYWLSIYSYLVECEFNTFVINPIQSEAFRKMYIRKTKTDSKDSFVIAQVMRFGEFSSSPLSDERLFELKNLTRYRFSLVDESSDWKRKLIALLDQVFPEYNKLFSDIFGVTSKNLLSKYPLPEDMLSISTETLAELLSKCSNGRFGFAKAEEIQNSALNTFGVKFAKRSFSFQIKQIIDQISFLEEQLKFLEKEIEYLLNDINPIITTITGIGYVLGASIIAEIGDISRFEKASQLVAYAGLDVSVKQSGEFNAINSAKLSKRGSPYLRRAIWLASTVAAFKDPALSVYYTNLRNRGKAHGTAMGAVARKLTNIIFAVLRDNKPYIPNI

SEQ ID NO: 419599 - protein, 454 aa, unidentified
MAKLRKNKKAHGLVAAPVMEPNAAGVDIGATEIYIAVPPDRDTQPVRRFAAFTEDLKAAADWLERCRIETVAMESTGVYWIPLFQILETRGMKVCLVNARHVKNVPGRKTDVSDCQWLQYLHAVGLLRASFRPSGQVCAVRSLMRYRESLVGMAAVHLQHMQKALDQMNLQLHHVISDLSGTTGMAILDAILCGERNPLKLAQLRDPRIKASPETIAKSLVGDYRREHLFTLRQSVTAYRSYQQLLACCDVEIEQMLGEFPDGAGPDTPVLADPKDRHRPRRNEMKFDLRGHLYRIFGVDLTEVPGLNALTAHTLLTEVGPDLSAFPNVGAFASWMGLCPDNRVSGGKVLSSHTRKVNNRAARALRMAAQSLFRSQSWMGQYYRRMRAKLGAPKAITASAHKLARIVFHMLTNRHAYDETVFAQQEIQNQHRLQQRLMQQAKKHGFQLIPIAQN

SEQ ID NO: 419600 - protein, 339 aa, unidentified
MKLTPVGIDIAKSVFQVHYVDQETGEIVNKPIKRAKFLEYFANRAPCLIGMEACGGSHHWARQLTNMGHEVKLMPAKFVKAFNIRNKNDAADARAIWMAVQQPGKPVAVKTEIQQAMLALHRMRQQLIKFRTMQINNLRGLLMEYGEIMSKGRNKLNKEIPIVLERIAERLPAVLIDTFREQWNGLAKLDEQVAEIERRMREWKKEDKAVKAVSEICGVGLLTATAAVSMMGDPKAFSSGREFAAWVGIVPKQTGSGGKVNLHGISKRGDTYLRTLLIHGARSAIENAKEPSEWVEQMMKRRPKNVVVVALANKMARTIWAVLAHDRPYQKAYVSVKPA

SEQ ID NO: 419601 - protein, 618 aa, unidentified
MIVIGADVHKRSHTFVAVDDVGRKLGSTVVPTTTAGHHTALRWAHDRFGHELLWAIEDCRNMSARLERDLLGAKQKVVRVTPRLMAEHRRTGRERGKSDPIDALAVARAAAREPDLPVASHDDVSYEAKALVDYRETLVRDRTSKINRVLWRVHQLDPEYHMPRGGLTLNKHQNNLAAWLIDRPGIDARLARHEVAAIIALTAEIKQVTREITTLARDAVPTLMTMPGCAELTAAKLLGESAGITRFGTEAHFARHAGVAPVPVWSANPGRHRLTRSGNRQLNAALHRIALTQARMPESLGHTYYQRKRDEGKPNAKPCAASNDAWPASSTTTSPSTTTTAQPHNKTPLDIGAMRCEERKRRATKGPRNQRSPPRVPHSPSTAPRGNLVLMLTAVLYGLATAVPIAVGAAIGLRWNLPNPILATLMAFGAGTMIAAVSTELFEPAFTQAGTGVAAMALFSGTAVYVVADRLVETKLGSSAIGPALMIGVFLDGVPENTALGVSLTAGGSLVLVVAIAVGNVPEAVSGASLMRREHDASIRSALAMWLFTAVVLVAVTVGGYAVADAISPTAISVVQAFAGGATLGVLANSLMPEAYREGGWWVGLATAGGFLLAFVLG

SEQ ID NO: 419602 - protein, 346 aa, unidentified
MPETEVDTFAGIDVSARELSVALRRGKGEDKPAIAKFSNHHAGHKALIAHLFRGGRRVRVCLEASGNYSLDLALTLQAHRQVEISVINPRRARRFAESLGQRSKTDPVDARVLCEYAARMPWVAWQPPSSVALHLRAVARAIADLAVIHTQQNNRAHASAASQALPVLVVKEMQRHQKYLEQRMTRLRREALRLIAGDSELDRRFRLMLTTTGIAETSALQILGELAVLPDMLDARQWVAFSGLDPRLFKSGKSVEKRPRISRGGSRHLRRALYMPALVALRRDPYLRCFYQNLLARGKARLQAVVAVMRKLLHALFAMFRTNQPYDGSKLCCAVDRAGNAIAACA

SEQ ID NO: 419603 - protein, 345 aa, unidentified
MGPMYYIGLDVHKLKISYCVKDIIGKIHAEGWIPATRFDLDRWMKVLPEPWSAAMEATMFTGWIYDHLKPHAAILKVAHPLMLRAIAAAKKKNDRIDASKICDCLRCDFLPESYMAPTAIRERRRTLRYRNLLVRQMVQMKNKVGMLLMEAGVSYNKQKLHKAGYFRELLASNPDINAGLRSLLCQCREMVVRLGKMETALIRSLQQDRLLAERVERLMSIPAVGPITALTWALEVGEVQRFSSIKKAISYCGLCGAEKSSGDTVQRTPLSKQRNKHLQTTLIEAAKMAPRYSPTLALLYDREKQRGNANRATLTVARKLVAYLLAVDRGQTHFLVLDRDSCAAA

SEQ ID NO: 419604 - protein, 489 aa, unidentified
MKAKSKENSKAVHKTKKATHPATQPQWHQMNRKQRRDLARTMQSEEISLEVVHPEAAGIDIGNDVHYASVPPSRDSEPVRHFGCTTAELKAMADWLKQCGIRTVAMQSTGVYWIAVFDILEERGFEVFLVNARDTKNLPGRKSDVQESQWLMKLHTYGLLRNSFRPAQEIRRLRTYWRQRNDLVRSASRHIQRMQKTLTQMNVQLANVLADITGMTGQAIIKAILAGERDPRELAAYRDHRVKATEAEIASHLEGNWQEDLLFVLKQEQDGYEFCQQQMSECDHKIEQYLAQMEDRSQGADLPVETRKVRLRKTKQGNTPRFGLRQELFRMTGKDLTQIDGVDVMTATTMVSEVGWDMSKWKTENHFVSWLRLCPDNKISGAKIIGKGRLPTNNRATNALKMAASSLRLSNTYLGAQFRRLRTKLGAPVAIKAMAAKLARLVYRMLRFGTEFIDRGAQFYEAQMHGLQVRHLKWKAAKLGFQLTEITAA

SEQ ID NO: 419605 - protein, 377 aa, unidentified
MKRIKFVGLDVHAETISIAVAEQGGEIRSLGVIPNREESIRKLVRKLGPVEELRFCYEAGPTGYALYWQLTKVGAKCEVVAPTLVPVKAGDRVKTDRRDALKLARNYRAGELTAVWVPDAAHEALRDLVRAREAAKKDELRARHRLNKFLLRHGRRPPMGVKAWTMKYLEWVKREVHFEQRAQEATLLDYLHEVEHAGARIARLDGAMEEAVKLAPPQMRVVIEALQALRGIAQVSAVTVVAELGEFSRFARAKQLMGYGGIVPSEDSSGERKRRGNITKTGNAHLRRVVVEAAWAYRHRPAVGAKLRRRQEKISEEIKEIAWKAQHRLHERYRKLLAKGKNKGVVMTAVGRELLGFIWAIGVQAETAQKEPLQRAA

SEQ ID NO: 419606 - protein, 438 aa, unidentified
MSDTVSNERDGAWAAFAAIDWADQKHCWKLIPGGSEQSEQGELDNTPEAVDDWAQALNQRFEGRPIAVCLEESRGALLYMLAKYSHLVLFLAHPTTAARYRQTFSPSGAKADPSDTASLLDLLLRHREHLRQWQPDTVETRLLQLLSEHRRRMVNEKTRQSLRLMACLKIYFPQILKWFADVSSPLVGDLLERWPSLSELQRSHPGTLRKFFRQHNCRTEERLEERITAIYQATPATQDPAVLAAGALAARGLIALLATLRDHIAELERRIEQLVVSHPDAALFASFPGAGKALVPRLLVAFGTRRDRYDNALQMQCYSGIAPVKEASGKSQWVHSRWTCPKFLRQTFHEYAGHSIAQSEWARTYYRLQREHGKSHHAAVRALAYKWIRIIFRCWKNGTPYDEQTYLHSLQKRNSPLSATAMAWNQISGFQKFSEHPS

SEQ ID NO: 419607 - protein, 412 aa, unidentified
MDLVHERCAGIDIGKADCKVCIRVPGRNGRRHTEIRTFSTMTEGLLALREWLLSEQITLVGMEATGSYWKPVYYLLEEQMETWLLNAQHMRNVPGRKTDVRDCQWICQLIEHGLVRPSFVPPKPIRQLRDLTRYRTEVTRERTREIQRLEKLLEDPGIKLSSVVSDLGGKSARTMVEALIGGERDPQVLARLAVGALKDKEAQLVQALTGFFTDHHAFLARIMLDRIDASTATVKGLTAEIDRRLEPYRRQLELLVTIPGISLTAAQVVVAEIGVDMRRFPTAGHLASWAGVCPGNHESAGKVTSGRTRHGDAWLKGVLGNAAAAAARSKNTYLAAQFRRLVGHRGKKRALVAVEHSILVSVWHILTRDTPYQDLGADHFINRIRKSRQTRRLVGQLTQLGYDVSLEPRTNG

SEQ ID NO: 419608 - protein, 334 aa, unidentified
MNGPIVSVDVSKGKSDYQAFKDLNVKFTDVRSIKHTKEGFDEIVNLVKDMERKLETEVCVVYEATGVYHRVLKKVLEDNNIKQFIINPLLSAKTRKNDSLRSPKTDKLDPKSIAKTYYNQSLHSSYKPQTTYHELRELSRYYEDILVHIRKDKVAFRAQLDIVFPGYDTLFDDLYGAVSLTVIEKYPHPELLQKKSINTVSKIIQKKTRHRQAVSNKMAFKAIEYSKTIYSGCGKDDIDVLILERLIKKLNEDLNEAERTINEMIRLVQELPDFIIIKSIPGIGDNLAARIIAELGDMTRFKKKNELVAYAGLDPRIYESGQKDGAHMHITKKR

SEQ ID NO: 419609 - protein, 318 aa, unidentified
MDVLGIDISKADFHACLIQGAKRSRKSFANAAAGYHQVQKWLQNRGCTEVHACMEATGAYWEGLAKALHDAGTTVSVVNPSQTVFFARSQLRRTKTDVVDAEMIAEYCQQRSPQPWKPPAPEILELRGLLSYRDHVVQETVRLKQMVAQIHVSKELRKAHVQQLKALQSTTATVEKELHTLLKRHSTLERQVAALTAISGVGLLTALAMLAKLPAERLRSGKAAASYVGLAPSERQSGTSVHGKPRICKTGNASLRRDLYMPALAAIRHNTILKAFAQRLQRNGKPAKVIIAAVMRKLIVLAFTILKRDLLARPASAV

SEQ ID NO: 419610 - protein, 405 aa, unidentified
MNAVGIDVSKGKSTVTIRKPGDVVLMSPCDIPHTQSAINDLIKQIKSLEGETKVCMEHTGRYYEPVATWLSDAGIFVSAVNPILIRDFGDDSLRTPKTDKADSKKIARYTLDRWAKLKQYGIMDKTRNQLKTMNRQFGFYMAQKTAMKNNLIALIDQTYPGANDFFDSPARNDGSQKWVDFIHTYWHVDCVRSKSLNAFTEHYQNWCKRKNYNFSAEKAAKIYRISSDLIAIFPKDDITKMLIWQAVALLNTASKTVESLRSKMNELASTLPEYPVVMDMNGVGATLGPQLIAEIGDVTRFTHREALTAFAGVDPGKNDSGKHIQNSVRTSKKGSPYLRKTLFQIMDSLIKRSPADDPVYTFMDKKRSEGKPYYVYMTAGANKFLRIYYGRVREYLSNLSNNETI

SEQ ID NO: 419611 - protein, 450 aa, unidentified
MGKGSRLSRGDARRNARIQRLRAVVRPELAVLAVDLADAKQAVVVCDHDGRVLARRTFRCRAWELDQAVSWGQQHARAGGFAGVVVACEPTGHRWKVLARLAGQAGAELVCVPPMLVARGREEEDLTRDRSDDKDALVIARLAAQLRCYRPERPTPTWARLRHLGARRAHLLVAAGAARQQLRDLLECACPALLDAAREPLDSASWRAAVTVALDHWQGQPGGVSLDGAAFTAQVTGQLPRWGTTRPYRPIIAAVGAATACPDGVAEQRRGALERARGLLDDWHQALAALGQVEQRMVAVLGELGLAGLVATIDGLSPLGAAAILAETGDPARFDCARALVKHAGLCPRDNASGTSAGPTRISRRGRPGLRLACWRAVWGALPHNQVLRARHQHLTTRTTNRLTPTQARVAVAAALLRQLWVVATRRVPWDAGIAAGTDSDHGKEVTPAA

SEQ ID NO: 419612 - protein, 367 aa, unidentified
MKKHTTMNKPVSATDVSVCTTVAVDLAKKVFQVAGEDAQGQLAYEQRIKSREAFQVFLQKLPEGVTVLMETGPGAQAWARLLQAQGNPVRILPAQRVAEHRSGAKNDRNDAHAILRAGRDSSIASVPVKSVAALAMQAWHRVRRGYVRRRTAMGNQIRGLLLEQGIALAQGDVGLKQGVTRVLEDARQPLPALLRELIDEMLNEWKRLGERIAALTGRLEACAAADPTAKRLMTVRGIGPITATALLAKQVEPERFANARQFAAYFGIVPDQHSSGQKVRLGKMTKRGDAYVRSLMVVGSHAVLKQLRPDSEHPDDRRLQRWLQRLGRKGAAVRLANRNLRIAWVLLCSEQTYQRKPNACREMEMSH

SEQ ID NO: 419613 - protein, 426 aa, unidentified
MQEKIQRITPKTIIVGIDVAKELHWARITDYRGIDLMKPVKVHNSIDGFDSLLSKTEKMLAKHDCDQIMIGMEPSGHYWRALGWYLKLHESKPVLVGVNPYHTKQAKELDDNSQTKSDPKDAGVIAHLIRDGRYFDTYLPEDEYAELRQLNAERQRLMKQLNRVNNILVALLDEFFPEYSTVWGNVTCQTSLELLKTYAFPSDILSASKGQLLEDIREASGGTEGTKLMEEMIRAAGRSIGVKEGLRVARLRILSLIDELTYFEEKKIEIEKELEAVMDKLQLGKILQSMLGVGPIISAAFLGEVGNITRFSNWKQVRSLAGLNLVENSSGKHKGKTKVSKRGRPYLRHMLYLAGECGCRCNPEMRGFYQYLRHRKNNPLNGPQAFVATGLKIMRILFYLAKTGESYDPSKALGTVRQQQIASLTI

SEQ ID NO: 419614 - protein, 315 aa, unidentified
MSQPLFAGIDVSKSQLDVAIIQGDELLEFCSVPHTEEGISALIQKFRNTMPQLIVVERSGGLERSLVALLAEAGLPVVANNPRQVRDFAKAMGILAKTDKLDASTMARFAAAVKPPQRPIKDAERQQLSDRVARRRQLVNMLAQEKNRLSRAVGPVRADIEHHIIYLKERLHKTNKDIEQMIANTPVYQETVELLLTFPGLGRVTSAALVADCPELGSLNRRKIGTLTGTAPLNDDSGKRTGQRYIRGGRKTVRVHLYMATISAIRCNYKIKGFYERLIAAGKKPKVAITACMHKIITILNAMVKRRKPWQTEAV

SEQ ID NO: 419615 - protein, 394 aa, unidentified
MDFLKYAIGIDVGMEKLVACISLMTTQQQVIIKAQCSFNNDKKGFALLYAWVIRNIKLDIPTIFLMEATGIYYEQLAWFLHDKGCIVSVVLPNKAKKYKDALGLKSKNDHIDAKGLAQMACEQKATLWEPFSKDIYMLRLITRQIQNISKQCNIISNQLHALQHAMFRDKDIEKMHTKQLTLLQKNKKDLQKRVELIVNNDQVLKQKFQNICKIKGLGLQNLAVIVAETNGFAAFENIAQLVSYAGYDVIENQSGKRTGKTKISKKGNAHIRKCLYFPAFNAVRLEVRVFKNLYERVYERSKIKMKAYTAVQKKLLAMVFVLWKNDQPFNPDHQDKVSRDAEPEPSLASASKKPITADTSSVIKKVALTKTKATQDKHPSKNRRMPSLAYFKIT

SEQ ID NO: 419616 - protein, 400 aa, unidentified
MNIIGIDVSQGESHATLITEEAEKVAFKFKHNKSGFQILNSYISSNTIIIFETTGVYSAQLTAYLKSKKVKFYELNPLEAKLRMASLRRNKTDKNDSFKLALLGATQLTEIKNHCNKQSALPYDSLRILSLRYKQLIKCRTRILNFLRSSLELTFPELNQIFKKAYAVLALQVFRMYCHPDFLAGLTLKEMTNRVYQFVSRRIHKDVIQSYCAQVWLAAKDSYPAVPADSLEIKIISEYCDEIESYNKEIAYIQSKLIKTAVGLDDFKVISSIPGAGQLNSALLLGFTGDIARFDNYKQLNAFLGLDLNRYQSGKYGKGDTINRRGSSQGRAVETDMIRSMLRNQGKIQNHLVDYYYKLKKPPFNKHDKVALIACANHLNRTIINLVHTHQLYNYSKAIH

SEQ ID NO: 419617 - protein, 366 aa, unidentified
MSANATSVGLDVHARSVVACGLDGRTGELFERRLTPDHGDIESWVRSLPGPVAVTYEAGPTGFGLARHLIGRGVECQVAAPSKLQRPSGDRVKTDLRDARHLARLLHLGEIVAVAVPSVEQEAARDLVRAREDVRGDLMAARHRLSKLLLRQGIVYYGGKPWTASHDRWLRARRRAEVFTVPGLGVAFDVAYDRVLDTVARRDRLDAAIAAMAADSEFTPVVTRLGCLRGVSTLTAFGLATEIGDWHRLGGRSSGAYLGLVPTESSSGGTRSQGSITKTGNGHARRLLIEAAWHHRKPYRVGVDLRRRLDKAAPPARDRGQRGNRRLHARWVSFDARRKRAVVANTAIARELAGWCWSLAVLDGGD

SEQ ID NO: 419618 - protein, 395 aa, unidentified
MFFLGIDIAKTNHVASIIDNNGKVVIRSIKFTNSKEGFSKLLDNINSVTNDLTNVLIAMEATGSYWLSLYSALIDKDFNVSVYNPYQIKSYRGAYNNRKQKNDIIDSIIIADYLRVFGASSTSLLEEDLLSLKTLTRFRSKIVDNIATLKTQTIGILDKVFPEYKKAFSDTFGVTSKQILLTCSTPEDILKINLTKLSNLLSKHSKGHLGKSSALNLKSLAKDSFGIKFTNDACSFEIKQLINQMIFLESQVDELNDKIKVIYDKLDTHLLSVPGVGKVLAPVILSEIGDIKTFDKPSKLTAFAGIDPTQSQSGNKVSSNEKTSKRGSPYLRHAIYTASLVAMFVDSELRAYYDKKIGEGKHHFVALAGVSCKLLTIIYYILKENRDYIRYGNIR

SEQ ID NO: 419619 - protein, 523 aa, unidentified
MSTRTSRKRARTRPPDAVQKPRGTFHPRVQKVGPEHFGIVAVDCAKARSKWMLADFYGNVLVPPTAVEHNRPAFDEAIAAIRRAGRHHDLKDLLIAVERTGRHHHAPKRAFAAAGFEVRVVHPFATKQFRQPADPDNKTDDKDLLALHRATVSGFALLEPEPGESWKTLQLLERYRRDLVFKSSALSCQIREHLDAAFPGFAACFDKLWDSACAWHLVRHFAAPHDLLAAGPTALARGLDAADAGYQMRTIHKVIQWAGQAAAPDVAAAQHRRIALALYDDRAQKAREIQALERELAGLLAPTPYLLLLAIPGINVVSAADFAGEMGPIPNYANHRAITGRAGLCPSRYQSDRVDKANGPLRRRCNRRLRAAILQIADNLVTCNHYFGALAHDWRNQGKGPKDVRVRVASRFCRIAFQVVAGRQAFRHPAAQERHYVLKKLMEFHREHETDTRAFMRDLQAAVEQLPRSEYRAEAQPLHEELETIQAGGRRGPQVLGDILPIVLARLGVGGVESTGSGEQDLR

SEQ ID NO: 419620 - protein, 370 aa, unidentified
MRIIGCDLHARQQTLAMLDTTTGEMVNLTLMHEGNSVREFYSKLPPPVIVGIEATGPMKWFLQLMEELGIECRVGHPAQIRAAEPRKQKHDRRDADLILKLLAENRFPAIWLPNQELLDLRALLLHRHQWVRMRTRIQNSLQAIALANGLRRGPSLWSYDGQAKIAFLPLMPHAAYRRNRLQAMYKTMESEIENLNKQVAEQAGNRPGTQRLMTHPGVGPVTALATEVFLGDPQRFADGKALASYVGIIPREYSSGGQQRLGGVTKQGSPLLRFLWGEAGAHAARRDPDLKRFYRRKLVHKGLGKARVAVARKLGIRLWIMLRDEIDYQEFCRRGQMQQKTVRPVAGMPETGNGAKSHRPVDEATRLPES

SEQ ID NO: 419621 - protein, 345 aa, unidentified
MKNTIVGVDLAKDVIQVCVFTNKKVRSNTEMTPPEFIDFLAKATESTIVFEACGTSNYWKQKAISLGHDARLISAKLVAAVRQNQKTDRNDALAIVQATLLPDVTFISGKSIEQQQLQSIMRLRELCVKQKTATGNQLISILLEFNIRVSSRNGGLRGVVESTLEDAENGLSIEFREALETSWKQYLSIIKSMNTYDDCLEKAMETHSDCKKLLKLEGVGTLNAINLYIALGCAELGVFEKGKEASACIGLTPIQYSSGGKAKLGSIGKYVKNSVLRSQLITGAMSAVSHAVKREAKTQKDVWIKGLVSRRGKKCAAVALANKTVRTAYAMLTQGTEYKAELLSV

SEQ ID NO: 419622 - protein, 359 aa, unidentified
MSTIADGDDLRVVAGVDTHKDVHVAVVLDEVGRLGDTASFPATVRGYRRLTGWVTSFGEVLAIGVEGTGSWGAGLARHLRARGLNVIEVNKPNRHNRRRRGKTDPIDAEAAARAVLAGDATATPKSGDGPVEALRQLRVARAGALKARTAAANQFHSICDTAPDAVRGQLRGLSTRPKMTVAGRYRAGDPLTPTSAAKMALHSIARRWAALDTEIRALDRDIKTILDTIAAPLLARHGVGYETAGSLLCAAGDNPDRLATEASFAALCGTSPVPVSSGRSNRHRLNRAGDRQANAALWRIVIVRLRSRHAPTIDYLERRLTAGNSKRDAIRCLKRYLARELYNDIQTIVATTQRSELAA

SEQ ID NO: 419623 - protein, 348 aa, unidentified
MKKILKQVVGIDVAQKELVVCLGKMYDDLQPDLYASKTFPNTFKGFTSFVQWVKKLTDGSIAVRFVMEATGVYHESLAYYLDDHGLEVSIILPNKISNYARSLDIKTVTDKTASEAICLFGLERRTEKWKRPNVVFKKLRQLSRERGQLVQARTIAKNQLHAEVSQAEPHIGSVARTKKLIAFINKQELEVKAEITELSKKDTAVNASIKIISSVSGIGLITAVNILAETNGFELIRNKRQLTSYAGYDVKEKQSGTSVKGKARISKQGNKYLRKSMHLPALTAIRHDQRFKAVFVRLVSKHGIKMKAVVAVQRKLLEMAYTVFKTNKPYEKNYLNKQIEEAELMEAK

SEQ ID NO: 419624 - protein, 388 aa, unidentified
MQTVADRPEAPTAIRTDLGAIFVSLELSRSTWLITSLWPGGGEKMSKQVVRGGDVAELLERFARLREKARARTGKVFPFVVIQEAGLDGFWIDRALQNEGIESHVVDPASIATSRRRRRAKTDGIDGEVLVRALLAYKRGEPRVCAMIKAPTPEEEDRRRLCRERKVLIVERVRHVNRVKGLLFSQGISGYEPLRRDRRRRLDTLQTGDGRLLPVHLKAQVCRELDRLELLLEQIKAVEAERDVLLAAQQVAAPAPAAMLLDIKGIGPEFAAILWSEGLFRHFDNRRQVASYAGLAPTPWQSGSVDREQGVSKAGNPRLRTTLIQLAWLWLRHQPHSALALWFEERVRRNGGRLKKTTIVALARKLLVALWKYVTAGIVIEGAVMKRT

SEQ ID NO: 419625 - protein, 427 aa, unidentified
MLDNQRLHTRIIKMNFVGIDIAKSFHIVSVIDENEIRVINKAFRIENTTVGFSKLISILESISLDKAEFVIGLEATGIYGENLLEFLKSIGYNIKLLNPFQTSRYREQRTMKKVKNDSIDSLIIAYLLNDGKYSSGYVTDDEYQSLRTLYRNRASIQADMKEVKKRILTQITVTFPEFEGFINPFSVSGLALLEKYPTAQHYKHSSVNRIMKLFRHIQGNNFNESKALKLLALSRESIYSGKAKDARAIAIRSTIRLLKMYLSELDIIESEILSLLDNKATVSTINEIGQELQRSDTLIENLKTIPGVADKTIAAVLSECGDLTRFPSIPKFIGYLGLFPTENSSGKSKIVGHLSKRGSSLVKHALYMSATSCLIHNPQMKQLYDTKRSQGKSKKEAIVAVSRKLATIIYSIFKYNTPYNPNRVFTN

SEQ ID NO: 419626 - protein, 423 aa, unidentified
MDVLYERVAGLDVHKETVVACVRIMADGKARRECRTFAATTEQLTELRAWLEECRCTHVAMEATGVYWIPVFRIVDEGGFELILANAAHIKNVPGRKTDMNDAMWLADLLACGLIKASFIPNEEIQELRALTRTRKQLVREQTRHVQRIDKTLAEANIKLSSVLSDIMGASGRRIIEAMIAGVRQPKQLAELAGKQIKATPKELYDALHGRLTDHHRFLLELHLKQRDSLDETIRKIDLEIDQRIARTHAEVGGSQVPFRALIDLVSTVPGVSLVAAPAILSEIGPDMSRFPTAGHLVAWAGLCPGQNESAGKRKSSRLRKGAPWLKTMLVQCAWAAKRKKDSYYRAQFFRLQSRRGPQKAICAVAASILTAIYNILKDGVEHHDLGGTYFDRRPVELKANHLVARLKKLGFNVQLQPIAETA

SEQ ID NO: 419627 - protein, 358 aa, unidentified
MQRNKISFKGQKIFIGIDVHKRNWDVAIAPEVGNVKRHSQKPSAKELFDFLKKHYPDGDYLAVYESGFSGFATYYALKDVGIASIVIHAADVPTTQYEEVMKTDRIDSVKLVRALKAGLLKGIYIREKENIDDRSVVRVRKTIQKQLSGYKTRVKHMLYCNGVSFPERFEKPGSHWSRAFIKWLKEDVTLLSSTRNSLDLLIRQVETIRMTLLEATKMVCSLSRTERYKNKFDLLMTVPGIGVTVSMCILTEVYDVRRFNNEKQFAAYLGLIPTSHSSGDKVAHGEKTFRGNKLLGPMIVEAAWISVFKDAGLASLYLHYKERMKPQEAIVRIARKLSNIIFAVLKNEKKYVPYHVGK

SEQ ID NO: 419628 - protein, 345 aa, unidentified
MKNVVRQIVGIDVAQDELVVCISRMDEDLYQECYARKVFTNNVKGFGFLTHWVSKHTDAAVELRYVMEATGVYHERLAYYLEEKGCLLSIVLPSKISNFFRTLDVKTVTDKTAAETIAVFGLSRKLTNWKKPRPIFQQLRQLTRERGQIIDERTVLKNQLHAQKAGAKSSQSSIARSMKRIDLLNKQEKEVRAELDEALKEDPEVKKMVQIICTIPGVGELTAMSVLAETNGFDLIRSKKQLTSYAGLDVREKQSGTSVKGKPKISKRGNKYLRRSMHLPALTAIRHDERYKAVFARLVARHGIKMKAVVAVQRKLLEMIYTVFKKNEAYDKNYYLHQAEKMHQL

SEQ ID NO: 419629 - protein, 347 aa, unidentified
MNFYTRQHKHYCGIDLHARAMYVCILDQQGTKLVHKNLPTTPEAFLRLIAPYREDLVVGVECMFTWYWLADLCAKEGMAFVLGHALYMKAIHGGKAKNDKIDAHKIAVLLRGGMFPQAYVYPSEMRATRDLLRRRCHLARKRAELLAHIHNTNSQYNLPEIGKRLANKSNREDVADHFPDPSVRKAIEVDVALIDQYDQLLGEVELYLTRSAKAHDVQPFARLQSVPGIGQILALVILSEIQDIARFPRVQDFVSYCRLVKCAKESNGKRFGTSGKKIGNVHLRWAFAEAAVLFIRQSQPGKEYFAKLEHKHGKAKALTVLAHKLGRAVYYMLSREQAFDLKRFVTA

SEQ ID NO: 419630 - protein, 476 aa, unidentified
MTARSLLTRGPCCAEPSEAHAETVPVGKRTAPEVQEKVAPPEGRYKANLAVHAPRPHGPGREGGGRVRYYLGVDWADQTHAVWVVDESGTKITARTVTHTAEGLGEWGRELDEWRAQGIAVWAAIERPDGRVVDFLLDHGAVVYPVNPKALDRARDRFRQSGAKSDPFDARVLADFLRTDHGHLRPLQPSSEAAQELKLLSEDCQRHIRQQTRLLNQLTATLKAYYPRALEVAELTSALAREFLPAYPTPAALTALTERQWQRWARAHRLTEARTRELWVVLRQPQLPVPAHVVRAKARLMRALMEQLVPVMAAVAQYRKAIDDFFASMPAAQWARTLPIGKHGITAPTLWARLGDAPGRWESFRHLQAHAGTVPVTKRSGKQQRVVQFRFACDKALRYVVDQVAFLSLLSSAWARAYYDQQRARGHSHRQALRALGAKWLKIIFVMWERHVPYDEQHHLATMTRQQLRPRQKQIA

SEQ ID NO: 419631 - protein, 352 aa, unidentified
MLIIGCDFHPGFQQVAIFDNRTGEIQEKRLQHRVEAEQFYRSLAGREVMVGMEACGHYPWFERLLEELGMELWFGDAAKVRASVVRKQKTDRRDAEHLLQLLREDRFPRIWVPSLEVRDVRQLLVHRHKQVQARTRTKNQLQSMALSCGVQKKYKLWTKAGRAELEQLPLLPYAAERRKRLLEGLDGLEAEIGELDRRVAEEARQRPEAVRLMTHPGVGSVTALAMVLTLGPAERFASAKQVGSYFGLIPSEDSSGGKQRLGKISKQGSSFLRFLLVEAGQTAARYDPQLKRFYRRLAARKNRGVVKVAVARKLATRLYLMLREDWTYAQLCQVVMQVSPSHSVVEQDKPTV

SEQ ID NO: 419632 - protein, 495 aa, unidentified
MSDFRIPRRNVRTRPTPAPAPAANDLSRAARHAEKTRRHAEECAKLVSMPVQHAHAAGIDAGDISHWACVESTPDDTDAVREFPAHTAGLRQLVDWLRQCGVTTVALEATGVYAHVLFLTLLEAGFVVVMTAPQFARQIKGRPKTDKRDCQWIQRLHKHGLLPAVFQPDEATQTLRDYVRQRANLVRLSGQHIQRMQKALQLMNLKLTRVLADVTGVTGLMIIRAILAGQRDPQQLAKLRDRRCRHSVADIAQALDGRYRPEHVTELRCCLTLWEKYQEVIGELDEAIDAHLRTMRRQTELPPLPPKPRLRGHKPHDPRFDVRQALYFATGVDLTAIEGIEEMHALTLVSELGTDFTKWPTVKQFTCWLGLCPNWQKTGGKVKSSQTRRVKNRAAYALRLAAWSLLRSKSYLGAYLRRQRSRLGAPKAITALALKLARIVYHLVRYGLAYVKQTEAAYAEQVRERLERQLRRRALELGFELKKIEPPVMPTVTEA

SEQ ID NO: 419633 - protein, 315 aa, unidentified
MSDTFVGVDVAKAEFVVACRPGGSTWTATNDPAGIAATVARLRSVAPSLIVAEATGGYERALVAALAAAGLPLVVANPRQVRDFAKAMGQLAKTDRLDADLLARFAERVRPAPRPLAAPVLQHLDALLTRRRQLLDMLTAERNRLEHATPAVRQSLTDHLRWLEREVADVDQDLDRTIAESPVWRAKENLLRSVPGVGPVVSRTLLAELPELGCLNRKQIAALVGVAPLARDSGTYRGKRSVWGGRAPVRAVLYMGALVATRRNPVIRGFYWRLVGAGKPKKLALVACMRKLLTILNAMMRSNHAWRETTQEVTA

SEQ ID NO: 419634 - protein, 345 aa, unidentified
MELHTIGIDLGKTVFHLVGLNSRGEVVMRKKFSRTQLLRFTANVHVGLIGMEACGGAHFLGRALREQGHEVRLIPAQYVKPYVKTNKSDYIDAEAIAEAVARPTMRFVPIKTDDQLDLQSLHRVRERWVMRRTAVINQIRGLLLERGITLRKGRCHVGAALPGILEDADAKLSGALRMLLAQLKLELDHLDLRIDEADEMIKKTARENEACQRLVAIPGIGPVTATALIAAIGNGGAFRKGREFAAWMGVVPREQSTGGKQKLLGISKRGNSYLRRLFVQGARAVMQQRTKQSSGLSRWLAQLTSRSHRNVAAVALANKIARMAWAVLAKNEQYRPPVLADVAAA

SEQ ID NO: 419635 - protein, 399 aa, unidentified
MFVGWDWASATHAVTVLDDAGVVVDRWAFRHTEQDLVGALERLARLAEPAALPVIIERASGLVVDRLLAAGHPVVPVHPTAFWAARPRWGASGAKSDPGDSYKLADYLRTDGHRLRRLDPPDTGLQELQALVWLREDHVRARTAASNQLGALLEAHWPGPTAVFFRLASPIALAFLSDYPTPQAAARLGQARMASFCRRHSYRGGKTPAQLLARLRSAPTAPVGIPAATLAILVRAHVELLRTLLGTIAELDAAIATRVPCHPRAQLLTALPGVGTINLAQLLAEVGPVLDRVANAEQAAAECGAAPVTRASGKTTGVYFRWAANRQARKALTAFAHNARMQSPWAGRLYADARARGKRNPHATRIVARAWLRVIWACWHTGTPYDRHAHLAEQRHAAA

SEQ ID NO: 419636 - protein, 335 aa, unidentified
MSSLVCGLDVHKDSVYATVMNYGGEIVDKRKLTNDEVVSYLGRYPIDKVAMESSTSIVPVYRALRGKGYEILVSHPKKTRLIAESRIKTDRVDSWALTELARLDALPLSYMPPDDIAALREKVRRRAFLVRMRSKLKVKIKAQLAMNGFTPPSEYGLFTSKGLEWLRSLQLDAVDSYLPVIQTLDIQVGKLSRELRGLASGDEDVRLLMTIPGIGYYSALLVKSEIGTVDRFPDGEKVCSYAGLAPSVSISGRYRRYGSITKEGSRWLRWIMVECVHTHLKYDTSITRAYHAIAERKGAQIAKVAAARRLLMCCYSVLRNREPYHDPAGSYQASS

SEQ ID NO: 419637 - protein, 402 aa, unidentified
MILGCGGMFIVGIDVGKRNHEVTVITSEGQVVCKAFRISNTCTGYNRMMERLGKLTNLKSQFIFAMESTAHYWLALYTRLKKDGYQVVILNPIQTHTMREMFLRKSKTDAKDSLVIAEVIRFGRYAASDIPQEKLLALKELCRNRSYLMDLASDLKRKTVALLDRVFPEYETQFDSIFCKSSLAVLNKYPTPQKLANANLSKLTEILWTSSNGHFGEWKALEMKALARNSFGIADCEGAYSTLILLMLEQIHTLQEKCGALEAQIGALLQQFDTTLTTIPGIGGILAATILSEIGDISRFSSADKLAAYIGVDPAVNQSGEFVGTHVHMSKRGSPYLRRAVWMASVGAVQRDPMFKAYYEKKAAEGLRYMNIIGHVTKKMTAVIYAIMRDNKAYVPVMPVVA

SEQ ID NO: 419638 - protein, 395 aa, unidentified
MSAEGEAIRSNDYRKDTTVKAPSTRPAAVLGLDVGKSSHWACLIDRDGEVLASAPVRNREAELDALFASAPAGTLVVVDQFRNIGSLAVRRARAAGLGVAHLPGLAASRAAGLFAGEAKTDERDAAVIARTALGVPDSLSGVPGRGEALEAARALSSQRDHVVACATRDKNRLRAVLLESCPALEAAVDLSDRRWLELLAGFGGAWGIARSGAEGPQAEAAGEAASGSTAPPPALVEAENRQVRFLAARISEALDEAGALEAETAALLEGDETYACLLTVPGIGPRTAAQLAVSVDIGRFPDHDHLASYCGIAPRVRSSGTSVRSVRASRRGDARLKSLLIFSCNSLVRSSGRYGEYYRACRARGMGHGRALKAVARKRLRAIYAVMRDRVPYRE

SEQ ID NO: 419639 - protein, 455 aa, unidentified
MGANMLRLRKQKSTSPQTPILQPNAAGVDVGANEIYIAVPADRDSQTVRHFRTFTGDLKAAADWLKRCGIQSVAMESTSVYWIPFFQILEESGFTVFLVNARHVKNVPGRKSDVADCQWLQYLHSVGLLRASFRPKQAVCAVRAVLRHRESLVRIASSYVQHMQKALDQMNLQLHHVISDITGVTGIAIIEAILKGERDPAVLAKMRDKRVKASGETIAQALVGDYRREHLFTLRQSLQAYRHCQELIATCDQEIEQYLKEFDAKLDPTQTPLAKPKDGHKPRHNQMKFDLRGHLYRIFGVDLTEIPGINALTAHVLFAEIGPDLSRFANASAFVSWLGLCPDNRVSGGKILSVRTRAVKNRAAMALRMSGQALHGSQSYLGNYFRRMRAKLGGPKAITAAAHKLARIVYHLLTTRQSYQESVFTQCETLNQHRTEARLRRQARALGFDLIKAST

SEQ ID NO: 419640 - protein, 347 aa, unidentified
MTITMIGLDTAKSAFQIHAVDETGKAKIRRKLSRNELIPFFEKQDGCTVVVEACGAAHHWARMLTGLGHQVKLIAPEAVRPFVKKGKKNDAADAAALCAAASRPDVKFVPAKRLEQQGILALHSARCLLVKQQTMLVNAMRSLATEFGLTVPKGIGKLADLLALVDADEAFPKQARQVFIGLLDQCRALAESIETFEAEIVAHARHDETARRLATIPGIGPITASLIAATVADIGVFKSARHFAAWLGLVPRQHSTGGRTRLGRITKAGNREIRTLLVLGATAMVYRAPHWNSAAGIWTRAVLERRPVRLVTVALANKMARIAWALMTRKEVYHAKGCIVAAAEPVA

SEQ ID NO: 419641 - protein, 413 aa, unidentified
MADSIAGIDVHKRVLMVVVCRSTAPAEPERLEFTQRKFGTTSAELLHLRAWLQEQGVAEAVMESTAQYWKPVWLALEQGFRLRLAQAWSNRAPRGKKSDFKDAQRLVRRHLAGELTLSFVPDAEQRLMRTLMRRRTQLTRDRVRIQNQVESLLEETRIKLSSVVSDLFGASGLRILAALAQGQSDPALLASMADERVQCPAEQLTDALTGVVSATHRKLLQQHLDHLKLVDEQREELLQLAATAMRAHEAAVTRLSAMPGIRVLAAQQIVAEAGPQASAFPTAARFSAWIGVCPGRNESAGENHSSRCAKGNLYLRHVLAQAAQAAVRTKGSYFQARFHRLLPRLGYVKAIWAIARNLSVVIWKILHEGVEYIERGQLTTPQAAQRRLQRLKRELRLLGYSDDLLPIPPRATS

SEQ ID NO: 419642 - protein, 460 aa, unidentified
MKVKAVSALRSERGLRPVGRVAEPQVVGLAPQTTMNDRRANTMKTYILRDPKTVEPQTSPRPLRPEPGLTALVNVICGPPVPPPPLLAGLVLFIGLDVHNDSIAVSLAPSDSTEVRRYGIIGGEHDDVLKLVKKLQASHPGATLKFCYEAGPRGFALCRCLRLHGLECILVCPSKVPRKPGERVKTDRRDADQLARLYRAGELTGIYVPEPVDEAMRDLIRARFQVGKAQHRARQQLKMYLLRHNLRYGGQTPWNAAHLRYLAKIKMPFAVQQIVFQEMLEVISEATARLERYDQEIERAVPGWRWEPVVRALMSLRGMALLHAATLVAELGDFNRFDHPGQLMSYLGLVPSEHTTGTDRQQGGITKMGNGPARRALVEAAWQYRAPARISPHLKKRQEGLPKAITDIAWEAQRRLHHRYNHLTRVGKKKSQVAVTAVARELSGFVWAIARQVKPHPAKP

SEQ ID NO: 419643 - protein, 393 aa, unidentified
MYLVGIDIGKLKHSFCLLEKETDEILVEPVFFENSKDGFNALLSSFKHLPQKDILIGTEDTGHYNLALLKFLLDRHYQVALINPVATDLTRKMQGGISKNDKLDTLTICDVLASNKRVKSYRITKVERFDLYEQKQLTREHHNLKEELNQYTNRLQKSIDIVFPEFNSLFKSKYGIVYMNLLKEFGSANAIAHADIRTLRKHFDTGRGKHISLTAEELKEAARNSIGFPSTAEVIQIKHLIARIELIKEQIAEIDKKIEKFSIQNNSPILSIPGISHFSGTSILAELGDIHNYSKPSQIIKYAGVAPLTYESSQFTAQHTAITKKGCKYLRKTLYQIITPVIQYNPVFRKFYLLKIAQGKGHRCAQGHCVRKLMRVIYHLLSTGTQFDPALLQ

SEQ ID NO: 419644 - protein, 344 aa, unidentified
MDHFAGLDVSVKETSVCIVDDTGRIVREVKVASEPEALLSVLKNPAYHFKRIGLEAGPLSQWLFSALAEAGLPVICVETRHMRAVLKAQINKTDRNDARGMAQMMRAGLYRPVHVKTLRSQKLRMLLTHRKLLQSKAIAIDNDLRGTLRNFGLKVGMVGKVRFEARIKELVENLPDLAAMVEPLLIVRRTLREQFCVLHRRLLAIVRDDEVCRRLMTTPGVGPVVSLTYRATVDVPARFRKSKSVGAVFGLTCSKYQSGEVEWSGRISRCGDEMMRVMLYEAAQSILHSKRWSWLKAWAMQIARRRGKKKAIVALARRLAVIMHRIWVDGTEFRWTREQAAAAA

SEQ ID NO: 419645 - protein, 375 aa, unidentified
MLSARPARVPSTRDGEETAITSVAQPAARRITVGVDTHLDLHVAHANDQLGRRVDTIGVPTTPGGYQHLLAWARGLGEVDAWGVEGTGSYGAALARFLHAAGQVVLEVNRPDRQARRRHGKTDPVDAEAAARAVQAGQVTVTPKAGNGQVEMIRSLRVARATAMRARTQAINALKALLVTAPAELREQLRGLPAATLVAAAAALQPGPITSPQAAAMLALGTLARRHQTLSGEIAALTTELERLTRTAAPKLVALFGVGQDSAGALLVAAGDNPDRLRSDACFSMLCGSSPLQASSGKTIRHRLNRGGDRQANAALYRIVLVRLCYHQATRDYMTRRLAEGKSKPEIIRCLKRYVAREVFAVLHERHPTDATGAS

SEQ ID NO: 419646 - protein, 368 aa, unidentified
MKKVSTAAMMQSRNFSVQQKLTIGLDLGDRNSWYCVLDEAGHVQLEQRVRTTAKALREVFGAIPRSRIALEIGTHSPWISRLLSELGHEVIVANARKVRLIGESRKKDDRLDAQTLARLARIDPALLCPVKHRSAQAQADLMMIRARAGLVRARTGLVNTARGLAKSYGERLQGCNVRNMNPEKAEGLSPELQRAVEPLLSAIEELSERICEYNDRIEALAEASYPQAELLQQIKGVGTLIALTFLLTLEDPHRFGKSRDVGSYLGLQPGRRNSGESKPQMHISKEGDPYLRTLLVQGAQHILGPFGVDCDLRRWGLKLAERGGKNGKKRAIVATARKLAVLLHHLWVSGEVYEPLHNSSRTTVAAAA

SEQ ID NO: 419647 - protein, 386 aa, unidentified
MQASNVGTPTVGHVGTIFVAIELSQKSWLMTIHSPDRDRISRHKLTGGDHAGLLGLLETIRTRASHKLGSAPAIVSCYEAGYDGFWLHRLLTAAGIRSHVFDPASIAVEQRGRRAKTDRIDGELLLRTLMAYCRGEPRVVRIVRPPSPEQEDARRETRERDRLVQEQGGHTNRIKALLRLLGMAVGNPRRRDWLAWLMRQRDWQGQAVAPQIKAEIEREHARLMLVREQLAALEQRSAQAQPTPAAAEMARRRGILFQLKGLGPAFSGTLAAEVFYKDFDNHRQVGAYVGLAPSPWKSGGIDREQGISKAGNPRARLAAVELAWLWLRHQPNSALTHWFLARTANASKRVKRIAIVALARKLMVALWRYLTTGLVPDGAVLKPVEA

SEQ ID NO: 419648 - protein, 402 aa, unidentified
MRYFVGLDWAKLTHAVCVIAEDGAIVLRLAVDHTAEGLARLVTALRRFGDPTDLGIAIERPSGLLVDTLVEAGFVVYPIHPNVVKASRPRYSAALGKSDPGDAYLLADLLRTDGHRFRALCSLSDETRALRALVRARTDLVSTRVGLANQLRALLESFWAGAVAIFGEVDSPITLAFLLEYPTPASAARLGPKRLAAFLSAEGYSGRRSPDELLQRLRAAPSVKLGPAEMEAKGTLVGSYATLLDTTVQQIRQLTSAIERAALAHSDATVFTSFPRIGKLNAAQILAELGAHDRFLSEQQLAGEAGVAPVTRMSGKHRAVVFRWACNHRLRAALTWWADNSRRASPWAQAVYLSARQRGCDHPHAIRILTRAWLRVLWRCWKDAKPYDPTQHRAATALTQPA

SEQ ID NO: 419649 - protein, 349 aa, unidentified
MSAKFNSEIAVIGIDIGKNSFHVVGLDRRGAIVLRQKWSRGQVEVRLSNLPPCLIGMEACVGAHHLSRKLTSLGHDARLMPAKYVRPYSRGQKNDFRDAEAIAEAVQRPTMKFVATKTAEQLDLQALHRVRERLVSQRTGIINQIRAFLLERGVAVRQGLRFLRAELPRILARSCKALSPRMLRVIEDLAGDWRRLDERIDGLSTEIEVLARQDAGCERLMSVPGIGPIISSAIVAAIGGGDAFSKGRDFAAWLGLVPKQSSTGDRTILGKISKRGNRYLRVLFVQAAWAVLIKPKSWARHGLKPWLEAAKKRLHHNVVAVALANKLARIAWSVLAHGRVFEATRIRAA

SEQ ID NO: 419650 - protein, 360 aa, unidentified
MYSIGVDFHKAYSHMTVLDAQGQLLKAGKVPNTAEAVRAFVAPYREGGEAVLEATRNWTVMYDLLETELTAVHLAHPLKVRAIAEARIKTDRIDSRILAHLLRCDLLPTAYVRPREQRLSQQVLRQRLFLVRVRTMVKNRIHVLIDRQAHVRETAPQCSDLFGQAGLAWLRRVELAPMERQLLNSELALFDALRERITSSDALVRSLASGDPRVRWARTIPGLGKFFAVLVVHEIGTIQRFATAEKLCAYAGLVPSVHASGGKVFHGRLTKQGNKWLRWAMVEAVRPAVMTDPELRAYYDRLRQRKGSNPAKVATARRLLTLVHHVLSQERPYRKPESQGMSRVKRRPRTALISPLPALG

SEQ ID NO: 419651 - protein, 338 aa, unidentified
MKITTIGLDIAKSVFHAVGVNKAGKLIKKKMLRRKDLLPFVAKIEPCLIVMEACGGASYWARELEQFGHVVKLIAPQYVVPFRQGNKNDYNDALAIAEAAQRPNMRFVKPKSVEQQDVQLLHRMRERLTKQSTALINQVRGMLAEYGIVITKSKSAFKAQLPDILVDEANILTTKGRAIFYQLYEEFTDIDKRLKSCDTQVLNETQNNVVCQRLQTIPGVGPVTATAIYAAVGDGKDFSNGRHFSAWCGLVPKQHSSGGKDNLLGISKRGNAYLRTLFIHGARAVLRHSGSKSDKLSCWAIQLADRRGFNRACVAIANKLARMSWVIAAREEEFRLAM

SEQ ID NO: 419652 - protein, 338 aa, unidentified
MKVHILGIDLAKNVFQLHGVDRKRRPVLVRRLRREQLLGVLGELEPCLIGIEASTGAFYWQRQFEKLGHAVKIMAPQYVKPFVRRQKNDSNDAEAICTAVQQRNMRFVPKKNLEQQDIQALHRARQRLVNHRTALISQMRGLLLDRGIAIAVSATRARRLIPKILAAANDELTKMMREIVSSLYAFMLQIDERIKAFDLKIEAIFKASEVCQRIAKIRGIGPKTSTAMIAAIGDGSDFKNGRHLAAWLGLVPRQHSSGERHVMMGISKRGSQHLRTLLVHGARAVVRTAVRKTDAGSMWVNELRLRRGYNRATVAVANKNARVIWAVLTSGEAYRAAA

SEQ ID NO: 419653 - protein, 355 aa, unidentified
MSYDVKYIGMDVHKEAIVIAVLNGTGKMIMETILETKASSILQFIHGLRGELHVTWEEGTWAAWLYDLLQPQVPHIVVCNPRRNALLKEGSKNDKVDAQKLADLLRTGMLRPVYHGENGLRTLRELARSYQTISKDLTRVMNRMKALYRGWGIPCAGTQVYAARSREEWLSKLPQVGVRRRAELLYQQLDGLQALRREVRPEFLAEGRKHKAAKLLRQIPCIGPIRAARLIALMQTPQRFRSKRQLWTYSGLGIETHDSAQYRFVSGQLQRSRKPQQLRGLNRNHNHEMKEIFKSAATRASYRGPFHDFYTALLAKGMRPEMARLTLARKIAAITLTLWKKEERFDVEQLKTQAA

SEQ ID NO: 419654 - protein, 325 aa, unidentified
MTLHVLGIDIAKETYQVVLLRDDKKRSHTFRNHPDTFAELTAWLAKHHVAQVHACMEATGRYWEDLAVFLFQAGHLVSVVNPARIHGYAKSKLSRNKTDKLDAALIADFCATQNPPLWTPPPPEVHELQAMVRHLEALHQMRTQEGNRLASGVPGDQVLQMLREHVAFIDEQIDALKQRIQDHINQHPGLKQQQDLLTTIPGIGDLTAAKLLGENIQSFSSTRSLAAYAGLSPQKGESGTSVHRRSKLCKVGNGSLRKALYFPAICAMRFNPLIMDFCDRLAHRDKHTMVIIGAAMRKLLCLALGVLKSGVPFDPYYAENVQLTA

SEQ ID NO: 419655 - protein, 348 aa, unidentified
MSHRATNVVTTIGIDIGKNSFHLIGLDGEGAIVLRQKLSRRQVEVRLANLPRCLIGMEACVGAHHLSRQLLGLGHDVRMMPARYVKPFLKGQKNDFRDAEAIAEAVLRPRMRFVATKSVEQLDLQALHRVRARLVRHRTAVINQIRALLLERGIAVRQGHRFLRVALPDILSRSDDELSPRMARMIADLSADWRHLDARLEDVTGEIEALAMADEACRRLMTVPGIGPIISSAMVAAIGEGAAFPKGRDFAAWLGLVPRQISTGDRTILGRISKRGNTYLRTLFIRGARVILLRPANWPKHSFGPWLEAAAKRMHRNVLAVALANKLARIAWSVLARDGLYEGRGTAA

SEQ ID NO: 419656 - protein, 346 aa, unidentified
MLIVGCDYHPRWQQVAWFDTETGEIGEQKLVNGDGEAARWYGQLPVPSLIGLEATGNSQWFLDLLNQLGHEVWVGDAAEIRASYVRRQKNDRRDAGHVLKLLREGRFPRLWVPSAEQRDLRQLLIHRHKLVQIRSRVKNGLQHLAMNQGMQKKSRLWSVAGQKAFRQLPLVGWAQCRRQDLLQLLVYLEQQIAPLDQAAQQAAEQDPQARLLLSQPGVGPITALAFVLTIGDVTRFPRGKQVASYLGLIPREHSSGGRQRLGAISKQGNSFLRMLLVEAAHSVVRLDEGFRKQYAHRCHSKPKGIAKVAAARRLAVRLYWMLRTNTPYPEIVRIESSPRVPLVGKS

SEQ ID NO: 419657 - protein, 368 aa, unidentified
MKQGIRMSGETELASVGIDLGDRWSYWCAVSADGAVSGRGRVCTSVEAFTNQAKAWCGVRVAVENGTHSGWVSRVLSGAGCAVVVANPSRWRGTAHNSKNDGNDAEALARVLRVDPRLLFPLQHRPEAQQQDLAVIRVRAQLIKARTQLVNTARGMVKSLGGRLPRADAQYFVGQTWAEVPSGLRAALRPLYRSLAELNQQIRNLDLKIRQLSRARYPETARLRSVPGVGPVTALSYVLTLADPHRFSSSREAGAYLGLRPRQRQSGERDPDLGIAKNGDCYLRSLLVECAHHVLSRGPDSALKRWGLALAAGGRRPKRRALVAVARKLAVLLHKLWITGQYFCPFPEETVDAGKRAHRSLRAATATL

SEQ ID NO: 419658 - protein, 322 aa, unidentified
MEAQAKFVGIDVSKARLDVGVWPGAESFSTSNDERGIAQLVERVLRLAPRAVVLEASGGLESVAAGELLAAELKVAVVNPRQVREFARSLGRLAKTDRLDALVLAQFAQSADSNGRLTTMRMLDPAQAELKALVARRRQLMQMLVAETNRRERAPKIIRKSVVQSIKGLKRAIAVVEKQVAEVIANSPVQQAKAKLLRAVPGVGPELTAGLLADLPELGELGRRAIASLVGVAPHAHESGIFQGRRMIWGGRAHVRTKLYMAALSAVRFNPLLRAHYVALLERGKARKLALVACMRKLLLILNAMLRDQQTWRPPLELQHSR

SEQ ID NO: 419659 - protein, 419 aa, unidentified
MKNSKTKKIKNINKKTLIVTMDIGKTVHYGYCRAPNGEDVKPFPFYNNRKSFNKFWDQVCQFKAEKNLKDIVVGFESTGSYAEPVCNFLREKPVELVQINPMHSKRIKELEGNSPNKTDKKDPRVIADVISLGHALTLVVPEGAAAELRRLAHARERALKSRTAMLNQLQDLMFIIFPEFSQVMKDTKTKSAQYLIRNHPTSDSIVAMGQKRLTAILRKVSRGKLGAERARELFKAAQASVGIQEGRESILIETQHLVSNIENQDQFIEELEQQMEHYLEQIPYSQSILSIKGIGTVTTAGLIGEVGDFKKFNTIAEVMKLAGLDLYEISSGKHNGQRRISKRGRPLMRKLLFFAAINAVKSKGIMHGYYNQMLDRGMLKMKALIAVSRKLLAIIFALVRNNMHYVENYSCIHDSKLAA

SEQ ID NO: 419660 - protein, 371 aa, unidentified
MKSIIYIGMDVHKKTYSLCALLKETSEIIGETKIPADVSLIIKFIENAKKSVDSDDVQIKTGYEAGCLGYSLYWQLAAKGIECDILAPSTMHRSAKNKVVKNDRRDAKNIAANLANGTYKSVYVPTDEDVEIKEYIRMMHDFKIELKKVKQHINAFLLRFGHHYPGKSKWIPAHIKWLKELELSDMYREILDEYLSQLEILSEKIERFKYRLEELSQKETYNEKIGQLRCINGIDTTAAMTMHAETSDFDRFPTANAFASYCGLTPGEDSSGDSYHRLGITKQGNSMIRTTLVEAAQTLVRGTIGKKGKKVKSKQKDQDVKVIDYADKAVIRLQKKYHRMIFRGVKRNVAITAVARELACFVWGIETGHIS

SEQ ID NO: 419661 - protein, 396 aa, unidentified
MSHIFVGVDIGKRHHEAAGLDDSGREIMAPVRFANTAAGLSTLLKKLPSGSTEIIFGLEATGHYWLNLYCALTTKGFQVKVINPMQSDALRNLFIRQTKTDKKDALIIAEVLRLGRYTATNLPKENIFKLKNLSRFYLEMMSHLLVYKQRLLQVLDKIFPEYEKLFSDPLIKTSKELLKQGVLPEDLVSWDVGKLSRWLKRQSHGRLGDKKAREILDTAADSFGITLATDAFSFELRLLVEQIEFSQKQMADLADKIEEMVEELQTPLTTIPGIGRLLAACILGEIGDIRRFSKAKKLVAFAGLDATVCQSGEFLGTRAHISKRGSPYLRRVLWLAANVARRCNPTFKAFYEKKLAEGKHPQVVMGAVAKKLCLLIHACLSKNEPFNPDYQWKSGS

SEQ ID NO: 419662 - protein, 359 aa, unidentified
MNKHKYVGLDVDQATIVAAVEDASGNFLMETFLPTRAADLRDFFKGLKGTIHTAFEEGAQASWLYDLIEPLAEEVVVCDPRRNKLIQTGNKGDRPDARKLARLLRLGELHAVYHGERGTRGLKELVHGYDYLVGDLTRAKNRLKGAFRSRAICCRGTKVYSADERKEWLEKVDLPAVRTRVSSLYEQLDYLRKLRDQAHKEMIREARKHPAYKLLVKVAGLGPVRTSQIIAAVGSPHRFRTKRQFWPYCGLAVVTHNSSEYEIVDGQRRRRNKPLQTRGLNRNFNRTMKQVFKGAAKTAITAEPFRQYYQRMIDEKMRPEMALLTVARKISAITLAIWKKGENFDPERVNQAARDSGDQ

SEQ ID NO: 419663 - protein, 443 aa, unidentified
MSEPMPLAKSEPEWAAFAAIDWADQKHFWRLVPAGSSQQEQGELENTPEAVEAWAAALQQRFGGRPIAVCLEQVRGALVYMLSKYAHLVLFPVHPTMAARYRETFCTSGAKDDPGDTASLLDLLMRHRERLRPLQPDTVETRLMQFLVEERRRTVNEKTRQSNRLTDCLKLYFPQVLRWFDGVDTALDLLERWPSLEELRRAHPGTLRKFFHEHNCRSEERNQERIDAIYQAVPASHDAAVLEAGALTARGLVALLRTLRDHIDKLDRRIAELVATHPEGALFASLPGAGSVLVPRLIVAFGTRRERYESAYEMQCYSGIAPVKEASGKTSWVHFRRACPKFLRQTFHEFALHSIGQSEWAKAYYQHLREDKNKSHQAAVRSLAYKWIRIIFRCWKDGKPYDEEVYLNSLRRRGSQLGAALAPATGLGWQTVAGFQKLSENKA

SEQ ID NO: 419664 - protein, 376 aa, unidentified
MNEKLRFLGLDVHAETIAVAVAEPNGEVRSLGMIANREDSIRKFIRKLGSPEHLRACYEAGPTGFVLYWQLTQLGVKCDVVAPSLVPKKPGDRVKTDRRDALKLARSHRSDDLTAVWVPDEGSEALRDLVRAREAAKQDQLRAKHRLTKFLLRTGQRPPLGVKAWTEKYVEWVQQVRYTHPAQEATLLDCLNEVQHMEERVKRLEQSIVEVIQLAPAPMQEVVRGLQALRGIAHISAVTIVVELGNITSRFESARDLMGYSGAFPSEDSTGKRIRRGGITKSGNAHLRRIVVESAWSYRHRPAIGARLRRRQEGLPAEITEIAWKAQNRLHKRYMTLMARGKEQRKTMTAIARELLGFIWAIGIKAEAACKQQMAA

SEQ ID NO: 419665 - protein, 339 aa, unidentified
MQKYVLFIGIDISKQWIDVCLCQEAQKKGLPHKRFDNDVDGFQQMLLFVSGHARKLGLEGRWLFCMEHTGVYTMPLCCFLREQQLDYVLESALQISKSLGIRRGKSDRADAADIARYVYKNHQQLRLHQIPSDNLLKIKHLLSLDSRLKKARILLATSAKEIVEFNSIGLPDLLAKASQEATAHLDQQIKAVAKAILELIEGSPELCGIYRLVTSVKGVGPIIGASLLVWTNAFRGFETARQFACYIGIAPFEHSSGSSVKQPDQVSNLANKKLKALLSNGAQSAVKHDADLKAYYARKVKEGKNRFLVQNNVKNKLVQRIFAVVKRGTPYVELGRHRA

SEQ ID NO: 419666 - protein, 355 aa, unidentified
MDESITAAMGLTIGLDLGDRFTEGRVLDASGEVVESFRVRTTEPTLASRLSSFAPSRVVLEVGTHSPWVSRVVTRLGHEGIVANPRRVRLISENDSKSDGVDAELLARLGRVDPALLKPIVHRGADAQRDRMLIQSRDGFVRARTQLVNQARGLAKALGTRMPTSSTDAFPKRVRAVIPLDLFPGLEPLLETIDHLSRTIRQFDREIERLCRERYPETEFLRQVPGVGPITALFYVLTIEDPSRFAKSRSVGAYLGLRPKQRDSGEQQPQLRITKAGDALLRRLLVSAAHYVLGPFGPDTDLRRAGLRMAERGGNASKKRAIVAVARRLAVLLHRLWVTQEEYVALRESNKVEAA

SEQ ID NO: 419667 - protein, 369 aa, unidentified
MPHVTSIGLDVHARSVAAAAFNPFTGEVVHRDFGTDAAEIAEWALGFEEPRACYESGPTGFHMARELRALGLDCAVAAVSKMQRPAADARRKNDRRDAEFIARMLATHNIVEVPLPDAAVEAARDLDRALDDATRELRRSRQRLNMFLIRLGHVWDERNADGTRKGSWTRAHWRWISGIRLEGPQRDVLEYYVTAARCAESDRRQLEKKVLALARTDRWRPAVEALSCIKGIDTLTAFRLAAEAGSFTRFRTAPAFASWCGLVPSERSSGETERRGGITKTGNRLARTALVESAWHYLTCTPRPKAPAPGADVPAAIRARADDCTARLCRRREALAAAGKSSCKANAAVARELACWVWEIGRRAEGTLG

SEQ ID NO: 419668 - protein, 381 aa, unidentified
MKQNTYYVGLDVHKENISVAIAEGGGSREVRHLGEISNDLHAIEKLLSKLRRVHEGGSFEVCYEAGPCGFGIARRLEQLGVTCLVIAPSLIPQRSGDRVKTDKRDSIKLARLLRAGELTSVYVPDPADEAIRDLCRARSDAVDDQRRSRFRLKAFLLRNGYRYQGKSTWGVAHMRYLRELVLPHPAQKAILEEYLMAIESARERISRAEASMELMKESWHLKAAVEALMAMRGFRLVAAMISVSELGDIHRFEHPRKLMAYLGLTGSEHSSGEKQRQGGISRAGNAHLRWLMVECAQHYALPPKVSKELSNRQQGVSREVLSISWKAQNRLHLRLMRLSARRVPRNKALVAVARELCGFIWAVLRSCPCYLSTQGEERMAA

SEQ ID NO: 419669 - protein, 320 aa, unidentified
MQTPSVVLNIGADVAKDEIVVACSEGSFPVRRIANQRAAVTAFLKGLPQGSRIGLESTGIYHELLAEAAHKLGFVVFVLNPKDARHYAKGVGLRGKTDRVDAELIARMIAHEYTKLHVWIPPTPEQREMGRLLKRRAKLSSLRQALAMSLTGLDGFGADLKALRARFDQVIARIDQRVKTLVEASPDRKQHVTHLRTIYGVGPVVSAALVNILERVPLNSADAFVAFTGLDPRPDESGKHRGKRRLSKRGPADLRRLLYLAAMSAIKTQAWKPLYERYRAKGLSSTATFVILARRIARTAWSMYTYKTEFDPTRLTKTLT

SEQ ID NO: 419670 - protein, 365 aa, unidentified
MGAALHGVRWPPDPVRGARRPFPLWQQPLVSLGTACCSVTHDRTVARLSIAWTRQVTVTDLICGVDVCSAALDVRLGRDGATARSTNDGAGIIELIAFCKEHQVSLLALEATGGYERLAFAMLWSAGLATAIVNPRAVRRFAEAMGFLEKTDRIDSGIIAWFAEVKRIAPRQPDGAAQRQLAALVTRLRQLTELRTAQDNQRRLVTEPAALASFAELLSLIARQIKAIGEQIGKLIATDPLWHKLDLAWREIKGVADRTVARLMAELPEIGTLSSKAVSKLAGLAPIARDSGKLSGNRSVRGGRSGIRSILFVVAELVRRHNPDFAAFHRRLTLAGKPKKVIRIALAHKLLVRLNAKARDVRAQL

SEQ ID NO: 419671 - protein, 360 aa, unidentified
MDKYIGFDIDSKKTIACVVQKGKKDEYATISADIESMRKYLRQQRAGIYRLHLTFEISGQAGFIYDSLIDSVDTITVGNPSKMTWIYRTAKKTDRIDARKQAVLLSIGEIPAVHMPNRQVRQWRNTILHRRKIVSRITAIKNRIRAVLKSVGFKKAFHRGSWWKKANRFWMRRLAEEGQISSEDIWRMNLCDLLDEVELLEKQLHRVTEYLDSYLDKQAGGKLLMSIPGVGPRTAEAVLAYTDDVSRFGRSKQYCAYFGMTPRLDESGSLKRLGHISKQGPSVVRWLLCESSWKVIRKSKAMRAFYERVMCGQAGRKKIAIVAVGRKLLSIMRAMQMTGELFNEELVCRECGFIEMMKTA

SEQ ID NO: 419672 - protein, 313 aa, unidentified
MSEVTRRLMVRVGVDIAKQVVHVHAVDGAGRRVVARALKRDQFLSRCAQHLPAGCLVAMEACSGAHHWARQLMAMGFAARLIAPHLVTPYRMEGRGGKNDATDAAAICEAASRPQMRFVPIKTTVQQGLMALHAIREGFKQDRTAWTNRIRGVLAEFGLVFGKSPKVLRAALPDVLEDAGNELSGVARMALQQALDHWRGLDDAMQWCDRQIKEHVRSCDAARRAARVIGIGELGASAFTASVADFHQFKSGRQFGAWLGIVPRQNSSGGKASLGRITKRGDDYLRTLLIQGAKSAVMSVDGSVRISVCEAVC

SEQ ID NO: 419673 - protein, 321 aa, unidentified
MAFWGIDISKAKFDVALLVAGKVKKTHVFDNVPDGFKALSSWLLKQGVTSASACMEATGCYGDALATYLYDQGFVVSVVNPAQIKSFGGAQLNRAKTDKADAKLIAQFYQQMNPAHWTPPPLHVRELQALVQRLSALAQMERQEHNRMDTAPAVIRPSIATVLATIKAEIKAVEAMIHDHIDRHPDLKDQSVLLESIPGIGQATIFRVLAFVGDVQRFDHAKELAAFVGLNPTVHQSGSSVRGKPHLSKKGNSVLRKALYMPAIVARRYNPVIKEFADRLKKAGKPNMVIIGAVMRKLLHIIYGVLKSGMPFDPSWSANHA

SEQ ID NO: 419674 - protein, 416 aa, unidentified
MKGSQNTRDVQRYIALDIHKEYVLAGGMSAAQEWTLPPRKIEMGRFREWAMKNLCDTDGVVIETTTNVWDIYDLVQPRVARAVVAHAGAVRQIAEARVKTDKEDVKRLIRLLIADIVPEVWVPPVYVRELRGLISYRQRLVKTGTMIRNRLHSLLHRHNLPLPEDGLASKEWWDQQQAISALERIQIHQEIVMLAQIEKHKTEIDHELGRQSLGQVWGKQAIQLMQLPGIGVVVAMTVLSAIGDISRFESANKLVGYSGLGAGVHDSGKEHHEKRITKSGRKELRWAMVEAAWRAVRMSPYWKEQYEKYLRRMRRPNQAIVVVARKLLVVVWHVLSKEETDCRASEEDLAYKMLLWSWSLSEDIRMGLTHKQFAKYALMKLGVQTDLTRFVRGKVPRRIASKEEVLARMTELGLTG

SEQ ID NO: 419675 - protein, 345 aa, unidentified
MPNIEIGVDFMVKENFIYVGIDLHKETHTAVMIDCYNQKLGEITFPNRPADFPKLVTKVKKCNTDAKEVVYGLENAYGYGRPLAVWLIDKGYFVKDVNTAISHRQAKHRGAMYRKSDSDDAEAIALATLNMLDKLPDAYPNDAYWSLGQLVHRRDNIMKQRTRLVNQLHEQLCIAYPSYKQFFNDISRPTALYFWEHYPSRKYLKGKSVEDLRAELVPVSHNKCSTRTCEKILDAIAGDKVKNNAYQDARDMVTLSIVSDLQHYDKQLAEVDKMLEQMYKMLGCTLTTIPGVNVITAVKILAEIGDIKRFSNANKLAQFAGIAPLHLSSSGKGKDVATKQGNRRL

SEQ ID NO: 419676 - protein, 412 aa, unidentified
MKDLLEISCGLDVHKEKIVACILTGPLGKPTRSEIREFTTLIPDMIALRDWIVSQNCHHVAMESTGIYWMPIYEILEDAFSGDITLLVVNARHMKNVPGKKTDMRDSEWISTLLRAGLLNGSFIPEKRIREFRDLNRYRKSVIHDITSQKNRIEKFLQSSGFRLSSFISDIFGASGRNIILHLMEHGQIDKAALDSCLKTKTRNRIDEILMSVNGTLSEHQKTFLKILMTHYDSLKEHLTEVETSLEEDMAPFTLQVEQLNSIYGISTTASCAIIAEIGIDMEPFKTAEHICSWAGLCPGNNESAGKRKSASVTKGNPYIKSMLCEIAWVIAGKRNTYLSAWYWRIKQKKGAKKAIVALARKLLVIIYTMLKQGTLFDESCFETRRKHCEQKQLSRYIRELEKHGYHVEAQS

SEQ ID NO: 419677 - protein, 340 aa, unidentified
MQITTIGLDIAKNVFQVHGIDAAEKVVVRKQLRRGQVMKFFAALPPCLIGMEACASAHYWARELTKLGHEVRLMPAKDVKAYVKRNKNDAADAEAICEAVGRPRMRLVRAKSAEQQGRLMQHRARDLLLRQQTQVINALRAHMAELGIVAAQGREGLKQLLKNIADEKDARLPIDARASLIVLAAQLQALHTMIGSIERRIVVQHRANEASKRLECIHGIGVIGASAITATVNDPGAFRSGRDFAAWIGLVPRQDSTGGKQKLGPISKRGDRYLRRILVVGAISVLRRAKLNPEKYPWLTQLLARRPFKVVAIALANKMARIAWALLANGSHYRPRLATT

SEQ ID NO: 419678 - protein, 390 aa, unidentified
MNGEGVKEMQRAINTATVSANTLECALELSKKTWLLAIQFPDRVQPSVYTIKGGDAAALLEKLIAARNRWAKVSGSPPSIVLCYEVGYDAFWLARFLMAHGIECLVIDPGSLEVKRRPRRVKTDRVDLKKLLRTLSAWRRGERHVWSVVRIPTIEEEDLRHSHRERSRLISERTAHMNRIKGLLFAQGIRVDNIPKTLTLEKLVTGDGRRLPPRLAAEIVREMQRLAVVEEQIEAVERERDTAPTACKETEKKRHLLLQLKSIGPTNAALLSREVYYRHFDNQRQIGSFLGLTPSPFKSGAEERCQGISRAGSGRVRAVMIEATWLWVRHQPKSALTRWFLQRTAGQSKRVRKIMIVALARKLAIALWRFVELGLVPEGAILSPPVKARS

SEQ ID NO: 419679 - protein, 425 aa, unidentified
MHSISNKKINQVTDQTLVVGMDIAKKKHYACFVDERGRVLKKSFPVLQSKEGLEWLYQCIVEAMKEFGKTEVIVGIEPTGHYWLNLAYFLDEKGIPLVMTNPMHVKRSKELDDNLPTKHDAKDALVIARLVKDGRFSYPRILKGMEAELRVGATFRSKLVEEQGAVRNQMIRWLDRYFPEFTQVFPSFGKMALAVLEYTPFPSDLAGKELEEVLALYRQSEGLQSPQRPKAKKLIELAQHSIGVTEGQQMARIEIATLVRRYRQLEEEIEALTQQLTELVQTSVEYEWLKTVPGLGDATIVELLSEIGSFSHYQDPRQLLKLAGLTLREHSSGQHKGQKRISKRGRRRLRALLFRVMMPMIRHNEAFRQLHEYYTTRPDNPLRKKQSIVVLCGKLLKVLHAVCTKHQAFDAKRMMQDIFGLETAA

SEQ ID NO: 419680 - protein, 340 aa, unidentified
MKGLYGAIDLHSNNNYSVISDQEDQVLCERRLGNSLEEVDAFFRPFRSELNALVLESTYNGYWLMDGLAELGYEVKLANPSQMQPYQGLKHRDDASDGLWLNRMHRLGVLPEGYIYPRPERGIRDLLRKRLFLVQHRTSLINSMKHQYQSWKAKDVSASEIKKLSSEEVSASFDDGFVRQGVEALRQSMEALSSQISGIEASLKHVLREDRLVSQLQILPGIGPLLAWTIRLEIGELARFGEDWRPYLSYCGLVESKQESNEKIKGHGNRKNRNRYLRWAYAEAAISALRYPKIRVYHDRLMRKKGKIKAKAILASKIARVSFMMMRDPGMIYAQEKLWG

SEQ ID NO: 419681 - protein, 402 aa, unidentified
MNAVGIDVSKGKSMVAIMRPFGEIVSTPFEIKHTTSDIHSLVELINSVEGESRIVMEHTGRYYEVLAHQLSEANLFVSTINPKLIKDFDNDSLRKVKSDKADAVKIARYALDKWQNLKQYSVMDELRNQLKTMNRQFGFYMKHKTAMKNNLISILDQTYPGVNTYFDSPARSDGSQKWVDFASTYWHVDCVCKMSKNAFINHYQNWCKRKKYNFSQSKAEEIYGKAKELVPVLPKDDITKLIIKQAVDQLNSVSTTVESLRTLMNETASKLPEYPVVMAMKGVGTSLRPQLMAEIGDVSRFTHKGVITAFAGVDPGVNKSGSYEQKSVPTSKRGSSVLRKTLFQVMDVLIKTHPQDNPVYQFIDKKRAPGKPYYVYMTAGANKFLRIYYGRVKEYLSSLPES

SEQ ID NO: 419682 - protein, 394 aa, unidentified
MILIGIDIGKNQHTFSIIDKETGEILSNPSVFNNNQEGFLLLIKKLNNYSKSELLIGMEDTGHYHFALLKYLLNRRYTVALINPTTTDLTRKLQGGITKNDPLDSLTICDVIGSNQRKKPYRITKVNRFDLYEQKQLTRHHHNLKEELNTYKNRLQKCIDIVFPEFNSLFRSKYGIVYMNVLKTFASAEKIANSDIRTIRKCFEFDGRGKRISLSAEQLKATAKVSIGISSVAEEIQIRHLVCQIEMIEEQLSEIDKKIEEFSLQNNSPILSIPGISHFSGTSILAELGDICNYTKASQIIKFAGVAPYHYESSQFTAQHTAITKKGSRYLRKTLYQIILPVINHNRVFTAYYNKKLAQGKGHRCAQGHCIRKLLRIIYHLLSTGQTFDPTLLI

SEQ ID NO: 419683 - protein, 387 aa, unidentified
MTQVDDLNRSVDAFDQDTSLTVVVEMSEASWLVTGMVPGVDRRPLKKLKPDPDALLRLVERWRSEAEKTGRTIERVALAYEAGRDGFWLARWLRVRGIEVHVIHSTSVAVSREHRRAKTDRLDTAMLMRVFLGWLRGERGHCGMVAIPTLEEEDAKRPSRERESLVGEHTRIVNRMKSALARLGIRGFKPKLRKAPERLAALRTPEGSAIPANMLDEFRRDMARLAVVREQIEEIEQARLERLEQAPAARPNAMVHLLARIIGVGIETADMLVREVLSRNLRDRRAVARYAGLTGSPDESGSKRREKGLARAGNARVRRGLIQLAWRLLMFQKDSALARWYRARTEGPKGARKTTMIVALARKLLIALWRMVTTGVVPEGFVLRQIA

SEQ ID NO: 419684 - protein, 316 aa, unidentified
MISYFVGFDVSKATLDMGFFPESVPQFQVKNDPEGFAQLIACLNELEVERVLLEATGGYERAVLKALRLEGLNVVRVNPRRCRDYASAMGKIAKTDKIDAQMLARFARDFEGLPQVEPNQDRDELGELIKLRGNLVQHRDDDKRRVKQTTSATAITVYTEHIAYLNDQIKALDKAIEHASNVLDRQTARRLRSVKGIGVISCGTFMAYLPELGTVTGREIAALAGLAPYNKDSGKKSGPRKIEGGRYRVRSAAYMSIWSMIQHVPEVRTRYEALIARGKRAKVAAVACMRVLLVRLNAMLRDGAEWKAPKPQVPAT

SEQ ID NO: 419685 - protein, 337 aa, unidentified
MKLYCGIDLHSSNSVIAVMDEQDRAVYEKRLDNDLNGILEALNPFKDEIVGCVVESTYNWYWLVDGLMEAGYRVYLAHTGALPQYAGLKFTNDHSDARHLAHLLRLDILPTGYIYPKQERALRDLLRRRLVLVRQKTLHHLSLQSLIARHSGQRLNANAIKQLEQEQLGEYLESPILLGGEITHQARCWLDGAIARIERELQKHLRPRTDYQLLQSMPGVGPALGTTIALETGTIERFPRPGKYCSYARCVKSEKISNGKYKGQGNRKNGNKYLAWAFMEAAHYSAIWNPQIKRYYQRKQAKAHVLVAKKAVANKLARACYHMLKRGEPFDVKRAFG

SEQ ID NO: 419686 - protein, 363 aa, unidentified
MMVPGLRRGCLEVLRMLMGGLDVHREQITFDWVDHETGEVARGRITPATRERFRSWLQELPSREGAFALEGCTGWRFVVEALQEAGFEAHLSEPADSAALRGRKRRAKNDRVDARHQRELLEQGRLPASWIPPAHIADLRQTVRLRKVLAEVRTQWQQRMHAVLFHLGLAKPEGGLLTCSSRVYLERLDAPDACRQVISVGLRQIDQVQQELAFIDRWLRAYARQQPGCRALIAKHYGVSWITGPTILAELGDARRFRNRRAIVRHTGLDITVYASDSKRSPGHLSRQGPETLRWALYEAAKCHARRGAPHHGLYQQVKERQGGKRAALSVARQLAREIRHTLIALGDDALAPVDPSPEFMLA

SEQ ID NO: 419687 - protein, 444 aa, unidentified
MNTKFKALQIKRQFLIDKYVVGIDPAKARHQAAIVDRHGMLKGKPFSFSNSLAGYQNLLRKVKMQTVDVNAQNIVYAIESACNLWLTLAHFLRKQGYDVLVVSPLSTKHSRPMVGHDFSRTDPKDALLVASNAQRGYFDYYRDYSDEIKAMHTLSISYDKLRQNLVQQRNRIHALMDRCFPEFLKEFSLESKTACYLLNKYFLPCHFQSMDIEGESEMIRRLSRGNCGRSCLEALQKHANSSIGITLDKLEEQAERLVLDSWLAMQVVIEKQMAAILEQLTMLARQSPYFKILVSLKGISDKQAALFIAETRDLAGFSHYKQIEKYAGYNLRQSQSADYTGPRHINHIGNRRLSGLLYKMCEETIKYIPEVRVKFVRRQLKKRCYRKNVVACASSLLRLIMLLIKENRLYQVRTNRSAECLMFLEKKYASLKRKDKARFGKKVA

SEQ ID NO: 419688 - protein, 364 aa, unidentified
MKRKVYVGMDVHKETIQIAYLTSNSKEILKEQQIKHNEVQIKKFIKKLKTEWNEIYCCYEAGVTGYPLYRYLKSLGVNCILVAPGKIPRQNTDKIKTDKRDAIKLARLMQSGELESIHVPSEEDEAVRDYLRSRDSLRLDLGRNRQRLMKFLLRKDIKYSTTKYWTVSHYKWLNNLHFNNEILQETFNDYYSRVRVQEENLKSMDKKIQEIAESEPYREKVGILRCFRGVDYLTAMFLLCEVNDFKRFKTAGSFMSFLGLVPGEYSSGSKRKQTGITKTGSPRLRRILTEAAWQHRFPGTGSKIITARRSGQPALVVALAEKASPRLHKKFRNLQLRGKTPQVMITAVSRELSGFLWAAMNLVA

SEQ ID NO: 419689 - protein, 354 aa, unidentified
MSSVSMIGLDTAKATFQVHGIDETGRATLKRKLRRDGVVAFFAAQPACTVVLEACGAAHYWGRVLGALGHEVKLVPPEAARPFVKRGRKNDAADAAAICEAARRPEVKFVPVKTAERQGVLALHTARALLVKQQTMLANAVRGLAAEFGLTAPRGLVKLGQLMEMAEAQEAAVLPEAARQALRALHGRFRALEEEAATLERAITSHARRDETARRLATIPGVGPITASLIAATVTDIGLFGSARAFAAWLGLVPRQFSTGGKTRLGRITKAGNGAIRTSLVVGATSMIVRAGRWDSPTGTWIRGVLARRPTRLATVALANKMARVAWALMTRKESYRPRGRAAAAATPETAATA

SEQ ID NO: 419690 - protein, 373 aa, unidentified
MTKNLRYLGLDVHAETIAVALAEPGGEVRSLGIIPNEPSAVAKLVRKLGGREQLRACYEAGPCGYVLYWQLTKLGVACDVVAPTLVPTKPGDRVKTDRRDAEKLARCHRAGDLTAVWVPDAAHEALRDLVRAREAAKADQLRARHRVSKFLLRHGRRAPGDVKPWTQRHRRWLDTVTFAPVAQQTTLADYIHEVDHAGARLERLESALDLAIAAAPPAMQAIMRALQCLRGVRQLTAATIVSEIGPLSRFAHPRQLMGYSGTVPSEYSSGSSVHRGAITKTGNAHLRRVLVEAAWAYRFPPKCGDALRTRQRGQPPGITDIAWKAQQRLHTRYRRLLGRGKPVPHVITAVARELVGFIWAIGIAAEREVAIAA

SEQ ID NO: 419691 - protein, 343 aa, unidentified
MKLIRVGVDLAKNVFQVHGVDRNETAVWRRKLTRENWLKVLLETVEPGCEIGMESCGGAHHWARCLLAHGFKVRLVAPQLVKPYVKSNKNDANDAEAICEAMSRPHMRFVSMKTVEQQDIQAVHRIRGELTKQRTAKANQIRGLVAEYGLVAPLKLVHLRRALPCWLEDAENGLTARFRRLLNGLWGDLQALDERMAELDREIAVIAQSDPVARRLQQLRGVGPIIATALVAAVGNGEQFANGRQMSAALGLTPRQRSSGGKERLLGISNRGDAYLRVLLIHGARSVIRTSRGKEDRLSQWVTRLTARSHANVAVVAMANKTTRMAWAMLKNGTDYKPAMVTR

SEQ ID NO: 419692 - protein, 412 aa, unidentified
MDVLVERCAGLDVHRDSVMVTVRVPGARRRQRERHTRAFGTTIAQLEALGDWLAGFGVTLVGMEATGIYWRPVFDLLEPRFQCWLLNAQHLHNVPGRKSDVIDSAWICELVEHGLVRPSFVPPPEIRRLRELTRLRKAEIQERTRTIQRLEKLLQSVGIKLTSVASEAYSVSARAMLEALLAGVSDPNELAELARGRLRAKIPQLREALANRFELAHHGVLVSQLLGHIDALDQAIAALDERIAVATEPYAELIELVSTIPGVKQRTAQVLIAECGTDMSVFPTVRHFASWARICPGTNKSAGKNRPGKTMRGSRWVREALTEAAKAAARTKGTYLASHYWQIRGRRGEPKAIGATRHDILVAYYHIVRDRVPYRDLGPDWLARRYSPEHRARRLVRQLEALGLKVTLEAAA

SEQ ID NO: 419693 - protein, 453 aa, unidentified
MPKTKSFAPQNLTRMNPGAAAIDIGSTMHMAAVNPNSDDMPIRAFGTFTHDLHDLAAWFRSCGVTSVAMESTGVYWIPAFEILEQHGFEVILVNARYAKNVPGRKTDVNDAAWLRQLHSYGLLRGSFRPNAQIATLRAYLRQRERLVEYAAAHIQHMQKALMEMNLQLHHVVSDITGVTGMKIIRAIVAGERDPDVLASLRDVRCHSSVDTIRASLIGNDRDEHVFALSQSLQLYDFYQLKMIECDRKLEASIASMTAEPEAPLAPLPKIRTKTKQTNAPSFDVRAALYGLTGADLTQIHGLGSSLALKLIGECGTDLRAWPTAKHFTSWLCLAPGNKISGGKVLSSRTRRSSSRAAALLRLAATTIGRSDTALGAFYRRLAGRIGKQKAVTATARKIAVLFYNALRYGMVYRDPGAAAYDERHRGRVIANLQRRARSMGYDLSPMAAGDCVS

SEQ ID NO: 419694 - protein, 369 aa, unidentified
MKPAMSVLGIDIAKRVFHAVGMDERGKIVFRKRLSRHDLMPFMAKLPPVLIGMEACGGAHYWARRFREHGHDVKLLAPQFVKPFVKSNKNDMRDAEAIAEAVMRPTMRFVPIKEIDQQDIQALHRVRERLISERTALINEVHGLLHEYGIVLPKGVAKFRQAVVEKLERDKDKLTALGQELFWKLLQEFVDLEKRIASYQEKLEGLATTHPECQRLMTIPGVGAITATALVAAVGDVGVFKNGRQFAAWLGLVPKQHSTGGQTRLLGISKRGDSYVRKLLIHGARATLRWVKRKTDGRSQWIQGLLERRGWNRTAVAVANKNARIVWALLSRGGVYDTNASSSGGQAPWRHREWCDEGQARVRGKDCNR

SEQ ID NO: 419695 - protein, 325 aa, unidentified
MKTIYLGIDVSANTLDICVKEEEFSHFVIENKAKSIKTFLKPFEKKGSLVIAMENTGIYNYELYSVLEKQQHRAYVICPIHMSKSFGLTRGKSDKVDAQRICQFIIKNQDELAEWKPTPDKIKELKILVTERDFLMKEKRSLLTRKAYYKRLVKLDHSKKLSKLNDKRLKALDQQVIEIEALIKDLVKADQELKEQQALITSIPGVGEVLAWTMLVKTEGFTRFSDPRKFACYSGVAPFGRASGTSYHRRPRVSSYADKSVKSLLHMSAMSAIRYNKDLKKYYERKILEGKNKMATLNAVRNKLIHRMFAVIKNQKPYQNDLVLS

SEQ ID NO: 419696 - protein, 445 aa, unidentified
MAFKSLQQKRQFVNGKYIIGIDPSKIKHQAAVLDTNGIQRGKAFTFKTTHQGYHHDLWKRLDQIIPSDVDNDHIVFAVETACNLWQTLAFYLKAKGYTVLLVSPLSTKHTRPVMNHDFSKTDPKDALIIANNARDGYFDYYQEFTPLVNAMHRLSITYCKLNKNLTQNKQRLRSLVEQIFPEFITVLPPDTKTAIYLFKTYMTPQDFLNIDICKEAEQIKRISRHNHGIKTLLRLKEQAEHSIGIQLKNEEIIAERLSLIAWITMIETIEGQMESIIEQLITLAQQTPYWDVLISFKGKGVSEKLAALFIAETRDLDQYNHHKKIEKFAGYNLRQAQSGNYVGPRRMSHIGNKRLSWIIYKMTEETTKYLPEVRMKYLRRQMNTKSKYRKNIIACSSPLLNLIVALVKQRRPYELREEKVKKLQQLEQKYQAYKQSKKSKRKKAA

SEQ ID NO: 419697 - protein, 387 aa, unidentified
MKLYIGMDVDKDKCIITSLDKNGEQIDQYRIENNSTEIERFIQKTPRNAEIALESSTCSKPIYQQLKKHGMKVHMAAPGKISLISKSKKKTDPNDSRLLADLLRLGYLPESYVPNDEIENLRKLVRYRRSLGEKKTVVKNQVHAILMRNGIKHGFSDLFGRDGTRFLKNQSLPLTEQTILEGGLREIGFLYEESNVMDLRLAEIAMEYKDVRLLMSIPGVGYYSALVIISEIGDISRFPCAKKLVGYAGLAPRVYQSGNIKRYGRISKGGPSILRWVLTIAAEGAIKKSGKLKRFHARLNKHIGYSKAVVATARKLLIIIFHMLTNGVKYEERDDDLTHRKIRMMETKSKRMKRLKDKETSISEKHKKLMNKGMKMLINSDSDANLG

SEQ ID NO: 419698 - protein, 335 aa, unidentified
MPILAELVDAVVGVDTHRDTHEVEIAHPNGAVIATCQISNATSGYAEVLAWILDHAPGPRLVVSIEGTRSYGIGLARAVSAAGVAVIECEQPTRNTRRGRGKSDPIDAHLAVLSALRLDADRLPTPRADGDREALRILLGARQELTTTNTAQTNRLRALLLTGDDHDRDRARGKLSDTALTALARRRLPRDADRAQAIRHAEIRRLALALREATHALAANRAQLQAIIDELAPGLTDRRGIGPVSAAQAVVSFSHPGRCRNEAAFAALAGTSPLPASSGNTVRHRLNRGGDRALNRAIHTIAMTRARCCPTTRAYITRRRAEGKTDREIRRCLKR

SEQ ID NO: 419699 - protein, 351 aa, unidentified
MEEKLYVGVDLHKTQFTICIQSNGKVVADAEKYETNSNGYQAFISRLKALSSNISIAIESTGNSRYFKDLMEHSGFNVTVVNTLRFKVVNLSTKKTDKNDARTLAEFLSRDILPQSHLCSADSEALRRVLKSRSLMVQNAVALKNQAHAILLAYGTVTKAAQFQSKTGRRRILKTLPDDQAKIIEVLFDTLDSIEAQRKRLERRLRAITADDTHVGLLRTIPGVGIVNACTIRAYIDDIDRFQTYKHFSAYCGLVPWVQTSNETIHYGKITKRGPQELRTALVQCVVAMVRMESKTKDLGIIRQYHELKEQKSSGKAIIATARKLSRIIYVMLKEGKPFDSSKLNIGSNLV
